United States Patent Application Publication US 2018/0305689 A1 - sequence listing, part 96

SEQ ID NO: 1370218 - RNA, 19 nt, Artificial Sequence
  Description of Artificial Sequence: Synthetic oligonucleotide
  Sense strand starting at position 3352 of SEQ ID NO: 1242750
ugaggaacauugucuccau

SEQ ID NO: 1370219 - RNA, 19 nt, Artificial Sequence
  Description of Artificial Sequence: Synthetic oligonucleotide
  Antisense strand to SEQ ID NO: 1370218
auggagacaauguuccuca

SEQ ID NO: 1370220 - RNA, 19 nt, Artificial Sequence
  Description of Artificial Sequence: Synthetic oligonucleotide
  Sense strand starting at position 3353 of SEQ ID NO: 1242750
gaggaacauugucuccauu

SEQ ID NO: 1370221 - RNA, 19 nt, Artificial Sequence
  Description of Artificial Sequence: Synthetic oligonucleotide
  Antisense strand to SEQ ID NO: 1370220
aauggagacaauguuccuc

SEQ ID NO: 1370222 - RNA, 19 nt, Artificial Sequence
  Description of Artificial Sequence: Synthetic oligonucleotide
  Sense strand starting at position 3374 of SEQ ID NO: 1242750
uacacuuuccagggaggua

SEQ ID NO: 1370223 - RNA, 19 nt, Artificial Sequence
  Description of Artificial Sequence: Synthetic oligonucleotide
  Antisense strand to SEQ ID NO: 1370222
uaccucccuggaaagugua

SEQ ID NO: 1370224 - RNA, 19 nt, Artificial Sequence
  Description of Artificial Sequence: Synthetic oligonucleotide
  Sense strand starting at position 3391 of SEQ ID NO: 1242750
uacagaggauccucagagu

SEQ ID NO: 1370225 - RNA, 19 nt, Artificial Sequence
  Description of Artificial Sequence: Synthetic oligonucleotide
  Antisense strand to SEQ ID NO: 1370224
acucugaggauccucugua

SEQ ID NO: 1370226 - RNA, 19 nt, Artificial Sequence
  Description of Artificial Sequence: Synthetic oligonucleotide
  Sense strand starting at position 3601 of SEQ ID NO: 1242750
gugggacauuguguauaaa

SEQ ID NO: 1370227 - RNA, 19 nt, Artificial Sequence
  Description of Artificial Sequence: Synthetic oligonucleotide
  Antisense strand to SEQ ID NO: 1370226
uuuauacacaaugucccac

SEQ ID NO: 1370228 - RNA, 19 nt, Artificial Sequence
  Description of Artificial Sequence: Synthetic oligonucleotide
  Sense strand starting at position 3664 of SEQ ID NO: 1242750
ugagcaucgcuucugcgaa

SEQ ID NO: 1370229 - RNA, 19 nt, Artificial Sequence
  Description of Artificial Sequence: Synthetic oligonucleotide
  Antisense strand to SEQ ID NO: 1370228
uucgcagaagcgaugcuca

SEQ ID NO: 1370230 - RNA, 19 nt, Artificial Sequence
  Description of Artificial Sequence: Synthetic oligonucleotide
  Sense strand starting at position 3665 of SEQ ID NO: 1242750
gagcaucgcuucugcgaaa

SEQ ID NO: 1370231 - RNA, 19 nt, Artificial Sequence
  Description of Artificial Sequence: Synthetic oligonucleotide
  Antisense strand to SEQ ID NO: 1370230
uuucgcagaagcgaugcuc

SEQ ID NO: 1370232 - RNA, 19 nt, Artificial Sequence
  Description of Artificial Sequence: Synthetic oligonucleotide
  Sense strand starting at position 3669 of SEQ ID NO: 1242750
aucgcuucugcgaaagggu

SEQ ID NO: 1370233 - RNA, 19 nt, Artificial Sequence
  Description of Artificial Sequence: Synthetic oligonucleotide
  Antisense strand to SEQ ID NO: 1370232
acccuuucgcagaagcgau

SEQ ID NO: 1370234 - RNA, 19 nt, Artificial Sequence
  Description of Artificial Sequence: Synthetic oligonucleotide
  Sense strand starting at position 3670 of SEQ ID NO: 1242750
ucgcuucugcgaaaggguu

SEQ ID NO: 1370235 - RNA, 19 nt, Artificial Sequence
  Description of Artificial Sequence: Synthetic oligonucleotide
  Antisense strand to SEQ ID NO: 1370234
aacccuuucgcagaagcga

SEQ ID NO: 1370236 - RNA, 19 nt, Artificial Sequence
  Description of Artificial Sequence: Synthetic oligonucleotide
  Sense strand starting at position 3872 of SEQ ID NO: 1242750
ggugguuccugucuguagu

SEQ ID NO: 1370237 - RNA, 19 nt, Artificial Sequence
  Description of Artificial Sequence: Synthetic oligonucleotide
  Antisense strand to SEQ ID NO: 1370236
acuacagacaggaaccacc

SEQ ID NO: 1370238 - RNA, 19 nt, Artificial Sequence
  Description of Artificial Sequence: Synthetic oligonucleotide
  Sense strand starting at position 288 of SEQ ID NO: 1242751
cuccuuucccauuaguagu

SEQ ID NO: 1370239 - RNA, 19 nt, Artificial Sequence
  Description of Artificial Sequence: Synthetic oligonucleotide
  Antisense strand to SEQ ID NO: 1370238
acuacuaaugggaaaggag

SEQ ID NO: 1370240 - RNA, 19 nt, Artificial Sequence
  Description of Artificial Sequence: Synthetic oligonucleotide
  Sense strand starting at position 514 of SEQ ID NO: 1242751
cucuuuaaguaagcagaga

SEQ ID NO: 1370241 - RNA, 19 nt, Artificial Sequence
  Description of Artificial Sequence: Synthetic oligonucleotide
  Antisense strand to SEQ ID NO: 1370240
ucucugcuuacuuaaagag

SEQ ID NO: 1370242 - RNA, 19 nt, Artificial Sequence
  Description of Artificial Sequence: Synthetic oligonucleotide
  Sense strand starting at position 536 of SEQ ID NO: 1242751
guccuagaugcugggaaua

SEQ ID NO: 1370243 - RNA, 19 nt, Artificial Sequence
  Description of Artificial Sequence: Synthetic oligonucleotide
  Antisense strand to SEQ ID NO: 1370242
uauucccagcaucuaggac

SEQ ID NO: 1370244 - RNA, 19 nt, Artificial Sequence
  Description of Artificial Sequence: Synthetic oligonucleotide
  Sense strand starting at position 574 of SEQ ID NO: 1242751
cagucugugcccucgugaa

SEQ ID NO: 1370245 - RNA, 19 nt, Artificial Sequence
  Description of Artificial Sequence: Synthetic oligonucleotide
  Antisense strand to SEQ ID NO: 1370244
uucacgagggcacagacug

SEQ ID NO: 1370246 - RNA, 19 nt, Artificial Sequence
  Description of Artificial Sequence: Synthetic oligonucleotide
  Sense strand starting at position 576 of SEQ ID NO: 1242751
gucugugcccucgugaagu

SEQ ID NO: 1370247 - RNA, 19 nt, Artificial Sequence
  Description of Artificial Sequence: Synthetic oligonucleotide
  Antisense strand to SEQ ID NO: 1370246
acuucacgagggcacagac

SEQ ID NO: 1370248 - RNA, 19 nt, Artificial Sequence
  Description of Artificial Sequence: Synthetic oligonucleotide
  Sense strand starting at position 745 of SEQ ID NO: 1242751
ccucgcugagcugauaaua

SEQ ID NO: 1370249 - RNA, 19 nt, Artificial Sequence
  Description of Artificial Sequence: Synthetic oligonucleotide
  Antisense strand to SEQ ID NO: 1370248
uauuaucagcucagcgagg

SEQ ID NO: 1370250 - RNA, 19 nt, Artificial Sequence
  Description of Artificial Sequence: Synthetic oligonucleotide
  Sense strand starting at position 1011 of SEQ ID NO: 1242751
cccagagcuguagagucau

SEQ ID NO: 1370251 - RNA, 19 nt, Artificial Sequence
  Description of Artificial Sequence: Synthetic oligonucleotide
  Antisense strand to SEQ ID NO: 1370250
augacucuacagcucuggg

SEQ ID NO: 1370252 - RNA, 19 nt, Artificial Sequence
  Description of Artificial Sequence: Synthetic oligonucleotide
  Sense strand starting at position 1176 of SEQ ID NO: 1242751
cguguucugagcuuaacgu

SEQ ID NO: 1370253 - RNA, 19 nt, Artificial Sequence
  Description of Artificial Sequence: Synthetic oligonucleotide
  Antisense strand to SEQ ID NO: 1370252
acguuaagcucagaacacg

SEQ ID NO: 1370254 - RNA, 19 nt, Artificial Sequence
  Description of Artificial Sequence: Synthetic oligonucleotide
  Sense strand starting at position 1402 of SEQ ID NO: 1242751
gaacaaagucuguguccau

SEQ ID NO: 1370255 - RNA, 19 nt, Artificial Sequence
  Description of Artificial Sequence: Synthetic oligonucleotide
  Antisense strand to SEQ ID NO: 1370254
auggacacagacuuuguuc

SEQ ID NO: 1370256 - RNA, 19 nt, Artificial Sequence
  Description of Artificial Sequence: Synthetic oligonucleotide
  Sense strand starting at position 1468 of SEQ ID NO: 1242751
cugagaaauuaagcgacuu

SEQ ID NO: 1370257 - RNA, 19 nt, Artificial Sequence
  Description of Artificial Sequence: Synthetic oligonucleotide
  Antisense strand to SEQ ID NO: 1370256
aagucgcuuaauuucucag

SEQ ID NO: 1370258 - RNA, 19 nt, Artificial Sequence
  Description of Artificial Sequence: Synthetic oligonucleotide
  Sense strand starting at position 1469 of SEQ ID NO: 1242751
ugagaaauuaagcgacuug

SEQ ID NO: 1370259 - RNA, 19 nt, Artificial Sequence
  Description of Artificial Sequence: Synthetic oligonucleotide
  Antisense strand to SEQ ID NO: 1370258
caagucgcuuaauuucuca

SEQ ID NO: 1370260 - RNA, 19 nt, Artificial Sequence
  Description of Artificial Sequence: Synthetic oligonucleotide
  Sense strand starting at position 2168 of SEQ ID NO: 1242751
agagggaaucggcguagau

SEQ ID NO: 1370261 - RNA, 19 nt, Artificial Sequence
  Description of Artificial Sequence: Synthetic oligonucleotide
  Antisense strand to SEQ ID NO: 1370260
aucuacgccgauucccucu

SEQ ID NO: 1370262 - RNA, 19 nt, Artificial Sequence
  Description of Artificial Sequence: Synthetic oligonucleotide
  Sense strand starting at position 2181 of SEQ ID NO: 1242751
guagaugggucaaggaaag

SEQ ID NO: 1370263 - RNA, 19 nt, Artificial Sequence
  Description of Artificial Sequence: Synthetic oligonucleotide
  Antisense strand to SEQ ID NO: 1370262
cuuuccuugacccaucuac

SEQ ID NO: 1370264 - RNA, 19 nt, Artificial Sequence
  Description of Artificial Sequence: Synthetic oligonucleotide
  Sense strand starting at position 2195 of SEQ ID NO: 1242751
gaaagucaccacuguagua

SEQ ID NO: 1370265 - RNA, 19 nt, Artificial Sequence
  Description of Artificial Sequence: Synthetic oligonucleotide
  Antisense strand to SEQ ID NO: 1370264
uacuacaguggugacuuuc

SEQ ID NO: 1370266 - RNA, 19 nt, Artificial Sequence
  Description of Artificial Sequence: Synthetic oligonucleotide
  Sense strand starting at position 2243 of SEQ ID NO: 1242751
aauaguauuggauggugua

SEQ ID NO: 1370267 - RNA, 19 nt, Artificial Sequence
  Description of Artificial Sequence: Synthetic oligonucleotide
  Antisense strand to SEQ ID NO: 1370266
uacaccauccaauacuauu

SEQ ID NO: 1370268 - RNA, 19 nt, Artificial Sequence
  Description of Artificial Sequence: Synthetic oligonucleotide
  Sense strand starting at position 2255 of SEQ ID NO: 1242751
ugguguauacuaugcaaag

SEQ ID NO: 1370269 - RNA, 19 nt, Artificial Sequence
  Description of Artificial Sequence: Synthetic oligonucleotide
  Antisense strand to SEQ ID NO: 1370268
cuuugcauaguauacacca

SEQ ID NO: 1370270 - RNA, 19 nt, Artificial Sequence
  Description of Artificial Sequence: Synthetic oligonucleotide
  Sense strand starting at position 2383 of SEQ ID NO: 1242751
gagguugacuuacccaaga

SEQ ID NO: 1370271 - RNA, 19 nt, Artificial Sequence
  Description of Artificial Sequence: Synthetic oligonucleotide
  Antisense strand to SEQ ID NO: 1370270
ucuuggguaagucaaccuc

SEQ ID NO: 1370272 - RNA, 19 nt, Artificial Sequence
  Description of Artificial Sequence: Synthetic oligonucleotide
  Sense strand starting at position 2637 of SEQ ID NO: 1242751
uuuguacuuccagaggauu

SEQ ID NO: 1370273 - RNA, 19 nt, Artificial Sequence
  Description of Artificial Sequence: Synthetic oligonucleotide
  Antisense strand to SEQ ID NO: 1370272
aauccucuggaaguacaaa

SEQ ID NO: 1370274 - RNA, 19 nt, Artificial Sequence
  Description of Artificial Sequence: Synthetic oligonucleotide
  Sense strand starting at position 2648 of SEQ ID NO: 1242751
agaggauuccucuggucuu

SEQ ID NO: 1370275 - RNA, 19 nt, Artificial Sequence
  Description of Artificial Sequence: Synthetic oligonucleotide
  Antisense strand to SEQ ID NO: 1370274
aagaccagaggaauccucu

SEQ ID NO: 1370276 - RNA, 19 nt, Artificial Sequence
  Description of Artificial Sequence: Synthetic oligonucleotide
  Sense strand starting at position 2688 of SEQ ID NO: 1242751
cccaaaguaccacguuaaa

SEQ ID NO: 1370277 - RNA, 19 nt, Artificial Sequence
  Description of Artificial Sequence: Synthetic oligonucleotide
  Antisense strand to SEQ ID NO: 1370276
uuuaacgugguacuuuggg

SEQ ID NO: 1370278 - RNA, 19 nt, Artificial Sequence
  Description of Artificial Sequence: Synthetic oligonucleotide
  Sense strand starting at position 2731 of SEQ ID NO: 1242751
cugcaugagccagaauaua

SEQ ID NO: 1370279 - RNA, 19 nt, Artificial Sequence
  Description of Artificial Sequence: Synthetic oligonucleotide
  Antisense strand to SEQ ID NO: 1370278
uauauucuggcucaugcag

SEQ ID NO: 1370280 - RNA, 19 nt, Artificial Sequence
  Description of Artificial Sequence: Synthetic oligonucleotide
  Sense strand starting at position 2763 of SEQ ID NO: 1242751
cuggauuagaagugguaag

SEQ ID NO: 1370281 - RNA, 19 nt, Artificial Sequence
  Description of Artificial Sequence: Synthetic oligonucleotide
  Antisense strand to SEQ ID NO: 1370280
cuuaccacuucuaauccag

SEQ ID NO: 1370282 - RNA, 19 nt, Artificial Sequence
  Description of Artificial Sequence: Synthetic oligonucleotide
  Sense strand starting at position 2764 of SEQ ID NO: 1242751
uggauuagaagugguaagu

SEQ ID NO: 1370283 - RNA, 19 nt, Artificial Sequence
  Description of Artificial Sequence: Synthetic oligonucleotide
  Antisense strand to SEQ ID NO: 1370282
acuuaccacuucuaaucca

SEQ ID NO: 1370284 - RNA, 19 nt, Artificial Sequence
  Description of Artificial Sequence: Synthetic oligonucleotide
  Sense strand starting at position 2790 of SEQ ID NO: 1242751
gggcaagacuucucaaguu

SEQ ID NO: 1370285 - RNA, 19 nt, Artificial Sequence
  Description of Artificial Sequence: Synthetic oligonucleotide
  Antisense strand to SEQ ID NO: 1370284
aacuugagaagucuugccc

SEQ ID NO: 1370286 - RNA, 19 nt, Artificial Sequence
  Description of Artificial Sequence: Synthetic oligonucleotide
  Sense strand starting at position 2944 of SEQ ID NO: 1242751
cauagcagguguuuaacaa

SEQ ID NO: 1370287 - RNA, 19 nt, Artificial Sequence
  Description of Artificial Sequence: Synthetic oligonucleotide
  Antisense strand to SEQ ID NO: 1370286
uuguuaaacaccugcuaug

SEQ ID NO: 1370288 - RNA, 19 nt, Artificial Sequence
  Description of Artificial Sequence: Synthetic oligonucleotide
  Sense strand starting at position 2945 of SEQ ID NO: 1242751
auagcagguguuuaacaaa

SEQ ID NO: 1370289 - RNA, 19 nt, Artificial Sequence
  Description of Artificial Sequence: Synthetic oligonucleotide
  Antisense strand to SEQ ID NO: 1370288
uuuguuaaacaccugcuau

SEQ ID NO: 1370290 - RNA, 19 nt, Artificial Sequence
  Description of Artificial Sequence: Synthetic oligonucleotide
  Sense strand starting at position 2957 of SEQ ID NO: 1242751
uaacaaauauugguagagu

SEQ ID NO: 1370291 - RNA, 19 nt, Artificial Sequence
  Description of Artificial Sequence: Synthetic oligonucleotide
  Antisense strand to SEQ ID NO: 1370290
acucuaccaauauuuguua

SEQ ID NO: 1370292 - RNA, 19 nt, Artificial Sequence
  Description of Artificial Sequence: Synthetic oligonucleotide
  Sense strand starting at position 2965 of SEQ ID NO: 1242751
auugguagagugcaugaau

SEQ ID NO: 1370293 - RNA, 19 nt, Artificial Sequence
  Description of Artificial Sequence: Synthetic oligonucleotide
  Antisense strand to SEQ ID NO: 1370292
auucaugcacucuaccaau

SEQ ID NO: 1370294 - RNA, 19 nt, Artificial Sequence
  Description of Artificial Sequence: Synthetic oligonucleotide
  Sense strand starting at position 3022 of SEQ ID NO: 1242751
ggauaagaguggagaguua

SEQ ID NO: 1370295 - RNA, 19 nt, Artificial Sequence
  Description of Artificial Sequence: Synthetic oligonucleotide
  Antisense strand to SEQ ID NO: 1370294
uaacucuccacucuuaucc

SEQ ID NO: 1370296 - RNA, 19 nt, Artificial Sequence
  Description of Artificial Sequence: Synthetic oligonucleotide
  Sense strand starting at position 3031 of SEQ ID NO: 1242751
uggagaguuaaugguuugu

SEQ ID NO: 1370297 - RNA, 19 nt, Artificial Sequence
  Description of Artificial Sequence: Synthetic oligonucleotide
  Antisense strand to SEQ ID NO: 1370296
acaaaccauuaacucucca

SEQ ID NO: 1370298 - RNA, 19 nt, Artificial Sequence
  Description of Artificial Sequence: Synthetic oligonucleotide
  Sense strand starting at position 3075 of SEQ ID NO: 1242751
agacaaagucauggagcaa

SEQ ID NO: 1370299 - RNA, 19 nt, Artificial Sequence
  Description of Artificial Sequence: Synthetic oligonucleotide
  Antisense strand to SEQ ID NO: 1370298
uugcuccaugacuuugucu

SEQ ID NO: 1370300 - RNA, 19 nt, Artificial Sequence
  Description of Artificial Sequence: Synthetic oligonucleotide
  Sense strand starting at position 3203 of SEQ ID NO: 1242751
cuuguauaccuccgauuaa

SEQ ID NO: 1370301 - RNA, 19 nt, Artificial Sequence
  Description of Artificial Sequence: Synthetic oligonucleotide
  Antisense strand to SEQ ID NO: 1370300
uuaaucggagguauacaag

SEQ ID NO: 1370302 - RNA, 19 nt, Artificial Sequence
  Description of Artificial Sequence: Synthetic oligonucleotide
  Sense strand starting at position 3261 of SEQ ID NO: 1242751
uuuaaagguuucuugaacu

SEQ ID NO: 1370303 - RNA, 19 nt, Artificial Sequence
  Description of Artificial Sequence: Synthetic oligonucleotide
  Antisense strand to SEQ ID NO: 1370302
aguucaagaaaccuuuaaa

SEQ ID NO: 1370304 - RNA, 19 nt, Artificial Sequence
  Description of Artificial Sequence: Synthetic oligonucleotide
  Sense strand starting at position 3289 of SEQ ID NO: 1242751
ggcucuuugggcgagauca

SEQ ID NO: 1370305 - RNA, 19 nt, Artificial Sequence
  Description of Artificial Sequence: Synthetic oligonucleotide
  Antisense strand to SEQ ID NO: 1370304
ugaucucgcccaaagagcc

SEQ ID NO: 1370306 - RNA, 19 nt, Artificial Sequence
  Description of Artificial Sequence: Synthetic oligonucleotide
  Sense strand starting at position 3462 of SEQ ID NO: 1242751
gcauccuuaugguugaaga

SEQ ID NO: 1370307 - RNA, 19 nt, Artificial Sequence
  Description of Artificial Sequence: Synthetic oligonucleotide
  Antisense strand to SEQ ID NO: 1370306
ucuucaaccauaaggaugc

SEQ ID NO: 1370308 - RNA, 19 nt, Artificial Sequence
  Description of Artificial Sequence: Synthetic oligonucleotide
  Sense strand starting at position 3463 of SEQ ID NO: 1242751
cauccuuaugguugaagau

SEQ ID NO: 1370309 - RNA, 19 nt, Artificial Sequence
  Description of Artificial Sequence: Synthetic oligonucleotide
  Antisense strand to SEQ ID NO: 1370308
aucuucaaccauaaggaug

SEQ ID NO: 1370310 - RNA, 19 nt, Artificial Sequence
  Description of Artificial Sequence: Synthetic oligonucleotide
  Sense strand starting at position 3507 of SEQ ID NO: 1242751
ucagguguuccuuaacucu

SEQ ID NO: 1370311 - RNA, 19 nt, Artificial Sequence
  Description of Artificial Sequence: Synthetic oligonucleotide
  Antisense strand to SEQ ID NO: 1370310
agaguuaaggaacaccuga

SEQ ID NO: 1370312 - RNA, 19 nt, Artificial Sequence
  Description of Artificial Sequence: Synthetic oligonucleotide
  Sense strand starting at position 3513 of SEQ ID NO: 1242751
guuccuuaacucuaggaug

SEQ ID NO: 1370313 - RNA, 19 nt, Artificial Sequence
  Description of Artificial Sequence: Synthetic oligonucleotide
  Antisense strand to SEQ ID NO: 1370312
cauccuagaguuaaggaac

SEQ ID NO: 1370314 - RNA, 19 nt, Artificial Sequence
  Description of Artificial Sequence: Synthetic oligonucleotide
  Sense strand starting at position 3761 of SEQ ID NO: 1242751
uagcauuaugucuagguuu

SEQ ID NO: 1370315 - RNA, 19 nt, Artificial Sequence
  Description of Artificial Sequence: Synthetic oligonucleotide
  Antisense strand to SEQ ID NO: 1370314
aaaccuagacauaaugcua

SEQ ID NO: 1370316 - RNA, 19 nt, Artificial Sequence
  Description of Artificial Sequence: Synthetic oligonucleotide
  Sense strand starting at position 3764 of SEQ ID NO: 1242751
cauuaugucuagguuugaa

SEQ ID NO: 1370317 - RNA, 19 nt, Artificial Sequence
  Description of Artificial Sequence: Synthetic oligonucleotide
  Antisense strand to SEQ ID NO: 1370316
uucaaaccuagacauaaug

SEQ ID NO: 1370318 - RNA, 19 nt, Artificial Sequence
  Description of Artificial Sequence: Synthetic oligonucleotide
  Sense strand starting at position 291 of SEQ ID NO: 1242752
gcuccuggucucugugaca

SEQ ID NO: 1370319 - RNA, 19 nt, Artificial Sequence
  Description of Artificial Sequence: Synthetic oligonucleotide
  Antisense strand to SEQ ID NO: 1370318
ugucacagagaccaggagc

SEQ ID NO: 1370320 - RNA, 19 nt, Artificial Sequence
  Description of Artificial Sequence: Synthetic oligonucleotide
  Sense strand starting at position 294 of SEQ ID NO: 1242752
ccuggucucugugacaaca

SEQ ID NO: 1370321 - RNA, 19 nt, Artificial Sequence
  Description of Artificial Sequence: Synthetic oligonucleotide
  Antisense strand to SEQ ID NO: 1370320
uguugucacagagaccagg

SEQ ID NO: 1370322 - RNA, 19 nt, Artificial Sequence
  Description of Artificial Sequence: Synthetic oligonucleotide
  Sense strand starting at position 2455 of SEQ ID NO: 1242752
ggguuccaacucuguggaa

SEQ ID NO: 1370323 - RNA, 19 nt, Artificial Sequence
  Description of Artificial Sequence: Synthetic oligonucleotide
  Antisense strand to SEQ ID NO: 1370322
uuccacagaguuggaaccc

SEQ ID NO: 1370324 - RNA, 19 nt, Artificial Sequence
  Description of Artificial Sequence: Synthetic oligonucleotide
  Sense strand starting at position 2467 of SEQ ID NO: 1242752
uguggaagcucugcugaga

SEQ ID NO: 1370325 - RNA, 19 nt, Artificial Sequence
  Description of Artificial Sequence: Synthetic oligonucleotide
  Antisense strand to SEQ ID NO: 1370324
ucucagcagagcuuccaca

SEQ ID NO: 1370326 - RNA, 19 nt, Artificial Sequence
  Description of Artificial Sequence: Synthetic oligonucleotide
  Sense strand starting at position 2526 of SEQ ID NO: 1242752
uguggcuaucgucauggau

SEQ ID NO: 1370327 - RNA, 19 nt, Artificial Sequence
  Description of Artificial Sequence: Synthetic oligonucleotide
  Antisense strand to SEQ ID NO: 1370326
auccaugacgauagccaca

SEQ ID NO: 1370328 - RNA, 19 nt, Artificial Sequence
  Description of Artificial Sequence: Synthetic oligonucleotide
  Sense strand starting at position 3013 of SEQ ID NO: 1242752
ccaagccaccuguguuuau

SEQ ID NO: 1370329 - RNA, 19 nt, Artificial Sequence
  Description of Artificial Sequence: Synthetic oligonucleotide
  Antisense strand to SEQ ID NO: 1370328
auaaacacagguggcuugg

SEQ ID NO: 1370330 - RNA, 19 nt, Artificial Sequence
  Description of Artificial Sequence: Synthetic oligonucleotide
  Sense strand starting at position 572 of SEQ ID NO: 1242753
gcuccuggucucugugaca

SEQ ID NO: 1370331 - RNA, 19 nt, Artificial Sequence
  Description of Artificial Sequence: Synthetic oligonucleotide
  Antisense strand to SEQ ID NO: 1370330
ugucacagagaccaggagc

SEQ ID NO: 1370332 - RNA, 19 nt, Artificial Sequence
  Description of Artificial Sequence: Synthetic oligonucleotide
  Sense strand starting at position 575 of SEQ ID NO: 1242753
ccuggucucugugacaaca

SEQ ID NO: 1370333 - RNA, 19 nt, Artificial Sequence
  Description of Artificial Sequence: Synthetic oligonucleotide
  Antisense strand to SEQ ID NO: 1370332
uguugucacagagaccagg

SEQ ID NO: 1370334 - RNA, 19 nt, Artificial Sequence
  Description of Artificial Sequence: Synthetic oligonucleotide
  Sense strand starting at position 2736 of SEQ ID NO: 1242753
ggguuccaacucuguggaa

SEQ ID NO: 1370335 - RNA, 19 nt, Artificial Sequence
  Description of Artificial Sequence: Synthetic oligonucleotide
  Antisense strand to SEQ ID NO: 1370334
uuccacagaguuggaaccc

SEQ ID NO: 1370336 - RNA, 19 nt, Artificial Sequence
  Description of Artificial Sequence: Synthetic oligonucleotide
  Sense strand starting at position 2748 of SEQ ID NO: 1242753
uguggaagcucugcugaga

SEQ ID NO: 1370337 - RNA, 19 nt, Artificial Sequence
  Description of Artificial Sequence: Synthetic oligonucleotide
  Antisense strand to SEQ ID NO: 1370336
ucucagcagagcuuccaca

SEQ ID NO: 1370338 - RNA, 19 nt, Artificial Sequence
  Description of Artificial Sequence: Synthetic oligonucleotide
  Sense strand starting at position 2807 of SEQ ID NO: 1242753
uguggcuaucgucauggau

SEQ ID NO: 1370339 - RNA, 19 nt, Artificial Sequence
  Description of Artificial Sequence: Synthetic oligonucleotide
  Antisense strand to SEQ ID NO: 1370338
auccaugacgauagccaca

SEQ ID NO: 1370340 - RNA, 19 nt, Artificial Sequence
  Description of Artificial Sequence: Synthetic oligonucleotide
  Sense strand starting at position 3294 of SEQ ID NO: 1242753
ccaagccaccuguguuuau

SEQ ID NO: 1370341 - RNA, 19 nt, Artificial Sequence
  Description of Artificial Sequence: Synthetic oligonucleotide
  Antisense strand to SEQ ID NO: 1370340
auaaacacagguggcuugg

SEQ ID NO: 1370342 - RNA, 19 nt, Artificial Sequence
  Description of Artificial Sequence: Synthetic oligonucleotide
  Sense strand starting at position 488 of SEQ ID NO: 1242754
gcuccuggucucugugaca

SEQ ID NO: 1370343 - RNA, 19 nt, Artificial Sequence
  Description of Artificial Sequence: Synthetic oligonucleotide
  Antisense strand to SEQ ID NO: 1370342
ugucacagagaccaggagc

SEQ ID NO: 1370344 - RNA, 19 nt, Artificial Sequence
  Description of Artificial Sequence: Synthetic oligonucleotide
  Sense strand starting at position 491 of SEQ ID NO: 1242754
ccuggucucugugacaaca

SEQ ID NO: 1370345 - RNA, 19 nt, Artificial Sequence
  Description of Artificial Sequence: Synthetic oligonucleotide
  Antisense strand to SEQ ID NO: 1370344
uguugucacagagaccagg

SEQ ID NO: 1370346 - RNA, 19 nt, Artificial Sequence
  Description of Artificial Sequence: Synthetic oligonucleotide
  Sense strand starting at position 2652 of SEQ ID NO: 1242754
ggguuccaacucuguggaa

SEQ ID NO: 1370347 - RNA, 19 nt, Artificial Sequence
  Description of Artificial Sequence: Synthetic oligonucleotide
  Antisense strand to SEQ ID NO: 1370346
uuccacagaguuggaaccc

SEQ ID NO: 1370348 - RNA, 19 nt, Artificial Sequence
  Description of Artificial Sequence: Synthetic oligonucleotide
  Sense strand starting at position 2664 of SEQ ID NO: 1242754
uguggaagcucugcugaga

SEQ ID NO: 1370349 - RNA, 19 nt, Artificial Sequence
  Description of Artificial Sequence: Synthetic oligonucleotide
  Antisense strand to SEQ ID NO: 1370348
ucucagcagagcuuccaca

SEQ ID NO: 1370350 - RNA, 19 nt, Artificial Sequence
  Description of Artificial Sequence: Synthetic oligonucleotide
  Sense strand starting at position 2723 of SEQ ID NO: 1242754
uguggcuaucgucauggau

SEQ ID NO: 1370351 - RNA, 19 nt, Artificial Sequence
  Description of Artificial Sequence: Synthetic oligonucleotide
  Antisense strand to SEQ ID NO: 1370350
auccaugacgauagccaca

SEQ ID NO: 1370352 - RNA, 19 nt, Artificial Sequence
  Description of Artificial Sequence: Synthetic oligonucleotide
  Sense strand starting at position 3210 of SEQ ID NO: 1242754
ccaagccaccuguguuuau

SEQ ID NO: 1370353 - RNA, 19 nt, Artificial Sequence
  Description of Artificial Sequence: Synthetic oligonucleotide
  Antisense strand to SEQ ID NO: 1370352
auaaacacagguggcuugg

SEQ ID NO: 1370354 - RNA, 19 nt, Artificial Sequence
  Description of Artificial Sequence: Synthetic oligonucleotide
  Sense strand starting at position 19 of SEQ ID NO: 1242755
uuugcaccuuuauggaaau

SEQ ID NO: 1370355 - RNA, 19 nt, Artificial Sequence
  Description of Artificial Sequence: Synthetic oligonucleotide
  Antisense strand to SEQ ID NO: 1370354
auuuccauaaaggugcaaa

SEQ ID NO: 1370356 - RNA, 19 nt, Artificial Sequence
  Description of Artificial Sequence: Synthetic oligonucleotide
  Sense strand starting at position 576 of SEQ ID NO: 1242755
guccuaguggcucagauaa

SEQ ID NO: 1370357 - RNA, 19 nt, Artificial Sequence
  Description of Artificial Sequence: Synthetic oligonucleotide
  Antisense strand to SEQ ID NO: 1370356
uuaucugagccacuaggac

SEQ ID NO: 1370358 - RNA, 19 nt, Artificial Sequence
  Description of Artificial Sequence: Synthetic oligonucleotide
  Sense strand starting at position 1545 of SEQ ID NO: 1242755
gggcuuccucauuaaacca

SEQ ID NO: 1370359 - RNA, 19 nt, Artificial Sequence
  Description of Artificial Sequence: Synthetic oligonucleotide
  Antisense strand to SEQ ID NO: 1370358
ugguuuaaugaggaagccc

SEQ ID NO: 1370360 - RNA, 19 nt, Artificial Sequence
  Description of Artificial Sequence: Synthetic oligonucleotide
  Sense strand starting at position 1853 of SEQ ID NO: 1242755
gcuuguuucucaggcugga

SEQ ID NO: 1370361 - RNA, 19 nt, Artificial Sequence
  Description of Artificial Sequence: Synthetic oligonucleotide
  Antisense strand to SEQ ID NO: 1370360
uccagccugagaaacaagc

SEQ ID NO: 1370362 - RNA, 19 nt, Artificial Sequence
  Description of Artificial Sequence: Synthetic oligonucleotide
  Sense strand starting at position 1881 of SEQ ID NO: 1242755
ucacaaucuccaggaguca

SEQ ID NO: 1370363 - RNA, 19 nt, Artificial Sequence
  Description of Artificial Sequence: Synthetic oligonucleotide
  Antisense strand to SEQ ID NO: 1370362
ugacuccuggagauuguga

SEQ ID NO: 1370364 - RNA, 19 nt, Artificial Sequence
  Description of Artificial Sequence: Synthetic oligonucleotide
  Sense strand starting at position 1945 of SEQ ID NO: 1242755
gaggcuggugagugaguaa

SEQ ID NO: 1370365 - RNA, 19 nt, Artificial Sequence
  Description of Artificial Sequence: Synthetic oligonucleotide
  Antisense strand to SEQ ID NO: 1370364
uuacucacucaccagccuc

SEQ ID NO: 1370366 - RNA, 19 nt, Artificial Sequence
  Description of Artificial Sequence: Synthetic oligonucleotide
  Sense strand starting at position 1948 of SEQ ID NO: 1242755
gcuggugagugaguaauca

SEQ ID NO: 1370367 - RNA, 19 nt, Artificial Sequence
  Description of Artificial Sequence: Synthetic oligonucleotide
  Antisense strand to SEQ ID NO: 1370366
ugauuacucacucaccagc

SEQ ID NO: 1370368 - RNA, 19 nt, Artificial Sequence
  Description of Artificial Sequence: Synthetic oligonucleotide
  Sense strand starting at position 1952 of SEQ ID NO: 1242755
gugagugaguaaucagugu

SEQ ID NO: 1370369 - RNA, 19 nt, Artificial Sequence
  Description of Artificial Sequence: Synthetic oligonucleotide
  Antisense strand to SEQ ID NO: 1370368
acacugauuacucacucac

SEQ ID NO: 1370370 - RNA, 19 nt, Artificial Sequence
  Description of Artificial Sequence: Synthetic oligonucleotide
  Sense strand starting at position 1958 of SEQ ID NO: 1242755
gaguaaucaguguguccag

SEQ ID NO: 1370371 - RNA, 19 nt, Artificial Sequence
  Description of Artificial Sequence: Synthetic oligonucleotide
  Antisense strand to SEQ ID NO: 1370370
cuggacacacugauuacuc

SEQ ID NO: 1370372 - RNA, 19 nt, Artificial Sequence
  Description of Artificial Sequence: Synthetic oligonucleotide
  Sense strand starting at position 1959 of SEQ ID NO: 1242755
aguaaucaguguguccaga

SEQ ID NO: 1370373 - RNA, 19 nt, Artificial Sequence
  Description of Artificial Sequence: Synthetic oligonucleotide
  Antisense strand to SEQ ID NO: 1370372
ucuggacacacugauuacu

SEQ ID NO: 1370374 - RNA, 19 nt, Artificial Sequence
  Description of Artificial Sequence: Synthetic oligonucleotide
  Sense strand starting at position 1961 of SEQ ID NO: 1242755
uaaucaguguguccagaca

SEQ ID NO: 1370375 - RNA, 19 nt, Artificial Sequence
  Description of Artificial Sequence: Synthetic oligonucleotide
  Antisense strand to SEQ ID NO: 1370374
ugucuggacacacugauua

SEQ ID NO: 1370376 - RNA, 19 nt, Artificial Sequence
  Description of Artificial Sequence: Synthetic oligonucleotide
  Sense strand starting at position 2099 of SEQ ID NO: 1242755
ccugcuaaucauuguggga

SEQ ID NO: 1370377 - RNA, 19 nt, Artificial Sequence
  Description of Artificial Sequence: Synthetic oligonucleotide
  Antisense strand to SEQ ID NO: 1370376
ucccacaaugauuagcagg

SEQ ID NO: 1370378 - RNA, 19 nt, Artificial Sequence
  Description of Artificial Sequence: Synthetic oligonucleotide
  Sense strand starting at position 2101 of SEQ ID NO: 1242755
ugcuaaucauugugggauu

SEQ ID NO: 1370379 - RNA, 19 nt, Artificial Sequence
  Description of Artificial Sequence: Synthetic oligonucleotide
  Antisense strand to SEQ ID NO: 1370378
aaucccacaaugauuagca

SEQ ID NO: 1370380 - RNA, 19 nt, Artificial Sequence
  Description of Artificial Sequence: Synthetic oligonucleotide
  Sense strand starting at position 2102 of SEQ ID NO: 1242755
gcuaaucauugugggauua

SEQ ID NO: 1370381 - RNA, 19 nt, Artificial Sequence
  Description of Artificial Sequence: Synthetic oligonucleotide
  Antisense strand to SEQ ID NO: 1370380
uaaucccacaaugauuagc

SEQ ID NO: 1370382 - RNA, 19 nt, Artificial Sequence
  Description of Artificial Sequence: Synthetic oligonucleotide
  Sense strand starting at position 2103 of SEQ ID NO: 1242755
cuaaucauugugggauuau

SEQ ID NO: 1370383 - RNA, 19 nt, Artificial Sequence
  Description of Artificial Sequence: Synthetic oligonucleotide
  Antisense strand to SEQ ID NO: 1370382
auaaucccacaaugauuag

SEQ ID NO: 1370384 - RNA, 19 nt, Artificial Sequence
  Description of Artificial Sequence: Synthetic oligonucleotide
  Sense strand starting at position 2104 of SEQ ID NO: 1242755
uaaucauugugggauuauu

SEQ ID NO: 1370385 - RNA, 19 nt, Artificial Sequence
  Description of Artificial Sequence: Synthetic oligonucleotide
  Antisense strand to SEQ ID NO: 1370384
aauaaucccacaaugauua

SEQ ID NO: 1370386 - RNA, 19 nt, Artificial Sequence
  Description of Artificial Sequence: Synthetic oligonucleotide
  Sense strand starting at position 2325 of SEQ ID NO: 1242755
ggaguucuuuccuuucuug

SEQ ID NO: 1370387 - RNA, 19 nt, Artificial Sequence
  Description of Artificial Sequence: Synthetic oligonucleotide
  Antisense strand to SEQ ID NO: 1370386
caagaaaggaaagaacucc

SEQ ID NO: 1370388 - RNA, 19 nt, Artificial Sequence
  Description of Artificial Sequence: Synthetic oligonucleotide
  Sense strand starting at position 2410 of SEQ ID NO: 1242755
gugcaaucugugggcucaa

SEQ ID NO: 1370389 - RNA, 19 nt, Artificial Sequence
  Description of Artificial Sequence: Synthetic oligonucleotide
  Antisense strand to SEQ ID NO: 1370388
uugagcccacagauugcac

SEQ ID NO: 1370390 - RNA, 19 nt, Artificial Sequence
  Description of Artificial Sequence: Synthetic oligonucleotide
  Sense strand starting at position 2411 of SEQ ID NO: 1242755
ugcaaucugugggcucaaa

SEQ ID NO: 1370391 - RNA, 19 nt, Artificial Sequence
  Description of Artificial Sequence: Synthetic oligonucleotide
  Antisense strand to SEQ ID NO: 1370390
uuugagcccacagauugca

SEQ ID NO: 1370392 - RNA, 19 nt, Artificial Sequence
  Description of Artificial Sequence: Synthetic oligonucleotide
  Sense strand starting at position 2758 of SEQ ID NO: 1242755
gggccaaguuucucagaaa

SEQ ID NO: 1370393 - RNA, 19 nt, Artificial Sequence
  Description of Artificial Sequence: Synthetic oligonucleotide
  Antisense strand to SEQ ID NO: 1370392
uuucugagaaacuuggccc

SEQ ID NO: 1370394 - RNA, 19 nt, Artificial Sequence
  Description of Artificial Sequence: Synthetic oligonucleotide
  Sense strand starting at position 2949 of SEQ ID NO: 1242755
cguggaagcucugcugaga

SEQ ID NO: 1370395 - RNA, 19 nt, Artificial Sequence
  Description of Artificial Sequence: Synthetic oligonucleotide
  Antisense strand to SEQ ID NO: 1370394
ucucagcagagcuuccacg

SEQ ID NO: 1370396 - RNA, 19 nt, Artificial Sequence
  Description of Artificial Sequence: Synthetic oligonucleotide
  Sense strand starting at position 3108 of SEQ ID NO: 1242755
aggaguuucuucucccuca

SEQ ID NO: 1370397 - RNA, 19 nt, Artificial Sequence
  Description of Artificial Sequence: Synthetic oligonucleotide
  Antisense strand to SEQ ID NO: 1370396
ugagggagaagaaacuccu

SEQ ID NO: 1370398 - RNA, 19 nt, Artificial Sequence
  Description of Artificial Sequence: Synthetic oligonucleotide
  Sense strand starting at position 3109 of SEQ ID NO: 1242755
ggaguuucuucucccucaa

SEQ ID NO: 1370399 - RNA, 19 nt, Artificial Sequence
  Description of Artificial Sequence: Synthetic oligonucleotide
  Antisense strand to SEQ ID NO: 1370398
uugagggagaagaaacucc

SEQ ID NO: 1370400 - RNA, 19 nt, Artificial Sequence
  Description of Artificial Sequence: Synthetic oligonucleotide
  Sense strand starting at position 3156 of SEQ ID NO: 1242755
gcguguggguccuagcaau

SEQ ID NO: 1370401 - RNA, 19 nt, Artificial Sequence
  Description of Artificial Sequence: Synthetic oligonucleotide
  Antisense strand to SEQ ID NO: 1370400
auugcuaggacccacacgc

SEQ ID NO: 1370402 - RNA, 19 nt, Artificial Sequence
  Description of Artificial Sequence: Synthetic oligonucleotide
  Sense strand starting at position 3162 of SEQ ID NO: 1242755
ggguccuagcaaugcuuaa

SEQ ID NO: 1370403 - RNA, 19 nt, Artificial Sequence
  Description of Artificial Sequence: Synthetic oligonucleotide
  Antisense strand to SEQ ID NO: 1370402
uuaagcauugcuaggaccc

SEQ ID NO: 1370404 - RNA, 19 nt, Artificial Sequence
  Description of Artificial Sequence: Synthetic oligonucleotide
  Sense strand starting at position 3245 of SEQ ID NO: 1242755
guuggaguguuauaaucuc

SEQ ID NO: 1370405 - RNA, 19 nt, Artificial Sequence
  Description of Artificial Sequence: Synthetic oligonucleotide
  Antisense strand to SEQ ID NO: 1370404
gagauuauaacacuccaac

SEQ ID NO: 1370406 - RNA, 19 nt, Artificial Sequence
  Description of Artificial Sequence: Synthetic oligonucleotide
  Sense strand starting at position 3495 of SEQ ID NO: 1242755
ccgagccaccuguguuuau

SEQ ID NO: 1370407 - RNA, 19 nt, Artificial Sequence
  Description of Artificial Sequence: Synthetic oligonucleotide
  Antisense strand to SEQ ID NO: 1370406
auaaacacagguggcucgg

SEQ ID NO: 1370408 - RNA, 19 nt, Artificial Sequence
  Description of Artificial Sequence: Synthetic oligonucleotide
  Sense strand starting at position 3527 of SEQ ID NO: 1242755
ccuguuugcaugugugagu

SEQ ID NO: 1370409 - RNA, 19 nt, Artificial Sequence
  Description of Artificial Sequence: Synthetic oligonucleotide
  Antisense strand to SEQ ID NO: 1370408
acucacacaugcaaacagg

SEQ ID NO: 1370410 - RNA, 19 nt, Artificial Sequence
  Description of Artificial Sequence: Synthetic oligonucleotide
  Sense strand starting at position 3528 of SEQ ID NO: 1242755
cuguuugcaugugugaguu

SEQ ID NO: 1370411 - RNA, 19 nt, Artificial Sequence
  Description of Artificial Sequence: Synthetic oligonucleotide
  Antisense strand to SEQ ID NO: 1370410
aacucacacaugcaaacag

SEQ ID NO: 1370412 - RNA, 19 nt, Artificial Sequence
  Description of Artificial Sequence: Synthetic oligonucleotide
  Sense strand starting at position 3530 of SEQ ID NO: 1242755
guuugcaugugugaguuca

SEQ ID NO: 1370413 - RNA, 19 nt, Artificial Sequence
  Description of Artificial Sequence: Synthetic oligonucleotide
  Antisense strand to SEQ ID NO: 1370412
ugaacucacacaugcaaac

SEQ ID NO: 1370414 - RNA, 19 nt, Artificial Sequence
  Description of Artificial Sequence: Synthetic oligonucleotide
  Sense strand starting at position 3532 of SEQ ID NO: 1242755
uugcaugugugaguucaag

SEQ ID NO: 1370415 - RNA, 19 nt, Artificial Sequence
  Description of Artificial Sequence: Synthetic oligonucleotide
  Antisense strand to SEQ ID NO: 1370414
cuugaacucacacaugcaa

SEQ ID NO: 1370416 - RNA, 19 nt, Artificial Sequence
  Description of Artificial Sequence: Synthetic oligonucleotide
  Sense strand starting at position 3546 of SEQ ID NO: 1242755
ucaaguuauugccacaaga

SEQ ID NO: 1370417 - RNA, 19 nt, Artificial Sequence
  Description of Artificial Sequence: Synthetic oligonucleotide
  Antisense strand to SEQ ID NO: 1370416
ucuuguggcaauaacuuga

SEQ ID NO: 1370418 - RNA, 19 nt, Artificial Sequence
  Description of Artificial Sequence: Synthetic oligonucleotide
  Sense strand starting at position 3582 of SEQ ID NO: 1242755
augggaugcccgucgugua

SEQ ID NO: 1370419 - RNA, 19 nt, Artificial Sequence
  Description of Artificial Sequence: Synthetic oligonucleotide
  Antisense strand to SEQ ID NO: 1370418
uacacgacgggcaucccau

SEQ ID NO: 1370420 - RNA, 19 nt, Artificial Sequence
  Description of Artificial Sequence: Synthetic oligonucleotide
  Sense strand starting at position 3592 of SEQ ID NO: 1242755
cgucguguagaugaggaaa

SEQ ID NO: 1370421 - RNA, 19 nt, Artificial Sequence
  Description of Artificial Sequence: Synthetic oligonucleotide
  Antisense strand to SEQ ID NO: 1370420
uuuccucaucuacacgacg

SEQ ID NO: 1370422 - RNA, 19 nt, Artificial Sequence
  Description of Artificial Sequence: Synthetic oligonucleotide
  Sense strand starting at position 3610 of SEQ ID NO: 1242755
acgggcuuagugugucuaa

SEQ ID NO: 1370423 - RNA, 19 nt, Artificial Sequence
  Description of Artificial Sequence: Synthetic oligonucleotide
  Antisense strand to SEQ ID NO: 1370422
uuagacacacuaagcccgu

SEQ ID NO: 1370424 - RNA, 19 nt, Artificial Sequence
  Description of Artificial Sequence: Synthetic oligonucleotide
  Sense strand starting at position 3723 of SEQ ID NO: 1242755
gaucuuucccagugcaguu

SEQ ID NO: 1370425 - RNA, 19 nt, Artificial Sequence
  Description of Artificial Sequence: Synthetic oligonucleotide
  Antisense strand to SEQ ID NO: 1370424
aacugcacugggaaagauc

SEQ ID NO: 1370426 - RNA, 19 nt, Artificial Sequence
  Description of Artificial Sequence: Synthetic oligonucleotide
  Sense strand starting at position 3750 of SEQ ID NO: 1242755
ucugcuaugccgggugaua

SEQ ID NO: 1370427 - RNA, 19 nt, Artificial Sequence
  Description of Artificial Sequence: Synthetic oligonucleotide
  Antisense strand to SEQ ID NO: 1370426
uaucacccggcauagcaga

SEQ ID NO: 1370428 - RNA, 19 nt, Artificial Sequence
  Description of Artificial Sequence: Synthetic oligonucleotide
  Sense strand starting at position 3752 of SEQ ID NO: 1242755
ugcuaugccgggugauaaa

SEQ ID NO: 1370429 - RNA, 19 nt, Artificial Sequence
  Description of Artificial Sequence: Synthetic oligonucleotide
  Antisense strand to SEQ ID NO: 1370428
uuuaucacccggcauagca

SEQ ID NO: 1370430 - RNA, 19 nt, Artificial Sequence
  Description of Artificial Sequence: Synthetic oligonucleotide
  Sense strand starting at position 3811 of SEQ ID NO: 1242755
ccaguugacccauauagua

SEQ ID NO: 1370431 - RNA, 19 nt, Artificial Sequence
  Description of Artificial Sequence: Synthetic oligonucleotide
  Antisense strand to SEQ ID NO: 1370430
uacuauaugggucaacugg

SEQ ID NO: 1370432 - RNA, 19 nt, Artificial Sequence
  Description of Artificial Sequence: Synthetic oligonucleotide
  Sense strand starting at position 3914 of SEQ ID NO: 1242755
ggcucacugcaagaagagu

SEQ ID NO: 1370433 - RNA, 19 nt, Artificial Sequence
  Description of Artificial Sequence: Synthetic oligonucleotide
  Antisense strand to SEQ ID NO: 1370432
acucuucuugcagugagcc

SEQ ID NO: 1370434 - RNA, 19 nt, Artificial Sequence
  Description of Artificial Sequence: Synthetic oligonucleotide
  Sense strand starting at position 2213 of SEQ ID NO: 1242756
gguccuucuggugagcaga

SEQ ID NO: 1370435 - RNA, 19 nt, Artificial Sequence
  Description of Artificial Sequence: Synthetic oligonucleotide
  Antisense strand to SEQ ID NO: 1370434
ucugcucaccagaaggacc

SEQ ID NO: 1370436 - RNA, 19 nt, Artificial Sequence
  Description of Artificial Sequence: Synthetic oligonucleotide
  Sense strand starting at position 2215 of SEQ ID NO: 1242756
uccuucuggugagcagaaa

SEQ ID NO: 1370437 - RNA, 19 nt, Artificial Sequence
  Description of Artificial Sequence: Synthetic oligonucleotide
  Antisense strand to SEQ ID NO: 1370436
uuucugcucaccagaagga

SEQ ID NO: 1370438 - RNA, 19 nt, Artificial Sequence
  Description of Artificial Sequence: Synthetic oligonucleotide
  Sense strand starting at position 2875 of SEQ ID NO: 1242756
cguggaagcucugcugaga

SEQ ID NO: 1370439 - RNA, 19 nt, Artificial Sequence
  Description of Artificial Sequence: Synthetic oligonucleotide
  Antisense strand to SEQ ID NO: 1370438
ucucagcagagcuuccacg

SEQ ID NO: 1370440 - RNA, 19 nt, Artificial Sequence
  Description of Artificial Sequence: Synthetic oligonucleotide
  Sense strand starting at position 3421 of SEQ ID NO: 1242756
ccgagccaccuguguuuau

SEQ ID NO: 1370441 - RNA, 19 nt, Artificial Sequence
  Description of Artificial Sequence: Synthetic oligonucleotide
  Antisense strand to SEQ ID NO: 1370440
auaaacacagguggcucgg

SEQ ID NO: 1370442 - RNA, 19 nt, Artificial Sequence
  Description of Artificial Sequence: Synthetic oligonucleotide
  Sense strand starting at position 3716 of SEQ ID NO: 1242756
gggcuuccauggcaaacau

SEQ ID NO: 1370443 - RNA, 19 nt, Artificial Sequence
  Description of Artificial Sequence: Synthetic oligonucleotide
  Antisense strand to SEQ ID NO: 1370442
auguuugccauggaagccc

SEQ ID NO: 1370444 - RNA, 19 nt, Artificial Sequence
  Description of Artificial Sequence: Synthetic oligonucleotide
  Sense strand starting at position 170 of SEQ ID NO: 1242757
aggcaagaucuugggauau

SEQ ID NO: 1370445 - RNA, 19 nt, Artificial Sequence
  Description of Artificial Sequence: Synthetic oligonucleotide
  Antisense strand to SEQ ID NO: 1370444
auaucccaagaucuugccu

SEQ ID NO: 1370446 - RNA, 19 nt, Artificial Sequence
  Description of Artificial Sequence: Synthetic oligonucleotide
  Sense strand starting at position 227 of SEQ ID NO: 1242757
uuccuacuugcuuauugua

SEQ ID NO: 1370447 - RNA, 19 nt, Artificial Sequence
  Description of Artificial Sequence: Synthetic oligonucleotide
  Antisense strand to SEQ ID NO: 1370446
uacaauaagcaaguaggaa

SEQ ID NO: 1370448 - RNA, 19 nt, Artificial Sequence
  Description of Artificial Sequence: Synthetic oligonucleotide
  Sense strand starting at position 237 of SEQ ID NO: 1242757
cuuauuguauuggugagga

SEQ ID NO: 1370449 - RNA, 19 nt, Artificial Sequence
  Description of Artificial Sequence: Synthetic oligonucleotide
  Antisense strand to SEQ ID NO: 1370448
uccucaccaauacaauaag

SEQ ID NO: 1370450 - RNA, 19 nt, Artificial Sequence
  Description of Artificial Sequence: Synthetic oligonucleotide
  Sense strand starting at position 394 of SEQ ID NO: 1242757
ugauuagauuuagauggga

SEQ ID NO: 1370451 - RNA, 19 nt, Artificial Sequence
  Description of Artificial Sequence: Synthetic oligonucleotide
  Antisense strand to SEQ ID NO: 1370450
ucccaucuaaaucuaauca

SEQ ID NO: 1370452 - RNA, 19 nt, Artificial Sequence
  Description of Artificial Sequence: Synthetic oligonucleotide
  Sense strand starting at position 399 of SEQ ID NO: 1242757
agauuuagaugggauccca

SEQ ID NO: 1370453 - RNA, 19 nt, Artificial Sequence
  Description of Artificial Sequence: Synthetic oligonucleotide
  Antisense strand to SEQ ID NO: 1370452
ugggaucccaucuaaaucu

SEQ ID NO: 1370454 - RNA, 19 nt, Artificial Sequence
  Description of Artificial Sequence: Synthetic oligonucleotide
  Sense strand starting at position 409 of SEQ ID NO: 1242757
gggaucccauccuuaugau

SEQ ID NO: 1370455 - RNA, 19 nt, Artificial Sequence
  Description of Artificial Sequence: Synthetic oligonucleotide
  Antisense strand to SEQ ID NO: 1370454
aucauaaggaugggauccc

SEQ ID NO: 1370456 - RNA, 19 nt, Artificial Sequence
  Description of Artificial Sequence: Synthetic oligonucleotide
  Sense strand starting at position 416 of SEQ ID NO: 1242757
cauccuuaugaugggauua

SEQ ID NO: 1370457 - RNA, 19 nt, Artificial Sequence
  Description of Artificial Sequence: Synthetic oligonucleotide
  Antisense strand to SEQ ID NO: 1370456
uaaucccaucauaaggaug

SEQ ID NO: 1370458 - RNA, 19 nt, Artificial Sequence
  Description of Artificial Sequence: Synthetic oligonucleotide
  Sense strand starting at position 525 of SEQ ID NO: 1242757
gaguccucaccaggaauaa

SEQ ID NO: 1370459 - RNA, 19 nt, Artificial Sequence
  Description of Artificial Sequence: Synthetic oligonucleotide
  Antisense strand to SEQ ID NO: 1370458
uuauuccuggugaggacuc

SEQ ID NO: 1370460 - RNA, 19 nt, Artificial Sequence
  Description of Artificial Sequence: Synthetic oligonucleotide
  Sense strand starting at position 843 of SEQ ID NO: 1242757
gcaugcuuacacuaagaaa

SEQ ID NO: 1370461 - RNA, 19 nt, Artificial Sequence
  Description of Artificial Sequence: Synthetic oligonucleotide
  Antisense strand to SEQ ID NO: 1370460
uuucuuaguguaagcaugc

SEQ ID NO: 1370462 - RNA, 19 nt, Artificial Sequence
  Description of Artificial Sequence: Synthetic oligonucleotide
  Sense strand starting at position 907 of SEQ ID NO: 1242757
ucaacccucuguuuaaagu

SEQ ID NO: 1370463 - RNA, 19 nt, Artificial Sequence
  Description of Artificial Sequence: Synthetic oligonucleotide
  Antisense strand to SEQ ID NO: 1370462
acuuuaaacagaggguuga

SEQ ID NO: 1370464 - RNA, 19 nt, Artificial Sequence
  Description of Artificial Sequence: Synthetic oligonucleotide
  Sense strand starting at position 916 of SEQ ID NO: 1242757
uguuuaaagucacucuaac

SEQ ID NO: 1370465 - RNA, 19 nt, Artificial Sequence
  Description of Artificial Sequence: Synthetic oligonucleotide
  Antisense strand to SEQ ID NO: 1370464
guuagagugacuuuaaaca

SEQ ID NO: 1370466 - RNA, 19 nt, Artificial Sequence
  Description of Artificial Sequence: Synthetic oligonucleotide
  Sense strand starting at position 1028 of SEQ ID NO: 1242757
cugccacugcuaugauaaa

SEQ ID NO: 1370467 - RNA, 19 nt, Artificial Sequence
  Description of Artificial Sequence: Synthetic oligonucleotide
  Antisense strand to SEQ ID NO: 1370466
uuuaucauagcaguggcag

SEQ ID NO: 1370468 - RNA, 19 nt, Artificial Sequence
  Description of Artificial Sequence: Synthetic oligonucleotide
  Sense strand starting at position 1197 of SEQ ID NO: 1242757
ggaagaaguugagcucauu

SEQ ID NO: 1370469 - RNA, 19 nt, Artificial Sequence
  Description of Artificial Sequence: Synthetic oligonucleotide
  Antisense strand to SEQ ID NO: 1370468
aaugagcucaacuucuucc

SEQ ID NO: 1370470 - RNA, 19 nt, Artificial Sequence
  Description of Artificial Sequence: Synthetic oligonucleotide
  Sense strand starting at position 1393 of SEQ ID NO: 1242757
ucugaaagcucccugggaa

SEQ ID NO: 1370471 - RNA, 19 nt, Artificial Sequence
  Description of Artificial Sequence: Synthetic oligonucleotide
  Antisense strand to SEQ ID NO: 1370470
uucccagggagcuuucaga

SEQ ID NO: 1370472 - RNA, 19 nt, Artificial Sequence
  Description of Artificial Sequence: Synthetic oligonucleotide
  Sense strand starting at position 1394 of SEQ ID NO: 1242757
cugaaagcucccugggaag

SEQ ID NO: 1370473 - RNA, 19 nt, Artificial Sequence
  Description of Artificial Sequence: Synthetic oligonucleotide
  Antisense strand to SEQ ID NO: 1370472
cuucccagggagcuuucag

SEQ ID NO: 1370474 - RNA, 19 nt, Artificial Sequence
  Description of Artificial Sequence: Synthetic oligonucleotide
  Sense strand starting at position 1671 of SEQ ID NO: 1242757
ugugucugggccuagaaga

SEQ ID NO: 1370475 - RNA, 19 nt, Artificial Sequence
  Description of Artificial Sequence: Synthetic oligonucleotide
  Antisense strand to SEQ ID NO: 1370474
ucuucuaggcccagacaca

SEQ ID NO: 1370476 - RNA, 19 nt, Artificial Sequence
  Description of Artificial Sequence: Synthetic oligonucleotide
  Sense strand starting at position 1768 of SEQ ID NO: 1242757
ccaggccucaccgauagaa

SEQ ID NO: 1370477 - RNA, 19 nt, Artificial Sequence
  Description of Artificial Sequence: Synthetic oligonucleotide
  Antisense strand to SEQ ID NO: 1370476
uucuaucggugaggccugg

SEQ ID NO: 1370478 - RNA, 19 nt, Artificial Sequence
  Description of Artificial Sequence: Synthetic oligonucleotide
  Sense strand starting at position 1770 of SEQ ID NO: 1242757
aggccucaccgauagaaua

SEQ ID NO: 1370479 - RNA, 19 nt, Artificial Sequence
  Description of Artificial Sequence: Synthetic oligonucleotide
  Antisense strand to SEQ ID NO: 1370478
uauucuaucggugaggccu

SEQ ID NO: 1370480 - RNA, 19 nt, Artificial Sequence
  Description of Artificial Sequence: Synthetic oligonucleotide
  Sense strand starting at position 1836 of SEQ ID NO: 1242757
ugcacuuaccuggacugau

SEQ ID NO: 1370481 - RNA, 19 nt, Artificial Sequence
  Description of Artificial Sequence: Synthetic oligonucleotide
  Antisense strand to SEQ ID NO: 1370480
aucaguccagguaagugca

SEQ ID NO: 1370482 - RNA, 19 nt, Artificial Sequence
  Description of Artificial Sequence: Synthetic oligonucleotide
  Sense strand starting at position 1990 of SEQ ID NO: 1242757
ggagcuuggguccaggauu

SEQ ID NO: 1370483 - RNA, 19 nt, Artificial Sequence
  Description of Artificial Sequence: Synthetic oligonucleotide
  Antisense strand to SEQ ID NO: 1370482
aauccuggacccaagcucc

SEQ ID NO: 1370484 - RNA, 19 nt, Artificial Sequence
  Description of Artificial Sequence: Synthetic oligonucleotide
  Sense strand starting at position 2357 of SEQ ID NO: 1242757
ccucccucagaguagauau

SEQ ID NO: 1370485 - RNA, 19 nt, Artificial Sequence
  Description of Artificial Sequence: Synthetic oligonucleotide
  Antisense strand to SEQ ID NO: 1370484
auaucuacucugagggagg

SEQ ID NO: 1370486 - RNA, 19 nt, Artificial Sequence
  Description of Artificial Sequence: Synthetic oligonucleotide
  Sense strand starting at position 2369 of SEQ ID NO: 1242757
uagauauguacuggaaggu

SEQ ID NO: 1370487 - RNA, 19 nt, Artificial Sequence
  Description of Artificial Sequence: Synthetic oligonucleotide
  Antisense strand to SEQ ID NO: 1370486
accuuccaguacauaucua

SEQ ID NO: 1370488 - RNA, 19 nt, Artificial Sequence
  Description of Artificial Sequence: Synthetic oligonucleotide
  Sense strand starting at position 2438 of SEQ ID NO: 1242757
gucauuuguuuggucugca

SEQ ID NO: 1370489 - RNA, 19 nt, Artificial Sequence
  Description of Artificial Sequence: Synthetic oligonucleotide
  Antisense strand to SEQ ID NO: 1370488
ugcagaccaaacaaaugac

SEQ ID NO: 1370490 - RNA, 19 nt, Artificial Sequence
  Description of Artificial Sequence: Synthetic oligonucleotide
  Sense strand starting at position 2441 of SEQ ID NO: 1242757
auuuguuuggucugcagag

SEQ ID NO: 1370491 - RNA, 19 nt, Artificial Sequence
  Description of Artificial Sequence: Synthetic oligonucleotide
  Antisense strand to SEQ ID NO: 1370490
cucugcagaccaaacaaau

SEQ ID NO: 1370492 - RNA, 19 nt, Artificial Sequence
  Description of Artificial Sequence: Synthetic oligonucleotide
  Sense strand starting at position 2496 of SEQ ID NO: 1242757
aagagaugcuagguauaag

SEQ ID NO: 1370493 - RNA, 19 nt, Artificial Sequence
  Description of Artificial Sequence: Synthetic oligonucleotide
  Antisense strand to SEQ ID NO: 1370492
cuuauaccuagcaucucuu

SEQ ID NO: 1370494 - RNA, 19 nt, Artificial Sequence
  Description of Artificial Sequence: Synthetic oligonucleotide
  Sense strand starting at position 2497 of SEQ ID NO: 1242757
agagaugcuagguauaagu

SEQ ID NO: 1370495 - RNA, 19 nt, Artificial Sequence
  Description of Artificial Sequence: Synthetic oligonucleotide
  Antisense strand to SEQ ID NO: 1370494
acuuauaccuagcaucucu

SEQ ID NO: 1370496 - RNA, 19 nt, Artificial Sequence
  Description of Artificial Sequence: Synthetic oligonucleotide
  Sense strand starting at position 2516 of SEQ ID NO: 1242757
ccggauuucugccuucuau

SEQ ID NO: 1370497 - RNA, 19 nt, Artificial Sequence
  Description of Artificial Sequence: Synthetic oligonucleotide
  Antisense strand to SEQ ID NO: 1370496
auagaaggcagaaauccgg

SEQ ID NO: 1370498 - RNA, 19 nt, Artificial Sequence
  Description of Artificial Sequence: Synthetic oligonucleotide
  Sense strand starting at position 2587 of SEQ ID NO: 1242757
auugcauggagcugagaaa

SEQ ID NO: 1370499 - RNA, 19 nt, Artificial Sequence
  Description of Artificial Sequence: Synthetic oligonucleotide
  Antisense strand to SEQ ID NO: 1370498
uuucucagcuccaugcaau

SEQ ID NO: 1370500 - RNA, 19 nt, Artificial Sequence
  Description of Artificial Sequence: Synthetic oligonucleotide
  Sense strand starting at position 2663 of SEQ ID NO: 1242757
gggucugauccugacagca

SEQ ID NO: 1370501 - RNA, 19 nt, Artificial Sequence
  Description of Artificial Sequence: Synthetic oligonucleotide
  Antisense strand to SEQ ID NO: 1370500
ugcugucaggaucagaccc

SEQ ID NO: 1370502 - RNA, 19 nt, Artificial Sequence
  Description of Artificial Sequence: Synthetic oligonucleotide
  Sense strand starting at position 2802 of SEQ ID NO: 1242757
cagaguguugcacagaaua

SEQ ID NO: 1370503 - RNA, 19 nt, Artificial Sequence
  Description of Artificial Sequence: Synthetic oligonucleotide
  Antisense strand to SEQ ID NO: 1370502
uauucugugcaacacucug

SEQ ID NO: 1370504 - RNA, 19 nt, Artificial Sequence
  Description of Artificial Sequence: Synthetic oligonucleotide
  Sense strand starting at position 2841 of SEQ ID NO: 1242757
aagugucaucacuagugca

SEQ ID NO: 1370505 - RNA, 19 nt, Artificial Sequence
  Description of Artificial Sequence: Synthetic oligonucleotide
  Antisense strand to SEQ ID NO: 1370504
ugcacuagugaugacacuu

SEQ ID NO: 1370506 - RNA, 19 nt, Artificial Sequence
  Description of Artificial Sequence: Synthetic oligonucleotide
  Sense strand starting at position 3331 of SEQ ID NO: 1242757
gcugcugugcuugugagaa

SEQ ID NO: 1370507 - RNA, 19 nt, Artificial Sequence
  Description of Artificial Sequence: Synthetic oligonucleotide
  Antisense strand to SEQ ID NO: 1370506
uucucacaagcacagcagc

SEQ ID NO: 1370508 - RNA, 19 nt, Artificial Sequence
  Description of Artificial Sequence: Synthetic oligonucleotide
  Sense strand starting at position 3507 of SEQ ID NO: 1242757
gugcauaucccagagcaug

SEQ ID NO: 1370509 - RNA, 19 nt, Artificial Sequence
  Description of Artificial Sequence: Synthetic oligonucleotide
  Antisense strand to SEQ ID NO: 1370508
caugcucugggauaugcac

SEQ ID NO: 1370510 - RNA, 19 nt, Artificial Sequence
  Description of Artificial Sequence: Synthetic oligonucleotide
  Sense strand starting at position 3561 of SEQ ID NO: 1242757
acauguuuauaagugaugu

SEQ ID NO: 1370511 - RNA, 19 nt, Artificial Sequence
  Description of Artificial Sequence: Synthetic oligonucleotide
  Antisense strand to SEQ ID NO: 1370510
acaucacuuauaaacaugu

SEQ ID NO: 1370512 - RNA, 19 nt, Artificial Sequence
  Description of Artificial Sequence: Synthetic oligonucleotide
  Sense strand starting at position 3580 of SEQ ID NO: 1242757
gcagguacgacucacugua

SEQ ID NO: 1370513 - RNA, 19 nt, Artificial Sequence
  Description of Artificial Sequence: Synthetic oligonucleotide
  Antisense strand to SEQ ID NO: 1370512
uacagugagucguaccugc

SEQ ID NO: 1370514 - RNA, 19 nt, Artificial Sequence
  Description of Artificial Sequence: Synthetic oligonucleotide
  Sense strand starting at position 3676 of SEQ ID NO: 1242757
gaagaaaguuuggauauuu

SEQ ID NO: 1370515 - RNA, 19 nt, Artificial Sequence
  Description of Artificial Sequence: Synthetic oligonucleotide
  Antisense strand to SEQ ID NO: 1370514
aaauauccaaacuuucuuc

SEQ ID NO: 1370516 - RNA, 19 nt, Artificial Sequence
  Description of Artificial Sequence: Synthetic oligonucleotide
  Sense strand starting at position 3915 of SEQ ID NO: 1242757
cuugcugagucaucauaug

SEQ ID NO: 1370517 - RNA, 19 nt, Artificial Sequence
  Description of Artificial Sequence: Synthetic oligonucleotide
  Antisense strand to SEQ ID NO: 1370516
cauaugaugacucagcaag

SEQ ID NO: 1370518 - RNA, 19 nt, Artificial Sequence
  Description of Artificial Sequence: Synthetic oligonucleotide
  Sense strand starting at position 3920 of SEQ ID NO: 1242757
ugagucaucauauggugga

SEQ ID NO: 1370519 - RNA, 19 nt, Artificial Sequence
  Description of Artificial Sequence: Synthetic oligonucleotide
  Antisense strand to SEQ ID NO: 1370518
uccaccauaugaugacuca

SEQ ID NO: 1370520 - RNA, 19 nt, Artificial Sequence
  Description of Artificial Sequence: Synthetic oligonucleotide
  Sense strand starting at position 3924 of SEQ ID NO: 1242757
ucaucauaugguggauagu

SEQ ID NO: 1370521 - RNA, 19 nt, Artificial Sequence
  Description of Artificial Sequence: Synthetic oligonucleotide
  Antisense strand to SEQ ID NO: 1370520
acuauccaccauaugauga

SEQ ID NO: 1370522 - RNA, 19 nt, Artificial Sequence
  Description of Artificial Sequence: Synthetic oligonucleotide
  Sense strand starting at position 3956 of SEQ ID NO: 1242757
agagaugagucacagagag

SEQ ID NO: 1370523 - RNA, 19 nt, Artificial Sequence
  Description of Artificial Sequence: Synthetic oligonucleotide
  Antisense strand to SEQ ID NO: 1370522
cucucugugacucaucucu

SEQ ID NO: 1370524 - RNA, 19 nt, Artificial Sequence
  Description of Artificial Sequence: Synthetic oligonucleotide
  Sense strand starting at position 648 of SEQ ID NO: 1242758
gaagaugugaaguguaaca

SEQ ID NO: 1370525 - RNA, 19 nt, Artificial Sequence
  Description of Artificial Sequence: Synthetic oligonucleotide
  Antisense strand to SEQ ID NO: 1370524
uguuacacuucacaucuuc

SEQ ID NO: 1370526 - RNA, 19 nt, Artificial Sequence
  Description of Artificial Sequence: Synthetic oligonucleotide
  Sense strand starting at position 685 of SEQ ID NO: 1242758
guguauuaugacuagggcu

SEQ ID NO: 1370527 - RNA, 19 nt, Artificial Sequence
  Description of Artificial Sequence: Synthetic oligonucleotide
  Antisense strand to SEQ ID NO: 1370526
agcccuagucauaauacac

SEQ ID NO: 1370528 - RNA, 19 nt, Artificial Sequence
  Description of Artificial Sequence: Synthetic oligonucleotide
  Sense strand starting at position 710 of SEQ ID NO: 1242758
ggcaaauagcaauaaguau

SEQ ID NO: 1370529 - RNA, 19 nt, Artificial Sequence
  Description of Artificial Sequence: Synthetic oligonucleotide
  Antisense strand to SEQ ID NO: 1370528
auacuuauugcuauuugcc

SEQ ID NO: 1370530 - RNA, 19 nt, Artificial Sequence
  Description of Artificial Sequence: Synthetic oligonucleotide
  Sense strand starting at position 772 of SEQ ID NO: 1242758
uucuaugugccggacaaca

SEQ ID NO: 1370531 - RNA, 19 nt, Artificial Sequence
  Description of Artificial Sequence: Synthetic oligonucleotide
  Antisense strand to SEQ ID NO: 1370530
uguuguccggcacauagaa

SEQ ID NO: 1370532 - RNA, 19 nt, Artificial Sequence
  Description of Artificial Sequence: Synthetic oligonucleotide
  Sense strand starting at position 878 of SEQ ID NO: 1242758
uauuuaggcuuagagaagu

SEQ ID NO: 1370533 - RNA, 19 nt, Artificial Sequence
  Description of Artificial Sequence: Synthetic oligonucleotide
  Antisense strand to SEQ ID NO: 1370532
acuucucuaagccuaaaua

SEQ ID NO: 1370534 - RNA, 19 nt, Artificial Sequence
  Description of Artificial Sequence: Synthetic oligonucleotide
  Sense strand starting at position 891 of SEQ ID NO: 1242758
agaaguuguuacuuguaac

SEQ ID NO: 1370535 - RNA, 19 nt, Artificial Sequence
  Description of Artificial Sequence: Synthetic oligonucleotide
  Antisense strand to SEQ ID NO: 1370534
guuacaaguaacaacuucu

SEQ ID NO: 1370536 - RNA, 19 nt, Artificial Sequence
  Description of Artificial Sequence: Synthetic oligonucleotide
  Sense strand starting at position 1369 of SEQ ID NO: 1242758
ggaacuagaugguauuuaa

SEQ ID NO: 1370537 - RNA, 19 nt, Artificial Sequence
  Description of Artificial Sequence: Synthetic oligonucleotide
  Antisense strand to SEQ ID NO: 1370536
uuaaauaccaucuaguucc

SEQ ID NO: 1370538 - RNA, 19 nt, Artificial Sequence
  Description of Artificial Sequence: Synthetic oligonucleotide
  Sense strand starting at position 1610 of SEQ ID NO: 1242758
aggagaaucgugcgaaccu

SEQ ID NO: 1370539 - RNA, 19 nt, Artificial Sequence
  Description of Artificial Sequence: Synthetic oligonucleotide
  Antisense strand to SEQ ID NO: 1370538
agguucgcacgauucuccu

SEQ ID NO: 1370540 - RNA, 19 nt, Artificial Sequence
  Description of Artificial Sequence: Synthetic oligonucleotide
  Sense strand starting at position 1776 of SEQ ID NO: 1242758
auaacugagccuugguaau

SEQ ID NO: 1370541 - RNA, 19 nt, Artificial Sequence
  Description of Artificial Sequence: Synthetic oligonucleotide
  Antisense strand to SEQ ID NO: 1370540
auuaccaaggcucaguuau

SEQ ID NO: 1370542 - RNA, 19 nt, Artificial Sequence
  Description of Artificial Sequence: Synthetic oligonucleotide
  Sense strand starting at position 1778 of SEQ ID NO: 1242758
aacugagccuugguaauau

SEQ ID NO: 1370543 - RNA, 19 nt, Artificial Sequence
  Description of Artificial Sequence: Synthetic oligonucleotide
  Antisense strand to SEQ ID NO: 1370542
auauuaccaaggcucaguu

SEQ ID NO: 1370544 - RNA, 19 nt, Artificial Sequence
  Description of Artificial Sequence: Synthetic oligonucleotide
  Sense strand starting at position 1889 of SEQ ID NO: 1242758
aggucucaucucugacauu

SEQ ID NO: 1370545 - RNA, 19 nt, Artificial Sequence
  Description of Artificial Sequence: Synthetic oligonucleotide
  Antisense strand to SEQ ID NO: 1370544
aaugucagagaugagaccu

SEQ ID NO: 1370546 - RNA, 19 nt, Artificial Sequence
  Description of Artificial Sequence: Synthetic oligonucleotide
  Sense strand starting at position 1916 of SEQ ID NO: 1242758
uguguaucucuugaacaaa

SEQ ID NO: 1370547 - RNA, 19 nt, Artificial Sequence
  Description of Artificial Sequence: Synthetic oligonucleotide
  Antisense strand to SEQ ID NO: 1370546
uuuguucaagagauacaca

SEQ ID NO: 1370548 - RNA, 19 nt, Artificial Sequence
  Description of Artificial Sequence: Synthetic oligonucleotide
  Sense strand starting at position 1990 of SEQ ID NO: 1242758
gcuuaaguugcuggaggau

SEQ ID NO: 1370549 - RNA, 19 nt, Artificial Sequence
  Description of Artificial Sequence: Synthetic oligonucleotide
  Antisense strand to SEQ ID NO: 1370548
auccuccagcaacuuaagc

SEQ ID NO: 1370550 - RNA, 19 nt, Artificial Sequence
  Description of Artificial Sequence: Synthetic oligonucleotide
  Sense strand starting at position 1993 of SEQ ID NO: 1242758
uaaguugcuggaggauuaa

SEQ ID NO: 1370551 - RNA, 19 nt, Artificial Sequence
  Description of Artificial Sequence: Synthetic oligonucleotide
  Antisense strand to SEQ ID NO: 1370550
uuaauccuccagcaacuua

SEQ ID NO: 1370552 - RNA, 19 nt, Artificial Sequence
  Description of Artificial Sequence: Synthetic oligonucleotide
  Sense strand starting at position 2139 of SEQ ID NO: 1242758
gggaguaugucacccuugu

SEQ ID NO: 1370553 - RNA, 19 nt, Artificial Sequence
  Description of Artificial Sequence: Synthetic oligonucleotide
  Antisense strand to SEQ ID NO: 1370552
acaagggugacauacuccc

SEQ ID NO: 1370554 - RNA, 19 nt, Artificial Sequence
  Description of Artificial Sequence: Synthetic oligonucleotide
  Sense strand starting at position 2152 of SEQ ID NO: 1242758
ccuuguuacuaggcaacau

SEQ ID NO: 1370555 - RNA, 19 nt, Artificial Sequence
  Description of Artificial Sequence: Synthetic oligonucleotide
  Antisense strand to SEQ ID NO: 1370554
auguugccuaguaacaagg

SEQ ID NO: 1370556 - RNA, 19 nt, Artificial Sequence
  Description of Artificial Sequence: Synthetic oligonucleotide
  Sense strand starting at position 2211 of SEQ ID NO: 1242758
uggucugggaguuauaaau

SEQ ID NO: 1370557 - RNA, 19 nt, Artificial Sequence
  Description of Artificial Sequence: Synthetic oligonucleotide
  Antisense strand to SEQ ID NO: 1370556
auuuauaacucccagacca

SEQ ID NO: 1370558 - RNA, 19 nt, Artificial Sequence
  Description of Artificial Sequence: Synthetic oligonucleotide
  Sense strand starting at position 2234 of SEQ ID NO: 1242758
gauggaaagccguaacuuc

SEQ ID NO: 1370559 - RNA, 19 nt, Artificial Sequence
  Description of Artificial Sequence: Synthetic oligonucleotide
  Antisense strand to SEQ ID NO: 1370558
gaaguuacggcuuuccauc

SEQ ID NO: 1370560 - RNA, 19 nt, Artificial Sequence
  Description of Artificial Sequence: Synthetic oligonucleotide
  Sense strand starting at position 2251 of SEQ ID NO: 1242758
ucagucuucccugaaggca

SEQ ID NO: 1370561 - RNA, 19 nt, Artificial Sequence
  Description of Artificial Sequence: Synthetic oligonucleotide
  Antisense strand to SEQ ID NO: 1370560
ugccuucagggaagacuga

SEQ ID NO: 1370562 - RNA, 19 nt, Artificial Sequence
  Description of Artificial Sequence: Synthetic oligonucleotide
  Sense strand starting at position 2510 of SEQ ID NO: 1242758
auguccuuccagcaucuua

SEQ ID NO: 1370563 - RNA, 19 nt, Artificial Sequence
  Description of Artificial Sequence: Synthetic oligonucleotide
  Antisense strand to SEQ ID NO: 1370562
uaagaugcuggaaggacau

SEQ ID NO: 1370564 - RNA, 19 nt, Artificial Sequence
  Description of Artificial Sequence: Synthetic oligonucleotide
  Sense strand starting at position 2533 of SEQ ID NO: 1242758
ggguguggcccgagagagu

SEQ ID NO: 1370565 - RNA, 19 nt, Artificial Sequence
  Description of Artificial Sequence: Synthetic oligonucleotide
  Antisense strand to SEQ ID NO: 1370564
acucucucgggccacaccc

SEQ ID NO: 1370566 - RNA, 19 nt, Artificial Sequence
  Description of Artificial Sequence: Synthetic oligonucleotide
  Sense strand starting at position 2548 of SEQ ID NO: 1242758
gaguccugguggccugaua

SEQ ID NO: 1370567 - RNA, 19 nt, Artificial Sequence
  Description of Artificial Sequence: Synthetic oligonucleotide
  Antisense strand to SEQ ID NO: 1370566
uaucaggccaccaggacuc

SEQ ID NO: 1370568 - RNA, 19 nt, Artificial Sequence
  Description of Artificial Sequence: Synthetic oligonucleotide
  Sense strand starting at position 2649 of SEQ ID NO: 1242758
auaaguauggacugacuuu

SEQ ID NO: 1370569 - RNA, 19 nt, Artificial Sequence
  Description of Artificial Sequence: Synthetic oligonucleotide
  Antisense strand to SEQ ID NO: 1370568
aaagucaguccauacuuau

SEQ ID NO: 1370570 - RNA, 19 nt, Artificial Sequence
  Description of Artificial Sequence: Synthetic oligonucleotide
  Sense strand starting at position 2725 of SEQ ID NO: 1242758
ugggauuguaaaugaagcu

SEQ ID NO: 1370571 - RNA, 19 nt, Artificial Sequence
  Description of Artificial Sequence: Synthetic oligonucleotide
  Antisense strand to SEQ ID NO: 1370570
agcuucauuuacaauccca

SEQ ID NO: 1370572 - RNA, 19 nt, Artificial Sequence
  Description of Artificial Sequence: Synthetic oligonucleotide
  Sense strand starting at position 2798 of SEQ ID NO: 1242758
uugauuugucaauguuucu

SEQ ID NO: 1370573 - RNA, 19 nt, Artificial Sequence
  Description of Artificial Sequence: Synthetic oligonucleotide
  Antisense strand to SEQ ID NO: 1370572
agaaacauugacaaaucaa

SEQ ID NO: 1370574 - RNA, 19 nt, Artificial Sequence
  Description of Artificial Sequence: Synthetic oligonucleotide
  Sense strand starting at position 2855 of SEQ ID NO: 1242758
uccugucuccuuugggaca

SEQ ID NO: 1370575 - RNA, 19 nt, Artificial Sequence
  Description of Artificial Sequence: Synthetic oligonucleotide
  Antisense strand to SEQ ID NO: 1370574
ugucccaaaggagacagga

SEQ ID NO: 1370576 - RNA, 19 nt, Artificial Sequence
  Description of Artificial Sequence: Synthetic oligonucleotide
  Sense strand starting at position 2879 of SEQ ID NO: 1242758
cugagaaggucugcaccuu

SEQ ID NO: 1370577 - RNA, 19 nt, Artificial Sequence
  Description of Artificial Sequence: Synthetic oligonucleotide
  Antisense strand to SEQ ID NO: 1370576
aaggugcagaccuucucag

SEQ ID NO: 1370578 - RNA, 19 nt, Artificial Sequence
  Description of Artificial Sequence: Synthetic oligonucleotide
  Sense strand starting at position 2880 of SEQ ID NO: 1242758
ugagaaggucugcaccuua

SEQ ID NO: 1370579 - RNA, 19 nt, Artificial Sequence
  Description of Artificial Sequence: Synthetic oligonucleotide
  Antisense strand to SEQ ID NO: 1370578
uaaggugcagaccuucuca

SEQ ID NO: 1370580 - RNA, 19 nt, Artificial Sequence
  Description of Artificial Sequence: Synthetic oligonucleotide
  Sense strand starting at position 3283 of SEQ ID NO: 1242758
guugaaugccuguaauucc

SEQ ID NO: 1370581 - RNA, 19 nt, Artificial Sequence
  Description of Artificial Sequence: Synthetic oligonucleotide
  Antisense strand to SEQ ID NO: 1370580
ggaauuacaggcauucaac

SEQ ID NO: 1370582 - RNA, 19 nt, Artificial Sequence
  Description of Artificial Sequence: Synthetic oligonucleotide
  Sense strand starting at position 3534 of SEQ ID NO: 1242758
gaagguccuucugugagau

SEQ ID NO: 1370583 - RNA, 19 nt, Artificial Sequence
  Description of Artificial Sequence: Synthetic oligonucleotide
  Antisense strand to SEQ ID NO: 1370582
aucucacagaaggaccuuc

SEQ ID NO: 1370584 - RNA, 19 nt, Artificial Sequence
  Description of Artificial Sequence: Synthetic oligonucleotide
  Sense strand starting at position 3535 of SEQ ID NO: 1242758
aagguccuucugugagaug

SEQ ID NO: 1370585 - RNA, 19 nt, Artificial Sequence
  Description of Artificial Sequence: Synthetic oligonucleotide
  Antisense strand to SEQ ID NO: 1370584
caucucacagaaggaccuu

SEQ ID NO: 1370586 - RNA, 19 nt, Artificial Sequence
  Description of Artificial Sequence: Synthetic oligonucleotide
  Sense strand starting at position 3614 of SEQ ID NO: 1242758
aucugagaaugagcucaau

SEQ ID NO: 1370587 - RNA, 19 nt, Artificial Sequence
  Description of Artificial Sequence: Synthetic oligonucleotide
  Antisense strand to SEQ ID NO: 1370586
auugagcucauucucagau

SEQ ID NO: 1370588 - RNA, 19 nt, Artificial Sequence
  Description of Artificial Sequence: Synthetic oligonucleotide
  Sense strand starting at position 3643 of SEQ ID NO: 1242758
cuguguguuccuucugcua

SEQ ID NO: 1370589 - RNA, 19 nt, Artificial Sequence
  Description of Artificial Sequence: Synthetic oligonucleotide
  Antisense strand to SEQ ID NO: 1370588
uagcagaaggaacacacag

SEQ ID NO: 1370590 - RNA, 19 nt, Artificial Sequence
  Description of Artificial Sequence: Synthetic oligonucleotide
  Sense strand starting at position 3724 of SEQ ID NO: 1242758
gaaggcuuuccugguuaua

SEQ ID NO: 1370591 - RNA, 19 nt, Artificial Sequence
  Description of Artificial Sequence: Synthetic oligonucleotide
  Antisense strand to SEQ ID NO: 1370590
uauaaccaggaaagccuuc

SEQ ID NO: 1370592 - RNA, 19 nt, Artificial Sequence
  Description of Artificial Sequence: Synthetic oligonucleotide
  Sense strand starting at position 3727 of SEQ ID NO: 1242758
ggcuuuccugguuauacua

SEQ ID NO: 1370593 - RNA, 19 nt, Artificial Sequence
  Description of Artificial Sequence: Synthetic oligonucleotide
  Antisense strand to SEQ ID NO: 1370592
uaguauaaccaggaaagcc

SEQ ID NO: 1370594 - RNA, 19 nt, Artificial Sequence
  Description of Artificial Sequence: Synthetic oligonucleotide
  Sense strand starting at position 3762 of SEQ ID NO: 1242758
cugcuaaucugucuuugaa

SEQ ID NO: 1370595 - RNA, 19 nt, Artificial Sequence
  Description of Artificial Sequence: Synthetic oligonucleotide
  Antisense strand to SEQ ID NO: 1370594
uucaaagacagauuagcag

SEQ ID NO: 1370596 - RNA, 19 nt, Artificial Sequence
  Description of Artificial Sequence: Synthetic oligonucleotide
  Sense strand starting at position 3764 of SEQ ID NO: 1242758
gcuaaucugucuuugaaac

SEQ ID NO: 1370597 - RNA, 19 nt, Artificial Sequence
  Description of Artificial Sequence: Synthetic oligonucleotide
  Antisense strand to SEQ ID NO: 1370596
guuucaaagacagauuagc

SEQ ID NO: 1370598 - RNA, 19 nt, Artificial Sequence
  Description of Artificial Sequence: Synthetic oligonucleotide
  Sense strand starting at position 3888 of SEQ ID NO: 1242758
cuuauuauucuugguucuu

SEQ ID NO: 1370599 - RNA, 19 nt, Artificial Sequence
  Description of Artificial Sequence: Synthetic oligonucleotide
  Antisense strand to SEQ ID NO: 1370598
aagaaccaagaauaauaag

SEQ ID NO: 1370600 - RNA, 19 nt, Artificial Sequence
  Description of Artificial Sequence: Synthetic oligonucleotide
  Sense strand starting at position 3917 of SEQ ID NO: 1242758
acaugauacuugguacaua

SEQ ID NO: 1370601 - RNA, 19 nt, Artificial Sequence
  Description of Artificial Sequence: Synthetic oligonucleotide
  Antisense strand to SEQ ID NO: 1370600
uauguaccaaguaucaugu

SEQ ID NO: 1370602 - RNA, 19 nt, Artificial Sequence
  Description of Artificial Sequence: Synthetic oligonucleotide
  Sense strand starting at position 3944 of SEQ ID NO: 1242758
ucauaauauugucuaguga

SEQ ID NO: 1370603 - RNA, 19 nt, Artificial Sequence
  Description of Artificial Sequence: Synthetic oligonucleotide
  Antisense strand to SEQ ID NO: 1370602
ucacuagacaauauuauga

SEQ ID NO: 1370604 - RNA, 19 nt, Artificial Sequence
  Description of Artificial Sequence: Synthetic oligonucleotide
  Sense strand starting at position 2 of SEQ ID NO: 1242759
agagguguguaccuaguca

SEQ ID NO: 1370605 - RNA, 19 nt, Artificial Sequence
  Description of Artificial Sequence: Synthetic oligonucleotide
  Antisense strand to SEQ ID NO: 1370604
ugacuagguacacaccucu

SEQ ID NO: 1370606 - RNA, 19 nt, Artificial Sequence
  Description of Artificial Sequence: Synthetic oligonucleotide
  Sense strand starting at position 59 of SEQ ID NO: 1242759
ugcacaugugguuaugaca

SEQ ID NO: 1370607 - RNA, 19 nt, Artificial Sequence
  Description of Artificial Sequence: Synthetic oligonucleotide
  Antisense strand to SEQ ID NO: 1370606
ugucauaaccacaugugca

SEQ ID NO: 1370608 - RNA, 19 nt, Artificial Sequence
  Description of Artificial Sequence: Synthetic oligonucleotide
  Sense strand starting at position 317 of SEQ ID NO: 1242759
aaacgcuggcuacagaaau

SEQ ID NO: 1370609 - RNA, 19 nt, Artificial Sequence
  Description of Artificial Sequence: Synthetic oligonucleotide
  Antisense strand to SEQ ID NO: 1370608
auuucuguagccagcguuu

SEQ ID NO: 1370610 - RNA, 19 nt, Artificial Sequence
  Description of Artificial Sequence: Synthetic oligonucleotide
  Sense strand starting at position 433 of SEQ ID NO: 1242759
ccgaaagaaguacaguauu

SEQ ID NO: 1370611 - RNA, 19 nt, Artificial Sequence
  Description of Artificial Sequence: Synthetic oligonucleotide
  Antisense strand to SEQ ID NO: 1370610
aauacuguacuucuuucgg

SEQ ID NO: 1370612 - RNA, 19 nt, Artificial Sequence
  Description of Artificial Sequence: Synthetic oligonucleotide
  Sense strand starting at position 816 of SEQ ID NO: 1242759
guaaauaaaugucccugaa

SEQ ID NO: 1370613 - RNA, 19 nt, Artificial Sequence
  Description of Artificial Sequence: Synthetic oligonucleotide
  Antisense strand to SEQ ID NO: 1370612
uucagggacauuuauuuac

SEQ ID NO: 1370614 - RNA, 19 nt, Artificial Sequence
  Description of Artificial Sequence: Synthetic oligonucleotide
  Sense strand starting at position 906 of SEQ ID NO: 1242759
acuguaaccuugcugaaau

SEQ ID NO: 1370615 - RNA, 19 nt, Artificial Sequence
  Description of Artificial Sequence: Synthetic oligonucleotide
  Antisense strand to SEQ ID NO: 1370614
auuucagcaagguuacagu

SEQ ID NO: 1370616 - RNA, 19 nt, Artificial Sequence
  Description of Artificial Sequence: Synthetic oligonucleotide
  Sense strand starting at position 917 of SEQ ID NO: 1242759
gcugaaauuuguguaugug

SEQ ID NO: 1370617 - RNA, 19 nt, Artificial Sequence
  Description of Artificial Sequence: Synthetic oligonucleotide
  Antisense strand to SEQ ID NO: 1370616
cacauacacaaauuucagc

SEQ ID NO: 1370618 - RNA, 19 nt, Artificial Sequence
  Description of Artificial Sequence: Synthetic oligonucleotide
  Sense strand starting at position 920 of SEQ ID NO: 1242759
gaaauuuguguaugugugu

SEQ ID NO: 1370619 - RNA, 19 nt, Artificial Sequence
  Description of Artificial Sequence: Synthetic oligonucleotide
  Antisense strand to SEQ ID NO: 1370618
acacacauacacaaauuuc

SEQ ID NO: 1370620 - RNA, 19 nt, Artificial Sequence
  Description of Artificial Sequence: Synthetic oligonucleotide
  Sense strand starting at position 939 of SEQ ID NO: 1242759
guuguuacuaauggaguga

SEQ ID NO: 1370621 - RNA, 19 nt, Artificial Sequence
  Description of Artificial Sequence: Synthetic oligonucleotide
  Antisense strand to SEQ ID NO: 1370620
ucacuccauuaguaacaac

SEQ ID NO: 1370622 - RNA, 19 nt, Artificial Sequence
  Description of Artificial Sequence: Synthetic oligonucleotide
  Sense strand starting at position 1001 of SEQ ID NO: 1242759
ugaugcagaggaugugaua

SEQ ID NO: 1370623 - RNA, 19 nt, Artificial Sequence
  Description of Artificial Sequence: Synthetic oligonucleotide
  Antisense strand to SEQ ID NO: 1370622
uaucacauccucugcauca

SEQ ID NO: 1370624 - RNA, 19 nt, Artificial Sequence
  Description of Artificial Sequence: Synthetic oligonucleotide
  Sense strand starting at position 1142 of SEQ ID NO: 1242759
auuugagguuccugggaga

SEQ ID NO: 1370625 - RNA, 19 nt, Artificial Sequence
  Description of Artificial Sequence: Synthetic oligonucleotide
  Antisense strand to SEQ ID NO: 1370624
ucucccaggaaccucaaau

SEQ ID NO: 1370626 - RNA, 19 nt, Artificial Sequence
  Description of Artificial Sequence: Synthetic oligonucleotide
  Sense strand starting at position 1190 of SEQ ID NO: 1242759
acuagaugacuuugcauau

SEQ ID NO: 1370627 - RNA, 19 nt, Artificial Sequence
  Description of Artificial Sequence: Synthetic oligonucleotide
  Antisense strand to SEQ ID NO: 1370626
auaugcaaagucaucuagu

SEQ ID NO: 1370628 - RNA, 19 nt, Artificial Sequence
  Description of Artificial Sequence: Synthetic oligonucleotide
  Sense strand starting at position 1191 of SEQ ID NO: 1242759
cuagaugacuuugcauauu

SEQ ID NO: 1370629 - RNA, 19 nt, Artificial Sequence
  Description of Artificial Sequence: Synthetic oligonucleotide
  Antisense strand to SEQ ID NO: 1370628
aauaugcaaagucaucuag

SEQ ID NO: 1370630 - RNA, 19 nt, Artificial Sequence
  Description of Artificial Sequence: Synthetic oligonucleotide
  Sense strand starting at position 1266 of SEQ ID NO: 1242759
gguauagguuguccuuaug

SEQ ID NO: 1370631 - RNA, 19 nt, Artificial Sequence
  Description of Artificial Sequence: Synthetic oligonucleotide
  Antisense strand to SEQ ID NO: 1370630
cauaaggacaaccuauacc

SEQ ID NO: 1370632 - RNA, 19 nt, Artificial Sequence
  Description of Artificial Sequence: Synthetic oligonucleotide
  Sense strand starting at position 1405 of SEQ ID NO: 1242759
ugaauugaguuacucaaua

SEQ ID NO: 1370633 - RNA, 19 nt, Artificial Sequence
  Description of Artificial Sequence: Synthetic oligonucleotide
  Antisense strand to SEQ ID NO: 1370632
uauugaguaacucaauuca

SEQ ID NO: 1370634 - RNA, 19 nt, Artificial Sequence
  Description of Artificial Sequence: Synthetic oligonucleotide
  Sense strand starting at position 1433 of SEQ ID NO: 1242759
gaaacagugugcucaguua

SEQ ID NO: 1370635 - RNA, 19 nt, Artificial Sequence
  Description of Artificial Sequence: Synthetic oligonucleotide
  Antisense strand to SEQ ID NO: 1370634
uaacugagcacacuguuuc

SEQ ID NO: 1370636 - RNA, 19 nt, Artificial Sequence
  Description of Artificial Sequence: Synthetic oligonucleotide
  Sense strand starting at position 1500 of SEQ ID NO: 1242759
acuugagcuuccucugaag

SEQ ID NO: 1370637 - RNA, 19 nt, Artificial Sequence
  Description of Artificial Sequence: Synthetic oligonucleotide
  Antisense strand to SEQ ID NO: 1370636
cuucagaggaagcucaagu

SEQ ID NO: 1370638 - RNA, 19 nt, Artificial Sequence
  Description of Artificial Sequence: Synthetic oligonucleotide
  Sense strand starting at position 1502 of SEQ ID NO: 1242759
uugagcuuccucugaagca

SEQ ID NO: 1370639 - RNA, 19 nt, Artificial Sequence
  Description of Artificial Sequence: Synthetic oligonucleotide
  Antisense strand to SEQ ID NO: 1370638
ugcuucagaggaagcucaa

SEQ ID NO: 1370640 - RNA, 19 nt, Artificial Sequence
  Description of Artificial Sequence: Synthetic oligonucleotide
  Sense strand starting at position 1711 of SEQ ID NO: 1242759
gauagucuccuggaggagu

SEQ ID NO: 1370641 - RNA, 19 nt, Artificial Sequence
  Description of Artificial Sequence: Synthetic oligonucleotide
  Antisense strand to SEQ ID NO: 1370640
acuccuccaggagacuauc

SEQ ID NO: 1370642 - RNA, 19 nt, Artificial Sequence
  Description of Artificial Sequence: Synthetic oligonucleotide
  Sense strand starting at position 1713 of SEQ ID NO: 1242759
uagucuccuggaggaguuu

SEQ ID NO: 1370643 - RNA, 19 nt, Artificial Sequence
  Description of Artificial Sequence: Synthetic oligonucleotide
  Antisense strand to SEQ ID NO: 1370642
aaacuccuccaggagacua

SEQ ID NO: 1370644 - RNA, 19 nt, Artificial Sequence
  Description of Artificial Sequence: Synthetic oligonucleotide
  Sense strand starting at position 1762 of SEQ ID NO: 1242759
acugucuaagccuagaauu

SEQ ID NO: 1370645 - RNA, 19 nt, Artificial Sequence
  Description of Artificial Sequence: Synthetic oligonucleotide
  Antisense strand to SEQ ID NO: 1370644
aauucuaggcuuagacagu

SEQ ID NO: 1370646 - RNA, 19 nt, Artificial Sequence
  Description of Artificial Sequence: Synthetic oligonucleotide
  Sense strand starting at position 1990 of SEQ ID NO: 1242759
gcuacaucuugcucuggga

SEQ ID NO: 1370647 - RNA, 19 nt, Artificial Sequence
  Description of Artificial Sequence: Synthetic oligonucleotide
  Antisense strand to SEQ ID NO: 1370646
ucccagagcaagauguagc

SEQ ID NO: 1370648 - RNA, 19 nt, Artificial Sequence
  Description of Artificial Sequence: Synthetic oligonucleotide
  Sense strand starting at position 2110 of SEQ ID NO: 1242759
uguucuugugccucauguu

SEQ ID NO: 1370649 - RNA, 19 nt, Artificial Sequence
  Description of Artificial Sequence: Synthetic oligonucleotide
  Antisense strand to SEQ ID NO: 1370648
aacaugaggcacaagaaca

SEQ ID NO: 1370650 - RNA, 19 nt, Artificial Sequence
  Description of Artificial Sequence: Synthetic oligonucleotide
  Sense strand starting at position 2124 of SEQ ID NO: 1242759
auguuaggcuuucuauuua

SEQ ID NO: 1370651 - RNA, 19 nt, Artificial Sequence
  Description of Artificial Sequence: Synthetic oligonucleotide
  Antisense strand to SEQ ID NO: 1370650
uaaauagaaagccuaacau

SEQ ID NO: 1370652 - RNA, 19 nt, Artificial Sequence
  Description of Artificial Sequence: Synthetic oligonucleotide
  Sense strand starting at position 2155 of SEQ ID NO: 1242759
ugcauuuccuagugauuug

SEQ ID NO: 1370653 - RNA, 19 nt, Artificial Sequence
  Description of Artificial Sequence: Synthetic oligonucleotide
  Antisense strand to SEQ ID NO: 1370652
caaaucacuaggaaaugca

SEQ ID NO: 1370654 - RNA, 19 nt, Artificial Sequence
  Description of Artificial Sequence: Synthetic oligonucleotide
  Sense strand starting at position 2520 of SEQ ID NO: 1242759
gcuuuccuccauuaggauu

SEQ ID NO: 1370655 - RNA, 19 nt, Artificial Sequence
  Description of Artificial Sequence: Synthetic oligonucleotide
  Antisense strand to SEQ ID NO: 1370654
aauccuaauggaggaaagc

SEQ ID NO: 1370656 - RNA, 19 nt, Artificial Sequence
  Description of Artificial Sequence: Synthetic oligonucleotide
  Sense strand starting at position 2538 of SEQ ID NO: 1242759
uuuguagacucaucaagaa

SEQ ID NO: 1370657 - RNA, 19 nt, Artificial Sequence
  Description of Artificial Sequence: Synthetic oligonucleotide
  Antisense strand to SEQ ID NO: 1370656
uucuugaugagucuacaaa

SEQ ID NO: 1370658 - RNA, 19 nt, Artificial Sequence
  Description of Artificial Sequence: Synthetic oligonucleotide
  Sense strand starting at position 2740 of SEQ ID NO: 1242759
gggagguugaggugugaga

SEQ ID NO: 1370659 - RNA, 19 nt, Artificial Sequence
  Description of Artificial Sequence: Synthetic oligonucleotide
  Antisense strand to SEQ ID NO: 1370658
ucucacaccucaaccuccc

SEQ ID NO: 1370660 - RNA, 19 nt, Artificial Sequence
  Description of Artificial Sequence: Synthetic oligonucleotide
  Sense strand starting at position 2771 of SEQ ID NO: 1242759
ccaggaguucgagaucacu

SEQ ID NO: 1370661 - RNA, 19 nt, Artificial Sequence
  Description of Artificial Sequence: Synthetic oligonucleotide
  Antisense strand to SEQ ID NO: 1370660
agugaucucgaacuccugg

SEQ ID NO: 1370662 - RNA, 19 nt, Artificial Sequence
  Description of Artificial Sequence: Synthetic oligonucleotide
  Sense strand starting at position 2804 of SEQ ID NO: 1242759
gcaaauuacuuucuuggga

SEQ ID NO: 1370663 - RNA, 19 nt, Artificial Sequence
  Description of Artificial Sequence: Synthetic oligonucleotide
  Antisense strand to SEQ ID NO: 1370662
ucccaagaaaguaauuugc

SEQ ID NO: 1370664 - RNA, 19 nt, Artificial Sequence
  Description of Artificial Sequence: Synthetic oligonucleotide
  Sense strand starting at position 2858 of SEQ ID NO: 1242759
gugaauuauuuccauuaga

SEQ ID NO: 1370665 - RNA, 19 nt, Artificial Sequence
  Description of Artificial Sequence: Synthetic oligonucleotide
  Antisense strand to SEQ ID NO: 1370664
ucuaauggaaauaauucac

SEQ ID NO: 1370666 - RNA, 19 nt, Artificial Sequence
  Description of Artificial Sequence: Synthetic oligonucleotide
  Sense strand starting at position 2889 of SEQ ID NO: 1242759
guaauagaucaauagcuau

SEQ ID NO: 1370667 - RNA, 19 nt, Artificial Sequence
  Description of Artificial Sequence: Synthetic oligonucleotide
  Antisense strand to SEQ ID NO: 1370666
auagcuauugaucuauuac

SEQ ID NO: 1370668 - RNA, 19 nt, Artificial Sequence
  Description of Artificial Sequence: Synthetic oligonucleotide
  Sense strand starting at position 3590 of SEQ ID NO: 1242759
augagugcuuccuucugaa

SEQ ID NO: 1370669 - RNA, 19 nt, Artificial Sequence
  Description of Artificial Sequence: Synthetic oligonucleotide
  Antisense strand to SEQ ID NO: 1370668
uucagaaggaagcacucau

SEQ ID NO: 1370670 - RNA, 19 nt, Artificial Sequence
  Description of Artificial Sequence: Synthetic oligonucleotide
  Sense strand starting at position 3694 of SEQ ID NO: 1242759
uaguaagaccacugaugua

SEQ ID NO: 1370671 - RNA, 19 nt, Artificial Sequence
  Description of Artificial Sequence: Synthetic oligonucleotide
  Antisense strand to SEQ ID NO: 1370670
uacaucaguggucuuacua

SEQ ID NO: 1370672 - RNA, 19 nt, Artificial Sequence
  Description of Artificial Sequence: Synthetic oligonucleotide
  Sense strand starting at position 3701 of SEQ ID NO: 1242759
accacugauguaggaaagu

SEQ ID NO: 1370673 - RNA, 19 nt, Artificial Sequence
  Description of Artificial Sequence: Synthetic oligonucleotide
  Antisense strand to SEQ ID NO: 1370672
acuuuccuacaucaguggu

SEQ ID NO: 1370674 - RNA, 19 nt, Artificial Sequence
  Description of Artificial Sequence: Synthetic oligonucleotide
  Sense strand starting at position 3769 of SEQ ID NO: 1242759
uguugacucuuuguaccaa

SEQ ID NO: 1370675 - RNA, 19 nt, Artificial Sequence
  Description of Artificial Sequence: Synthetic oligonucleotide
  Antisense strand to SEQ ID NO: 1370674
uugguacaaagagucaaca

SEQ ID NO: 1370676 - RNA, 19 nt, Artificial Sequence
  Description of Artificial Sequence: Synthetic oligonucleotide
  Sense strand starting at position 3794 of SEQ ID NO: 1242759
caguuaaugcaugggcauu

SEQ ID NO: 1370677 - RNA, 19 nt, Artificial Sequence
  Description of Artificial Sequence: Synthetic oligonucleotide
  Antisense strand to SEQ ID NO: 1370676
aaugcccaugcauuaacug

SEQ ID NO: 1370678 - RNA, 19 nt, Artificial Sequence
  Description of Artificial Sequence: Synthetic oligonucleotide
  Sense strand starting at position 3795 of SEQ ID NO: 1242759
aguuaaugcaugggcauuu

SEQ ID NO: 1370679 - RNA, 19 nt, Artificial Sequence
  Description of Artificial Sequence: Synthetic oligonucleotide
  Antisense strand to SEQ ID NO: 1370678
aaaugcccaugcauuaacu

SEQ ID NO: 1370680 - RNA, 19 nt, Artificial Sequence
  Description of Artificial Sequence: Synthetic oligonucleotide
  Sense strand starting at position 3804 of SEQ ID NO: 1242759
augggcauuugagaacauu

SEQ ID NO: 1370681 - RNA, 19 nt, Artificial Sequence
  Description of Artificial Sequence: Synthetic oligonucleotide
  Antisense strand to SEQ ID NO: 1370680
aauguucucaaaugcccau

SEQ ID NO: 1370682 - RNA, 19 nt, Artificial Sequence
  Description of Artificial Sequence: Synthetic oligonucleotide
  Sense strand starting at position 3967 of SEQ ID NO: 1242759
agauaauggcuaugaagca

SEQ ID NO: 1370683 - RNA, 19 nt, Artificial Sequence
  Description of Artificial Sequence: Synthetic oligonucleotide
  Antisense strand to SEQ ID NO: 1370682
ugcuucauagccauuaucu

SEQ ID NO: 1370684 - RNA, 19 nt, Artificial Sequence
  Description of Artificial Sequence: Synthetic oligonucleotide
  Sense strand starting at position 6 of SEQ ID NO: 1242760
cagagaguuucugggagag

SEQ ID NO: 1370685 - RNA, 19 nt, Artificial Sequence
  Description of Artificial Sequence: Synthetic oligonucleotide
  Antisense strand to SEQ ID NO: 1370684
cucucccagaaacucucug

SEQ ID NO: 1370686 - RNA, 19 nt, Artificial Sequence
  Description of Artificial Sequence: Synthetic oligonucleotide
  Sense strand starting at position 1150 of SEQ ID NO: 1242760
ggcugaauuggcuggaaga

SEQ ID NO: 1370687 - RNA, 19 nt, Artificial Sequence
  Description of Artificial Sequence: Synthetic oligonucleotide
  Antisense strand to SEQ ID NO: 1370686
ucuuccagccaauucagcc

SEQ ID NO: 1370688 - RNA, 19 nt, Artificial Sequence
  Description of Artificial Sequence: Synthetic oligonucleotide
  Sense strand starting at position 1151 of SEQ ID NO: 1242760
gcugaauuggcuggaagaa

SEQ ID NO: 1370689 - RNA, 19 nt, Artificial Sequence
  Description of Artificial Sequence: Synthetic oligonucleotide
  Antisense strand to SEQ ID NO: 1370688
uucuuccagccaauucagc

SEQ ID NO: 1370690 - RNA, 19 nt, Artificial Sequence
  Description of Artificial Sequence: Synthetic oligonucleotide
  Sense strand starting at position 1173 of SEQ ID NO: 1242760
aguaaauaauccuacaggu

SEQ ID NO: 1370691 - RNA, 19 nt, Artificial Sequence
  Description of Artificial Sequence: Synthetic oligonucleotide
  Antisense strand to SEQ ID NO: 1370690
accuguaggauuauuuacu

SEQ ID NO: 1370692 - RNA, 19 nt, Artificial Sequence
  Description of Artificial Sequence: Synthetic oligonucleotide
  Sense strand starting at position 1188 of SEQ ID NO: 1242760
aggugguagguaugaggau

SEQ ID NO: 1370693 - RNA, 19 nt, Artificial Sequence
  Description of Artificial Sequence: Synthetic oligonucleotide
  Antisense strand to SEQ ID NO: 1370692
auccucauaccuaccaccu

SEQ ID NO: 1370694 - RNA, 19 nt, Artificial Sequence
  Description of Artificial Sequence: Synthetic oligonucleotide
  Sense strand starting at position 1211 of SEQ ID NO: 1242760
cuaaauccggaaggugaua

SEQ ID NO: 1370695 - RNA, 19 nt, Artificial Sequence
  Description of Artificial Sequence: Synthetic oligonucleotide
  Antisense strand to SEQ ID NO: 1370694
uaucaccuuccggauuuag

SEQ ID NO: 1370696 - RNA, 19 nt, Artificial Sequence
  Description of Artificial Sequence: Synthetic oligonucleotide
  Sense strand starting at position 1223 of SEQ ID NO: 1242760
ggugauaaggagugaaguu

SEQ ID NO: 1370697 - RNA, 19 nt, Artificial Sequence
  Description of Artificial Sequence: Synthetic oligonucleotide
  Antisense strand to SEQ ID NO: 1370696
aacuucacuccuuaucacc

SEQ ID NO: 1370698 - RNA, 19 nt, Artificial Sequence
  Description of Artificial Sequence: Synthetic oligonucleotide
  Sense strand starting at position 1224 of SEQ ID NO: 1242760
gugauaaggagugaaguuu

SEQ ID NO: 1370699 - RNA, 19 nt, Artificial Sequence
  Description of Artificial Sequence: Synthetic oligonucleotide
  Antisense strand to SEQ ID NO: 1370698
aaacuucacuccuuaucac

SEQ ID NO: 1370700 - RNA, 19 nt, Artificial Sequence
  Description of Artificial Sequence: Synthetic oligonucleotide
  Sense strand starting at position 1230 of SEQ ID NO: 1242760
aggagugaaguuuggaaau

SEQ ID NO: 1370701 - RNA, 19 nt, Artificial Sequence
  Description of Artificial Sequence: Synthetic oligonucleotide
  Antisense strand to SEQ ID NO: 1370700
auuuccaaacuucacuccu

SEQ ID NO: 1370702 - RNA, 19 nt, Artificial Sequence
  Description of Artificial Sequence: Synthetic oligonucleotide
  Sense strand starting at position 1358 of SEQ ID NO: 1242760
uucucaugccauugucacu

SEQ ID NO: 1370703 - RNA, 19 nt, Artificial Sequence
  Description of Artificial Sequence: Synthetic oligonucleotide
  Antisense strand to SEQ ID NO: 1370702
agugacaauggcaugagaa

SEQ ID NO: 1370704 - RNA, 19 nt, Artificial Sequence
  Description of Artificial Sequence: Synthetic oligonucleotide
  Sense strand starting at position 1365 of SEQ ID NO: 1242760
gccauugucacucgcugaa

SEQ ID NO: 1370705 - RNA, 19 nt, Artificial Sequence
  Description of Artificial Sequence: Synthetic oligonucleotide
  Antisense strand to SEQ ID NO: 1370704
uucagcgagugacaauggc

SEQ ID NO: 1370706 - RNA, 19 nt, Artificial Sequence
  Description of Artificial Sequence: Synthetic oligonucleotide
  Sense strand starting at position 1367 of SEQ ID NO: 1242760
cauugucacucgcugaagu

SEQ ID NO: 1370707 - RNA, 19 nt, Artificial Sequence
  Description of Artificial Sequence: Synthetic oligonucleotide
  Antisense strand to SEQ ID NO: 1370706
acuucagcgagugacaaug

SEQ ID NO: 1370708 - RNA, 19 nt, Artificial Sequence
  Description of Artificial Sequence: Synthetic oligonucleotide
  Sense strand starting at position 1707 of SEQ ID NO: 1242760
agggucauagaguguccaa

SEQ ID NO: 1370709 - RNA, 19 nt, Artificial Sequence
  Description of Artificial Sequence: Synthetic oligonucleotide
  Antisense strand to SEQ ID NO: 1370708
uuggacacucuaugacccu

SEQ ID NO: 1370710 - RNA, 19 nt, Artificial Sequence
  Description of Artificial Sequence: Synthetic oligonucleotide
  Sense strand starting at position 1949 of SEQ ID NO: 1242760
gcagaauguucugcacuau

SEQ ID NO: 1370711 - RNA, 19 nt, Artificial Sequence
  Description of Artificial Sequence: Synthetic oligonucleotide
  Antisense strand to SEQ ID NO: 1370710
auagugcagaacauucugc

SEQ ID NO: 1370712 - RNA, 19 nt, Artificial Sequence
  Description of Artificial Sequence: Synthetic oligonucleotide
  Sense strand starting at position 1950 of SEQ ID NO: 1242760
cagaauguucugcacuaug

SEQ ID NO: 1370713 - RNA, 19 nt, Artificial Sequence
  Description of Artificial Sequence: Synthetic oligonucleotide
  Antisense strand to SEQ ID NO: 1370712
cauagugcagaacauucug

SEQ ID NO: 1370714 - RNA, 19 nt, Artificial Sequence
  Description of Artificial Sequence: Synthetic oligonucleotide
  Sense strand starting at position 2075 of SEQ ID NO: 1242760
ucggcuucggagcgugaaa

SEQ ID NO: 1370715 - RNA, 19 nt, Artificial Sequence
  Description of Artificial Sequence: Synthetic oligonucleotide
  Antisense strand to SEQ ID NO: 1370714
uuucacgcuccgaagccga

SEQ ID NO: 1370716 - RNA, 19 nt, Artificial Sequence
  Description of Artificial Sequence: Synthetic oligonucleotide
  Sense strand starting at position 2212 of SEQ ID NO: 1242760
accaguuaugacuguggga

SEQ ID NO: 1370717 - RNA, 19 nt, Artificial Sequence
  Description of Artificial Sequence: Synthetic oligonucleotide
  Antisense strand to SEQ ID NO: 1370716
ucccacagucauaacuggu

SEQ ID NO: 1370718 - RNA, 19 nt, Artificial Sequence
  Description of Artificial Sequence: Synthetic oligonucleotide
  Sense strand starting at position 2322 of SEQ ID NO: 1242760
gacuguuucugguugcgaa

SEQ ID NO: 1370719 - RNA, 19 nt, Artificial Sequence
  Description of Artificial Sequence: Synthetic oligonucleotide
  Antisense strand to SEQ ID NO: 1370718
uucgcaaccagaaacaguc

SEQ ID NO: 1370720 - RNA, 19 nt, Artificial Sequence
  Description of Artificial Sequence: Synthetic oligonucleotide
  Sense strand starting at position 2323 of SEQ ID NO: 1242760
acuguuucugguugcgaac

SEQ ID NO: 1370721 - RNA, 19 nt, Artificial Sequence
  Description of Artificial Sequence: Synthetic oligonucleotide
  Antisense strand to SEQ ID NO: 1370720
guucgcaaccagaaacagu

SEQ ID NO: 1370722 - RNA, 19 nt, Artificial Sequence
  Description of Artificial Sequence: Synthetic oligonucleotide
  Sense strand starting at position 2436 of SEQ ID NO: 1242760
uuucgugaaugaucuauug

SEQ ID NO: 1370723 - RNA, 19 nt, Artificial Sequence
  Description of Artificial Sequence: Synthetic oligonucleotide
  Antisense strand to SEQ ID NO: 1370722
caauagaucauucacgaaa

SEQ ID NO: 1370724 - RNA, 19 nt, Artificial Sequence
  Description of Artificial Sequence: Synthetic oligonucleotide
  Sense strand starting at position 2443 of SEQ ID NO: 1242760
aaugaucuauuggcaguau

SEQ ID NO: 1370725 - RNA, 19 nt, Artificial Sequence
  Description of Artificial Sequence: Synthetic oligonucleotide
  Antisense strand to SEQ ID NO: 1370724
auacugccaauagaucauu

SEQ ID NO: 1370726 - RNA, 19 nt, Artificial Sequence
  Description of Artificial Sequence: Synthetic oligonucleotide
  Sense strand starting at position 2447 of SEQ ID NO: 1242760
aucuauuggcaguauccaa

SEQ ID NO: 1370727 - RNA, 19 nt, Artificial Sequence
  Description of Artificial Sequence: Synthetic oligonucleotide
  Antisense strand to SEQ ID NO: 1370726
uuggauacugccaauagau

SEQ ID NO: 1370728 - RNA, 19 nt, Artificial Sequence
  Description of Artificial Sequence: Synthetic oligonucleotide
  Sense strand starting at position 2459 of SEQ ID NO: 1242760
uauccaagauguuaagaga

SEQ ID NO: 1370729 - RNA, 19 nt, Artificial Sequence
  Description of Artificial Sequence: Synthetic oligonucleotide
  Antisense strand to SEQ ID NO: 1370728
ucucuuaacaucuuggaua

SEQ ID NO: 1370730 - RNA, 19 nt, Artificial Sequence
  Description of Artificial Sequence: Synthetic oligonucleotide
  Sense strand starting at position 2529 of SEQ ID NO: 1242760
ccugguguuacagaugaga

SEQ ID NO: 1370731 - RNA, 19 nt, Artificial Sequence
  Description of Artificial Sequence: Synthetic oligonucleotide
  Antisense strand to SEQ ID NO: 1370730
ucucaucuguaacaccagg

SEQ ID NO: 1370732 - RNA, 19 nt, Artificial Sequence
  Description of Artificial Sequence: Synthetic oligonucleotide
  Sense strand starting at position 2603 of SEQ ID NO: 1242760
uggcgcauuccuguaguca

SEQ ID NO: 1370733 - RNA, 19 nt, Artificial Sequence
  Description of Artificial Sequence: Synthetic oligonucleotide
  Antisense strand to SEQ ID NO: 1370732
ugacuacaggaaugcgcca

SEQ ID NO: 1370734 - RNA, 19 nt, Artificial Sequence
  Description of Artificial Sequence: Synthetic oligonucleotide
  Sense strand starting at position 2604 of SEQ ID NO: 1242760
ggcgcauuccuguagucac

SEQ ID NO: 1370735 - RNA, 19 nt, Artificial Sequence
  Description of Artificial Sequence: Synthetic oligonucleotide
  Antisense strand to SEQ ID NO: 1370734
gugacuacaggaaugcgcc

SEQ ID NO: 1370736 - RNA, 19 nt, Artificial Sequence
  Description of Artificial Sequence: Synthetic oligonucleotide
  Sense strand starting at position 2791 of SEQ ID NO: 1242760
auuggaaaguugcugacaa

SEQ ID NO: 1370737 - RNA, 19 nt, Artificial Sequence
  Description of Artificial Sequence: Synthetic oligonucleotide
  Antisense strand to SEQ ID NO: 1370736
uugucagcaacuuuccaau

SEQ ID NO: 1370738 - RNA, 19 nt, Artificial Sequence
  Description of Artificial Sequence: Synthetic oligonucleotide
  Sense strand starting at position 2793 of SEQ ID NO: 1242760
uggaaaguugcugacaauc

SEQ ID NO: 1370739 - RNA, 19 nt, Artificial Sequence
  Description of Artificial Sequence: Synthetic oligonucleotide
  Antisense strand to SEQ ID NO: 1370738
gauugucagcaacuuucca

SEQ ID NO: 1370740 - RNA, 19 nt, Artificial Sequence
  Description of Artificial Sequence: Synthetic oligonucleotide
  Sense strand starting at position 2795 of SEQ ID NO: 1242760
gaaaguugcugacaaucau

SEQ ID NO: 1370741 - RNA, 19 nt, Artificial Sequence
  Description of Artificial Sequence: Synthetic oligonucleotide
  Antisense strand to SEQ ID NO: 1370740
augauugucagcaacuuuc

SEQ ID NO: 1370742 - RNA, 19 nt, Artificial Sequence
  Description of Artificial Sequence: Synthetic oligonucleotide
  Sense strand starting at position 2841 of SEQ ID NO: 1242760
cuuagagaccuguauggug

SEQ ID NO: 1370743 - RNA, 19 nt, Artificial Sequence
  Description of Artificial Sequence: Synthetic oligonucleotide
  Antisense strand to SEQ ID NO: 1370742
caccauacaggucucuaag

SEQ ID NO: 1370744 - RNA, 19 nt, Artificial Sequence
  Description of Artificial Sequence: Synthetic oligonucleotide
  Sense strand starting at position 2843 of SEQ ID NO: 1242760
uagagaccuguauggugau

SEQ ID NO: 1370745 - RNA, 19 nt, Artificial Sequence
  Description of Artificial Sequence: Synthetic oligonucleotide
  Antisense strand to SEQ ID NO: 1370744
aucaccauacaggucucua

SEQ ID NO: 1370746 - RNA, 19 nt, Artificial Sequence
  Description of Artificial Sequence: Synthetic oligonucleotide
  Sense strand starting at position 2844 of SEQ ID NO: 1242760
agagaccuguauggugaua

SEQ ID NO: 1370747 - RNA, 19 nt, Artificial Sequence
  Description of Artificial Sequence: Synthetic oligonucleotide
  Antisense strand to SEQ ID NO: 1370746
uaucaccauacaggucucu

SEQ ID NO: 1370748 - RNA, 19 nt, Artificial Sequence
  Description of Artificial Sequence: Synthetic oligonucleotide
  Sense strand starting at position 2849 of SEQ ID NO: 1242760
ccuguauggugauaagaaa

SEQ ID NO: 1370749 - RNA, 19 nt, Artificial Sequence
  Description of Artificial Sequence: Synthetic oligonucleotide
  Antisense strand to SEQ ID NO: 1370748
uuucuuaucaccauacagg

SEQ ID NO: 1370750 - RNA, 19 nt, Artificial Sequence
  Description of Artificial Sequence: Synthetic oligonucleotide
  Sense strand starting at position 3365 of SEQ ID NO: 1242760
agagcaaggucacuuuaug

SEQ ID NO: 1370751 - RNA, 19 nt, Artificial Sequence
  Description of Artificial Sequence: Synthetic oligonucleotide
  Antisense strand to SEQ ID NO: 1370750
cauaaagugaccuugcucu

SEQ ID NO: 1370752 - RNA, 19 nt, Artificial Sequence
  Description of Artificial Sequence: Synthetic oligonucleotide
  Sense strand starting at position 3410 of SEQ ID NO: 1242760
uaccuucuucuagguggaa

SEQ ID NO: 1370753 - RNA, 19 nt, Artificial Sequence
  Description of Artificial Sequence: Synthetic oligonucleotide
  Antisense strand to SEQ ID NO: 1370752
uuccaccuagaagaaggua

SEQ ID NO: 1370754 - RNA, 19 nt, Artificial Sequence
  Description of Artificial Sequence: Synthetic oligonucleotide
  Sense strand starting at position 3411 of SEQ ID NO: 1242760
accuucuucuagguggaaa

SEQ ID NO: 1370755 - RNA, 19 nt, Artificial Sequence
  Description of Artificial Sequence: Synthetic oligonucleotide
  Antisense strand to SEQ ID NO: 1370754
uuuccaccuagaagaaggu

SEQ ID NO: 1370756 - RNA, 19 nt, Artificial Sequence
  Description of Artificial Sequence: Synthetic oligonucleotide
  Sense strand starting at position 3412 of SEQ ID NO: 1242760
ccuucuucuagguggaaag

SEQ ID NO: 1370757 - RNA, 19 nt, Artificial Sequence
  Description of Artificial Sequence: Synthetic oligonucleotide
  Antisense strand to SEQ ID NO: 1370756
cuuuccaccuagaagaagg

SEQ ID NO: 1370758 - RNA, 19 nt, Artificial Sequence
  Description of Artificial Sequence: Synthetic oligonucleotide
  Sense strand starting at position 3518 of SEQ ID NO: 1242760
ucagaaugcaguuggaaau

SEQ ID NO: 1370759 - RNA, 19 nt, Artificial Sequence
  Description of Artificial Sequence: Synthetic oligonucleotide
  Antisense strand to SEQ ID NO: 1370758
auuuccaacugcauucuga

SEQ ID NO: 1370760 - RNA, 19 nt, Artificial Sequence
  Description of Artificial Sequence: Synthetic oligonucleotide
  Sense strand starting at position 3917 of SEQ ID NO: 1242760
cgugcagggcucuagaaau

SEQ ID NO: 1370761 - RNA, 19 nt, Artificial Sequence
  Description of Artificial Sequence: Synthetic oligonucleotide
  Antisense strand to SEQ ID NO: 1370760
auuucuagagcccugcacg

SEQ ID NO: 1370762 - RNA, 19 nt, Artificial Sequence
  Description of Artificial Sequence: Synthetic oligonucleotide
  Sense strand starting at position 3955 of SEQ ID NO: 1242760
ggcaucugccaucaaggaa

SEQ ID NO: 1370763 - RNA, 19 nt, Artificial Sequence
  Description of Artificial Sequence: Synthetic oligonucleotide
  Antisense strand to SEQ ID NO: 1370762
uuccuugauggcagaugcc

SEQ ID NO: 1370764 - RNA, 19 nt, Artificial Sequence
  Description of Artificial Sequence: Synthetic oligonucleotide
  Sense strand starting at position 930 of SEQ ID NO: 1242761
ggcugaauuggcuggaaga

SEQ ID NO: 1370765 - RNA, 19 nt, Artificial Sequence
  Description of Artificial Sequence: Synthetic oligonucleotide
  Antisense strand to SEQ ID NO: 1370764
ucuuccagccaauucagcc

SEQ ID NO: 1370766 - RNA, 19 nt, Artificial Sequence
  Description of Artificial Sequence: Synthetic oligonucleotide
  Sense strand starting at position 931 of SEQ ID NO: 1242761
gcugaauuggcuggaagaa

SEQ ID NO: 1370767 - RNA, 19 nt, Artificial Sequence
  Description of Artificial Sequence: Synthetic oligonucleotide
  Antisense strand to SEQ ID NO: 1370766
uucuuccagccaauucagc

SEQ ID NO: 1370768 - RNA, 19 nt, Artificial Sequence
  Description of Artificial Sequence: Synthetic oligonucleotide
  Sense strand starting at position 953 of SEQ ID NO: 1242761
aguaaauaauccuacaggu

SEQ ID NO: 1370769 - RNA, 19 nt, Artificial Sequence
  Description of Artificial Sequence: Synthetic oligonucleotide
  Antisense strand to SEQ ID NO: 1370768
accuguaggauuauuuacu

SEQ ID NO: 1370770 - RNA, 19 nt, Artificial Sequence
  Description of Artificial Sequence: Synthetic oligonucleotide
  Sense strand starting at position 968 of SEQ ID NO: 1242761
aggugguagguaugaggau

SEQ ID NO: 1370771 - RNA, 19 nt, Artificial Sequence
  Description of Artificial Sequence: Synthetic oligonucleotide
  Antisense strand to SEQ ID NO: 1370770
auccucauaccuaccaccu

SEQ ID NO: 1370772 - RNA, 19 nt, Artificial Sequence
  Description of Artificial Sequence: Synthetic oligonucleotide
  Sense strand starting at position 991 of SEQ ID NO: 1242761
cuaaauccggaaggugaua

SEQ ID NO: 1370773 - RNA, 19 nt, Artificial Sequence
  Description of Artificial Sequence: Synthetic oligonucleotide
  Antisense strand to SEQ ID NO: 1370772
uaucaccuuccggauuuag

SEQ ID NO: 1370774 - RNA, 19 nt, Artificial Sequence
  Description of Artificial Sequence: Synthetic oligonucleotide
  Sense strand starting at position 1003 of SEQ ID NO: 1242761
ggugauaaggagugaaguu

SEQ ID NO: 1370775 - RNA, 19 nt, Artificial Sequence
  Description of Artificial Sequence: Synthetic oligonucleotide
  Antisense strand to SEQ ID NO: 1370774
aacuucacuccuuaucacc

SEQ ID NO: 1370776 - RNA, 19 nt, Artificial Sequence
  Description of Artificial Sequence: Synthetic oligonucleotide
  Sense strand starting at position 1004 of SEQ ID NO: 1242761
gugauaaggagugaaguuu

SEQ ID NO: 1370777 - RNA, 19 nt, Artificial Sequence
  Description of Artificial Sequence: Synthetic oligonucleotide
  Antisense strand to SEQ ID NO: 1370776
aaacuucacuccuuaucac

SEQ ID NO: 1370778 - RNA, 19 nt, Artificial Sequence
  Description of Artificial Sequence: Synthetic oligonucleotide
  Sense strand starting at position 1010 of SEQ ID NO: 1242761
aggagugaaguuuggaaau

SEQ ID NO: 1370779 - RNA, 19 nt, Artificial Sequence
  Description of Artificial Sequence: Synthetic oligonucleotide
  Antisense strand to SEQ ID NO: 1370778
auuuccaaacuucacuccu

SEQ ID NO: 1370780 - RNA, 19 nt, Artificial Sequence
  Description of Artificial Sequence: Synthetic oligonucleotide
  Sense strand starting at position 1138 of SEQ ID NO: 1242761
uucucaugccauugucacu

SEQ ID NO: 1370781 - RNA, 19 nt, Artificial Sequence
  Description of Artificial Sequence: Synthetic oligonucleotide
  Antisense strand to SEQ ID NO: 1370780
agugacaauggcaugagaa

SEQ ID NO: 1370782 - RNA, 19 nt, Artificial Sequence
  Description of Artificial Sequence: Synthetic oligonucleotide
  Sense strand starting at position 1145 of SEQ ID NO: 1242761
gccauugucacucgcugaa

SEQ ID NO: 1370783 - RNA, 19 nt, Artificial Sequence
  Description of Artificial Sequence: Synthetic oligonucleotide
  Antisense strand to SEQ ID NO: 1370782
uucagcgagugacaauggc

SEQ ID NO: 1370784 - RNA, 19 nt, Artificial Sequence
  Description of Artificial Sequence: Synthetic oligonucleotide
  Sense strand starting at position 1147 of SEQ ID NO: 1242761
cauugucacucgcugaagu

SEQ ID NO: 1370785 - RNA, 19 nt, Artificial Sequence
  Description of Artificial Sequence: Synthetic oligonucleotide
  Antisense strand to SEQ ID NO: 1370784
acuucagcgagugacaaug

SEQ ID NO: 1370786 - RNA, 19 nt, Artificial Sequence
  Description of Artificial Sequence: Synthetic oligonucleotide
  Sense strand starting at position 1487 of SEQ ID NO: 1242761
agggucauagaguguccaa

SEQ ID NO: 1370787 - RNA, 19 nt, Artificial Sequence
  Description of Artificial Sequence: Synthetic oligonucleotide
  Antisense strand to SEQ ID NO: 1370786
uuggacacucuaugacccu

SEQ ID NO: 1370788 - RNA, 19 nt, Artificial Sequence
  Description of Artificial Sequence: Synthetic oligonucleotide
  Sense strand starting at position 1729 of SEQ ID NO: 1242761
gcagaauguucugcacuau

SEQ ID NO: 1370789 - RNA, 19 nt, Artificial Sequence
  Description of Artificial Sequence: Synthetic oligonucleotide
  Antisense strand to SEQ ID NO: 1370788
auagugcagaacauucugc

SEQ ID NO: 1370790 - RNA, 19 nt, Artificial Sequence
  Description of Artificial Sequence: Synthetic oligonucleotide
  Sense strand starting at position 1730 of SEQ ID NO: 1242761
cagaauguucugcacuaug

SEQ ID NO: 1370791 - RNA, 19 nt, Artificial Sequence
  Description of Artificial Sequence: Synthetic oligonucleotide
  Antisense strand to SEQ ID NO: 1370790
cauagugcagaacauucug

SEQ ID NO: 1370792 - RNA, 19 nt, Artificial Sequence
  Description of Artificial Sequence: Synthetic oligonucleotide
  Sense strand starting at position 1855 of SEQ ID NO: 1242761
ucggcuucggagcgugaaa

SEQ ID NO: 1370793 - RNA, 19 nt, Artificial Sequence
  Description of Artificial Sequence: Synthetic oligonucleotide
  Antisense strand to SEQ ID NO: 1370792
uuucacgcuccgaagccga

SEQ ID NO: 1370794 - RNA, 19 nt, Artificial Sequence
  Description of Artificial Sequence: Synthetic oligonucleotide
  Sense strand starting at position 1992 of SEQ ID NO: 1242761
accaguuaugacuguggga

SEQ ID NO: 1370795 - RNA, 19 nt, Artificial Sequence
  Description of Artificial Sequence: Synthetic oligonucleotide
  Antisense strand to SEQ ID NO: 1370794
ucccacagucauaacuggu

SEQ ID NO: 1370796 - RNA, 19 nt, Artificial Sequence
  Description of Artificial Sequence: Synthetic oligonucleotide
  Sense strand starting at position 2102 of SEQ ID NO: 1242761
gacuguuucugguugcgaa

SEQ ID NO: 1370797 - RNA, 19 nt, Artificial Sequence
  Description of Artificial Sequence: Synthetic oligonucleotide
  Antisense strand to SEQ ID NO: 1370796
uucgcaaccagaaacaguc

SEQ ID NO: 1370798 - RNA, 19 nt, Artificial Sequence
  Description of Artificial Sequence: Synthetic oligonucleotide
  Sense strand starting at position 2103 of SEQ ID NO: 1242761
acuguuucugguugcgaac

SEQ ID NO: 1370799 - RNA, 19 nt, Artificial Sequence
  Description of Artificial Sequence: Synthetic oligonucleotide
  Antisense strand to SEQ ID NO: 1370798
guucgcaaccagaaacagu

SEQ ID NO: 1370800 - RNA, 19 nt, Artificial Sequence
  Description of Artificial Sequence: Synthetic oligonucleotide
  Sense strand starting at position 2216 of SEQ ID NO: 1242761
uuucgugaaugaucuauug

SEQ ID NO: 1370801 - RNA, 19 nt, Artificial Sequence
  Description of Artificial Sequence: Synthetic oligonucleotide
  Antisense strand to SEQ ID NO: 1370800
caauagaucauucacgaaa

SEQ ID NO: 1370802 - RNA, 19 nt, Artificial Sequence
  Description of Artificial Sequence: Synthetic oligonucleotide
  Sense strand starting at position 2223 of SEQ ID NO: 1242761
aaugaucuauuggcaguau

SEQ ID NO: 1370803 - RNA, 19 nt, Artificial Sequence
  Description of Artificial Sequence: Synthetic oligonucleotide
  Antisense strand to SEQ ID NO: 1370802
auacugccaauagaucauu

SEQ ID NO: 1370804 - RNA, 19 nt, Artificial Sequence
  Description of Artificial Sequence: Synthetic oligonucleotide
  Sense strand starting at position 2227 of SEQ ID NO: 1242761
aucuauuggcaguauccaa

SEQ ID NO: 1370805 - RNA, 19 nt, Artificial Sequence
  Description of Artificial Sequence: Synthetic oligonucleotide
  Antisense strand to SEQ ID NO: 1370804
uuggauacugccaauagau

SEQ ID NO: 1370806 - RNA, 19 nt, Artificial Sequence
  Description of Artificial Sequence: Synthetic oligonucleotide
  Sense strand starting at position 2239 of SEQ ID NO: 1242761
uauccaagauguuaagaga

SEQ ID NO: 1370807 - RNA, 19 nt, Artificial Sequence
  Description of Artificial Sequence: Synthetic oligonucleotide
  Antisense strand to SEQ ID NO: 1370806
ucucuuaacaucuuggaua

SEQ ID NO: 1370808 - RNA, 19 nt, Artificial Sequence
  Description of Artificial Sequence: Synthetic oligonucleotide
  Sense strand starting at position 2309 of SEQ ID NO: 1242761
ccugguguuacagaugaga

SEQ ID NO: 1370809 - RNA, 19 nt, Artificial Sequence
  Description of Artificial Sequence: Synthetic oligonucleotide
  Antisense strand to SEQ ID NO: 1370808
ucucaucuguaacaccagg

SEQ ID NO: 1370810 - RNA, 19 nt, Artificial Sequence
  Description of Artificial Sequence: Synthetic oligonucleotide
  Sense strand starting at position 2383 of SEQ ID NO: 1242761
uggcgcauuccuguaguca

SEQ ID NO: 1370811 - RNA, 19 nt, Artificial Sequence
  Description of Artificial Sequence: Synthetic oligonucleotide
  Antisense strand to SEQ ID NO: 1370810
ugacuacaggaaugcgcca

SEQ ID NO: 1370812 - RNA, 19 nt, Artificial Sequence
  Description of Artificial Sequence: Synthetic oligonucleotide
  Sense strand starting at position 2384 of SEQ ID NO: 1242761
ggcgcauuccuguagucac

SEQ ID NO: 1370813 - RNA, 19 nt, Artificial Sequence
  Description of Artificial Sequence: Synthetic oligonucleotide
  Antisense strand to SEQ ID NO: 1370812
gugacuacaggaaugcgcc

SEQ ID NO: 1370814 - RNA, 19 nt, Artificial Sequence
  Description of Artificial Sequence: Synthetic oligonucleotide
  Sense strand starting at position 2571 of SEQ ID NO: 1242761
auuggaaaguugcugacaa

SEQ ID NO: 1370815 - RNA, 19 nt, Artificial Sequence
  Description of Artificial Sequence: Synthetic oligonucleotide
  Antisense strand to SEQ ID NO: 1370814
uugucagcaacuuuccaau

SEQ ID NO: 1370816 - RNA, 19 nt, Artificial Sequence
  Description of Artificial Sequence: Synthetic oligonucleotide
  Sense strand starting at position 2573 of SEQ ID NO: 1242761
uggaaaguugcugacaauc

SEQ ID NO: 1370817 - RNA, 19 nt, Artificial Sequence
  Description of Artificial Sequence: Synthetic oligonucleotide
  Antisense strand to SEQ ID NO: 1370816
gauugucagcaacuuucca

SEQ ID NO: 1370818 - RNA, 19 nt, Artificial Sequence
  Description of Artificial Sequence: Synthetic oligonucleotide
  Sense strand starting at position 2575 of SEQ ID NO: 1242761
gaaaguugcugacaaucau

SEQ ID NO: 1370819 - RNA, 19 nt, Artificial Sequence
  Description of Artificial Sequence: Synthetic oligonucleotide
  Antisense strand to SEQ ID NO: 1370818
augauugucagcaacuuuc

SEQ ID NO: 1370820 - RNA, 19 nt, Artificial Sequence
  Description of Artificial Sequence: Synthetic oligonucleotide
  Sense strand starting at position 2621 of SEQ ID NO: 1242761
cuuagagaccuguauggug

SEQ ID NO: 1370821 - RNA, 19 nt, Artificial Sequence
  Description of Artificial Sequence: Synthetic oligonucleotide
  Antisense strand to SEQ ID NO: 1370820
caccauacaggucucuaag

SEQ ID NO: 1370822 - RNA, 19 nt, Artificial Sequence
  Description of Artificial Sequence: Synthetic oligonucleotide
  Sense strand starting at position 2623 of SEQ ID NO: 1242761
uagagaccuguauggugau

SEQ ID NO: 1370823 - RNA, 19 nt, Artificial Sequence
  Description of Artificial Sequence: Synthetic oligonucleotide
  Antisense strand to SEQ ID NO: 1370822
aucaccauacaggucucua

SEQ ID NO: 1370824 - RNA, 19 nt, Artificial Sequence
  Description of Artificial Sequence: Synthetic oligonucleotide
  Sense strand starting at position 2629 of SEQ ID NO: 1242761
ccuguauggugauaagaaa

SEQ ID NO: 1370825 - RNA, 19 nt, Artificial Sequence
  Description of Artificial Sequence: Synthetic oligonucleotide
  Antisense strand to SEQ ID NO: 1370824
uuucuuaucaccauacagg

SEQ ID NO: 1370826 - RNA, 19 nt, Artificial Sequence
  Description of Artificial Sequence: Synthetic oligonucleotide
  Sense strand starting at position 3145 of SEQ ID NO: 1242761
agagcaaggucacuuuaug

SEQ ID NO: 1370827 - RNA, 19 nt, Artificial Sequence
  Description of Artificial Sequence: Synthetic oligonucleotide
  Antisense strand to SEQ ID NO: 1370826
cauaaagugaccuugcucu

SEQ ID NO: 1370828 - RNA, 19 nt, Artificial Sequence
  Description of Artificial Sequence: Synthetic oligonucleotide
  Sense strand starting at position 3190 of SEQ ID NO: 1242761
uaccuucuucuagguggaa

SEQ ID NO: 1370829 - RNA, 19 nt, Artificial Sequence
  Description of Artificial Sequence: Synthetic oligonucleotide
  Antisense strand to SEQ ID NO: 1370828
uuccaccuagaagaaggua

SEQ ID NO: 1370830 - RNA, 19 nt, Artificial Sequence
  Description of Artificial Sequence: Synthetic oligonucleotide
  Sense strand starting at position 3191 of SEQ ID NO: 1242761
accuucuucuagguggaaa

SEQ ID NO: 1370831 - RNA, 19 nt, Artificial Sequence
  Description of Artificial Sequence: Synthetic oligonucleotide
  Antisense strand to SEQ ID NO: 1370830
uuuccaccuagaagaaggu

SEQ ID NO: 1370832 - RNA, 19 nt, Artificial Sequence
  Description of Artificial Sequence: Synthetic oligonucleotide
  Sense strand starting at position 3192 of SEQ ID NO: 1242761
ccuucuucuagguggaaag

SEQ ID NO: 1370833 - RNA, 19 nt, Artificial Sequence
  Description of Artificial Sequence: Synthetic oligonucleotide
  Antisense strand to SEQ ID NO: 1370832
cuuuccaccuagaagaagg

SEQ ID NO: 1370834 - RNA, 19 nt, Artificial Sequence
  Description of Artificial Sequence: Synthetic oligonucleotide
  Sense strand starting at position 3298 of SEQ ID NO: 1242761
ucagaaugcaguuggaaau

SEQ ID NO: 1370835 - RNA, 19 nt, Artificial Sequence
  Description of Artificial Sequence: Synthetic oligonucleotide
  Antisense strand to SEQ ID NO: 1370834
auuuccaacugcauucuga

SEQ ID NO: 1370836 - RNA, 19 nt, Artificial Sequence
  Description of Artificial Sequence: Synthetic oligonucleotide
  Sense strand starting at position 3697 of SEQ ID NO: 1242761
cgugcagggcucuagaaau

SEQ ID NO: 1370837 - RNA, 19 nt, Artificial Sequence
  Description of Artificial Sequence: Synthetic oligonucleotide
  Antisense strand to SEQ ID NO: 1370836
auuucuagagcccugcacg

SEQ ID NO: 1370838 - RNA, 19 nt, Artificial Sequence
  Description of Artificial Sequence: Synthetic oligonucleotide
  Sense strand starting at position 3735 of SEQ ID NO: 1242761
ggcaucugccaucaaggaa

SEQ ID NO: 1370839 - RNA, 19 nt, Artificial Sequence
  Description of Artificial Sequence: Synthetic oligonucleotide
  Antisense strand to SEQ ID NO: 1370838
uuccuugauggcagaugcc

SEQ ID NO: 1370840 - RNA, 19 nt, Artificial Sequence
  Description of Artificial Sequence: Synthetic oligonucleotide
  Sense strand starting at position 3889 of SEQ ID NO: 1242761
cauuaaugacgccgaaaug

SEQ ID NO: 1370841 - RNA, 19 nt, Artificial Sequence
  Description of Artificial Sequence: Synthetic oligonucleotide
  Antisense strand to SEQ ID NO: 1370840
cauuucggcgucauuaaug

SEQ ID NO: 1370842 - RNA, 19 nt, Artificial Sequence
  Description of Artificial Sequence: Synthetic oligonucleotide
  Sense strand starting at position 3890 of SEQ ID NO: 1242761
auuaaugacgccgaaaugu

SEQ ID NO: 1370843 - RNA, 19 nt, Artificial Sequence
  Description of Artificial Sequence: Synthetic oligonucleotide
  Antisense strand to SEQ ID NO: 1370842
acauuucggcgucauuaau

SEQ ID NO: 1370844 - RNA, 19 nt, Artificial Sequence
  Description of Artificial Sequence: Synthetic oligonucleotide
  Sense strand starting at position 25 of SEQ ID NO: 1242762
uagucaaguucuguuaaug

SEQ ID NO: 1370845 - RNA, 19 nt, Artificial Sequence
  Description of Artificial Sequence: Synthetic oligonucleotide
  Antisense strand to SEQ ID NO: 1370844
cauuaacagaacuugacua

SEQ ID NO: 1370846 - RNA, 19 nt, Artificial Sequence
  Description of Artificial Sequence: Synthetic oligonucleotide
  Sense strand starting at position 37 of SEQ ID NO: 1242762
guuaaugcugcgguguuau

SEQ ID NO: 1370847 - RNA, 19 nt, Artificial Sequence
  Description of Artificial Sequence: Synthetic oligonucleotide
  Antisense strand to SEQ ID NO: 1370846
auaacaccgcagcauuaac

SEQ ID NO: 1370848 - RNA, 19 nt, Artificial Sequence
  Description of Artificial Sequence: Synthetic oligonucleotide
  Sense strand starting at position 76 of SEQ ID NO: 1242762
ugaguaagauccuuaccau

SEQ ID NO: 1370849 - RNA, 19 nt, Artificial Sequence
  Description of Artificial Sequence: Synthetic oligonucleotide
  Antisense strand to SEQ ID NO: 1370848
augguaaggaucuuacuca

SEQ ID NO: 1370850 - RNA, 19 nt, Artificial Sequence
  Description of Artificial Sequence: Synthetic oligonucleotide
  Sense strand starting at position 239 of SEQ ID NO: 1242762
caugauguguggccaccaa

SEQ ID NO: 1370851 - RNA, 19 nt, Artificial Sequence
  Description of Artificial Sequence: Synthetic oligonucleotide
  Antisense strand to SEQ ID NO: 1370850
uugguggccacacaucaug

SEQ ID NO: 1370852 - RNA, 19 nt, Artificial Sequence
  Description of Artificial Sequence: Synthetic oligonucleotide
  Sense strand starting at position 322 of SEQ ID NO: 1242762
uaaugcgucuuccuagaua

SEQ ID NO: 1370853 - RNA, 19 nt, Artificial Sequence
  Description of Artificial Sequence: Synthetic oligonucleotide
  Antisense strand to SEQ ID NO: 1370852
uaucuaggaagacgcauua

SEQ ID NO: 1370854 - RNA, 19 nt, Artificial Sequence
  Description of Artificial Sequence: Synthetic oligonucleotide
  Sense strand starting at position 325 of SEQ ID NO: 1242762
ugcgucuuccuagauauuu

SEQ ID NO: 1370855 - RNA, 19 nt, Artificial Sequence
  Description of Artificial Sequence: Synthetic oligonucleotide
  Antisense strand to SEQ ID NO: 1370854
aaauaucuaggaagacgca

SEQ ID NO: 1370856 - RNA, 19 nt, Artificial Sequence
  Description of Artificial Sequence: Synthetic oligonucleotide
  Sense strand starting at position 377 of SEQ ID NO: 1242762
aggaguaaucucuaaugcu

SEQ ID NO: 1370857 - RNA, 19 nt, Artificial Sequence
  Description of Artificial Sequence: Synthetic oligonucleotide
  Antisense strand to SEQ ID NO: 1370856
agcauuagagauuacuccu

SEQ ID NO: 1370858 - RNA, 19 nt, Artificial Sequence
  Description of Artificial Sequence: Synthetic oligonucleotide
  Sense strand starting at position 690 of SEQ ID NO: 1242762
uagcuaggcuagucuagaa

SEQ ID NO: 1370859 - RNA, 19 nt, Artificial Sequence
  Description of Artificial Sequence: Synthetic oligonucleotide
  Antisense strand to SEQ ID NO: 1370858
uucuagacuagccuagcua

SEQ ID NO: 1370860 - RNA, 19 nt, Artificial Sequence
  Description of Artificial Sequence: Synthetic oligonucleotide
  Sense strand starting at position 714 of SEQ ID NO: 1242762
gaaauuaagugauccgccu

SEQ ID NO: 1370861 - RNA, 19 nt, Artificial Sequence
  Description of Artificial Sequence: Synthetic oligonucleotide
  Antisense strand to SEQ ID NO: 1370860
aggcggaucacuuaauuuc

SEQ ID NO: 1370862 - RNA, 19 nt, Artificial Sequence
  Description of Artificial Sequence: Synthetic oligonucleotide
  Sense strand starting at position 891 of SEQ ID NO: 1242762
ucaggaugucuggaguuca

SEQ ID NO: 1370863 - RNA, 19 nt, Artificial Sequence
  Description of Artificial Sequence: Synthetic oligonucleotide
  Antisense strand to SEQ ID NO: 1370862
ugaacuccagacauccuga

SEQ ID NO: 1370864 - RNA, 19 nt, Artificial Sequence
  Description of Artificial Sequence: Synthetic oligonucleotide
  Sense strand starting at position 951 of SEQ ID NO: 1242762
guaucaccugcccaaguua

SEQ ID NO: 1370865 - RNA, 19 nt, Artificial Sequence
  Description of Artificial Sequence: Synthetic oligonucleotide
  Antisense strand to SEQ ID NO: 1370864
uaacuugggcaggugauac

SEQ ID NO: 1370866 - RNA, 19 nt, Artificial Sequence
  Description of Artificial Sequence: Synthetic oligonucleotide
  Sense strand starting at position 1012 of SEQ ID NO: 1242762
ggcacagaguuguucagau

SEQ ID NO: 1370867 - RNA, 19 nt, Artificial Sequence
  Description of Artificial Sequence: Synthetic oligonucleotide
  Antisense strand to SEQ ID NO: 1370866
aucugaacaacucugugcc

SEQ ID NO: 1370868 - RNA, 19 nt, Artificial Sequence
  Description of Artificial Sequence: Synthetic oligonucleotide
  Sense strand starting at position 1038 of SEQ ID NO: 1242762
augaaaugcgcauaacaca

SEQ ID NO: 1370869 - RNA, 19 nt, Artificial Sequence
  Description of Artificial Sequence: Synthetic oligonucleotide
  Antisense strand to SEQ ID NO: 1370868
uguguuaugcgcauuucau

SEQ ID NO: 1370870 - RNA, 19 nt, Artificial Sequence
  Description of Artificial Sequence: Synthetic oligonucleotide
  Sense strand starting at position 1089 of SEQ ID NO: 1242762
aaauguuagccgcaaugau

SEQ ID NO: 1370871 - RNA, 19 nt, Artificial Sequence
  Description of Artificial Sequence: Synthetic oligonucleotide
  Antisense strand to SEQ ID NO: 1370870
aucauugcggcuaacauuu

SEQ ID NO: 1370872 - RNA, 19 nt, Artificial Sequence
  Description of Artificial Sequence: Synthetic oligonucleotide
  Sense strand starting at position 1649 of SEQ ID NO: 1242762
uuuccauccucgcuagaaa

SEQ ID NO: 1370873 - RNA, 19 nt, Artificial Sequence
  Description of Artificial Sequence: Synthetic oligonucleotide
  Antisense strand to SEQ ID NO: 1370872
uuucuagcgaggauggaaa

SEQ ID NO: 1370874 - RNA, 19 nt, Artificial Sequence
  Description of Artificial Sequence: Synthetic oligonucleotide
  Sense strand starting at position 1650 of SEQ ID NO: 1242762
uuccauccucgcuagaaau

SEQ ID NO: 1370875 - RNA, 19 nt, Artificial Sequence
  Description of Artificial Sequence: Synthetic oligonucleotide
  Antisense strand to SEQ ID NO: 1370874
auuucuagcgaggauggaa

SEQ ID NO: 1370876 - RNA, 19 nt, Artificial Sequence
  Description of Artificial Sequence: Synthetic oligonucleotide
  Sense strand starting at position 1660 of SEQ ID NO: 1242762
gcuagaaauggccgaagaa

SEQ ID NO: 1370877 - RNA, 19 nt, Artificial Sequence
  Description of Artificial Sequence: Synthetic oligonucleotide
  Antisense strand to SEQ ID NO: 1370876
uucuucggccauuucuagc

SEQ ID NO: 1370878 - RNA, 19 nt, Artificial Sequence
  Description of Artificial Sequence: Synthetic oligonucleotide
  Sense strand starting at position 2096 of SEQ ID NO: 1242762
gcgauaccggcgucuauga

SEQ ID NO: 1370879 - RNA, 19 nt, Artificial Sequence
  Description of Artificial Sequence: Synthetic oligonucleotide
  Antisense strand to SEQ ID NO: 1370878
ucauagacgccgguaucgc

SEQ ID NO: 1370880 - RNA, 19 nt, Artificial Sequence
  Description of Artificial Sequence: Synthetic oligonucleotide
  Sense strand starting at position 2132 of SEQ ID NO: 1242762
gcuucugggcgucuguuua

SEQ ID NO: 1370881 - RNA, 19 nt, Artificial Sequence
  Description of Artificial Sequence: Synthetic oligonucleotide
  Antisense strand to SEQ ID NO: 1370880
uaaacagacgcccagaagc

SEQ ID NO: 1370882 - RNA, 19 nt, Artificial Sequence
  Description of Artificial Sequence: Synthetic oligonucleotide
  Sense strand starting at position 2194 of SEQ ID NO: 1242762
ccuacuacgugcuugauau

SEQ ID NO: 1370883 - RNA, 19 nt, Artificial Sequence
  Description of Artificial Sequence: Synthetic oligonucleotide
  Antisense strand to SEQ ID NO: 1370882
auaucaagcacguaguagg

SEQ ID NO: 1370884 - RNA, 19 nt, Artificial Sequence
  Description of Artificial Sequence: Synthetic oligonucleotide
  Sense strand starting at position 2214 of SEQ ID NO: 1242762
gcgcuaggcgcuuuccaua

SEQ ID NO: 1370885 - RNA, 19 nt, Artificial Sequence
  Description of Artificial Sequence: Synthetic oligonucleotide
  Antisense strand to SEQ ID NO: 1370884
uauggaaagcgccuagcgc

SEQ ID NO: 1370886 - RNA, 19 nt, Artificial Sequence
  Description of Artificial Sequence: Synthetic oligonucleotide
  Sense strand starting at position 2257 of SEQ ID NO: 1242762
uaaagaaugcacgaugcuu

SEQ ID NO: 1370887 - RNA, 19 nt, Artificial Sequence
  Description of Artificial Sequence: Synthetic oligonucleotide
  Antisense strand to SEQ ID NO: 1370886
aagcaucgugcauucuuua

SEQ ID NO: 1370888 - RNA, 19 nt, Artificial Sequence
  Description of Artificial Sequence: Synthetic oligonucleotide
  Sense strand starting at position 2828 of SEQ ID NO: 1242762
ggccuccacgugugaaaug

SEQ ID NO: 1370889 - RNA, 19 nt, Artificial Sequence
  Description of Artificial Sequence: Synthetic oligonucleotide
  Antisense strand to SEQ ID NO: 1370888
cauuucacacguggaggcc

SEQ ID NO: 1370890 - RNA, 19 nt, Artificial Sequence
  Description of Artificial Sequence: Synthetic oligonucleotide
  Sense strand starting at position 2930 of SEQ ID NO: 1242762
aagcgauugguuggcauca

SEQ ID NO: 1370891 - RNA, 19 nt, Artificial Sequence
  Description of Artificial Sequence: Synthetic oligonucleotide
  Antisense strand to SEQ ID NO: 1370890
ugaugccaaccaaucgcuu

SEQ ID NO: 1370892 - RNA, 19 nt, Artificial Sequence
  Description of Artificial Sequence: Synthetic oligonucleotide
  Sense strand starting at position 2935 of SEQ ID NO: 1242762
auugguuggcaucagguua

SEQ ID NO: 1370893 - RNA, 19 nt, Artificial Sequence
  Description of Artificial Sequence: Synthetic oligonucleotide
  Antisense strand to SEQ ID NO: 1370892
uaaccugaugccaaccaau

SEQ ID NO: 1370894 - RNA, 19 nt, Artificial Sequence
  Description of Artificial Sequence: Synthetic oligonucleotide
  Sense strand starting at position 3027 of SEQ ID NO: 1242762
guugguugcagugaaucuu

SEQ ID NO: 1370895 - RNA, 19 nt, Artificial Sequence
  Description of Artificial Sequence: Synthetic oligonucleotide
  Antisense strand to SEQ ID NO: 1370894
aagauucacugcaaccaac

SEQ ID NO: 1370896 - RNA, 19 nt, Artificial Sequence
  Description of Artificial Sequence: Synthetic oligonucleotide
  Sense strand starting at position 3072 of SEQ ID NO: 1242762
cuaaguucgcauugauuac

SEQ ID NO: 1370897 - RNA, 19 nt, Artificial Sequence
  Description of Artificial Sequence: Synthetic oligonucleotide
  Antisense strand to SEQ ID NO: 1370896
guaaucaaugcgaacuuag

SEQ ID NO: 1370898 - RNA, 19 nt, Artificial Sequence
  Description of Artificial Sequence: Synthetic oligonucleotide
  Sense strand starting at position 3185 of SEQ ID NO: 1242762
guugcuucacguguuauua

SEQ ID NO: 1370899 - RNA, 19 nt, Artificial Sequence
  Description of Artificial Sequence: Synthetic oligonucleotide
  Antisense strand to SEQ ID NO: 1370898
uaauaacacgugaagcaac

SEQ ID NO: 1370900 - RNA, 19 nt, Artificial Sequence
  Description of Artificial Sequence: Synthetic oligonucleotide
  Sense strand starting at position 3250 of SEQ ID NO: 1242762
acacauaucugauaaagag

SEQ ID NO: 1370901 - RNA, 19 nt, Artificial Sequence
  Description of Artificial Sequence: Synthetic oligonucleotide
  Antisense strand to SEQ ID NO: 1370900
cucuuuaucagauaugugu

SEQ ID NO: 1370902 - RNA, 19 nt, Artificial Sequence
  Description of Artificial Sequence: Synthetic oligonucleotide
  Sense strand starting at position 3258 of SEQ ID NO: 1242762
cugauaaagagacguguau

SEQ ID NO: 1370903 - RNA, 19 nt, Artificial Sequence
  Description of Artificial Sequence: Synthetic oligonucleotide
  Antisense strand to SEQ ID NO: 1370902
auacacgucucuuuaucag

SEQ ID NO: 1370904 - RNA, 19 nt, Artificial Sequence
  Description of Artificial Sequence: Synthetic oligonucleotide
  Sense strand starting at position 3271 of SEQ ID NO: 1242762
guguauccagaauguauca

SEQ ID NO: 1370905 - RNA, 19 nt, Artificial Sequence
  Description of Artificial Sequence: Synthetic oligonucleotide
  Antisense strand to SEQ ID NO: 1370904
ugauacauucuggauacac

SEQ ID NO: 1370906 - RNA, 19 nt, Artificial Sequence
  Description of Artificial Sequence: Synthetic oligonucleotide
  Sense strand starting at position 3369 of SEQ ID NO: 1242762
agauauauggauggcuaau

SEQ ID NO: 1370907 - RNA, 19 nt, Artificial Sequence
  Description of Artificial Sequence: Synthetic oligonucleotide
  Antisense strand to SEQ ID NO: 1370906
auuagccauccauauaucu

SEQ ID NO: 1370908 - RNA, 19 nt, Artificial Sequence
  Description of Artificial Sequence: Synthetic oligonucleotide
  Sense strand starting at position 3371 of SEQ ID NO: 1242762
auauauggauggcuaauau

SEQ ID NO: 1370909 - RNA, 19 nt, Artificial Sequence
  Description of Artificial Sequence: Synthetic oligonucleotide
  Antisense strand to SEQ ID NO: 1370908
auauuagccauccauauau

SEQ ID NO: 1370910 - RNA, 19 nt, Artificial Sequence
  Description of Artificial Sequence: Synthetic oligonucleotide
  Sense strand starting at position 3398 of SEQ ID NO: 1242762
agagaugaucaaggcuauu

SEQ ID NO: 1370911 - RNA, 19 nt, Artificial Sequence
  Description of Artificial Sequence: Synthetic oligonucleotide
  Antisense strand to SEQ ID NO: 1370910
aauagccuugaucaucucu

SEQ ID NO: 1370912 - RNA, 19 nt, Artificial Sequence
  Description of Artificial Sequence: Synthetic oligonucleotide
  Sense strand starting at position 3446 of SEQ ID NO: 1242762
gagauaucacuaugaaguu

SEQ ID NO: 1370913 - RNA, 19 nt, Artificial Sequence
  Description of Artificial Sequence: Synthetic oligonucleotide
  Antisense strand to SEQ ID NO: 1370912
aacuucauagugauaucuc

SEQ ID NO: 1370914 - RNA, 19 nt, Artificial Sequence
  Description of Artificial Sequence: Synthetic oligonucleotide
  Sense strand starting at position 3447 of SEQ ID NO: 1242762
agauaucacuaugaaguua

SEQ ID NO: 1370915 - RNA, 19 nt, Artificial Sequence
  Description of Artificial Sequence: Synthetic oligonucleotide
  Antisense strand to SEQ ID NO: 1370914
uaacuucauagugauaucu

SEQ ID NO: 1370916 - RNA, 19 nt, Artificial Sequence
  Description of Artificial Sequence: Synthetic oligonucleotide
  Sense strand starting at position 3568 of SEQ ID NO: 1242762
aaaggauguugaucaacuu

SEQ ID NO: 1370917 - RNA, 19 nt, Artificial Sequence
  Description of Artificial Sequence: Synthetic oligonucleotide
  Antisense strand to SEQ ID NO: 1370916
aaguugaucaacauccuuu

SEQ ID NO: 1370918 - RNA, 19 nt, Artificial Sequence
  Description of Artificial Sequence: Synthetic oligonucleotide
  Sense strand starting at position 3575 of SEQ ID NO: 1242762
guugaucaacuugaacuuu

SEQ ID NO: 1370919 - RNA, 19 nt, Artificial Sequence
  Description of Artificial Sequence: Synthetic oligonucleotide
  Antisense strand to SEQ ID NO: 1370918
aaaguucaaguugaucaac

SEQ ID NO: 1370920 - RNA, 19 nt, Artificial Sequence
  Description of Artificial Sequence: Synthetic oligonucleotide
  Sense strand starting at position 3809 of SEQ ID NO: 1242762
gccugcauuucccugauga

SEQ ID NO: 1370921 - RNA, 19 nt, Artificial Sequence
  Description of Artificial Sequence: Synthetic oligonucleotide
  Antisense strand to SEQ ID NO: 1370920
ucaucagggaaaugcaggc

SEQ ID NO: 1370922 - RNA, 19 nt, Artificial Sequence
  Description of Artificial Sequence: Synthetic oligonucleotide
  Sense strand starting at position 3964 of SEQ ID NO: 1242762
auauauucugccuaugaga

SEQ ID NO: 1370923 - RNA, 19 nt, Artificial Sequence
  Description of Artificial Sequence: Synthetic oligonucleotide
  Antisense strand to SEQ ID NO: 1370922
ucucauaggcagaauauau

SEQ ID NO: 1370924 - RNA, 19 nt, Artificial Sequence
  Description of Artificial Sequence: Synthetic oligonucleotide
  Sense strand starting at position 215 of SEQ ID NO: 1242763
agggcauagcugggagaaa

SEQ ID NO: 1370925 - RNA, 19 nt, Artificial Sequence
  Description of Artificial Sequence: Synthetic oligonucleotide
  Antisense strand to SEQ ID NO: 1370924
uuucucccagcuaugcccu

SEQ ID NO: 1370926 - RNA, 19 nt, Artificial Sequence
  Description of Artificial Sequence: Synthetic oligonucleotide
  Sense strand starting at position 247 of SEQ ID NO: 1242763
cuacuuggacuuugucaca

SEQ ID NO: 1370927 - RNA, 19 nt, Artificial Sequence
  Description of Artificial Sequence: Synthetic oligonucleotide
  Antisense strand to SEQ ID NO: 1370926
ugugacaaaguccaaguag

SEQ ID NO: 1370928 - RNA, 19 nt, Artificial Sequence
  Description of Artificial Sequence: Synthetic oligonucleotide
  Sense strand starting at position 446 of SEQ ID NO: 1242763
gguucugggcuccacagau

SEQ ID NO: 1370929 - RNA, 19 nt, Artificial Sequence
  Description of Artificial Sequence: Synthetic oligonucleotide
  Antisense strand to SEQ ID NO: 1370928
aucuguggagcccagaacc

SEQ ID NO: 1370930 - RNA, 19 nt, Artificial Sequence
  Description of Artificial Sequence: Synthetic oligonucleotide
  Sense strand starting at position 524 of SEQ ID NO: 1242763
ugcacaggcuucuuucuua

SEQ ID NO: 1370931 - RNA, 19 nt, Artificial Sequence
  Description of Artificial Sequence: Synthetic oligonucleotide
  Antisense strand to SEQ ID NO: 1370930
uaagaaagaagccugugca

SEQ ID NO: 1370932 - RNA, 19 nt, Artificial Sequence
  Description of Artificial Sequence: Synthetic oligonucleotide
  Sense strand starting at position 528 of SEQ ID NO: 1242763
caggcuucuuucuuaggau

SEQ ID NO: 1370933 - RNA, 19 nt, Artificial Sequence
  Description of Artificial Sequence: Synthetic oligonucleotide
  Antisense strand to SEQ ID NO: 1370932
auccuaagaaagaagccug

SEQ ID NO: 1370934 - RNA, 19 nt, Artificial Sequence
  Description of Artificial Sequence: Synthetic oligonucleotide
  Sense strand starting at position 738 of SEQ ID NO: 1242763
cuuccuuaguccuccagga

SEQ ID NO: 1370935 - RNA, 19 nt, Artificial Sequence
  Description of Artificial Sequence: Synthetic oligonucleotide
  Antisense strand to SEQ ID NO: 1370934
uccuggaggacuaaggaag

SEQ ID NO: 1370936 - RNA, 19 nt, Artificial Sequence
  Description of Artificial Sequence: Synthetic oligonucleotide
  Sense strand starting at position 929 of SEQ ID NO: 1242763
uaccaucugugugcugauu

SEQ ID NO: 1370937 - RNA, 19 nt, Artificial Sequence
  Description of Artificial Sequence: Synthetic oligonucleotide
  Antisense strand to SEQ ID NO: 1370936
aaucagcacacagauggua

SEQ ID NO: 1370938 - RNA, 19 nt, Artificial Sequence
  Description of Artificial Sequence: Synthetic oligonucleotide
  Sense strand starting at position 1129 of SEQ ID NO: 1242763
agcagugaugucuaauaua

SEQ ID NO: 1370939 - RNA, 19 nt, Artificial Sequence
  Description of Artificial Sequence: Synthetic oligonucleotide
  Antisense strand to SEQ ID NO: 1370938
uauauuagacaucacugcu

SEQ ID NO: 1370940 - RNA, 19 nt, Artificial Sequence
  Description of Artificial Sequence: Synthetic oligonucleotide
  Sense strand starting at position 1251 of SEQ ID NO: 1242763
agugguucccguagaguac

SEQ ID NO: 1370941 - RNA, 19 nt, Artificial Sequence
  Description of Artificial Sequence: Synthetic oligonucleotide
  Antisense strand to SEQ ID NO: 1370940
guacucuacgggaaccacu

SEQ ID NO: 1370942 - RNA, 19 nt, Artificial Sequence
  Description of Artificial Sequence: Synthetic oligonucleotide
  Sense strand starting at position 1252 of SEQ ID NO: 1242763
gugguucccguagaguaca

SEQ ID NO: 1370943 - RNA, 19 nt, Artificial Sequence
  Description of Artificial Sequence: Synthetic oligonucleotide
  Antisense strand to SEQ ID NO: 1370942
uguacucuacgggaaccac

SEQ ID NO: 1370944 - RNA, 19 nt, Artificial Sequence
  Description of Artificial Sequence: Synthetic oligonucleotide
  Sense strand starting at position 1364 of SEQ ID NO: 1242763
ugccucaucccgugagauc

SEQ ID NO: 1370945 - RNA, 19 nt, Artificial Sequence
  Description of Artificial Sequence: Synthetic oligonucleotide
  Antisense strand to SEQ ID NO: 1370944
gaucucacgggaugaggca

SEQ ID NO: 1370946 - RNA, 19 nt, Artificial Sequence
  Description of Artificial Sequence: Synthetic oligonucleotide
  Sense strand starting at position 1365 of SEQ ID NO: 1242763
gccucaucccgugagaucu

SEQ ID NO: 1370947 - RNA, 19 nt, Artificial Sequence
  Description of Artificial Sequence: Synthetic oligonucleotide
  Antisense strand to SEQ ID NO: 1370946
agaucucacgggaugaggc

SEQ ID NO: 1370948 - RNA, 19 nt, Artificial Sequence
  Description of Artificial Sequence: Synthetic oligonucleotide
  Sense strand starting at position 2271 of SEQ ID NO: 1242763
ggccuugggccucagagua

SEQ ID NO: 1370949 - RNA, 19 nt, Artificial Sequence
  Description of Artificial Sequence: Synthetic oligonucleotide
  Antisense strand to SEQ ID NO: 1370948
uacucugaggcccaaggcc

SEQ ID NO: 1370950 - RNA, 19 nt, Artificial Sequence
  Description of Artificial Sequence: Synthetic oligonucleotide
  Sense strand starting at position 2284 of SEQ ID NO: 1242763
agaguaacggcuuaaccuu

SEQ ID NO: 1370951 - RNA, 19 nt, Artificial Sequence
  Description of Artificial Sequence: Synthetic oligonucleotide
  Antisense strand to SEQ ID NO: 1370950
aagguuaagccguuacucu

SEQ ID NO: 1370952 - RNA, 19 nt, Artificial Sequence
  Description of Artificial Sequence: Synthetic oligonucleotide
  Sense strand starting at position 2462 of SEQ ID NO: 1242763
aacccuuuggacgggaaau

SEQ ID NO: 1370953 - RNA, 19 nt, Artificial Sequence
  Description of Artificial Sequence: Synthetic oligonucleotide
  Antisense strand to SEQ ID NO: 1370952
auuucccguccaaaggguu

SEQ ID NO: 1370954 - RNA, 19 nt, Artificial Sequence
  Description of Artificial Sequence: Synthetic oligonucleotide
  Sense strand starting at position 2463 of SEQ ID NO: 1242763
acccuuuggacgggaaaua

SEQ ID NO: 1370955 - RNA, 19 nt, Artificial Sequence
  Description of Artificial Sequence: Synthetic oligonucleotide
  Antisense strand to SEQ ID NO: 1370954
uauuucccguccaaagggu

SEQ ID NO: 1370956 - RNA, 19 nt, Artificial Sequence
  Description of Artificial Sequence: Synthetic oligonucleotide
  Sense strand starting at position 2561 of SEQ ID NO: 1242763
gccagagggucugucaauc

SEQ ID NO: 1370957 - RNA, 19 nt, Artificial Sequence
  Description of Artificial Sequence: Synthetic oligonucleotide
  Antisense strand to SEQ ID NO: 1370956
gauugacagacccucuggc

SEQ ID NO: 1370958 - RNA, 19 nt, Artificial Sequence
  Description of Artificial Sequence: Synthetic oligonucleotide
  Sense strand starting at position 2882 of SEQ ID NO: 1242763
aaguguuuggcuuacagga

SEQ ID NO: 1370959 - RNA, 19 nt, Artificial Sequence
  Description of Artificial Sequence: Synthetic oligonucleotide
  Antisense strand to SEQ ID NO: 1370958
uccuguaagccaaacacuu

SEQ ID NO: 1370960 - RNA, 19 nt, Artificial Sequence
  Description of Artificial Sequence: Synthetic oligonucleotide
  Sense strand starting at position 2991 of SEQ ID NO: 1242763
uggaucucugcuggaaaca

SEQ ID NO: 1370961 - RNA, 19 nt, Artificial Sequence
  Description of Artificial Sequence: Synthetic oligonucleotide
  Antisense strand to SEQ ID NO: 1370960
uguuuccagcagagaucca

SEQ ID NO: 1370962 - RNA, 19 nt, Artificial Sequence
  Description of Artificial Sequence: Synthetic oligonucleotide
  Sense strand starting at position 3212 of SEQ ID NO: 1242763
cuugaaugcuaccugacaa

SEQ ID NO: 1370963 - RNA, 19 nt, Artificial Sequence
  Description of Artificial Sequence: Synthetic oligonucleotide
  Antisense strand to SEQ ID NO: 1370962
uugucagguagcauucaag

SEQ ID NO: 1370964 - RNA, 19 nt, Artificial Sequence
  Description of Artificial Sequence: Synthetic oligonucleotide
  Sense strand starting at position 3249 of SEQ ID NO: 1242763
auaguugaauuaguggauu

SEQ ID NO: 1370965 - RNA, 19 nt, Artificial Sequence
  Description of Artificial Sequence: Synthetic oligonucleotide
  Antisense strand to SEQ ID NO: 1370964
aauccacuaauucaacuau

SEQ ID NO: 1370966 - RNA, 19 nt, Artificial Sequence
  Description of Artificial Sequence: Synthetic oligonucleotide
  Sense strand starting at position 3251 of SEQ ID NO: 1242763
aguugaauuaguggauugu

SEQ ID NO: 1370967 - RNA, 19 nt, Artificial Sequence
  Description of Artificial Sequence: Synthetic oligonucleotide
  Antisense strand to SEQ ID NO: 1370966
acaauccacuaauucaacu

SEQ ID NO: 1370968 - RNA, 19 nt, Artificial Sequence
  Description of Artificial Sequence: Synthetic oligonucleotide
  Sense strand starting at position 3255 of SEQ ID NO: 1242763
gaauuaguggauugugacu

SEQ ID NO: 1370969 - RNA, 19 nt, Artificial Sequence
  Description of Artificial Sequence: Synthetic oligonucleotide
  Antisense strand to SEQ ID NO: 1370968
agucacaauccacuaauuc

SEQ ID NO: 1370970 - RNA, 19 nt, Artificial Sequence
  Description of Artificial Sequence: Synthetic oligonucleotide
  Sense strand starting at position 3266 of SEQ ID NO: 1242763
uugugacuuugacuuuauc

SEQ ID NO: 1370971 - RNA, 19 nt, Artificial Sequence
  Description of Artificial Sequence: Synthetic oligonucleotide
  Antisense strand to SEQ ID NO: 1370970
gauaaagucaaagucacaa

SEQ ID NO: 1370972 - RNA, 19 nt, Artificial Sequence
  Description of Artificial Sequence: Synthetic oligonucleotide
  Sense strand starting at position 3351 of SEQ ID NO: 1242763
guagcagacuccuuccacu

SEQ ID NO: 1370973 - RNA, 19 nt, Artificial Sequence
  Description of Artificial Sequence: Synthetic oligonucleotide
  Antisense strand to SEQ ID NO: 1370972
aguggaaggagucugcuac

SEQ ID NO: 1370974 - RNA, 19 nt, Artificial Sequence
  Description of Artificial Sequence: Synthetic oligonucleotide
  Sense strand starting at position 3638 of SEQ ID NO: 1242763
aggcccuuuccauguaaug

SEQ ID NO: 1370975 - RNA, 19 nt, Artificial Sequence
  Description of Artificial Sequence: Synthetic oligonucleotide
  Antisense strand to SEQ ID NO: 1370974
cauuacauggaaagggccu

SEQ ID NO: 1370976 - RNA, 19 nt, Artificial Sequence
  Description of Artificial Sequence: Synthetic oligonucleotide
  Sense strand starting at position 3647 of SEQ ID NO: 1242763
ccauguaaugucuaaacua

SEQ ID NO: 1370977 - RNA, 19 nt, Artificial Sequence
  Description of Artificial Sequence: Synthetic oligonucleotide
  Antisense strand to SEQ ID NO: 1370976
uaguuuagacauuacaugg

SEQ ID NO: 1370978 - RNA, 19 nt, Artificial Sequence
  Description of Artificial Sequence: Synthetic oligonucleotide
  Sense strand starting at position 3670 of SEQ ID NO: 1242763
ccauguaggugaguugaaa

SEQ ID NO: 1370979 - RNA, 19 nt, Artificial Sequence
  Description of Artificial Sequence: Synthetic oligonucleotide
  Antisense strand to SEQ ID NO: 1370978
uuucaacucaccuacaugg

SEQ ID NO: 1370980 - RNA, 19 nt, Artificial Sequence
  Description of Artificial Sequence: Synthetic oligonucleotide
  Sense strand starting at position 3694 of SEQ ID NO: 1242763
ucugcugacaacugggaua

SEQ ID NO: 1370981 - RNA, 19 nt, Artificial Sequence
  Description of Artificial Sequence: Synthetic oligonucleotide
  Antisense strand to SEQ ID NO: 1370980
uaucccaguugucagcaga

SEQ ID NO: 1370982 - RNA, 19 nt, Artificial Sequence
  Description of Artificial Sequence: Synthetic oligonucleotide
  Sense strand starting at position 3696 of SEQ ID NO: 1242763
ugcugacaacugggauaua

SEQ ID NO: 1370983 - RNA, 19 nt, Artificial Sequence
  Description of Artificial Sequence: Synthetic oligonucleotide
  Antisense strand to SEQ ID NO: 1370982
uauaucccaguugucagca

SEQ ID NO: 1370984 - RNA, 19 nt, Artificial Sequence
  Description of Artificial Sequence: Synthetic oligonucleotide
  Sense strand starting at position 3697 of SEQ ID NO: 1242763
gcugacaacugggauauaa

SEQ ID NO: 1370985 - RNA, 19 nt, Artificial Sequence
  Description of Artificial Sequence: Synthetic oligonucleotide
  Antisense strand to SEQ ID NO: 1370984
uuauaucccaguugucagc

SEQ ID NO: 1370986 - RNA, 19 nt, Artificial Sequence
  Description of Artificial Sequence: Synthetic oligonucleotide
  Sense strand starting at position 3740 of SEQ ID NO: 1242763
ugacucaaacauugugagu

SEQ ID NO: 1370987 - RNA, 19 nt, Artificial Sequence
  Description of Artificial Sequence: Synthetic oligonucleotide
  Antisense strand to SEQ ID NO: 1370986
acucacaauguuugaguca

SEQ ID NO: 1370988 - RNA, 19 nt, Artificial Sequence
  Description of Artificial Sequence: Synthetic oligonucleotide
  Sense strand starting at position 3746 of SEQ ID NO: 1242763
aaacauugugagugguugu

SEQ ID NO: 1370989 - RNA, 19 nt, Artificial Sequence
  Description of Artificial Sequence: Synthetic oligonucleotide
  Antisense strand to SEQ ID NO: 1370988
acaaccacucacaauguuu

SEQ ID NO: 1370990 - RNA, 19 nt, Artificial Sequence
  Description of Artificial Sequence: Synthetic oligonucleotide
  Sense strand starting at position 3747 of SEQ ID NO: 1242763
aacauugugagugguugua

SEQ ID NO: 1370991 - RNA, 19 nt, Artificial Sequence
  Description of Artificial Sequence: Synthetic oligonucleotide
  Antisense strand to SEQ ID NO: 1370990
uacaaccacucacaauguu

SEQ ID NO: 1370992 - RNA, 19 nt, Artificial Sequence
  Description of Artificial Sequence: Synthetic oligonucleotide
  Sense strand starting at position 3749 of SEQ ID NO: 1242763
cauugugagugguuguaua

SEQ ID NO: 1370993 - RNA, 19 nt, Artificial Sequence
  Description of Artificial Sequence: Synthetic oligonucleotide
  Antisense strand to SEQ ID NO: 1370992
uauacaaccacucacaaug

SEQ ID NO: 1370994 - RNA, 19 nt, Artificial Sequence
  Description of Artificial Sequence: Synthetic oligonucleotide
  Sense strand starting at position 3759 of SEQ ID NO: 1242763
gguuguauaaacugggaca

SEQ ID NO: 1370995 - RNA, 19 nt, Artificial Sequence
  Description of Artificial Sequence: Synthetic oligonucleotide
  Antisense strand to SEQ ID NO: 1370994
ugucccaguuuauacaacc

SEQ ID NO: 1370996 - RNA, 19 nt, Artificial Sequence
  Description of Artificial Sequence: Synthetic oligonucleotide
  Sense strand starting at position 3760 of SEQ ID NO: 1242763
guuguauaaacugggacaa

SEQ ID NO: 1370997 - RNA, 19 nt, Artificial Sequence
  Description of Artificial Sequence: Synthetic oligonucleotide
  Antisense strand to SEQ ID NO: 1370996
uugucccaguuuauacaac

SEQ ID NO: 1370998 - RNA, 19 nt, Artificial Sequence
  Description of Artificial Sequence: Synthetic oligonucleotide
  Sense strand starting at position 3761 of SEQ ID NO: 1242763
uuguauaaacugggacaau

SEQ ID NO: 1370999 - RNA, 19 nt, Artificial Sequence
  Description of Artificial Sequence: Synthetic oligonucleotide
  Antisense strand to SEQ ID NO: 1370998
auugucccaguuuauacaa

SEQ ID NO: 1371000 - RNA, 19 nt, Artificial Sequence
  Description of Artificial Sequence: Synthetic oligonucleotide
  Sense strand starting at position 3773 of SEQ ID NO: 1242763
ggacaaucuugauggagag

SEQ ID NO: 1371001 - RNA, 19 nt, Artificial Sequence
  Description of Artificial Sequence: Synthetic oligonucleotide
  Antisense strand to SEQ ID NO: 1371000
cucuccaucaagauugucc

SEQ ID NO: 1371002 - RNA, 19 nt, Artificial Sequence
  Description of Artificial Sequence: Synthetic oligonucleotide
  Sense strand starting at position 3894 of SEQ ID NO: 1242763
augagauguacagguuauu

SEQ ID NO: 1371003 - RNA, 19 nt, Artificial Sequence
  Description of Artificial Sequence: Synthetic oligonucleotide
  Antisense strand to SEQ ID NO: 1371002
aauaaccuguacaucucau

SEQ ID NO: 1371004 - RNA, 19 nt, Artificial Sequence
  Description of Artificial Sequence: Synthetic oligonucleotide
  Sense strand starting at position 117 of SEQ ID NO: 1242764
aguuguaauuucuaaugcu

SEQ ID NO: 1371005 - RNA, 19 nt, Artificial Sequence
  Description of Artificial Sequence: Synthetic oligonucleotide
  Antisense strand to SEQ ID NO: 1371004
agcauuagaaauuacaacu

SEQ ID NO: 1371006 - RNA, 19 nt, Artificial Sequence
  Description of Artificial Sequence: Synthetic oligonucleotide
  Sense strand starting at position 174 of SEQ ID NO: 1242764
uugugcagagucugaagaa

SEQ ID NO: 1371007 - RNA, 19 nt, Artificial Sequence
  Description of Artificial Sequence: Synthetic oligonucleotide
  Antisense strand to SEQ ID NO: 1371006
uucuucagacucugcacaa

SEQ ID NO: 1371008 - RNA, 19 nt, Artificial Sequence
  Description of Artificial Sequence: Synthetic oligonucleotide
  Sense strand starting at position 186 of SEQ ID NO: 1242764
ugaagaaacuguucuccag

SEQ ID NO: 1371009 - RNA, 19 nt, Artificial Sequence
  Description of Artificial Sequence: Synthetic oligonucleotide
  Antisense strand to SEQ ID NO: 1371008
cuggagaacaguuucuuca

SEQ ID NO: 1371010 - RNA, 19 nt, Artificial Sequence
  Description of Artificial Sequence: Synthetic oligonucleotide
  Sense strand starting at position 574 of SEQ ID NO: 1242764
acauuucggcccugguauu

SEQ ID NO: 1371011 - RNA, 19 nt, Artificial Sequence
  Description of Artificial Sequence: Synthetic oligonucleotide
  Antisense strand to SEQ ID NO: 1371010
aauaccagggccgaaaugu

SEQ ID NO: 1371012 - RNA, 19 nt, Artificial Sequence
  Description of Artificial Sequence: Synthetic oligonucleotide
  Sense strand starting at position 575 of SEQ ID NO: 1242764
cauuucggcccugguauua

SEQ ID NO: 1371013 - RNA, 19 nt, Artificial Sequence
  Description of Artificial Sequence: Synthetic oligonucleotide
  Antisense strand to SEQ ID NO: 1371012
uaauaccagggccgaaaug

SEQ ID NO: 1371014 - RNA, 19 nt, Artificial Sequence
  Description of Artificial Sequence: Synthetic oligonucleotide
  Sense strand starting at position 617 of SEQ ID NO: 1242764
agcuaugagccauacugca

SEQ ID NO: 1371015 - RNA, 19 nt, Artificial Sequence
  Description of Artificial Sequence: Synthetic oligonucleotide
  Antisense strand to SEQ ID NO: 1371014
ugcaguauggcucauagcu

SEQ ID NO: 1371016 - RNA, 19 nt, Artificial Sequence
  Description of Artificial Sequence: Synthetic oligonucleotide
  Sense strand starting at position 699 of SEQ ID NO: 1242764
guucuaaaccgauaccacu

SEQ ID NO: 1371017 - RNA, 19 nt, Artificial Sequence
  Description of Artificial Sequence: Synthetic oligonucleotide
  Antisense strand to SEQ ID NO: 1371016
agugguaucgguuuagaac

SEQ ID NO: 1371018 - RNA, 19 nt, Artificial Sequence
  Description of Artificial Sequence: Synthetic oligonucleotide
  Sense strand starting at position 799 of SEQ ID NO: 1242764
gggcuuaacuacucugacu

SEQ ID NO: 1371019 - RNA, 19 nt, Artificial Sequence
  Description of Artificial Sequence: Synthetic oligonucleotide
  Antisense strand to SEQ ID NO: 1371018
agucagaguaguuaagccc

SEQ ID NO: 1371020 - RNA, 19 nt, Artificial Sequence
  Description of Artificial Sequence: Synthetic oligonucleotide
  Sense strand starting at position 812 of SEQ ID NO: 1242764
cugacuuccaccgaagagu

SEQ ID NO: 1371021 - RNA, 19 nt, Artificial Sequence
  Description of Artificial Sequence: Synthetic oligonucleotide
  Antisense strand to SEQ ID NO: 1371020
acucuucgguggaagucag

SEQ ID NO: 1371022 - RNA, 19 nt, Artificial Sequence
  Description of Artificial Sequence: Synthetic oligonucleotide
  Sense strand starting at position 825 of SEQ ID NO: 1242764
aagaguuucucagagaaug

SEQ ID NO: 1371023 - RNA, 19 nt, Artificial Sequence
  Description of Artificial Sequence: Synthetic oligonucleotide
  Antisense strand to SEQ ID NO: 1371022
cauucucugagaaacucuu

SEQ ID NO: 1371024 - RNA, 19 nt, Artificial Sequence
  Description of Artificial Sequence: Synthetic oligonucleotide
  Sense strand starting at position 850 of SEQ ID NO: 1242764
cgcagcuuucccugaauaa

SEQ ID NO: 1371025 - RNA, 19 nt, Artificial Sequence
  Description of Artificial Sequence: Synthetic oligonucleotide
  Antisense strand to SEQ ID NO: 1371024
uuauucagggaaagcugcg

SEQ ID NO: 1371026 - RNA, 19 nt, Artificial Sequence
  Description of Artificial Sequence: Synthetic oligonucleotide
  Sense strand starting at position 851 of SEQ ID NO: 1242764
gcagcuuucccugaauaaa

SEQ ID NO: 1371027 - RNA, 19 nt, Artificial Sequence
  Description of Artificial Sequence: Synthetic oligonucleotide
  Antisense strand to SEQ ID NO: 1371026
uuuauucagggaaagcugc

SEQ ID NO: 1371028 - RNA, 19 nt, Artificial Sequence
  Description of Artificial Sequence: Synthetic oligonucleotide
  Sense strand starting at position 895 of SEQ ID NO: 1242764
agcacucugccagaaucau

SEQ ID NO: 1371029 - RNA, 19 nt, Artificial Sequence
  Description of Artificial Sequence: Synthetic oligonucleotide
  Antisense strand to SEQ ID NO: 1371028
augauucuggcagagugcu

SEQ ID NO: 1371030 - RNA, 19 nt, Artificial Sequence
  Description of Artificial Sequence: Synthetic oligonucleotide
  Sense strand starting at position 904 of SEQ ID NO: 1242764
ccagaaucaugugaauuuc

SEQ ID NO: 1371031 - RNA, 19 nt, Artificial Sequence
  Description of Artificial Sequence: Synthetic oligonucleotide
  Antisense strand to SEQ ID NO: 1371030
gaaauucacaugauucugg

SEQ ID NO: 1371032 - RNA, 19 nt, Artificial Sequence
  Description of Artificial Sequence: Synthetic oligonucleotide
  Sense strand starting at position 969 of SEQ ID NO: 1242764
gagggagcauucuugccaa

SEQ ID NO: 1371033 - RNA, 19 nt, Artificial Sequence
  Description of Artificial Sequence: Synthetic oligonucleotide
  Antisense strand to SEQ ID NO: 1371032
uuggcaagaaugcucccuc

SEQ ID NO: 1371034 - RNA, 19 nt, Artificial Sequence
  Description of Artificial Sequence: Synthetic oligonucleotide
  Sense strand starting at position 983 of SEQ ID NO: 1242764
gccaaugcacaugguaaau

SEQ ID NO: 1371035 - RNA, 19 nt, Artificial Sequence
  Description of Artificial Sequence: Synthetic oligonucleotide
  Antisense strand to SEQ ID NO: 1371034
auuuaccaugugcauuggc

SEQ ID NO: 1371036 - RNA, 19 nt, Artificial Sequence
  Description of Artificial Sequence: Synthetic oligonucleotide
  Sense strand starting at position 1009 of SEQ ID NO: 1242764
cgauguucgcggaauguca

SEQ ID NO: 1371037 - RNA, 19 nt, Artificial Sequence
  Description of Artificial Sequence: Synthetic oligonucleotide
  Antisense strand to SEQ ID NO: 1371036
ugacauuccgcgaacaucg

SEQ ID NO: 1371038 - RNA, 19 nt, Artificial Sequence
  Description of Artificial Sequence: Synthetic oligonucleotide
  Sense strand starting at position 1177 of SEQ ID NO: 1242764
cuuccaugccuuugagguu

SEQ ID NO: 1371039 - RNA, 19 nt, Artificial Sequence
  Description of Artificial Sequence: Synthetic oligonucleotide
  Antisense strand to SEQ ID NO: 1371038
aaccucaaaggcauggaag

SEQ ID NO: 1371040 - RNA, 19 nt, Artificial Sequence
  Description of Artificial Sequence: Synthetic oligonucleotide
  Sense strand starting at position 1277 of SEQ ID NO: 1242764
auguauuacuuuccuggaa

SEQ ID NO: 1371041 - RNA, 19 nt, Artificial Sequence
  Description of Artificial Sequence: Synthetic oligonucleotide
  Antisense strand to SEQ ID NO: 1371040
uuccaggaaaguaauacau

SEQ ID NO: 1371042 - RNA, 19 nt, Artificial Sequence
  Description of Artificial Sequence: Synthetic oligonucleotide
  Sense strand starting at position 1278 of SEQ ID NO: 1242764
uguauuacuuuccuggaaa

SEQ ID NO: 1371043 - RNA, 19 nt, Artificial Sequence
  Description of Artificial Sequence: Synthetic oligonucleotide
  Antisense strand to SEQ ID NO: 1371042
uuuccaggaaaguaauaca

SEQ ID NO: 1371044 - RNA, 19 nt, Artificial Sequence
  Description of Artificial Sequence: Synthetic oligonucleotide
  Sense strand starting at position 1373 of SEQ ID NO: 1242764
gcagcugagacuugcuuga

SEQ ID NO: 1371045 - RNA, 19 nt, Artificial Sequence
  Description of Artificial Sequence: Synthetic oligonucleotide
  Antisense strand to SEQ ID NO: 1371044
ucaagcaagucucagcugc

SEQ ID NO: 1371046 - RNA, 19 nt, Artificial Sequence
  Description of Artificial Sequence: Synthetic oligonucleotide
  Sense strand starting at position 1375 of SEQ ID NO: 1242764
agcugagacuugcuugaac

SEQ ID NO: 1371047 - RNA, 19 nt, Artificial Sequence
  Description of Artificial Sequence: Synthetic oligonucleotide
  Antisense strand to SEQ ID NO: 1371046
guucaagcaagucucagcu

SEQ ID NO: 1371048 - RNA, 19 nt, Artificial Sequence
  Description of Artificial Sequence: Synthetic oligonucleotide
  Sense strand starting at position 1469 of SEQ ID NO: 1242764
ugucaaacccuguguugag

SEQ ID NO: 1371049 - RNA, 19 nt, Artificial Sequence
  Description of Artificial Sequence: Synthetic oligonucleotide
  Antisense strand to SEQ ID NO: 1371048
cucaacacaggguuugaca

SEQ ID NO: 1371050 - RNA, 19 nt, Artificial Sequence
  Description of Artificial Sequence: Synthetic oligonucleotide
  Sense strand starting at position 2483 of SEQ ID NO: 1242764
cguugugaggcgcaggauu

SEQ ID NO: 1371051 - RNA, 19 nt, Artificial Sequence
  Description of Artificial Sequence: Synthetic oligonucleotide
  Antisense strand to SEQ ID NO: 1371050
aauccugcgccucacaacg

SEQ ID NO: 1371052 - RNA, 19 nt, Artificial Sequence
  Description of Artificial Sequence: Synthetic oligonucleotide
  Sense strand starting at position 2602 of SEQ ID NO: 1242764
gcggguggagccuuucgua

SEQ ID NO: 1371053 - RNA, 19 nt, Artificial Sequence
  Description of Artificial Sequence: Synthetic oligonucleotide
  Antisense strand to SEQ ID NO: 1371052
uacgaaaggcuccacccgc

SEQ ID NO: 1371054 - RNA, 19 nt, Artificial Sequence
  Description of Artificial Sequence: Synthetic oligonucleotide
  Sense strand starting at position 2847 of SEQ ID NO: 1242764
ucaugcguuccacagaucu

SEQ ID NO: 1371055 - RNA, 19 nt, Artificial Sequence
  Description of Artificial Sequence: Synthetic oligonucleotide
  Antisense strand to SEQ ID NO: 1371054
agaucuguggaacgcauga

SEQ ID NO: 1371056 - RNA, 19 nt, Artificial Sequence
  Description of Artificial Sequence: Synthetic oligonucleotide
  Sense strand starting at position 2869 of SEQ ID NO: 1242764
gcaucuacuguaugucaga

SEQ ID NO: 1371057 - RNA, 19 nt, Artificial Sequence
  Description of Artificial Sequence: Synthetic oligonucleotide
  Antisense strand to SEQ ID NO: 1371056
ucugacauacaguagaugc

SEQ ID NO: 1371058 - RNA, 19 nt, Artificial Sequence
  Description of Artificial Sequence: Synthetic oligonucleotide
  Sense strand starting at position 3197 of SEQ ID NO: 1242764
gagacugugucuccgaaac

SEQ ID NO: 1371059 - RNA, 19 nt, Artificial Sequence
  Description of Artificial Sequence: Synthetic oligonucleotide
  Antisense strand to SEQ ID NO: 1371058
guuucggagacacagucuc

SEQ ID NO: 1371060 - RNA, 19 nt, Artificial Sequence
  Description of Artificial Sequence: Synthetic oligonucleotide
  Sense strand starting at position 3272 of SEQ ID NO: 1242764
uccgucuuaauuggugaga

SEQ ID NO: 1371061 - RNA, 19 nt, Artificial Sequence
  Description of Artificial Sequence: Synthetic oligonucleotide
  Antisense strand to SEQ ID NO: 1371060
ucucaccaauuaagacgga

SEQ ID NO: 1371062 - RNA, 19 nt, Artificial Sequence
  Description of Artificial Sequence: Synthetic oligonucleotide
  Sense strand starting at position 3275 of SEQ ID NO: 1242764
gucuuaauuggugagacug

SEQ ID NO: 1371063 - RNA, 19 nt, Artificial Sequence
  Description of Artificial Sequence: Synthetic oligonucleotide
  Antisense strand to SEQ ID NO: 1371062
cagucucaccaauuaagac

SEQ ID NO: 1371064 - RNA, 19 nt, Artificial Sequence
  Description of Artificial Sequence: Synthetic oligonucleotide
  Sense strand starting at position 3329 of SEQ ID NO: 1242764
ugcaaacuuuacccggaau

SEQ ID NO: 1371065 - RNA, 19 nt, Artificial Sequence
  Description of Artificial Sequence: Synthetic oligonucleotide
  Antisense strand to SEQ ID NO: 1371064
auuccggguaaaguuugca

SEQ ID NO: 1371066 - RNA, 19 nt, Artificial Sequence
  Description of Artificial Sequence: Synthetic oligonucleotide
  Sense strand starting at position 3614 of SEQ ID NO: 1242764
agaggugugcgucacgaca

SEQ ID NO: 1371067 - RNA, 19 nt, Artificial Sequence
  Description of Artificial Sequence: Synthetic oligonucleotide
  Antisense strand to SEQ ID NO: 1371066
ugucgugacgcacaccucu

SEQ ID NO: 1371068 - RNA, 19 nt, Artificial Sequence
  Description of Artificial Sequence: Synthetic oligonucleotide
  Sense strand starting at position 3686 of SEQ ID NO: 1242764
gguggucuugaacgacuga

SEQ ID NO: 1371069 - RNA, 19 nt, Artificial Sequence
  Description of Artificial Sequence: Synthetic oligonucleotide
  Antisense strand to SEQ ID NO: 1371068
ucagucguucaagaccacc

SEQ ID NO: 1371070 - RNA, 19 nt, Artificial Sequence
  Description of Artificial Sequence: Synthetic oligonucleotide
  Sense strand starting at position 3766 of SEQ ID NO: 1242764
agguguugauuugauguuu

SEQ ID NO: 1371071 - RNA, 19 nt, Artificial Sequence
  Description of Artificial Sequence: Synthetic oligonucleotide
  Antisense strand to SEQ ID NO: 1371070
aaacaucaaaucaacaccu

SEQ ID NO: 1371072 - RNA, 19 nt, Artificial Sequence
  Description of Artificial Sequence: Synthetic oligonucleotide
  Sense strand starting at position 3863 of SEQ ID NO: 1242764
gacuguucuuggccugauu

SEQ ID NO: 1371073 - RNA, 19 nt, Artificial Sequence
  Description of Artificial Sequence: Synthetic oligonucleotide
  Antisense strand to SEQ ID NO: 1371072
aaucaggccaagaacaguc

SEQ ID NO: 1371074 - RNA, 19 nt, Artificial Sequence
  Description of Artificial Sequence: Synthetic oligonucleotide
  Sense strand starting at position 3866 of SEQ ID NO: 1242764
uguucuuggccugauuaga

SEQ ID NO: 1371075 - RNA, 19 nt, Artificial Sequence
  Description of Artificial Sequence: Synthetic oligonucleotide
  Antisense strand to SEQ ID NO: 1371074
ucuaaucaggccaagaaca

SEQ ID NO: 1371076 - RNA, 19 nt, Artificial Sequence
  Description of Artificial Sequence: Synthetic oligonucleotide
  Sense strand starting at position 3903 of SEQ ID NO: 1242764
gcaguucuggucuaggagu

SEQ ID NO: 1371077 - RNA, 19 nt, Artificial Sequence
  Description of Artificial Sequence: Synthetic oligonucleotide
  Antisense strand to SEQ ID NO: 1371076
acuccuagaccagaacugc

SEQ ID NO: 1371078 - RNA, 19 nt, Artificial Sequence
  Description of Artificial Sequence: Synthetic oligonucleotide
  Sense strand starting at position 3905 of SEQ ID NO: 1242764
aguucuggucuaggaguau

SEQ ID NO: 1371079 - RNA, 19 nt, Artificial Sequence
  Description of Artificial Sequence: Synthetic oligonucleotide
  Antisense strand to SEQ ID NO: 1371078
auacuccuagaccagaacu

SEQ ID NO: 1371080 - RNA, 19 nt, Artificial Sequence
  Description of Artificial Sequence: Synthetic oligonucleotide
  Sense strand starting at position 3914 of SEQ ID NO: 1242764
cuaggaguauagcugugaa

SEQ ID NO: 1371081 - RNA, 19 nt, Artificial Sequence
  Description of Artificial Sequence: Synthetic oligonucleotide
  Antisense strand to SEQ ID NO: 1371080
uucacagcuauacuccuag

SEQ ID NO: 1371082 - RNA, 19 nt, Artificial Sequence
  Description of Artificial Sequence: Synthetic oligonucleotide
  Sense strand starting at position 3917 of SEQ ID NO: 1242764
ggaguauagcugugaauaa

SEQ ID NO: 1371083 - RNA, 19 nt, Artificial Sequence
  Description of Artificial Sequence: Synthetic oligonucleotide
  Antisense strand to SEQ ID NO: 1371082
uuauucacagcuauacucc

SEQ ID NO: 1371084 - RNA, 19 nt, Artificial Sequence
  Description of Artificial Sequence: Synthetic oligonucleotide
  Sense strand starting at position 93 of SEQ ID NO: 1242765
agugacagcuguucucaua

SEQ ID NO: 1371085 - RNA, 19 nt, Artificial Sequence
  Description of Artificial Sequence: Synthetic oligonucleotide
  Antisense strand to SEQ ID NO: 1371084
uaugagaacagcugucacu

SEQ ID NO: 1371086 - RNA, 19 nt, Artificial Sequence
  Description of Artificial Sequence: Synthetic oligonucleotide
  Sense strand starting at position 131 of SEQ ID NO: 1242765
cuaggucugccugagcaga

SEQ ID NO: 1371087 - RNA, 19 nt, Artificial Sequence
  Description of Artificial Sequence: Synthetic oligonucleotide
  Antisense strand to SEQ ID NO: 1371086
ucugcucaggcagaccuag

SEQ ID NO: 1371088 - RNA, 19 nt, Artificial Sequence
  Description of Artificial Sequence: Synthetic oligonucleotide
  Sense strand starting at position 482 of SEQ ID NO: 1242765
ucuugaacuuguccuuuga

SEQ ID NO: 1371089 - RNA, 19 nt, Artificial Sequence
  Description of Artificial Sequence: Synthetic oligonucleotide
  Antisense strand to SEQ ID NO: 1371088
ucaaaggacaaguucaaga

SEQ ID NO: 1371090 - RNA, 19 nt, Artificial Sequence
  Description of Artificial Sequence: Synthetic oligonucleotide
  Sense strand starting at position 529 of SEQ ID NO: 1242765
auguaagacucugcucauu

SEQ ID NO: 1371091 - RNA, 19 nt, Artificial Sequence
  Description of Artificial Sequence: Synthetic oligonucleotide
  Antisense strand to SEQ ID NO: 1371090
aaugagcagagucuuacau

SEQ ID NO: 1371092 - RNA, 19 nt, Artificial Sequence
  Description of Artificial Sequence: Synthetic oligonucleotide
  Sense strand starting at position 681 of SEQ ID NO: 1242765
ggaggagacagcugugaua

SEQ ID NO: 1371093 - RNA, 19 nt, Artificial Sequence
  Description of Artificial Sequence: Synthetic oligonucleotide
  Antisense strand to SEQ ID NO: 1371092
uaucacagcugucuccucc

SEQ ID NO: 1371094 - RNA, 19 nt, Artificial Sequence
  Description of Artificial Sequence: Synthetic oligonucleotide
  Sense strand starting at position 762 of SEQ ID NO: 1242765
ccacuuugcuacuuugaga

SEQ ID NO: 1371095 - RNA, 19 nt, Artificial Sequence
  Description of Artificial Sequence: Synthetic oligonucleotide
  Antisense strand to SEQ ID NO: 1371094
ucucaaaguagcaaagugg

SEQ ID NO: 1371096 - RNA, 19 nt, Artificial Sequence
  Description of Artificial Sequence: Synthetic oligonucleotide
  Sense strand starting at position 775 of SEQ ID NO: 1242765
uugagacaucgucauccau

SEQ ID NO: 1371097 - RNA, 19 nt, Artificial Sequence
  Description of Artificial Sequence: Synthetic oligonucleotide
  Antisense strand to SEQ ID NO: 1371096
auggaugacgaugucucaa

SEQ ID NO: 1371098 - RNA, 19 nt, Artificial Sequence
  Description of Artificial Sequence: Synthetic oligonucleotide
  Sense strand starting at position 777 of SEQ ID NO: 1242765
gagacaucgucauccauuc

SEQ ID NO: 1371099 - RNA, 19 nt, Artificial Sequence
  Description of Artificial Sequence: Synthetic oligonucleotide
  Antisense strand to SEQ ID NO: 1371098
gaauggaugacgaugucuc

SEQ ID NO: 1371100 - RNA, 19 nt, Artificial Sequence
  Description of Artificial Sequence: Synthetic oligonucleotide
  Sense strand starting at position 906 of SEQ ID NO: 1242765
acuugucaggguugagaag

SEQ ID NO: 1371101 - RNA, 19 nt, Artificial Sequence
  Description of Artificial Sequence: Synthetic oligonucleotide
  Antisense strand to SEQ ID NO: 1371100
cuucucaacccugacaagu

SEQ ID NO: 1371102 - RNA, 19 nt, Artificial Sequence
  Description of Artificial Sequence: Synthetic oligonucleotide
  Sense strand starting at position 1039 of SEQ ID NO: 1242765
gcuguauucugagcacaca

SEQ ID NO: 1371103 - RNA, 19 nt, Artificial Sequence
  Description of Artificial Sequence: Synthetic oligonucleotide
  Antisense strand to SEQ ID NO: 1371102
ugugugcucagaauacagc

SEQ ID NO: 1371104 - RNA, 19 nt, Artificial Sequence
  Description of Artificial Sequence: Synthetic oligonucleotide
  Sense strand starting at position 1040 of SEQ ID NO: 1242765
cuguauucugagcacacaa

SEQ ID NO: 1371105 - RNA, 19 nt, Artificial Sequence
  Description of Artificial Sequence: Synthetic oligonucleotide
  Antisense strand to SEQ ID NO: 1371104
uugugugcucagaauacag

SEQ ID NO: 1371106 - RNA, 19 nt, Artificial Sequence
  Description of Artificial Sequence: Synthetic oligonucleotide
  Sense strand starting at position 1151 of SEQ ID NO: 1242765
uguuuacacaugugaugug

SEQ ID NO: 1371107 - RNA, 19 nt, Artificial Sequence
  Description of Artificial Sequence: Synthetic oligonucleotide
  Antisense strand to SEQ ID NO: 1371106
cacaucacauguguaaaca

SEQ ID NO: 1371108 - RNA, 19 nt, Artificial Sequence
  Description of Artificial Sequence: Synthetic oligonucleotide
  Sense strand starting at position 1156 of SEQ ID NO: 1242765
acacaugugauguguguua

SEQ ID NO: 1371109 - RNA, 19 nt, Artificial Sequence
  Description of Artificial Sequence: Synthetic oligonucleotide
  Antisense strand to SEQ ID NO: 1371108
uaacacacaucacaugugu

SEQ ID NO: 1371110 - RNA, 19 nt, Artificial Sequence
  Description of Artificial Sequence: Synthetic oligonucleotide
  Sense strand starting at position 1158 of SEQ ID NO: 1242765
acaugugauguguguuaac

SEQ ID NO: 1371111 - RNA, 19 nt, Artificial Sequence
  Description of Artificial Sequence: Synthetic oligonucleotide
  Antisense strand to SEQ ID NO: 1371110
guuaacacacaucacaugu

SEQ ID NO: 1371112 - RNA, 19 nt, Artificial Sequence
  Description of Artificial Sequence: Synthetic oligonucleotide
  Sense strand starting at position 1168 of SEQ ID NO: 1242765
uguguuaacucacccagca

SEQ ID NO: 1371113 - RNA, 19 nt, Artificial Sequence
  Description of Artificial Sequence: Synthetic oligonucleotide
  Antisense strand to SEQ ID NO: 1371112
ugcugggugaguuaacaca

SEQ ID NO: 1371114 - RNA, 19 nt, Artificial Sequence
  Description of Artificial Sequence: Synthetic oligonucleotide
  Sense strand starting at position 1713 of SEQ ID NO: 1242765
ggucucucagauuagcaga

SEQ ID NO: 1371115 - RNA, 19 nt, Artificial Sequence
  Description of Artificial Sequence: Synthetic oligonucleotide
  Antisense strand to SEQ ID NO: 1371114
ucugcuaaucugagagacc

SEQ ID NO: 1371116 - RNA, 19 nt, Artificial Sequence
  Description of Artificial Sequence: Synthetic oligonucleotide
  Sense strand starting at position 1751 of SEQ ID NO: 1242765
agaagugggucugugaauu

SEQ ID NO: 1371117 - RNA, 19 nt, Artificial Sequence
  Description of Artificial Sequence: Synthetic oligonucleotide
  Antisense strand to SEQ ID NO: 1371116
aauucacagacccacuucu

SEQ ID NO: 1371118 - RNA, 19 nt, Artificial Sequence
  Description of Artificial Sequence: Synthetic oligonucleotide
  Sense strand starting at position 2123 of SEQ ID NO: 1242765
ugagaaacccuaugcuaca

SEQ ID NO: 1371119 - RNA, 19 nt, Artificial Sequence
  Description of Artificial Sequence: Synthetic oligonucleotide
  Antisense strand to SEQ ID NO: 1371118
uguagcauaggguuucuca

SEQ ID NO: 1371120 - RNA, 19 nt, Artificial Sequence
  Description of Artificial Sequence: Synthetic oligonucleotide
  Sense strand starting at position 2180 of SEQ ID NO: 1242765
ccagguacuccacagucau

SEQ ID NO: 1371121 - RNA, 19 nt, Artificial Sequence
  Description of Artificial Sequence: Synthetic oligonucleotide
  Antisense strand to SEQ ID NO: 1371120
augacuguggaguaccugg

SEQ ID NO: 1371122 - RNA, 19 nt, Artificial Sequence
  Description of Artificial Sequence: Synthetic oligonucleotide
  Sense strand starting at position 2354 of SEQ ID NO: 1242765
cgacacuagcucuaugauc

SEQ ID NO: 1371123 - RNA, 19 nt, Artificial Sequence
  Description of Artificial Sequence: Synthetic oligonucleotide
  Antisense strand to SEQ ID NO: 1371122
gaucauagagcuagugucg

SEQ ID NO: 1371124 - RNA, 19 nt, Artificial Sequence
  Description of Artificial Sequence: Synthetic oligonucleotide
  Sense strand starting at position 2366 of SEQ ID NO: 1242765
uaugauccauggcuaguua

SEQ ID NO: 1371125 - RNA, 19 nt, Artificial Sequence
  Description of Artificial Sequence: Synthetic oligonucleotide
  Antisense strand to SEQ ID NO: 1371124
uaacuagccauggaucaua

SEQ ID NO: 1371126 - RNA, 19 nt, Artificial Sequence
  Description of Artificial Sequence: Synthetic oligonucleotide
  Sense strand starting at position 2370 of SEQ ID NO: 1242765
auccauggcuaguuacaua

SEQ ID NO: 1371127 - RNA, 19 nt, Artificial Sequence
  Description of Artificial Sequence: Synthetic oligonucleotide
  Antisense strand to SEQ ID NO: 1371126
uauguaacuagccauggau

SEQ ID NO: 1371128 - RNA, 19 nt, Artificial Sequence
  Description of Artificial Sequence: Synthetic oligonucleotide
  Sense strand starting at position 2411 of SEQ ID NO: 1242765
ucaucuguaaagugcgaua

SEQ ID NO: 1371129 - RNA, 19 nt, Artificial Sequence
  Description of Artificial Sequence: Synthetic oligonucleotide
  Antisense strand to SEQ ID NO: 1371128
uaucgcacuuuacagauga

SEQ ID NO: 1371130 - RNA, 19 nt, Artificial Sequence
  Description of Artificial Sequence: Synthetic oligonucleotide
  Sense strand starting at position 2413 of SEQ ID NO: 1242765
aucuguaaagugcgauacu

SEQ ID NO: 1371131 - RNA, 19 nt, Artificial Sequence
  Description of Artificial Sequence: Synthetic oligonucleotide
  Antisense strand to SEQ ID NO: 1371130
aguaucgcacuuuacagau

SEQ ID NO: 1371132 - RNA, 19 nt, Artificial Sequence
  Description of Artificial Sequence: Synthetic oligonucleotide
  Sense strand starting at position 2491 of SEQ ID NO: 1242765
gcucuugauaaauggcagu

SEQ ID NO: 1371133 - RNA, 19 nt, Artificial Sequence
  Description of Artificial Sequence: Synthetic oligonucleotide
  Antisense strand to SEQ ID NO: 1371132
acugccauuuaucaagagc

SEQ ID NO: 1371134 - RNA, 19 nt, Artificial Sequence
  Description of Artificial Sequence: Synthetic oligonucleotide
  Sense strand starting at position 3105 of SEQ ID NO: 1242765
gaaagacgagucugaaauc

SEQ ID NO: 1371135 - RNA, 19 nt, Artificial Sequence
  Description of Artificial Sequence: Synthetic oligonucleotide
  Antisense strand to SEQ ID NO: 1371134
gauuucagacucgucuuuc

SEQ ID NO: 1371136 - RNA, 19 nt, Artificial Sequence
  Description of Artificial Sequence: Synthetic oligonucleotide
  Sense strand starting at position 3114 of SEQ ID NO: 1242765
gucugaaaucacggcugga

SEQ ID NO: 1371137 - RNA, 19 nt, Artificial Sequence
  Description of Artificial Sequence: Synthetic oligonucleotide
  Antisense strand to SEQ ID NO: 1371136
uccagccgugauuucagac

SEQ ID NO: 1371138 - RNA, 19 nt, Artificial Sequence
  Description of Artificial Sequence: Synthetic oligonucleotide
  Sense strand starting at position 3263 of SEQ ID NO: 1242765
ggguguuaccuuugagcca

SEQ ID NO: 1371139 - RNA, 19 nt, Artificial Sequence
  Description of Artificial Sequence: Synthetic oligonucleotide
  Antisense strand to SEQ ID NO: 1371138
uggcucaaagguaacaccc

SEQ ID NO: 1371140 - RNA, 19 nt, Artificial Sequence
  Description of Artificial Sequence: Synthetic oligonucleotide
  Sense strand starting at position 3616 of SEQ ID NO: 1242765
auguuaggcccucauauuc

SEQ ID NO: 1371141 - RNA, 19 nt, Artificial Sequence
  Description of Artificial Sequence: Synthetic oligonucleotide
  Antisense strand to SEQ ID NO: 1371140
gaauaugagggccuaacau

SEQ ID NO: 1371142 - RNA, 19 nt, Artificial Sequence
  Description of Artificial Sequence: Synthetic oligonucleotide
  Sense strand starting at position 3656 of SEQ ID NO: 1242765
uuauuacuguugguguuua

SEQ ID NO: 1371143 - RNA, 19 nt, Artificial Sequence
  Description of Artificial Sequence: Synthetic oligonucleotide
  Antisense strand to SEQ ID NO: 1371142
uaaacaccaacaguaauaa

SEQ ID NO: 1371144 - RNA, 19 nt, Artificial Sequence
  Description of Artificial Sequence: Synthetic oligonucleotide
  Sense strand starting at position 3660 of SEQ ID NO: 1242765
uacuguugguguuuauauu

SEQ ID NO: 1371145 - RNA, 19 nt, Artificial Sequence
  Description of Artificial Sequence: Synthetic oligonucleotide
  Antisense strand to SEQ ID NO: 1371144
aauauaaacaccaacagua

SEQ ID NO: 1371146 - RNA, 19 nt, Artificial Sequence
  Description of Artificial Sequence: Synthetic oligonucleotide
  Sense strand starting at position 3661 of SEQ ID NO: 1242765
acuguugguguuuauauua

SEQ ID NO: 1371147 - RNA, 19 nt, Artificial Sequence
  Description of Artificial Sequence: Synthetic oligonucleotide
  Antisense strand to SEQ ID NO: 1371146
uaauauaaacaccaacagu

SEQ ID NO: 1371148 - RNA, 19 nt, Artificial Sequence
  Description of Artificial Sequence: Synthetic oligonucleotide
  Sense strand starting at position 3672 of SEQ ID NO: 1242765
uuauauuaacugugaagcu

SEQ ID NO: 1371149 - RNA, 19 nt, Artificial Sequence
  Description of Artificial Sequence: Synthetic oligonucleotide
  Antisense strand to SEQ ID NO: 1371148
agcuucacaguuaauauaa

SEQ ID NO: 1371150 - RNA, 19 nt, Artificial Sequence
  Description of Artificial Sequence: Synthetic oligonucleotide
  Sense strand starting at position 3733 of SEQ ID NO: 1242765
gccacacugccggaagauu

SEQ ID NO: 1371151 - RNA, 19 nt, Artificial Sequence
  Description of Artificial Sequence: Synthetic oligonucleotide
  Antisense strand to SEQ ID NO: 1371150
aaucuuccggcaguguggc

SEQ ID NO: 1371152 - RNA, 19 nt, Artificial Sequence
  Description of Artificial Sequence: Synthetic oligonucleotide
  Sense strand starting at position 3804 of SEQ ID NO: 1242765
ccuugucaucgucaccaua

SEQ ID NO: 1371153 - RNA, 19 nt, Artificial Sequence
  Description of Artificial Sequence: Synthetic oligonucleotide
  Antisense strand to SEQ ID NO: 1371152
uauggugacgaugacaagg

SEQ ID NO: 1371154 - RNA, 19 nt, Artificial Sequence
  Description of Artificial Sequence: Synthetic oligonucleotide
  Sense strand starting at position 3806 of SEQ ID NO: 1242765
uugucaucgucaccauaaa

SEQ ID NO: 1371155 - RNA, 19 nt, Artificial Sequence
  Description of Artificial Sequence: Synthetic oligonucleotide
  Antisense strand to SEQ ID NO: 1371154
uuuauggugacgaugacaa

SEQ ID NO: 1371156 - RNA, 19 nt, Artificial Sequence
  Description of Artificial Sequence: Synthetic oligonucleotide
  Sense strand starting at position 3835 of SEQ ID NO: 1242765
ccuugagucacacgguaca

SEQ ID NO: 1371157 - RNA, 19 nt, Artificial Sequence
  Description of Artificial Sequence: Synthetic oligonucleotide
  Antisense strand to SEQ ID NO: 1371156
uguaccgugugacucaagg

SEQ ID NO: 1371158 - RNA, 19 nt, Artificial Sequence
  Description of Artificial Sequence: Synthetic oligonucleotide
  Sense strand starting at position 3876 of SEQ ID NO: 1242765
gcuuuauauuucguacuuc

SEQ ID NO: 1371159 - RNA, 19 nt, Artificial Sequence
  Description of Artificial Sequence: Synthetic oligonucleotide
  Antisense strand to SEQ ID NO: 1371158
gaaguacgaaauauaaagc

SEQ ID NO: 1371160 - RNA, 19 nt, Artificial Sequence
  Description of Artificial Sequence: Synthetic oligonucleotide
  Sense strand starting at position 3882 of SEQ ID NO: 1242765
uauuucguacuucguuuaa

SEQ ID NO: 1371161 - RNA, 19 nt, Artificial Sequence
  Description of Artificial Sequence: Synthetic oligonucleotide
  Antisense strand to SEQ ID NO: 1371160
uuaaacgaaguacgaaaua

SEQ ID NO: 1371162 - RNA, 19 nt, Artificial Sequence
  Description of Artificial Sequence: Synthetic oligonucleotide
  Sense strand starting at position 3915 of SEQ ID NO: 1242765
ugaggaagugggcgacauu

SEQ ID NO: 1371163 - RNA, 19 nt, Artificial Sequence
  Description of Artificial Sequence: Synthetic oligonucleotide
  Antisense strand to SEQ ID NO: 1371162
aaugucgcccacuuccuca

SEQ ID NO: 1371164 - RNA, 19 nt, Artificial Sequence
  Description of Artificial Sequence: Synthetic oligonucleotide
  Sense strand starting at position 79 of SEQ ID NO: 1242766
gccuccauccauuggaaag

SEQ ID NO: 1371165 - RNA, 19 nt, Artificial Sequence
  Description of Artificial Sequence: Synthetic oligonucleotide
  Antisense strand to SEQ ID NO: 1371164
cuuuccaauggauggaggc

SEQ ID NO: 1371166 - RNA, 19 nt, Artificial Sequence
  Description of Artificial Sequence: Synthetic oligonucleotide
  Sense strand starting at position 196 of SEQ ID NO: 1242766
aaaggagucuuugcagaua

SEQ ID NO: 1371167 - RNA, 19 nt, Artificial Sequence
  Description of Artificial Sequence: Synthetic oligonucleotide
  Antisense strand to SEQ ID NO: 1371166
uaucugcaaagacuccuuu

SEQ ID NO: 1371168 - RNA, 19 nt, Artificial Sequence
  Description of Artificial Sequence: Synthetic oligonucleotide
  Sense strand starting at position 199 of SEQ ID NO: 1242766
ggagucuuugcagauauug

SEQ ID NO: 1371169 - RNA, 19 nt, Artificial Sequence
  Description of Artificial Sequence: Synthetic oligonucleotide
  Antisense strand to SEQ ID NO: 1371168
caauaucugcaaagacucc

SEQ ID NO: 1371170 - RNA, 19 nt, Artificial Sequence
  Description of Artificial Sequence: Synthetic oligonucleotide
  Sense strand starting at position 387 of SEQ ID NO: 1242766
ugugucauggccugugaca

SEQ ID NO: 1371171 - RNA, 19 nt, Artificial Sequence
  Description of Artificial Sequence: Synthetic oligonucleotide
  Antisense strand to SEQ ID NO: 1371170
ugucacaggccaugacaca

SEQ ID NO: 1371172 - RNA, 19 nt, Artificial Sequence
  Description of Artificial Sequence: Synthetic oligonucleotide
  Sense strand starting at position 420 of SEQ ID NO: 1242766
cauggaugccagggaaaug

SEQ ID NO: 1371173 - RNA, 19 nt, Artificial Sequence
  Description of Artificial Sequence: Synthetic oligonucleotide
  Antisense strand to SEQ ID NO: 1371172
cauuucccuggcauccaug

SEQ ID NO: 1371174 - RNA, 19 nt, Artificial Sequence
  Description of Artificial Sequence: Synthetic oligonucleotide
  Sense strand starting at position 451 of SEQ ID NO: 1242766
acacguuugugacaugcca

SEQ ID NO: 1371175 - RNA, 19 nt, Artificial Sequence
  Description of Artificial Sequence: Synthetic oligonucleotide
  Antisense strand to SEQ ID NO: 1371174
uggcaugucacaaacgugu

SEQ ID NO: 1371176 - RNA, 19 nt, Artificial Sequence
  Description of Artificial Sequence: Synthetic oligonucleotide
  Sense strand starting at position 541 of SEQ ID NO: 1242766
ucccacugcgcuuaguaaa

SEQ ID NO: 1371177 - RNA, 19 nt, Artificial Sequence
  Description of Artificial Sequence: Synthetic oligonucleotide
  Antisense strand to SEQ ID NO: 1371176
uuuacuaagcgcaguggga

SEQ ID NO: 1371178 - RNA, 19 nt, Artificial Sequence
  Description of Artificial Sequence: Synthetic oligonucleotide
  Sense strand starting at position 754 of SEQ ID NO: 1242766
agcugucuuucuccacgua

SEQ ID NO: 1371179 - RNA, 19 nt, Artificial Sequence
  Description of Artificial Sequence: Synthetic oligonucleotide
  Antisense strand to SEQ ID NO: 1371178
uacguggagaaagacagcu

SEQ ID NO: 1371180 - RNA, 19 nt, Artificial Sequence
  Description of Artificial Sequence: Synthetic oligonucleotide
  Sense strand starting at position 757 of SEQ ID NO: 1242766
ugucuuucuccacguacga

SEQ ID NO: 1371181 - RNA, 19 nt, Artificial Sequence
  Description of Artificial Sequence: Synthetic oligonucleotide
  Antisense strand to SEQ ID NO: 1371180
ucguacguggagaaagaca

SEQ ID NO: 1371182 - RNA, 19 nt, Artificial Sequence
  Description of Artificial Sequence: Synthetic oligonucleotide
  Sense strand starting at position 956 of SEQ ID NO: 1242766
agcagcuucuaggcuagaa

SEQ ID NO: 1371183 - RNA, 19 nt, Artificial Sequence
  Description of Artificial Sequence: Synthetic oligonucleotide
  Antisense strand to SEQ ID NO: 1371182
uucuagccuagaagcugcu

SEQ ID NO: 1371184 - RNA, 19 nt, Artificial Sequence
  Description of Artificial Sequence: Synthetic oligonucleotide
  Sense strand starting at position 982 of SEQ ID NO: 1242766
accgcuggguccugagaua

SEQ ID NO: 1371185 - RNA, 19 nt, Artificial Sequence
  Description of Artificial Sequence: Synthetic oligonucleotide
  Antisense strand to SEQ ID NO: 1371184
uaucucaggacccagcggu

SEQ ID NO: 1371186 - RNA, 19 nt, Artificial Sequence
  Description of Artificial Sequence: Synthetic oligonucleotide
  Sense strand starting at position 1037 of SEQ ID NO: 1242766
ccucucaaugugcgaauga

SEQ ID NO: 1371187 - RNA, 19 nt, Artificial Sequence
  Description of Artificial Sequence: Synthetic oligonucleotide
  Antisense strand to SEQ ID NO: 1371186
ucauucgcacauugagagg

SEQ ID NO: 1371188 - RNA, 19 nt, Artificial Sequence
  Description of Artificial Sequence: Synthetic oligonucleotide
  Sense strand starting at position 1136 of SEQ ID NO: 1242766
gaaacuggcuucuggaaau

SEQ ID NO: 1371189 - RNA, 19 nt, Artificial Sequence
  Description of Artificial Sequence: Synthetic oligonucleotide
  Antisense strand to SEQ ID NO: 1371188
auuuccagaagccaguuuc

SEQ ID NO: 1371190 - RNA, 19 nt, Artificial Sequence
  Description of Artificial Sequence: Synthetic oligonucleotide
  Sense strand starting at position 1146 of SEQ ID NO: 1242766
ucuggaaauucuuuggguu

SEQ ID NO: 1371191 - RNA, 19 nt, Artificial Sequence
  Description of Artificial Sequence: Synthetic oligonucleotide
  Antisense strand to SEQ ID NO: 1371190
aacccaaagaauuuccaga

SEQ ID NO: 1371192 - RNA, 19 nt, Artificial Sequence
  Description of Artificial Sequence: Synthetic oligonucleotide
  Sense strand starting at position 1147 of SEQ ID NO: 1242766
cuggaaauucuuuggguuu

SEQ ID NO: 1371193 - RNA, 19 nt, Artificial Sequence
  Description of Artificial Sequence: Synthetic oligonucleotide
  Antisense strand to SEQ ID NO: 1371192
aaacccaaagaauuuccag

SEQ ID NO: 1371194 - RNA, 19 nt, Artificial Sequence
  Description of Artificial Sequence: Synthetic oligonucleotide
  Sense strand starting at position 2911 of SEQ ID NO: 1242766
cgccuucccgacugaaagu

SEQ ID NO: 1371195 - RNA, 19 nt, Artificial Sequence
  Description of Artificial Sequence: Synthetic oligonucleotide
  Antisense strand to SEQ ID NO: 1371194
acuuucagucgggaaggcg

SEQ ID NO: 1371196 - RNA, 19 nt, Artificial Sequence
  Description of Artificial Sequence: Synthetic oligonucleotide
  Sense strand starting at position 3042 of SEQ ID NO: 1242766
cucaaaccuucuggagaga

SEQ ID NO: 1371197 - RNA, 19 nt, Artificial Sequence
  Description of Artificial Sequence: Synthetic oligonucleotide
  Antisense strand to SEQ ID NO: 1371196
ucucuccagaagguuugag

SEQ ID NO: 1371198 - RNA, 19 nt, Artificial Sequence
  Description of Artificial Sequence: Synthetic oligonucleotide
  Sense strand starting at position 3103 of SEQ ID NO: 1242766
gacagagccucuucuagga

SEQ ID NO: 1371199 - RNA, 19 nt, Artificial Sequence
  Description of Artificial Sequence: Synthetic oligonucleotide
  Antisense strand to SEQ ID NO: 1371198
uccuagaagaggcucuguc

SEQ ID NO: 1371200 - RNA, 19 nt, Artificial Sequence
  Description of Artificial Sequence: Synthetic oligonucleotide
  Sense strand starting at position 3263 of SEQ ID NO: 1242766
auauucgauucucuuguga

SEQ ID NO: 1371201 - RNA, 19 nt, Artificial Sequence
  Description of Artificial Sequence: Synthetic oligonucleotide
  Antisense strand to SEQ ID NO: 1371200
ucacaagagaaucgaauau

SEQ ID NO: 1371202 - RNA, 19 nt, Artificial Sequence
  Description of Artificial Sequence: Synthetic oligonucleotide
  Sense strand starting at position 3267 of SEQ ID NO: 1242766
ucgauucucuugugaccca

SEQ ID NO: 1371203 - RNA, 19 nt, Artificial Sequence
  Description of Artificial Sequence: Synthetic oligonucleotide
  Antisense strand to SEQ ID NO: 1371202
ugggucacaagagaaucga

SEQ ID NO: 1371204 - RNA, 19 nt, Artificial Sequence
  Description of Artificial Sequence: Synthetic oligonucleotide
  Sense strand starting at position 3272 of SEQ ID NO: 1242766
ucucuugugacccagggua

SEQ ID NO: 1371205 - RNA, 19 nt, Artificial Sequence
  Description of Artificial Sequence: Synthetic oligonucleotide
  Antisense strand to SEQ ID NO: 1371204
uacccugggucacaagaga

SEQ ID NO: 1371206 - RNA, 19 nt, Artificial Sequence
  Description of Artificial Sequence: Synthetic oligonucleotide
  Sense strand starting at position 3402 of SEQ ID NO: 1242766
cgugcuccugcagcuaaua

SEQ ID NO: 1371207 - RNA, 19 nt, Artificial Sequence
  Description of Artificial Sequence: Synthetic oligonucleotide
  Antisense strand to SEQ ID NO: 1371206
uauuagcugcaggagcacg

SEQ ID NO: 1371208 - RNA, 19 nt, Artificial Sequence
  Description of Artificial Sequence: Synthetic oligonucleotide
  Sense strand starting at position 3410 of SEQ ID NO: 1242766
ugcagcuaauaacguuaaa

SEQ ID NO: 1371209 - RNA, 19 nt, Artificial Sequence
  Description of Artificial Sequence: Synthetic oligonucleotide
  Antisense strand to SEQ ID NO: 1371208
uuuaacguuauuagcugca

SEQ ID NO: 1371210 - RNA, 19 nt, Artificial Sequence
  Description of Artificial Sequence: Synthetic oligonucleotide
  Sense strand starting at position 3462 of SEQ ID NO: 1242766
cucuguagugaacacauga

SEQ ID NO: 1371211 - RNA, 19 nt, Artificial Sequence
  Description of Artificial Sequence: Synthetic oligonucleotide
  Antisense strand to SEQ ID NO: 1371210
ucauguguucacuacagag

SEQ ID NO: 1371212 - RNA, 19 nt, Artificial Sequence
  Description of Artificial Sequence: Synthetic oligonucleotide
  Sense strand starting at position 3483 of SEQ ID NO: 1242766
gugugcagcguguguugaa

SEQ ID NO: 1371213 - RNA, 19 nt, Artificial Sequence
  Description of Artificial Sequence: Synthetic oligonucleotide
  Antisense strand to SEQ ID NO: 1371212
uucaacacacgcugcacac

SEQ ID NO: 1371214 - RNA, 19 nt, Artificial Sequence
  Description of Artificial Sequence: Synthetic oligonucleotide
  Sense strand starting at position 3495 of SEQ ID NO: 1242766
uguugaacugcgucgugaa

SEQ ID NO: 1371215 - RNA, 19 nt, Artificial Sequence
  Description of Artificial Sequence: Synthetic oligonucleotide
  Antisense strand to SEQ ID NO: 1371214
uucacgacgcaguucaaca

SEQ ID NO: 1371216 - RNA, 19 nt, Artificial Sequence
  Description of Artificial Sequence: Synthetic oligonucleotide
  Sense strand starting at position 3496 of SEQ ID NO: 1242766
guugaacugcgucgugaac

SEQ ID NO: 1371217 - RNA, 19 nt, Artificial Sequence
  Description of Artificial Sequence: Synthetic oligonucleotide
  Antisense strand to SEQ ID NO: 1371216
guucacgacgcaguucaac

SEQ ID NO: 1371218 - RNA, 19 nt, Artificial Sequence
  Description of Artificial Sequence: Synthetic oligonucleotide
  Sense strand starting at position 3507 of SEQ ID NO: 1242766
ucgugaacacugcggaaua

SEQ ID NO: 1371219 - RNA, 19 nt, Artificial Sequence
  Description of Artificial Sequence: Synthetic oligonucleotide
  Antisense strand to SEQ ID NO: 1371218
uauuccgcaguguucacga

SEQ ID NO: 1371220 - RNA, 19 nt, Artificial Sequence
  Description of Artificial Sequence: Synthetic oligonucleotide
  Sense strand starting at position 3508 of SEQ ID NO: 1242766
cgugaacacugcggaauau

SEQ ID NO: 1371221 - RNA, 19 nt, Artificial Sequence
  Description of Artificial Sequence: Synthetic oligonucleotide
  Antisense strand to SEQ ID NO: 1371220
auauuccgcaguguucacg

SEQ ID NO: 1371222 - RNA, 19 nt, Artificial Sequence
  Description of Artificial Sequence: Synthetic oligonucleotide
  Sense strand starting at position 3518 of SEQ ID NO: 1242766
gcggaauauccacagcauc

SEQ ID NO: 1371223 - RNA, 19 nt, Artificial Sequence
  Description of Artificial Sequence: Synthetic oligonucleotide
  Antisense strand to SEQ ID NO: 1371222
gaugcuguggauauuccgc

SEQ ID NO: 1371224 - RNA, 19 nt, Artificial Sequence
  Description of Artificial Sequence: Synthetic oligonucleotide
  Sense strand starting at position 3747 of SEQ ID NO: 1242766
guuagaaauuccuuagcuc

SEQ ID NO: 1371225 - RNA, 19 nt, Artificial Sequence
  Description of Artificial Sequence: Synthetic oligonucleotide
  Antisense strand to SEQ ID NO: 1371224
gagcuaaggaauuucuaac

SEQ ID NO: 1371226 - RNA, 19 nt, Artificial Sequence
  Description of Artificial Sequence: Synthetic oligonucleotide
  Sense strand starting at position 3801 of SEQ ID NO: 1242766
cuugaacagccuugagaaa

SEQ ID NO: 1371227 - RNA, 19 nt, Artificial Sequence
  Description of Artificial Sequence: Synthetic oligonucleotide
  Antisense strand to SEQ ID NO: 1371226
uuucucaaggcuguucaag

SEQ ID NO: 1371228 - RNA, 19 nt, Artificial Sequence
  Description of Artificial Sequence: Synthetic oligonucleotide
  Sense strand starting at position 3836 of SEQ ID NO: 1242766
gggcaagcccuagauaugu

SEQ ID NO: 1371229 - RNA, 19 nt, Artificial Sequence
  Description of Artificial Sequence: Synthetic oligonucleotide
  Antisense strand to SEQ ID NO: 1371228
acauaucuagggcuugccc

SEQ ID NO: 1371230 - RNA, 19 nt, Artificial Sequence
  Description of Artificial Sequence: Synthetic oligonucleotide
  Sense strand starting at position 3894 of SEQ ID NO: 1242766
ccauuaagcgggugggauu

SEQ ID NO: 1371231 - RNA, 19 nt, Artificial Sequence
  Description of Artificial Sequence: Synthetic oligonucleotide
  Antisense strand to SEQ ID NO: 1371230
aaucccacccgcuuaaugg

SEQ ID NO: 1371232 - RNA, 19 nt, Artificial Sequence
  Description of Artificial Sequence: Synthetic oligonucleotide
  Sense strand starting at position 3907 of SEQ ID NO: 1242766
gggauuagauccuuuguuc

SEQ ID NO: 1371233 - RNA, 19 nt, Artificial Sequence
  Description of Artificial Sequence: Synthetic oligonucleotide
  Antisense strand to SEQ ID NO: 1371232
gaacaaaggaucuaauccc

SEQ ID NO: 1371234 - RNA, 19 nt, Artificial Sequence
  Description of Artificial Sequence: Synthetic oligonucleotide
  Sense strand starting at position 3967 of SEQ ID NO: 1242766
caggcacuaggguauuaau

SEQ ID NO: 1371235 - RNA, 19 nt, Artificial Sequence
  Description of Artificial Sequence: Synthetic oligonucleotide
  Antisense strand to SEQ ID NO: 1371234
auuaauacccuagugccug

SEQ ID NO: 1371236 - RNA, 19 nt, Artificial Sequence
  Description of Artificial Sequence: Synthetic oligonucleotide
  Sense strand starting at position 3976 of SEQ ID NO: 1242766
ggguauuaaugguaaugac

SEQ ID NO: 1371237 - RNA, 19 nt, Artificial Sequence
  Description of Artificial Sequence: Synthetic oligonucleotide
  Antisense strand to SEQ ID NO: 1371236
gucauuaccauuaauaccc

SEQ ID NO: 1371238 - RNA, 19 nt, Artificial Sequence
  Description of Artificial Sequence: Synthetic oligonucleotide
  Sense strand starting at position 62 of SEQ ID NO: 1242767
agggacaaauguugaauuu

SEQ ID NO: 1371239 - RNA, 19 nt, Artificial Sequence
  Description of Artificial Sequence: Synthetic oligonucleotide
  Antisense strand to SEQ ID NO: 1371238
aaauucaacauuugucccu

SEQ ID NO: 1371240 - RNA, 19 nt, Artificial Sequence
  Description of Artificial Sequence: Synthetic oligonucleotide
  Sense strand starting at position 82 of SEQ ID NO: 1242767
gucacauguucugugacau

SEQ ID NO: 1371241 - RNA, 19 nt, Artificial Sequence
  Description of Artificial Sequence: Synthetic oligonucleotide
  Antisense strand to SEQ ID NO: 1371240
augucacagaacaugugac

SEQ ID NO: 1371242 - RNA, 19 nt, Artificial Sequence
  Description of Artificial Sequence: Synthetic oligonucleotide
  Sense strand starting at position 83 of SEQ ID NO: 1242767
ucacauguucugugacaua

SEQ ID NO: 1371243 - RNA, 19 nt, Artificial Sequence
  Description of Artificial Sequence: Synthetic oligonucleotide
  Antisense strand to SEQ ID NO: 1371242
uaugucacagaacauguga

SEQ ID NO: 1371244 - RNA, 19 nt, Artificial Sequence
  Description of Artificial Sequence: Synthetic oligonucleotide
  Sense strand starting at position 238 of SEQ ID NO: 1242767
ugaugaauauuaucugcua

SEQ ID NO: 1371245 - RNA, 19 nt, Artificial Sequence
  Description of Artificial Sequence: Synthetic oligonucleotide
  Antisense strand to SEQ ID NO: 1371244
uagcagauaauauucauca

SEQ ID NO: 1371246 - RNA, 19 nt, Artificial Sequence
  Description of Artificial Sequence: Synthetic oligonucleotide
  Sense strand starting at position 251 of SEQ ID NO: 1242767
cugcuaauagauugacauu

SEQ ID NO: 1371247 - RNA, 19 nt, Artificial Sequence
  Description of Artificial Sequence: Synthetic oligonucleotide
  Antisense strand to SEQ ID NO: 1371246
aaugucaaucuauuagcag

SEQ ID NO: 1371248 - RNA, 19 nt, Artificial Sequence
  Description of Artificial Sequence: Synthetic oligonucleotide
  Sense strand starting at position 269 of SEQ ID NO: 1242767
uuuguucugaugcaaguga

SEQ ID NO: 1371249 - RNA, 19 nt, Artificial Sequence
  Description of Artificial Sequence: Synthetic oligonucleotide
  Antisense strand to SEQ ID NO: 1371248
ucacuugcaucagaacaaa

SEQ ID NO: 1371250 - RNA, 19 nt, Artificial Sequence
  Description of Artificial Sequence: Synthetic oligonucleotide
  Sense strand starting at position 273 of SEQ ID NO: 1242767
uucugaugcaagugagauc

SEQ ID NO: 1371251 - RNA, 19 nt, Artificial Sequence
  Description of Artificial Sequence: Synthetic oligonucleotide
  Antisense strand to SEQ ID NO: 1371250
gaucucacuugcaucagaa

SEQ ID NO: 1371252 - RNA, 19 nt, Artificial Sequence
  Description of Artificial Sequence: Synthetic oligonucleotide
  Sense strand starting at position 285 of SEQ ID NO: 1242767
ugagaucucuacuucguuu

SEQ ID NO: 1371253 - RNA, 19 nt, Artificial Sequence
  Description of Artificial Sequence: Synthetic oligonucleotide
  Antisense strand to SEQ ID NO: 1371252
aaacgaaguagagaucuca

SEQ ID NO: 1371254 - RNA, 19 nt, Artificial Sequence
  Description of Artificial Sequence: Synthetic oligonucleotide
  Sense strand starting at position 331 of SEQ ID NO: 1242767
cuaucaguauuauacugau

SEQ ID NO: 1371255 - RNA, 19 nt, Artificial Sequence
  Description of Artificial Sequence: Synthetic oligonucleotide
  Antisense strand to SEQ ID NO: 1371254
aucaguauaauacugauag

SEQ ID NO: 1371256 - RNA, 19 nt, Artificial Sequence
  Description of Artificial Sequence: Synthetic oligonucleotide
  Sense strand starting at position 337 of SEQ ID NO: 1242767
guauuauacugauugugua

SEQ ID NO: 1371257 - RNA, 19 nt, Artificial Sequence
  Description of Artificial Sequence: Synthetic oligonucleotide
  Antisense strand to SEQ ID NO: 1371256
uacacaaucaguauaauac

SEQ ID NO: 1371258 - RNA, 19 nt, Artificial Sequence
  Description of Artificial Sequence: Synthetic oligonucleotide
  Sense strand starting at position 341 of SEQ ID NO: 1242767
uauacugauuguguaaaga

SEQ ID NO: 1371259 - RNA, 19 nt, Artificial Sequence
  Description of Artificial Sequence: Synthetic oligonucleotide
  Antisense strand to SEQ ID NO: 1371258
ucuuuacacaaucaguaua

SEQ ID NO: 1371260 - RNA, 19 nt, Artificial Sequence
  Description of Artificial Sequence: Synthetic oligonucleotide
  Sense strand starting at position 415 of SEQ ID NO: 1242767
agaauuauaucccaugaag

SEQ ID NO: 1371261 - RNA, 19 nt, Artificial Sequence
  Description of Artificial Sequence: Synthetic oligonucleotide
  Antisense strand to SEQ ID NO: 1371260
cuucaugggauauaauucu

SEQ ID NO: 1371262 - RNA, 19 nt, Artificial Sequence
  Description of Artificial Sequence: Synthetic oligonucleotide
  Sense strand starting at position 418 of SEQ ID NO: 1242767
auuauaucccaugaaggcu

SEQ ID NO: 1371263 - RNA, 19 nt, Artificial Sequence
  Description of Artificial Sequence: Synthetic oligonucleotide
  Antisense strand to SEQ ID NO: 1371262
agccuucaugggauauaau

SEQ ID NO: 1371264 - RNA, 19 nt, Artificial Sequence
  Description of Artificial Sequence: Synthetic oligonucleotide
  Sense strand starting at position 434 of SEQ ID NO: 1242767
gcuugaaagaguuaacuug

SEQ ID NO: 1371265 - RNA, 19 nt, Artificial Sequence
  Description of Artificial Sequence: Synthetic oligonucleotide
  Antisense strand to SEQ ID NO: 1371264
caaguuaacucuuucaagc

SEQ ID NO: 1371266 - RNA, 19 nt, Artificial Sequence
  Description of Artificial Sequence: Synthetic oligonucleotide
  Sense strand starting at position 457 of SEQ ID NO: 1242767
aaggucugggccugauaca

SEQ ID NO: 1371267 - RNA, 19 nt, Artificial Sequence
  Description of Artificial Sequence: Synthetic oligonucleotide
  Antisense strand to SEQ ID NO: 1371266
uguaucaggcccagaccuu

SEQ ID NO: 1371268 - RNA, 19 nt, Artificial Sequence
  Description of Artificial Sequence: Synthetic oligonucleotide
  Sense strand starting at position 521 of SEQ ID NO: 1242767
uuuauauugcccuguuuag

SEQ ID NO: 1371269 - RNA, 19 nt, Artificial Sequence
  Description of Artificial Sequence: Synthetic oligonucleotide
  Antisense strand to SEQ ID NO: 1371268
cuaaacagggcaauauaaa

SEQ ID NO: 1371270 - RNA, 19 nt, Artificial Sequence
  Description of Artificial Sequence: Synthetic oligonucleotide
  Sense strand starting at position 653 of SEQ ID NO: 1242767
uuugcugauguuugugauu

SEQ ID NO: 1371271 - RNA, 19 nt, Artificial Sequence
  Description of Artificial Sequence: Synthetic oligonucleotide
  Antisense strand to SEQ ID NO: 1371270
aaucacaaacaucagcaaa

SEQ ID NO: 1371272 - RNA, 19 nt, Artificial Sequence
  Description of Artificial Sequence: Synthetic oligonucleotide
  Sense strand starting at position 734 of SEQ ID NO: 1242767
uggccaauggcuuaucaau

SEQ ID NO: 1371273 - RNA, 19 nt, Artificial Sequence
  Description of Artificial Sequence: Synthetic oligonucleotide
  Antisense strand to SEQ ID NO: 1371272
auugauaagccauuggcca

SEQ ID NO: 1371274 - RNA, 19 nt, Artificial Sequence
  Description of Artificial Sequence: Synthetic oligonucleotide
  Sense strand starting at position 780 of SEQ ID NO: 1242767
uguauugacugauucuauu

SEQ ID NO: 1371275 - RNA, 19 nt, Artificial Sequence
  Description of Artificial Sequence: Synthetic oligonucleotide
  Antisense strand to SEQ ID NO: 1371274
aauagaaucagucaauaca

SEQ ID NO: 1371276 - RNA, 19 nt, Artificial Sequence
  Description of Artificial Sequence: Synthetic oligonucleotide
  Sense strand starting at position 851 of SEQ ID NO: 1242767
uccuuugugagaggaaacu

SEQ ID NO: 1371277 - RNA, 19 nt, Artificial Sequence
  Description of Artificial Sequence: Synthetic oligonucleotide
  Antisense strand to SEQ ID NO: 1371276
aguuuccucucacaaagga

SEQ ID NO: 1371278 - RNA, 19 nt, Artificial Sequence
  Description of Artificial Sequence: Synthetic oligonucleotide
  Sense strand starting at position 1213 of SEQ ID NO: 1242767
cgcguauauaccuauguaa

SEQ ID NO: 1371279 - RNA, 19 nt, Artificial Sequence
  Description of Artificial Sequence: Synthetic oligonucleotide
  Antisense strand to SEQ ID NO: 1371278
uuacauagguauauacgcg

SEQ ID NO: 1371280 - RNA, 19 nt, Artificial Sequence
  Description of Artificial Sequence: Synthetic oligonucleotide
  Sense strand starting at position 1313 of SEQ ID NO: 1242767
gaggcaaguuuaguaggaa

SEQ ID NO: 1371281 - RNA, 19 nt, Artificial Sequence
  Description of Artificial Sequence: Synthetic oligonucleotide
  Antisense strand to SEQ ID NO: 1371280
uuccuacuaaacuugccuc

SEQ ID NO: 1371282 - RNA, 19 nt, Artificial Sequence
  Description of Artificial Sequence: Synthetic oligonucleotide
  Sense strand starting at position 1314 of SEQ ID NO: 1242767
aggcaaguuuaguaggaaa

SEQ ID NO: 1371283 - RNA, 19 nt, Artificial Sequence
  Description of Artificial Sequence: Synthetic oligonucleotide
  Antisense strand to SEQ ID NO: 1371282
uuuccuacuaaacuugccu

SEQ ID NO: 1371284 - RNA, 19 nt, Artificial Sequence
  Description of Artificial Sequence: Synthetic oligonucleotide
  Sense strand starting at position 1317 of SEQ ID NO: 1242767
caaguuuaguaggaaaggu

SEQ ID NO: 1371285 - RNA, 19 nt, Artificial Sequence
  Description of Artificial Sequence: Synthetic oligonucleotide
  Antisense strand to SEQ ID NO: 1371284
accuuuccuacuaaacuug

SEQ ID NO: 1371286 - RNA, 19 nt, Artificial Sequence
  Description of Artificial Sequence: Synthetic oligonucleotide
  Sense strand starting at position 1402 of SEQ ID NO: 1242767
ugaauuauggaagguuucu

SEQ ID NO: 1371287 - RNA, 19 nt, Artificial Sequence
  Description of Artificial Sequence: Synthetic oligonucleotide
  Antisense strand to SEQ ID NO: 1371286
agaaaccuuccauaauuca

SEQ ID NO: 1371288 - RNA, 19 nt, Artificial Sequence
  Description of Artificial Sequence: Synthetic oligonucleotide
  Sense strand starting at position 2579 of SEQ ID NO: 1242767
gugucacugcccuaaccau

SEQ ID NO: 1371289 - RNA, 19 nt, Artificial Sequence
  Description of Artificial Sequence: Synthetic oligonucleotide
  Antisense strand to SEQ ID NO: 1371288
augguuagggcagugacac

SEQ ID NO: 1371290 - RNA, 19 nt, Artificial Sequence
  Description of Artificial Sequence: Synthetic oligonucleotide
  Sense strand starting at position 2808 of SEQ ID NO: 1242767
cagugugggcucugaaauc

SEQ ID NO: 1371291 - RNA, 19 nt, Artificial Sequence
  Description of Artificial Sequence: Synthetic oligonucleotide
  Antisense strand to SEQ ID NO: 1371290
gauuucagagcccacacug

SEQ ID NO: 1371292 - RNA, 19 nt, Artificial Sequence
  Description of Artificial Sequence: Synthetic oligonucleotide
  Sense strand starting at position 3069 of SEQ ID NO: 1242767
cugcuuaaagggugagauu

SEQ ID NO: 1371293 - RNA, 19 nt, Artificial Sequence
  Description of Artificial Sequence: Synthetic oligonucleotide
  Antisense strand to SEQ ID NO: 1371292
aaucucacccuuuaagcag

SEQ ID NO: 1371294 - RNA, 19 nt, Artificial Sequence
  Description of Artificial Sequence: Synthetic oligonucleotide
  Sense strand starting at position 3072 of SEQ ID NO: 1242767
cuuaaagggugagauucua

SEQ ID NO: 1371295 - RNA, 19 nt, Artificial Sequence
  Description of Artificial Sequence: Synthetic oligonucleotide
  Antisense strand to SEQ ID NO: 1371294
uagaaucucacccuuuaag

SEQ ID NO: 1371296 - RNA, 19 nt, Artificial Sequence
  Description of Artificial Sequence: Synthetic oligonucleotide
  Sense strand starting at position 3155 of SEQ ID NO: 1242767
cacucugauggcuaucuga

SEQ ID NO: 1371297 - RNA, 19 nt, Artificial Sequence
  Description of Artificial Sequence: Synthetic oligonucleotide
  Antisense strand to SEQ ID NO: 1371296
ucagauagccaucagagug

SEQ ID NO: 1371298 - RNA, 19 nt, Artificial Sequence
  Description of Artificial Sequence: Synthetic oligonucleotide
  Sense strand starting at position 3200 of SEQ ID NO: 1242767
ggaugucauuccuugcaug

SEQ ID NO: 1371299 - RNA, 19 nt, Artificial Sequence
  Description of Artificial Sequence: Synthetic oligonucleotide
  Antisense strand to SEQ ID NO: 1371298
caugcaaggaaugacaucc

SEQ ID NO: 1371300 - RNA, 19 nt, Artificial Sequence
  Description of Artificial Sequence: Synthetic oligonucleotide
  Sense strand starting at position 3232 of SEQ ID NO: 1242767
uucuuccagucaucaggaa

SEQ ID NO: 1371301 - RNA, 19 nt, Artificial Sequence
  Description of Artificial Sequence: Synthetic oligonucleotide
  Antisense strand to SEQ ID NO: 1371300
uuccugaugacuggaagaa

SEQ ID NO: 1371302 - RNA, 19 nt, Artificial Sequence
  Description of Artificial Sequence: Synthetic oligonucleotide
  Sense strand starting at position 3236 of SEQ ID NO: 1242767
uccagucaucaggaaguuu

SEQ ID NO: 1371303 - RNA, 19 nt, Artificial Sequence
  Description of Artificial Sequence: Synthetic oligonucleotide
  Antisense strand to SEQ ID NO: 1371302
aaacuuccugaugacugga

SEQ ID NO: 1371304 - RNA, 19 nt, Artificial Sequence
  Description of Artificial Sequence: Synthetic oligonucleotide
  Sense strand starting at position 3523 of SEQ ID NO: 1242767
uugugucuccuguguuaag

SEQ ID NO: 1371305 - RNA, 19 nt, Artificial Sequence
  Description of Artificial Sequence: Synthetic oligonucleotide
  Antisense strand to SEQ ID NO: 1371304
cuuaacacaggagacacaa

SEQ ID NO: 1371306 - RNA, 19 nt, Artificial Sequence
  Description of Artificial Sequence: Synthetic oligonucleotide
  Sense strand starting at position 3533 of SEQ ID NO: 1242767
uguguuaagcucuaagcaa

SEQ ID NO: 1371307 - RNA, 19 nt, Artificial Sequence
  Description of Artificial Sequence: Synthetic oligonucleotide
  Antisense strand to SEQ ID NO: 1371306
uugcuuagagcuuaacaca

SEQ ID NO: 1371308 - RNA, 19 nt, Artificial Sequence
  Description of Artificial Sequence: Synthetic oligonucleotide
  Sense strand starting at position 3576 of SEQ ID NO: 1242767
gucagugcugucugaaagc

SEQ ID NO: 1371309 - RNA, 19 nt, Artificial Sequence
  Description of Artificial Sequence: Synthetic oligonucleotide
  Antisense strand to SEQ ID NO: 1371308
gcuuucagacagcacugac

SEQ ID NO: 1371310 - RNA, 19 nt, Artificial Sequence
  Description of Artificial Sequence: Synthetic oligonucleotide
  Sense strand starting at position 3585 of SEQ ID NO: 1242767
gucugaaagcagcauaaua

SEQ ID NO: 1371311 - RNA, 19 nt, Artificial Sequence
  Description of Artificial Sequence: Synthetic oligonucleotide
  Antisense strand to SEQ ID NO: 1371310
uauuaugcugcuuucagac

SEQ ID NO: 1371312 - RNA, 19 nt, Artificial Sequence
  Description of Artificial Sequence: Synthetic oligonucleotide
  Sense strand starting at position 3599 of SEQ ID NO: 1242767
uaauaugagucaccagugu

SEQ ID NO: 1371313 - RNA, 19 nt, Artificial Sequence
  Description of Artificial Sequence: Synthetic oligonucleotide
  Antisense strand to SEQ ID NO: 1371312
acacuggugacucauauua

SEQ ID NO: 1371314 - RNA, 19 nt, Artificial Sequence
  Description of Artificial Sequence: Synthetic oligonucleotide
  Sense strand starting at position 3603 of SEQ ID NO: 1242767
augagucaccaguguaaca

SEQ ID NO: 1371315 - RNA, 19 nt, Artificial Sequence
  Description of Artificial Sequence: Synthetic oligonucleotide
  Antisense strand to SEQ ID NO: 1371314
uguuacacuggugacucau

SEQ ID NO: 1371316 - RNA, 19 nt, Artificial Sequence
  Description of Artificial Sequence: Synthetic oligonucleotide
  Sense strand starting at position 3767 of SEQ ID NO: 1242767
uuguuaacacggugaaacu

SEQ ID NO: 1371317 - RNA, 19 nt, Artificial Sequence
  Description of Artificial Sequence: Synthetic oligonucleotide
  Antisense strand to SEQ ID NO: 1371316
aguuucaccguguuaacaa

SEQ ID NO: 1371318 - RNA, 19 nt, Artificial Sequence
  Description of Artificial Sequence: Synthetic oligonucleotide
  Sense strand starting at position 6 of SEQ ID NO: 1242768
agggacaaauguugaauuu

SEQ ID NO: 1371319 - RNA, 19 nt, Artificial Sequence
  Description of Artificial Sequence: Synthetic oligonucleotide
  Antisense strand to SEQ ID NO: 1371318
aaauucaacauuugucccu

SEQ ID NO: 1371320 - RNA, 19 nt, Artificial Sequence
  Description of Artificial Sequence: Synthetic oligonucleotide
  Sense strand starting at position 26 of SEQ ID NO: 1242768
gucacauguucugugacau

SEQ ID NO: 1371321 - RNA, 19 nt, Artificial Sequence
  Description of Artificial Sequence: Synthetic oligonucleotide
  Antisense strand to SEQ ID NO: 1371320
augucacagaacaugugac

SEQ ID NO: 1371322 - RNA, 19 nt, Artificial Sequence
  Description of Artificial Sequence: Synthetic oligonucleotide
  Sense strand starting at position 27 of SEQ ID NO: 1242768
ucacauguucugugacaua

SEQ ID NO: 1371323 - RNA, 19 nt, Artificial Sequence
  Description of Artificial Sequence: Synthetic oligonucleotide
  Antisense strand to SEQ ID NO: 1371322
uaugucacagaacauguga

SEQ ID NO: 1371324 - RNA, 19 nt, Artificial Sequence
  Description of Artificial Sequence: Synthetic oligonucleotide
  Sense strand starting at position 182 of SEQ ID NO: 1242768
ugaugaauauuaucugcua

SEQ ID NO: 1371325 - RNA, 19 nt, Artificial Sequence
  Description of Artificial Sequence: Synthetic oligonucleotide
  Antisense strand to SEQ ID NO: 1371324
uagcagauaauauucauca

SEQ ID NO: 1371326 - RNA, 19 nt, Artificial Sequence
  Description of Artificial Sequence: Synthetic oligonucleotide
  Sense strand starting at position 195 of SEQ ID NO: 1242768
cugcuaauagauugacauu

SEQ ID NO: 1371327 - RNA, 19 nt, Artificial Sequence
  Description of Artificial Sequence: Synthetic oligonucleotide
  Antisense strand to SEQ ID NO: 1371326
aaugucaaucuauuagcag

SEQ ID NO: 1371328 - RNA, 19 nt, Artificial Sequence
  Description of Artificial Sequence: Synthetic oligonucleotide
  Sense strand starting at position 213 of SEQ ID NO: 1242768
uuuguucugaugcaaguga

SEQ ID NO: 1371329 - RNA, 19 nt, Artificial Sequence
  Description of Artificial Sequence: Synthetic oligonucleotide
  Antisense strand to SEQ ID NO: 1371328
ucacuugcaucagaacaaa

SEQ ID NO: 1371330 - RNA, 19 nt, Artificial Sequence
  Description of Artificial Sequence: Synthetic oligonucleotide
  Sense strand starting at position 217 of SEQ ID NO: 1242768
uucugaugcaagugagauc

SEQ ID NO: 1371331 - RNA, 19 nt, Artificial Sequence
  Description of Artificial Sequence: Synthetic oligonucleotide
  Antisense strand to SEQ ID NO: 1371330
gaucucacuugcaucagaa

SEQ ID NO: 1371332 - RNA, 19 nt, Artificial Sequence
  Description of Artificial Sequence: Synthetic oligonucleotide
  Sense strand starting at position 229 of SEQ ID NO: 1242768
ugagaucucuacuucguuu

SEQ ID NO: 1371333 - RNA, 19 nt, Artificial Sequence
  Description of Artificial Sequence: Synthetic oligonucleotide
  Antisense strand to SEQ ID NO: 1371332
aaacgaaguagagaucuca

SEQ ID NO: 1371334 - RNA, 19 nt, Artificial Sequence
  Description of Artificial Sequence: Synthetic oligonucleotide
  Sense strand starting at position 281 of SEQ ID NO: 1242768
guauuauacugauugugua

SEQ ID NO: 1371335 - RNA, 19 nt, Artificial Sequence
  Description of Artificial Sequence: Synthetic oligonucleotide
  Antisense strand to SEQ ID NO: 1371334
uacacaaucaguauaauac

SEQ ID NO: 1371336 - RNA, 19 nt, Artificial Sequence
  Description of Artificial Sequence: Synthetic oligonucleotide
  Sense strand starting at position 285 of SEQ ID NO: 1242768
uauacugauuguguaaaga

SEQ ID NO: 1371337 - RNA, 19 nt, Artificial Sequence
  Description of Artificial Sequence: Synthetic oligonucleotide
  Antisense strand to SEQ ID NO: 1371336
ucuuuacacaaucaguaua

SEQ ID NO: 1371338 - RNA, 19 nt, Artificial Sequence
  Description of Artificial Sequence: Synthetic oligonucleotide
  Sense strand starting at position 359 of SEQ ID NO: 1242768
agaauuauaucccaugaag

SEQ ID NO: 1371339 - RNA, 19 nt, Artificial Sequence
  Description of Artificial Sequence: Synthetic oligonucleotide
  Antisense strand to SEQ ID NO: 1371338
cuucaugggauauaauucu

SEQ ID NO: 1371340 - RNA, 19 nt, Artificial Sequence
  Description of Artificial Sequence: Synthetic oligonucleotide
  Sense strand starting at position 362 of SEQ ID NO: 1242768
auuauaucccaugaaggcu

SEQ ID NO: 1371341 - RNA, 19 nt, Artificial Sequence
  Description of Artificial Sequence: Synthetic oligonucleotide
  Antisense strand to SEQ ID NO: 1371340
agccuucaugggauauaau

SEQ ID NO: 1371342 - RNA, 19 nt, Artificial Sequence
  Description of Artificial Sequence: Synthetic oligonucleotide
  Sense strand starting at position 378 of SEQ ID NO: 1242768
gcuugaaagaguuaacuug

SEQ ID NO: 1371343 - RNA, 19 nt, Artificial Sequence
  Description of Artificial Sequence: Synthetic oligonucleotide
  Antisense strand to SEQ ID NO: 1371342
caaguuaacucuuucaagc

SEQ ID NO: 1371344 - RNA, 19 nt, Artificial Sequence
  Description of Artificial Sequence: Synthetic oligonucleotide
  Sense strand starting at position 401 of SEQ ID NO: 1242768
aaggucugggccugauaca

SEQ ID NO: 1371345 - RNA, 19 nt, Artificial Sequence
  Description of Artificial Sequence: Synthetic oligonucleotide
  Antisense strand to SEQ ID NO: 1371344
uguaucaggcccagaccuu

SEQ ID NO: 1371346 - RNA, 19 nt, Artificial Sequence
  Description of Artificial Sequence: Synthetic oligonucleotide
  Sense strand starting at position 465 of SEQ ID NO: 1242768
uuuauauugcccuguuuag

SEQ ID NO: 1371347 - RNA, 19 nt, Artificial Sequence
  Description of Artificial Sequence: Synthetic oligonucleotide
  Antisense strand to SEQ ID NO: 1371346
cuaaacagggcaauauaaa

SEQ ID NO: 1371348 - RNA, 19 nt, Artificial Sequence
  Description of Artificial Sequence: Synthetic oligonucleotide
  Sense strand starting at position 597 of SEQ ID NO: 1242768
uuugcugauguuugugauu

SEQ ID NO: 1371349 - RNA, 19 nt, Artificial Sequence
  Description of Artificial Sequence: Synthetic oligonucleotide
  Antisense strand to SEQ ID NO: 1371348
aaucacaaacaucagcaaa

SEQ ID NO: 1371350 - RNA, 19 nt, Artificial Sequence
  Description of Artificial Sequence: Synthetic oligonucleotide
  Sense strand starting at position 678 of SEQ ID NO: 1242768
uggccaauggcuuaucaau

SEQ ID NO: 1371351 - RNA, 19 nt, Artificial Sequence
  Description of Artificial Sequence: Synthetic oligonucleotide
  Antisense strand to SEQ ID NO: 1371350
auugauaagccauuggcca

SEQ ID NO: 1371352 - RNA, 19 nt, Artificial Sequence
  Description of Artificial Sequence: Synthetic oligonucleotide
  Sense strand starting at position 724 of SEQ ID NO: 1242768
uguauugacugauucuauu

SEQ ID NO: 1371353 - RNA, 19 nt, Artificial Sequence
  Description of Artificial Sequence: Synthetic oligonucleotide
  Antisense strand to SEQ ID NO: 1371352
aauagaaucagucaauaca

SEQ ID NO: 1371354 - RNA, 19 nt, Artificial Sequence
  Description of Artificial Sequence: Synthetic oligonucleotide
  Sense strand starting at position 795 of SEQ ID NO: 1242768
uccuuugugagaggaaacu

SEQ ID NO: 1371355 - RNA, 19 nt, Artificial Sequence
  Description of Artificial Sequence: Synthetic oligonucleotide
  Antisense strand to SEQ ID NO: 1371354
aguuuccucucacaaagga

SEQ ID NO: 1371356 - RNA, 19 nt, Artificial Sequence
  Description of Artificial Sequence: Synthetic oligonucleotide
  Sense strand starting at position 1157 of SEQ ID NO: 1242768
cgcguauauaccuauguaa

SEQ ID NO: 1371357 - RNA, 19 nt, Artificial Sequence
  Description of Artificial Sequence: Synthetic oligonucleotide
  Antisense strand to SEQ ID NO: 1371356
uuacauagguauauacgcg

SEQ ID NO: 1371358 - RNA, 19 nt, Artificial Sequence
  Description of Artificial Sequence: Synthetic oligonucleotide
  Sense strand starting at position 1257 of SEQ ID NO: 1242768
gaggcaaguuuaguaggaa

SEQ ID NO: 1371359 - RNA, 19 nt, Artificial Sequence
  Description of Artificial Sequence: Synthetic oligonucleotide
  Antisense strand to SEQ ID NO: 1371358
uuccuacuaaacuugccuc

SEQ ID NO: 1371360 - RNA, 19 nt, Artificial Sequence
  Description of Artificial Sequence: Synthetic oligonucleotide
  Sense strand starting at position 1258 of SEQ ID NO: 1242768
aggcaaguuuaguaggaaa

SEQ ID NO: 1371361 - RNA, 19 nt, Artificial Sequence
  Description of Artificial Sequence: Synthetic oligonucleotide
  Antisense strand to SEQ ID NO: 1371360
uuuccuacuaaacuugccu

SEQ ID NO: 1371362 - RNA, 19 nt, Artificial Sequence
  Description of Artificial Sequence: Synthetic oligonucleotide
  Sense strand starting at position 1346 of SEQ ID NO: 1242768
ugaauuauggaagguuucu

SEQ ID NO: 1371363 - RNA, 19 nt, Artificial Sequence
  Description of Artificial Sequence: Synthetic oligonucleotide
  Antisense strand to SEQ ID NO: 1371362
agaaaccuuccauaauuca

SEQ ID NO: 1371364 - RNA, 19 nt, Artificial Sequence
  Description of Artificial Sequence: Synthetic oligonucleotide
  Sense strand starting at position 2523 of SEQ ID NO: 1242768
gugucacugcccuaaccau

SEQ ID NO: 1371365 - RNA, 19 nt, Artificial Sequence
  Description of Artificial Sequence: Synthetic oligonucleotide
  Antisense strand to SEQ ID NO: 1371364
augguuagggcagugacac

SEQ ID NO: 1371366 - RNA, 19 nt, Artificial Sequence
  Description of Artificial Sequence: Synthetic oligonucleotide
  Sense strand starting at position 2752 of SEQ ID NO: 1242768
cagugugggcucugaaauc

SEQ ID NO: 1371367 - RNA, 19 nt, Artificial Sequence
  Description of Artificial Sequence: Synthetic oligonucleotide
  Antisense strand to SEQ ID NO: 1371366
gauuucagagcccacacug

SEQ ID NO: 1371368 - RNA, 19 nt, Artificial Sequence
  Description of Artificial Sequence: Synthetic oligonucleotide
  Sense strand starting at position 3013 of SEQ ID NO: 1242768
cugcuuaaagggugagauu

SEQ ID NO: 1371369 - RNA, 19 nt, Artificial Sequence
  Description of Artificial Sequence: Synthetic oligonucleotide
  Antisense strand to SEQ ID NO: 1371368
aaucucacccuuuaagcag

SEQ ID NO: 1371370 - RNA, 19 nt, Artificial Sequence
  Description of Artificial Sequence: Synthetic oligonucleotide
  Sense strand starting at position 3016 of SEQ ID NO: 1242768
cuuaaagggugagauucua

SEQ ID NO: 1371371 - RNA, 19 nt, Artificial Sequence
  Description of Artificial Sequence: Synthetic oligonucleotide
  Antisense strand to SEQ ID NO: 1371370
uagaaucucacccuuuaag

SEQ ID NO: 1371372 - RNA, 19 nt, Artificial Sequence
  Description of Artificial Sequence: Synthetic oligonucleotide
  Sense strand starting at position 3099 of SEQ ID NO: 1242768
cacucugauggcuaucuga

SEQ ID NO: 1371373 - RNA, 19 nt, Artificial Sequence
  Description of Artificial Sequence: Synthetic oligonucleotide
  Antisense strand to SEQ ID NO: 1371372
ucagauagccaucagagug

SEQ ID NO: 1371374 - RNA, 19 nt, Artificial Sequence
  Description of Artificial Sequence: Synthetic oligonucleotide
  Sense strand starting at position 3144 of SEQ ID NO: 1242768
ggaugucauuccuugcaug

SEQ ID NO: 1371375 - RNA, 19 nt, Artificial Sequence
  Description of Artificial Sequence: Synthetic oligonucleotide
  Antisense strand to SEQ ID NO: 1371374
caugcaaggaaugacaucc

SEQ ID NO: 1371376 - RNA, 19 nt, Artificial Sequence
  Description of Artificial Sequence: Synthetic oligonucleotide
  Sense strand starting at position 3176 of SEQ ID NO: 1242768
uucuuccagucaucaggaa

SEQ ID NO: 1371377 - RNA, 19 nt, Artificial Sequence
  Description of Artificial Sequence: Synthetic oligonucleotide
  Antisense strand to SEQ ID NO: 1371376
uuccugaugacuggaagaa

SEQ ID NO: 1371378 - RNA, 19 nt, Artificial Sequence
  Description of Artificial Sequence: Synthetic oligonucleotide
  Sense strand starting at position 3180 of SEQ ID NO: 1242768
uccagucaucaggaaguuu

SEQ ID NO: 1371379 - RNA, 19 nt, Artificial Sequence
  Description of Artificial Sequence: Synthetic oligonucleotide
  Antisense strand to SEQ ID NO: 1371378
aaacuuccugaugacugga

SEQ ID NO: 1371380 - RNA, 19 nt, Artificial Sequence
  Description of Artificial Sequence: Synthetic oligonucleotide
  Sense strand starting at position 3467 of SEQ ID NO: 1242768
uugugucuccuguguuaag

SEQ ID NO: 1371381 - RNA, 19 nt, Artificial Sequence
  Description of Artificial Sequence: Synthetic oligonucleotide
  Antisense strand to SEQ ID NO: 1371380
cuuaacacaggagacacaa

SEQ ID NO: 1371382 - RNA, 19 nt, Artificial Sequence
  Description of Artificial Sequence: Synthetic oligonucleotide
  Sense strand starting at position 3477 of SEQ ID NO: 1242768
uguguuaagcucuaagcaa

SEQ ID NO: 1371383 - RNA, 19 nt, Artificial Sequence
  Description of Artificial Sequence: Synthetic oligonucleotide
  Antisense strand to SEQ ID NO: 1371382
uugcuuagagcuuaacaca

SEQ ID NO: 1371384 - RNA, 19 nt, Artificial Sequence
  Description of Artificial Sequence: Synthetic oligonucleotide
  Sense strand starting at position 3520 of SEQ ID NO: 1242768
gucagugcugucugaaagc

SEQ ID NO: 1371385 - RNA, 19 nt, Artificial Sequence
  Description of Artificial Sequence: Synthetic oligonucleotide
  Antisense strand to SEQ ID NO: 1371384
gcuuucagacagcacugac

SEQ ID NO: 1371386 - RNA, 19 nt, Artificial Sequence
  Description of Artificial Sequence: Synthetic oligonucleotide
  Sense strand starting at position 3529 of SEQ ID NO: 1242768
gucugaaagcagcauaaua

SEQ ID NO: 1371387 - RNA, 19 nt, Artificial Sequence
  Description of Artificial Sequence: Synthetic oligonucleotide
  Antisense strand to SEQ ID NO: 1371386
uauuaugcugcuuucagac

SEQ ID NO: 1371388 - RNA, 19 nt, Artificial Sequence
  Description of Artificial Sequence: Synthetic oligonucleotide
  Sense strand starting at position 3543 of SEQ ID NO: 1242768
uaauaugagucaccagugu

SEQ ID NO: 1371389 - RNA, 19 nt, Artificial Sequence
  Description of Artificial Sequence: Synthetic oligonucleotide
  Antisense strand to SEQ ID NO: 1371388
acacuggugacucauauua

SEQ ID NO: 1371390 - RNA, 19 nt, Artificial Sequence
  Description of Artificial Sequence: Synthetic oligonucleotide
  Sense strand starting at position 3547 of SEQ ID NO: 1242768
augagucaccaguguaaca

SEQ ID NO: 1371391 - RNA, 19 nt, Artificial Sequence
  Description of Artificial Sequence: Synthetic oligonucleotide
  Antisense strand to SEQ ID NO: 1371390
uguuacacuggugacucau

SEQ ID NO: 1371392 - RNA, 19 nt, Artificial Sequence
  Description of Artificial Sequence: Synthetic oligonucleotide
  Sense strand starting at position 3711 of SEQ ID NO: 1242768
uuguuaacacggugaaacu

SEQ ID NO: 1371393 - RNA, 19 nt, Artificial Sequence
  Description of Artificial Sequence: Synthetic oligonucleotide
  Antisense strand to SEQ ID NO: 1371392
aguuucaccguguuaacaa

SEQ ID NO: 1371394 - RNA, 19 nt, Artificial Sequence
  Description of Artificial Sequence: Synthetic oligonucleotide
  Sense strand starting at position 3952 of SEQ ID NO: 1242768
uuuagcucaguaugucuaa

SEQ ID NO: 1371395 - RNA, 19 nt, Artificial Sequence
  Description of Artificial Sequence: Synthetic oligonucleotide
  Antisense strand to SEQ ID NO: 1371394
uuagacauacugagcuaaa

SEQ ID NO: 1371396 - RNA, 19 nt, Artificial Sequence
  Description of Artificial Sequence: Synthetic oligonucleotide
  Sense strand starting at position 3953 of SEQ ID NO: 1242768
uuagcucaguaugucuaaa

SEQ ID NO: 1371397 - RNA, 19 nt, Artificial Sequence
  Description of Artificial Sequence: Synthetic oligonucleotide
  Antisense strand to SEQ ID NO: 1371396
uuuagacauacugagcuaa

SEQ ID NO: 1371398 - RNA, 19 nt, Artificial Sequence
  Description of Artificial Sequence: Synthetic oligonucleotide
  Sense strand starting at position 337 of SEQ ID NO: 1242769
ucauaaagcuaaguuugaa

SEQ ID NO: 1371399 - RNA, 19 nt, Artificial Sequence
  Description of Artificial Sequence: Synthetic oligonucleotide
  Antisense strand to SEQ ID NO: 1371398
uucaaacuuagcuuuauga

SEQ ID NO: 1371400 - RNA, 19 nt, Artificial Sequence
  Description of Artificial Sequence: Synthetic oligonucleotide
  Sense strand starting at position 391 of SEQ ID NO: 1242769
gggcaaguuacuuggccau

SEQ ID NO: 1371401 - RNA, 19 nt, Artificial Sequence
  Description of Artificial Sequence: Synthetic oligonucleotide
  Antisense strand to SEQ ID NO: 1371400
auggccaaguaacuugccc

SEQ ID NO: 1371402 - RNA, 19 nt, Artificial Sequence
  Description of Artificial Sequence: Synthetic oligonucleotide
  Sense strand starting at position 403 of SEQ ID NO: 1242769
uggccauucuaggccaauu

SEQ ID NO: 1371403 - RNA, 19 nt, Artificial Sequence
  Description of Artificial Sequence: Synthetic oligonucleotide
  Antisense strand to SEQ ID NO: 1371402
aauuggccuagaauggcca

SEQ ID NO: 1371404 - RNA, 19 nt, Artificial Sequence
  Description of Artificial Sequence: Synthetic oligonucleotide
  Sense strand starting at position 429 of SEQ ID NO: 1242769
guguaacgugagugaaaca

SEQ ID NO: 1371405 - RNA, 19 nt, Artificial Sequence
  Description of Artificial Sequence: Synthetic oligonucleotide
  Antisense strand to SEQ ID NO: 1371404
uguuucacucacguuacac

SEQ ID NO: 1371406 - RNA, 19 nt, Artificial Sequence
  Description of Artificial Sequence: Synthetic oligonucleotide
  Sense strand starting at position 476 of SEQ ID NO: 1242769
gugaaugugcaaugaacaa

SEQ ID NO: 1371407 - RNA, 19 nt, Artificial Sequence
  Description of Artificial Sequence: Synthetic oligonucleotide
  Antisense strand to SEQ ID NO: 1371406
uuguucauugcacauucac

SEQ ID NO: 1371408 - RNA, 19 nt, Artificial Sequence
  Description of Artificial Sequence: Synthetic oligonucleotide
  Sense strand starting at position 583 of SEQ ID NO: 1242769
uuccaugaguccucaggca

SEQ ID NO: 1371409 - RNA, 19 nt, Artificial Sequence
  Description of Artificial Sequence: Synthetic oligonucleotide
  Antisense strand to SEQ ID NO: 1371408
ugccugaggacucauggaa

SEQ ID NO: 1371410 - RNA, 19 nt, Artificial Sequence
  Description of Artificial Sequence: Synthetic oligonucleotide
  Sense strand starting at position 620 of SEQ ID NO: 1242769
auuuaauccucaggauuga

SEQ ID NO: 1371411 - RNA, 19 nt, Artificial Sequence
  Description of Artificial Sequence: Synthetic oligonucleotide
  Antisense strand to SEQ ID NO: 1371410
ucaauccugaggauuaaau

SEQ ID NO: 1371412 - RNA, 19 nt, Artificial Sequence
  Description of Artificial Sequence: Synthetic oligonucleotide
  Sense strand starting at position 638 of SEQ ID NO: 1242769
aaugucaguucugcaagga

SEQ ID NO: 1371413 - RNA, 19 nt, Artificial Sequence
  Description of Artificial Sequence: Synthetic oligonucleotide
  Antisense strand to SEQ ID NO: 1371412
uccuugcagaacugacauu

SEQ ID NO: 1371414 - RNA, 19 nt, Artificial Sequence
  Description of Artificial Sequence: Synthetic oligonucleotide
  Sense strand starting at position 639 of SEQ ID NO: 1242769
augucaguucugcaaggaa

SEQ ID NO: 1371415 - RNA, 19 nt, Artificial Sequence
  Description of Artificial Sequence: Synthetic oligonucleotide
  Antisense strand to SEQ ID NO: 1371414
uuccuugcagaacugacau

SEQ ID NO: 1371416 - RNA, 19 nt, Artificial Sequence
  Description of Artificial Sequence: Synthetic oligonucleotide
  Sense strand starting at position 642 of SEQ ID NO: 1242769
ucaguucugcaaggaaugu

SEQ ID NO: 1371417 - RNA, 19 nt, Artificial Sequence
  Description of Artificial Sequence: Synthetic oligonucleotide
  Antisense strand to SEQ ID NO: 1371416
acauuccuugcagaacuga

SEQ ID NO: 1371418 - RNA, 19 nt, Artificial Sequence
  Description of Artificial Sequence: Synthetic oligonucleotide
  Sense strand starting at position 692 of SEQ ID NO: 1242769
cugggaaugguuuaguaac

SEQ ID NO: 1371419 - RNA, 19 nt, Artificial Sequence
  Description of Artificial Sequence: Synthetic oligonucleotide
  Antisense strand to SEQ ID NO: 1371418
guuacuaaaccauucccag

SEQ ID NO: 1371420 - RNA, 19 nt, Artificial Sequence
  Description of Artificial Sequence: Synthetic oligonucleotide
  Sense strand starting at position 694 of SEQ ID NO: 1242769
gggaaugguuuaguaacuu

SEQ ID NO: 1371421 - RNA, 19 nt, Artificial Sequence
  Description of Artificial Sequence: Synthetic oligonucleotide
  Antisense strand to SEQ ID NO: 1371420
aaguuacuaaaccauuccc

SEQ ID NO: 1371422 - RNA, 19 nt, Artificial Sequence
  Description of Artificial Sequence: Synthetic oligonucleotide
  Sense strand starting at position 712 of SEQ ID NO: 1242769
ugcccaguucugucucuuu

SEQ ID NO: 1371423 - RNA, 19 nt, Artificial Sequence
  Description of Artificial Sequence: Synthetic oligonucleotide
  Antisense strand to SEQ ID NO: 1371422
aaagagacagaacugggca

SEQ ID NO: 1371424 - RNA, 19 nt, Artificial Sequence
  Description of Artificial Sequence: Synthetic oligonucleotide
  Sense strand starting at position 741 of SEQ ID NO: 1242769
acugcuuugggcugaacau

SEQ ID NO: 1371425 - RNA, 19 nt, Artificial Sequence
  Description of Artificial Sequence: Synthetic oligonucleotide
  Antisense strand to SEQ ID NO: 1371424
auguucagcccaaagcagu

SEQ ID NO: 1371426 - RNA, 19 nt, Artificial Sequence
  Description of Artificial Sequence: Synthetic oligonucleotide
  Sense strand starting at position 750 of SEQ ID NO: 1242769
ggcugaacauccuucugau

SEQ ID NO: 1371427 - RNA, 19 nt, Artificial Sequence
  Description of Artificial Sequence: Synthetic oligonucleotide
  Antisense strand to SEQ ID NO: 1371426
aucagaaggauguucagcc

SEQ ID NO: 1371428 - RNA, 19 nt, Artificial Sequence
  Description of Artificial Sequence: Synthetic oligonucleotide
  Sense strand starting at position 798 of SEQ ID NO: 1242769
gagaccuaacgcugcuuua

SEQ ID NO: 1371429 - RNA, 19 nt, Artificial Sequence
  Description of Artificial Sequence: Synthetic oligonucleotide
  Antisense strand to SEQ ID NO: 1371428
uaaagcagcguuaggucuc

SEQ ID NO: 1371430 - RNA, 19 nt, Artificial Sequence
  Description of Artificial Sequence: Synthetic oligonucleotide
  Sense strand starting at position 801 of SEQ ID NO: 1242769
accuaacgcugcuuuagaa

SEQ ID NO: 1371431 - RNA, 19 nt, Artificial Sequence
  Description of Artificial Sequence: Synthetic oligonucleotide
  Antisense strand to SEQ ID NO: 1371430
uucuaaagcagcguuaggu

SEQ ID NO: 1371432 - RNA, 19 nt, Artificial Sequence
  Description of Artificial Sequence: Synthetic oligonucleotide
  Sense strand starting at position 857 of SEQ ID NO: 1242769
auugacuuaugggagagua

SEQ ID NO: 1371433 - RNA, 19 nt, Artificial Sequence
  Description of Artificial Sequence: Synthetic oligonucleotide
  Antisense strand to SEQ ID NO: 1371432
uacucucccauaagucaau

SEQ ID NO: 1371434 - RNA, 19 nt, Artificial Sequence
  Description of Artificial Sequence: Synthetic oligonucleotide
  Sense strand starting at position 2303 of SEQ ID NO: 1242769
ggaagcagguguucucgau

SEQ ID NO: 1371435 - RNA, 19 nt, Artificial Sequence
  Description of Artificial Sequence: Synthetic oligonucleotide
  Antisense strand to SEQ ID NO: 1371434
aucgagaacaccugcuucc

SEQ ID NO: 1371436 - RNA, 19 nt, Artificial Sequence
  Description of Artificial Sequence: Synthetic oligonucleotide
  Sense strand starting at position 2838 of SEQ ID NO: 1242769
aguaguagccucgcuugau

SEQ ID NO: 1371437 - RNA, 19 nt, Artificial Sequence
  Description of Artificial Sequence: Synthetic oligonucleotide
  Antisense strand to SEQ ID NO: 1371436
aucaagcgaggcuacuacu

SEQ ID NO: 1371438 - RNA, 19 nt, Artificial Sequence
  Description of Artificial Sequence: Synthetic oligonucleotide
  Sense strand starting at position 2915 of SEQ ID NO: 1242769
ggguuagguccugagaagc

SEQ ID NO: 1371439 - RNA, 19 nt, Artificial Sequence
  Description of Artificial Sequence: Synthetic oligonucleotide
  Antisense strand to SEQ ID NO: 1371438
gcuucucaggaccuaaccc

SEQ ID NO: 1371440 - RNA, 19 nt, Artificial Sequence
  Description of Artificial Sequence: Synthetic oligonucleotide
  Sense strand starting at position 2929 of SEQ ID NO: 1242769
gaagcccucuccguggaaa

SEQ ID NO: 1371441 - RNA, 19 nt, Artificial Sequence
  Description of Artificial Sequence: Synthetic oligonucleotide
  Antisense strand to SEQ ID NO: 1371440
uuuccacggagagggcuuc

SEQ ID NO: 1371442 - RNA, 19 nt, Artificial Sequence
  Description of Artificial Sequence: Synthetic oligonucleotide
  Sense strand starting at position 2931 of SEQ ID NO: 1242769
agcccucuccguggaaaga

SEQ ID NO: 1371443 - RNA, 19 nt, Artificial Sequence
  Description of Artificial Sequence: Synthetic oligonucleotide
  Antisense strand to SEQ ID NO: 1371442
ucuuuccacggagagggcu

SEQ ID NO: 1371444 - RNA, 19 nt, Artificial Sequence
  Description of Artificial Sequence: Synthetic oligonucleotide
  Sense strand starting at position 3117 of SEQ ID NO: 1242769
ggaggucaggugugagauu

SEQ ID NO: 1371445 - RNA, 19 nt, Artificial Sequence
  Description of Artificial Sequence: Synthetic oligonucleotide
  Antisense strand to SEQ ID NO: 1371444
aaucucacaccugaccucc

SEQ ID NO: 1371446 - RNA, 19 nt, Artificial Sequence
  Description of Artificial Sequence: Synthetic oligonucleotide
  Sense strand starting at position 3149 of SEQ ID NO: 1242769
ugcaguguucaugagguga

SEQ ID NO: 1371447 - RNA, 19 nt, Artificial Sequence
  Description of Artificial Sequence: Synthetic oligonucleotide
  Antisense strand to SEQ ID NO: 1371446
ucaccucaugaacacugca

SEQ ID NO: 1371448 - RNA, 19 nt, Artificial Sequence
  Description of Artificial Sequence: Synthetic oligonucleotide
  Sense strand starting at position 3276 of SEQ ID NO: 1242769
aggagugauagcggaguca

SEQ ID NO: 1371449 - RNA, 19 nt, Artificial Sequence
  Description of Artificial Sequence: Synthetic oligonucleotide
  Antisense strand to SEQ ID NO: 1371448
ugacuccgcuaucacuccu

SEQ ID NO: 1371450 - RNA, 19 nt, Artificial Sequence
  Description of Artificial Sequence: Synthetic oligonucleotide
  Sense strand starting at position 3359 of SEQ ID NO: 1242769
cuuggauguuucucuuuau

SEQ ID NO: 1371451 - RNA, 19 nt, Artificial Sequence
  Description of Artificial Sequence: Synthetic oligonucleotide
  Antisense strand to SEQ ID NO: 1371450
auaaagagaaacauccaag

SEQ ID NO: 1371452 - RNA, 19 nt, Artificial Sequence
  Description of Artificial Sequence: Synthetic oligonucleotide
  Sense strand starting at position 3360 of SEQ ID NO: 1242769
uuggauguuucucuuuaug

SEQ ID NO: 1371453 - RNA, 19 nt, Artificial Sequence
  Description of Artificial Sequence: Synthetic oligonucleotide
  Antisense strand to SEQ ID NO: 1371452
cauaaagagaaacauccaa

SEQ ID NO: 1371454 - RNA, 19 nt, Artificial Sequence
  Description of Artificial Sequence: Synthetic oligonucleotide
  Sense strand starting at position 3362 of SEQ ID NO: 1242769
ggauguuucucuuuauggu

SEQ ID NO: 1371455 - RNA, 19 nt, Artificial Sequence
  Description of Artificial Sequence: Synthetic oligonucleotide
  Antisense strand to SEQ ID NO: 1371454
accauaaagagaaacaucc

SEQ ID NO: 1371456 - RNA, 19 nt, Artificial Sequence
  Description of Artificial Sequence: Synthetic oligonucleotide
  Sense strand starting at position 3368 of SEQ ID NO: 1242769
uucucuuuauggucacuua

SEQ ID NO: 1371457 - RNA, 19 nt, Artificial Sequence
  Description of Artificial Sequence: Synthetic oligonucleotide
  Antisense strand to SEQ ID NO: 1371456
uaagugaccauaaagagaa

SEQ ID NO: 1371458 - RNA, 19 nt, Artificial Sequence
  Description of Artificial Sequence: Synthetic oligonucleotide
  Sense strand starting at position 3383 of SEQ ID NO: 1242769
cuuaauuccuggcugcuua

SEQ ID NO: 1371459 - RNA, 19 nt, Artificial Sequence
  Description of Artificial Sequence: Synthetic oligonucleotide
  Antisense strand to SEQ ID NO: 1371458
uaagcagccaggaauuaag

SEQ ID NO: 1371460 - RNA, 19 nt, Artificial Sequence
  Description of Artificial Sequence: Synthetic oligonucleotide
  Sense strand starting at position 3384 of SEQ ID NO: 1242769
uuaauuccuggcugcuuaa

SEQ ID NO: 1371461 - RNA, 19 nt, Artificial Sequence
  Description of Artificial Sequence: Synthetic oligonucleotide
  Antisense strand to SEQ ID NO: 1371460
uuaagcagccaggaauuaa

SEQ ID NO: 1371462 - RNA, 19 nt, Artificial Sequence
  Description of Artificial Sequence: Synthetic oligonucleotide
  Sense strand starting at position 3485 of SEQ ID NO: 1242769
ucaugucuggcacaaucaa

SEQ ID NO: 1371463 - RNA, 19 nt, Artificial Sequence
  Description of Artificial Sequence: Synthetic oligonucleotide
  Antisense strand to SEQ ID NO: 1371462
uugauugugccagacauga

SEQ ID NO: 1371464 - RNA, 19 nt, Artificial Sequence
  Description of Artificial Sequence: Synthetic oligonucleotide
  Sense strand starting at position 3492 of SEQ ID NO: 1242769
uggcacaaucaaugggauu

SEQ ID NO: 1371465 - RNA, 19 nt, Artificial Sequence
  Description of Artificial Sequence: Synthetic oligonucleotide
  Antisense strand to SEQ ID NO: 1371464
aaucccauugauugugcca

SEQ ID NO: 1371466 - RNA, 19 nt, Artificial Sequence
  Description of Artificial Sequence: Synthetic oligonucleotide
  Sense strand starting at position 3567 of SEQ ID NO: 1242769
uucuguucucauuguuuaa

SEQ ID NO: 1371467 - RNA, 19 nt, Artificial Sequence
  Description of Artificial Sequence: Synthetic oligonucleotide
  Antisense strand to SEQ ID NO: 1371466
uuaaacaaugagaacagaa

SEQ ID NO: 1371468 - RNA, 19 nt, Artificial Sequence
  Description of Artificial Sequence: Synthetic oligonucleotide
  Sense strand starting at position 3569 of SEQ ID NO: 1242769
cuguucucauuguuuaacu

SEQ ID NO: 1371469 - RNA, 19 nt, Artificial Sequence
  Description of Artificial Sequence: Synthetic oligonucleotide
  Antisense strand to SEQ ID NO: 1371468
aguuaaacaaugagaacag

SEQ ID NO: 1371470 - RNA, 19 nt, Artificial Sequence
  Description of Artificial Sequence: Synthetic oligonucleotide
  Sense strand starting at position 3710 of SEQ ID NO: 1242769
guuccuauaucuguacaaa

SEQ ID NO: 1371471 - RNA, 19 nt, Artificial Sequence
  Description of Artificial Sequence: Synthetic oligonucleotide
  Antisense strand to SEQ ID NO: 1371470
uuuguacagauauaggaac

SEQ ID NO: 1371472 - RNA, 19 nt, Artificial Sequence
  Description of Artificial Sequence: Synthetic oligonucleotide
  Sense strand starting at position 3726 of SEQ ID NO: 1242769
aaaugagaguuguaaagau

SEQ ID NO: 1371473 - RNA, 19 nt, Artificial Sequence
  Description of Artificial Sequence: Synthetic oligonucleotide
  Antisense strand to SEQ ID NO: 1371472
aucuuuacaacucucauuu

SEQ ID NO: 1371474 - RNA, 19 nt, Artificial Sequence
  Description of Artificial Sequence: Synthetic oligonucleotide
  Sense strand starting at position 3733 of SEQ ID NO: 1242769
aguuguaaagauuaaguca

SEQ ID NO: 1371475 - RNA, 19 nt, Artificial Sequence
  Description of Artificial Sequence: Synthetic oligonucleotide
  Antisense strand to SEQ ID NO: 1371474
ugacuuaaucuuuacaacu

SEQ ID NO: 1371476 - RNA, 19 nt, Artificial Sequence
  Description of Artificial Sequence: Synthetic oligonucleotide
  Sense strand starting at position 3854 of SEQ ID NO: 1242769
cuggauuccucacuuuaga

SEQ ID NO: 1371477 - RNA, 19 nt, Artificial Sequence
  Description of Artificial Sequence: Synthetic oligonucleotide
  Antisense strand to SEQ ID NO: 1371476
ucuaaagugaggaauccag

SEQ ID NO: 1371478 - RNA, 19 nt, Artificial Sequence
  Description of Artificial Sequence: Synthetic oligonucleotide
  Sense strand starting at position 201 of SEQ ID NO: 1242770
ugaccuggauuccugacau

SEQ ID NO: 1371479 - RNA, 19 nt, Artificial Sequence
  Description of Artificial Sequence: Synthetic oligonucleotide
  Antisense strand to SEQ ID NO: 1371478
augucaggaauccagguca

SEQ ID NO: 1371480 - RNA, 19 nt, Artificial Sequence
  Description of Artificial Sequence: Synthetic oligonucleotide
  Sense strand starting at position 267 of SEQ ID NO: 1242770
ccucuuaugagguggucuu

SEQ ID NO: 1371481 - RNA, 19 nt, Artificial Sequence
  Description of Artificial Sequence: Synthetic oligonucleotide
  Antisense strand to SEQ ID NO: 1371480
aagaccaccucauaagagg

SEQ ID NO: 1371482 - RNA, 19 nt, Artificial Sequence
  Description of Artificial Sequence: Synthetic oligonucleotide
  Sense strand starting at position 597 of SEQ ID NO: 1242770
agcgcucucaucuguaaag

SEQ ID NO: 1371483 - RNA, 19 nt, Artificial Sequence
  Description of Artificial Sequence: Synthetic oligonucleotide
  Antisense strand to SEQ ID NO: 1371482
cuuuacagaugagagcgcu

SEQ ID NO: 1371484 - RNA, 19 nt, Artificial Sequence
  Description of Artificial Sequence: Synthetic oligonucleotide
  Sense strand starting at position 598 of SEQ ID NO: 1242770
gcgcucucaucuguaaagu

SEQ ID NO: 1371485 - RNA, 19 nt, Artificial Sequence
  Description of Artificial Sequence: Synthetic oligonucleotide
  Antisense strand to SEQ ID NO: 1371484
acuuuacagaugagagcgc

SEQ ID NO: 1371486 - RNA, 19 nt, Artificial Sequence
  Description of Artificial Sequence: Synthetic oligonucleotide
  Sense strand starting at position 599 of SEQ ID NO: 1242770
cgcucucaucuguaaagug

SEQ ID NO: 1371487 - RNA, 19 nt, Artificial Sequence
  Description of Artificial Sequence: Synthetic oligonucleotide
  Antisense strand to SEQ ID NO: 1371486
cacuuuacagaugagagcg

SEQ ID NO: 1371488 - RNA, 19 nt, Artificial Sequence
  Description of Artificial Sequence: Synthetic oligonucleotide
  Sense strand starting at position 637 of SEQ ID NO: 1242770
ccaaguuccugggaucuaa

SEQ ID NO: 1371489 - RNA, 19 nt, Artificial Sequence
  Description of Artificial Sequence: Synthetic oligonucleotide
  Antisense strand to SEQ ID NO: 1371488
uuagaucccaggaacuugg

SEQ ID NO: 1371490 - RNA, 19 nt, Artificial Sequence
  Description of Artificial Sequence: Synthetic oligonucleotide
  Sense strand starting at position 641 of SEQ ID NO: 1242770
guuccugggaucuaagcaa

SEQ ID NO: 1371491 - RNA, 19 nt, Artificial Sequence
  Description of Artificial Sequence: Synthetic oligonucleotide
  Antisense strand to SEQ ID NO: 1371490
uugcuuagaucccaggaac

SEQ ID NO: 1371492 - RNA, 19 nt, Artificial Sequence
  Description of Artificial Sequence: Synthetic oligonucleotide
  Sense strand starting at position 2328 of SEQ ID NO: 1242770
ucuggaguucagcgugauc

SEQ ID NO: 1371493 - RNA, 19 nt, Artificial Sequence
  Description of Artificial Sequence: Synthetic oligonucleotide
  Antisense strand to SEQ ID NO: 1371492
gaucacgcugaacuccaga

SEQ ID NO: 1371494 - RNA, 19 nt, Artificial Sequence
  Description of Artificial Sequence: Synthetic oligonucleotide
  Sense strand starting at position 2330 of SEQ ID NO: 1242770
uggaguucagcgugaucaa

SEQ ID NO: 1371495 - RNA, 19 nt, Artificial Sequence
  Description of Artificial Sequence: Synthetic oligonucleotide
  Antisense strand to SEQ ID NO: 1371494
uugaucacgcugaacucca

SEQ ID NO: 1371496 - RNA, 19 nt, Artificial Sequence
  Description of Artificial Sequence: Synthetic oligonucleotide
  Sense strand starting at position 2331 of SEQ ID NO: 1242770
ggaguucagcgugaucaag

SEQ ID NO: 1371497 - RNA, 19 nt, Artificial Sequence
  Description of Artificial Sequence: Synthetic oligonucleotide
  Antisense strand to SEQ ID NO: 1371496
cuugaucacgcugaacucc

SEQ ID NO: 1371498 - RNA, 19 nt, Artificial Sequence
  Description of Artificial Sequence: Synthetic oligonucleotide
  Sense strand starting at position 2560 of SEQ ID NO: 1242770
cugugauggugucuuuaag

SEQ ID NO: 1371499 - RNA, 19 nt, Artificial Sequence
  Description of Artificial Sequence: Synthetic oligonucleotide
  Antisense strand to SEQ ID NO: 1371498
cuuaaagacaccaucacag

SEQ ID NO: 1371500 - RNA, 19 nt, Artificial Sequence
  Description of Artificial Sequence: Synthetic oligonucleotide
  Sense strand starting at position 2574 of SEQ ID NO: 1242770
uuaagaggcccuuagguuu

SEQ ID NO: 1371501 - RNA, 19 nt, Artificial Sequence
  Description of Artificial Sequence: Synthetic oligonucleotide
  Antisense strand to SEQ ID NO: 1371500
aaaccuaagggccucuuaa

SEQ ID NO: 1371502 - RNA, 19 nt, Artificial Sequence
  Description of Artificial Sequence: Synthetic oligonucleotide
  Sense strand starting at position 2612 of SEQ ID NO: 1242770
gagagcuuauggcacagua

SEQ ID NO: 1371503 - RNA, 19 nt, Artificial Sequence
  Description of Artificial Sequence: Synthetic oligonucleotide
  Antisense strand to SEQ ID NO: 1371502
uacugugccauaagcucuc

SEQ ID NO: 1371504 - RNA, 19 nt, Artificial Sequence
  Description of Artificial Sequence: Synthetic oligonucleotide
  Sense strand starting at position 2614 of SEQ ID NO: 1242770
gagcuuauggcacaguacu

SEQ ID NO: 1371505 - RNA, 19 nt, Artificial Sequence
  Description of Artificial Sequence: Synthetic oligonucleotide
  Antisense strand to SEQ ID NO: 1371504
aguacugugccauaagcuc

SEQ ID NO: 1371506 - RNA, 19 nt, Artificial Sequence
  Description of Artificial Sequence: Synthetic oligonucleotide
  Sense strand starting at position 2689 of SEQ ID NO: 1242770
uagggugcuuugccaacaa

SEQ ID NO: 1371507 - RNA, 19 nt, Artificial Sequence
  Description of Artificial Sequence: Synthetic oligonucleotide
  Antisense strand to SEQ ID NO: 1371506
uuguuggcaaagcacccua

SEQ ID NO: 1371508 - RNA, 19 nt, Artificial Sequence
  Description of Artificial Sequence: Synthetic oligonucleotide
  Sense strand starting at position 2884 of SEQ ID NO: 1242770
guggcaccgugccuauaau

SEQ ID NO: 1371509 - RNA, 19 nt, Artificial Sequence
  Description of Artificial Sequence: Synthetic oligonucleotide
  Antisense strand to SEQ ID NO: 1371508
auuauaggcacggugccac

SEQ ID NO: 1371510 - RNA, 19 nt, Artificial Sequence
  Description of Artificial Sequence: Synthetic oligonucleotide
  Sense strand starting at position 3109 of SEQ ID NO: 1242770
agcacucugugacuacaaa

SEQ ID NO: 1371511 - RNA, 19 nt, Artificial Sequence
  Description of Artificial Sequence: Synthetic oligonucleotide
  Antisense strand to SEQ ID NO: 1371510
uuuguagucacagagugcu

SEQ ID NO: 1371512 - RNA, 19 nt, Artificial Sequence
  Description of Artificial Sequence: Synthetic oligonucleotide
  Sense strand starting at position 3208 of SEQ ID NO: 1242770
ccucaaagacucugcaaga

SEQ ID NO: 1371513 - RNA, 19 nt, Artificial Sequence
  Description of Artificial Sequence: Synthetic oligonucleotide
  Antisense strand to SEQ ID NO: 1371512
ucuugcagagucuuugagg

SEQ ID NO: 1371514 - RNA, 19 nt, Artificial Sequence
  Description of Artificial Sequence: Synthetic oligonucleotide
  Sense strand starting at position 3333 of SEQ ID NO: 1242770
uuuguuguggaauguuuau

SEQ ID NO: 1371515 - RNA, 19 nt, Artificial Sequence
  Description of Artificial Sequence: Synthetic oligonucleotide
  Antisense strand to SEQ ID NO: 1371514
auaaacauuccacaacaaa

SEQ ID NO: 1371516 - RNA, 19 nt, Artificial Sequence
  Description of Artificial Sequence: Synthetic oligonucleotide
  Sense strand starting at position 3339 of SEQ ID NO: 1242770
guggaauguuuauaacauu

SEQ ID NO: 1371517 - RNA, 19 nt, Artificial Sequence
  Description of Artificial Sequence: Synthetic oligonucleotide
  Antisense strand to SEQ ID NO: 1371516
aauguuauaaacauuccac

SEQ ID NO: 1371518 - RNA, 19 nt, Artificial Sequence
  Description of Artificial Sequence: Synthetic oligonucleotide
  Sense strand starting at position 3353 of SEQ ID NO: 1242770
acauuuacauguggauuaa

SEQ ID NO: 1371519 - RNA, 19 nt, Artificial Sequence
  Description of Artificial Sequence: Synthetic oligonucleotide
  Antisense strand to SEQ ID NO: 1371518
uuaauccacauguaaaugu

SEQ ID NO: 1371520 - RNA, 19 nt, Artificial Sequence
  Description of Artificial Sequence: Synthetic oligonucleotide
  Sense strand starting at position 3363 of SEQ ID NO: 1242770
guggauuaaguauacuauu

SEQ ID NO: 1371521 - RNA, 19 nt, Artificial Sequence
  Description of Artificial Sequence: Synthetic oligonucleotide
  Antisense strand to SEQ ID NO: 1371520
aauaguauacuuaauccac

SEQ ID NO: 1371522 - RNA, 19 nt, Artificial Sequence
  Description of Artificial Sequence: Synthetic oligonucleotide
  Sense strand starting at position 3429 of SEQ ID NO: 1242770
ugugcucacuacugaguga

SEQ ID NO: 1371523 - RNA, 19 nt, Artificial Sequence
  Description of Artificial Sequence: Synthetic oligonucleotide
  Antisense strand to SEQ ID NO: 1371522
ucacucaguagugagcaca

SEQ ID NO: 1371524 - RNA, 19 nt, Artificial Sequence
  Description of Artificial Sequence: Synthetic oligonucleotide
  Sense strand starting at position 3430 of SEQ ID NO: 1242770
gugcucacuacugagugaa

SEQ ID NO: 1371525 - RNA, 19 nt, Artificial Sequence
  Description of Artificial Sequence: Synthetic oligonucleotide
  Antisense strand to SEQ ID NO: 1371524
uucacucaguagugagcac

SEQ ID NO: 1371526 - RNA, 19 nt, Artificial Sequence
  Description of Artificial Sequence: Synthetic oligonucleotide
  Sense strand starting at position 3760 of SEQ ID NO: 1242770
gagacucuguaugaaagaa

SEQ ID NO: 1371527 - RNA, 19 nt, Artificial Sequence
  Description of Artificial Sequence: Synthetic oligonucleotide
  Antisense strand to SEQ ID NO: 1371526
uucuuucauacagagucuc

SEQ ID NO: 1371528 - RNA, 19 nt, Artificial Sequence
  Description of Artificial Sequence: Synthetic oligonucleotide
  Sense strand starting at position 3802 of SEQ ID NO: 1242770
caaauuggcuccuugggau

SEQ ID NO: 1371529 - RNA, 19 nt, Artificial Sequence
  Description of Artificial Sequence: Synthetic oligonucleotide
  Antisense strand to SEQ ID NO: 1371528
aucccaaggagccaauuug

SEQ ID NO: 1371530 - RNA, 19 nt, Artificial Sequence
  Description of Artificial Sequence: Synthetic oligonucleotide
  Sense strand starting at position 3815 of SEQ ID NO: 1242770
ugggauagcuuguggcuuu

SEQ ID NO: 1371531 - RNA, 19 nt, Artificial Sequence
  Description of Artificial Sequence: Synthetic oligonucleotide
  Antisense strand to SEQ ID NO: 1371530
aaagccacaagcuauccca

SEQ ID NO: 1371532 - RNA, 19 nt, Artificial Sequence
  Description of Artificial Sequence: Synthetic oligonucleotide
  Sense strand starting at position 3849 of SEQ ID NO: 1242770
uuggguauagggugaauaa

SEQ ID NO: 1371533 - RNA, 19 nt, Artificial Sequence
  Description of Artificial Sequence: Synthetic oligonucleotide
  Antisense strand to SEQ ID NO: 1371532
uuauucacccuauacccaa

SEQ ID NO: 1371534 - RNA, 19 nt, Artificial Sequence
  Description of Artificial Sequence: Synthetic oligonucleotide
  Sense strand starting at position 24 of SEQ ID NO: 1242771
uguggcugcguuugaacau

SEQ ID NO: 1371535 - RNA, 19 nt, Artificial Sequence
  Description of Artificial Sequence: Synthetic oligonucleotide
  Antisense strand to SEQ ID NO: 1371534
auguucaaacgcagccaca

SEQ ID NO: 1371536 - RNA, 19 nt, Artificial Sequence
  Description of Artificial Sequence: Synthetic oligonucleotide
  Sense strand starting at position 30 of SEQ ID NO: 1242771
ugcguuugaacaugucuau

SEQ ID NO: 1371537 - RNA, 19 nt, Artificial Sequence
  Description of Artificial Sequence: Synthetic oligonucleotide
  Antisense strand to SEQ ID NO: 1371536
auagacauguucaaacgca

SEQ ID NO: 1371538 - RNA, 19 nt, Artificial Sequence
  Description of Artificial Sequence: Synthetic oligonucleotide
  Sense strand starting at position 36 of SEQ ID NO: 1242771
ugaacaugucuauggcuga

SEQ ID NO: 1371539 - RNA, 19 nt, Artificial Sequence
  Description of Artificial Sequence: Synthetic oligonucleotide
  Antisense strand to SEQ ID NO: 1371538
ucagccauagacauguuca

SEQ ID NO: 1371540 - RNA, 19 nt, Artificial Sequence
  Description of Artificial Sequence: Synthetic oligonucleotide
  Sense strand starting at position 39 of SEQ ID NO: 1242771
acaugucuauggcugagua

SEQ ID NO: 1371541 - RNA, 19 nt, Artificial Sequence
  Description of Artificial Sequence: Synthetic oligonucleotide
  Antisense strand to SEQ ID NO: 1371540
uacucagccauagacaugu

SEQ ID NO: 1371542 - RNA, 19 nt, Artificial Sequence
  Description of Artificial Sequence: Synthetic oligonucleotide
  Sense strand starting at position 41 of SEQ ID NO: 1242771
augucuauggcugaguagu

SEQ ID NO: 1371543 - RNA, 19 nt, Artificial Sequence
  Description of Artificial Sequence: Synthetic oligonucleotide
  Antisense strand to SEQ ID NO: 1371542
acuacucagccauagacau

SEQ ID NO: 1371544 - RNA, 19 nt, Artificial Sequence
  Description of Artificial Sequence: Synthetic oligonucleotide
  Sense strand starting at position 43 of SEQ ID NO: 1242771
gucuauggcugaguaguuu

SEQ ID NO: 1371545 - RNA, 19 nt, Artificial Sequence
  Description of Artificial Sequence: Synthetic oligonucleotide
  Antisense strand to SEQ ID NO: 1371544
aaacuacucagccauagac

SEQ ID NO: 1371546 - RNA, 19 nt, Artificial Sequence
  Description of Artificial Sequence: Synthetic oligonucleotide
  Sense strand starting at position 52 of SEQ ID NO: 1242771
ugaguaguuucuagugggu

SEQ ID NO: 1371547 - RNA, 19 nt, Artificial Sequence
  Description of Artificial Sequence: Synthetic oligonucleotide
  Antisense strand to SEQ ID NO: 1371546
acccacuagaaacuacuca

SEQ ID NO: 1371548 - RNA, 19 nt, Artificial Sequence
  Description of Artificial Sequence: Synthetic oligonucleotide
  Sense strand starting at position 540 of SEQ ID NO: 1242771
ugaccuggauuccugacau

SEQ ID NO: 1371549 - RNA, 19 nt, Artificial Sequence
  Description of Artificial Sequence: Synthetic oligonucleotide
  Antisense strand to SEQ ID NO: 1371548
augucaggaauccagguca

SEQ ID NO: 1371550 - RNA, 19 nt, Artificial Sequence
  Description of Artificial Sequence: Synthetic oligonucleotide
  Sense strand starting at position 606 of SEQ ID NO: 1242771
ccucuuaugagguggucuu

SEQ ID NO: 1371551 - RNA, 19 nt, Artificial Sequence
  Description of Artificial Sequence: Synthetic oligonucleotide
  Antisense strand to SEQ ID NO: 1371550
aagaccaccucauaagagg

SEQ ID NO: 1371552 - RNA, 19 nt, Artificial Sequence
  Description of Artificial Sequence: Synthetic oligonucleotide
  Sense strand starting at position 936 of SEQ ID NO: 1242771
agcgcucucaucuguaaag

SEQ ID NO: 1371553 - RNA, 19 nt, Artificial Sequence
  Description of Artificial Sequence: Synthetic oligonucleotide
  Antisense strand to SEQ ID NO: 1371552
cuuuacagaugagagcgcu

SEQ ID NO: 1371554 - RNA, 19 nt, Artificial Sequence
  Description of Artificial Sequence: Synthetic oligonucleotide
  Sense strand starting at position 937 of SEQ ID NO: 1242771
gcgcucucaucuguaaagu

SEQ ID NO: 1371555 - RNA, 19 nt, Artificial Sequence
  Description of Artificial Sequence: Synthetic oligonucleotide
  Antisense strand to SEQ ID NO: 1371554
acuuuacagaugagagcgc

SEQ ID NO: 1371556 - RNA, 19 nt, Artificial Sequence
  Description of Artificial Sequence: Synthetic oligonucleotide
  Sense strand starting at position 938 of SEQ ID NO: 1242771
cgcucucaucuguaaagug

SEQ ID NO: 1371557 - RNA, 19 nt, Artificial Sequence
  Description of Artificial Sequence: Synthetic oligonucleotide
  Antisense strand to SEQ ID NO: 1371556
cacuuuacagaugagagcg

SEQ ID NO: 1371558 - RNA, 19 nt, Artificial Sequence
  Description of Artificial Sequence: Synthetic oligonucleotide
  Sense strand starting at position 976 of SEQ ID NO: 1242771
ccaaguuccugggaucuaa

SEQ ID NO: 1371559 - RNA, 19 nt, Artificial Sequence
  Description of Artificial Sequence: Synthetic oligonucleotide
  Antisense strand to SEQ ID NO: 1371558
uuagaucccaggaacuugg

SEQ ID NO: 1371560 - RNA, 19 nt, Artificial Sequence
  Description of Artificial Sequence: Synthetic oligonucleotide
  Sense strand starting at position 980 of SEQ ID NO: 1242771
guuccugggaucuaagcaa

SEQ ID NO: 1371561 - RNA, 19 nt, Artificial Sequence
  Description of Artificial Sequence: Synthetic oligonucleotide
  Antisense strand to SEQ ID NO: 1371560
uugcuuagaucccaggaac

SEQ ID NO: 1371562 - RNA, 19 nt, Artificial Sequence
  Description of Artificial Sequence: Synthetic oligonucleotide
  Sense strand starting at position 2667 of SEQ ID NO: 1242771
ucuggaguucagcgugauc

SEQ ID NO: 1371563 - RNA, 19 nt, Artificial Sequence
  Description of Artificial Sequence: Synthetic oligonucleotide
  Antisense strand to SEQ ID NO: 1371562
gaucacgcugaacuccaga

SEQ ID NO: 1371564 - RNA, 19 nt, Artificial Sequence
  Description of Artificial Sequence: Synthetic oligonucleotide
  Sense strand starting at position 2669 of SEQ ID NO: 1242771
uggaguucagcgugaucaa

SEQ ID NO: 1371565 - RNA, 19 nt, Artificial Sequence
  Description of Artificial Sequence: Synthetic oligonucleotide
  Antisense strand to SEQ ID NO: 1371564
uugaucacgcugaacucca

SEQ ID NO: 1371566 - RNA, 19 nt, Artificial Sequence
  Description of Artificial Sequence: Synthetic oligonucleotide
  Sense strand starting at position 2670 of SEQ ID NO: 1242771
ggaguucagcgugaucaag

SEQ ID NO: 1371567 - RNA, 19 nt, Artificial Sequence
  Description of Artificial Sequence: Synthetic oligonucleotide
  Antisense strand to SEQ ID NO: 1371566
cuugaucacgcugaacucc

SEQ ID NO: 1371568 - RNA, 19 nt, Artificial Sequence
  Description of Artificial Sequence: Synthetic oligonucleotide
  Sense strand starting at position 2899 of SEQ ID NO: 1242771
cugugauggugucuuuaag

SEQ ID NO: 1371569 - RNA, 19 nt, Artificial Sequence
  Description of Artificial Sequence: Synthetic oligonucleotide
  Antisense strand to SEQ ID NO: 1371568
cuuaaagacaccaucacag

SEQ ID NO: 1371570 - RNA, 19 nt, Artificial Sequence
  Description of Artificial Sequence: Synthetic oligonucleotide
  Sense strand starting at position 2913 of SEQ ID NO: 1242771
uuaagaggcccuuagguuu

SEQ ID NO: 1371571 - RNA, 19 nt, Artificial Sequence
  Description of Artificial Sequence: Synthetic oligonucleotide
  Antisense strand to SEQ ID NO: 1371570
aaaccuaagggccucuuaa

SEQ ID NO: 1371572 - RNA, 19 nt, Artificial Sequence
  Description of Artificial Sequence: Synthetic oligonucleotide
  Sense strand starting at position 2951 of SEQ ID NO: 1242771
gagagcuuauggcacagua

SEQ ID NO: 1371573 - RNA, 19 nt, Artificial Sequence
  Description of Artificial Sequence: Synthetic oligonucleotide
  Antisense strand to SEQ ID NO: 1371572
uacugugccauaagcucuc

SEQ ID NO: 1371574 - RNA, 19 nt, Artificial Sequence
  Description of Artificial Sequence: Synthetic oligonucleotide
  Sense strand starting at position 2953 of SEQ ID NO: 1242771
gagcuuauggcacaguacu

SEQ ID NO: 1371575 - RNA, 19 nt, Artificial Sequence
  Description of Artificial Sequence: Synthetic oligonucleotide
  Antisense strand to SEQ ID NO: 1371574
aguacugugccauaagcuc

SEQ ID NO: 1371576 - RNA, 19 nt, Artificial Sequence
  Description of Artificial Sequence: Synthetic oligonucleotide
  Sense strand starting at position 3028 of SEQ ID NO: 1242771
uagggugcuuugccaacaa

SEQ ID NO: 1371577 - RNA, 19 nt, Artificial Sequence
  Description of Artificial Sequence: Synthetic oligonucleotide
  Antisense strand to SEQ ID NO: 1371576
uuguuggcaaagcacccua

SEQ ID NO: 1371578 - RNA, 19 nt, Artificial Sequence
  Description of Artificial Sequence: Synthetic oligonucleotide
  Sense strand starting at position 3223 of SEQ ID NO: 1242771
guggcaccgugccuauaau

SEQ ID NO: 1371579 - RNA, 19 nt, Artificial Sequence
  Description of Artificial Sequence: Synthetic oligonucleotide
  Antisense strand to SEQ ID NO: 1371578
auuauaggcacggugccac

SEQ ID NO: 1371580 - RNA, 19 nt, Artificial Sequence
  Description of Artificial Sequence: Synthetic oligonucleotide
  Sense strand starting at position 3448 of SEQ ID NO: 1242771
agcacucugugacuacaaa

SEQ ID NO: 1371581 - RNA, 19 nt, Artificial Sequence
  Description of Artificial Sequence: Synthetic oligonucleotide
  Antisense strand to SEQ ID NO: 1371580
uuuguagucacagagugcu

SEQ ID NO: 1371582 - RNA, 19 nt, Artificial Sequence
  Description of Artificial Sequence: Synthetic oligonucleotide
  Sense strand starting at position 3547 of SEQ ID NO: 1242771
ccucaaagacucugcaaga

SEQ ID NO: 1371583 - RNA, 19 nt, Artificial Sequence
  Description of Artificial Sequence: Synthetic oligonucleotide
  Antisense strand to SEQ ID NO: 1371582
ucuugcagagucuuugagg

SEQ ID NO: 1371584 - RNA, 19 nt, Artificial Sequence
  Description of Artificial Sequence: Synthetic oligonucleotide
  Sense strand starting at position 3672 of SEQ ID NO: 1242771
uuuguuguggaauguuuau

SEQ ID NO: 1371585 - RNA, 19 nt, Artificial Sequence
  Description of Artificial Sequence: Synthetic oligonucleotide
  Antisense strand to SEQ ID NO: 1371584
auaaacauuccacaacaaa

SEQ ID NO: 1371586 - RNA, 19 nt, Artificial Sequence
  Description of Artificial Sequence: Synthetic oligonucleotide
  Sense strand starting at position 3678 of SEQ ID NO: 1242771
guggaauguuuauaacauu

SEQ ID NO: 1371587 - RNA, 19 nt, Artificial Sequence
  Description of Artificial Sequence: Synthetic oligonucleotide
  Antisense strand to SEQ ID NO: 1371586
aauguuauaaacauuccac

SEQ ID NO: 1371588 - RNA, 19 nt, Artificial Sequence
  Description of Artificial Sequence: Synthetic oligonucleotide
  Sense strand starting at position 3692 of SEQ ID NO: 1242771
acauuuacauguggauuaa

SEQ ID NO: 1371589 - RNA, 19 nt, Artificial Sequence
  Description of Artificial Sequence: Synthetic oligonucleotide
  Antisense strand to SEQ ID NO: 1371588
uuaauccacauguaaaugu

SEQ ID NO: 1371590 - RNA, 19 nt, Artificial Sequence
  Description of Artificial Sequence: Synthetic oligonucleotide
  Sense strand starting at position 3702 of SEQ ID NO: 1242771
guggauuaaguauacuauu

SEQ ID NO: 1371591 - RNA, 19 nt, Artificial Sequence
  Description of Artificial Sequence: Synthetic oligonucleotide
  Antisense strand to SEQ ID NO: 1371590
aauaguauacuuaauccac

SEQ ID NO: 1371592 - RNA, 19 nt, Artificial Sequence
  Description of Artificial Sequence: Synthetic oligonucleotide
  Sense strand starting at position 3768 of SEQ ID NO: 1242771
ugugcucacuacugaguga

SEQ ID NO: 1371593 - RNA, 19 nt, Artificial Sequence
  Description of Artificial Sequence: Synthetic oligonucleotide
  Antisense strand to SEQ ID NO: 1371592
ucacucaguagugagcaca

SEQ ID NO: 1371594 - RNA, 19 nt, Artificial Sequence
  Description of Artificial Sequence: Synthetic oligonucleotide
  Sense strand starting at position 3769 of SEQ ID NO: 1242771
gugcucacuacugagugaa

SEQ ID NO: 1371595 - RNA, 19 nt, Artificial Sequence
  Description of Artificial Sequence: Synthetic oligonucleotide
  Antisense strand to SEQ ID NO: 1371594
uucacucaguagugagcac

SEQ ID NO: 1371596 - RNA, 19 nt, Artificial Sequence
  Description of Artificial Sequence: Synthetic oligonucleotide
  Sense strand starting at position 249 of SEQ ID NO: 1242772
gccuaugauucugucauuu

SEQ ID NO: 1371597 - RNA, 19 nt, Artificial Sequence
  Description of Artificial Sequence: Synthetic oligonucleotide
  Antisense strand to SEQ ID NO: 1371596
aaaugacagaaucauaggc

SEQ ID NO: 1371598 - RNA, 19 nt, Artificial Sequence
  Description of Artificial Sequence: Synthetic oligonucleotide
  Sense strand starting at position 503 of SEQ ID NO: 1242772
gguggaacgugcuuguagu

SEQ ID NO: 1371599 - RNA, 19 nt, Artificial Sequence
  Description of Artificial Sequence: Synthetic oligonucleotide
  Antisense strand to SEQ ID NO: 1371598
acuacaagcacguuccacc

SEQ ID NO: 1371600 - RNA, 19 nt, Artificial Sequence
  Description of Artificial Sequence: Synthetic oligonucleotide
  Sense strand starting at position 668 of SEQ ID NO: 1242772
ggcuucucuggcuaugaga

SEQ ID NO: 1371601 - RNA, 19 nt, Artificial Sequence
  Description of Artificial Sequence: Synthetic oligonucleotide
  Antisense strand to SEQ ID NO: 1371600
ucucauagccagagaagcc

SEQ ID NO: 1371602 - RNA, 19 nt, Artificial Sequence
  Description of Artificial Sequence: Synthetic oligonucleotide
  Sense strand starting at position 670 of SEQ ID NO: 1242772
cuucucuggcuaugagaag

SEQ ID NO: 1371603 - RNA, 19 nt, Artificial Sequence
  Description of Artificial Sequence: Synthetic oligonucleotide
  Antisense strand to SEQ ID NO: 1371602
cuucucauagccagagaag

SEQ ID NO: 1371604 - RNA, 19 nt, Artificial Sequence
  Description of Artificial Sequence: Synthetic oligonucleotide
  Sense strand starting at position 719 of SEQ ID NO: 1242772
aaggccuaccugugacaga

SEQ ID NO: 1371605 - RNA, 19 nt, Artificial Sequence
  Description of Artificial Sequence: Synthetic oligonucleotide
  Antisense strand to SEQ ID NO: 1371604
ucugucacagguaggccuu

SEQ ID NO: 1371606 - RNA, 19 nt, Artificial Sequence
  Description of Artificial Sequence: Synthetic oligonucleotide
  Sense strand starting at position 883 of SEQ ID NO: 1242772
acaggacccugagaaauga

SEQ ID NO: 1371607 - RNA, 19 nt, Artificial Sequence
  Description of Artificial Sequence: Synthetic oligonucleotide
  Antisense strand to SEQ ID NO: 1371606
ucauuucucaggguccugu

SEQ ID NO: 1371608 - RNA, 19 nt, Artificial Sequence
  Description of Artificial Sequence: Synthetic oligonucleotide
  Sense strand starting at position 923 of SEQ ID NO: 1242772
acagaaaguucucuguuuc

SEQ ID NO: 1371609 - RNA, 19 nt, Artificial Sequence
  Description of Artificial Sequence: Synthetic oligonucleotide
  Antisense strand to SEQ ID NO: 1371608
gaaacagagaacuuucugu

SEQ ID NO: 1371610 - RNA, 19 nt, Artificial Sequence
  Description of Artificial Sequence: Synthetic oligonucleotide
  Sense strand starting at position 1019 of SEQ ID NO: 1242772
gguggauuccgggaugcca

SEQ ID NO: 1371611 - RNA, 19 nt, Artificial Sequence
  Description of Artificial Sequence: Synthetic oligonucleotide
  Antisense strand to SEQ ID NO: 1371610
uggcaucccggaauccacc

SEQ ID NO: 1371612 - RNA, 19 nt, Artificial Sequence
  Description of Artificial Sequence: Synthetic oligonucleotide
  Sense strand starting at position 1037 of SEQ ID NO: 1242772
aagucugucuucuugguua

SEQ ID NO: 1371613 - RNA, 19 nt, Artificial Sequence
  Description of Artificial Sequence: Synthetic oligonucleotide
  Antisense strand to SEQ ID NO: 1371612
uaaccaagaagacagacuu

SEQ ID NO: 1371614 - RNA, 19 nt, Artificial Sequence
  Description of Artificial Sequence: Synthetic oligonucleotide
  Sense strand starting at position 1039 of SEQ ID NO: 1242772
gucugucuucuugguuaga

SEQ ID NO: 1371615 - RNA, 19 nt, Artificial Sequence
  Description of Artificial Sequence: Synthetic oligonucleotide
  Antisense strand to SEQ ID NO: 1371614
ucuaaccaagaagacagac

SEQ ID NO: 1371616 - RNA, 19 nt, Artificial Sequence
  Description of Artificial Sequence: Synthetic oligonucleotide
  Sense strand starting at position 1040 of SEQ ID NO: 1242772
ucugucuucuugguuagaa

SEQ ID NO: 1371617 - RNA, 19 nt, Artificial Sequence
  Description of Artificial Sequence: Synthetic oligonucleotide
  Antisense strand to SEQ ID NO: 1371616
uucuaaccaagaagacaga

SEQ ID NO: 1371618 - RNA, 19 nt, Artificial Sequence
  Description of Artificial Sequence: Synthetic oligonucleotide
  Sense strand starting at position 1041 of SEQ ID NO: 1242772
cugucuucuugguuagaag

SEQ ID NO: 1371619 - RNA, 19 nt, Artificial Sequence
  Description of Artificial Sequence: Synthetic oligonucleotide
  Antisense strand to SEQ ID NO: 1371618
cuucuaaccaagaagacag

SEQ ID NO: 1371620 - RNA, 19 nt, Artificial Sequence
  Description of Artificial Sequence: Synthetic oligonucleotide
  Sense strand starting at position 1069 of SEQ ID NO: 1242772
cucugcaguguagagaauu

SEQ ID NO: 1371621 - RNA, 19 nt, Artificial Sequence
  Description of Artificial Sequence: Synthetic oligonucleotide
  Antisense strand to SEQ ID NO: 1371620
aauucucuacacugcagag

SEQ ID NO: 1371622 - RNA, 19 nt, Artificial Sequence
  Description of Artificial Sequence: Synthetic oligonucleotide
  Sense strand starting at position 1079 of SEQ ID NO: 1242772
uagagaauugugggcauau

SEQ ID NO: 1371623 - RNA, 19 nt, Artificial Sequence
  Description of Artificial Sequence: Synthetic oligonucleotide
  Antisense strand to SEQ ID NO: 1371622
auaugcccacaauucucua

SEQ ID NO: 1371624 - RNA, 19 nt, Artificial Sequence
  Description of Artificial Sequence: Synthetic oligonucleotide
  Sense strand starting at position 1080 of SEQ ID NO: 1242772
agagaauugugggcauauc

SEQ ID NO: 1371625 - RNA, 19 nt, Artificial Sequence
  Description of Artificial Sequence: Synthetic oligonucleotide
  Antisense strand to SEQ ID NO: 1371624
gauaugcccacaauucucu

SEQ ID NO: 1371626 - RNA, 19 nt, Artificial Sequence
  Description of Artificial Sequence: Synthetic oligonucleotide
  Sense strand starting at position 1081 of SEQ ID NO: 1242772
gagaauugugggcauaucu

SEQ ID NO: 1371627 - RNA, 19 nt, Artificial Sequence
  Description of Artificial Sequence: Synthetic oligonucleotide
  Antisense strand to SEQ ID NO: 1371626
agauaugcccacaauucuc

SEQ ID NO: 1371628 - RNA, 19 nt, Artificial Sequence
  Description of Artificial Sequence: Synthetic oligonucleotide
  Sense strand starting at position 2384 of SEQ ID NO: 1242772
cagguucuccuuugaagaa

SEQ ID NO: 1371629 - RNA, 19 nt, Artificial Sequence
  Description of Artificial Sequence: Synthetic oligonucleotide
  Antisense strand to SEQ ID NO: 1371628
uucuucaaaggagaaccug

SEQ ID NO: 1371630 - RNA, 19 nt, Artificial Sequence
  Description of Artificial Sequence: Synthetic oligonucleotide
  Sense strand starting at position 2385 of SEQ ID NO: 1242772
agguucuccuuugaagaaa

SEQ ID NO: 1371631 - RNA, 19 nt, Artificial Sequence
  Description of Artificial Sequence: Synthetic oligonucleotide
  Antisense strand to SEQ ID NO: 1371630
uuucuucaaaggagaaccu

SEQ ID NO: 1371632 - RNA, 19 nt, Artificial Sequence
  Description of Artificial Sequence: Synthetic oligonucleotide
  Sense strand starting at position 2428 of SEQ ID NO: 1242772
gggagcuucucgguaaaga

SEQ ID NO: 1371633 - RNA, 19 nt, Artificial Sequence
  Description of Artificial Sequence: Synthetic oligonucleotide
  Antisense strand to SEQ ID NO: 1371632
ucuuuaccgagaagcuccc

SEQ ID NO: 1371634 - RNA, 19 nt, Artificial Sequence
  Description of Artificial Sequence: Synthetic oligonucleotide
  Sense strand starting at position 2429 of SEQ ID NO: 1242772
ggagcuucucgguaaagac

SEQ ID NO: 1371635 - RNA, 19 nt, Artificial Sequence
  Description of Artificial Sequence: Synthetic oligonucleotide
  Antisense strand to SEQ ID NO: 1371634
gucuuuaccgagaagcucc

SEQ ID NO: 1371636 - RNA, 19 nt, Artificial Sequence
  Description of Artificial Sequence: Synthetic oligonucleotide
  Sense strand starting at position 2495 of SEQ ID NO: 1242772
gugggcuugacucagacua

SEQ ID NO: 1371637 - RNA, 19 nt, Artificial Sequence
  Description of Artificial Sequence: Synthetic oligonucleotide
  Antisense strand to SEQ ID NO: 1371636
uagucugagucaagcccac

SEQ ID NO: 1371638 - RNA, 19 nt, Artificial Sequence
  Description of Artificial Sequence: Synthetic oligonucleotide
  Sense strand starting at position 2497 of SEQ ID NO: 1242772
gggcuugacucagacuauu

SEQ ID NO: 1371639 - RNA, 19 nt, Artificial Sequence
  Description of Artificial Sequence: Synthetic oligonucleotide
  Antisense strand to SEQ ID NO: 1371638
aauagucugagucaagccc

SEQ ID NO: 1371640 - RNA, 19 nt, Artificial Sequence
  Description of Artificial Sequence: Synthetic oligonucleotide
  Sense strand starting at position 2509 of SEQ ID NO: 1242772
gacuauugggccgacgaga

SEQ ID NO: 1371641 - RNA, 19 nt, Artificial Sequence
  Description of Artificial Sequence: Synthetic oligonucleotide
  Antisense strand to SEQ ID NO: 1371640
ucucgucggcccaauaguc

SEQ ID NO: 1371642 - RNA, 19 nt, Artificial Sequence
  Description of Artificial Sequence: Synthetic oligonucleotide
  Sense strand starting at position 2531 of SEQ ID NO: 1242772
ggguaagugccuguguucu

SEQ ID NO: 1371643 - RNA, 19 nt, Artificial Sequence
  Description of Artificial Sequence: Synthetic oligonucleotide
  Antisense strand to SEQ ID NO: 1371642
agaacacaggcacuuaccc

SEQ ID NO: 1371644 - RNA, 19 nt, Artificial Sequence
  Description of Artificial Sequence: Synthetic oligonucleotide
  Sense strand starting at position 2533 of SEQ ID NO: 1242772
guaagugccuguguucuca

SEQ ID NO: 1371645 - RNA, 19 nt, Artificial Sequence
  Description of Artificial Sequence: Synthetic oligonucleotide
  Antisense strand to SEQ ID NO: 1371644
ugagaacacaggcacuuac

SEQ ID NO: 1371646 - RNA, 19 nt, Artificial Sequence
  Description of Artificial Sequence: Synthetic oligonucleotide
  Sense strand starting at position 2691 of SEQ ID NO: 1242772
uagcucugucuacgcauaa

SEQ ID NO: 1371647 - RNA, 19 nt, Artificial Sequence
  Description of Artificial Sequence: Synthetic oligonucleotide
  Antisense strand to SEQ ID NO: 1371646
uuaugcguagacagagcua

SEQ ID NO: 1371648 - RNA, 19 nt, Artificial Sequence
  Description of Artificial Sequence: Synthetic oligonucleotide
  Sense strand starting at position 2692 of SEQ ID NO: 1242772
agcucugucuacgcauaaa

SEQ ID NO: 1371649 - RNA, 19 nt, Artificial Sequence
  Description of Artificial Sequence: Synthetic oligonucleotide
  Antisense strand to SEQ ID NO: 1371648
uuuaugcguagacagagcu

SEQ ID NO: 1371650 - RNA, 19 nt, Artificial Sequence
  Description of Artificial Sequence: Synthetic oligonucleotide
  Sense strand starting at position 2695 of SEQ ID NO: 1242772
ucugucuacgcauaaagua

SEQ ID NO: 1371651 - RNA, 19 nt, Artificial Sequence
  Description of Artificial Sequence: Synthetic oligonucleotide
  Antisense strand to SEQ ID NO: 1371650
uacuuuaugcguagacaga

SEQ ID NO: 1371652 - RNA, 19 nt, Artificial Sequence
  Description of Artificial Sequence: Synthetic oligonucleotide
  Sense strand starting at position 2741 of SEQ ID NO: 1242772
ggcauuaauuagggaccaa

SEQ ID NO: 1371653 - RNA, 19 nt, Artificial Sequence
  Description of Artificial Sequence: Synthetic oligonucleotide
  Antisense strand to SEQ ID NO: 1371652
uuggucccuaauuaaugcc

SEQ ID NO: 1371654 - RNA, 19 nt, Artificial Sequence
  Description of Artificial Sequence: Synthetic oligonucleotide
  Sense strand starting at position 2809 of SEQ ID NO: 1242772
uaagaagugucgcuuugau

SEQ ID NO: 1371655 - RNA, 19 nt, Artificial Sequence
  Description of Artificial Sequence: Synthetic oligonucleotide
  Antisense strand to SEQ ID NO: 1371654
aucaaagcgacacuucuua

SEQ ID NO: 1371656 - RNA, 19 nt, Artificial Sequence
  Description of Artificial Sequence: Synthetic oligonucleotide
  Sense strand starting at position 2856 of SEQ ID NO: 1242772
gagagcuugccauguucua

SEQ ID NO: 1371657 - RNA, 19 nt, Artificial Sequence
  Description of Artificial Sequence: Synthetic oligonucleotide
  Antisense strand to SEQ ID NO: 1371656
uagaacauggcaagcucuc

SEQ ID NO: 1371658 - RNA, 19 nt, Artificial Sequence
  Description of Artificial Sequence: Synthetic oligonucleotide
  Sense strand starting at position 2881 of SEQ ID NO: 1242772
gagcaaggcgcuugaagaa

SEQ ID NO: 1371659 - RNA, 19 nt, Artificial Sequence
  Description of Artificial Sequence: Synthetic oligonucleotide
  Antisense strand to SEQ ID NO: 1371658
uucuucaagcgccuugcuc

SEQ ID NO: 1371660 - RNA, 19 nt, Artificial Sequence
  Description of Artificial Sequence: Synthetic oligonucleotide
  Sense strand starting at position 2890 of SEQ ID NO: 1242772
gcuugaagaacguaucguu

SEQ ID NO: 1371661 - RNA, 19 nt, Artificial Sequence
  Description of Artificial Sequence: Synthetic oligonucleotide
  Antisense strand to SEQ ID NO: 1371660
aacgauacguucuucaagc

SEQ ID NO: 1371662 - RNA, 19 nt, Artificial Sequence
  Description of Artificial Sequence: Synthetic oligonucleotide
  Sense strand starting at position 2895 of SEQ ID NO: 1242772
aagaacguaucguuguuau

SEQ ID NO: 1371663 - RNA, 19 nt, Artificial Sequence
  Description of Artificial Sequence: Synthetic oligonucleotide
  Antisense strand to SEQ ID NO: 1371662
auaacaacgauacguucuu

SEQ ID NO: 1371664 - RNA, 19 nt, Artificial Sequence
  Description of Artificial Sequence: Synthetic oligonucleotide
  Sense strand starting at position 2898 of SEQ ID NO: 1242772
aacguaucguuguuauuuc

SEQ ID NO: 1371665 - RNA, 19 nt, Artificial Sequence
  Description of Artificial Sequence: Synthetic oligonucleotide
  Antisense strand to SEQ ID NO: 1371664
gaaauaacaacgauacguu

SEQ ID NO: 1371666 - RNA, 19 nt, Artificial Sequence
  Description of Artificial Sequence: Synthetic oligonucleotide
  Sense strand starting at position 2949 of SEQ ID NO: 1242772
cuggaaguagcuuguccaa

SEQ ID NO: 1371667 - RNA, 19 nt, Artificial Sequence
  Description of Artificial Sequence: Synthetic oligonucleotide
  Antisense strand to SEQ ID NO: 1371666
uuggacaagcuacuuccag

SEQ ID NO: 1371668 - RNA, 19 nt, Artificial Sequence
  Description of Artificial Sequence: Synthetic oligonucleotide
  Sense strand starting at position 3340 of SEQ ID NO: 1242772
acacacaucuucucguaua

SEQ ID NO: 1371669 - RNA, 19 nt, Artificial Sequence
  Description of Artificial Sequence: Synthetic oligonucleotide
  Antisense strand to SEQ ID NO: 1371668
uauacgagaagaugugugu

SEQ ID NO: 1371670 - RNA, 19 nt, Artificial Sequence
  Description of Artificial Sequence: Synthetic oligonucleotide
  Sense strand starting at position 3368 of SEQ ID NO: 1242772
auuguucuacuguauuacu

SEQ ID NO: 1371671 - RNA, 19 nt, Artificial Sequence
  Description of Artificial Sequence: Synthetic oligonucleotide
  Antisense strand to SEQ ID NO: 1371670
aguaauacaguagaacaau

SEQ ID NO: 1371672 - RNA, 19 nt, Artificial Sequence
  Description of Artificial Sequence: Synthetic oligonucleotide
  Sense strand starting at position 3490 of SEQ ID NO: 1242772
uggugagaucucugcuuac

SEQ ID NO: 1371673 - RNA, 19 nt, Artificial Sequence
  Description of Artificial Sequence: Synthetic oligonucleotide
  Antisense strand to SEQ ID NO: 1371672
guaagcagagaucucacca

SEQ ID NO: 1371674 - RNA, 19 nt, Artificial Sequence
  Description of Artificial Sequence: Synthetic oligonucleotide
  Sense strand starting at position 3494 of SEQ ID NO: 1242772
gagaucucugcuuacagca

SEQ ID NO: 1371675 - RNA, 19 nt, Artificial Sequence
  Description of Artificial Sequence: Synthetic oligonucleotide
  Antisense strand to SEQ ID NO: 1371674
ugcuguaagcagagaucuc

SEQ ID NO: 1371676 - RNA, 19 nt, Artificial Sequence
  Description of Artificial Sequence: Synthetic oligonucleotide
  Sense strand starting at position 456 of SEQ ID NO: 1242773
ucuuaauucgcauugugcu

SEQ ID NO: 1371677 - RNA, 19 nt, Artificial Sequence
  Description of Artificial Sequence: Synthetic oligonucleotide
  Antisense strand to SEQ ID NO: 1371676
agcacaaugcgaauuaaga

SEQ ID NO: 1371678 - RNA, 19 nt, Artificial Sequence
  Description of Artificial Sequence: Synthetic oligonucleotide
  Sense strand starting at position 464 of SEQ ID NO: 1242773
cgcauugugcuugcuggaa

SEQ ID NO: 1371679 - RNA, 19 nt, Artificial Sequence
  Description of Artificial Sequence: Synthetic oligonucleotide
  Antisense strand to SEQ ID NO: 1371678
uuccagcaagcacaaugcg

SEQ ID NO: 1371680 - RNA, 19 nt, Artificial Sequence
  Description of Artificial Sequence: Synthetic oligonucleotide
  Sense strand starting at position 468 of SEQ ID NO: 1242773
uugugcuugcuggaaacua

SEQ ID NO: 1371681 - RNA, 19 nt, Artificial Sequence
  Description of Artificial Sequence: Synthetic oligonucleotide
  Antisense strand to SEQ ID NO: 1371680
uaguuuccagcaagcacaa

SEQ ID NO: 1371682 - RNA, 19 nt, Artificial Sequence
  Description of Artificial Sequence: Synthetic oligonucleotide
  Sense strand starting at position 556 of SEQ ID NO: 1242773
cuaauuaacggcuguaguu

SEQ ID NO: 1371683 - RNA, 19 nt, Artificial Sequence
  Description of Artificial Sequence: Synthetic oligonucleotide
  Antisense strand to SEQ ID NO: 1371682
aacuacagccguuaauuag

SEQ ID NO: 1371684 - RNA, 19 nt, Artificial Sequence
  Description of Artificial Sequence: Synthetic oligonucleotide
  Sense strand starting at position 558 of SEQ ID NO: 1242773
aauuaacggcuguaguuaa

SEQ ID NO: 1371685 - RNA, 19 nt, Artificial Sequence
  Description of Artificial Sequence: Synthetic oligonucleotide
  Antisense strand to SEQ ID NO: 1371684
uuaacuacagccguuaauu

SEQ ID NO: 1371686 - RNA, 19 nt, Artificial Sequence
  Description of Artificial Sequence: Synthetic oligonucleotide
  Sense strand starting at position 565 of SEQ ID NO: 1242773
ggcuguaguuaagcuguga

SEQ ID NO: 1371687 - RNA, 19 nt, Artificial Sequence
  Description of Artificial Sequence: Synthetic oligonucleotide
  Antisense strand to SEQ ID NO: 1371686
ucacagcuuaacuacagcc

SEQ ID NO: 1371688 - RNA, 19 nt, Artificial Sequence
  Description of Artificial Sequence: Synthetic oligonucleotide
  Sense strand starting at position 569 of SEQ ID NO: 1242773
guaguuaagcugugaaacc

SEQ ID NO: 1371689 - RNA, 19 nt, Artificial Sequence
  Description of Artificial Sequence: Synthetic oligonucleotide
  Antisense strand to SEQ ID NO: 1371688
gguuucacagcuuaacuac

SEQ ID NO: 1371690 - RNA, 19 nt, Artificial Sequence
  Description of Artificial Sequence: Synthetic oligonucleotide
  Sense strand starting at position 592 of SEQ ID NO: 1242773
cuaagcuaauaggaaauua

SEQ ID NO: 1371691 - RNA, 19 nt, Artificial Sequence
  Description of Artificial Sequence: Synthetic oligonucleotide
  Antisense strand to SEQ ID NO: 1371690
uaauuuccuauuagcuuag

SEQ ID NO: 1371692 - RNA, 19 nt, Artificial Sequence
  Description of Artificial Sequence: Synthetic oligonucleotide
  Sense strand starting at position 877 of SEQ ID NO: 1242773
cucagugaagccuaccuaa

SEQ ID NO: 1371693 - RNA, 19 nt, Artificial Sequence
  Description of Artificial Sequence: Synthetic oligonucleotide
  Antisense strand to SEQ ID NO: 1371692
uuagguaggcuucacugag

SEQ ID NO: 1371694 - RNA, 19 nt, Artificial Sequence
  Description of Artificial Sequence: Synthetic oligonucleotide
  Sense strand starting at position 880 of SEQ ID NO: 1242773
agugaagccuaccuaagau

SEQ ID NO: 1371695 - RNA, 19 nt, Artificial Sequence
  Description of Artificial Sequence: Synthetic oligonucleotide
  Antisense strand to SEQ ID NO: 1371694
aucuuagguaggcuucacu

SEQ ID NO: 1371696 - RNA, 19 nt, Artificial Sequence
  Description of Artificial Sequence: Synthetic oligonucleotide
  Sense strand starting at position 919 of SEQ ID NO: 1242773
ccucuuaccucgcuguauu

SEQ ID NO: 1371697 - RNA, 19 nt, Artificial Sequence
  Description of Artificial Sequence: Synthetic oligonucleotide
  Antisense strand to SEQ ID NO: 1371696
aauacagcgagguaagagg

SEQ ID NO: 1371698 - RNA, 19 nt, Artificial Sequence
  Description of Artificial Sequence: Synthetic oligonucleotide
  Sense strand starting at position 920 of SEQ ID NO: 1242773
cucuuaccucgcuguauuu

SEQ ID NO: 1371699 - RNA, 19 nt, Artificial Sequence
  Description of Artificial Sequence: Synthetic oligonucleotide
  Antisense strand to SEQ ID NO: 1371698
aaauacagcgagguaagag

SEQ ID NO: 1371700 - RNA, 19 nt, Artificial Sequence
  Description of Artificial Sequence: Synthetic oligonucleotide
  Sense strand starting at position 941 of SEQ ID NO: 1242773
uuccuaugguacucaugua

SEQ ID NO: 1371701 - RNA, 19 nt, Artificial Sequence
  Description of Artificial Sequence: Synthetic oligonucleotide
  Antisense strand to SEQ ID NO: 1371700
uacaugaguaccauaggaa

SEQ ID NO: 1371702 - RNA, 19 nt, Artificial Sequence
  Description of Artificial Sequence: Synthetic oligonucleotide
  Sense strand starting at position 1071 of SEQ ID NO: 1242773
uuccaagaaguuggacauu

SEQ ID NO: 1371703 - RNA, 19 nt, Artificial Sequence
  Description of Artificial Sequence: Synthetic oligonucleotide
  Antisense strand to SEQ ID NO: 1371702
aauguccaacuucuuggaa

SEQ ID NO: 1371704 - RNA, 19 nt, Artificial Sequence
  Description of Artificial Sequence: Synthetic oligonucleotide
  Sense strand starting at position 1102 of SEQ ID NO: 1242773
guaagcacucaguauuacu

SEQ ID NO: 1371705 - RNA, 19 nt, Artificial Sequence
  Description of Artificial Sequence: Synthetic oligonucleotide
  Antisense strand to SEQ ID NO: 1371704
aguaauacugagugcuuac

SEQ ID NO: 1371706 - RNA, 19 nt, Artificial Sequence
  Description of Artificial Sequence: Synthetic oligonucleotide
  Sense strand starting at position 1127 of SEQ ID NO: 1242773
augaguggauaucauacuu

SEQ ID NO: 1371707 - RNA, 19 nt, Artificial Sequence
  Description of Artificial Sequence: Synthetic oligonucleotide
  Antisense strand to SEQ ID NO: 1371706
aaguaugauauccacucau

SEQ ID NO: 1371708 - RNA, 19 nt, Artificial Sequence
  Description of Artificial Sequence: Synthetic oligonucleotide
  Sense strand starting at position 1168 of SEQ ID NO: 1242773
ucagguucugaauaugagu

SEQ ID NO: 1371709 - RNA, 19 nt, Artificial Sequence
  Description of Artificial Sequence: Synthetic oligonucleotide
  Antisense strand to SEQ ID NO: 1371708
acucauauucagaaccuga

SEQ ID NO: 1371710 - RNA, 19 nt, Artificial Sequence
  Description of Artificial Sequence: Synthetic oligonucleotide
  Sense strand starting at position 1170 of SEQ ID NO: 1242773
agguucugaauaugaguca

SEQ ID NO: 1371711 - RNA, 19 nt, Artificial Sequence
  Description of Artificial Sequence: Synthetic oligonucleotide
  Antisense strand to SEQ ID NO: 1371710
ugacucauauucagaaccu

SEQ ID NO: 1371712 - RNA, 19 nt, Artificial Sequence
  Description of Artificial Sequence: Synthetic oligonucleotide
  Sense strand starting at position 1173 of SEQ ID NO: 1242773
uucugaauaugagucauua

SEQ ID NO: 1371713 - RNA, 19 nt, Artificial Sequence
  Description of Artificial Sequence: Synthetic oligonucleotide
  Antisense strand to SEQ ID NO: 1371712
uaaugacucauauucagaa

SEQ ID NO: 1371714 - RNA, 19 nt, Artificial Sequence
  Description of Artificial Sequence: Synthetic oligonucleotide
  Sense strand starting at position 1319 of SEQ ID NO: 1242773
uccuuugagcuuugugaca

SEQ ID NO: 1371715 - RNA, 19 nt, Artificial Sequence
  Description of Artificial Sequence: Synthetic oligonucleotide
  Antisense strand to SEQ ID NO: 1371714
ugucacaaagcucaaagga

SEQ ID NO: 1371716 - RNA, 19 nt, Artificial Sequence
  Description of Artificial Sequence: Synthetic oligonucleotide
  Sense strand starting at position 1471 of SEQ ID NO: 1242773
agcugacacuuauaaagga

SEQ ID NO: 1371717 - RNA, 19 nt, Artificial Sequence
  Description of Artificial Sequence: Synthetic oligonucleotide
  Antisense strand to SEQ ID NO: 1371716
uccuuuauaagugucagcu

SEQ ID NO: 1371718 - RNA, 19 nt, Artificial Sequence
  Description of Artificial Sequence: Synthetic oligonucleotide
  Sense strand starting at position 2329 of SEQ ID NO: 1242773
cagacucuucuggacaguu

SEQ ID NO: 1371719 - RNA, 19 nt, Artificial Sequence
  Description of Artificial Sequence: Synthetic oligonucleotide
  Antisense strand to SEQ ID NO: 1371718
aacuguccagaagagucug

SEQ ID NO: 1371720 - RNA, 19 nt, Artificial Sequence
  Description of Artificial Sequence: Synthetic oligonucleotide
  Sense strand starting at position 2344 of SEQ ID NO: 1242773
aguuguuacuuccuguaca

SEQ ID NO: 1371721 - RNA, 19 nt, Artificial Sequence
  Description of Artificial Sequence: Synthetic oligonucleotide
  Antisense strand to SEQ ID NO: 1371720
uguacaggaaguaacaacu

SEQ ID NO: 1371722 - RNA, 19 nt, Artificial Sequence
  Description of Artificial Sequence: Synthetic oligonucleotide
  Sense strand starting at position 2357 of SEQ ID NO: 1242773
uguacagacuggguugaaa

SEQ ID NO: 1371723 - RNA, 19 nt, Artificial Sequence
  Description of Artificial Sequence: Synthetic oligonucleotide
  Antisense strand to SEQ ID NO: 1371722
uuucaacccagucuguaca

SEQ ID NO: 1371724 - RNA, 19 nt, Artificial Sequence
  Description of Artificial Sequence: Synthetic oligonucleotide
  Sense strand starting at position 2420 of SEQ ID NO: 1242773
gcaagauaagauuguuuau

SEQ ID NO: 1371725 - RNA, 19 nt, Artificial Sequence
  Description of Artificial Sequence: Synthetic oligonucleotide
  Antisense strand to SEQ ID NO: 1371724
auaaacaaucuuaucuugc

SEQ ID NO: 1371726 - RNA, 19 nt, Artificial Sequence
  Description of Artificial Sequence: Synthetic oligonucleotide
  Sense strand starting at position 2468 of SEQ ID NO: 1242773
guugcuuaauaagccaaua

SEQ ID NO: 1371727 - RNA, 19 nt, Artificial Sequence
  Description of Artificial Sequence: Synthetic oligonucleotide
  Antisense strand to SEQ ID NO: 1371726
uauuggcuuauuaagcaac

SEQ ID NO: 1371728 - RNA, 19 nt, Artificial Sequence
  Description of Artificial Sequence: Synthetic oligonucleotide
  Sense strand starting at position 2646 of SEQ ID NO: 1242773
cgguuuagcaaagauguaa

SEQ ID NO: 1371729 - RNA, 19 nt, Artificial Sequence
  Description of Artificial Sequence: Synthetic oligonucleotide
  Antisense strand to SEQ ID NO: 1371728
uuacaucuuugcuaaaccg

SEQ ID NO: 1371730 - RNA, 19 nt, Artificial Sequence
  Description of Artificial Sequence: Synthetic oligonucleotide
  Sense strand starting at position 2866 of SEQ ID NO: 1242773
gcgauccuccuagagagau

SEQ ID NO: 1371731 - RNA, 19 nt, Artificial Sequence
  Description of Artificial Sequence: Synthetic oligonucleotide
  Antisense strand to SEQ ID NO: 1371730
aucucucuaggaggaucgc

SEQ ID NO: 1371732 - RNA, 19 nt, Artificial Sequence
  Description of Artificial Sequence: Synthetic oligonucleotide
  Sense strand starting at position 2896 of SEQ ID NO: 1242773
aucuuaggcuggucuggaa

SEQ ID NO: 1371733 - RNA, 19 nt, Artificial Sequence
  Description of Artificial Sequence: Synthetic oligonucleotide
  Antisense strand to SEQ ID NO: 1371732
uuccagaccagccuaagau

SEQ ID NO: 1371734 - RNA, 19 nt, Artificial Sequence
  Description of Artificial Sequence: Synthetic oligonucleotide
  Sense strand starting at position 3353 of SEQ ID NO: 1242773
cgcaguuuauccuuaggag

SEQ ID NO: 1371735 - RNA, 19 nt, Artificial Sequence
  Description of Artificial Sequence: Synthetic oligonucleotide
  Antisense strand to SEQ ID NO: 1371734
cuccuaaggauaaacugcg

SEQ ID NO: 1371736 - RNA, 19 nt, Artificial Sequence
  Description of Artificial Sequence: Synthetic oligonucleotide
  Sense strand starting at position 3354 of SEQ ID NO: 1242773
gcaguuuauccuuaggaga

SEQ ID NO: 1371737 - RNA, 19 nt, Artificial Sequence
  Description of Artificial Sequence: Synthetic oligonucleotide
  Antisense strand to SEQ ID NO: 1371736
ucuccuaaggauaaacugc

SEQ ID NO: 1371738 - RNA, 19 nt, Artificial Sequence
  Description of Artificial Sequence: Synthetic oligonucleotide
  Sense strand starting at position 3357 of SEQ ID NO: 1242773
guuuauccuuaggagauaa

SEQ ID NO: 1371739 - RNA, 19 nt, Artificial Sequence
  Description of Artificial Sequence: Synthetic oligonucleotide
  Antisense strand to SEQ ID NO: 1371738
uuaucuccuaaggauaaac

SEQ ID NO: 1371740 - RNA, 19 nt, Artificial Sequence
  Description of Artificial Sequence: Synthetic oligonucleotide
  Sense strand starting at position 3454 of SEQ ID NO: 1242773
ugucuacuuuaagagaauu

SEQ ID NO: 1371741 - RNA, 19 nt, Artificial Sequence
  Description of Artificial Sequence: Synthetic oligonucleotide
  Antisense strand to SEQ ID NO: 1371740
aauucucuuaaaguagaca

SEQ ID NO: 1371742 - RNA, 19 nt, Artificial Sequence
  Description of Artificial Sequence: Synthetic oligonucleotide
  Sense strand starting at position 3526 of SEQ ID NO: 1242773
ccauuaauaggcuguaugu

SEQ ID NO: 1371743 - RNA, 19 nt, Artificial Sequence
  Description of Artificial Sequence: Synthetic oligonucleotide
  Antisense strand to SEQ ID NO: 1371742
acauacagccuauuaaugg

SEQ ID NO: 1371744 - RNA, 19 nt, Artificial Sequence
  Description of Artificial Sequence: Synthetic oligonucleotide
  Sense strand starting at position 3575 of SEQ ID NO: 1242773
auuagaauuauguguagag

SEQ ID NO: 1371745 - RNA, 19 nt, Artificial Sequence
  Description of Artificial Sequence: Synthetic oligonucleotide
  Antisense strand to SEQ ID NO: 1371744
cucuacacauaauucuaau

SEQ ID NO: 1371746 - RNA, 19 nt, Artificial Sequence
  Description of Artificial Sequence: Synthetic oligonucleotide
  Sense strand starting at position 3576 of SEQ ID NO: 1242773
uuagaauuauguguagagu

SEQ ID NO: 1371747 - RNA, 19 nt, Artificial Sequence
  Description of Artificial Sequence: Synthetic oligonucleotide
  Antisense strand to SEQ ID NO: 1371746
acucuacacauaauucuaa

SEQ ID NO: 1371748 - RNA, 19 nt, Artificial Sequence
  Description of Artificial Sequence: Synthetic oligonucleotide
  Sense strand starting at position 3577 of SEQ ID NO: 1242773
uagaauuauguguagaguu

SEQ ID NO: 1371749 - RNA, 19 nt, Artificial Sequence
  Description of Artificial Sequence: Synthetic oligonucleotide
  Antisense strand to SEQ ID NO: 1371748
aacucuacacauaauucua

SEQ ID NO: 1371750 - RNA, 19 nt, Artificial Sequence
  Description of Artificial Sequence: Synthetic oligonucleotide
  Sense strand starting at position 3702 of SEQ ID NO: 1242773
agugguaggucauuugugu

SEQ ID NO: 1371751 - RNA, 19 nt, Artificial Sequence
  Description of Artificial Sequence: Synthetic oligonucleotide
  Antisense strand to SEQ ID NO: 1371750
acacaaaugaccuaccacu

SEQ ID NO: 1371752 - RNA, 19 nt, Artificial Sequence
  Description of Artificial Sequence: Synthetic oligonucleotide
  Sense strand starting at position 3709 of SEQ ID NO: 1242773
ggucauuugugucucucca

SEQ ID NO: 1371753 - RNA, 19 nt, Artificial Sequence
  Description of Artificial Sequence: Synthetic oligonucleotide
  Antisense strand to SEQ ID NO: 1371752
uggagagacacaaaugacc

SEQ ID NO: 1371754 - RNA, 19 nt, Artificial Sequence
  Description of Artificial Sequence: Synthetic oligonucleotide
  Sense strand starting at position 3783 of SEQ ID NO: 1242773
uuuggauugucagucugua

SEQ ID NO: 1371755 - RNA, 19 nt, Artificial Sequence
  Description of Artificial Sequence: Synthetic oligonucleotide
  Antisense strand to SEQ ID NO: 1371754
uacagacugacaauccaaa

SEQ ID NO: 1371756 - RNA, 19 nt, Artificial Sequence
  Description of Artificial Sequence: Synthetic oligonucleotide
  Sense strand starting at position 262 of SEQ ID NO: 1242774
ucuuaauucgcauugugcu

SEQ ID NO: 1371757 - RNA, 19 nt, Artificial Sequence
  Description of Artificial Sequence: Synthetic oligonucleotide
  Antisense strand to SEQ ID NO: 1371756
agcacaaugcgaauuaaga

SEQ ID NO: 1371758 - RNA, 19 nt, Artificial Sequence
  Description of Artificial Sequence: Synthetic oligonucleotide
  Sense strand starting at position 270 of SEQ ID NO: 1242774
cgcauugugcuugcuggaa

SEQ ID NO: 1371759 - RNA, 19 nt, Artificial Sequence
  Description of Artificial Sequence: Synthetic oligonucleotide
  Antisense strand to SEQ ID NO: 1371758
uuccagcaagcacaaugcg

SEQ ID NO: 1371760 - RNA, 19 nt, Artificial Sequence
  Description of Artificial Sequence: Synthetic oligonucleotide
  Sense strand starting at position 274 of SEQ ID NO: 1242774
uugugcuugcuggaaacua

SEQ ID NO: 1371761 - RNA, 19 nt, Artificial Sequence
  Description of Artificial Sequence: Synthetic oligonucleotide
  Antisense strand to SEQ ID NO: 1371760
uaguuuccagcaagcacaa

SEQ ID NO: 1371762 - RNA, 19 nt, Artificial Sequence
  Description of Artificial Sequence: Synthetic oligonucleotide
  Sense strand starting at position 362 of SEQ ID NO: 1242774
cuaauuaacggcuguaguu

SEQ ID NO: 1371763 - RNA, 19 nt, Artificial Sequence
  Description of Artificial Sequence: Synthetic oligonucleotide
  Antisense strand to SEQ ID NO: 1371762
aacuacagccguuaauuag

SEQ ID NO: 1371764 - RNA, 19 nt, Artificial Sequence
  Description of Artificial Sequence: Synthetic oligonucleotide
  Sense strand starting at position 364 of SEQ ID NO: 1242774
aauuaacggcuguaguuaa

SEQ ID NO: 1371765 - RNA, 19 nt, Artificial Sequence
  Description of Artificial Sequence: Synthetic oligonucleotide
  Antisense strand to SEQ ID NO: 1371764
uuaacuacagccguuaauu

SEQ ID NO: 1371766 - RNA, 19 nt, Artificial Sequence
  Description of Artificial Sequence: Synthetic oligonucleotide
  Sense strand starting at position 371 of SEQ ID NO: 1242774
ggcuguaguuaagcuguga

SEQ ID NO: 1371767 - RNA, 19 nt, Artificial Sequence
  Description of Artificial Sequence: Synthetic oligonucleotide
  Antisense strand to SEQ ID NO: 1371766
ucacagcuuaacuacagcc

SEQ ID NO: 1371768 - RNA, 19 nt, Artificial Sequence
  Description of Artificial Sequence: Synthetic oligonucleotide
  Sense strand starting at position 375 of SEQ ID NO: 1242774
guaguuaagcugugaaacc

SEQ ID NO: 1371769 - RNA, 19 nt, Artificial Sequence
  Description of Artificial Sequence: Synthetic oligonucleotide
  Antisense strand to SEQ ID NO: 1371768
gguuucacagcuuaacuac

SEQ ID NO: 1371770 - RNA, 19 nt, Artificial Sequence
  Description of Artificial Sequence: Synthetic oligonucleotide
  Sense strand starting at position 398 of SEQ ID NO: 1242774
cuaagcuaauaggaaauua

SEQ ID NO: 1371771 - RNA, 19 nt, Artificial Sequence
  Description of Artificial Sequence: Synthetic oligonucleotide
  Antisense strand to SEQ ID NO: 1371770
uaauuuccuauuagcuuag

SEQ ID NO: 1371772 - RNA, 19 nt, Artificial Sequence
  Description of Artificial Sequence: Synthetic oligonucleotide
  Sense strand starting at position 683 of SEQ ID NO: 1242774
cucagugaagccuaccuaa

SEQ ID NO: 1371773 - RNA, 19 nt, Artificial Sequence
  Description of Artificial Sequence: Synthetic oligonucleotide
  Antisense strand to SEQ ID NO: 1371772
uuagguaggcuucacugag

SEQ ID NO: 1371774 - RNA, 19 nt, Artificial Sequence
  Description of Artificial Sequence: Synthetic oligonucleotide
  Sense strand starting at position 686 of SEQ ID NO: 1242774
agugaagccuaccuaagau

SEQ ID NO: 1371775 - RNA, 19 nt, Artificial Sequence
  Description of Artificial Sequence: Synthetic oligonucleotide
  Antisense strand to SEQ ID NO: 1371774
aucuuagguaggcuucacu

SEQ ID NO: 1371776 - RNA, 19 nt, Artificial Sequence
  Description of Artificial Sequence: Synthetic oligonucleotide
  Sense strand starting at position 725 of SEQ ID NO: 1242774
ccucuuaccucgcuguauu

SEQ ID NO: 1371777 - RNA, 19 nt, Artificial Sequence
  Description of Artificial Sequence: Synthetic oligonucleotide
  Antisense strand to SEQ ID NO: 1371776
aauacagcgagguaagagg

SEQ ID NO: 1371778 - RNA, 19 nt, Artificial Sequence
  Description of Artificial Sequence: Synthetic oligonucleotide
  Sense strand starting at position 726 of SEQ ID NO: 1242774
cucuuaccucgcuguauuu

SEQ ID NO: 1371779 - RNA, 19 nt, Artificial Sequence
  Description of Artificial Sequence: Synthetic oligonucleotide
  Antisense strand to SEQ ID NO: 1371778
aaauacagcgagguaagag

SEQ ID NO: 1371780 - RNA, 19 nt, Artificial Sequence
  Description of Artificial Sequence: Synthetic oligonucleotide
  Sense strand starting at position 747 of SEQ ID NO: 1242774
uuccuaugguacucaugua

SEQ ID NO: 1371781 - RNA, 19 nt, Artificial Sequence
  Description of Artificial Sequence: Synthetic oligonucleotide
  Antisense strand to SEQ ID NO: 1371780
uacaugaguaccauaggaa

SEQ ID NO: 1371782 - RNA, 19 nt, Artificial Sequence
  Description of Artificial Sequence: Synthetic oligonucleotide
  Sense strand starting at position 877 of SEQ ID NO: 1242774
uuccaagaaguuggacauu

SEQ ID NO: 1371783 - RNA, 19 nt, Artificial Sequence
  Description of Artificial Sequence: Synthetic oligonucleotide
  Antisense strand to SEQ ID NO: 1371782
aauguccaacuucuuggaa

SEQ ID NO: 1371784 - RNA, 19 nt, Artificial Sequence
  Description of Artificial Sequence: Synthetic oligonucleotide
  Sense strand starting at position 908 of SEQ ID NO: 1242774
guaagcacucaguauuacu

SEQ ID NO: 1371785 - RNA, 19 nt, Artificial Sequence
  Description of Artificial Sequence: Synthetic oligonucleotide
  Antisense strand to SEQ ID NO: 1371784
aguaauacugagugcuuac

SEQ ID NO: 1371786 - RNA, 19 nt, Artificial Sequence
  Description of Artificial Sequence: Synthetic oligonucleotide
  Sense strand starting at position 933 of SEQ ID NO: 1242774
augaguggauaucauacuu

SEQ ID NO: 1371787 - RNA, 19 nt, Artificial Sequence
  Description of Artificial Sequence: Synthetic oligonucleotide
  Antisense strand to SEQ ID NO: 1371786
aaguaugauauccacucau

SEQ ID NO: 1371788 - RNA, 19 nt, Artificial Sequence
  Description of Artificial Sequence: Synthetic oligonucleotide
  Sense strand starting at position 974 of SEQ ID NO: 1242774
ucagguucugaauaugagu

SEQ ID NO: 1371789 - RNA, 19 nt, Artificial Sequence
  Description of Artificial Sequence: Synthetic oligonucleotide
  Antisense strand to SEQ ID NO: 1371788
acucauauucagaaccuga

SEQ ID NO: 1371790 - RNA, 19 nt, Artificial Sequence
  Description of Artificial Sequence: Synthetic oligonucleotide
  Sense strand starting at position 976 of SEQ ID NO: 1242774
agguucugaauaugaguca

SEQ ID NO: 1371791 - RNA, 19 nt, Artificial Sequence
  Description of Artificial Sequence: Synthetic oligonucleotide
  Antisense strand to SEQ ID NO: 1371790
ugacucauauucagaaccu

SEQ ID NO: 1371792 - RNA, 19 nt, Artificial Sequence
  Description of Artificial Sequence: Synthetic oligonucleotide
  Sense strand starting at position 979 of SEQ ID NO: 1242774
uucugaauaugagucauua

SEQ ID NO: 1371793 - RNA, 19 nt, Artificial Sequence
  Description of Artificial Sequence: Synthetic oligonucleotide
  Antisense strand to SEQ ID NO: 1371792
uaaugacucauauucagaa

SEQ ID NO: 1371794 - RNA, 19 nt, Artificial Sequence
  Description of Artificial Sequence: Synthetic oligonucleotide
  Sense strand starting at position 1125 of SEQ ID NO: 1242774
uccuuugagcuuugugaca

SEQ ID NO: 1371795 - RNA, 19 nt, Artificial Sequence
  Description of Artificial Sequence: Synthetic oligonucleotide
  Antisense strand to SEQ ID NO: 1371794
ugucacaaagcucaaagga

SEQ ID NO: 1371796 - RNA, 19 nt, Artificial Sequence
  Description of Artificial Sequence: Synthetic oligonucleotide
  Sense strand starting at position 1277 of SEQ ID NO: 1242774
agcugacacuuauaaagga

SEQ ID NO: 1371797 - RNA, 19 nt, Artificial Sequence
  Description of Artificial Sequence: Synthetic oligonucleotide
  Antisense strand to SEQ ID NO: 1371796
uccuuuauaagugucagcu

SEQ ID NO: 1371798 - RNA, 19 nt, Artificial Sequence
  Description of Artificial Sequence: Synthetic oligonucleotide
  Sense strand starting at position 2135 of SEQ ID NO: 1242774
cagacucuucuggacaguu

SEQ ID NO: 1371799 - RNA, 19 nt, Artificial Sequence
  Description of Artificial Sequence: Synthetic oligonucleotide
  Antisense strand to SEQ ID NO: 1371798
aacuguccagaagagucug

SEQ ID NO: 1371800 - RNA, 19 nt, Artificial Sequence
  Description of Artificial Sequence: Synthetic oligonucleotide
  Sense strand starting at position 2150 of SEQ ID NO: 1242774
aguuguuacuuccuguaca

SEQ ID NO: 1371801 - RNA, 19 nt, Artificial Sequence
  Description of Artificial Sequence: Synthetic oligonucleotide
  Antisense strand to SEQ ID NO: 1371800
uguacaggaaguaacaacu

SEQ ID NO: 1371802 - RNA, 19 nt, Artificial Sequence
  Description of Artificial Sequence: Synthetic oligonucleotide
  Sense strand starting at position 2163 of SEQ ID NO: 1242774
uguacagacuggguugaaa

SEQ ID NO: 1371803 - RNA, 19 nt, Artificial Sequence
  Description of Artificial Sequence: Synthetic oligonucleotide
  Antisense strand to SEQ ID NO: 1371802
uuucaacccagucuguaca

SEQ ID NO: 1371804 - RNA, 19 nt, Artificial Sequence
  Description of Artificial Sequence: Synthetic oligonucleotide
  Sense strand starting at position 2226 of SEQ ID NO: 1242774
gcaagauaagauuguuuau

SEQ ID NO: 1371805 - RNA, 19 nt, Artificial Sequence
  Description of Artificial Sequence: Synthetic oligonucleotide
  Antisense strand to SEQ ID NO: 1371804
auaaacaaucuuaucuugc

SEQ ID NO: 1371806 - RNA, 19 nt, Artificial Sequence
  Description of Artificial Sequence: Synthetic oligonucleotide
  Sense strand starting at position 2274 of SEQ ID NO: 1242774
guugcuuaauaagccaaua

SEQ ID NO: 1371807 - RNA, 19 nt, Artificial Sequence
  Description of Artificial Sequence: Synthetic oligonucleotide
  Antisense strand to SEQ ID NO: 1371806
uauuggcuuauuaagcaac

SEQ ID NO: 1371808 - RNA, 19 nt, Artificial Sequence
  Description of Artificial Sequence: Synthetic oligonucleotide
  Sense strand starting at position 2452 of SEQ ID NO: 1242774
cgguuuagcaaagauguaa

SEQ ID NO: 1371809 - RNA, 19 nt, Artificial Sequence
  Description of Artificial Sequence: Synthetic oligonucleotide
  Antisense strand to SEQ ID NO: 1371808
uuacaucuuugcuaaaccg

SEQ ID NO: 1371810 - RNA, 19 nt, Artificial Sequence
  Description of Artificial Sequence: Synthetic oligonucleotide
  Sense strand starting at position 2672 of SEQ ID NO: 1242774
gcgauccuccuagagagau

SEQ ID NO: 1371811 - RNA, 19 nt, Artificial Sequence
  Description of Artificial Sequence: Synthetic oligonucleotide
  Antisense strand to SEQ ID NO: 1371810
aucucucuaggaggaucgc

SEQ ID NO: 1371812 - RNA, 19 nt, Artificial Sequence
  Description of Artificial Sequence: Synthetic oligonucleotide
  Sense strand starting at position 2702 of SEQ ID NO: 1242774
aucuuaggcuggucuggaa

SEQ ID NO: 1371813 - RNA, 19 nt, Artificial Sequence
  Description of Artificial Sequence: Synthetic oligonucleotide
  Antisense strand to SEQ ID NO: 1371812
uuccagaccagccuaagau

SEQ ID NO: 1371814 - RNA, 19 nt, Artificial Sequence
  Description of Artificial Sequence: Synthetic oligonucleotide
  Sense strand starting at position 3159 of SEQ ID NO: 1242774
cgcaguuuauccuuaggag

SEQ ID NO: 1371815 - RNA, 19 nt, Artificial Sequence
  Description of Artificial Sequence: Synthetic oligonucleotide
  Antisense strand to SEQ ID NO: 1371814
cuccuaaggauaaacugcg

SEQ ID NO: 1371816 - RNA, 19 nt, Artificial Sequence
  Description of Artificial Sequence: Synthetic oligonucleotide
  Sense strand starting at position 3160 of SEQ ID NO: 1242774
gcaguuuauccuuaggaga

SEQ ID NO: 1371817 - RNA, 19 nt, Artificial Sequence
  Description of Artificial Sequence: Synthetic oligonucleotide
  Antisense strand to SEQ ID NO: 1371816
ucuccuaaggauaaacugc

SEQ ID NO: 1371818 - RNA, 19 nt, Artificial Sequence
  Description of Artificial Sequence: Synthetic oligonucleotide
  Sense strand starting at position 3163 of SEQ ID NO: 1242774
guuuauccuuaggagauaa

SEQ ID NO: 1371819 - RNA, 19 nt, Artificial Sequence
  Description of Artificial Sequence: Synthetic oligonucleotide
  Antisense strand to SEQ ID NO: 1371818
uuaucuccuaaggauaaac

SEQ ID NO: 1371820 - RNA, 19 nt, Artificial Sequence
  Description of Artificial Sequence: Synthetic oligonucleotide
  Sense strand starting at position 3260 of SEQ ID NO: 1242774
ugucuacuuuaagagaauu

SEQ ID NO: 1371821 - RNA, 19 nt, Artificial Sequence
  Description of Artificial Sequence: Synthetic oligonucleotide
  Antisense strand to SEQ ID NO: 1371820
aauucucuuaaaguagaca

SEQ ID NO: 1371822 - RNA, 19 nt, Artificial Sequence
  Description of Artificial Sequence: Synthetic oligonucleotide
  Sense strand starting at position 3332 of SEQ ID NO: 1242774
ccauuaauaggcuguaugu

SEQ ID NO: 1371823 - RNA, 19 nt, Artificial Sequence
  Description of Artificial Sequence: Synthetic oligonucleotide
  Antisense strand to SEQ ID NO: 1371822
acauacagccuauuaaugg

SEQ ID NO: 1371824 - RNA, 19 nt, Artificial Sequence
  Description of Artificial Sequence: Synthetic oligonucleotide
  Sense strand starting at position 3381 of SEQ ID NO: 1242774
auuagaauuauguguagag

SEQ ID NO: 1371825 - RNA, 19 nt, Artificial Sequence
  Description of Artificial Sequence: Synthetic oligonucleotide
  Antisense strand to SEQ ID NO: 1371824
cucuacacauaauucuaau

SEQ ID NO: 1371826 - RNA, 19 nt, Artificial Sequence
  Description of Artificial Sequence: Synthetic oligonucleotide
  Sense strand starting at position 3382 of SEQ ID NO: 1242774
uuagaauuauguguagagu

SEQ ID NO: 1371827 - RNA, 19 nt, Artificial Sequence
  Description of Artificial Sequence: Synthetic oligonucleotide
  Antisense strand to SEQ ID NO: 1371826
acucuacacauaauucuaa

SEQ ID NO: 1371828 - RNA, 19 nt, Artificial Sequence
  Description of Artificial Sequence: Synthetic oligonucleotide
  Sense strand starting at position 3383 of SEQ ID NO: 1242774
uagaauuauguguagaguu

SEQ ID NO: 1371829 - RNA, 19 nt, Artificial Sequence
  Description of Artificial Sequence: Synthetic oligonucleotide
  Antisense strand to SEQ ID NO: 1371828
aacucuacacauaauucua

SEQ ID NO: 1371830 - RNA, 19 nt, Artificial Sequence
  Description of Artificial Sequence: Synthetic oligonucleotide
  Sense strand starting at position 3508 of SEQ ID NO: 1242774
agugguaggucauuugugu

SEQ ID NO: 1371831 - RNA, 19 nt, Artificial Sequence
  Description of Artificial Sequence: Synthetic oligonucleotide
  Antisense strand to SEQ ID NO: 1371830
acacaaaugaccuaccacu

SEQ ID NO: 1371832 - RNA, 19 nt, Artificial Sequence
  Description of Artificial Sequence: Synthetic oligonucleotide
  Sense strand starting at position 3515 of SEQ ID NO: 1242774
ggucauuugugucucucca

SEQ ID NO: 1371833 - RNA, 19 nt, Artificial Sequence
  Description of Artificial Sequence: Synthetic oligonucleotide
  Antisense strand to SEQ ID NO: 1371832
uggagagacacaaaugacc

SEQ ID NO: 1371834 - RNA, 19 nt, Artificial Sequence
  Description of Artificial Sequence: Synthetic oligonucleotide
  Sense strand starting at position 3589 of SEQ ID NO: 1242774
uuuggauugucagucugua

SEQ ID NO: 1371835 - RNA, 19 nt, Artificial Sequence
  Description of Artificial Sequence: Synthetic oligonucleotide
  Antisense strand to SEQ ID NO: 1371834
uacagacugacaauccaaa

SEQ ID NO: 1371836 - RNA, 19 nt, Artificial Sequence
  Description of Artificial Sequence: Synthetic oligonucleotide
  Sense strand starting at position 53 of SEQ ID NO: 1242775
ugggauuauaugcgugacu

SEQ ID NO: 1371837 - RNA, 19 nt, Artificial Sequence
  Description of Artificial Sequence: Synthetic oligonucleotide
  Antisense strand to SEQ ID NO: 1371836
agucacgcauauaauccca

SEQ ID NO: 1371838 - RNA, 19 nt, Artificial Sequence
  Description of Artificial Sequence: Synthetic oligonucleotide
  Sense strand starting at position 54 of SEQ ID NO: 1242775
gggauuauaugcgugacuc

SEQ ID NO: 1371839 - RNA, 19 nt, Artificial Sequence
  Description of Artificial Sequence: Synthetic oligonucleotide
  Antisense strand to SEQ ID NO: 1371838
gagucacgcauauaauccc

SEQ ID NO: 1371840 - RNA, 19 nt, Artificial Sequence
  Description of Artificial Sequence: Synthetic oligonucleotide
  Sense strand starting at position 55 of SEQ ID NO: 1242775
ggauuauaugcgugacuca

SEQ ID NO: 1371841 - RNA, 19 nt, Artificial Sequence
  Description of Artificial Sequence: Synthetic oligonucleotide
  Antisense strand to SEQ ID NO: 1371840
ugagucacgcauauaaucc

SEQ ID NO: 1371842 - RNA, 19 nt, Artificial Sequence
  Description of Artificial Sequence: Synthetic oligonucleotide
  Sense strand starting at position 56 of SEQ ID NO: 1242775
gauuauaugcgugacucac

SEQ ID NO: 1371843 - RNA, 19 nt, Artificial Sequence
  Description of Artificial Sequence: Synthetic oligonucleotide
  Antisense strand to SEQ ID NO: 1371842
gugagucacgcauauaauc

SEQ ID NO: 1371844 - RNA, 19 nt, Artificial Sequence
  Description of Artificial Sequence: Synthetic oligonucleotide
  Sense strand starting at position 553 of SEQ ID NO: 1242775
cacgaaauagacuguucuu

SEQ ID NO: 1371845 - RNA, 19 nt, Artificial Sequence
  Description of Artificial Sequence: Synthetic oligonucleotide
  Antisense strand to SEQ ID NO: 1371844
aagaacagucuauuucgug

SEQ ID NO: 1371846 - RNA, 19 nt, Artificial Sequence
  Description of Artificial Sequence: Synthetic oligonucleotide
  Sense strand starting at position 618 of SEQ ID NO: 1242775
aggcauugucuacaauguu

SEQ ID NO: 1371847 - RNA, 19 nt, Artificial Sequence
  Description of Artificial Sequence: Synthetic oligonucleotide
  Antisense strand to SEQ ID NO: 1371846
aacauuguagacaaugccu

SEQ ID NO: 1371848 - RNA, 19 nt, Artificial Sequence
  Description of Artificial Sequence: Synthetic oligonucleotide
  Sense strand starting at position 801 of SEQ ID NO: 1242775
agccuugagaucuagguau

SEQ ID NO: 1371849 - RNA, 19 nt, Artificial Sequence
  Description of Artificial Sequence: Synthetic oligonucleotide
  Antisense strand to SEQ ID NO: 1371848
auaccuagaucucaaggcu

SEQ ID NO: 1371850 - RNA, 19 nt, Artificial Sequence
  Description of Artificial Sequence: Synthetic oligonucleotide
  Sense strand starting at position 803 of SEQ ID NO: 1242775
ccuugagaucuagguauaa

SEQ ID NO: 1371851 - RNA, 19 nt, Artificial Sequence
  Description of Artificial Sequence: Synthetic oligonucleotide
  Antisense strand to SEQ ID NO: 1371850
uuauaccuagaucucaagg

SEQ ID NO: 1371852 - RNA, 19 nt, Artificial Sequence
  Description of Artificial Sequence: Synthetic oligonucleotide
  Sense strand starting at position 846 of SEQ ID NO: 1242775
cucuuacucgucugacgaa

SEQ ID NO: 1371853 - RNA, 19 nt, Artificial Sequence
  Description of Artificial Sequence: Synthetic oligonucleotide
  Antisense strand to SEQ ID NO: 1371852
uucgucagacgaguaagag

SEQ ID NO: 1371854 - RNA, 19 nt, Artificial Sequence
  Description of Artificial Sequence: Synthetic oligonucleotide
  Sense strand starting at position 859 of SEQ ID NO: 1242775
gacgaaaugucagaguauu

SEQ ID NO: 1371855 - RNA, 19 nt, Artificial Sequence
  Description of Artificial Sequence: Synthetic oligonucleotide
  Antisense strand to SEQ ID NO: 1371854
aauacucugacauuucguc

SEQ ID NO: 1371856 - RNA, 19 nt, Artificial Sequence
  Description of Artificial Sequence: Synthetic oligonucleotide
  Sense strand starting at position 893 of SEQ ID NO: 1242775
cgacaugugagauacucuu

SEQ ID NO: 1371857 - RNA, 19 nt, Artificial Sequence
  Description of Artificial Sequence: Synthetic oligonucleotide
  Antisense strand to SEQ ID NO: 1371856
aagaguaucucacaugucg

SEQ ID NO: 1371858 - RNA, 19 nt, Artificial Sequence
  Description of Artificial Sequence: Synthetic oligonucleotide
  Sense strand starting at position 899 of SEQ ID NO: 1242775
gugagauacucuuaacugc

SEQ ID NO: 1371859 - RNA, 19 nt, Artificial Sequence
  Description of Artificial Sequence: Synthetic oligonucleotide
  Antisense strand to SEQ ID NO: 1371858
gcaguuaagaguaucucac

SEQ ID NO: 1371860 - RNA, 19 nt, Artificial Sequence
  Description of Artificial Sequence: Synthetic oligonucleotide
  Sense strand starting at position 944 of SEQ ID NO: 1242775
guaucacugcacuguuuau

SEQ ID NO: 1371861 - RNA, 19 nt, Artificial Sequence
  Description of Artificial Sequence: Synthetic oligonucleotide
  Antisense strand to SEQ ID NO: 1371860
auaaacagugcagugauac

SEQ ID NO: 1371862 - RNA, 19 nt, Artificial Sequence
  Description of Artificial Sequence: Synthetic oligonucleotide
  Sense strand starting at position 1005 of SEQ ID NO: 1242775
agggcucuuuaauuccaau

SEQ ID NO: 1371863 - RNA, 19 nt, Artificial Sequence
  Description of Artificial Sequence: Synthetic oligonucleotide
  Antisense strand to SEQ ID NO: 1371862
auuggaauuaaagagcccu

SEQ ID NO: 1371864 - RNA, 19 nt, Artificial Sequence
  Description of Artificial Sequence: Synthetic oligonucleotide
  Sense strand starting at position 1065 of SEQ ID NO: 1242775
cauaaaugguauugggaga

SEQ ID NO: 1371865 - RNA, 19 nt, Artificial Sequence
  Description of Artificial Sequence: Synthetic oligonucleotide
  Antisense strand to SEQ ID NO: 1371864
ucucccaauaccauuuaug

SEQ ID NO: 1371866 - RNA, 19 nt, Artificial Sequence
  Description of Artificial Sequence: Synthetic oligonucleotide
  Sense strand starting at position 1160 of SEQ ID NO: 1242775
uuagcucucugggaaccaa

SEQ ID NO: 1371867 - RNA, 19 nt, Artificial Sequence
  Description of Artificial Sequence: Synthetic oligonucleotide
  Antisense strand to SEQ ID NO: 1371866
uugguucccagagagcuaa

SEQ ID NO: 1371868 - RNA, 19 nt, Artificial Sequence
  Description of Artificial Sequence: Synthetic oligonucleotide
  Sense strand starting at position 1224 of SEQ ID NO: 1242775
aggucuaccugacugcaau

SEQ ID NO: 1371869 - RNA, 19 nt, Artificial Sequence
  Description of Artificial Sequence: Synthetic oligonucleotide
  Antisense strand to SEQ ID NO: 1371868
auugcagucagguagaccu

SEQ ID NO: 1371870 - RNA, 19 nt, Artificial Sequence
  Description of Artificial Sequence: Synthetic oligonucleotide
  Sense strand starting at position 1225 of SEQ ID NO: 1242775
ggucuaccugacugcaauu

SEQ ID NO: 1371871 - RNA, 19 nt, Artificial Sequence
  Description of Artificial Sequence: Synthetic oligonucleotide
  Antisense strand to SEQ ID NO: 1371870
aauugcagucagguagacc

SEQ ID NO: 1371872 - RNA, 19 nt, Artificial Sequence
  Description of Artificial Sequence: Synthetic oligonucleotide
  Sense strand starting at position 1255 of SEQ ID NO: 1242775
guuuccagcucuuauauuu

SEQ ID NO: 1371873 - RNA, 19 nt, Artificial Sequence
  Description of Artificial Sequence: Synthetic oligonucleotide
  Antisense strand to SEQ ID NO: 1371872
aaauauaagagcuggaaac

SEQ ID NO: 1371874 - RNA, 19 nt, Artificial Sequence
  Description of Artificial Sequence: Synthetic oligonucleotide
  Sense strand starting at position 1287 of SEQ ID NO: 1242775
gccgucuggccuuacuaga

SEQ ID NO: 1371875 - RNA, 19 nt, Artificial Sequence
  Description of Artificial Sequence: Synthetic oligonucleotide
  Antisense strand to SEQ ID NO: 1371874
ucuaguaaggccagacggc

SEQ ID NO: 1371876 - RNA, 19 nt, Artificial Sequence
  Description of Artificial Sequence: Synthetic oligonucleotide
  Sense strand starting at position 1368 of SEQ ID NO: 1242775
acaggugaucuucguggca

SEQ ID NO: 1371877 - RNA, 19 nt, Artificial Sequence
  Description of Artificial Sequence: Synthetic oligonucleotide
  Antisense strand to SEQ ID NO: 1371876
ugccacgaagaucaccugu

SEQ ID NO: 1371878 - RNA, 19 nt, Artificial Sequence
  Description of Artificial Sequence: Synthetic oligonucleotide
  Sense strand starting at position 1396 of SEQ ID NO: 1242775
cgccuaguucuagaagaca

SEQ ID NO: 1371879 - RNA, 19 nt, Artificial Sequence
  Description of Artificial Sequence: Synthetic oligonucleotide
  Antisense strand to SEQ ID NO: 1371878
ugucuucuagaacuaggcg

SEQ ID NO: 1371880 - RNA, 19 nt, Artificial Sequence
  Description of Artificial Sequence: Synthetic oligonucleotide
  Sense strand starting at position 1458 of SEQ ID NO: 1242775
cgcaguggugugcuuuaaa

SEQ ID NO: 1371881 - RNA, 19 nt, Artificial Sequence
  Description of Artificial Sequence: Synthetic oligonucleotide
  Antisense strand to SEQ ID NO: 1371880
uuuaaagcacaccacugcg

SEQ ID NO: 1371882 - RNA, 19 nt, Artificial Sequence
  Description of Artificial Sequence: Synthetic oligonucleotide
  Sense strand starting at position 1461 of SEQ ID NO: 1242775
aguggugugcuuuaaacuu

SEQ ID NO: 1371883 - RNA, 19 nt, Artificial Sequence
  Description of Artificial Sequence: Synthetic oligonucleotide
  Antisense strand to SEQ ID NO: 1371882
aaguuuaaagcacaccacu

SEQ ID NO: 1371884 - RNA, 19 nt, Artificial Sequence
  Description of Artificial Sequence: Synthetic oligonucleotide
  Sense strand starting at position 1498 of SEQ ID NO: 1242775
uuccuaaccuuggcaguua

SEQ ID NO: 1371885 - RNA, 19 nt, Artificial Sequence
  Description of Artificial Sequence: Synthetic oligonucleotide
  Antisense strand to SEQ ID NO: 1371884
uaacugccaagguuaggaa

SEQ ID NO: 1371886 - RNA, 19 nt, Artificial Sequence
  Description of Artificial Sequence: Synthetic oligonucleotide
  Sense strand starting at position 2030 of SEQ ID NO: 1242775
ccgcuacgcucauuggauu

SEQ ID NO: 1371887 - RNA, 19 nt, Artificial Sequence
  Description of Artificial Sequence: Synthetic oligonucleotide
  Antisense strand to SEQ ID NO: 1371886
aauccaaugagcguagcgg

SEQ ID NO: 1371888 - RNA, 19 nt, Artificial Sequence
  Description of Artificial Sequence: Synthetic oligonucleotide
  Sense strand starting at position 2301 of SEQ ID NO: 1242775
gcauuauucuggucgcuag

SEQ ID NO: 1371889 - RNA, 19 nt, Artificial Sequence
  Description of Artificial Sequence: Synthetic oligonucleotide
  Antisense strand to SEQ ID NO: 1371888
cuagcgaccagaauaaugc

SEQ ID NO: 1371890 - RNA, 19 nt, Artificial Sequence
  Description of Artificial Sequence: Synthetic oligonucleotide
  Sense strand starting at position 2344 of SEQ ID NO: 1242775
ugguucuguccucaaggau

SEQ ID NO: 1371891 - RNA, 19 nt, Artificial Sequence
  Description of Artificial Sequence: Synthetic oligonucleotide
  Antisense strand to SEQ ID NO: 1371890
auccuugaggacagaacca

SEQ ID NO: 1371892 - RNA, 19 nt, Artificial Sequence
  Description of Artificial Sequence: Synthetic oligonucleotide
  Sense strand starting at position 2470 of SEQ ID NO: 1242775
ugguuacuuuccucucaca

SEQ ID NO: 1371893 - RNA, 19 nt, Artificial Sequence
  Description of Artificial Sequence: Synthetic oligonucleotide
  Antisense strand to SEQ ID NO: 1371892
ugugagaggaaaguaacca

SEQ ID NO: 1371894 - RNA, 19 nt, Artificial Sequence
  Description of Artificial Sequence: Synthetic oligonucleotide
  Sense strand starting at position 2538 of SEQ ID NO: 1242775
ccuauaacuuaagaagaga

SEQ ID NO: 1371895 - RNA, 19 nt, Artificial Sequence
  Description of Artificial Sequence: Synthetic oligonucleotide
  Antisense strand to SEQ ID NO: 1371894
ucucuucuuaaguuauagg

SEQ ID NO: 1371896 - RNA, 19 nt, Artificial Sequence
  Description of Artificial Sequence: Synthetic oligonucleotide
  Sense strand starting at position 2664 of SEQ ID NO: 1242775
uguauugauacgcguguga

SEQ ID NO: 1371897 - RNA, 19 nt, Artificial Sequence
  Description of Artificial Sequence: Synthetic oligonucleotide
  Antisense strand to SEQ ID NO: 1371896
ucacacgcguaucaauaca

SEQ ID NO: 1371898 - RNA, 19 nt, Artificial Sequence
  Description of Artificial Sequence: Synthetic oligonucleotide
  Sense strand starting at position 2693 of SEQ ID NO: 1242775
caggauuccugcccgcaaa

SEQ ID NO: 1371899 - RNA, 19 nt, Artificial Sequence
  Description of Artificial Sequence: Synthetic oligonucleotide
  Antisense strand to SEQ ID NO: 1371898
uuugcgggcaggaauccug

SEQ ID NO: 1371900 - RNA, 19 nt, Artificial Sequence
  Description of Artificial Sequence: Synthetic oligonucleotide
  Sense strand starting at position 3088 of SEQ ID NO: 1242775
aucuaagacugaugggcua

SEQ ID NO: 1371901 - RNA, 19 nt, Artificial Sequence
  Description of Artificial Sequence: Synthetic oligonucleotide
  Antisense strand to SEQ ID NO: 1371900
uagcccaucagucuuagau

SEQ ID NO: 1371902 - RNA, 19 nt, Artificial Sequence
  Description of Artificial Sequence: Synthetic oligonucleotide
  Sense strand starting at position 3285 of SEQ ID NO: 1242775
aguaccagucacugacuaa

SEQ ID NO: 1371903 - RNA, 19 nt, Artificial Sequence
  Description of Artificial Sequence: Synthetic oligonucleotide
  Antisense strand to SEQ ID NO: 1371902
uuagucagugacugguacu

SEQ ID NO: 1371904 - RNA, 19 nt, Artificial Sequence
  Description of Artificial Sequence: Synthetic oligonucleotide
  Sense strand starting at position 3437 of SEQ ID NO: 1242775
gccuuuauguucucugcuu

SEQ ID NO: 1371905 - RNA, 19 nt, Artificial Sequence
  Description of Artificial Sequence: Synthetic oligonucleotide
  Antisense strand to SEQ ID NO: 1371904
aagcagagaacauaaaggc

SEQ ID NO: 1371906 - RNA, 19 nt, Artificial Sequence
  Description of Artificial Sequence: Synthetic oligonucleotide
  Sense strand starting at position 3465 of SEQ ID NO: 1242775
acguaaagggucuaacugu

SEQ ID NO: 1371907 - RNA, 19 nt, Artificial Sequence
  Description of Artificial Sequence: Synthetic oligonucleotide
  Antisense strand to SEQ ID NO: 1371906
acaguuagacccuuuacgu

SEQ ID NO: 1371908 - RNA, 19 nt, Artificial Sequence
  Description of Artificial Sequence: Synthetic oligonucleotide
  Sense strand starting at position 3471 of SEQ ID NO: 1242775
agggucuaacuguaaugca

SEQ ID NO: 1371909 - RNA, 19 nt, Artificial Sequence
  Description of Artificial Sequence: Synthetic oligonucleotide
  Antisense strand to SEQ ID NO: 1371908
ugcauuacaguuagacccu

SEQ ID NO: 1371910 - RNA, 19 nt, Artificial Sequence
  Description of Artificial Sequence: Synthetic oligonucleotide
  Sense strand starting at position 3474 of SEQ ID NO: 1242775
gucuaacuguaaugcauuu

SEQ ID NO: 1371911 - RNA, 19 nt, Artificial Sequence
  Description of Artificial Sequence: Synthetic oligonucleotide
  Antisense strand to SEQ ID NO: 1371910
aaaugcauuacaguuagac

SEQ ID NO: 1371912 - RNA, 19 nt, Artificial Sequence
  Description of Artificial Sequence: Synthetic oligonucleotide
  Sense strand starting at position 3520 of SEQ ID NO: 1242775
acaugugacccauguaaca

SEQ ID NO: 1371913 - RNA, 19 nt, Artificial Sequence
  Description of Artificial Sequence: Synthetic oligonucleotide
  Antisense strand to SEQ ID NO: 1371912
uguuacaugggucacaugu

SEQ ID NO: 1371914 - RNA, 19 nt, Artificial Sequence
  Description of Artificial Sequence: Synthetic oligonucleotide
  Sense strand starting at position 3531 of SEQ ID NO: 1242775
auguaacaugcaugauugu

SEQ ID NO: 1371915 - RNA, 19 nt, Artificial Sequence
  Description of Artificial Sequence: Synthetic oligonucleotide
  Antisense strand to SEQ ID NO: 1371914
acaaucaugcauguuacau

SEQ ID NO: 1371916 - RNA, 19 nt, Artificial Sequence
  Description of Artificial Sequence: Synthetic oligonucleotide
  Sense strand starting at position 434 of SEQ ID NO: 1242776
ggagauugcacucagccau

SEQ ID NO: 1371917 - RNA, 19 nt, Artificial Sequence
  Description of Artificial Sequence: Synthetic oligonucleotide
  Antisense strand to SEQ ID NO: 1371916
auggcugagugcaaucucc

SEQ ID NO: 1371918 - RNA, 19 nt, Artificial Sequence
  Description of Artificial Sequence: Synthetic oligonucleotide
  Sense strand starting at position 612 of SEQ ID NO: 1242776
gguuguuucugguugauuu

SEQ ID NO: 1371919 - RNA, 19 nt, Artificial Sequence
  Description of Artificial Sequence: Synthetic oligonucleotide
  Antisense strand to SEQ ID NO: 1371918
aaaucaaccagaaacaacc

SEQ ID NO: 1371920 - RNA, 19 nt, Artificial Sequence
  Description of Artificial Sequence: Synthetic oligonucleotide
  Sense strand starting at position 613 of SEQ ID NO: 1242776
guuguuucugguugauuuc

SEQ ID NO: 1371921 - RNA, 19 nt, Artificial Sequence
  Description of Artificial Sequence: Synthetic oligonucleotide
  Antisense strand to SEQ ID NO: 1371920
gaaaucaaccagaaacaac

SEQ ID NO: 1371922 - RNA, 19 nt, Artificial Sequence
  Description of Artificial Sequence: Synthetic oligonucleotide
  Sense strand starting at position 994 of SEQ ID NO: 1242776
ggaacacagcucuaagugu

SEQ ID NO: 1371923 - RNA, 19 nt, Artificial Sequence
  Description of Artificial Sequence: Synthetic oligonucleotide
  Antisense strand to SEQ ID NO: 1371922
acacuuagagcuguguucc

SEQ ID NO: 1371924 - RNA, 19 nt, Artificial Sequence
  Description of Artificial Sequence: Synthetic oligonucleotide
  Sense strand starting at position 1206 of SEQ ID NO: 1242776
agugcauucuacccaugau

SEQ ID NO: 1371925 - RNA, 19 nt, Artificial Sequence
  Description of Artificial Sequence: Synthetic oligonucleotide
  Antisense strand to SEQ ID NO: 1371924
aucauggguagaaugcacu

SEQ ID NO: 1371926 - RNA, 19 nt, Artificial Sequence
  Description of Artificial Sequence: Synthetic oligonucleotide
  Sense strand starting at position 1293 of SEQ ID NO: 1242776
uuauguagcacagaaaggu

SEQ ID NO: 1371927 - RNA, 19 nt, Artificial Sequence
  Description of Artificial Sequence: Synthetic oligonucleotide
  Antisense strand to SEQ ID NO: 1371926
accuuucugugcuacauaa

SEQ ID NO: 1371928 - RNA, 19 nt, Artificial Sequence
  Description of Artificial Sequence: Synthetic oligonucleotide
  Sense strand starting at position 1313 of SEQ ID NO: 1242776
aacagaaucgccugaagca

SEQ ID NO: 1371929 - RNA, 19 nt, Artificial Sequence
  Description of Artificial Sequence: Synthetic oligonucleotide
  Antisense strand to SEQ ID NO: 1371928
ugcuucaggcgauucuguu

SEQ ID NO: 1371930 - RNA, 19 nt, Artificial Sequence
  Description of Artificial Sequence: Synthetic oligonucleotide
  Sense strand starting at position 1345 of SEQ ID NO: 1242776
uggccaacuugaguuuaca

SEQ ID NO: 1371931 - RNA, 19 nt, Artificial Sequence
  Description of Artificial Sequence: Synthetic oligonucleotide
  Antisense strand to SEQ ID NO: 1371930
uguaaacucaaguuggcca

SEQ ID NO: 1371932 - RNA, 19 nt, Artificial Sequence
  Description of Artificial Sequence: Synthetic oligonucleotide
  Sense strand starting at position 1390 of SEQ ID NO: 1242776
ccacauguauucccaggua

SEQ ID NO: 1371933 - RNA, 19 nt, Artificial Sequence
  Description of Artificial Sequence: Synthetic oligonucleotide
  Antisense strand to SEQ ID NO: 1371932
uaccugggaauacaugugg

SEQ ID NO: 1371934 - RNA, 19 nt, Artificial Sequence
  Description of Artificial Sequence: Synthetic oligonucleotide
  Sense strand starting at position 1393 of SEQ ID NO: 1242776
cauguauucccagguaguc

SEQ ID NO: 1371935 - RNA, 19 nt, Artificial Sequence
  Description of Artificial Sequence: Synthetic oligonucleotide
  Antisense strand to SEQ ID NO: 1371934
gacuaccugggaauacaug

SEQ ID NO: 1371936 - RNA, 19 nt, Artificial Sequence
  Description of Artificial Sequence: Synthetic oligonucleotide
  Sense strand starting at position 1402 of SEQ ID NO: 1242776
ccagguagucguggcauuu

SEQ ID NO: 1371937 - RNA, 19 nt, Artificial Sequence
  Description of Artificial Sequence: Synthetic oligonucleotide
  Antisense strand to SEQ ID NO: 1371936
aaaugccacgacuaccugg

SEQ ID NO: 1371938 - RNA, 19 nt, Artificial Sequence
  Description of Artificial Sequence: Synthetic oligonucleotide
  Sense strand starting at position 1412 of SEQ ID NO: 1242776
guggcauuugccgaguguu

SEQ ID NO: 1371939 - RNA, 19 nt, Artificial Sequence
  Description of Artificial Sequence: Synthetic oligonucleotide
  Antisense strand to SEQ ID NO: 1371938
aacacucggcaaaugccac

SEQ ID NO: 1371940 - RNA, 19 nt, Artificial Sequence
  Description of Artificial Sequence: Synthetic oligonucleotide
  Sense strand starting at position 1472 of SEQ ID NO: 1242776
gcagcaauucucgcuugca

SEQ ID NO: 1371941 - RNA, 19 nt, Artificial Sequence
  Description of Artificial Sequence: Synthetic oligonucleotide
  Antisense strand to SEQ ID NO: 1371940
ugcaagcgagaauugcugc

SEQ ID NO: 1371942 - RNA, 19 nt, Artificial Sequence
  Description of Artificial Sequence: Synthetic oligonucleotide
  Sense strand starting at position 1474 of SEQ ID NO: 1242776
agcaauucucgcuugcauu

SEQ ID NO: 1371943 - RNA, 19 nt, Artificial Sequence
  Description of Artificial Sequence: Synthetic oligonucleotide
  Antisense strand to SEQ ID NO: 1371942
aaugcaagcgagaauugcu

SEQ ID NO: 1371944 - RNA, 19 nt, Artificial Sequence
  Description of Artificial Sequence: Synthetic oligonucleotide
  Sense strand starting at position 1475 of SEQ ID NO: 1242776
gcaauucucgcuugcauuu

SEQ ID NO: 1371945 - RNA, 19 nt, Artificial Sequence
  Description of Artificial Sequence: Synthetic oligonucleotide
  Antisense strand to SEQ ID NO: 1371944
aaaugcaagcgagaauugc

SEQ ID NO: 1371946 - RNA, 19 nt, Artificial Sequence
  Description of Artificial Sequence: Synthetic oligonucleotide
  Sense strand starting at position 1693 of SEQ ID NO: 1242776
cagagucuucuggagagcu

SEQ ID NO: 1371947 - RNA, 19 nt, Artificial Sequence
  Description of Artificial Sequence: Synthetic oligonucleotide
  Antisense strand to SEQ ID NO: 1371946
agcucuccagaagacucug

SEQ ID NO: 1371948 - RNA, 19 nt, Artificial Sequence
  Description of Artificial Sequence: Synthetic oligonucleotide
  Sense strand starting at position 1771 of SEQ ID NO: 1242776
uguacaagcuguccugaaa

SEQ ID NO: 1371949 - RNA, 19 nt, Artificial Sequence
  Description of Artificial Sequence: Synthetic oligonucleotide
  Antisense strand to SEQ ID NO: 1371948
uuucaggacagcuuguaca

SEQ ID NO: 1371950 - RNA, 19 nt, Artificial Sequence
  Description of Artificial Sequence: Synthetic oligonucleotide
  Sense strand starting at position 1874 of SEQ ID NO: 1242776
ugccuuucuagagggagaa

SEQ ID NO: 1371951 - RNA, 19 nt, Artificial Sequence
  Description of Artificial Sequence: Synthetic oligonucleotide
  Antisense strand to SEQ ID NO: 1371950
uucucccucuagaaaggca

SEQ ID NO: 1371952 - RNA, 19 nt, Artificial Sequence
  Description of Artificial Sequence: Synthetic oligonucleotide
  Sense strand starting at position 1924 of SEQ ID NO: 1242776
uccaccucacccugaguua

SEQ ID NO: 1371953 - RNA, 19 nt, Artificial Sequence
  Description of Artificial Sequence: Synthetic oligonucleotide
  Antisense strand to SEQ ID NO: 1371952
uaacucagggugaggugga

SEQ ID NO: 1371954 - RNA, 19 nt, Artificial Sequence
  Description of Artificial Sequence: Synthetic oligonucleotide
  Sense strand starting at position 1936 of SEQ ID NO: 1242776
ugaguuaccugcuuagaug

SEQ ID NO: 1371955 - RNA, 19 nt, Artificial Sequence
  Description of Artificial Sequence: Synthetic oligonucleotide
  Antisense strand to SEQ ID NO: 1371954
caucuaagcagguaacuca

SEQ ID NO: 1371956 - RNA, 19 nt, Artificial Sequence
  Description of Artificial Sequence: Synthetic oligonucleotide
  Sense strand starting at position 2038 of SEQ ID NO: 1242776
ggccgugugcaaaggauua

SEQ ID NO: 1371957 - RNA, 19 nt, Artificial Sequence
  Description of Artificial Sequence: Synthetic oligonucleotide
  Antisense strand to SEQ ID NO: 1371956
uaauccuuugcacacggcc

SEQ ID NO: 1371958 - RNA, 19 nt, Artificial Sequence
  Description of Artificial Sequence: Synthetic oligonucleotide
  Sense strand starting at position 2089 of SEQ ID NO: 1242776
ggcuguugaugcccaggaa

SEQ ID NO: 1371959 - RNA, 19 nt, Artificial Sequence
  Description of Artificial Sequence: Synthetic oligonucleotide
  Antisense strand to SEQ ID NO: 1371958
uuccugggcaucaacagcc

SEQ ID NO: 1371960 - RNA, 19 nt, Artificial Sequence
  Description of Artificial Sequence: Synthetic oligonucleotide
  Sense strand starting at position 2090 of SEQ ID NO: 1242776
gcuguugaugcccaggaaa

SEQ ID NO: 1371961 - RNA, 19 nt, Artificial Sequence
  Description of Artificial Sequence: Synthetic oligonucleotide
  Antisense strand to SEQ ID NO: 1371960
uuuccugggcaucaacagc

SEQ ID NO: 1371962 - RNA, 19 nt, Artificial Sequence
  Description of Artificial Sequence: Synthetic oligonucleotide
  Sense strand starting at position 2275 of SEQ ID NO: 1242776
agaauaacagcuuggaguu

SEQ ID NO: 1371963 - RNA, 19 nt, Artificial Sequence
  Description of Artificial Sequence: Synthetic oligonucleotide
  Antisense strand to SEQ ID NO: 1371962
aacuccaagcuguuauucu

SEQ ID NO: 1371964 - RNA, 19 nt, Artificial Sequence
  Description of Artificial Sequence: Synthetic oligonucleotide
  Sense strand starting at position 2295 of SEQ ID NO: 1242776
ccaugugaugccuggagac

SEQ ID NO: 1371965 - RNA, 19 nt, Artificial Sequence
  Description of Artificial Sequence: Synthetic oligonucleotide
  Antisense strand to SEQ ID NO: 1371964
gucuccaggcaucacaugg

SEQ ID NO: 1371966 - RNA, 19 nt, Artificial Sequence
  Description of Artificial Sequence: Synthetic oligonucleotide
  Sense strand starting at position 2689 of SEQ ID NO: 1242776
uuucuagaguucuuccuuu

SEQ ID NO: 1371967 - RNA, 19 nt, Artificial Sequence
  Description of Artificial Sequence: Synthetic oligonucleotide
  Antisense strand to SEQ ID NO: 1371966
aaaggaagaacucuagaaa

SEQ ID NO: 1371968 - RNA, 19 nt, Artificial Sequence
  Description of Artificial Sequence: Synthetic oligonucleotide
  Sense strand starting at position 2989 of SEQ ID NO: 1242776
ggagauuacugacaaauaa

SEQ ID NO: 1371969 - RNA, 19 nt, Artificial Sequence
  Description of Artificial Sequence: Synthetic oligonucleotide
  Antisense strand to SEQ ID NO: 1371968
uuauuugucaguaaucucc

SEQ ID NO: 1371970 - RNA, 19 nt, Artificial Sequence
  Description of Artificial Sequence: Synthetic oligonucleotide
  Sense strand starting at position 3101 of SEQ ID NO: 1242776
ugacgagguggauguauau

SEQ ID NO: 1371971 - RNA, 19 nt, Artificial Sequence
  Description of Artificial Sequence: Synthetic oligonucleotide
  Antisense strand to SEQ ID NO: 1371970
auauacauccaccucguca

SEQ ID NO: 1371972 - RNA, 19 nt, Artificial Sequence
  Description of Artificial Sequence: Synthetic oligonucleotide
  Sense strand starting at position 3110 of SEQ ID NO: 1242776
ggauguauauuugaacuga

SEQ ID NO: 1371973 - RNA, 19 nt, Artificial Sequence
  Description of Artificial Sequence: Synthetic oligonucleotide
  Antisense strand to SEQ ID NO: 1371972
ucaguucaaauauacaucc

SEQ ID NO: 1371974 - RNA, 19 nt, Artificial Sequence
  Description of Artificial Sequence: Synthetic oligonucleotide
  Sense strand starting at position 3139 of SEQ ID NO: 1242776
guaagaaagacucagcugu

SEQ ID NO: 1371975 - RNA, 19 nt, Artificial Sequence
  Description of Artificial Sequence: Synthetic oligonucleotide
  Antisense strand to SEQ ID NO: 1371974
acagcugagucuuucuuac

SEQ ID NO: 1371976 - RNA, 19 nt, Artificial Sequence
  Description of Artificial Sequence: Synthetic oligonucleotide
  Sense strand starting at position 3141 of SEQ ID NO: 1242776
aagaaagacucagcuguga

SEQ ID NO: 1371977 - RNA, 19 nt, Artificial Sequence
  Description of Artificial Sequence: Synthetic oligonucleotide
  Antisense strand to SEQ ID NO: 1371976
ucacagcugagucuuucuu

SEQ ID NO: 1371978 - RNA, 19 nt, Artificial Sequence
  Description of Artificial Sequence: Synthetic oligonucleotide
  Sense strand starting at position 3209 of SEQ ID NO: 1242776
gguucugaggcuggaauga

SEQ ID NO: 1371979 - RNA, 19 nt, Artificial Sequence
  Description of Artificial Sequence: Synthetic oligonucleotide
  Antisense strand to SEQ ID NO: 1371978
ucauuccagccucagaacc

SEQ ID NO: 1371980 - RNA, 19 nt, Artificial Sequence
  Description of Artificial Sequence: Synthetic oligonucleotide
  Sense strand starting at position 3454 of SEQ ID NO: 1242776
gggacaagcugauugguga

SEQ ID NO: 1371981 - RNA, 19 nt, Artificial Sequence
  Description of Artificial Sequence: Synthetic oligonucleotide
  Antisense strand to SEQ ID NO: 1371980
ucaccaaucagcuuguccc

SEQ ID NO: 1371982 - RNA, 19 nt, Artificial Sequence
  Description of Artificial Sequence: Synthetic oligonucleotide
  Sense strand starting at position 3462 of SEQ ID NO: 1242776
cugauuggugacuggauga

SEQ ID NO: 1371983 - RNA, 19 nt, Artificial Sequence
  Description of Artificial Sequence: Synthetic oligonucleotide
  Antisense strand to SEQ ID NO: 1371982
ucauccagucaccaaucag

SEQ ID NO: 1371984 - RNA, 19 nt, Artificial Sequence
  Description of Artificial Sequence: Synthetic oligonucleotide
  Sense strand starting at position 3587 of SEQ ID NO: 1242776
aacgguaaagcucaaugua

SEQ ID NO: 1371985 - RNA, 19 nt, Artificial Sequence
  Description of Artificial Sequence: Synthetic oligonucleotide
  Antisense strand to SEQ ID NO: 1371984
uacauugagcuuuaccguu

SEQ ID NO: 1371986 - RNA, 19 nt, Artificial Sequence
  Description of Artificial Sequence: Synthetic oligonucleotide
  Sense strand starting at position 3590 of SEQ ID NO: 1242776
gguaaagcucaauguacuc

SEQ ID NO: 1371987 - RNA, 19 nt, Artificial Sequence
  Description of Artificial Sequence: Synthetic oligonucleotide
  Antisense strand to SEQ ID NO: 1371986
gaguacauugagcuuuacc

SEQ ID NO: 1371988 - RNA, 19 nt, Artificial Sequence
  Description of Artificial Sequence: Synthetic oligonucleotide
  Sense strand starting at position 3687 of SEQ ID NO: 1242776
cugcuugggccugagacua

SEQ ID NO: 1371989 - RNA, 19 nt, Artificial Sequence
  Description of Artificial Sequence: Synthetic oligonucleotide
  Antisense strand to SEQ ID NO: 1371988
uagucucaggcccaagcag

SEQ ID NO: 1371990 - RNA, 19 nt, Artificial Sequence
  Description of Artificial Sequence: Synthetic oligonucleotide
  Sense strand starting at position 3846 of SEQ ID NO: 1242776
ugguuuagugggugaacca

SEQ ID NO: 1371991 - RNA, 19 nt, Artificial Sequence
  Description of Artificial Sequence: Synthetic oligonucleotide
  Antisense strand to SEQ ID NO: 1371990
ugguucacccacuaaacca

SEQ ID NO: 1371992 - RNA, 19 nt, Artificial Sequence
  Description of Artificial Sequence: Synthetic oligonucleotide
  Sense strand starting at position 3954 of SEQ ID NO: 1242776
ugagcacuacuuuguuaag

SEQ ID NO: 1371993 - RNA, 19 nt, Artificial Sequence
  Description of Artificial Sequence: Synthetic oligonucleotide
  Antisense strand to SEQ ID NO: 1371992
cuuaacaaaguagugcuca

SEQ ID NO: 1371994 - RNA, 19 nt, Artificial Sequence
  Description of Artificial Sequence: Synthetic oligonucleotide
  Sense strand starting at position 3955 of SEQ ID NO: 1242776
gagcacuacuuuguuaaga

SEQ ID NO: 1371995 - RNA, 19 nt, Artificial Sequence
  Description of Artificial Sequence: Synthetic oligonucleotide
  Antisense strand to SEQ ID NO: 1371994
ucuuaacaaaguagugcuc

SEQ ID NO: 1371996 - RNA, 19 nt, Artificial Sequence
  Description of Artificial Sequence: Synthetic oligonucleotide
  Sense strand starting at position 232 of SEQ ID NO: 1242777
gcgcccagucgauucuaga

SEQ ID NO: 1371997 - RNA, 19 nt, Artificial Sequence
  Description of Artificial Sequence: Synthetic oligonucleotide
  Antisense strand to SEQ ID NO: 1371996
ucuagaaucgacugggcgc

SEQ ID NO: 1371998 - RNA, 19 nt, Artificial Sequence
  Description of Artificial Sequence: Synthetic oligonucleotide
  Sense strand starting at position 439 of SEQ ID NO: 1242777
guuaccacaugucuucuua

SEQ ID NO: 1371999 - RNA, 19 nt, Artificial Sequence
  Description of Artificial Sequence: Synthetic oligonucleotide
  Antisense strand to SEQ ID NO: 1371998
uaagaagacaugugguaac

SEQ ID NO: 1372000 - RNA, 19 nt, Artificial Sequence
  Description of Artificial Sequence: Synthetic oligonucleotide
  Sense strand starting at position 742 of SEQ ID NO: 1242777
aggcuaucgaauuguagag

SEQ ID NO: 1372001 - RNA, 19 nt, Artificial Sequence
  Description of Artificial Sequence: Synthetic oligonucleotide
  Antisense strand to SEQ ID NO: 1372000
cucuacaauucgauagccu

SEQ ID NO: 1372002 - RNA, 19 nt, Artificial Sequence
  Description of Artificial Sequence: Synthetic oligonucleotide
  Sense strand starting at position 756 of SEQ ID NO: 1242777
uagagaaaucggcagggua

SEQ ID NO: 1372003 - RNA, 19 nt, Artificial Sequence
  Description of Artificial Sequence: Synthetic oligonucleotide
  Antisense strand to SEQ ID NO: 1372002
uacccugccgauuucucua

SEQ ID NO: 1372004 - RNA, 19 nt, Artificial Sequence
  Description of Artificial Sequence: Synthetic oligonucleotide
  Sense strand starting at position 773 of SEQ ID NO: 1242777
uagguuaagcauuguuacu

SEQ ID NO: 1372005 - RNA, 19 nt, Artificial Sequence
  Description of Artificial Sequence: Synthetic oligonucleotide
  Antisense strand to SEQ ID NO: 1372004
aguaacaaugcuuaaccua

SEQ ID NO: 1372006 - RNA, 19 nt, Artificial Sequence
  Description of Artificial Sequence: Synthetic oligonucleotide
  Sense strand starting at position 775 of SEQ ID NO: 1242777
gguuaagcauuguuacuca

SEQ ID NO: 1372007 - RNA, 19 nt, Artificial Sequence
  Description of Artificial Sequence: Synthetic oligonucleotide
  Antisense strand to SEQ ID NO: 1372006
ugaguaacaaugcuuaacc

SEQ ID NO: 1372008 - RNA, 19 nt, Artificial Sequence
  Description of Artificial Sequence: Synthetic oligonucleotide
  Sense strand starting at position 828 of SEQ ID NO: 1242777
uaagaaaugugacauuuga

SEQ ID NO: 1372009 - RNA, 19 nt, Artificial Sequence
  Description of Artificial Sequence: Synthetic oligonucleotide
  Antisense strand to SEQ ID NO: 1372008
ucaaaugucacauuucuua

SEQ ID NO: 1372010 - RNA, 19 nt, Artificial Sequence
  Description of Artificial Sequence: Synthetic oligonucleotide
  Sense strand starting at position 951 of SEQ ID NO: 1242777
gggaguuaguaucugugag

SEQ ID NO: 1372011 - RNA, 19 nt, Artificial Sequence
  Description of Artificial Sequence: Synthetic oligonucleotide
  Antisense strand to SEQ ID NO: 1372010
cucacagauacuaacuccc

SEQ ID NO: 1372012 - RNA, 19 nt, Artificial Sequence
  Description of Artificial Sequence: Synthetic oligonucleotide
  Sense strand starting at position 952 of SEQ ID NO: 1242777
ggaguuaguaucugugagc

SEQ ID NO: 1372013 - RNA, 19 nt, Artificial Sequence
  Description of Artificial Sequence: Synthetic oligonucleotide
  Antisense strand to SEQ ID NO: 1372012
gcucacagauacuaacucc

SEQ ID NO: 1372014 - RNA, 19 nt, Artificial Sequence
  Description of Artificial Sequence: Synthetic oligonucleotide
  Sense strand starting at position 967 of SEQ ID NO: 1242777
gagcccucuugggugaauu

SEQ ID NO: 1372015 - RNA, 19 nt, Artificial Sequence
  Description of Artificial Sequence: Synthetic oligonucleotide
  Antisense strand to SEQ ID NO: 1372014
aauucacccaagagggcuc

SEQ ID NO: 1372016 - RNA, 19 nt, Artificial Sequence
  Description of Artificial Sequence: Synthetic oligonucleotide
  Sense strand starting at position 1019 of SEQ ID NO: 1242777
uguguuuggccuuaaguac

SEQ ID NO: 1372017 - RNA, 19 nt, Artificial Sequence
  Description of Artificial Sequence: Synthetic oligonucleotide
  Antisense strand to SEQ ID NO: 1372016
guacuuaaggccaaacaca

SEQ ID NO: 1372018 - RNA, 19 nt, Artificial Sequence
  Description of Artificial Sequence: Synthetic oligonucleotide
  Sense strand starting at position 1716 of SEQ ID NO: 1242777
ucccuagagcuccgggaaa

SEQ ID NO: 1372019 - RNA, 19 nt, Artificial Sequence
  Description of Artificial Sequence: Synthetic oligonucleotide
  Antisense strand to SEQ ID NO: 1372018
uuucccggagcucuaggga

SEQ ID NO: 1372020 - RNA, 19 nt, Artificial Sequence
  Description of Artificial Sequence: Synthetic oligonucleotide
  Sense strand starting at position 1783 of SEQ ID NO: 1242777
ucgcguucccaagcugaca

SEQ ID NO: 1372021 - RNA, 19 nt, Artificial Sequence
  Description of Artificial Sequence: Synthetic oligonucleotide
  Antisense strand to SEQ ID NO: 1372020
ugucagcuugggaacgcga

SEQ ID NO: 1372022 - RNA, 19 nt, Artificial Sequence
  Description of Artificial Sequence: Synthetic oligonucleotide
  Sense strand starting at position 1916 of SEQ ID NO: 1242777
cgguuaacuccgcuuguuu

SEQ ID NO: 1372023 - RNA, 19 nt, Artificial Sequence
  Description of Artificial Sequence: Synthetic oligonucleotide
  Antisense strand to SEQ ID NO: 1372022
aaacaagcggaguuaaccg

SEQ ID NO: 1372024 - RNA, 19 nt, Artificial Sequence
  Description of Artificial Sequence: Synthetic oligonucleotide
  Sense strand starting at position 2124 of SEQ ID NO: 1242777
ugcagaagucgaggaagaa

SEQ ID NO: 1372025 - RNA, 19 nt, Artificial Sequence
  Description of Artificial Sequence: Synthetic oligonucleotide
  Antisense strand to SEQ ID NO: 1372024
uucuuccucgacuucugca

SEQ ID NO: 1372026 - RNA, 19 nt, Artificial Sequence
  Description of Artificial Sequence: Synthetic oligonucleotide
  Sense strand starting at position 2344 of SEQ ID NO: 1242777
uggcauugccuuugaggaa

SEQ ID NO: 1372027 - RNA, 19 nt, Artificial Sequence
  Description of Artificial Sequence: Synthetic oligonucleotide
  Antisense strand to SEQ ID NO: 1372026
uuccucaaaggcaaugcca

SEQ ID NO: 1372028 - RNA, 19 nt, Artificial Sequence
  Description of Artificial Sequence: Synthetic oligonucleotide
  Sense strand starting at position 2406 of SEQ ID NO: 1242777
cgggaacuacuuugaauua

SEQ ID NO: 1372029 - RNA, 19 nt, Artificial Sequence
  Description of Artificial Sequence: Synthetic oligonucleotide
  Antisense strand to SEQ ID NO: 1372028
uaauucaaaguaguucccg

SEQ ID NO: 1372030 - RNA, 19 nt, Artificial Sequence
  Description of Artificial Sequence: Synthetic oligonucleotide
  Sense strand starting at position 2407 of SEQ ID NO: 1242777
gggaacuacuuugaauuac

SEQ ID NO: 1372031 - RNA, 19 nt, Artificial Sequence
  Description of Artificial Sequence: Synthetic oligonucleotide
  Antisense strand to SEQ ID NO: 1372030
guaauucaaaguaguuccc

SEQ ID NO: 1372032 - RNA, 19 nt, Artificial Sequence
  Description of Artificial Sequence: Synthetic oligonucleotide
  Sense strand starting at position 2557 of SEQ ID NO: 1242777
ccagguugugacuagaguu

SEQ ID NO: 1372033 - RNA, 19 nt, Artificial Sequence
  Description of Artificial Sequence: Synthetic oligonucleotide
  Antisense strand to SEQ ID NO: 1372032
aacucuagucacaaccugg

SEQ ID NO: 1372034 - RNA, 19 nt, Artificial Sequence
  Description of Artificial Sequence: Synthetic oligonucleotide
  Sense strand starting at position 2579 of SEQ ID NO: 1242777
gcgcuuugcauccugggau

SEQ ID NO: 1372035 - RNA, 19 nt, Artificial Sequence
  Description of Artificial Sequence: Synthetic oligonucleotide
  Antisense strand to SEQ ID NO: 1372034
aucccaggaugcaaagcgc

SEQ ID NO: 1372036 - RNA, 19 nt, Artificial Sequence
  Description of Artificial Sequence: Synthetic oligonucleotide
  Sense strand starting at position 2621 of SEQ ID NO: 1242777
guucccaucgcagaaguaa

SEQ ID NO: 1372037 - RNA, 19 nt, Artificial Sequence
  Description of Artificial Sequence: Synthetic oligonucleotide
  Antisense strand to SEQ ID NO: 1372036
uuacuucugcgaugggaac

SEQ ID NO: 1372038 - RNA, 19 nt, Artificial Sequence
  Description of Artificial Sequence: Synthetic oligonucleotide
  Sense strand starting at position 2632 of SEQ ID NO: 1242777
agaaguaaugcgucuucgu

SEQ ID NO: 1372039 - RNA, 19 nt, Artificial Sequence
  Description of Artificial Sequence: Synthetic oligonucleotide
  Antisense strand to SEQ ID NO: 1372038
acgaagacgcauuacuucu

SEQ ID NO: 1372040 - RNA, 19 nt, Artificial Sequence
  Description of Artificial Sequence: Synthetic oligonucleotide
  Sense strand starting at position 2633 of SEQ ID NO: 1242777
gaaguaaugcgucuucguu

SEQ ID NO: 1372041 - RNA, 19 nt, Artificial Sequence
  Description of Artificial Sequence: Synthetic oligonucleotide
  Antisense strand to SEQ ID NO: 1372040
aacgaagacgcauuacuuc

SEQ ID NO: 1372042 - RNA, 19 nt, Artificial Sequence
  Description of Artificial Sequence: Synthetic oligonucleotide
  Sense strand starting at position 2634 of SEQ ID NO: 1242777
aaguaaugcgucuucguuc

SEQ ID NO: 1372043 - RNA, 19 nt, Artificial Sequence
  Description of Artificial Sequence: Synthetic oligonucleotide
  Antisense strand to SEQ ID NO: 1372042
gaacgaagacgcauuacuu

SEQ ID NO: 1372044 - RNA, 19 nt, Artificial Sequence
  Description of Artificial Sequence: Synthetic oligonucleotide
  Sense strand starting at position 2721 of SEQ ID NO: 1242777
gcuugcuucgcuuugguca

SEQ ID NO: 1372045 - RNA, 19 nt, Artificial Sequence
  Description of Artificial Sequence: Synthetic oligonucleotide
  Antisense strand to SEQ ID NO: 1372044
ugaccaaagcgaagcaagc

SEQ ID NO: 1372046 - RNA, 19 nt, Artificial Sequence
  Description of Artificial Sequence: Synthetic oligonucleotide
  Sense strand starting at position 2726 of SEQ ID NO: 1242777
cuucgcuuuggucaaggga

SEQ ID NO: 1372047 - RNA, 19 nt, Artificial Sequence
  Description of Artificial Sequence: Synthetic oligonucleotide
  Antisense strand to SEQ ID NO: 1372046
ucccuugaccaaagcgaag

SEQ ID NO: 1372048 - RNA, 19 nt, Artificial Sequence
  Description of Artificial Sequence: Synthetic oligonucleotide
  Sense strand starting at position 2729 of SEQ ID NO: 1242777
cgcuuuggucaagggaacu

SEQ ID NO: 1372049 - RNA, 19 nt, Artificial Sequence
  Description of Artificial Sequence: Synthetic oligonucleotide
  Antisense strand to SEQ ID NO: 1372048
aguucccuugaccaaagcg

SEQ ID NO: 1372050 - RNA, 19 nt, Artificial Sequence
  Description of Artificial Sequence: Synthetic oligonucleotide
  Sense strand starting at position 2819 of SEQ ID NO: 1242777
aguucucuuccuggcuuaa

SEQ ID NO: 1372051 - RNA, 19 nt, Artificial Sequence
  Description of Artificial Sequence: Synthetic oligonucleotide
  Antisense strand to SEQ ID NO: 1372050
uuaagccaggaagagaacu

SEQ ID NO: 1372052 - RNA, 19 nt, Artificial Sequence
  Description of Artificial Sequence: Synthetic oligonucleotide
  Sense strand starting at position 2837 of SEQ ID NO: 1242777
aguccuagaagccgucuaa

SEQ ID NO: 1372053 - RNA, 19 nt, Artificial Sequence
  Description of Artificial Sequence: Synthetic oligonucleotide
  Antisense strand to SEQ ID NO: 1372052
uuagacggcuucuaggacu

SEQ ID NO: 1372054 - RNA, 19 nt, Artificial Sequence
  Description of Artificial Sequence: Synthetic oligonucleotide
  Sense strand starting at position 2841 of SEQ ID NO: 1242777
cuagaagccgucuaagaaa

SEQ ID NO: 1372055 - RNA, 19 nt, Artificial Sequence
  Description of Artificial Sequence: Synthetic oligonucleotide
  Antisense strand to SEQ ID NO: 1372054
uuucuuagacggcuucuag

SEQ ID NO: 1372056 - RNA, 19 nt, Artificial Sequence
  Description of Artificial Sequence: Synthetic oligonucleotide
  Sense strand starting at position 2912 of SEQ ID NO: 1242777
uaugguuuguuuguuaacu

SEQ ID NO: 1372057 - RNA, 19 nt, Artificial Sequence
  Description of Artificial Sequence: Synthetic oligonucleotide
  Antisense strand to SEQ ID NO: 1372056
aguuaacaaacaaaccaua

SEQ ID NO: 1372058 - RNA, 19 nt, Artificial Sequence
  Description of Artificial Sequence: Synthetic oligonucleotide
  Sense strand starting at position 2913 of SEQ ID NO: 1242777
augguuuguuuguuaacua

SEQ ID NO: 1372059 - RNA, 19 nt, Artificial Sequence
  Description of Artificial Sequence: Synthetic oligonucleotide
  Antisense strand to SEQ ID NO: 1372058
uaguuaacaaacaaaccau

SEQ ID NO: 1372060 - RNA, 19 nt, Artificial Sequence
  Description of Artificial Sequence: Synthetic oligonucleotide
  Sense strand starting at position 2920 of SEQ ID NO: 1242777
guuuguuaacuaugauagu

SEQ ID NO: 1372061 - RNA, 19 nt, Artificial Sequence
  Description of Artificial Sequence: Synthetic oligonucleotide
  Antisense strand to SEQ ID NO: 1372060
acuaucauaguuaacaaac

SEQ ID NO: 1372062 - RNA, 19 nt, Artificial Sequence
  Description of Artificial Sequence: Synthetic oligonucleotide
  Sense strand starting at position 2929 of SEQ ID NO: 1242777
cuaugauaguugguaagau

SEQ ID NO: 1372063 - RNA, 19 nt, Artificial Sequence
  Description of Artificial Sequence: Synthetic oligonucleotide
  Antisense strand to SEQ ID NO: 1372062
aucuuaccaacuaucauag

SEQ ID NO: 1372064 - RNA, 19 nt, Artificial Sequence
  Description of Artificial Sequence: Synthetic oligonucleotide
  Sense strand starting at position 3341 of SEQ ID NO: 1242777
ugcggaucacgccugcaau

SEQ ID NO: 1372065 - RNA, 19 nt, Artificial Sequence
  Description of Artificial Sequence: Synthetic oligonucleotide
  Antisense strand to SEQ ID NO: 1372064
auugcaggcgugauccgca

SEQ ID NO: 1372066 - RNA, 19 nt, Artificial Sequence
  Description of Artificial Sequence: Synthetic oligonucleotide
  Sense strand starting at position 3797 of SEQ ID NO: 1242777
uguagaauacaguaguguu

SEQ ID NO: 1372067 - RNA, 19 nt, Artificial Sequence
  Description of Artificial Sequence: Synthetic oligonucleotide
  Antisense strand to SEQ ID NO: 1372066
aacacuacuguauucuaca

SEQ ID NO: 1372068 - RNA, 19 nt, Artificial Sequence
  Description of Artificial Sequence: Synthetic oligonucleotide
  Sense strand starting at position 3877 of SEQ ID NO: 1242777
cuacaucuguuguuuaaca

SEQ ID NO: 1372069 - RNA, 19 nt, Artificial Sequence
  Description of Artificial Sequence: Synthetic oligonucleotide
  Antisense strand to SEQ ID NO: 1372068
uguuaaacaacagauguag

SEQ ID NO: 1372070 - RNA, 19 nt, Artificial Sequence
  Description of Artificial Sequence: Synthetic oligonucleotide
  Sense strand starting at position 3941 of SEQ ID NO: 1242777
cuuuauguuccugaguuug

SEQ ID NO: 1372071 - RNA, 19 nt, Artificial Sequence
  Description of Artificial Sequence: Synthetic oligonucleotide
  Antisense strand to SEQ ID NO: 1372070
caaacucaggaacauaaag

SEQ ID NO: 1372072 - RNA, 19 nt, Artificial Sequence
  Description of Artificial Sequence: Synthetic oligonucleotide
  Sense strand starting at position 3943 of SEQ ID NO: 1242777
uuauguuccugaguuugau

SEQ ID NO: 1372073 - RNA, 19 nt, Artificial Sequence
  Description of Artificial Sequence: Synthetic oligonucleotide
  Antisense strand to SEQ ID NO: 1372072
aucaaacucaggaacauaa

SEQ ID NO: 1372074 - RNA, 19 nt, Artificial Sequence
  Description of Artificial Sequence: Synthetic oligonucleotide
  Sense strand starting at position 3949 of SEQ ID NO: 1242777
uccugaguuugauuacuuu

SEQ ID NO: 1372075 - RNA, 19 nt, Artificial Sequence
  Description of Artificial Sequence: Synthetic oligonucleotide
  Antisense strand to SEQ ID NO: 1372074
aaaguaaucaaacucagga

SEQ ID NO: 1372076 - RNA, 19 nt, Artificial Sequence
  Description of Artificial Sequence: Synthetic oligonucleotide
  Sense strand starting at position 40 of SEQ ID NO: 1242778
ggugaugugcuuuacauug

SEQ ID NO: 1372077 - RNA, 19 nt, Artificial Sequence
  Description of Artificial Sequence: Synthetic oligonucleotide
  Antisense strand to SEQ ID NO: 1372076
caauguaaagcacaucacc

SEQ ID NO: 1372078 - RNA, 19 nt, Artificial Sequence
  Description of Artificial Sequence: Synthetic oligonucleotide
  Sense strand starting at position 92 of SEQ ID NO: 1242778
gaacuuuagugguuggaag

SEQ ID NO: 1372079 - RNA, 19 nt, Artificial Sequence
  Description of Artificial Sequence: Synthetic oligonucleotide
  Antisense strand to SEQ ID NO: 1372078
cuuccaaccacuaaaguuc

SEQ ID NO: 1372080 - RNA, 19 nt, Artificial Sequence
  Description of Artificial Sequence: Synthetic oligonucleotide
  Sense strand starting at position 94 of SEQ ID NO: 1242778
acuuuagugguuggaagau

SEQ ID NO: 1372081 - RNA, 19 nt, Artificial Sequence
  Description of Artificial Sequence: Synthetic oligonucleotide
  Antisense strand to SEQ ID NO: 1372080
aucuuccaaccacuaaagu

SEQ ID NO: 1372082 - RNA, 19 nt, Artificial Sequence
  Description of Artificial Sequence: Synthetic oligonucleotide
  Sense strand starting at position 100 of SEQ ID NO: 1242778
gugguuggaagaugaauua

SEQ ID NO: 1372083 - RNA, 19 nt, Artificial Sequence
  Description of Artificial Sequence: Synthetic oligonucleotide
  Antisense strand to SEQ ID NO: 1372082
uaauucaucuuccaaccac

SEQ ID NO: 1372084 - RNA, 19 nt, Artificial Sequence
  Description of Artificial Sequence: Synthetic oligonucleotide
  Sense strand starting at position 336 of SEQ ID NO: 1242778
auggauacccugugacauu

SEQ ID NO: 1372085 - RNA, 19 nt, Artificial Sequence
  Description of Artificial Sequence: Synthetic oligonucleotide
  Antisense strand to SEQ ID NO: 1372084
aaugucacaggguauccau

SEQ ID NO: 1372086 - RNA, 19 nt, Artificial Sequence
  Description of Artificial Sequence: Synthetic oligonucleotide
  Sense strand starting at position 475 of SEQ ID NO: 1242778
agugauaugccauagcaaa

SEQ ID NO: 1372087 - RNA, 19 nt, Artificial Sequence
  Description of Artificial Sequence: Synthetic oligonucleotide
  Antisense strand to SEQ ID NO: 1372086
uuugcuauggcauaucacu

SEQ ID NO: 1372088 - RNA, 19 nt, Artificial Sequence
  Description of Artificial Sequence: Synthetic oligonucleotide
  Sense strand starting at position 486 of SEQ ID NO: 1242778
auagcaaaugucugauuac

SEQ ID NO: 1372089 - RNA, 19 nt, Artificial Sequence
  Description of Artificial Sequence: Synthetic oligonucleotide
  Antisense strand to SEQ ID NO: 1372088
guaaucagacauuugcuau

SEQ ID NO: 1372090 - RNA, 19 nt, Artificial Sequence
  Description of Artificial Sequence: Synthetic oligonucleotide
  Sense strand starting at position 643 of SEQ ID NO: 1242778
cuuguuugucauuaaucag

SEQ ID NO: 1372091 - RNA, 19 nt, Artificial Sequence
  Description of Artificial Sequence: Synthetic oligonucleotide
  Antisense strand to SEQ ID NO: 1372090
cugauuaaugacaaacaag

SEQ ID NO: 1372092 - RNA, 19 nt, Artificial Sequence
  Description of Artificial Sequence: Synthetic oligonucleotide
  Sense strand starting at position 908 of SEQ ID NO: 1242778
cuuuaagcgaaauguagga

SEQ ID NO: 1372093 - RNA, 19 nt, Artificial Sequence
  Description of Artificial Sequence: Synthetic oligonucleotide
  Antisense strand to SEQ ID NO: 1372092
uccuacauuucgcuuaaag

SEQ ID NO: 1372094 - RNA, 19 nt, Artificial Sequence
  Description of Artificial Sequence: Synthetic oligonucleotide
  Sense strand starting at position 1106 of SEQ ID NO: 1242778
ucagaaaucuaagccaaug

SEQ ID NO: 1372095 - RNA, 19 nt, Artificial Sequence
  Description of Artificial Sequence: Synthetic oligonucleotide
  Antisense strand to SEQ ID NO: 1372094
cauuggcuuagauuucuga

SEQ ID NO: 1372096 - RNA, 19 nt, Artificial Sequence
  Description of Artificial Sequence: Synthetic oligonucleotide
  Sense strand starting at position 1255 of SEQ ID NO: 1242778
uuacuagaacuugggcauu

SEQ ID NO: 1372097 - RNA, 19 nt, Artificial Sequence
  Description of Artificial Sequence: Synthetic oligonucleotide
  Antisense strand to SEQ ID NO: 1372096
aaugcccaaguucuaguaa

SEQ ID NO: 1372098 - RNA, 19 nt, Artificial Sequence
  Description of Artificial Sequence: Synthetic oligonucleotide
  Sense strand starting at position 1267 of SEQ ID NO: 1242778
gggcauucucaaugaauac

SEQ ID NO: 1372099 - RNA, 19 nt, Artificial Sequence
  Description of Artificial Sequence: Synthetic oligonucleotide
  Antisense strand to SEQ ID NO: 1372098
guauucauugagaaugccc

SEQ ID NO: 1372100 - RNA, 19 nt, Artificial Sequence
  Description of Artificial Sequence: Synthetic oligonucleotide
  Sense strand starting at position 1303 of SEQ ID NO: 1242778
agauucugcgaguagacaa

SEQ ID NO: 1372101 - RNA, 19 nt, Artificial Sequence
  Description of Artificial Sequence: Synthetic oligonucleotide
  Antisense strand to SEQ ID NO: 1372100
uugucuacucgcagaaucu

SEQ ID NO: 1372102 - RNA, 19 nt, Artificial Sequence
  Description of Artificial Sequence: Synthetic oligonucleotide
  Sense strand starting at position 2150 of SEQ ID NO: 1242778
aggucuugcauuugcaaga

SEQ ID NO: 1372103 - RNA, 19 nt, Artificial Sequence
  Description of Artificial Sequence: Synthetic oligonucleotide
  Antisense strand to SEQ ID NO: 1372102
ucuugcaaaugcaagaccu

SEQ ID NO: 1372104 - RNA, 19 nt, Artificial Sequence
  Description of Artificial Sequence: Synthetic oligonucleotide
  Sense strand starting at position 2183 of SEQ ID NO: 1242778
ugagccauuccugauuauc

SEQ ID NO: 1372105 - RNA, 19 nt, Artificial Sequence
  Description of Artificial Sequence: Synthetic oligonucleotide
  Antisense strand to SEQ ID NO: 1372104
gauaaucaggaauggcuca

SEQ ID NO: 1372106 - RNA, 19 nt, Artificial Sequence
  Description of Artificial Sequence: Synthetic oligonucleotide
  Sense strand starting at position 2193 of SEQ ID NO: 1242778
cugauuauccgggagugca

SEQ ID NO: 1372107 - RNA, 19 nt, Artificial Sequence
  Description of Artificial Sequence: Synthetic oligonucleotide
  Antisense strand to SEQ ID NO: 1372106
ugcacucccggauaaucag

SEQ ID NO: 1372108 - RNA, 19 nt, Artificial Sequence
  Description of Artificial Sequence: Synthetic oligonucleotide
  Sense strand starting at position 2405 of SEQ ID NO: 1242778
gacauuccugcuuagcaga

SEQ ID NO: 1372109 - RNA, 19 nt, Artificial Sequence
  Description of Artificial Sequence: Synthetic oligonucleotide
  Antisense strand to SEQ ID NO: 1372108
ucugcuaagcaggaauguc

SEQ ID NO: 1372110 - RNA, 19 nt, Artificial Sequence
  Description of Artificial Sequence: Synthetic oligonucleotide
  Sense strand starting at position 2439 of SEQ ID NO: 1242778
gguaguagucugcaagaaa

SEQ ID NO: 1372111 - RNA, 19 nt, Artificial Sequence
  Description of Artificial Sequence: Synthetic oligonucleotide
  Antisense strand to SEQ ID NO: 1372110
uuucuugcagacuacuacc

SEQ ID NO: 1372112 - RNA, 19 nt, Artificial Sequence
  Description of Artificial Sequence: Synthetic oligonucleotide
  Sense strand starting at position 2442 of SEQ ID NO: 1242778
aguagucugcaagaaauua

SEQ ID NO: 1372113 - RNA, 19 nt, Artificial Sequence
  Description of Artificial Sequence: Synthetic oligonucleotide
  Antisense strand to SEQ ID NO: 1372112
uaauuucuugcagacuacu

SEQ ID NO: 1372114 - RNA, 19 nt, Artificial Sequence
  Description of Artificial Sequence: Synthetic oligonucleotide
  Sense strand starting at position 2500 of SEQ ID NO: 1242778
aaugaaaugcuuuggcuag

SEQ ID NO: 1372115 - RNA, 19 nt, Artificial Sequence
  Description of Artificial Sequence: Synthetic oligonucleotide
  Antisense strand to SEQ ID NO: 1372114
cuagccaaagcauuucauu

SEQ ID NO: 1372116 - RNA, 19 nt, Artificial Sequence
  Description of Artificial Sequence: Synthetic oligonucleotide
  Sense strand starting at position 2502 of SEQ ID NO: 1242778
ugaaaugcuuuggcuagau

SEQ ID NO: 1372117 - RNA, 19 nt, Artificial Sequence
  Description of Artificial Sequence: Synthetic oligonucleotide
  Antisense strand to SEQ ID NO: 1372116
aucuagccaaagcauuuca

SEQ ID NO: 1372118 - RNA, 19 nt, Artificial Sequence
  Description of Artificial Sequence: Synthetic oligonucleotide
  Sense strand starting at position 2792 of SEQ ID NO: 1242778
ggauacaacuguuucuuga

SEQ ID NO: 1372119 - RNA, 19 nt, Artificial Sequence
  Description of Artificial Sequence: Synthetic oligonucleotide
  Antisense strand to SEQ ID NO: 1372118
ucaagaaacaguuguaucc

SEQ ID NO: 1372120 - RNA, 19 nt, Artificial Sequence
  Description of Artificial Sequence: Synthetic oligonucleotide
  Sense strand starting at position 2800 of SEQ ID NO: 1242778
cuguuucuugaauggaauu

SEQ ID NO: 1372121 - RNA, 19 nt, Artificial Sequence
  Description of Artificial Sequence: Synthetic oligonucleotide
  Antisense strand to SEQ ID NO: 1372120
aauuccauucaagaaacag

SEQ ID NO: 1372122 - RNA, 19 nt, Artificial Sequence
  Description of Artificial Sequence: Synthetic oligonucleotide
  Sense strand starting at position 2920 of SEQ ID NO: 1242778
uacugauaaugugcuagau

SEQ ID NO: 1372123 - RNA, 19 nt, Artificial Sequence
  Description of Artificial Sequence: Synthetic oligonucleotide
  Antisense strand to SEQ ID NO: 1372122
aucuagcacauuaucagua

SEQ ID NO: 1372124 - RNA, 19 nt, Artificial Sequence
  Description of Artificial Sequence: Synthetic oligonucleotide
  Sense strand starting at position 2947 of SEQ ID NO: 1242778
aauggaaauccuggaguuc

SEQ ID NO: 1372125 - RNA, 19 nt, Artificial Sequence
  Description of Artificial Sequence: Synthetic oligonucleotide
  Antisense strand to SEQ ID NO: 1372124
gaacuccaggauuuccauu

SEQ ID NO: 1372126 - RNA, 19 nt, Artificial Sequence
  Description of Artificial Sequence: Synthetic oligonucleotide
  Sense strand starting at position 2972 of SEQ ID NO: 1242778
gccucuugguaaucacaaa

SEQ ID NO: 1372127 - RNA, 19 nt, Artificial Sequence
  Description of Artificial Sequence: Synthetic oligonucleotide
  Antisense strand to SEQ ID NO: 1372126
uuugugauuaccaagaggc

SEQ ID NO: 1372128 - RNA, 19 nt, Artificial Sequence
  Description of Artificial Sequence: Synthetic oligonucleotide
  Sense strand starting at position 3029 of SEQ ID NO: 1242778
gaauaaugagaguggguuu

SEQ ID NO: 1372129 - RNA, 19 nt, Artificial Sequence
  Description of Artificial Sequence: Synthetic oligonucleotide
  Antisense strand to SEQ ID NO: 1372128
aaacccacucucauuauuc

SEQ ID NO: 1372130 - RNA, 19 nt, Artificial Sequence
  Description of Artificial Sequence: Synthetic oligonucleotide
  Sense strand starting at position 3036 of SEQ ID NO: 1242778
gagaguggguuugucaaag

SEQ ID NO: 1372131 - RNA, 19 nt, Artificial Sequence
  Description of Artificial Sequence: Synthetic oligonucleotide
  Antisense strand to SEQ ID NO: 1372130
cuuugacaaacccacucuc

SEQ ID NO: 1372132 - RNA, 19 nt, Artificial Sequence
  Description of Artificial Sequence: Synthetic oligonucleotide
  Sense strand starting at position 3055 of SEQ ID NO: 1242778
aucagauagguuugucaaa

SEQ ID NO: 1372133 - RNA, 19 nt, Artificial Sequence
  Description of Artificial Sequence: Synthetic oligonucleotide
  Antisense strand to SEQ ID NO: 1372132
uuugacaaaccuaucugau

SEQ ID NO: 1372134 - RNA, 19 nt, Artificial Sequence
  Description of Artificial Sequence: Synthetic oligonucleotide
  Sense strand starting at position 3056 of SEQ ID NO: 1242778
ucagauagguuugucaaag

SEQ ID NO: 1372135 - RNA, 19 nt, Artificial Sequence
  Description of Artificial Sequence: Synthetic oligonucleotide
  Antisense strand to SEQ ID NO: 1372134
cuuugacaaaccuaucuga

SEQ ID NO: 1372136 - RNA, 19 nt, Artificial Sequence
  Description of Artificial Sequence: Synthetic oligonucleotide
  Sense strand starting at position 3057 of SEQ ID NO: 1242778
cagauagguuugucaaaga

SEQ ID NO: 1372137 - RNA, 19 nt, Artificial Sequence
  Description of Artificial Sequence: Synthetic oligonucleotide
  Antisense strand to SEQ ID NO: 1372136
ucuuugacaaaccuaucug

SEQ ID NO: 1372138 - RNA, 19 nt, Artificial Sequence
  Description of Artificial Sequence: Synthetic oligonucleotide
  Sense strand starting at position 3062 of SEQ ID NO: 1242778
agguuugucaaagagugag

SEQ ID NO: 1372139 - RNA, 19 nt, Artificial Sequence
  Description of Artificial Sequence: Synthetic oligonucleotide
  Antisense strand to SEQ ID NO: 1372138
cucacucuuugacaaaccu

SEQ ID NO: 1372140 - RNA, 19 nt, Artificial Sequence
  Description of Artificial Sequence: Synthetic oligonucleotide
  Sense strand starting at position 3065 of SEQ ID NO: 1242778
uuugucaaagagugagaaa

SEQ ID NO: 1372141 - RNA, 19 nt, Artificial Sequence
  Description of Artificial Sequence: Synthetic oligonucleotide
  Antisense strand to SEQ ID NO: 1372140
uuucucacucuuugacaaa

SEQ ID NO: 1372142 - RNA, 19 nt, Artificial Sequence
  Description of Artificial Sequence: Synthetic oligonucleotide
  Sense strand starting at position 3122 of SEQ ID NO: 1242778
agcucaugccugcaaacaa

SEQ ID NO: 1372143 - RNA, 19 nt, Artificial Sequence
  Description of Artificial Sequence: Synthetic oligonucleotide
  Antisense strand to SEQ ID NO: 1372142
uuguuugcaggcaugagcu

SEQ ID NO: 1372144 - RNA, 19 nt, Artificial Sequence
  Description of Artificial Sequence: Synthetic oligonucleotide
  Sense strand starting at position 3202 of SEQ ID NO: 1242778
augauucgaagaggucaua

SEQ ID NO: 1372145 - RNA, 19 nt, Artificial Sequence
  Description of Artificial Sequence: Synthetic oligonucleotide
  Antisense strand to SEQ ID NO: 1372144
uaugaccucuucgaaucau

SEQ ID NO: 1372146 - RNA, 19 nt, Artificial Sequence
  Description of Artificial Sequence: Synthetic oligonucleotide
  Sense strand starting at position 3213 of SEQ ID NO: 1242778
aggucauagaguuaguaau

SEQ ID NO: 1372147 - RNA, 19 nt, Artificial Sequence
  Description of Artificial Sequence: Synthetic oligonucleotide
  Antisense strand to SEQ ID NO: 1372146
auuacuaacucuaugaccu

SEQ ID NO: 1372148 - RNA, 19 nt, Artificial Sequence
  Description of Artificial Sequence: Synthetic oligonucleotide
  Sense strand starting at position 3823 of SEQ ID NO: 1242778
gccauuuguuaucuaauug

SEQ ID NO: 1372149 - RNA, 19 nt, Artificial Sequence
  Description of Artificial Sequence: Synthetic oligonucleotide
  Antisense strand to SEQ ID NO: 1372148
caauuagauaacaaauggc

SEQ ID NO: 1372150 - RNA, 19 nt, Artificial Sequence
  Description of Artificial Sequence: Synthetic oligonucleotide
  Sense strand starting at position 3847 of SEQ ID NO: 1242778
uuauaucaguccuuugaag

SEQ ID NO: 1372151 - RNA, 19 nt, Artificial Sequence
  Description of Artificial Sequence: Synthetic oligonucleotide
  Antisense strand to SEQ ID NO: 1372150
cuucaaaggacugauauaa

SEQ ID NO: 1372152 - RNA, 19 nt, Artificial Sequence
  Description of Artificial Sequence: Synthetic oligonucleotide
  Sense strand starting at position 3849 of SEQ ID NO: 1242778
auaucaguccuuugaagaa

SEQ ID NO: 1372153 - RNA, 19 nt, Artificial Sequence
  Description of Artificial Sequence: Synthetic oligonucleotide
  Antisense strand to SEQ ID NO: 1372152
uucuucaaaggacugauau

SEQ ID NO: 1372154 - RNA, 19 nt, Artificial Sequence
  Description of Artificial Sequence: Synthetic oligonucleotide
  Sense strand starting at position 3867 of SEQ ID NO: 1242778
aaauaucaugucuguggga

SEQ ID NO: 1372155 - RNA, 19 nt, Artificial Sequence
  Description of Artificial Sequence: Synthetic oligonucleotide
  Antisense strand to SEQ ID NO: 1372154
ucccacagacaugauauuu

SEQ ID NO: 1372156 - RNA, 19 nt, Artificial Sequence
  Description of Artificial Sequence: Synthetic oligonucleotide
  Sense strand starting at position 49 of SEQ ID NO: 1242779
agugaaauuuaguaaucga

SEQ ID NO: 1372157 - RNA, 19 nt, Artificial Sequence
  Description of Artificial Sequence: Synthetic oligonucleotide
  Antisense strand to SEQ ID NO: 1372156
ucgauuacuaaauuucacu

SEQ ID NO: 1372158 - RNA, 19 nt, Artificial Sequence
  Description of Artificial Sequence: Synthetic oligonucleotide
  Sense strand starting at position 57 of SEQ ID NO: 1242779
uuaguaaucgaguaaccaa

SEQ ID NO: 1372159 - RNA, 19 nt, Artificial Sequence
  Description of Artificial Sequence: Synthetic oligonucleotide
  Antisense strand to SEQ ID NO: 1372158
uugguuacucgauuacuaa

SEQ ID NO: 1372160 - RNA, 19 nt, Artificial Sequence
  Description of Artificial Sequence: Synthetic oligonucleotide
  Sense strand starting at position 82 of SEQ ID NO: 1242779
cauggacgucuguacaauu

SEQ ID NO: 1372161 - RNA, 19 nt, Artificial Sequence
  Description of Artificial Sequence: Synthetic oligonucleotide
  Antisense strand to SEQ ID NO: 1372160
aauuguacagacguccaug

SEQ ID NO: 1372162 - RNA, 19 nt, Artificial Sequence
  Description of Artificial Sequence: Synthetic oligonucleotide
  Sense strand starting at position 247 of SEQ ID NO: 1242779
cuugauaucaguuggaagu

SEQ ID NO: 1372163 - RNA, 19 nt, Artificial Sequence
  Description of Artificial Sequence: Synthetic oligonucleotide
  Antisense strand to SEQ ID NO: 1372162
acuuccaacugauaucaag

SEQ ID NO: 1372164 - RNA, 19 nt, Artificial Sequence
  Description of Artificial Sequence: Synthetic oligonucleotide
  Sense strand starting at position 248 of SEQ ID NO: 1242779
uugauaucaguuggaagua

SEQ ID NO: 1372165 - RNA, 19 nt, Artificial Sequence
  Description of Artificial Sequence: Synthetic oligonucleotide
  Antisense strand to SEQ ID NO: 1372164
uacuuccaacugauaucaa

SEQ ID NO: 1372166 - RNA, 19 nt, Artificial Sequence
  Description of Artificial Sequence: Synthetic oligonucleotide
  Sense strand starting at position 270 of SEQ ID NO: 1242779
aaacgauagcuuuagucuu

SEQ ID NO: 1372167 - RNA, 19 nt, Artificial Sequence
  Description of Artificial Sequence: Synthetic oligonucleotide
  Antisense strand to SEQ ID NO: 1372166
aagacuaaagcuaucguuu

SEQ ID NO: 1372168 - RNA, 19 nt, Artificial Sequence
  Description of Artificial Sequence: Synthetic oligonucleotide
  Sense strand starting at position 509 of SEQ ID NO: 1242779
agaucucuggcagauugua

SEQ ID NO: 1372169 - RNA, 19 nt, Artificial Sequence
  Description of Artificial Sequence: Synthetic oligonucleotide
  Antisense strand to SEQ ID NO: 1372168
uacaaucugccagagaucu

SEQ ID NO: 1372170 - RNA, 19 nt, Artificial Sequence
  Description of Artificial Sequence: Synthetic oligonucleotide
  Sense strand starting at position 640 of SEQ ID NO: 1242779
ggcuuuaaugcauaauucu

SEQ ID NO: 1372171 - RNA, 19 nt, Artificial Sequence
  Description of Artificial Sequence: Synthetic oligonucleotide
  Antisense strand to SEQ ID NO: 1372170
agaauuaugcauuaaagcc

SEQ ID NO: 1372172 - RNA, 19 nt, Artificial Sequence
  Description of Artificial Sequence: Synthetic oligonucleotide
  Sense strand starting at position 917 of SEQ ID NO: 1242779
augacuaauaggugguaga

SEQ ID NO: 1372173 - RNA, 19 nt, Artificial Sequence
  Description of Artificial Sequence: Synthetic oligonucleotide
  Antisense strand to SEQ ID NO: 1372172
ucuaccaccuauuagucau

SEQ ID NO: 1372174 - RNA, 19 nt, Artificial Sequence
  Description of Artificial Sequence: Synthetic oligonucleotide
  Sense strand starting at position 918 of SEQ ID NO: 1242779
ugacuaauaggugguagaa

SEQ ID NO: 1372175 - RNA, 19 nt, Artificial Sequence
  Description of Artificial Sequence: Synthetic oligonucleotide
  Antisense strand to SEQ ID NO: 1372174
uucuaccaccuauuaguca

SEQ ID NO: 1372176 - RNA, 19 nt, Artificial Sequence
  Description of Artificial Sequence: Synthetic oligonucleotide
  Sense strand starting at position 981 of SEQ ID NO: 1242779
gaaccaguacuuuguugaa

SEQ ID NO: 1372177 - RNA, 19 nt, Artificial Sequence
  Description of Artificial Sequence: Synthetic oligonucleotide
  Antisense strand to SEQ ID NO: 1372176
uucaacaaaguacugguuc

SEQ ID NO: 1372178 - RNA, 19 nt, Artificial Sequence
  Description of Artificial Sequence: Synthetic oligonucleotide
  Sense strand starting at position 983 of SEQ ID NO: 1242779
accaguacuuuguugaaac

SEQ ID NO: 1372179 - RNA, 19 nt, Artificial Sequence
  Description of Artificial Sequence: Synthetic oligonucleotide
  Antisense strand to SEQ ID NO: 1372178
guuucaacaaaguacuggu

SEQ ID NO: 1372180 - RNA, 19 nt, Artificial Sequence
  Description of Artificial Sequence: Synthetic oligonucleotide
  Sense strand starting at position 1087 of SEQ ID NO: 1242779
gucaucuucucaguuauuu

SEQ ID NO: 1372181 - RNA, 19 nt, Artificial Sequence
  Description of Artificial Sequence: Synthetic oligonucleotide
  Antisense strand to SEQ ID NO: 1372180
aaauaacugagaagaugac

SEQ ID NO: 1372182 - RNA, 19 nt, Artificial Sequence
  Description of Artificial Sequence: Synthetic oligonucleotide
  Sense strand starting at position 1095 of SEQ ID NO: 1242779
cucaguuauuuggaagaca

SEQ ID NO: 1372183 - RNA, 19 nt, Artificial Sequence
  Description of Artificial Sequence: Synthetic oligonucleotide
  Antisense strand to SEQ ID NO: 1372182
ugucuuccaaauaacugag

SEQ ID NO: 1372184 - RNA, 19 nt, Artificial Sequence
  Description of Artificial Sequence: Synthetic oligonucleotide
  Sense strand starting at position 1141 of SEQ ID NO: 1242779
ugaaucguaugucccauaa

SEQ ID NO: 1372185 - RNA, 19 nt, Artificial Sequence
  Description of Artificial Sequence: Synthetic oligonucleotide
  Antisense strand to SEQ ID NO: 1372184
uuaugggacauacgauuca

SEQ ID NO: 1372186 - RNA, 19 nt, Artificial Sequence
  Description of Artificial Sequence: Synthetic oligonucleotide
  Sense strand starting at position 1468 of SEQ ID NO: 1242779
auggaauuauguuugcaua

SEQ ID NO: 1372187 - RNA, 19 nt, Artificial Sequence
  Description of Artificial Sequence: Synthetic oligonucleotide
  Antisense strand to SEQ ID NO: 1372186
uaugcaaacauaauuccau

SEQ ID NO: 1372188 - RNA, 19 nt, Artificial Sequence
  Description of Artificial Sequence: Synthetic oligonucleotide
  Sense strand starting at position 1469 of SEQ ID NO: 1242779
uggaauuauguuugcauau

SEQ ID NO: 1372189 - RNA, 19 nt, Artificial Sequence
  Description of Artificial Sequence: Synthetic oligonucleotide
  Antisense strand to SEQ ID NO: 1372188
auaugcaaacauaauucca

SEQ ID NO: 1372190 - RNA, 19 nt, Artificial Sequence
  Description of Artificial Sequence: Synthetic oligonucleotide
  Sense strand starting at position 1470 of SEQ ID NO: 1242779
ggaauuauguuugcauaua

SEQ ID NO: 1372191 - RNA, 19 nt, Artificial Sequence
  Description of Artificial Sequence: Synthetic oligonucleotide
  Antisense strand to SEQ ID NO: 1372190
uauaugcaaacauaauucc

SEQ ID NO: 1372192 - RNA, 19 nt, Artificial Sequence
  Description of Artificial Sequence: Synthetic oligonucleotide
  Sense strand starting at position 1498 of SEQ ID NO: 1242779
auuacuuguuagucaagau

SEQ ID NO: 1372193 - RNA, 19 nt, Artificial Sequence
  Description of Artificial Sequence: Synthetic oligonucleotide
  Antisense strand to SEQ ID NO: 1372192
aucuugacuaacaaguaau

SEQ ID NO: 1372194 - RNA, 19 nt, Artificial Sequence
  Description of Artificial Sequence: Synthetic oligonucleotide
  Sense strand starting at position 1542 of SEQ ID NO: 1242779
auuguacuguaaccauaaa

SEQ ID NO: 1372195 - RNA, 19 nt, Artificial Sequence
  Description of Artificial Sequence: Synthetic oligonucleotide
  Antisense strand to SEQ ID NO: 1372194
uuuaugguuacaguacaau

SEQ ID NO: 1372196 - RNA, 19 nt, Artificial Sequence
  Description of Artificial Sequence: Synthetic oligonucleotide
  Sense strand starting at position 1793 of SEQ ID NO: 1242779
cagacuucugucugaagca

SEQ ID NO: 1372197 - RNA, 19 nt, Artificial Sequence
  Description of Artificial Sequence: Synthetic oligonucleotide
  Antisense strand to SEQ ID NO: 1372196
ugcuucagacagaagucug

SEQ ID NO: 1372198 - RNA, 19 nt, Artificial Sequence
  Description of Artificial Sequence: Synthetic oligonucleotide
  Sense strand starting at position 2201 of SEQ ID NO: 1242779
cccaaauagccaggacuua

SEQ ID NO: 1372199 - RNA, 19 nt, Artificial Sequence
  Description of Artificial Sequence: Synthetic oligonucleotide
  Antisense strand to SEQ ID NO: 1372198
uaaguccuggcuauuuggg

SEQ ID NO: 1372200 - RNA, 19 nt, Artificial Sequence
  Description of Artificial Sequence: Synthetic oligonucleotide
  Sense strand starting at position 2268 of SEQ ID NO: 1242779
agcugaauauguuuaggaa

SEQ ID NO: 1372201 - RNA, 19 nt, Artificial Sequence
  Description of Artificial Sequence: Synthetic oligonucleotide
  Antisense strand to SEQ ID NO: 1372200
uuccuaaacauauucagcu

SEQ ID NO: 1372202 - RNA, 19 nt, Artificial Sequence
  Description of Artificial Sequence: Synthetic oligonucleotide
  Sense strand starting at position 2425 of SEQ ID NO: 1242779
ccuuuacuccaguguaaag

SEQ ID NO: 1372203 - RNA, 19 nt, Artificial Sequence
  Description of Artificial Sequence: Synthetic oligonucleotide
  Antisense strand to SEQ ID NO: 1372202
cuuuacacuggaguaaagg

SEQ ID NO: 1372204 - RNA, 19 nt, Artificial Sequence
  Description of Artificial Sequence: Synthetic oligonucleotide
  Sense strand starting at position 2427 of SEQ ID NO: 1242779
uuuacuccaguguaaaguu

SEQ ID NO: 1372205 - RNA, 19 nt, Artificial Sequence
  Description of Artificial Sequence: Synthetic oligonucleotide
  Antisense strand to SEQ ID NO: 1372204
aacuuuacacuggaguaaa

SEQ ID NO: 1372206 - RNA, 19 nt, Artificial Sequence
  Description of Artificial Sequence: Synthetic oligonucleotide
  Sense strand starting at position 2682 of SEQ ID NO: 1242779
agacacaaguauguuuaaa

SEQ ID NO: 1372207 - RNA, 19 nt, Artificial Sequence
  Description of Artificial Sequence: Synthetic oligonucleotide
  Antisense strand to SEQ ID NO: 1372206
uuuaaacauacuugugucu

SEQ ID NO: 1372208 - RNA, 19 nt, Artificial Sequence
  Description of Artificial Sequence: Synthetic oligonucleotide
  Sense strand starting at position 2821 of SEQ ID NO: 1242779
gccuaagcaagaugucaag

SEQ ID NO: 1372209 - RNA, 19 nt, Artificial Sequence
  Description of Artificial Sequence: Synthetic oligonucleotide
  Antisense strand to SEQ ID NO: 1372208
cuugacaucuugcuuaggc

SEQ ID NO: 1372210 - RNA, 19 nt, Artificial Sequence
  Description of Artificial Sequence: Synthetic oligonucleotide
  Sense strand starting at position 3065 of SEQ ID NO: 1242779
uguagugugcaucuucagu

SEQ ID NO: 1372211 - RNA, 19 nt, Artificial Sequence
  Description of Artificial Sequence: Synthetic oligonucleotide
  Antisense strand to SEQ ID NO: 1372210
acugaagaugcacacuaca

SEQ ID NO: 1372212 - RNA, 19 nt, Artificial Sequence
  Description of Artificial Sequence: Synthetic oligonucleotide
  Sense strand starting at position 3134 of SEQ ID NO: 1242779
ccaugauugugucccacag

SEQ ID NO: 1372213 - RNA, 19 nt, Artificial Sequence
  Description of Artificial Sequence: Synthetic oligonucleotide
  Antisense strand to SEQ ID NO: 1372212
cugugggacacaaucaugg

SEQ ID NO: 1372214 - RNA, 19 nt, Artificial Sequence
  Description of Artificial Sequence: Synthetic oligonucleotide
  Sense strand starting at position 3156 of SEQ ID NO: 1242779
gaaccaugcuagucuggaa

SEQ ID NO: 1372215 - RNA, 19 nt, Artificial Sequence
  Description of Artificial Sequence: Synthetic oligonucleotide
  Antisense strand to SEQ ID NO: 1372214
uuccagacuagcaugguuc

SEQ ID NO: 1372216 - RNA, 19 nt, Artificial Sequence
  Description of Artificial Sequence: Synthetic oligonucleotide
  Sense strand starting at position 3207 of SEQ ID NO: 1242779
uccagugaugagcauuguu

SEQ ID NO: 1372217 - RNA, 19 nt, Artificial Sequence
  Description of Artificial Sequence: Synthetic oligonucleotide
  Antisense strand to SEQ ID NO: 1372216
aacaaugcucaucacugga

SEQ ID NO: 1372218 - RNA, 19 nt, Artificial Sequence
  Description of Artificial Sequence: Synthetic oligonucleotide
  Sense strand starting at position 3241 of SEQ ID NO: 1242779
uuaugcuuuccauacuguu

SEQ ID NO: 1372219 - RNA, 19 nt, Artificial Sequence
  Description of Artificial Sequence: Synthetic oligonucleotide
  Antisense strand to SEQ ID NO: 1372218
aacaguauggaaagcauaa

SEQ ID NO: 1372220 - RNA, 19 nt, Artificial Sequence
  Description of Artificial Sequence: Synthetic oligonucleotide
  Sense strand starting at position 3373 of SEQ ID NO: 1242779
gcugcugcacugucacauu

SEQ ID NO: 1372221 - RNA, 19 nt, Artificial Sequence
  Description of Artificial Sequence: Synthetic oligonucleotide
  Antisense strand to SEQ ID NO: 1372220
aaugugacagugcagcagc

SEQ ID NO: 1372222 - RNA, 19 nt, Artificial Sequence
  Description of Artificial Sequence: Synthetic oligonucleotide
  Sense strand starting at position 3544 of SEQ ID NO: 1242779
auuaaaugccacgagugua

SEQ ID NO: 1372223 - RNA, 19 nt, Artificial Sequence
  Description of Artificial Sequence: Synthetic oligonucleotide
  Antisense strand to SEQ ID NO: 1372222
uacacucguggcauuuaau

SEQ ID NO: 1372224 - RNA, 19 nt, Artificial Sequence
  Description of Artificial Sequence: Synthetic oligonucleotide
  Sense strand starting at position 3593 of SEQ ID NO: 1242779
guauuaauuugacauugac

SEQ ID NO: 1372225 - RNA, 19 nt, Artificial Sequence
  Description of Artificial Sequence: Synthetic oligonucleotide
  Antisense strand to SEQ ID NO: 1372224
gucaaugucaaauuaauac

SEQ ID NO: 1372226 - RNA, 19 nt, Artificial Sequence
  Description of Artificial Sequence: Synthetic oligonucleotide
  Sense strand starting at position 3677 of SEQ ID NO: 1242779
cuaauucugucagucauug

SEQ ID NO: 1372227 - RNA, 19 nt, Artificial Sequence
  Description of Artificial Sequence: Synthetic oligonucleotide
  Antisense strand to SEQ ID NO: 1372226
caaugacugacagaauuag

SEQ ID NO: 1372228 - RNA, 19 nt, Artificial Sequence
  Description of Artificial Sequence: Synthetic oligonucleotide
  Sense strand starting at position 3736 of SEQ ID NO: 1242779
aguaacuaucaguauguuu

SEQ ID NO: 1372229 - RNA, 19 nt, Artificial Sequence
  Description of Artificial Sequence: Synthetic oligonucleotide
  Antisense strand to SEQ ID NO: 1372228
aaacauacugauaguuacu

SEQ ID NO: 1372230 - RNA, 19 nt, Artificial Sequence
  Description of Artificial Sequence: Synthetic oligonucleotide
  Sense strand starting at position 3877 of SEQ ID NO: 1242779
acuguuaauucucugugau

SEQ ID NO: 1372231 - RNA, 19 nt, Artificial Sequence
  Description of Artificial Sequence: Synthetic oligonucleotide
  Antisense strand to SEQ ID NO: 1372230
aucacagagaauuaacagu

SEQ ID NO: 1372232 - RNA, 19 nt, Artificial Sequence
  Description of Artificial Sequence: Synthetic oligonucleotide
  Sense strand starting at position 3922 of SEQ ID NO: 1242779
ggcaaacacuggcuuacau

SEQ ID NO: 1372233 - RNA, 19 nt, Artificial Sequence
  Description of Artificial Sequence: Synthetic oligonucleotide
  Antisense strand to SEQ ID NO: 1372232
auguaagccaguguuugcc

SEQ ID NO: 1372234 - RNA, 19 nt, Artificial Sequence
  Description of Artificial Sequence: Synthetic oligonucleotide
  Sense strand starting at position 3946 of SEQ ID NO: 1242779
aaguuauagccugaguuug

SEQ ID NO: 1372235 - RNA, 19 nt, Artificial Sequence
  Description of Artificial Sequence: Synthetic oligonucleotide
  Antisense strand to SEQ ID NO: 1372234
caaacucaggcuauaacuu

SEQ ID NO: 1372236 - RNA, 19 nt, Artificial Sequence
  Description of Artificial Sequence: Synthetic oligonucleotide
  Sense strand starting at position 114 of SEQ ID NO: 1242780
cgagcuuaggaauguuaag

SEQ ID NO: 1372237 - RNA, 19 nt, Artificial Sequence
  Description of Artificial Sequence: Synthetic oligonucleotide
  Antisense strand to SEQ ID NO: 1372236
cuuaacauuccuaagcucg

SEQ ID NO: 1372238 - RNA, 19 nt, Artificial Sequence
  Description of Artificial Sequence: Synthetic oligonucleotide
  Sense strand starting at position 120 of SEQ ID NO: 1242780
uaggaauguuaagucaaga

SEQ ID NO: 1372239 - RNA, 19 nt, Artificial Sequence
  Description of Artificial Sequence: Synthetic oligonucleotide
  Antisense strand to SEQ ID NO: 1372238
ucuugacuuaacauuccua

SEQ ID NO: 1372240 - RNA, 19 nt, Artificial Sequence
  Description of Artificial Sequence: Synthetic oligonucleotide
  Sense strand starting at position 735 of SEQ ID NO: 1242780
cccgcaagauacuaaauuu

SEQ ID NO: 1372241 - RNA, 19 nt, Artificial Sequence
  Description of Artificial Sequence: Synthetic oligonucleotide
  Antisense strand to SEQ ID NO: 1372240
aaauuuaguaucuugcggg

SEQ ID NO: 1372242 - RNA, 19 nt, Artificial Sequence
  Description of Artificial Sequence: Synthetic oligonucleotide
  Sense strand starting at position 992 of SEQ ID NO: 1242780
acucaaagauaucaacgau

SEQ ID NO: 1372243 - RNA, 19 nt, Artificial Sequence
  Description of Artificial Sequence: Synthetic oligonucleotide
  Antisense strand to SEQ ID NO: 1372242
aucguugauaucuuugagu

SEQ ID NO: 1372244 - RNA, 19 nt, Artificial Sequence
  Description of Artificial Sequence: Synthetic oligonucleotide
  Sense strand starting at position 1041 of SEQ ID NO: 1242780
gugcucaacuuugcuagaa

SEQ ID NO: 1372245 - RNA, 19 nt, Artificial Sequence
  Description of Artificial Sequence: Synthetic oligonucleotide
  Antisense strand to SEQ ID NO: 1372244
uucuagcaaaguugagcac

SEQ ID NO: 1372246 - RNA, 19 nt, Artificial Sequence
  Description of Artificial Sequence: Synthetic oligonucleotide
  Sense strand starting at position 1045 of SEQ ID NO: 1242780
ucaacuuugcuagaaguuu

SEQ ID NO: 1372247 - RNA, 19 nt, Artificial Sequence
  Description of Artificial Sequence: Synthetic oligonucleotide
  Antisense strand to SEQ ID NO: 1372246
aaacuucuagcaaaguuga

SEQ ID NO: 1372248 - RNA, 19 nt, Artificial Sequence
  Description of Artificial Sequence: Synthetic oligonucleotide
  Sense strand starting at position 1054 of SEQ ID NO: 1242780
cuagaaguuuggucuggga

SEQ ID NO: 1372249 - RNA, 19 nt, Artificial Sequence
  Description of Artificial Sequence: Synthetic oligonucleotide
  Antisense strand to SEQ ID NO: 1372248
ucccagaccaaacuucuag

SEQ ID NO: 1372250 - RNA, 19 nt, Artificial Sequence
  Description of Artificial Sequence: Synthetic oligonucleotide
  Sense strand starting at position 1056 of SEQ ID NO: 1242780
agaaguuuggucugggaaa

SEQ ID NO: 1372251 - RNA, 19 nt, Artificial Sequence
  Description of Artificial Sequence: Synthetic oligonucleotide
  Antisense strand to SEQ ID NO: 1372250
uuucccagaccaaacuucu

SEQ ID NO: 1372252 - RNA, 19 nt, Artificial Sequence
  Description of Artificial Sequence: Synthetic oligonucleotide
  Sense strand starting at position 1058 of SEQ ID NO: 1242780
aaguuuggucugggaaaca

SEQ ID NO: 1372253 - RNA, 19 nt, Artificial Sequence
  Description of Artificial Sequence: Synthetic oligonucleotide
  Antisense strand to SEQ ID NO: 1372252
uguuucccagaccaaacuu

SEQ ID NO: 1372254 - RNA, 19 nt, Artificial Sequence
  Description of Artificial Sequence: Synthetic oligonucleotide
  Sense strand starting at position 1279 of SEQ ID NO: 1242780
agauuagagaauugugucu

SEQ ID NO: 1372255 - RNA, 19 nt, Artificial Sequence
  Description of Artificial Sequence: Synthetic oligonucleotide
  Antisense strand to SEQ ID NO: 1372254
agacacaauucucuaaucu

SEQ ID NO: 1372256 - RNA, 19 nt, Artificial Sequence
  Description of Artificial Sequence: Synthetic oligonucleotide
  Sense strand starting at position 1284 of SEQ ID NO: 1242780
agagaauugugucugaguc

SEQ ID NO: 1372257 - RNA, 19 nt, Artificial Sequence
  Description of Artificial Sequence: Synthetic oligonucleotide
  Antisense strand to SEQ ID NO: 1372256
gacucagacacaauucucu

SEQ ID NO: 1372258 - RNA, 19 nt, Artificial Sequence
  Description of Artificial Sequence: Synthetic oligonucleotide
  Sense strand starting at position 1285 of SEQ ID NO: 1242780
gagaauugugucugagucu

SEQ ID NO: 1372259 - RNA, 19 nt, Artificial Sequence
  Description of Artificial Sequence: Synthetic oligonucleotide
  Antisense strand to SEQ ID NO: 1372258
agacucagacacaauucuc

SEQ ID NO: 1372260 - RNA, 19 nt, Artificial Sequence
  Description of Artificial Sequence: Synthetic oligonucleotide
  Sense strand starting at position 1288 of SEQ ID NO: 1242780
aauugugucugagucuuaa

SEQ ID NO: 1372261 - RNA, 19 nt, Artificial Sequence
  Description of Artificial Sequence: Synthetic oligonucleotide
  Antisense strand to SEQ ID NO: 1372260
uuaagacucagacacaauu

SEQ ID NO: 1372262 - RNA, 19 nt, Artificial Sequence
  Description of Artificial Sequence: Synthetic oligonucleotide
  Sense strand starting at position 1324 of SEQ ID NO: 1242780
agaugugcauuugaccaaa

SEQ ID NO: 1372263 - RNA, 19 nt, Artificial Sequence
  Description of Artificial Sequence: Synthetic oligonucleotide
  Antisense strand to SEQ ID NO: 1372262
uuuggucaaaugcacaucu

SEQ ID NO: 1372264 - RNA, 19 nt, Artificial Sequence
  Description of Artificial Sequence: Synthetic oligonucleotide
  Sense strand starting at position 1397 of SEQ ID NO: 1242780
ucaagaaguuaaucugcaa

SEQ ID NO: 1372265 - RNA, 19 nt, Artificial Sequence
  Description of Artificial Sequence: Synthetic oligonucleotide
  Antisense strand to SEQ ID NO: 1372264
uugcagauuaacuucuuga

SEQ ID NO: 1372266 - RNA, 19 nt, Artificial Sequence
  Description of Artificial Sequence: Synthetic oligonucleotide
  Sense strand starting at position 1411 of SEQ ID NO: 1242780
ugcaaaggcuucccucuua

SEQ ID NO: 1372267 - RNA, 19 nt, Artificial Sequence
  Description of Artificial Sequence: Synthetic oligonucleotide
  Antisense strand to SEQ ID NO: 1372266
uaagagggaagccuuugca

SEQ ID NO: 1372268 - RNA, 19 nt, Artificial Sequence
  Description of Artificial Sequence: Synthetic oligonucleotide
  Sense strand starting at position 1531 of SEQ ID NO: 1242780
acuuuacucccguggagaa

SEQ ID NO: 1372269 - RNA, 19 nt, Artificial Sequence
  Description of Artificial Sequence: Synthetic oligonucleotide
  Antisense strand to SEQ ID NO: 1372268
uucuccacgggaguaaagu

SEQ ID NO: 1372270 - RNA, 19 nt, Artificial Sequence
  Description of Artificial Sequence: Synthetic oligonucleotide
  Sense strand starting at position 1532 of SEQ ID NO: 1242780
cuuuacucccguggagaaa

SEQ ID NO: 1372271 - RNA, 19 nt, Artificial Sequence
  Description of Artificial Sequence: Synthetic oligonucleotide
  Antisense strand to SEQ ID NO: 1372270
uuucuccacgggaguaaag

SEQ ID NO: 1372272 - RNA, 19 nt, Artificial Sequence
  Description of Artificial Sequence: Synthetic oligonucleotide
  Sense strand starting at position 1556 of SEQ ID NO: 1242780
gaucauggaucagggaaau

SEQ ID NO: 1372273 - RNA, 19 nt, Artificial Sequence
  Description of Artificial Sequence: Synthetic oligonucleotide
  Antisense strand to SEQ ID NO: 1372272
auuucccugauccaugauc

SEQ ID NO: 1372274 - RNA, 19 nt, Artificial Sequence
  Description of Artificial Sequence: Synthetic oligonucleotide
  Sense strand starting at position 1825 of SEQ ID NO: 1242780
gccgcagagccguucguau

SEQ ID NO: 1372275 - RNA, 19 nt, Artificial Sequence
  Description of Artificial Sequence: Synthetic oligonucleotide
  Antisense strand to SEQ ID NO: 1372274
auacgaacggcucugcggc

SEQ ID NO: 1372276 - RNA, 19 nt, Artificial Sequence
  Description of Artificial Sequence: Synthetic oligonucleotide
  Sense strand starting at position 1878 of SEQ ID NO: 1242780
gaaugagcucagcggagau

SEQ ID NO: 1372277 - RNA, 19 nt, Artificial Sequence
  Description of Artificial Sequence: Synthetic oligonucleotide
  Antisense strand to SEQ ID NO: 1372276
aucuccgcugagcucauuc

SEQ ID NO: 1372278 - RNA, 19 nt, Artificial Sequence
  Description of Artificial Sequence: Synthetic oligonucleotide
  Sense strand starting at position 2137 of SEQ ID NO: 1242780
agcaauaaagcauguuuaa

SEQ ID NO: 1372279 - RNA, 19 nt, Artificial Sequence
  Description of Artificial Sequence: Synthetic oligonucleotide
  Antisense strand to SEQ ID NO: 1372278
uuaaacaugcuuuauugcu

SEQ ID NO: 1372280 - RNA, 19 nt, Artificial Sequence
  Description of Artificial Sequence: Synthetic oligonucleotide
  Sense strand starting at position 2528 of SEQ ID NO: 1242780
aacggcuuccugcaguuau

SEQ ID NO: 1372281 - RNA, 19 nt, Artificial Sequence
  Description of Artificial Sequence: Synthetic oligonucleotide
  Antisense strand to SEQ ID NO: 1372280
auaacugcaggaagccguu

SEQ ID NO: 1372282 - RNA, 19 nt, Artificial Sequence
  Description of Artificial Sequence: Synthetic oligonucleotide
  Sense strand starting at position 2567 of SEQ ID NO: 1242780
gugggaacauauucuaucu

SEQ ID NO: 1372283 - RNA, 19 nt, Artificial Sequence
  Description of Artificial Sequence: Synthetic oligonucleotide
  Antisense strand to SEQ ID NO: 1372282
agauagaauauguucccac

SEQ ID NO: 1372284 - RNA, 19 nt, Artificial Sequence
  Description of Artificial Sequence: Synthetic oligonucleotide
  Sense strand starting at position 2713 of SEQ ID NO: 1242780
aaagauggagcguguuaaa

SEQ ID NO: 1372285 - RNA, 19 nt, Artificial Sequence
  Description of Artificial Sequence: Synthetic oligonucleotide
  Antisense strand to SEQ ID NO: 1372284
uuuaacacgcuccaucuuu

SEQ ID NO: 1372286 - RNA, 19 nt, Artificial Sequence
  Description of Artificial Sequence: Synthetic oligonucleotide
  Sense strand starting at position 2829 of SEQ ID NO: 1242780
ucucguuugcguaauggag

SEQ ID NO: 1372287 - RNA, 19 nt, Artificial Sequence
  Description of Artificial Sequence: Synthetic oligonucleotide
  Antisense strand to SEQ ID NO: 1372286
cuccauuacgcaaacgaga

SEQ ID NO: 1372288 - RNA, 19 nt, Artificial Sequence
  Description of Artificial Sequence: Synthetic oligonucleotide
  Sense strand starting at position 2835 of SEQ ID NO: 1242780
uugcguaauggaggacaga

SEQ ID NO: 1372289 - RNA, 19 nt, Artificial Sequence
  Description of Artificial Sequence: Synthetic oligonucleotide
  Antisense strand to SEQ ID NO: 1372288
ucuguccuccauuacgcaa

SEQ ID NO: 1372290 - RNA, 19 nt, Artificial Sequence
  Description of Artificial Sequence: Synthetic oligonucleotide
  Sense strand starting at position 2851 of SEQ ID NO: 1242780
agaguuuaaaugcgaugau

SEQ ID NO: 1372291 - RNA, 19 nt, Artificial Sequence
  Description of Artificial Sequence: Synthetic oligonucleotide
  Antisense strand to SEQ ID NO: 1372290
aucaucgcauuuaaacucu

SEQ ID NO: 1372292 - RNA, 19 nt, Artificial Sequence
  Description of Artificial Sequence: Synthetic oligonucleotide
  Sense strand starting at position 2854 of SEQ ID NO: 1242780
guuuaaaugcgaugauguu

SEQ ID NO: 1372293 - RNA, 19 nt, Artificial Sequence
  Description of Artificial Sequence: Synthetic oligonucleotide
  Antisense strand to SEQ ID NO: 1372292
aacaucaucgcauuuaaac

SEQ ID NO: 1372294 - RNA, 19 nt, Artificial Sequence
  Description of Artificial Sequence: Synthetic oligonucleotide
  Sense strand starting at position 2855 of SEQ ID NO: 1242780
uuuaaaugcgaugauguuu

SEQ ID NO: 1372295 - RNA, 19 nt, Artificial Sequence
  Description of Artificial Sequence: Synthetic oligonucleotide
  Antisense strand to SEQ ID NO: 1372294
aaacaucaucgcauuuaaa

SEQ ID NO: 1372296 - RNA, 19 nt, Artificial Sequence
  Description of Artificial Sequence: Synthetic oligonucleotide
  Sense strand starting at position 2863 of SEQ ID NO: 1242780
cgaugauguuuccuuggag

SEQ ID NO: 1372297 - RNA, 19 nt, Artificial Sequence
  Description of Artificial Sequence: Synthetic oligonucleotide
  Antisense strand to SEQ ID NO: 1372296
cuccaaggaaacaucaucg

SEQ ID NO: 1372298 - RNA, 19 nt, Artificial Sequence
  Description of Artificial Sequence: Synthetic oligonucleotide
  Sense strand starting at position 2887 of SEQ ID NO: 1242780
agaagaugcagugagcaau

SEQ ID NO: 1372299 - RNA, 19 nt, Artificial Sequence
  Description of Artificial Sequence: Synthetic oligonucleotide
  Antisense strand to SEQ ID NO: 1372298
auugcucacugcaucuucu

SEQ ID NO: 1372300 - RNA, 19 nt, Artificial Sequence
  Description of Artificial Sequence: Synthetic oligonucleotide
  Sense strand starting at position 3766 of SEQ ID NO: 1242780
gcgccuggccucguauaua

SEQ ID NO: 1372301 - RNA, 19 nt, Artificial Sequence
  Description of Artificial Sequence: Synthetic oligonucleotide
  Antisense strand to SEQ ID NO: 1372300
uauauacgaggccaggcgc

SEQ ID NO: 1372302 - RNA, 19 nt, Artificial Sequence
  Description of Artificial Sequence: Synthetic oligonucleotide
  Sense strand starting at position 3788 of SEQ ID NO: 1242780
uuucuaguacuggacugau

SEQ ID NO: 1372303 - RNA, 19 nt, Artificial Sequence
  Description of Artificial Sequence: Synthetic oligonucleotide
  Antisense strand to SEQ ID NO: 1372302
aucaguccaguacuagaaa

SEQ ID NO: 1372304 - RNA, 19 nt, Artificial Sequence
  Description of Artificial Sequence: Synthetic oligonucleotide
  Sense strand starting at position 3797 of SEQ ID NO: 1242780
cuggacugauccuccgaaa

SEQ ID NO: 1372305 - RNA, 19 nt, Artificial Sequence
  Description of Artificial Sequence: Synthetic oligonucleotide
  Antisense strand to SEQ ID NO: 1372304
uuucggaggaucaguccag

SEQ ID NO: 1372306 - RNA, 19 nt, Artificial Sequence
  Description of Artificial Sequence: Synthetic oligonucleotide
  Sense strand starting at position 3841 of SEQ ID NO: 1242780
uaaggugucgcuggagaac

SEQ ID NO: 1372307 - RNA, 19 nt, Artificial Sequence
  Description of Artificial Sequence: Synthetic oligonucleotide
  Antisense strand to SEQ ID NO: 1372306
guucuccagcgacaccuua

SEQ ID NO: 1372308 - RNA, 19 nt, Artificial Sequence
  Description of Artificial Sequence: Synthetic oligonucleotide
  Sense strand starting at position 3890 of SEQ ID NO: 1242780
auuccaaagguuuguaaug

SEQ ID NO: 1372309 - RNA, 19 nt, Artificial Sequence
  Description of Artificial Sequence: Synthetic oligonucleotide
  Antisense strand to SEQ ID NO: 1372308
cauuacaaaccuuuggaau

SEQ ID NO: 1372310 - RNA, 19 nt, Artificial Sequence
  Description of Artificial Sequence: Synthetic oligonucleotide
  Sense strand starting at position 3897 of SEQ ID NO: 1242780
agguuuguaauggauugua

SEQ ID NO: 1372311 - RNA, 19 nt, Artificial Sequence
  Description of Artificial Sequence: Synthetic oligonucleotide
  Antisense strand to SEQ ID NO: 1372310
uacaauccauuacaaaccu

SEQ ID NO: 1372312 - RNA, 19 nt, Artificial Sequence
  Description of Artificial Sequence: Synthetic oligonucleotide
  Sense strand starting at position 3900 of SEQ ID NO: 1242780
uuuguaauggauuguauca

SEQ ID NO: 1372313 - RNA, 19 nt, Artificial Sequence
  Description of Artificial Sequence: Synthetic oligonucleotide
  Antisense strand to SEQ ID NO: 1372312
ugauacaauccauuacaaa

SEQ ID NO: 1372314 - RNA, 19 nt, Artificial Sequence
  Description of Artificial Sequence: Synthetic oligonucleotide
  Sense strand starting at position 3907 of SEQ ID NO: 1242780
uggauuguaucaguuauaa

SEQ ID NO: 1372315 - RNA, 19 nt, Artificial Sequence
  Description of Artificial Sequence: Synthetic oligonucleotide
  Antisense strand to SEQ ID NO: 1372314
uuauaacugauacaaucca

SEQ ID NO: 1372316 - RNA, 19 nt, Artificial Sequence
  Description of Artificial Sequence: Synthetic oligonucleotide
  Sense strand starting at position 30 of SEQ ID NO: 1242781
ggaacaucucuuggacuau

SEQ ID NO: 1372317 - RNA, 19 nt, Artificial Sequence
  Description of Artificial Sequence: Synthetic oligonucleotide
  Antisense strand to SEQ ID NO: 1372316
auaguccaagagauguucc

SEQ ID NO: 1372318 - RNA, 19 nt, Artificial Sequence
  Description of Artificial Sequence: Synthetic oligonucleotide
  Sense strand starting at position 98 of SEQ ID NO: 1242781
gagagacuugugugcagua

SEQ ID NO: 1372319 - RNA, 19 nt, Artificial Sequence
  Description of Artificial Sequence: Synthetic oligonucleotide
  Antisense strand to SEQ ID NO: 1372318
uacugcacacaagucucuc

SEQ ID NO: 1372320 - RNA, 19 nt, Artificial Sequence
  Description of Artificial Sequence: Synthetic oligonucleotide
  Sense strand starting at position 111 of SEQ ID NO: 1242781
gcaguacguacugaaucaa

SEQ ID NO: 1372321 - RNA, 19 nt, Artificial Sequence
  Description of Artificial Sequence: Synthetic oligonucleotide
  Antisense strand to SEQ ID NO: 1372320
uugauucaguacguacugc

SEQ ID NO: 1372322 - RNA, 19 nt, Artificial Sequence
  Description of Artificial Sequence: Synthetic oligonucleotide
  Sense strand starting at position 138 of SEQ ID NO: 1242781
gaaucaacacacggugaau

SEQ ID NO: 1372323 - RNA, 19 nt, Artificial Sequence
  Description of Artificial Sequence: Synthetic oligonucleotide
  Antisense strand to SEQ ID NO: 1372322
auucaccguguguugauuc

SEQ ID NO: 1372324 - RNA, 19 nt, Artificial Sequence
  Description of Artificial Sequence: Synthetic oligonucleotide
  Sense strand starting at position 262 of SEQ ID NO: 1242781
ccaguaauccuagggcuuu

SEQ ID NO: 1372325 - RNA, 19 nt, Artificial Sequence
  Description of Artificial Sequence: Synthetic oligonucleotide
  Antisense strand to SEQ ID NO: 1372324
aaagcccuaggauuacugg

SEQ ID NO: 1372326 - RNA, 19 nt, Artificial Sequence
  Description of Artificial Sequence: Synthetic oligonucleotide
  Sense strand starting at position 311 of SEQ ID NO: 1242781
ucagaaauuugagaucaac

SEQ ID NO: 1372327 - RNA, 19 nt, Artificial Sequence
  Description of Artificial Sequence: Synthetic oligonucleotide
  Antisense strand to SEQ ID NO: 1372326
guugaucucaaauuucuga

SEQ ID NO: 1372328 - RNA, 19 nt, Artificial Sequence
  Description of Artificial Sequence: Synthetic oligonucleotide
  Sense strand starting at position 554 of SEQ ID NO: 1242781
agguuuaagucuccacuga

SEQ ID NO: 1372329 - RNA, 19 nt, Artificial Sequence
  Description of Artificial Sequence: Synthetic oligonucleotide
  Antisense strand to SEQ ID NO: 1372328
ucaguggagacuuaaaccu

SEQ ID NO: 1372330 - RNA, 19 nt, Artificial Sequence
  Description of Artificial Sequence: Synthetic oligonucleotide
  Sense strand starting at position 555 of SEQ ID NO: 1242781
gguuuaagucuccacugag

SEQ ID NO: 1372331 - RNA, 19 nt, Artificial Sequence
  Description of Artificial Sequence: Synthetic oligonucleotide
  Antisense strand to SEQ ID NO: 1372330
cucaguggagacuuaaacc

SEQ ID NO: 1372332 - RNA, 19 nt, Artificial Sequence
  Description of Artificial Sequence: Synthetic oligonucleotide
  Sense strand starting at position 578 of SEQ ID NO: 1242781
gccuaucuuccucagcuga

SEQ ID NO: 1372333 - RNA, 19 nt, Artificial Sequence
  Description of Artificial Sequence: Synthetic oligonucleotide
  Antisense strand to SEQ ID NO: 1372332
ucagcugaggaagauaggc

SEQ ID NO: 1372334 - RNA, 19 nt, Artificial Sequence
  Description of Artificial Sequence: Synthetic oligonucleotide
  Sense strand starting at position 625 of SEQ ID NO: 1242781
agaucugugucauucucuu

SEQ ID NO: 1372335 - RNA, 19 nt, Artificial Sequence
  Description of Artificial Sequence: Synthetic oligonucleotide
  Antisense strand to SEQ ID NO: 1372334
aagagaaugacacagaucu

SEQ ID NO: 1372336 - RNA, 19 nt, Artificial Sequence
  Description of Artificial Sequence: Synthetic oligonucleotide
  Sense strand starting at position 676 of SEQ ID NO: 1242781
uauggaucuguuggcuauu

SEQ ID NO: 1372337 - RNA, 19 nt, Artificial Sequence
  Description of Artificial Sequence: Synthetic oligonucleotide
  Antisense strand to SEQ ID NO: 1372336
aauagccaacagauccaua

SEQ ID NO: 1372338 - RNA, 19 nt, Artificial Sequence
  Description of Artificial Sequence: Synthetic oligonucleotide
  Sense strand starting at position 679 of SEQ ID NO: 1242781
ggaucuguuggcuauucuu

SEQ ID NO: 1372339 - RNA, 19 nt, Artificial Sequence
  Description of Artificial Sequence: Synthetic oligonucleotide
  Antisense strand to SEQ ID NO: 1372338
aagaauagccaacagaucc

SEQ ID NO: 1372340 - RNA, 19 nt, Artificial Sequence
  Description of Artificial Sequence: Synthetic oligonucleotide
  Sense strand starting at position 735 of SEQ ID NO: 1242781
guuuauuguuugguacaaa

SEQ ID NO: 1372341 - RNA, 19 nt, Artificial Sequence
  Description of Artificial Sequence: Synthetic oligonucleotide
  Antisense strand to SEQ ID NO: 1372340
uuuguaccaaacaauaaac

SEQ ID NO: 1372342 - RNA, 19 nt, Artificial Sequence
  Description of Artificial Sequence: Synthetic oligonucleotide
  Sense strand starting at position 786 of SEQ ID NO: 1242781
acagacucgugcuccuaga

SEQ ID NO: 1372343 - RNA, 19 nt, Artificial Sequence
  Description of Artificial Sequence: Synthetic oligonucleotide
  Antisense strand to SEQ ID NO: 1372342
ucuaggagcacgagucugu

SEQ ID NO: 1372344 - RNA, 19 nt, Artificial Sequence
  Description of Artificial Sequence: Synthetic oligonucleotide
  Sense strand starting at position 840 of SEQ ID NO: 1242781
ggcucuugacucugagauu

SEQ ID NO: 1372345 - RNA, 19 nt, Artificial Sequence
  Description of Artificial Sequence: Synthetic oligonucleotide
  Antisense strand to SEQ ID NO: 1372344
aaucucagagucaagagcc

SEQ ID NO: 1372346 - RNA, 19 nt, Artificial Sequence
  Description of Artificial Sequence: Synthetic oligonucleotide
  Sense strand starting at position 960 of SEQ ID NO: 1242781
agauccaucuugucuucca

SEQ ID NO: 1372347 - RNA, 19 nt, Artificial Sequence
  Description of Artificial Sequence: Synthetic oligonucleotide
  Antisense strand to SEQ ID NO: 1372346
uggaagacaagauggaucu

SEQ ID NO: 1372348 - RNA, 19 nt, Artificial Sequence
  Description of Artificial Sequence: Synthetic oligonucleotide
  Sense strand starting at position 978 of SEQ ID NO: 1242781
agugccuauggauaauaau

SEQ ID NO: 1372349 - RNA, 19 nt, Artificial Sequence
  Description of Artificial Sequence: Synthetic oligonucleotide
  Antisense strand to SEQ ID NO: 1372348
auuauuauccauaggcacu

SEQ ID NO: 1372350 - RNA, 19 nt, Artificial Sequence
  Description of Artificial Sequence: Synthetic oligonucleotide
  Sense strand starting at position 1148 of SEQ ID NO: 1242781
acccauuaugcccaggaau

SEQ ID NO: 1372351 - RNA, 19 nt, Artificial Sequence
  Description of Artificial Sequence: Synthetic oligonucleotide
  Antisense strand to SEQ ID NO: 1372350
auuccugggcauaaugggu

SEQ ID NO: 1372352 - RNA, 19 nt, Artificial Sequence
  Description of Artificial Sequence: Synthetic oligonucleotide
  Sense strand starting at position 1737 of SEQ ID NO: 1242781
cccugaaggccgcauugau

SEQ ID NO: 1372353 - RNA, 19 nt, Artificial Sequence
  Description of Artificial Sequence: Synthetic oligonucleotide
  Antisense strand to SEQ ID NO: 1372352
aucaaugcggccuucaggg

SEQ ID NO: 1372354 - RNA, 19 nt, Artificial Sequence
  Description of Artificial Sequence: Synthetic oligonucleotide
  Sense strand starting at position 1791 of SEQ ID NO: 1242781
uggagaaguccauggcgga

SEQ ID NO: 1372355 - RNA, 19 nt, Artificial Sequence
  Description of Artificial Sequence: Synthetic oligonucleotide
  Antisense strand to SEQ ID NO: 1372354
uccgccauggacuucucca

SEQ ID NO: 1372356 - RNA, 19 nt, Artificial Sequence
  Description of Artificial Sequence: Synthetic oligonucleotide
  Sense strand starting at position 1792 of SEQ ID NO: 1242781
ggagaaguccauggcggaa

SEQ ID NO: 1372357 - RNA, 19 nt, Artificial Sequence
  Description of Artificial Sequence: Synthetic oligonucleotide
  Antisense strand to SEQ ID NO: 1372356
uuccgccauggacuucucc

SEQ ID NO: 1372358 - RNA, 19 nt, Artificial Sequence
  Description of Artificial Sequence: Synthetic oligonucleotide
  Sense strand starting at position 1825 of SEQ ID NO: 1242781
gcguccagaacuuaagagu

SEQ ID NO: 1372359 - RNA, 19 nt, Artificial Sequence
  Description of Artificial Sequence: Synthetic oligonucleotide
  Antisense strand to SEQ ID NO: 1372358
acucuuaaguucuggacgc

SEQ ID NO: 1372360 - RNA, 19 nt, Artificial Sequence
  Description of Artificial Sequence: Synthetic oligonucleotide
  Sense strand starting at position 2023 of SEQ ID NO: 1242781
agucguuggccguuaccau

SEQ ID NO: 1372361 - RNA, 19 nt, Artificial Sequence
  Description of Artificial Sequence: Synthetic oligonucleotide
  Antisense strand to SEQ ID NO: 1372360
augguaacggccaacgacu

SEQ ID NO: 1372362 - RNA, 19 nt, Artificial Sequence
  Description of Artificial Sequence: Synthetic oligonucleotide
  Sense strand starting at position 2318 of SEQ ID NO: 1242781
gugcaauugaacgaucucu

SEQ ID NO: 1372363 - RNA, 19 nt, Artificial Sequence
  Description of Artificial Sequence: Synthetic oligonucleotide
  Antisense strand to SEQ ID NO: 1372362
agagaucguucaauugcac

SEQ ID NO: 1372364 - RNA, 19 nt, Artificial Sequence
  Description of Artificial Sequence: Synthetic oligonucleotide
  Sense strand starting at position 2348 of SEQ ID NO: 1242781
ccucaaauuccugggcaau

SEQ ID NO: 1372365 - RNA, 19 nt, Artificial Sequence
  Description of Artificial Sequence: Synthetic oligonucleotide
  Antisense strand to SEQ ID NO: 1372364
auugcccaggaauuugagg

SEQ ID NO: 1372366 - RNA, 19 nt, Artificial Sequence
  Description of Artificial Sequence: Synthetic oligonucleotide
  Sense strand starting at position 2349 of SEQ ID NO: 1242781
cucaaauuccugggcaauu

SEQ ID NO: 1372367 - RNA, 19 nt, Artificial Sequence
  Description of Artificial Sequence: Synthetic oligonucleotide
  Antisense strand to SEQ ID NO: 1372366
aauugcccaggaauuugag

SEQ ID NO: 1372368 - RNA, 19 nt, Artificial Sequence
  Description of Artificial Sequence: Synthetic oligonucleotide
  Sense strand starting at position 2360 of SEQ ID NO: 1242781
gggcaauugaacgaucuca

SEQ ID NO: 1372369 - RNA, 19 nt, Artificial Sequence
  Description of Artificial Sequence: Synthetic oligonucleotide
  Antisense strand to SEQ ID NO: 1372368
ugagaucguucaauugccc

SEQ ID NO: 1372370 - RNA, 19 nt, Artificial Sequence
  Description of Artificial Sequence: Synthetic oligonucleotide
  Sense strand starting at position 2842 of SEQ ID NO: 1242781
uuuguuaaguuccuuauca

SEQ ID NO: 1372371 - RNA, 19 nt, Artificial Sequence
  Description of Artificial Sequence: Synthetic oligonucleotide
  Antisense strand to SEQ ID NO: 1372370
ugauaaggaacuuaacaaa

SEQ ID NO: 1372372 - RNA, 19 nt, Artificial Sequence
  Description of Artificial Sequence: Synthetic oligonucleotide
  Sense strand starting at position 2843 of SEQ ID NO: 1242781
uuguuaaguuccuuaucac

SEQ ID NO: 1372373 - RNA, 19 nt, Artificial Sequence
  Description of Artificial Sequence: Synthetic oligonucleotide
  Antisense strand to SEQ ID NO: 1372372
gugauaaggaacuuaacaa

SEQ ID NO: 1372374 - RNA, 19 nt, Artificial Sequence
  Description of Artificial Sequence: Synthetic oligonucleotide
  Sense strand starting at position 2882 of SEQ ID NO: 1242781
uuugguguugcggcugaga

SEQ ID NO: 1372375 - RNA, 19 nt, Artificial Sequence
  Description of Artificial Sequence: Synthetic oligonucleotide
  Antisense strand to SEQ ID NO: 1372374
ucucagccgcaacaccaaa

SEQ ID NO: 1372376 - RNA, 19 nt, Artificial Sequence
  Description of Artificial Sequence: Synthetic oligonucleotide
  Sense strand starting at position 2893 of SEQ ID NO: 1242781
ggcugagaaaucugugcau

SEQ ID NO: 1372377 - RNA, 19 nt, Artificial Sequence
  Description of Artificial Sequence: Synthetic oligonucleotide
  Antisense strand to SEQ ID NO: 1372376
augcacagauuucucagcc

SEQ ID NO: 1372378 - RNA, 19 nt, Artificial Sequence
  Description of Artificial Sequence: Synthetic oligonucleotide
  Sense strand starting at position 2896 of SEQ ID NO: 1242781
ugagaaaucugugcauaac

SEQ ID NO: 1372379 - RNA, 19 nt, Artificial Sequence
  Description of Artificial Sequence: Synthetic oligonucleotide
  Antisense strand to SEQ ID NO: 1372378
guuaugcacagauuucuca

SEQ ID NO: 1372380 - RNA, 19 nt, Artificial Sequence
  Description of Artificial Sequence: Synthetic oligonucleotide
  Sense strand starting at position 2897 of SEQ ID NO: 1242781
gagaaaucugugcauaacc

SEQ ID NO: 1372381 - RNA, 19 nt, Artificial Sequence
  Description of Artificial Sequence: Synthetic oligonucleotide
  Antisense strand to SEQ ID NO: 1372380
gguuaugcacagauuucuc

SEQ ID NO: 1372382 - RNA, 19 nt, Artificial Sequence
  Description of Artificial Sequence: Synthetic oligonucleotide
  Sense strand starting at position 3159 of SEQ ID NO: 1242781
aagguaugaggguauucuu

SEQ ID NO: 1372383 - RNA, 19 nt, Artificial Sequence
  Description of Artificial Sequence: Synthetic oligonucleotide
  Antisense strand to SEQ ID NO: 1372382
aagaauacccucauaccuu

SEQ ID NO: 1372384 - RNA, 19 nt, Artificial Sequence
  Description of Artificial Sequence: Synthetic oligonucleotide
  Sense strand starting at position 3162 of SEQ ID NO: 1242781
guaugaggguauucuuuag

SEQ ID NO: 1372385 - RNA, 19 nt, Artificial Sequence
  Description of Artificial Sequence: Synthetic oligonucleotide
  Antisense strand to SEQ ID NO: 1372384
cuaaagaauacccucauac

SEQ ID NO: 1372386 - RNA, 19 nt, Artificial Sequence
  Description of Artificial Sequence: Synthetic oligonucleotide
  Sense strand starting at position 3855 of SEQ ID NO: 1242781
agggauuauguugaacugu

SEQ ID NO: 1372387 - RNA, 19 nt, Artificial Sequence
  Description of Artificial Sequence: Synthetic oligonucleotide
  Antisense strand to SEQ ID NO: 1372386
acaguucaacauaaucccu

SEQ ID NO: 1372388 - RNA, 19 nt, Artificial Sequence
  Description of Artificial Sequence: Synthetic oligonucleotide
  Sense strand starting at position 3863 of SEQ ID NO: 1242781
uguugaacuguugaauugu

SEQ ID NO: 1372389 - RNA, 19 nt, Artificial Sequence
  Description of Artificial Sequence: Synthetic oligonucleotide
  Antisense strand to SEQ ID NO: 1372388
acaauucaacaguucaaca

SEQ ID NO: 1372390 - RNA, 19 nt, Artificial Sequence
  Description of Artificial Sequence: Synthetic oligonucleotide
  Sense strand starting at position 3869 of SEQ ID NO: 1242781
acuguugaauuguuggauu

SEQ ID NO: 1372391 - RNA, 19 nt, Artificial Sequence
  Description of Artificial Sequence: Synthetic oligonucleotide
  Antisense strand to SEQ ID NO: 1372390
aauccaacaauucaacagu

SEQ ID NO: 1372392 - RNA, 19 nt, Artificial Sequence
  Description of Artificial Sequence: Synthetic oligonucleotide
  Sense strand starting at position 3871 of SEQ ID NO: 1242781
uguugaauuguuggauuaa

SEQ ID NO: 1372393 - RNA, 19 nt, Artificial Sequence
  Description of Artificial Sequence: Synthetic oligonucleotide
  Antisense strand to SEQ ID NO: 1372392
uuaauccaacaauucaaca

SEQ ID NO: 1372394 - RNA, 19 nt, Artificial Sequence
  Description of Artificial Sequence: Synthetic oligonucleotide
  Sense strand starting at position 3892 of SEQ ID NO: 1242781
uuaggagaauugccaucau

SEQ ID NO: 1372395 - RNA, 19 nt, Artificial Sequence
  Description of Artificial Sequence: Synthetic oligonucleotide
  Antisense strand to SEQ ID NO: 1372394
augauggcaauucuccuaa

SEQ ID NO: 1372396 - RNA, 19 nt, Artificial Sequence
  Description of Artificial Sequence: Synthetic oligonucleotide
  Sense strand starting at position 835 of SEQ ID NO: 1242782
cgguccacgcuuucguaua

SEQ ID NO: 1372397 - RNA, 19 nt, Artificial Sequence
  Description of Artificial Sequence: Synthetic oligonucleotide
  Antisense strand to SEQ ID NO: 1372396
uauacgaaagcguggaccg

SEQ ID NO: 1372398 - RNA, 19 nt, Artificial Sequence
  Description of Artificial Sequence: Synthetic oligonucleotide
  Sense strand starting at position 837 of SEQ ID NO: 1242782
guccacgcuuucguauaaa

SEQ ID NO: 1372399 - RNA, 19 nt, Artificial Sequence
  Description of Artificial Sequence: Synthetic oligonucleotide
  Antisense strand to SEQ ID NO: 1372398
uuuauacgaaagcguggac

SEQ ID NO: 1372400 - RNA, 19 nt, Artificial Sequence
  Description of Artificial Sequence: Synthetic oligonucleotide
  Sense strand starting at position 860 of SEQ ID NO: 1242782
guauauaaaugugcacaua

SEQ ID NO: 1372401 - RNA, 19 nt, Artificial Sequence
  Description of Artificial Sequence: Synthetic oligonucleotide
  Antisense strand to SEQ ID NO: 1372400
uaugugcacauuuauauac

SEQ ID NO: 1372402 - RNA, 19 nt, Artificial Sequence
  Description of Artificial Sequence: Synthetic oligonucleotide
  Sense strand starting at position 896 of SEQ ID NO: 1242782
uaauguuaacugugucaga

SEQ ID NO: 1372403 - RNA, 19 nt, Artificial Sequence
  Description of Artificial Sequence: Synthetic oligonucleotide
  Antisense strand to SEQ ID NO: 1372402
ucugacacaguuaacauua

SEQ ID NO: 1372404 - RNA, 19 nt, Artificial Sequence
  Description of Artificial Sequence: Synthetic oligonucleotide
  Sense strand starting at position 897 of SEQ ID NO: 1242782
aauguuaacugugucagac

SEQ ID NO: 1372405 - RNA, 19 nt, Artificial Sequence
  Description of Artificial Sequence: Synthetic oligonucleotide
  Antisense strand to SEQ ID NO: 1372404
gucugacacaguuaacauu

SEQ ID NO: 1372406 - RNA, 19 nt, Artificial Sequence
  Description of Artificial Sequence: Synthetic oligonucleotide
  Sense strand starting at position 905 of SEQ ID NO: 1242782
cugugucagacccgauaau

SEQ ID NO: 1372407 - RNA, 19 nt, Artificial Sequence
  Description of Artificial Sequence: Synthetic oligonucleotide
  Antisense strand to SEQ ID NO: 1372406
auuaucgggucugacacag

SEQ ID NO: 1372408 - RNA, 19 nt, Artificial Sequence
  Description of Artificial Sequence: Synthetic oligonucleotide
  Sense strand starting at position 906 of SEQ ID NO: 1242782
ugugucagacccgauaaua

SEQ ID NO: 1372409 - RNA, 19 nt, Artificial Sequence
  Description of Artificial Sequence: Synthetic oligonucleotide
  Antisense strand to SEQ ID NO: 1372408
uauuaucgggucugacaca

SEQ ID NO: 1372410 - RNA, 19 nt, Artificial Sequence
  Description of Artificial Sequence: Synthetic oligonucleotide
  Sense strand starting at position 925 of SEQ ID NO: 1242782
agagcuuugcaugaauccu

SEQ ID NO: 1372411 - RNA, 19 nt, Artificial Sequence
  Description of Artificial Sequence: Synthetic oligonucleotide
  Antisense strand to SEQ ID NO: 1372410
aggauucaugcaaagcucu

SEQ ID NO: 1372412 - RNA, 19 nt, Artificial Sequence
  Description of Artificial Sequence: Synthetic oligonucleotide
  Sense strand starting at position 1026 of SEQ ID NO: 1242782
guccuuggacgucacuaau

SEQ ID NO: 1372413 - RNA, 19 nt, Artificial Sequence
  Description of Artificial Sequence: Synthetic oligonucleotide
  Antisense strand to SEQ ID NO: 1372412
auuagugacguccaaggac

SEQ ID NO: 1372414 - RNA, 19 nt, Artificial Sequence
  Description of Artificial Sequence: Synthetic oligonucleotide
  Sense strand starting at position 1048 of SEQ ID NO: 1242782
ugucuugacuugcucauau

SEQ ID NO: 1372415 - RNA, 19 nt, Artificial Sequence
  Description of Artificial Sequence: Synthetic oligonucleotide
  Antisense strand to SEQ ID NO: 1372414
auaugagcaagucaagaca

SEQ ID NO: 1372416 - RNA, 19 nt, Artificial Sequence
  Description of Artificial Sequence: Synthetic oligonucleotide
  Sense strand starting at position 1050 of SEQ ID NO: 1242782
ucuugacuugcucauaugu

SEQ ID NO: 1372417 - RNA, 19 nt, Artificial Sequence
  Description of Artificial Sequence: Synthetic oligonucleotide
  Antisense strand to SEQ ID NO: 1372416
acauaugagcaagucaaga

SEQ ID NO: 1372418 - RNA, 19 nt, Artificial Sequence
  Description of Artificial Sequence: Synthetic oligonucleotide
  Sense strand starting at position 1432 of SEQ ID NO: 1242782
uaauaaagcgcucagcaga

SEQ ID NO: 1372419 - RNA, 19 nt, Artificial Sequence
  Description of Artificial Sequence: Synthetic oligonucleotide
  Antisense strand to SEQ ID NO: 1372418
ucugcugagcgcuuuauua

SEQ ID NO: 1372420 - RNA, 19 nt, Artificial Sequence
  Description of Artificial Sequence: Synthetic oligonucleotide
  Sense strand starting at position 1451 of SEQ ID NO: 1242782
gaaccuggaacgugguaaa

SEQ ID NO: 1372421 - RNA, 19 nt, Artificial Sequence
  Description of Artificial Sequence: Synthetic oligonucleotide
  Antisense strand to SEQ ID NO: 1372420
uuuaccacguuccagguuc

SEQ ID NO: 1372422 - RNA, 19 nt, Artificial Sequence
  Description of Artificial Sequence: Synthetic oligonucleotide
  Sense strand starting at position 1461 of SEQ ID NO: 1242782
cgugguaaacgcuuuaugu

SEQ ID NO: 1372423 - RNA, 19 nt, Artificial Sequence
  Description of Artificial Sequence: Synthetic oligonucleotide
  Antisense strand to SEQ ID NO: 1372422
acauaaagcguuuaccacg

SEQ ID NO: 1372424 - RNA, 19 nt, Artificial Sequence
  Description of Artificial Sequence: Synthetic oligonucleotide
  Sense strand starting at position 1463 of SEQ ID NO: 1242782
ugguaaacgcuuuaugugu

SEQ ID NO: 1372425 - RNA, 19 nt, Artificial Sequence
  Description of Artificial Sequence: Synthetic oligonucleotide
  Antisense strand to SEQ ID NO: 1372424
acacauaaagcguuuacca

SEQ ID NO: 1372426 - RNA, 19 nt, Artificial Sequence
  Description of Artificial Sequence: Synthetic oligonucleotide
  Sense strand starting at position 1469 of SEQ ID NO: 1242782
acgcuuuauguguuaguua

SEQ ID NO: 1372427 - RNA, 19 nt, Artificial Sequence
  Description of Artificial Sequence: Synthetic oligonucleotide
  Antisense strand to SEQ ID NO: 1372426
uaacuaacacauaaagcgu

SEQ ID NO: 1372428 - RNA, 19 nt, Artificial Sequence
  Description of Artificial Sequence: Synthetic oligonucleotide
  Sense strand starting at position 1476 of SEQ ID NO: 1242782
auguguuaguuauuucuac

SEQ ID NO: 1372429 - RNA, 19 nt, Artificial Sequence
  Description of Artificial Sequence: Synthetic oligonucleotide
  Antisense strand to SEQ ID NO: 1372428
guagaaauaacuaacacau

SEQ ID NO: 1372430 - RNA, 19 nt, Artificial Sequence
  Description of Artificial Sequence: Synthetic oligonucleotide
  Sense strand starting at position 1480 of SEQ ID NO: 1242782
guuaguuauuucuaccauc

SEQ ID NO: 1372431 - RNA, 19 nt, Artificial Sequence
  Description of Artificial Sequence: Synthetic oligonucleotide
  Antisense strand to SEQ ID NO: 1372430
gaugguagaaauaacuaac

SEQ ID NO: 1372432 - RNA, 19 nt, Artificial Sequence
  Description of Artificial Sequence: Synthetic oligonucleotide
  Sense strand starting at position 1483 of SEQ ID NO: 1242782
aguuauuucuaccaucgua

SEQ ID NO: 1372433 - RNA, 19 nt, Artificial Sequence
  Description of Artificial Sequence: Synthetic oligonucleotide
  Antisense strand to SEQ ID NO: 1372432
uacgaugguagaaauaacu

SEQ ID NO: 1372434 - RNA, 19 nt, Artificial Sequence
  Description of Artificial Sequence: Synthetic oligonucleotide
  Sense strand starting at position 1661 of SEQ ID NO: 1242782
aaggucuuguaguuagcga

SEQ ID NO: 1372435 - RNA, 19 nt, Artificial Sequence
  Description of Artificial Sequence: Synthetic oligonucleotide
  Antisense strand to SEQ ID NO: 1372434
ucgcuaacuacaagaccuu

SEQ ID NO: 1372436 - RNA, 19 nt, Artificial Sequence
  Description of Artificial Sequence: Synthetic oligonucleotide
  Sense strand starting at position 1662 of SEQ ID NO: 1242782
aggucuuguaguuagcgaa

SEQ ID NO: 1372437 - RNA, 19 nt, Artificial Sequence
  Description of Artificial Sequence: Synthetic oligonucleotide
  Antisense strand to SEQ ID NO: 1372436
uucgcuaacuacaagaccu

SEQ ID NO: 1372438 - RNA, 19 nt, Artificial Sequence
  Description of Artificial Sequence: Synthetic oligonucleotide
  Sense strand starting at position 1663 of SEQ ID NO: 1242782
ggucuuguaguuagcgaag

SEQ ID NO: 1372439 - RNA, 19 nt, Artificial Sequence
  Description of Artificial Sequence: Synthetic oligonucleotide
  Antisense strand to SEQ ID NO: 1372438
cuucgcuaacuacaagacc

SEQ ID NO: 1372440 - RNA, 19 nt, Artificial Sequence
  Description of Artificial Sequence: Synthetic oligonucleotide
  Sense strand starting at position 2739 of SEQ ID NO: 1242782
gggcgaugaagucaaggau

SEQ ID NO: 1372441 - RNA, 19 nt, Artificial Sequence
  Description of Artificial Sequence: Synthetic oligonucleotide
  Antisense strand to SEQ ID NO: 1372440
auccuugacuucaucgccc

SEQ ID NO: 1372442 - RNA, 19 nt, Artificial Sequence
  Description of Artificial Sequence: Synthetic oligonucleotide
  Sense strand starting at position 2742 of SEQ ID NO: 1242782
cgaugaagucaaggauuag

SEQ ID NO: 1372443 - RNA, 19 nt, Artificial Sequence
  Description of Artificial Sequence: Synthetic oligonucleotide
  Antisense strand to SEQ ID NO: 1372442
cuaauccuugacuucaucg

SEQ ID NO: 1372444 - RNA, 19 nt, Artificial Sequence
  Description of Artificial Sequence: Synthetic oligonucleotide
  Sense strand starting at position 2761 of SEQ ID NO: 1242782
gcagauuguccggcagcuu

SEQ ID NO: 1372445 - RNA, 19 nt, Artificial Sequence
  Description of Artificial Sequence: Synthetic oligonucleotide
  Antisense strand to SEQ ID NO: 1372444
aagcugccggacaaucugc

SEQ ID NO: 1372446 - RNA, 19 nt, Artificial Sequence
  Description of Artificial Sequence: Synthetic oligonucleotide
  Sense strand starting at position 2828 of SEQ ID NO: 1242782
ggagauguguagaggucuu

SEQ ID NO: 1372447 - RNA, 19 nt, Artificial Sequence
  Description of Artificial Sequence: Synthetic oligonucleotide
  Antisense strand to SEQ ID NO: 1372446
aagaccucuacacaucucc

SEQ ID NO: 1372448 - RNA, 19 nt, Artificial Sequence
  Description of Artificial Sequence: Synthetic oligonucleotide
  Sense strand starting at position 2859 of SEQ ID NO: 1242782
uggucagggcuaugggaua

SEQ ID NO: 1372449 - RNA, 19 nt, Artificial Sequence
  Description of Artificial Sequence: Synthetic oligonucleotide
  Antisense strand to SEQ ID NO: 1372448
uaucccauagcccugacca

SEQ ID NO: 1372450 - RNA, 19 nt, Artificial Sequence
  Description of Artificial Sequence: Synthetic oligonucleotide
  Sense strand starting at position 3020 of SEQ ID NO: 1242782
gaggaugauccuuguagag

SEQ ID NO: 1372451 - RNA, 19 nt, Artificial Sequence
  Description of Artificial Sequence: Synthetic oligonucleotide
  Antisense strand to SEQ ID NO: 1372450
cucuacaaggaucauccuc

SEQ ID NO: 1372452 - RNA, 19 nt, Artificial Sequence
  Description of Artificial Sequence: Synthetic oligonucleotide
  Sense strand starting at position 3413 of SEQ ID NO: 1242782
gauagacaguuugaggaaa

SEQ ID NO: 1372453 - RNA, 19 nt, Artificial Sequence
  Description of Artificial Sequence: Synthetic oligonucleotide
  Antisense strand to SEQ ID NO: 1372452
uuuccucaaacugucuauc

SEQ ID NO: 1372454 - RNA, 19 nt, Artificial Sequence
  Description of Artificial Sequence: Synthetic oligonucleotide
  Sense strand starting at position 3432 of SEQ ID NO: 1242782
acaugagucucucuguuuc

SEQ ID NO: 1372455 - RNA, 19 nt, Artificial Sequence
  Description of Artificial Sequence: Synthetic oligonucleotide
  Antisense strand to SEQ ID NO: 1372454
gaaacagagagacucaugu

SEQ ID NO: 1372456 - RNA, 19 nt, Artificial Sequence
  Description of Artificial Sequence: Synthetic oligonucleotide
  Sense strand starting at position 3491 of SEQ ID NO: 1242782
cuagcuugucugcauggau

SEQ ID NO: 1372457 - RNA, 19 nt, Artificial Sequence
  Description of Artificial Sequence: Synthetic oligonucleotide
  Antisense strand to SEQ ID NO: 1372456
auccaugcagacaagcuag

SEQ ID NO: 1372458 - RNA, 19 nt, Artificial Sequence
  Description of Artificial Sequence: Synthetic oligonucleotide
  Sense strand starting at position 3494 of SEQ ID NO: 1242782
gcuugucugcauggauaga

SEQ ID NO: 1372459 - RNA, 19 nt, Artificial Sequence
  Description of Artificial Sequence: Synthetic oligonucleotide
  Antisense strand to SEQ ID NO: 1372458
ucuauccaugcagacaagc

SEQ ID NO: 1372460 - RNA, 19 nt, Artificial Sequence
  Description of Artificial Sequence: Synthetic oligonucleotide
  Sense strand starting at position 3495 of SEQ ID NO: 1242782
cuugucugcauggauagaa

SEQ ID NO: 1372461 - RNA, 19 nt, Artificial Sequence
  Description of Artificial Sequence: Synthetic oligonucleotide
  Antisense strand to SEQ ID NO: 1372460
uucuauccaugcagacaag

SEQ ID NO: 1372462 - RNA, 19 nt, Artificial Sequence
  Description of Artificial Sequence: Synthetic oligonucleotide
  Sense strand starting at position 3690 of SEQ ID NO: 1242782
ucccuuuggugaguagaga

SEQ ID NO: 1372463 - RNA, 19 nt, Artificial Sequence
  Description of Artificial Sequence: Synthetic oligonucleotide
  Antisense strand to SEQ ID NO: 1372462
ucucuacucaccaaaggga

SEQ ID NO: 1372464 - RNA, 19 nt, Artificial Sequence
  Description of Artificial Sequence: Synthetic oligonucleotide
  Sense strand starting at position 3691 of SEQ ID NO: 1242782
cccuuuggugaguagagau

SEQ ID NO: 1372465 - RNA, 19 nt, Artificial Sequence
  Description of Artificial Sequence: Synthetic oligonucleotide
  Antisense strand to SEQ ID NO: 1372464
aucucuacucaccaaaggg

SEQ ID NO: 1372466 - RNA, 19 nt, Artificial Sequence
  Description of Artificial Sequence: Synthetic oligonucleotide
  Sense strand starting at position 3704 of SEQ ID NO: 1242782
agagaugguagcuguuaca

SEQ ID NO: 1372467 - RNA, 19 nt, Artificial Sequence
  Description of Artificial Sequence: Synthetic oligonucleotide
  Antisense strand to SEQ ID NO: 1372466
uguaacagcuaccaucucu

SEQ ID NO: 1372468 - RNA, 19 nt, Artificial Sequence
  Description of Artificial Sequence: Synthetic oligonucleotide
  Sense strand starting at position 3759 of SEQ ID NO: 1242782
caaucugagugcuugagag

SEQ ID NO: 1372469 - RNA, 19 nt, Artificial Sequence
  Description of Artificial Sequence: Synthetic oligonucleotide
  Antisense strand to SEQ ID NO: 1372468
cucucaagcacucagauug

SEQ ID NO: 1372470 - RNA, 19 nt, Artificial Sequence
  Description of Artificial Sequence: Synthetic oligonucleotide
  Sense strand starting at position 3779 of SEQ ID NO: 1242782
auaaauucucagcacguuu

SEQ ID NO: 1372471 - RNA, 19 nt, Artificial Sequence
  Description of Artificial Sequence: Synthetic oligonucleotide
  Antisense strand to SEQ ID NO: 1372470
aaacgugcugagaauuuau

SEQ ID NO: 1372472 - RNA, 19 nt, Artificial Sequence
  Description of Artificial Sequence: Synthetic oligonucleotide
  Sense strand starting at position 3849 of SEQ ID NO: 1242782
cccucaauaugggcauauu

SEQ ID NO: 1372473 - RNA, 19 nt, Artificial Sequence
  Description of Artificial Sequence: Synthetic oligonucleotide
  Antisense strand to SEQ ID NO: 1372472
aauaugcccauauugaggg

SEQ ID NO: 1372474 - RNA, 19 nt, Artificial Sequence
  Description of Artificial Sequence: Synthetic oligonucleotide
  Sense strand starting at position 3879 of SEQ ID NO: 1242782
gugaguuagugucucuucu

SEQ ID NO: 1372475 - RNA, 19 nt, Artificial Sequence
  Description of Artificial Sequence: Synthetic oligonucleotide
  Antisense strand to SEQ ID NO: 1372474
agaagagacacuaacucac

SEQ ID NO: 1372476 - RNA, 19 nt, Artificial Sequence
  Description of Artificial Sequence: Synthetic oligonucleotide
  Sense strand starting at position 563 of SEQ ID NO: 1242783
cuuacugaguuaugaggau

SEQ ID NO: 1372477 - RNA, 19 nt, Artificial Sequence
  Description of Artificial Sequence: Synthetic oligonucleotide
  Antisense strand to SEQ ID NO: 1372476
auccucauaacucaguaag

SEQ ID NO: 1372478 - RNA, 19 nt, Artificial Sequence
  Description of Artificial Sequence: Synthetic oligonucleotide
  Sense strand starting at position 618 of SEQ ID NO: 1242783
agaaaugagucuuauucug

SEQ ID NO: 1372479 - RNA, 19 nt, Artificial Sequence
  Description of Artificial Sequence: Synthetic oligonucleotide
  Antisense strand to SEQ ID NO: 1372478
cagaauaagacucauuucu

SEQ ID NO: 1372480 - RNA, 19 nt, Artificial Sequence
  Description of Artificial Sequence: Synthetic oligonucleotide
  Sense strand starting at position 678 of SEQ ID NO: 1242783
ucaacaacccucggaguuu

SEQ ID NO: 1372481 - RNA, 19 nt, Artificial Sequence
  Description of Artificial Sequence: Synthetic oligonucleotide
  Antisense strand to SEQ ID NO: 1372480
aaacuccgaggguuguuga

SEQ ID NO: 1372482 - RNA, 19 nt, Artificial Sequence
  Description of Artificial Sequence: Synthetic oligonucleotide
  Sense strand starting at position 754 of SEQ ID NO: 1242783
gcaucacuuuauguccaua

SEQ ID NO: 1372483 - RNA, 19 nt, Artificial Sequence
  Description of Artificial Sequence: Synthetic oligonucleotide
  Antisense strand to SEQ ID NO: 1372482
uauggacauaaagugaugc

SEQ ID NO: 1372484 - RNA, 19 nt, Artificial Sequence
  Description of Artificial Sequence: Synthetic oligonucleotide
  Sense strand starting at position 775 of SEQ ID NO: 1242783
uucccaaagugugaaacau

SEQ ID NO: 1372485 - RNA, 19 nt, Artificial Sequence
  Description of Artificial Sequence: Synthetic oligonucleotide
  Antisense strand to SEQ ID NO: 1372484
auguuucacacuuugggaa

SEQ ID NO: 1372486 - RNA, 19 nt, Artificial Sequence
  Description of Artificial Sequence: Synthetic oligonucleotide
  Sense strand starting at position 787 of SEQ ID NO: 1242783
gaaacaugccaguguggua

SEQ ID NO: 1372487 - RNA, 19 nt, Artificial Sequence
  Description of Artificial Sequence: Synthetic oligonucleotide
  Antisense strand to SEQ ID NO: 1372486
uaccacacuggcauguuuc

SEQ ID NO: 1372488 - RNA, 19 nt, Artificial Sequence
  Description of Artificial Sequence: Synthetic oligonucleotide
  Sense strand starting at position 815 of SEQ ID NO: 1242783
uauuaaguggcuuauggau

SEQ ID NO: 1372489 - RNA, 19 nt, Artificial Sequence
  Description of Artificial Sequence: Synthetic oligonucleotide
  Antisense strand to SEQ ID NO: 1372488
auccauaagccacuuaaua

SEQ ID NO: 1372490 - RNA, 19 nt, Artificial Sequence
  Description of Artificial Sequence: Synthetic oligonucleotide
  Sense strand starting at position 921 of SEQ ID NO: 1242783
cugguauagccuuaacacu

SEQ ID NO: 1372491 - RNA, 19 nt, Artificial Sequence
  Description of Artificial Sequence: Synthetic oligonucleotide
  Antisense strand to SEQ ID NO: 1372490
aguguuaaggcuauaccag

SEQ ID NO: 1372492 - RNA, 19 nt, Artificial Sequence
  Description of Artificial Sequence: Synthetic oligonucleotide
  Sense strand starting at position 1190 of SEQ ID NO: 1242783
gaaagugguacacgguaau

SEQ ID NO: 1372493 - RNA, 19 nt, Artificial Sequence
  Description of Artificial Sequence: Synthetic oligonucleotide
  Antisense strand to SEQ ID NO: 1372492
auuaccguguaccacuuuc

SEQ ID NO: 1372494 - RNA, 19 nt, Artificial Sequence
  Description of Artificial Sequence: Synthetic oligonucleotide
  Sense strand starting at position 1666 of SEQ ID NO: 1242783
guuuacagugcaugcaaau

SEQ ID NO: 1372495 - RNA, 19 nt, Artificial Sequence
  Description of Artificial Sequence: Synthetic oligonucleotide
  Antisense strand to SEQ ID NO: 1372494
auuugcaugcacuguaaac

SEQ ID NO: 1372496 - RNA, 19 nt, Artificial Sequence
  Description of Artificial Sequence: Synthetic oligonucleotide
  Sense strand starting at position 1740 of SEQ ID NO: 1242783
gcccgagaaucuguauuuc

SEQ ID NO: 1372497 - RNA, 19 nt, Artificial Sequence
  Description of Artificial Sequence: Synthetic oligonucleotide
  Antisense strand to SEQ ID NO: 1372496
gaaauacagauucucgggc

SEQ ID NO: 1372498 - RNA, 19 nt, Artificial Sequence
  Description of Artificial Sequence: Synthetic oligonucleotide
  Sense strand starting at position 1746 of SEQ ID NO: 1242783
gaaucuguauuucuagcga

SEQ ID NO: 1372499 - RNA, 19 nt, Artificial Sequence
  Description of Artificial Sequence: Synthetic oligonucleotide
  Antisense strand to SEQ ID NO: 1372498
ucgcuagaaauacagauuc

SEQ ID NO: 1372500 - RNA, 19 nt, Artificial Sequence
  Description of Artificial Sequence: Synthetic oligonucleotide
  Sense strand starting at position 2396 of SEQ ID NO: 1242783
ggguuagauugguuagaua

SEQ ID NO: 1372501 - RNA, 19 nt, Artificial Sequence
  Description of Artificial Sequence: Synthetic oligonucleotide
  Antisense strand to SEQ ID NO: 1372500
uaucuaaccaaucuaaccc

SEQ ID NO: 1372502 - RNA, 19 nt, Artificial Sequence
  Description of Artificial Sequence: Synthetic oligonucleotide
  Sense strand starting at position 2399 of SEQ ID NO: 1242783
uuagauugguuagauacga

SEQ ID NO: 1372503 - RNA, 19 nt, Artificial Sequence
  Description of Artificial Sequence: Synthetic oligonucleotide
  Antisense strand to SEQ ID NO: 1372502
ucguaucuaaccaaucuaa

SEQ ID NO: 1372504 - RNA, 19 nt, Artificial Sequence
  Description of Artificial Sequence: Synthetic oligonucleotide
  Sense strand starting at position 2403 of SEQ ID NO: 1242783
auugguuagauacgacaaa

SEQ ID NO: 1372505 - RNA, 19 nt, Artificial Sequence
  Description of Artificial Sequence: Synthetic oligonucleotide
  Antisense strand to SEQ ID NO: 1372504
uuugucguaucuaaccaau

SEQ ID NO: 1372506 - RNA, 19 nt, Artificial Sequence
  Description of Artificial Sequence: Synthetic oligonucleotide
  Sense strand starting at position 2404 of SEQ ID NO: 1242783
uugguuagauacgacaaau

SEQ ID NO: 1372507 - RNA, 19 nt, Artificial Sequence
  Description of Artificial Sequence: Synthetic oligonucleotide
  Antisense strand to SEQ ID NO: 1372506
auuugucguaucuaaccaa

SEQ ID NO: 1372508 - RNA, 19 nt, Artificial Sequence
  Description of Artificial Sequence: Synthetic oligonucleotide
  Sense strand starting at position 2448 of SEQ ID NO: 1242783
cugucaaucacucggaaga

SEQ ID NO: 1372509 - RNA, 19 nt, Artificial Sequence
  Description of Artificial Sequence: Synthetic oligonucleotide
  Antisense strand to SEQ ID NO: 1372508
ucuuccgagugauugacag

SEQ ID NO: 1372510 - RNA, 19 nt, Artificial Sequence
  Description of Artificial Sequence: Synthetic oligonucleotide
  Sense strand starting at position 2508 of SEQ ID NO: 1242783
cuaaauugcuguuuagaaa

SEQ ID NO: 1372511 - RNA, 19 nt, Artificial Sequence
  Description of Artificial Sequence: Synthetic oligonucleotide
  Antisense strand to SEQ ID NO: 1372510
uuucuaaacagcaauuuag

SEQ ID NO: 1372512 - RNA, 19 nt, Artificial Sequence
  Description of Artificial Sequence: Synthetic oligonucleotide
  Sense strand starting at position 2509 of SEQ ID NO: 1242783
uaaauugcuguuuagaaag

SEQ ID NO: 1372513 - RNA, 19 nt, Artificial Sequence
  Description of Artificial Sequence: Synthetic oligonucleotide
  Antisense strand to SEQ ID NO: 1372512
cuuucuaaacagcaauuua

SEQ ID NO: 1372514 - RNA, 19 nt, Artificial Sequence
  Description of Artificial Sequence: Synthetic oligonucleotide
  Sense strand starting at position 2511 of SEQ ID NO: 1242783
aauugcuguuuagaaagau

SEQ ID NO: 1372515 - RNA, 19 nt, Artificial Sequence
  Description of Artificial Sequence: Synthetic oligonucleotide
  Antisense strand to SEQ ID NO: 1372514
aucuuucuaaacagcaauu

SEQ ID NO: 1372516 - RNA, 19 nt, Artificial Sequence
  Description of Artificial Sequence: Synthetic oligonucleotide
  Sense strand starting at position 2520 of SEQ ID NO: 1242783
uuagaaagaucaggacaag

SEQ ID NO: 1372517 - RNA, 19 nt, Artificial Sequence
  Description of Artificial Sequence: Synthetic oligonucleotide
  Antisense strand to SEQ ID NO: 1372516
cuuguccugaucuuucuaa

SEQ ID NO: 1372518 - RNA, 19 nt, Artificial Sequence
  Description of Artificial Sequence: Synthetic oligonucleotide
  Sense strand starting at position 2569 of SEQ ID NO: 1242783
aaaggaucaugagggaauu

SEQ ID NO: 1372519 - RNA, 19 nt, Artificial Sequence
  Description of Artificial Sequence: Synthetic oligonucleotide
  Antisense strand to SEQ ID NO: 1372518
aauucccucaugauccuuu

SEQ ID NO: 1372520 - RNA, 19 nt, Artificial Sequence
  Description of Artificial Sequence: Synthetic oligonucleotide
  Sense strand starting at position 2605 of SEQ ID NO: 1242783
gguauuuccugcuuuaccu

SEQ ID NO: 1372521 - RNA, 19 nt, Artificial Sequence
  Description of Artificial Sequence: Synthetic oligonucleotide
  Antisense strand to SEQ ID NO: 1372520
agguaaagcaggaaauacc

SEQ ID NO: 1372522 - RNA, 19 nt, Artificial Sequence
  Description of Artificial Sequence: Synthetic oligonucleotide
  Sense strand starting at position 2613 of SEQ ID NO: 1242783
cugcuuuaccuacguggaa

SEQ ID NO: 1372523 - RNA, 19 nt, Artificial Sequence
  Description of Artificial Sequence: Synthetic oligonucleotide
  Antisense strand to SEQ ID NO: 1372522
uuccacguagguaaagcag

SEQ ID NO: 1372524 - RNA, 19 nt, Artificial Sequence
  Description of Artificial Sequence: Synthetic oligonucleotide
  Sense strand starting at position 2814 of SEQ ID NO: 1242783
ugcagucagccgugauucu

SEQ ID NO: 1372525 - RNA, 19 nt, Artificial Sequence
  Description of Artificial Sequence: Synthetic oligonucleotide
  Antisense strand to SEQ ID NO: 1372524
agaaucacggcugacugca

SEQ ID NO: 1372526 - RNA, 19 nt, Artificial Sequence
  Description of Artificial Sequence: Synthetic oligonucleotide
  Sense strand starting at position 2933 of SEQ ID NO: 1242783
uaguguuaucucuauuggu

SEQ ID NO: 1372527 - RNA, 19 nt, Artificial Sequence
  Description of Artificial Sequence: Synthetic oligonucleotide
  Antisense strand to SEQ ID NO: 1372526
accaauagagauaacacua

SEQ ID NO: 1372528 - RNA, 19 nt, Artificial Sequence
  Description of Artificial Sequence: Synthetic oligonucleotide
  Sense strand starting at position 2941 of SEQ ID NO: 1242783
ucucuauuggugggcugaa

SEQ ID NO: 1372529 - RNA, 19 nt, Artificial Sequence
  Description of Artificial Sequence: Synthetic oligonucleotide
  Antisense strand to SEQ ID NO: 1372528
uucagcccaccaauagaga

SEQ ID NO: 1372530 - RNA, 19 nt, Artificial Sequence
  Description of Artificial Sequence: Synthetic oligonucleotide
  Sense strand starting at position 2942 of SEQ ID NO: 1242783
cucuauuggugggcugaaa

SEQ ID NO: 1372531 - RNA, 19 nt, Artificial Sequence
  Description of Artificial Sequence: Synthetic oligonucleotide
  Antisense strand to SEQ ID NO: 1372530
uuucagcccaccaauagag

SEQ ID NO: 1372532 - RNA, 19 nt, Artificial Sequence
  Description of Artificial Sequence: Synthetic oligonucleotide
  Sense strand starting at position 3025 of SEQ ID NO: 1242783
ugguauccaccuuaaugua

SEQ ID NO: 1372533 - RNA, 19 nt, Artificial Sequence
  Description of Artificial Sequence: Synthetic oligonucleotide
  Antisense strand to SEQ ID NO: 1372532
uacauuaagguggauacca

SEQ ID NO: 1372534 - RNA, 19 nt, Artificial Sequence
  Description of Artificial Sequence: Synthetic oligonucleotide
  Sense strand starting at position 3035 of SEQ ID NO: 1242783
cuuaauguacugugugcau

SEQ ID NO: 1372535 - RNA, 19 nt, Artificial Sequence
  Description of Artificial Sequence: Synthetic oligonucleotide
  Antisense strand to SEQ ID NO: 1372534
augcacacaguacauuaag

SEQ ID NO: 1372536 - RNA, 19 nt, Artificial Sequence
  Description of Artificial Sequence: Synthetic oligonucleotide
  Sense strand starting at position 3058 of SEQ ID NO: 1242783
gcauguauauuugugcaaa

SEQ ID NO: 1372537 - RNA, 19 nt, Artificial Sequence
  Description of Artificial Sequence: Synthetic oligonucleotide
  Antisense strand to SEQ ID NO: 1372536
uuugcacaaauauacaugc

SEQ ID NO: 1372538 - RNA, 19 nt, Artificial Sequence
  Description of Artificial Sequence: Synthetic oligonucleotide
  Sense strand starting at position 3152 of SEQ ID NO: 1242783
uuaggaaucuacucaacga

SEQ ID NO: 1372539 - RNA, 19 nt, Artificial Sequence
  Description of Artificial Sequence: Synthetic oligonucleotide
  Antisense strand to SEQ ID NO: 1372538
ucguugaguagauuccuaa

SEQ ID NO: 1372540 - RNA, 19 nt, Artificial Sequence
  Description of Artificial Sequence: Synthetic oligonucleotide
  Sense strand starting at position 3217 of SEQ ID NO: 1242783
gcgugucugcaaggauaua

SEQ ID NO: 1372541 - RNA, 19 nt, Artificial Sequence
  Description of Artificial Sequence: Synthetic oligonucleotide
  Antisense strand to SEQ ID NO: 1372540
uauauccuugcagacacgc

SEQ ID NO: 1372542 - RNA, 19 nt, Artificial Sequence
  Description of Artificial Sequence: Synthetic oligonucleotide
  Sense strand starting at position 3239 of SEQ ID NO: 1242783
cguuuaauauuggcaacau

SEQ ID NO: 1372543 - RNA, 19 nt, Artificial Sequence
  Description of Artificial Sequence: Synthetic oligonucleotide
  Antisense strand to SEQ ID NO: 1372542
auguugccaauauuaaacg

SEQ ID NO: 1372544 - RNA, 19 nt, Artificial Sequence
  Description of Artificial Sequence: Synthetic oligonucleotide
  Sense strand starting at position 3240 of SEQ ID NO: 1242783
guuuaauauuggcaacauc

SEQ ID NO: 1372545 - RNA, 19 nt, Artificial Sequence
  Description of Artificial Sequence: Synthetic oligonucleotide
  Antisense strand to SEQ ID NO: 1372544
gauguugccaauauuaaac

SEQ ID NO: 1372546 - RNA, 19 nt, Artificial Sequence
  Description of Artificial Sequence: Synthetic oligonucleotide
  Sense strand starting at position 3398 of SEQ ID NO: 1242783
uuuauaucacucuaguguu

SEQ ID NO: 1372547 - RNA, 19 nt, Artificial Sequence
  Description of Artificial Sequence: Synthetic oligonucleotide
  Antisense strand to SEQ ID NO: 1372546
aacacuagagugauauaaa

SEQ ID NO: 1372548 - RNA, 19 nt, Artificial Sequence
  Description of Artificial Sequence: Synthetic oligonucleotide
  Sense strand starting at position 3459 of SEQ ID NO: 1242783
aauacuacuuagugaggau

SEQ ID NO: 1372549 - RNA, 19 nt, Artificial Sequence
  Description of Artificial Sequence: Synthetic oligonucleotide
  Antisense strand to SEQ ID NO: 1372548
auccucacuaaguaguauu

SEQ ID NO: 1372550 - RNA, 19 nt, Artificial Sequence
  Description of Artificial Sequence: Synthetic oligonucleotide
  Sense strand starting at position 3881 of SEQ ID NO: 1242783
aggucucuguuucuaagga

SEQ ID NO: 1372551 - RNA, 19 nt, Artificial Sequence
  Description of Artificial Sequence: Synthetic oligonucleotide
  Antisense strand to SEQ ID NO: 1372550
uccuuagaaacagagaccu

SEQ ID NO: 1372552 - RNA, 19 nt, Artificial Sequence
  Description of Artificial Sequence: Synthetic oligonucleotide
  Sense strand starting at position 3885 of SEQ ID NO: 1242783
cucuguuucuaaggagaaa

SEQ ID NO: 1372553 - RNA, 19 nt, Artificial Sequence
  Description of Artificial Sequence: Synthetic oligonucleotide
  Antisense strand to SEQ ID NO: 1372552
uuucuccuuagaaacagag

SEQ ID NO: 1372554 - RNA, 19 nt, Artificial Sequence
  Description of Artificial Sequence: Synthetic oligonucleotide
  Sense strand starting at position 3911 of SEQ ID NO: 1242783
gacaaagauuuauagaugu

SEQ ID NO: 1372555 - RNA, 19 nt, Artificial Sequence
  Description of Artificial Sequence: Synthetic oligonucleotide
  Antisense strand to SEQ ID NO: 1372554
acaucuauaaaucuuuguc

SEQ ID NO: 1372556 - RNA, 19 nt, Artificial Sequence
  Description of Artificial Sequence: Synthetic oligonucleotide
  Sense strand starting at position 241 of SEQ ID NO: 1242784
cuuacugaguuaugaggau

SEQ ID NO: 1372557 - RNA, 19 nt, Artificial Sequence
  Description of Artificial Sequence: Synthetic oligonucleotide
  Antisense strand to SEQ ID NO: 1372556
auccucauaacucaguaag

SEQ ID NO: 1372558 - RNA, 19 nt, Artificial Sequence
  Description of Artificial Sequence: Synthetic oligonucleotide
  Sense strand starting at position 296 of SEQ ID NO: 1242784
agaaaugagucuuauucug

SEQ ID NO: 1372559 - RNA, 19 nt, Artificial Sequence
  Description of Artificial Sequence: Synthetic oligonucleotide
  Antisense strand to SEQ ID NO: 1372558
cagaauaagacucauuucu

SEQ ID NO: 1372560 - RNA, 19 nt, Artificial Sequence
  Description of Artificial Sequence: Synthetic oligonucleotide
  Sense strand starting at position 356 of SEQ ID NO: 1242784
ucaacaacccucggaguuu

SEQ ID NO: 1372561 - RNA, 19 nt, Artificial Sequence
  Description of Artificial Sequence: Synthetic oligonucleotide
  Antisense strand to SEQ ID NO: 1372560
aaacuccgaggguuguuga

SEQ ID NO: 1372562 - RNA, 19 nt, Artificial Sequence
  Description of Artificial Sequence: Synthetic oligonucleotide
  Sense strand starting at position 432 of SEQ ID NO: 1242784
gcaucacuuuauguccaua

SEQ ID NO: 1372563 - RNA, 19 nt, Artificial Sequence
  Description of Artificial Sequence: Synthetic oligonucleotide
  Antisense strand to SEQ ID NO: 1372562
uauggacauaaagugaugc

SEQ ID NO: 1372564 - RNA, 19 nt, Artificial Sequence
  Description of Artificial Sequence: Synthetic oligonucleotide
  Sense strand starting at position 453 of SEQ ID NO: 1242784
uucccaaagugugaaacau

SEQ ID NO: 1372565 - RNA, 19 nt, Artificial Sequence
  Description of Artificial Sequence: Synthetic oligonucleotide
  Antisense strand to SEQ ID NO: 1372564
auguuucacacuuugggaa

SEQ ID NO: 1372566 - RNA, 19 nt, Artificial Sequence
  Description of Artificial Sequence: Synthetic oligonucleotide
  Sense strand starting at position 465 of SEQ ID NO: 1242784
gaaacaugccaguguggua

SEQ ID NO: 1372567 - RNA, 19 nt, Artificial Sequence
  Description of Artificial Sequence: Synthetic oligonucleotide
  Antisense strand to SEQ ID NO: 1372566
uaccacacuggcauguuuc

SEQ ID NO: 1372568 - RNA, 19 nt, Artificial Sequence
  Description of Artificial Sequence: Synthetic oligonucleotide
  Sense strand starting at position 493 of SEQ ID NO: 1242784
uauuaaguggcuuauggau

SEQ ID NO: 1372569 - RNA, 19 nt, Artificial Sequence
  Description of Artificial Sequence: Synthetic oligonucleotide
  Antisense strand to SEQ ID NO: 1372568
auccauaagccacuuaaua

SEQ ID NO: 1372570 - RNA, 19 nt, Artificial Sequence
  Description of Artificial Sequence: Synthetic oligonucleotide
  Sense strand starting at position 599 of SEQ ID NO: 1242784
cugguauagccuuaacacu

SEQ ID NO: 1372571 - RNA, 19 nt, Artificial Sequence
  Description of Artificial Sequence: Synthetic oligonucleotide
  Antisense strand to SEQ ID NO: 1372570
aguguuaaggcuauaccag

SEQ ID NO: 1372572 - RNA, 19 nt, Artificial Sequence
  Description of Artificial Sequence: Synthetic oligonucleotide
  Sense strand starting at position 868 of SEQ ID NO: 1242784
gaaagugguacacgguaau

SEQ ID NO: 1372573 - RNA, 19 nt, Artificial Sequence
  Description of Artificial Sequence: Synthetic oligonucleotide
  Antisense strand to SEQ ID NO: 1372572
auuaccguguaccacuuuc

SEQ ID NO: 1372574 - RNA, 19 nt, Artificial Sequence
  Description of Artificial Sequence: Synthetic oligonucleotide
  Sense strand starting at position 1344 of SEQ ID NO: 1242784
guuuacagugcaugcaaau

SEQ ID NO: 1372575 - RNA, 19 nt, Artificial Sequence
  Description of Artificial Sequence: Synthetic oligonucleotide
  Antisense strand to SEQ ID NO: 1372574
auuugcaugcacuguaaac

SEQ ID NO: 1372576 - RNA, 19 nt, Artificial Sequence
  Description of Artificial Sequence: Synthetic oligonucleotide
  Sense strand starting at position 1418 of SEQ ID NO: 1242784
gcccgagaaucuguauuuc

SEQ ID NO: 1372577 - RNA, 19 nt, Artificial Sequence
  Description of Artificial Sequence: Synthetic oligonucleotide
  Antisense strand to SEQ ID NO: 1372576
gaaauacagauucucgggc

SEQ ID NO: 1372578 - RNA, 19 nt, Artificial Sequence
  Description of Artificial Sequence: Synthetic oligonucleotide
  Sense strand starting at position 1424 of SEQ ID NO: 1242784
gaaucuguauuucuagcga

SEQ ID NO: 1372579 - RNA, 19 nt, Artificial Sequence
  Description of Artificial Sequence: Synthetic oligonucleotide
  Antisense strand to SEQ ID NO: 1372578
ucgcuagaaauacagauuc

SEQ ID NO: 1372580 - RNA, 19 nt, Artificial Sequence
  Description of Artificial Sequence: Synthetic oligonucleotide
  Sense strand starting at position 2074 of SEQ ID NO: 1242784
ggguuagauugguuagaua

SEQ ID NO: 1372581 - RNA, 19 nt, Artificial Sequence
  Description of Artificial Sequence: Synthetic oligonucleotide
  Antisense strand to SEQ ID NO: 1372580
uaucuaaccaaucuaaccc

SEQ ID NO: 1372582 - RNA, 19 nt, Artificial Sequence
  Description of Artificial Sequence: Synthetic oligonucleotide
  Sense strand starting at position 2077 of SEQ ID NO: 1242784
uuagauugguuagauacga

SEQ ID NO: 1372583 - RNA, 19 nt, Artificial Sequence
  Description of Artificial Sequence: Synthetic oligonucleotide
  Antisense strand to SEQ ID NO: 1372582
ucguaucuaaccaaucuaa

SEQ ID NO: 1372584 - RNA, 19 nt, Artificial Sequence
  Description of Artificial Sequence: Synthetic oligonucleotide
  Sense strand starting at position 2081 of SEQ ID NO: 1242784
auugguuagauacgacaaa

SEQ ID NO: 1372585 - RNA, 19 nt, Artificial Sequence
  Description of Artificial Sequence: Synthetic oligonucleotide
  Antisense strand to SEQ ID NO: 1372584
uuugucguaucuaaccaau

SEQ ID NO: 1372586 - RNA, 19 nt, Artificial Sequence
  Description of Artificial Sequence: Synthetic oligonucleotide
  Sense strand starting at position 2082 of SEQ ID NO: 1242784
uugguuagauacgacaaau

SEQ ID NO: 1372587 - RNA, 19 nt, Artificial Sequence
  Description of Artificial Sequence: Synthetic oligonucleotide
  Antisense strand to SEQ ID NO: 1372586
auuugucguaucuaaccaa

SEQ ID NO: 1372588 - RNA, 19 nt, Artificial Sequence
  Description of Artificial Sequence: Synthetic oligonucleotide
  Sense strand starting at position 2126 of SEQ ID NO: 1242784
cugucaaucacucggaaga

SEQ ID NO: 1372589 - RNA, 19 nt, Artificial Sequence
  Description of Artificial Sequence: Synthetic oligonucleotide
  Antisense strand to SEQ ID NO: 1372588
ucuuccgagugauugacag

SEQ ID NO: 1372590 - RNA, 19 nt, Artificial Sequence
  Description of Artificial Sequence: Synthetic oligonucleotide
  Sense strand starting at position 2186 of SEQ ID NO: 1242784
cuaaauugcuguuuagaaa

SEQ ID NO: 1372591 - RNA, 19 nt, Artificial Sequence
  Description of Artificial Sequence: Synthetic oligonucleotide
  Antisense strand to SEQ ID NO: 1372590
uuucuaaacagcaauuuag

SEQ ID NO: 1372592 - RNA, 19 nt, Artificial Sequence
  Description of Artificial Sequence: Synthetic oligonucleotide
  Sense strand starting at position 2187 of SEQ ID NO: 1242784
uaaauugcuguuuagaaag

SEQ ID NO: 1372593 - RNA, 19 nt, Artificial Sequence
  Description of Artificial Sequence: Synthetic oligonucleotide
  Antisense strand to SEQ ID NO: 1372592
cuuucuaaacagcaauuua

SEQ ID NO: 1372594 - RNA, 19 nt, Artificial Sequence
  Description of Artificial Sequence: Synthetic oligonucleotide
  Sense strand starting at position 2189 of SEQ ID NO: 1242784
aauugcuguuuagaaagau

SEQ ID NO: 1372595 - RNA, 19 nt, Artificial Sequence
  Description of Artificial Sequence: Synthetic oligonucleotide
  Antisense strand to SEQ ID NO: 1372594
aucuuucuaaacagcaauu

SEQ ID NO: 1372596 - RNA, 19 nt, Artificial Sequence
  Description of Artificial Sequence: Synthetic oligonucleotide
  Sense strand starting at position 2198 of SEQ ID NO: 1242784
uuagaaagaucaggacaag

SEQ ID NO: 1372597 - RNA, 19 nt, Artificial Sequence
  Description of Artificial Sequence: Synthetic oligonucleotide
  Antisense strand to SEQ ID NO: 1372596
cuuguccugaucuuucuaa

SEQ ID NO: 1372598 - RNA, 19 nt, Artificial Sequence
  Description of Artificial Sequence: Synthetic oligonucleotide
  Sense strand starting at position 2247 of SEQ ID NO: 1242784
aaaggaucaugagggaauu

SEQ ID NO: 1372599 - RNA, 19 nt, Artificial Sequence
  Description of Artificial Sequence: Synthetic oligonucleotide
  Antisense strand to SEQ ID NO: 1372598
aauucccucaugauccuuu

SEQ ID NO: 1372600 - RNA, 19 nt, Artificial Sequence
  Description of Artificial Sequence: Synthetic oligonucleotide
  Sense strand starting at position 2283 of SEQ ID NO: 1242784
gguauuuccugcuuuaccu

SEQ ID NO: 1372601 - RNA, 19 nt, Artificial Sequence
  Description of Artificial Sequence: Synthetic oligonucleotide
  Antisense strand to SEQ ID NO: 1372600
agguaaagcaggaaauacc

SEQ ID NO: 1372602 - RNA, 19 nt, Artificial Sequence
  Description of Artificial Sequence: Synthetic oligonucleotide
  Sense strand starting at position 2291 of SEQ ID NO: 1242784
cugcuuuaccuacguggaa

SEQ ID NO: 1372603 - RNA, 19 nt, Artificial Sequence
  Description of Artificial Sequence: Synthetic oligonucleotide
  Antisense strand to SEQ ID NO: 1372602
uuccacguagguaaagcag

SEQ ID NO: 1372604 - RNA, 19 nt, Artificial Sequence
  Description of Artificial Sequence: Synthetic oligonucleotide
  Sense strand starting at position 2492 of SEQ ID NO: 1242784
ugcagucagccgugauucu

SEQ ID NO: 1372605 - RNA, 19 nt, Artificial Sequence
  Description of Artificial Sequence: Synthetic oligonucleotide
  Antisense strand to SEQ ID NO: 1372604
agaaucacggcugacugca

SEQ ID NO: 1372606 - RNA, 19 nt, Artificial Sequence
  Description of Artificial Sequence: Synthetic oligonucleotide
  Sense strand starting at position 2611 of SEQ ID NO: 1242784
uaguguuaucucuauuggu

SEQ ID NO: 1372607 - RNA, 19 nt, Artificial Sequence
  Description of Artificial Sequence: Synthetic oligonucleotide
  Antisense strand to SEQ ID NO: 1372606
accaauagagauaacacua

SEQ ID NO: 1372608 - RNA, 19 nt, Artificial Sequence
  Description of Artificial Sequence: Synthetic oligonucleotide
  Sense strand starting at position 2619 of SEQ ID NO: 1242784
ucucuauuggugggcugaa

SEQ ID NO: 1372609 - RNA, 19 nt, Artificial Sequence
  Description of Artificial Sequence: Synthetic oligonucleotide
  Antisense strand to SEQ ID NO: 1372608
uucagcccaccaauagaga

SEQ ID NO: 1372610 - RNA, 19 nt, Artificial Sequence
  Description of Artificial Sequence: Synthetic oligonucleotide
  Sense strand starting at position 2620 of SEQ ID NO: 1242784
cucuauuggugggcugaaa

SEQ ID NO: 1372611 - RNA, 19 nt, Artificial Sequence
  Description of Artificial Sequence: Synthetic oligonucleotide
  Antisense strand to SEQ ID NO: 1372610
uuucagcccaccaauagag

SEQ ID NO: 1372612 - RNA, 19 nt, Artificial Sequence
  Description of Artificial Sequence: Synthetic oligonucleotide
  Sense strand starting at position 2703 of SEQ ID NO: 1242784
ugguauccaccuuaaugua

SEQ ID NO: 1372613 - RNA, 19 nt, Artificial Sequence
  Description of Artificial Sequence: Synthetic oligonucleotide
  Antisense strand to SEQ ID NO: 1372612
uacauuaagguggauacca

SEQ ID NO: 1372614 - RNA, 19 nt, Artificial Sequence
  Description of Artificial Sequence: Synthetic oligonucleotide
  Sense strand starting at position 2713 of SEQ ID NO: 1242784
cuuaauguacugugugcau

SEQ ID NO: 1372615 - RNA, 19 nt, Artificial Sequence
  Description of Artificial Sequence: Synthetic oligonucleotide
  Antisense strand to SEQ ID NO: 1372614
augcacacaguacauuaag

SEQ ID NO: 1372616 - RNA, 19 nt, Artificial Sequence
  Description of Artificial Sequence: Synthetic oligonucleotide
  Sense strand starting at position 2736 of SEQ ID NO: 1242784
gcauguauauuugugcaaa

SEQ ID NO: 1372617 - RNA, 19 nt, Artificial Sequence
  Description of Artificial Sequence: Synthetic oligonucleotide
  Antisense strand to SEQ ID NO: 1372616
uuugcacaaauauacaugc

SEQ ID NO: 1372618 - RNA, 19 nt, Artificial Sequence
  Description of Artificial Sequence: Synthetic oligonucleotide
  Sense strand starting at position 2830 of SEQ ID NO: 1242784
uuaggaaucuacucaacga

SEQ ID NO: 1372619 - RNA, 19 nt, Artificial Sequence
  Description of Artificial Sequence: Synthetic oligonucleotide
  Antisense strand to SEQ ID NO: 1372618
ucguugaguagauuccuaa

SEQ ID NO: 1372620 - RNA, 19 nt, Artificial Sequence
  Description of Artificial Sequence: Synthetic oligonucleotide
  Sense strand starting at position 2895 of SEQ ID NO: 1242784
gcgugucugcaaggauaua

SEQ ID NO: 1372621 - RNA, 19 nt, Artificial Sequence
  Description of Artificial Sequence: Synthetic oligonucleotide
  Antisense strand to SEQ ID NO: 1372620
uauauccuugcagacacgc

SEQ ID NO: 1372622 - RNA, 19 nt, Artificial Sequence
  Description of Artificial Sequence: Synthetic oligonucleotide
  Sense strand starting at position 2917 of SEQ ID NO: 1242784
cguuuaauauuggcaacau

SEQ ID NO: 1372623 - RNA, 19 nt, Artificial Sequence
  Description of Artificial Sequence: Synthetic oligonucleotide
  Antisense strand to SEQ ID NO: 1372622
auguugccaauauuaaacg

SEQ ID NO: 1372624 - RNA, 19 nt, Artificial Sequence
  Description of Artificial Sequence: Synthetic oligonucleotide
  Sense strand starting at position 3076 of SEQ ID NO: 1242784
uuuauaucacucuaguguu

SEQ ID NO: 1372625 - RNA, 19 nt, Artificial Sequence
  Description of Artificial Sequence: Synthetic oligonucleotide
  Antisense strand to SEQ ID NO: 1372624
aacacuagagugauauaaa

SEQ ID NO: 1372626 - RNA, 19 nt, Artificial Sequence
  Description of Artificial Sequence: Synthetic oligonucleotide
  Sense strand starting at position 3137 of SEQ ID NO: 1242784
aauacuacuuagugaggau

SEQ ID NO: 1372627 - RNA, 19 nt, Artificial Sequence
  Description of Artificial Sequence: Synthetic oligonucleotide
  Antisense strand to SEQ ID NO: 1372626
auccucacuaaguaguauu

SEQ ID NO: 1372628 - RNA, 19 nt, Artificial Sequence
  Description of Artificial Sequence: Synthetic oligonucleotide
  Sense strand starting at position 3559 of SEQ ID NO: 1242784
aggucucuguuucuaagga

SEQ ID NO: 1372629 - RNA, 19 nt, Artificial Sequence
  Description of Artificial Sequence: Synthetic oligonucleotide
  Antisense strand to SEQ ID NO: 1372628
uccuuagaaacagagaccu

SEQ ID NO: 1372630 - RNA, 19 nt, Artificial Sequence
  Description of Artificial Sequence: Synthetic oligonucleotide
  Sense strand starting at position 3563 of SEQ ID NO: 1242784
cucuguuucuaaggagaaa

SEQ ID NO: 1372631 - RNA, 19 nt, Artificial Sequence
  Description of Artificial Sequence: Synthetic oligonucleotide
  Antisense strand to SEQ ID NO: 1372630
uuucuccuuagaaacagag

SEQ ID NO: 1372632 - RNA, 19 nt, Artificial Sequence
  Description of Artificial Sequence: Synthetic oligonucleotide
  Sense strand starting at position 3589 of SEQ ID NO: 1242784
gacaaagauuuauagaugu

SEQ ID NO: 1372633 - RNA, 19 nt, Artificial Sequence
  Description of Artificial Sequence: Synthetic oligonucleotide
  Antisense strand to SEQ ID NO: 1372632
acaucuauaaaucuuuguc

SEQ ID NO: 1372634 - RNA, 19 nt, Artificial Sequence
  Description of Artificial Sequence: Synthetic oligonucleotide
  Sense strand starting at position 3971 of SEQ ID NO: 1242784
auccaacuguaugauguua

SEQ ID NO: 1372635 - RNA, 19 nt, Artificial Sequence
  Description of Artificial Sequence: Synthetic oligonucleotide
  Antisense strand to SEQ ID NO: 1372634
uaacaucauacaguuggau

SEQ ID NO: 1372636 - RNA, 19 nt, Artificial Sequence
  Description of Artificial Sequence: Synthetic oligonucleotide
  Sense strand starting at position 96 of SEQ ID NO: 1242785
ggccacaucccuuaagaua

SEQ ID NO: 1372637 - RNA, 19 nt, Artificial Sequence
  Description of Artificial Sequence: Synthetic oligonucleotide
  Antisense strand to SEQ ID NO: 1372636
uaucuuaagggauguggcc

SEQ ID NO: 1372638 - RNA, 19 nt, Artificial Sequence
  Description of Artificial Sequence: Synthetic oligonucleotide
  Sense strand starting at position 628 of SEQ ID NO: 1242785
cauuucucuugguggauuu

SEQ ID NO: 1372639 - RNA, 19 nt, Artificial Sequence
  Description of Artificial Sequence: Synthetic oligonucleotide
  Antisense strand to SEQ ID NO: 1372638
aaauccaccaagagaaaug

SEQ ID NO: 1372640 - RNA, 19 nt, Artificial Sequence
  Description of Artificial Sequence: Synthetic oligonucleotide
  Sense strand starting at position 673 of SEQ ID NO: 1242785
acacaucuuuaguuuggaa

SEQ ID NO: 1372641 - RNA, 19 nt, Artificial Sequence
  Description of Artificial Sequence: Synthetic oligonucleotide
  Antisense strand to SEQ ID NO: 1372640
uuccaaacuaaagaugugu

SEQ ID NO: 1372642 - RNA, 19 nt, Artificial Sequence
  Description of Artificial Sequence: Synthetic oligonucleotide
  Sense strand starting at position 675 of SEQ ID NO: 1242785
acaucuuuaguuuggaauu

SEQ ID NO: 1372643 - RNA, 19 nt, Artificial Sequence
  Description of Artificial Sequence: Synthetic oligonucleotide
  Antisense strand to SEQ ID NO: 1372642
aauuccaaacuaaagaugu

SEQ ID NO: 1372644 - RNA, 19 nt, Artificial Sequence
  Description of Artificial Sequence: Synthetic oligonucleotide
  Sense strand starting at position 1094 of SEQ ID NO: 1242785
acagaauaguaugugccaa

SEQ ID NO: 1372645 - RNA, 19 nt, Artificial Sequence
  Description of Artificial Sequence: Synthetic oligonucleotide
  Antisense strand to SEQ ID NO: 1372644
uuggcacauacuauucugu

SEQ ID NO: 1372646 - RNA, 19 nt, Artificial Sequence
  Description of Artificial Sequence: Synthetic oligonucleotide
  Sense strand starting at position 1183 of SEQ ID NO: 1242785
gcagaugcaaaguaugacu

SEQ ID NO: 1372647 - RNA, 19 nt, Artificial Sequence
  Description of Artificial Sequence: Synthetic oligonucleotide
  Antisense strand to SEQ ID NO: 1372646
agucauacuuugcaucugc

SEQ ID NO: 1372648 - RNA, 19 nt, Artificial Sequence
  Description of Artificial Sequence: Synthetic oligonucleotide
  Sense strand starting at position 1235 of SEQ ID NO: 1242785
gugaaauacaggugaacgu

SEQ ID NO: 1372649 - RNA, 19 nt, Artificial Sequence
  Description of Artificial Sequence: Synthetic oligonucleotide
  Antisense strand to SEQ ID NO: 1372648
acguucaccuguauuucac

SEQ ID NO: 1372650 - RNA, 19 nt, Artificial Sequence
  Description of Artificial Sequence: Synthetic oligonucleotide
  Sense strand starting at position 1297 of SEQ ID NO: 1242785
cuaauuaaggaaggcgaua

SEQ ID NO: 1372651 - RNA, 19 nt, Artificial Sequence
  Description of Artificial Sequence: Synthetic oligonucleotide
  Antisense strand to SEQ ID NO: 1372650
uaucgccuuccuuaauuag

SEQ ID NO: 1372652 - RNA, 19 nt, Artificial Sequence
  Description of Artificial Sequence: Synthetic oligonucleotide
  Sense strand starting at position 1302 of SEQ ID NO: 1242785
uaaggaaggcgauauuagu

SEQ ID NO: 1372653 - RNA, 19 nt, Artificial Sequence
  Description of Artificial Sequence: Synthetic oligonucleotide
  Antisense strand to SEQ ID NO: 1372652
acuaauaucgccuuccuua

SEQ ID NO: 1372654 - RNA, 19 nt, Artificial Sequence
  Description of Artificial Sequence: Synthetic oligonucleotide
  Sense strand starting at position 1404 of SEQ ID NO: 1242785
gugguaagagaguaucaca

SEQ ID NO: 1372655 - RNA, 19 nt, Artificial Sequence
  Description of Artificial Sequence: Synthetic oligonucleotide
  Antisense strand to SEQ ID NO: 1372654
ugugauacucucuuaccac

SEQ ID NO: 1372656 - RNA, 19 nt, Artificial Sequence
  Description of Artificial Sequence: Synthetic oligonucleotide
  Sense strand starting at position 1417 of SEQ ID NO: 1242785
aucacagaauucgugaagu

SEQ ID NO: 1372657 - RNA, 19 nt, Artificial Sequence
  Description of Artificial Sequence: Synthetic oligonucleotide
  Antisense strand to SEQ ID NO: 1372656
acuucacgaauucugugau

SEQ ID NO: 1372658 - RNA, 19 nt, Artificial Sequence
  Description of Artificial Sequence: Synthetic oligonucleotide
  Sense strand starting at position 1427 of SEQ ID NO: 1242785
ucgugaaguggugaggaaa

SEQ ID NO: 1372659 - RNA, 19 nt, Artificial Sequence
  Description of Artificial Sequence: Synthetic oligonucleotide
  Antisense strand to SEQ ID NO: 1372658
uuuccucaccacuucacga

SEQ ID NO: 1372660 - RNA, 19 nt, Artificial Sequence
  Description of Artificial Sequence: Synthetic oligonucleotide
  Sense strand starting at position 1448 of SEQ ID NO: 1242785
gcuggcuuucgggaaacaa

SEQ ID NO: 1372661 - RNA, 19 nt, Artificial Sequence
  Description of Artificial Sequence: Synthetic oligonucleotide
  Antisense strand to SEQ ID NO: 1372660
uuguuucccgaaagccagc

SEQ ID NO: 1372662 - RNA, 19 nt, Artificial Sequence
  Description of Artificial Sequence: Synthetic oligonucleotide
  Sense strand starting at position 1514 of SEQ ID NO: 1242785
uggcaauggacuugagaau

SEQ ID NO: 1372663 - RNA, 19 nt, Artificial Sequence
  Description of Artificial Sequence: Synthetic oligonucleotide
  Antisense strand to SEQ ID NO: 1372662
auucucaaguccauugcca

SEQ ID NO: 1372664 - RNA, 19 nt, Artificial Sequence
  Description of Artificial Sequence: Synthetic oligonucleotide
  Sense strand starting at position 1538 of SEQ ID NO: 1242785
ugcgacugccaguucugua

SEQ ID NO: 1372665 - RNA, 19 nt, Artificial Sequence
  Description of Artificial Sequence: Synthetic oligonucleotide
  Antisense strand to SEQ ID NO: 1372664
uacagaacuggcagucgca

SEQ ID NO: 1372666 - RNA, 19 nt, Artificial Sequence
  Description of Artificial Sequence: Synthetic oligonucleotide
  Sense strand starting at position 1539 of SEQ ID NO: 1242785
gcgacugccaguucuguaa

SEQ ID NO: 1372667 - RNA, 19 nt, Artificial Sequence
  Description of Artificial Sequence: Synthetic oligonucleotide
  Antisense strand to SEQ ID NO: 1372666
uuacagaacuggcagucgc

SEQ ID NO: 1372668 - RNA, 19 nt, Artificial Sequence
  Description of Artificial Sequence: Synthetic oligonucleotide
  Sense strand starting at position 1543 of SEQ ID NO: 1242785
cugccaguucuguaaccaa

SEQ ID NO: 1372669 - RNA, 19 nt, Artificial Sequence
  Description of Artificial Sequence: Synthetic oligonucleotide
  Antisense strand to SEQ ID NO: 1372668
uugguuacagaacuggcag

SEQ ID NO: 1372670 - RNA, 19 nt, Artificial Sequence
  Description of Artificial Sequence: Synthetic oligonucleotide
  Sense strand starting at position 1609 of SEQ ID NO: 1242785
cugccaacuccaugaaaug

SEQ ID NO: 1372671 - RNA, 19 nt, Artificial Sequence
  Description of Artificial Sequence: Synthetic oligonucleotide
  Antisense strand to SEQ ID NO: 1372670
cauuucauggaguuggcag

SEQ ID NO: 1372672 - RNA, 19 nt, Artificial Sequence
  Description of Artificial Sequence: Synthetic oligonucleotide
  Sense strand starting at position 2232 of SEQ ID NO: 1242785
ugguuuauuccugagaagu

SEQ ID NO: 1372673 - RNA, 19 nt, Artificial Sequence
  Description of Artificial Sequence: Synthetic oligonucleotide
  Antisense strand to SEQ ID NO: 1372672
acuucucaggaauaaacca

SEQ ID NO: 1372674 - RNA, 19 nt, Artificial Sequence
  Description of Artificial Sequence: Synthetic oligonucleotide
  Sense strand starting at position 2530 of SEQ ID NO: 1242785
gguaccugagcucacgauu

SEQ ID NO: 1372675 - RNA, 19 nt, Artificial Sequence
  Description of Artificial Sequence: Synthetic oligonucleotide
  Antisense strand to SEQ ID NO: 1372674
aaucgugagcucagguacc

SEQ ID NO: 1372676 - RNA, 19 nt, Artificial Sequence
  Description of Artificial Sequence: Synthetic oligonucleotide
  Sense strand starting at position 2533 of SEQ ID NO: 1242785
accugagcucacgauugua

SEQ ID NO: 1372677 - RNA, 19 nt, Artificial Sequence
  Description of Artificial Sequence: Synthetic oligonucleotide
  Antisense strand to SEQ ID NO: 1372676
uacaaucgugagcucaggu

SEQ ID NO: 1372678 - RNA, 19 nt, Artificial Sequence
  Description of Artificial Sequence: Synthetic oligonucleotide
  Sense strand starting at position 2618 of SEQ ID NO: 1242785
gaaggaugcuuguuacuag

SEQ ID NO: 1372679 - RNA, 19 nt, Artificial Sequence
  Description of Artificial Sequence: Synthetic oligonucleotide
  Antisense strand to SEQ ID NO: 1372678
cuaguaacaagcauccuuc

SEQ ID NO: 1372680 - RNA, 19 nt, Artificial Sequence
  Description of Artificial Sequence: Synthetic oligonucleotide
  Sense strand starting at position 2621 of SEQ ID NO: 1242785
ggaugcuuguuacuagaac

SEQ ID NO: 1372681 - RNA, 19 nt, Artificial Sequence
  Description of Artificial Sequence: Synthetic oligonucleotide
  Antisense strand to SEQ ID NO: 1372680
guucuaguaacaagcaucc

SEQ ID NO: 1372682 - RNA, 19 nt, Artificial Sequence
  Description of Artificial Sequence: Synthetic oligonucleotide
  Sense strand starting at position 2649 of SEQ ID NO: 1242785
ggccuuuguccagaaggau

SEQ ID NO: 1372683 - RNA, 19 nt, Artificial Sequence
  Description of Artificial Sequence: Synthetic oligonucleotide
  Antisense strand to SEQ ID NO: 1372682
auccuucuggacaaaggcc

SEQ ID NO: 1372684 - RNA, 19 nt, Artificial Sequence
  Description of Artificial Sequence: Synthetic oligonucleotide
  Sense strand starting at position 2652 of SEQ ID NO: 1242785
cuuuguccagaaggauuga

SEQ ID NO: 1372685 - RNA, 19 nt, Artificial Sequence
  Description of Artificial Sequence: Synthetic oligonucleotide
  Antisense strand to SEQ ID NO: 1372684
ucaauccuucuggacaaag

SEQ ID NO: 1372686 - RNA, 19 nt, Artificial Sequence
  Description of Artificial Sequence: Synthetic oligonucleotide
  Sense strand starting at position 2770 of SEQ ID NO: 1242785
ugacauuacugagugccaa

SEQ ID NO: 1372687 - RNA, 19 nt, Artificial Sequence
  Description of Artificial Sequence: Synthetic oligonucleotide
  Antisense strand to SEQ ID NO: 1372686
uuggcacucaguaauguca

SEQ ID NO: 1372688 - RNA, 19 nt, Artificial Sequence
  Description of Artificial Sequence: Synthetic oligonucleotide
  Sense strand starting at position 2813 of SEQ ID NO: 1242785
cggucuagccacuaacaga

SEQ ID NO: 1372689 - RNA, 19 nt, Artificial Sequence
  Description of Artificial Sequence: Synthetic oligonucleotide
  Antisense strand to SEQ ID NO: 1372688
ucuguuaguggcuagaccg

SEQ ID NO: 1372690 - RNA, 19 nt, Artificial Sequence
  Description of Artificial Sequence: Synthetic oligonucleotide
  Sense strand starting at position 2844 of SEQ ID NO: 1242785
ggugucaucagagaaggcu

SEQ ID NO: 1372691 - RNA, 19 nt, Artificial Sequence
  Description of Artificial Sequence: Synthetic oligonucleotide
  Antisense strand to SEQ ID NO: 1372690
agccuucucugaugacacc

SEQ ID NO: 1372692 - RNA, 19 nt, Artificial Sequence
  Description of Artificial Sequence: Synthetic oligonucleotide
  Sense strand starting at position 2904 of SEQ ID NO: 1242785
acgacaagagcaugugauu

SEQ ID NO: 1372693 - RNA, 19 nt, Artificial Sequence
  Description of Artificial Sequence: Synthetic oligonucleotide
  Antisense strand to SEQ ID NO: 1372692
aaucacaugcucuugucgu

SEQ ID NO: 1372694 - RNA, 19 nt, Artificial Sequence
  Description of Artificial Sequence: Synthetic oligonucleotide
  Sense strand starting at position 2965 of SEQ ID NO: 1242785
guuaaaguugugcuuugca

SEQ ID NO: 1372695 - RNA, 19 nt, Artificial Sequence
  Description of Artificial Sequence: Synthetic oligonucleotide
  Antisense strand to SEQ ID NO: 1372694
ugcaaagcacaacuuuaac

SEQ ID NO: 1372696 - RNA, 19 nt, Artificial Sequence
  Description of Artificial Sequence: Synthetic oligonucleotide
  Sense strand starting at position 3168 of SEQ ID NO: 1242785
gccuuuccuguggaaacua

SEQ ID NO: 1372697 - RNA, 19 nt, Artificial Sequence
  Description of Artificial Sequence: Synthetic oligonucleotide
  Antisense strand to SEQ ID NO: 1372696
uaguuuccacaggaaaggc

SEQ ID NO: 1372698 - RNA, 19 nt, Artificial Sequence
  Description of Artificial Sequence: Synthetic oligonucleotide
  Sense strand starting at position 3192 of SEQ ID NO: 1242785
uggguauccuuucugaaac

SEQ ID NO: 1372699 - RNA, 19 nt, Artificial Sequence
  Description of Artificial Sequence: Synthetic oligonucleotide
  Antisense strand to SEQ ID NO: 1372698
guuucagaaaggauaccca

SEQ ID NO: 1372700 - RNA, 19 nt, Artificial Sequence
  Description of Artificial Sequence: Synthetic oligonucleotide
  Sense strand starting at position 3387 of SEQ ID NO: 1242785
accgcaucucuacaaagaa

SEQ ID NO: 1372701 - RNA, 19 nt, Artificial Sequence
  Description of Artificial Sequence: Synthetic oligonucleotide
  Antisense strand to SEQ ID NO: 1372700
uucuuuguagagaugcggu

SEQ ID NO: 1372702 - RNA, 19 nt, Artificial Sequence
  Description of Artificial Sequence: Synthetic oligonucleotide
  Sense strand starting at position 3597 of SEQ ID NO: 1242785
aaggucuuagucuaagugu

SEQ ID NO: 1372703 - RNA, 19 nt, Artificial Sequence
  Description of Artificial Sequence: Synthetic oligonucleotide
  Antisense strand to SEQ ID NO: 1372702
acacuuagacuaagaccuu

SEQ ID NO: 1372704 - RNA, 19 nt, Artificial Sequence
  Description of Artificial Sequence: Synthetic oligonucleotide
  Sense strand starting at position 3604 of SEQ ID NO: 1242785
uagucuaagugucuagaca

SEQ ID NO: 1372705 - RNA, 19 nt, Artificial Sequence
  Description of Artificial Sequence: Synthetic oligonucleotide
  Antisense strand to SEQ ID NO: 1372704
ugucuagacacuuagacua

SEQ ID NO: 1372706 - RNA, 19 nt, Artificial Sequence
  Description of Artificial Sequence: Synthetic oligonucleotide
  Sense strand starting at position 3605 of SEQ ID NO: 1242785
agucuaagugucuagacag

SEQ ID NO: 1372707 - RNA, 19 nt, Artificial Sequence
  Description of Artificial Sequence: Synthetic oligonucleotide
  Antisense strand to SEQ ID NO: 1372706
cugucuagacacuuagacu

SEQ ID NO: 1372708 - RNA, 19 nt, Artificial Sequence
  Description of Artificial Sequence: Synthetic oligonucleotide
  Sense strand starting at position 3703 of SEQ ID NO: 1242785
gucucauuugcagguugua

SEQ ID NO: 1372709 - RNA, 19 nt, Artificial Sequence
  Description of Artificial Sequence: Synthetic oligonucleotide
  Antisense strand to SEQ ID NO: 1372708
uacaaccugcaaaugagac

SEQ ID NO: 1372710 - RNA, 19 nt, Artificial Sequence
  Description of Artificial Sequence: Synthetic oligonucleotide
  Sense strand starting at position 3706 of SEQ ID NO: 1242785
ucauuugcagguuguaauu

SEQ ID NO: 1372711 - RNA, 19 nt, Artificial Sequence
  Description of Artificial Sequence: Synthetic oligonucleotide
  Antisense strand to SEQ ID NO: 1372710
aauuacaaccugcaaauga

SEQ ID NO: 1372712 - RNA, 19 nt, Artificial Sequence
  Description of Artificial Sequence: Synthetic oligonucleotide
  Sense strand starting at position 3716 of SEQ ID NO: 1242785
guuguaauugugccuuccu

SEQ ID NO: 1372713 - RNA, 19 nt, Artificial Sequence
  Description of Artificial Sequence: Synthetic oligonucleotide
  Antisense strand to SEQ ID NO: 1372712
aggaaggcacaauuacaac

SEQ ID NO: 1372714 - RNA, 19 nt, Artificial Sequence
  Description of Artificial Sequence: Synthetic oligonucleotide
  Sense strand starting at position 3960 of SEQ ID NO: 1242785
gcaagaucuugguccacua

SEQ ID NO: 1372715 - RNA, 19 nt, Artificial Sequence
  Description of Artificial Sequence: Synthetic oligonucleotide
  Antisense strand to SEQ ID NO: 1372714
uaguggaccaagaucuugc

SEQ ID NO: 1372716 - RNA, 19 nt, Artificial Sequence
  Description of Artificial Sequence: Synthetic oligonucleotide
  Sense strand starting at position 239 of SEQ ID NO: 1242786
ggucaacucugaucuucca

SEQ ID NO: 1372717 - RNA, 19 nt, Artificial Sequence
  Description of Artificial Sequence: Synthetic oligonucleotide
  Antisense strand to SEQ ID NO: 1372716
uggaagaucagaguugacc

SEQ ID NO: 1372718 - RNA, 19 nt, Artificial Sequence
  Description of Artificial Sequence: Synthetic oligonucleotide
  Sense strand starting at position 487 of SEQ ID NO: 1242786
cugcauguuuguugacuga

SEQ ID NO: 1372719 - RNA, 19 nt, Artificial Sequence
  Description of Artificial Sequence: Synthetic oligonucleotide
  Antisense strand to SEQ ID NO: 1372718
ucagucaacaaacaugcag

SEQ ID NO: 1372720 - RNA, 19 nt, Artificial Sequence
  Description of Artificial Sequence: Synthetic oligonucleotide
  Sense strand starting at position 576 of SEQ ID NO: 1242786
gaggguggguucucucuua

SEQ ID NO: 1372721 - RNA, 19 nt, Artificial Sequence
  Description of Artificial Sequence: Synthetic oligonucleotide
  Antisense strand to SEQ ID NO: 1372720
uaagagagaacccacccuc

SEQ ID NO: 1372722 - RNA, 19 nt, Artificial Sequence
  Description of Artificial Sequence: Synthetic oligonucleotide
  Sense strand starting at position 581 of SEQ ID NO: 1242786
uggguucucucuuaguuac

SEQ ID NO: 1372723 - RNA, 19 nt, Artificial Sequence
  Description of Artificial Sequence: Synthetic oligonucleotide
  Antisense strand to SEQ ID NO: 1372722
guaacuaagagagaaccca

SEQ ID NO: 1372724 - RNA, 19 nt, Artificial Sequence
  Description of Artificial Sequence: Synthetic oligonucleotide
  Sense strand starting at position 1176 of SEQ ID NO: 1242786
cagccuguaucuggagaga

SEQ ID NO: 1372725 - RNA, 19 nt, Artificial Sequence
  Description of Artificial Sequence: Synthetic oligonucleotide
  Antisense strand to SEQ ID NO: 1372724
ucucuccagauacaggcug

SEQ ID NO: 1372726 - RNA, 19 nt, Artificial Sequence
  Description of Artificial Sequence: Synthetic oligonucleotide
  Sense strand starting at position 2280 of SEQ ID NO: 1242786
ggcucugagaucuaagcau

SEQ ID NO: 1372727 - RNA, 19 nt, Artificial Sequence
  Description of Artificial Sequence: Synthetic oligonucleotide
  Antisense strand to SEQ ID NO: 1372726
augcuuagaucucagagcc

SEQ ID NO: 1372728 - RNA, 19 nt, Artificial Sequence
  Description of Artificial Sequence: Synthetic oligonucleotide
  Sense strand starting at position 2284 of SEQ ID NO: 1242786
cugagaucuaagcaugggu

SEQ ID NO: 1372729 - RNA, 19 nt, Artificial Sequence
  Description of Artificial Sequence: Synthetic oligonucleotide
  Antisense strand to SEQ ID NO: 1372728
acccaugcuuagaucucag

SEQ ID NO: 1372730 - RNA, 19 nt, Artificial Sequence
  Description of Artificial Sequence: Synthetic oligonucleotide
  Sense strand starting at position 2357 of SEQ ID NO: 1242786
cugcccuccugcugaaaua

SEQ ID NO: 1372731 - RNA, 19 nt, Artificial Sequence
  Description of Artificial Sequence: Synthetic oligonucleotide
  Antisense strand to SEQ ID NO: 1372730
uauuucagcaggagggcag

SEQ ID NO: 1372732 - RNA, 19 nt, Artificial Sequence
  Description of Artificial Sequence: Synthetic oligonucleotide
  Sense strand starting at position 2358 of SEQ ID NO: 1242786
ugcccuccugcugaaauaa

SEQ ID NO: 1372733 - RNA, 19 nt, Artificial Sequence
  Description of Artificial Sequence: Synthetic oligonucleotide
  Antisense strand to SEQ ID NO: 1372732
uuauuucagcaggagggca

SEQ ID NO: 1372734 - RNA, 19 nt, Artificial Sequence
  Description of Artificial Sequence: Synthetic oligonucleotide
  Sense strand starting at position 2368 of SEQ ID NO: 1242786
cugaaauaauccggcauca

SEQ ID NO: 1372735 - RNA, 19 nt, Artificial Sequence
  Description of Artificial Sequence: Synthetic oligonucleotide
  Antisense strand to SEQ ID NO: 1372734
ugaugccggauuauuucag

SEQ ID NO: 1372736 - RNA, 19 nt, Artificial Sequence
  Description of Artificial Sequence: Synthetic oligonucleotide
  Sense strand starting at position 2370 of SEQ ID NO: 1242786
gaaauaauccggcaucacg

SEQ ID NO: 1372737 - RNA, 19 nt, Artificial Sequence
  Description of Artificial Sequence: Synthetic oligonucleotide
  Antisense strand to SEQ ID NO: 1372736
cgugaugccggauuauuuc

SEQ ID NO: 1372738 - RNA, 19 nt, Artificial Sequence
  Description of Artificial Sequence: Synthetic oligonucleotide
  Sense strand starting at position 2536 of SEQ ID NO: 1242786
aggaauaguucccacccuu

SEQ ID NO: 1372739 - RNA, 19 nt, Artificial Sequence
  Description of Artificial Sequence: Synthetic oligonucleotide
  Antisense strand to SEQ ID NO: 1372738
aagggugggaacuauuccu

SEQ ID NO: 1372740 - RNA, 19 nt, Artificial Sequence
  Description of Artificial Sequence: Synthetic oligonucleotide
  Sense strand starting at position 2590 of SEQ ID NO: 1242786
gcaggaaaggccugcucua

SEQ ID NO: 1372741 - RNA, 19 nt, Artificial Sequence
  Description of Artificial Sequence: Synthetic oligonucleotide
  Antisense strand to SEQ ID NO: 1372740
uagagcaggccuuuccugc

SEQ ID NO: 1372742 - RNA, 19 nt, Artificial Sequence
  Description of Artificial Sequence: Synthetic oligonucleotide
  Sense strand starting at position 2603 of SEQ ID NO: 1242786
gcucuagagucagacuaug

SEQ ID NO: 1372743 - RNA, 19 nt, Artificial Sequence
  Description of Artificial Sequence: Synthetic oligonucleotide
  Antisense strand to SEQ ID NO: 1372742
cauagucugacucuagagc

SEQ ID NO: 1372744 - RNA, 19 nt, Artificial Sequence
  Description of Artificial Sequence: Synthetic oligonucleotide
  Sense strand starting at position 2609 of SEQ ID NO: 1242786
gagucagacuaugucauga

SEQ ID NO: 1372745 - RNA, 19 nt, Artificial Sequence
  Description of Artificial Sequence: Synthetic oligonucleotide
  Antisense strand to SEQ ID NO: 1372744
ucaugacauagucugacuc

SEQ ID NO: 1372746 - RNA, 19 nt, Artificial Sequence
  Description of Artificial Sequence: Synthetic oligonucleotide
  Sense strand starting at position 2611 of SEQ ID NO: 1242786
gucagacuaugucaugagu

SEQ ID NO: 1372747 - RNA, 19 nt, Artificial Sequence
  Description of Artificial Sequence: Synthetic oligonucleotide
  Antisense strand to SEQ ID NO: 1372746
acucaugacauagucugac

SEQ ID NO: 1372748 - RNA, 19 nt, Artificial Sequence
  Description of Artificial Sequence: Synthetic oligonucleotide
  Sense strand starting at position 2691 of SEQ ID NO: 1242786
gguuucucccucuguaaca

SEQ ID NO: 1372749 - RNA, 19 nt, Artificial Sequence
  Description of Artificial Sequence: Synthetic oligonucleotide
  Antisense strand to SEQ ID NO: 1372748
uguuacagagggagaaacc

SEQ ID NO: 1372750 - RNA, 19 nt, Artificial Sequence
  Description of Artificial Sequence: Synthetic oligonucleotide
  Sense strand starting at position 2709 of SEQ ID NO: 1242786
agucauaccugccacguaa

SEQ ID NO: 1372751 - RNA, 19 nt, Artificial Sequence
  Description of Artificial Sequence: Synthetic oligonucleotide
  Antisense strand to SEQ ID NO: 1372750
uuacguggcagguaugacu

SEQ ID NO: 1372752 - RNA, 19 nt, Artificial Sequence
  Description of Artificial Sequence: Synthetic oligonucleotide
  Sense strand starting at position 2792 of SEQ ID NO: 1242786
gcgggugcuuaauaaacgu

SEQ ID NO: 1372753 - RNA, 19 nt, Artificial Sequence
  Description of Artificial Sequence: Synthetic oligonucleotide
  Antisense strand to SEQ ID NO: 1372752
acguuuauuaagcacccgc

SEQ ID NO: 1372754 - RNA, 19 nt, Artificial Sequence
  Description of Artificial Sequence: Synthetic oligonucleotide
  Sense strand starting at position 2806 of SEQ ID NO: 1242786
aacguuagcucucagccau

SEQ ID NO: 1372755 - RNA, 19 nt, Artificial Sequence
  Description of Artificial Sequence: Synthetic oligonucleotide
  Antisense strand to SEQ ID NO: 1372754
auggcugagagcuaacguu

SEQ ID NO: 1372756 - RNA, 19 nt, Artificial Sequence
  Description of Artificial Sequence: Synthetic oligonucleotide
  Sense strand starting at position 3071 of SEQ ID NO: 1242786
cccagucuucucuggguga

SEQ ID NO: 1372757 - RNA, 19 nt, Artificial Sequence
  Description of Artificial Sequence: Synthetic oligonucleotide
  Antisense strand to SEQ ID NO: 1372756
ucacccagagaagacuggg

SEQ ID NO: 1372758 - RNA, 19 nt, Artificial Sequence
  Description of Artificial Sequence: Synthetic oligonucleotide
  Sense strand starting at position 3072 of SEQ ID NO: 1242786
ccagucuucucugggugaa

SEQ ID NO: 1372759 - RNA, 19 nt, Artificial Sequence
  Description of Artificial Sequence: Synthetic oligonucleotide
  Antisense strand to SEQ ID NO: 1372758
uucacccagagaagacugg

SEQ ID NO: 1372760 - RNA, 19 nt, Artificial Sequence
  Description of Artificial Sequence: Synthetic oligonucleotide
  Sense strand starting at position 3073 of SEQ ID NO: 1242786
cagucuucucugggugaaa

SEQ ID NO: 1372761 - RNA, 19 nt, Artificial Sequence
  Description of Artificial Sequence: Synthetic oligonucleotide
  Antisense strand to SEQ ID NO: 1372760
uuucacccagagaagacug

SEQ ID NO: 1372762 - RNA, 19 nt, Artificial Sequence
  Description of Artificial Sequence: Synthetic oligonucleotide
  Sense strand starting at position 3074 of SEQ ID NO: 1242786
agucuucucugggugaaag

SEQ ID NO: 1372763 - RNA, 19 nt, Artificial Sequence
  Description of Artificial Sequence: Synthetic oligonucleotide
  Antisense strand to SEQ ID NO: 1372762
cuuucacccagagaagacu

SEQ ID NO: 1372764 - RNA, 19 nt, Artificial Sequence
  Description of Artificial Sequence: Synthetic oligonucleotide
  Sense strand starting at position 3075 of SEQ ID NO: 1242786
gucuucucugggugaaaga

SEQ ID NO: 1372765 - RNA, 19 nt, Artificial Sequence
  Description of Artificial Sequence: Synthetic oligonucleotide
  Antisense strand to SEQ ID NO: 1372764
ucuuucacccagagaagac

SEQ ID NO: 1372766 - RNA, 19 nt, Artificial Sequence
  Description of Artificial Sequence: Synthetic oligonucleotide
  Sense strand starting at position 3119 of SEQ ID NO: 1242786
guuagcucucaucauucuu

SEQ ID NO: 1372767 - RNA, 19 nt, Artificial Sequence
  Description of Artificial Sequence: Synthetic oligonucleotide
  Antisense strand to SEQ ID NO: 1372766
aagaaugaugagagcuaac

SEQ ID NO: 1372768 - RNA, 19 nt, Artificial Sequence
  Description of Artificial Sequence: Synthetic oligonucleotide
  Sense strand starting at position 3223 of SEQ ID NO: 1242786
agcccugucguguggagaa

SEQ ID NO: 1372769 - RNA, 19 nt, Artificial Sequence
  Description of Artificial Sequence: Synthetic oligonucleotide
  Antisense strand to SEQ ID NO: 1372768
uucuccacacgacagggcu

SEQ ID NO: 1372770 - RNA, 19 nt, Artificial Sequence
  Description of Artificial Sequence: Synthetic oligonucleotide
  Sense strand starting at position 3225 of SEQ ID NO: 1242786
cccugucguguggagaagu

SEQ ID NO: 1372771 - RNA, 19 nt, Artificial Sequence
  Description of Artificial Sequence: Synthetic oligonucleotide
  Antisense strand to SEQ ID NO: 1372770
acuucuccacacgacaggg

SEQ ID NO: 1372772 - RNA, 19 nt, Artificial Sequence
  Description of Artificial Sequence: Synthetic oligonucleotide
  Sense strand starting at position 3226 of SEQ ID NO: 1242786
ccugucguguggagaaguu

SEQ ID NO: 1372773 - RNA, 19 nt, Artificial Sequence
  Description of Artificial Sequence: Synthetic oligonucleotide
  Antisense strand to SEQ ID NO: 1372772
aacuucuccacacgacagg

SEQ ID NO: 1372774 - RNA, 19 nt, Artificial Sequence
  Description of Artificial Sequence: Synthetic oligonucleotide
  Sense strand starting at position 3296 of SEQ ID NO: 1242786
gugcgaucuuggccaagag

SEQ ID NO: 1372775 - RNA, 19 nt, Artificial Sequence
  Description of Artificial Sequence: Synthetic oligonucleotide
  Antisense strand to SEQ ID NO: 1372774
cucuuggccaagaucgcac

SEQ ID NO: 1372776 - RNA, 19 nt, Artificial Sequence
  Description of Artificial Sequence: Synthetic oligonucleotide
  Sense strand starting at position 3312 of SEQ ID NO: 1242786
gagggcuaaucucucugaa

SEQ ID NO: 1372777 - RNA, 19 nt, Artificial Sequence
  Description of Artificial Sequence: Synthetic oligonucleotide
  Antisense strand to SEQ ID NO: 1372776
uucagagagauuagcccuc

SEQ ID NO: 1372778 - RNA, 19 nt, Artificial Sequence
  Description of Artificial Sequence: Synthetic oligonucleotide
  Sense strand starting at position 3315 of SEQ ID NO: 1242786
ggcuaaucucucugaaccu

SEQ ID NO: 1372779 - RNA, 19 nt, Artificial Sequence
  Description of Artificial Sequence: Synthetic oligonucleotide
  Antisense strand to SEQ ID NO: 1372778
agguucagagagauuagcc

SEQ ID NO: 1372780 - RNA, 19 nt, Artificial Sequence
  Description of Artificial Sequence: Synthetic oligonucleotide
  Sense strand starting at position 161 of SEQ ID NO: 1242787
cugggauuaccgugaguca

SEQ ID NO: 1372781 - RNA, 19 nt, Artificial Sequence
  Description of Artificial Sequence: Synthetic oligonucleotide
  Antisense strand to SEQ ID NO: 1372780
ugacucacgguaaucccag

SEQ ID NO: 1372782 - RNA, 19 nt, Artificial Sequence
  Description of Artificial Sequence: Synthetic oligonucleotide
  Sense strand starting at position 162 of SEQ ID NO: 1242787
ugggauuaccgugagucau

SEQ ID NO: 1372783 - RNA, 19 nt, Artificial Sequence
  Description of Artificial Sequence: Synthetic oligonucleotide
  Antisense strand to SEQ ID NO: 1372782
augacucacgguaauccca

SEQ ID NO: 1372784 - RNA, 19 nt, Artificial Sequence
  Description of Artificial Sequence: Synthetic oligonucleotide
  Sense strand starting at position 166 of SEQ ID NO: 1242787
auuaccgugagucauggua

SEQ ID NO: 1372785 - RNA, 19 nt, Artificial Sequence
  Description of Artificial Sequence: Synthetic oligonucleotide
  Antisense strand to SEQ ID NO: 1372784
uaccaugacucacgguaau

SEQ ID NO: 1372786 - RNA, 19 nt, Artificial Sequence
  Description of Artificial Sequence: Synthetic oligonucleotide
  Sense strand starting at position 168 of SEQ ID NO: 1242787
uaccgugagucaugguauc

SEQ ID NO: 1372787 - RNA, 19 nt, Artificial Sequence
  Description of Artificial Sequence: Synthetic oligonucleotide
  Antisense strand to SEQ ID NO: 1372786
gauaccaugacucacggua

SEQ ID NO: 1372788 - RNA, 19 nt, Artificial Sequence
  Description of Artificial Sequence: Synthetic oligonucleotide
  Sense strand starting at position 281 of SEQ ID NO: 1242787
ggacucaucugucaccaua

SEQ ID NO: 1372789 - RNA, 19 nt, Artificial Sequence
  Description of Artificial Sequence: Synthetic oligonucleotide
  Antisense strand to SEQ ID NO: 1372788
uauggugacagaugagucc

SEQ ID NO: 1372790 - RNA, 19 nt, Artificial Sequence
  Description of Artificial Sequence: Synthetic oligonucleotide
  Sense strand starting at position 471 of SEQ ID NO: 1242787
uguguucuucaaugucguu

SEQ ID NO: 1372791 - RNA, 19 nt, Artificial Sequence
  Description of Artificial Sequence: Synthetic oligonucleotide
  Antisense strand to SEQ ID NO: 1372790
aacgacauugaagaacaca

SEQ ID NO: 1372792 - RNA, 19 nt, Artificial Sequence
  Description of Artificial Sequence: Synthetic oligonucleotide
  Sense strand starting at position 498 of SEQ ID NO: 1242787
cuccaaugcucuuguuugu

SEQ ID NO: 1372793 - RNA, 19 nt, Artificial Sequence
  Description of Artificial Sequence: Synthetic oligonucleotide
  Antisense strand to SEQ ID NO: 1372792
acaaacaagagcauuggag

SEQ ID NO: 1372794 - RNA, 19 nt, Artificial Sequence
  Description of Artificial Sequence: Synthetic oligonucleotide
  Sense strand starting at position 584 of SEQ ID NO: 1242787
ggaugucuccagcagcuua

SEQ ID NO: 1372795 - RNA, 19 nt, Artificial Sequence
  Description of Artificial Sequence: Synthetic oligonucleotide
  Antisense strand to SEQ ID NO: 1372794
uaagcugcuggagacaucc

SEQ ID NO: 1372796 - RNA, 19 nt, Artificial Sequence
  Description of Artificial Sequence: Synthetic oligonucleotide
  Sense strand starting at position 723 of SEQ ID NO: 1242787
ccaguuaucggaggacacu

SEQ ID NO: 1372797 - RNA, 19 nt, Artificial Sequence
  Description of Artificial Sequence: Synthetic oligonucleotide
  Antisense strand to SEQ ID NO: 1372796
aguguccuccgauaacugg

SEQ ID NO: 1372798 - RNA, 19 nt, Artificial Sequence
  Description of Artificial Sequence: Synthetic oligonucleotide
  Sense strand starting at position 916 of SEQ ID NO: 1242787
ggcagcaucaccgagauaa

SEQ ID NO: 1372799 - RNA, 19 nt, Artificial Sequence
  Description of Artificial Sequence: Synthetic oligonucleotide
  Antisense strand to SEQ ID NO: 1372798
uuaucucggugaugcugcc

SEQ ID NO: 1372800 - RNA, 19 nt, Artificial Sequence
  Description of Artificial Sequence: Synthetic oligonucleotide
  Sense strand starting at position 1938 of SEQ ID NO: 1242787
caggauuugcuguggaguc

SEQ ID NO: 1372801 - RNA, 19 nt, Artificial Sequence
  Description of Artificial Sequence: Synthetic oligonucleotide
  Antisense strand to SEQ ID NO: 1372800
gacuccacagcaaauccug

SEQ ID NO: 1372802 - RNA, 19 nt, Artificial Sequence
  Description of Artificial Sequence: Synthetic oligonucleotide
  Sense strand starting at position 1952 of SEQ ID NO: 1242787
gagucuuugcgguguaccu

SEQ ID NO: 1372803 - RNA, 19 nt, Artificial Sequence
  Description of Artificial Sequence: Synthetic oligonucleotide
  Antisense strand to SEQ ID NO: 1372802
agguacaccgcaaagacuc

SEQ ID NO: 1372804 - RNA, 19 nt, Artificial Sequence
  Description of Artificial Sequence: Synthetic oligonucleotide
  Sense strand starting at position 1953 of SEQ ID NO: 1242787
agucuuugcgguguaccua

SEQ ID NO: 1372805 - RNA, 19 nt, Artificial Sequence
  Description of Artificial Sequence: Synthetic oligonucleotide
  Antisense strand to SEQ ID NO: 1372804
uagguacaccgcaaagacu

SEQ ID NO: 1372806 - RNA, 19 nt, Artificial Sequence
  Description of Artificial Sequence: Synthetic oligonucleotide
  Sense strand starting at position 2011 of SEQ ID NO: 1242787
gggagaaauuagcuccauu

SEQ ID NO: 1372807 - RNA, 19 nt, Artificial Sequence
  Description of Artificial Sequence: Synthetic oligonucleotide
  Antisense strand to SEQ ID NO: 1372806
aauggagcuaauuucuccc

SEQ ID NO: 1372808 - RNA, 19 nt, Artificial Sequence
  Description of Artificial Sequence: Synthetic oligonucleotide
  Sense strand starting at position 2081 of SEQ ID NO: 1242787
ggucacaccagugguaaga

SEQ ID NO: 1372809 - RNA, 19 nt, Artificial Sequence
  Description of Artificial Sequence: Synthetic oligonucleotide
  Antisense strand to SEQ ID NO: 1372808
ucuuaccacuggugugacc

SEQ ID NO: 1372810 - RNA, 19 nt, Artificial Sequence
  Description of Artificial Sequence: Synthetic oligonucleotide
  Sense strand starting at position 2209 of SEQ ID NO: 1242787
ucaggucuguaaucccgaa

SEQ ID NO: 1372811 - RNA, 19 nt, Artificial Sequence
  Description of Artificial Sequence: Synthetic oligonucleotide
  Antisense strand to SEQ ID NO: 1372810
uucgggauuacagaccuga

SEQ ID NO: 1372812 - RNA, 19 nt, Artificial Sequence
  Description of Artificial Sequence: Synthetic oligonucleotide
  Sense strand starting at position 2213 of SEQ ID NO: 1242787
gucuguaaucccgaacuuu

SEQ ID NO: 1372813 - RNA, 19 nt, Artificial Sequence
  Description of Artificial Sequence: Synthetic oligonucleotide
  Antisense strand to SEQ ID NO: 1372812
aaaguucgggauuacagac

SEQ ID NO: 1372814 - RNA, 19 nt, Artificial Sequence
  Description of Artificial Sequence: Synthetic oligonucleotide
  Sense strand starting at position 2221 of SEQ ID NO: 1242787
ucccgaacuuugggagacu

SEQ ID NO: 1372815 - RNA, 19 nt, Artificial Sequence
  Description of Artificial Sequence: Synthetic oligonucleotide
  Antisense strand to SEQ ID NO: 1372814
agucucccaaaguucggga

SEQ ID NO: 1372816 - RNA, 19 nt, Artificial Sequence
  Description of Artificial Sequence: Synthetic oligonucleotide
  Sense strand starting at position 2277 of SEQ ID NO: 1242787
ugcaguuaucugugaccgu

SEQ ID NO: 1372817 - RNA, 19 nt, Artificial Sequence
  Description of Artificial Sequence: Synthetic oligonucleotide
  Antisense strand to SEQ ID NO: 1372816
acggucacagauaacugca

SEQ ID NO: 1372818 - RNA, 19 nt, Artificial Sequence
  Description of Artificial Sequence: Synthetic oligonucleotide
  Sense strand starting at position 2278 of SEQ ID NO: 1242787
gcaguuaucugugaccgug

SEQ ID NO: 1372819 - RNA, 19 nt, Artificial Sequence
  Description of Artificial Sequence: Synthetic oligonucleotide
  Antisense strand to SEQ ID NO: 1372818
cacggucacagauaacugc

SEQ ID NO: 1372820 - RNA, 19 nt, Artificial Sequence
  Description of Artificial Sequence: Synthetic oligonucleotide
  Sense strand starting at position 2584 of SEQ ID NO: 1242787
gcuggucucgaacgagacu

SEQ ID NO: 1372821 - RNA, 19 nt, Artificial Sequence
  Description of Artificial Sequence: Synthetic oligonucleotide
  Antisense strand to SEQ ID NO: 1372820
agucucguucgagaccagc

SEQ ID NO: 1372822 - RNA, 19 nt, Artificial Sequence
  Description of Artificial Sequence: Synthetic oligonucleotide
  Sense strand starting at position 2666 of SEQ ID NO: 1242787
agcugauucuugcauuucu

SEQ ID NO: 1372823 - RNA, 19 nt, Artificial Sequence
  Description of Artificial Sequence: Synthetic oligonucleotide
  Antisense strand to SEQ ID NO: 1372822
agaaaugcaagaaucagcu

SEQ ID NO: 1372824 - RNA, 19 nt, Artificial Sequence
  Description of Artificial Sequence: Synthetic oligonucleotide
  Sense strand starting at position 2675 of SEQ ID NO: 1242787
uugcauuucuaagguuuga

SEQ ID NO: 1372825 - RNA, 19 nt, Artificial Sequence
  Description of Artificial Sequence: Synthetic oligonucleotide
  Antisense strand to SEQ ID NO: 1372824
ucaaaccuuagaaaugcaa

SEQ ID NO: 1372826 - RNA, 19 nt, Artificial Sequence
  Description of Artificial Sequence: Synthetic oligonucleotide
  Sense strand starting at position 2711 of SEQ ID NO: 1242787
uuaucuuaguucgggcaga

SEQ ID NO: 1372827 - RNA, 19 nt, Artificial Sequence
  Description of Artificial Sequence: Synthetic oligonucleotide
  Antisense strand to SEQ ID NO: 1372826
ucugcccgaacuaagauaa

SEQ ID NO: 1372828 - RNA, 19 nt, Artificial Sequence
  Description of Artificial Sequence: Synthetic oligonucleotide
  Sense strand starting at position 2712 of SEQ ID NO: 1242787
uaucuuaguucgggcagaa

SEQ ID NO: 1372829 - RNA, 19 nt, Artificial Sequence
  Description of Artificial Sequence: Synthetic oligonucleotide
  Antisense strand to SEQ ID NO: 1372828
uucugcccgaacuaagaua

SEQ ID NO: 1372830 - RNA, 19 nt, Artificial Sequence
  Description of Artificial Sequence: Synthetic oligonucleotide
  Sense strand starting at position 2725 of SEQ ID NO: 1242787
gcagaaguguauuuacugu

SEQ ID NO: 1372831 - RNA, 19 nt, Artificial Sequence
  Description of Artificial Sequence: Synthetic oligonucleotide
  Antisense strand to SEQ ID NO: 1372830
acaguaaauacacuucugc

SEQ ID NO: 1372832 - RNA, 19 nt, Artificial Sequence
  Description of Artificial Sequence: Synthetic oligonucleotide
  Sense strand starting at position 2729 of SEQ ID NO: 1242787
aaguguauuuacugugaac

SEQ ID NO: 1372833 - RNA, 19 nt, Artificial Sequence
  Description of Artificial Sequence: Synthetic oligonucleotide
  Antisense strand to SEQ ID NO: 1372832
guucacaguaaauacacuu

SEQ ID NO: 1372834 - RNA, 19 nt, Artificial Sequence
  Description of Artificial Sequence: Synthetic oligonucleotide
  Sense strand starting at position 2732 of SEQ ID NO: 1242787
uguauuuacugugaaccaa

SEQ ID NO: 1372835 - RNA, 19 nt, Artificial Sequence
  Description of Artificial Sequence: Synthetic oligonucleotide
  Antisense strand to SEQ ID NO: 1372834
uugguucacaguaaauaca

SEQ ID NO: 1372836 - RNA, 19 nt, Artificial Sequence
  Description of Artificial Sequence: Synthetic oligonucleotide
  Sense strand starting at position 2746 of SEQ ID NO: 1242787
accaaagucacuugugguu

SEQ ID NO: 1372837 - RNA, 19 nt, Artificial Sequence
  Description of Artificial Sequence: Synthetic oligonucleotide
  Antisense strand to SEQ ID NO: 1372836
aaccacaagugacuuuggu

SEQ ID NO: 1372838 - RNA, 19 nt, Artificial Sequence
  Description of Artificial Sequence: Synthetic oligonucleotide
  Sense strand starting at position 2748 of SEQ ID NO: 1242787
caaagucacuugugguuua

SEQ ID NO: 1372839 - RNA, 19 nt, Artificial Sequence
  Description of Artificial Sequence: Synthetic oligonucleotide
  Antisense strand to SEQ ID NO: 1372838
uaaaccacaagugacuuug

SEQ ID NO: 1372840 - RNA, 19 nt, Artificial Sequence
  Description of Artificial Sequence: Synthetic oligonucleotide
  Sense strand starting at position 2749 of SEQ ID NO: 1242787
aaagucacuugugguuuau

SEQ ID NO: 1372841 - RNA, 19 nt, Artificial Sequence
  Description of Artificial Sequence: Synthetic oligonucleotide
  Antisense strand to SEQ ID NO: 1372840
auaaaccacaagugacuuu

SEQ ID NO: 1372842 - RNA, 19 nt, Artificial Sequence
  Description of Artificial Sequence: Synthetic oligonucleotide
  Sense strand starting at position 2753 of SEQ ID NO: 1242787
ucacuugugguuuauugaa

SEQ ID NO: 1372843 - RNA, 19 nt, Artificial Sequence
  Description of Artificial Sequence: Synthetic oligonucleotide
  Antisense strand to SEQ ID NO: 1372842
uucaauaaaccacaaguga

SEQ ID NO: 1372844 - RNA, 19 nt, Artificial Sequence
  Description of Artificial Sequence: Synthetic oligonucleotide
  Sense strand starting at position 3328 of SEQ ID NO: 1242787
ucgagaucgugccauugaa

SEQ ID NO: 1372845 - RNA, 19 nt, Artificial Sequence
  Description of Artificial Sequence: Synthetic oligonucleotide
  Antisense strand to SEQ ID NO: 1372844
uucaauggcacgaucucga

SEQ ID NO: 1372846 - RNA, 19 nt, Artificial Sequence
  Description of Artificial Sequence: Synthetic oligonucleotide
  Sense strand starting at position 3847 of SEQ ID NO: 1242787
uuggaauuguccuauacuc

SEQ ID NO: 1372847 - RNA, 19 nt, Artificial Sequence
  Description of Artificial Sequence: Synthetic oligonucleotide
  Antisense strand to SEQ ID NO: 1372846
gaguauaggacaauuccaa

SEQ ID NO: 1372848 - RNA, 19 nt, Artificial Sequence
  Description of Artificial Sequence: Synthetic oligonucleotide
  Sense strand starting at position 3849 of SEQ ID NO: 1242787
ggaauuguccuauacucug

SEQ ID NO: 1372849 - RNA, 19 nt, Artificial Sequence
  Description of Artificial Sequence: Synthetic oligonucleotide
  Antisense strand to SEQ ID NO: 1372848
cagaguauaggacaauucc

SEQ ID NO: 1372850 - RNA, 19 nt, Artificial Sequence
  Description of Artificial Sequence: Synthetic oligonucleotide
  Sense strand starting at position 3854 of SEQ ID NO: 1242787
uguccuauacucuguguga

SEQ ID NO: 1372851 - RNA, 19 nt, Artificial Sequence
  Description of Artificial Sequence: Synthetic oligonucleotide
  Antisense strand to SEQ ID NO: 1372850
ucacacagaguauaggaca

SEQ ID NO: 1372852 - RNA, 19 nt, Artificial Sequence
  Description of Artificial Sequence: Synthetic oligonucleotide
  Sense strand starting at position 3855 of SEQ ID NO: 1242787
guccuauacucugugugaa

SEQ ID NO: 1372853 - RNA, 19 nt, Artificial Sequence
  Description of Artificial Sequence: Synthetic oligonucleotide
  Antisense strand to SEQ ID NO: 1372852
uucacacagaguauaggac

SEQ ID NO: 1372854 - RNA, 19 nt, Artificial Sequence
  Description of Artificial Sequence: Synthetic oligonucleotide
  Sense strand starting at position 3856 of SEQ ID NO: 1242787
uccuauacucugugugaag

SEQ ID NO: 1372855 - RNA, 19 nt, Artificial Sequence
  Description of Artificial Sequence: Synthetic oligonucleotide
  Antisense strand to SEQ ID NO: 1372854
cuucacacagaguauagga

SEQ ID NO: 1372856 - RNA, 19 nt, Artificial Sequence
  Description of Artificial Sequence: Synthetic oligonucleotide
  Sense strand starting at position 3858 of SEQ ID NO: 1242787
cuauacucugugugaagua

SEQ ID NO: 1372857 - RNA, 19 nt, Artificial Sequence
  Description of Artificial Sequence: Synthetic oligonucleotide
  Antisense strand to SEQ ID NO: 1372856
uacuucacacagaguauag

SEQ ID NO: 1372858 - RNA, 19 nt, Artificial Sequence
  Description of Artificial Sequence: Synthetic oligonucleotide
  Sense strand starting at position 3859 of SEQ ID NO: 1242787
uauacucugugugaaguaa

SEQ ID NO: 1372859 - RNA, 19 nt, Artificial Sequence
  Description of Artificial Sequence: Synthetic oligonucleotide
  Antisense strand to SEQ ID NO: 1372858
uuacuucacacagaguaua

SEQ ID NO: 1372860 - RNA, 19 nt, Artificial Sequence
  Description of Artificial Sequence: Synthetic oligonucleotide
  Sense strand starting at position 161 of SEQ ID NO: 1242788
cugggauuaccgugaguca

SEQ ID NO: 1372861 - RNA, 19 nt, Artificial Sequence
  Description of Artificial Sequence: Synthetic oligonucleotide
  Antisense strand to SEQ ID NO: 1372860
ugacucacgguaaucccag

SEQ ID NO: 1372862 - RNA, 19 nt, Artificial Sequence
  Description of Artificial Sequence: Synthetic oligonucleotide
  Sense strand starting at position 162 of SEQ ID NO: 1242788
ugggauuaccgugagucau

SEQ ID NO: 1372863 - RNA, 19 nt, Artificial Sequence
  Description of Artificial Sequence: Synthetic oligonucleotide
  Antisense strand to SEQ ID NO: 1372862
augacucacgguaauccca

SEQ ID NO: 1372864 - RNA, 19 nt, Artificial Sequence
  Description of Artificial Sequence: Synthetic oligonucleotide
  Sense strand starting at position 166 of SEQ ID NO: 1242788
auuaccgugagucauggua

SEQ ID NO: 1372865 - RNA, 19 nt, Artificial Sequence
  Description of Artificial Sequence: Synthetic oligonucleotide
  Antisense strand to SEQ ID NO: 1372864
uaccaugacucacgguaau

SEQ ID NO: 1372866 - RNA, 19 nt, Artificial Sequence
  Description of Artificial Sequence: Synthetic oligonucleotide
  Sense strand starting at position 168 of SEQ ID NO: 1242788
uaccgugagucaugguauc

SEQ ID NO: 1372867 - RNA, 19 nt, Artificial Sequence
  Description of Artificial Sequence: Synthetic oligonucleotide
  Antisense strand to SEQ ID NO: 1372866
gauaccaugacucacggua

SEQ ID NO: 1372868 - RNA, 19 nt, Artificial Sequence
  Description of Artificial Sequence: Synthetic oligonucleotide
  Sense strand starting at position 281 of SEQ ID NO: 1242788
ggacucaucugucaccaua

SEQ ID NO: 1372869 - RNA, 19 nt, Artificial Sequence
  Description of Artificial Sequence: Synthetic oligonucleotide
  Antisense strand to SEQ ID NO: 1372868
uauggugacagaugagucc

SEQ ID NO: 1372870 - RNA, 19 nt, Artificial Sequence
  Description of Artificial Sequence: Synthetic oligonucleotide
  Sense strand starting at position 471 of SEQ ID NO: 1242788
uguguucuucaaugucguu

SEQ ID NO: 1372871 - RNA, 19 nt, Artificial Sequence
  Description of Artificial Sequence: Synthetic oligonucleotide
  Antisense strand to SEQ ID NO: 1372870
aacgacauugaagaacaca

SEQ ID NO: 1372872 - RNA, 19 nt, Artificial Sequence
  Description of Artificial Sequence: Synthetic oligonucleotide
  Sense strand starting at position 498 of SEQ ID NO: 1242788
cuccaaugcucuuguuugu

SEQ ID NO: 1372873 - RNA, 19 nt, Artificial Sequence
  Description of Artificial Sequence: Synthetic oligonucleotide
  Antisense strand to SEQ ID NO: 1372872
acaaacaagagcauuggag

SEQ ID NO: 1372874 - RNA, 19 nt, Artificial Sequence
  Description of Artificial Sequence: Synthetic oligonucleotide
  Sense strand starting at position 584 of SEQ ID NO: 1242788
ggaugucuccagcagcuua

SEQ ID NO: 1372875 - RNA, 19 nt, Artificial Sequence
  Description of Artificial Sequence: Synthetic oligonucleotide
  Antisense strand to SEQ ID NO: 1372874
uaagcugcuggagacaucc

SEQ ID NO: 1372876 - RNA, 19 nt, Artificial Sequence
  Description of Artificial Sequence: Synthetic oligonucleotide
  Sense strand starting at position 723 of SEQ ID NO: 1242788
ccaguuaucggaggacacu

SEQ ID NO: 1372877 - RNA, 19 nt, Artificial Sequence
  Description of Artificial Sequence: Synthetic oligonucleotide
  Antisense strand to SEQ ID NO: 1372876
aguguccuccgauaacugg

SEQ ID NO: 1372878 - RNA, 19 nt, Artificial Sequence
  Description of Artificial Sequence: Synthetic oligonucleotide
  Sense strand starting at position 916 of SEQ ID NO: 1242788
ggcagcaucaccgagauaa

SEQ ID NO: 1372879 - RNA, 19 nt, Artificial Sequence
  Description of Artificial Sequence: Synthetic oligonucleotide
  Antisense strand to SEQ ID NO: 1372878
uuaucucggugaugcugcc

SEQ ID NO: 1372880 - RNA, 19 nt, Artificial Sequence
  Description of Artificial Sequence: Synthetic oligonucleotide
  Sense strand starting at position 1938 of SEQ ID NO: 1242788
caggauuugcuguggaguc

SEQ ID NO: 1372881 - RNA, 19 nt, Artificial Sequence
  Description of Artificial Sequence: Synthetic oligonucleotide
  Antisense strand to SEQ ID NO: 1372880
gacuccacagcaaauccug

SEQ ID NO: 1372882 - RNA, 19 nt, Artificial Sequence
  Description of Artificial Sequence: Synthetic oligonucleotide
  Sense strand starting at position 1952 of SEQ ID NO: 1242788
gagucuuugcgguguaccu

SEQ ID NO: 1372883 - RNA, 19 nt, Artificial Sequence
  Description of Artificial Sequence: Synthetic oligonucleotide
  Antisense strand to SEQ ID NO: 1372882
agguacaccgcaaagacuc

SEQ ID NO: 1372884 - RNA, 19 nt, Artificial Sequence
  Description of Artificial Sequence: Synthetic oligonucleotide
  Sense strand starting at position 1953 of SEQ ID NO: 1242788
agucuuugcgguguaccua

SEQ ID NO: 1372885 - RNA, 19 nt, Artificial Sequence
  Description of Artificial Sequence: Synthetic oligonucleotide
  Antisense strand to SEQ ID NO: 1372884
uagguacaccgcaaagacu

SEQ ID NO: 1372886 - RNA, 19 nt, Artificial Sequence
  Description of Artificial Sequence: Synthetic oligonucleotide
  Sense strand starting at position 2011 of SEQ ID NO: 1242788
gggagaaauuagcuccauu

SEQ ID NO: 1372887 - RNA, 19 nt, Artificial Sequence
  Description of Artificial Sequence: Synthetic oligonucleotide
  Antisense strand to SEQ ID NO: 1372886
aauggagcuaauuucuccc

SEQ ID NO: 1372888 - RNA, 19 nt, Artificial Sequence
  Description of Artificial Sequence: Synthetic oligonucleotide
  Sense strand starting at position 2081 of SEQ ID NO: 1242788
ggucacaccagugguaaga

SEQ ID NO: 1372889 - RNA, 19 nt, Artificial Sequence
  Description of Artificial Sequence: Synthetic oligonucleotide
  Antisense strand to SEQ ID NO: 1372888
ucuuaccacuggugugacc

SEQ ID NO: 1372890 - RNA, 19 nt, Artificial Sequence
  Description of Artificial Sequence: Synthetic oligonucleotide
  Sense strand starting at position 2209 of SEQ ID NO: 1242788
ucaggucuguaaucccgaa

SEQ ID NO: 1372891 - RNA, 19 nt, Artificial Sequence
  Description of Artificial Sequence: Synthetic oligonucleotide
  Antisense strand to SEQ ID NO: 1372890
uucgggauuacagaccuga

SEQ ID NO: 1372892 - RNA, 19 nt, Artificial Sequence
  Description of Artificial Sequence: Synthetic oligonucleotide
  Sense strand starting at position 2213 of SEQ ID NO: 1242788
gucuguaaucccgaacuuu

SEQ ID NO: 1372893 - RNA, 19 nt, Artificial Sequence
  Description of Artificial Sequence: Synthetic oligonucleotide
  Antisense strand to SEQ ID NO: 1372892
aaaguucgggauuacagac

SEQ ID NO: 1372894 - RNA, 19 nt, Artificial Sequence
  Description of Artificial Sequence: Synthetic oligonucleotide
  Sense strand starting at position 2221 of SEQ ID NO: 1242788
ucccgaacuuugggagacu

SEQ ID NO: 1372895 - RNA, 19 nt, Artificial Sequence
  Description of Artificial Sequence: Synthetic oligonucleotide
  Antisense strand to SEQ ID NO: 1372894
agucucccaaaguucggga

SEQ ID NO: 1372896 - RNA, 19 nt, Artificial Sequence
  Description of Artificial Sequence: Synthetic oligonucleotide
  Sense strand starting at position 2277 of SEQ ID NO: 1242788
ugcaguuaucugugaccgu

SEQ ID NO: 1372897 - RNA, 19 nt, Artificial Sequence
  Description of Artificial Sequence: Synthetic oligonucleotide
  Antisense strand to SEQ ID NO: 1372896
acggucacagauaacugca

SEQ ID NO: 1372898 - RNA, 19 nt, Artificial Sequence
  Description of Artificial Sequence: Synthetic oligonucleotide
  Sense strand starting at position 2278 of SEQ ID NO: 1242788
gcaguuaucugugaccgug

SEQ ID NO: 1372899 - RNA, 19 nt, Artificial Sequence
  Description of Artificial Sequence: Synthetic oligonucleotide
  Antisense strand to SEQ ID NO: 1372898
cacggucacagauaacugc

SEQ ID NO: 1372900 - RNA, 19 nt, Artificial Sequence
  Description of Artificial Sequence: Synthetic oligonucleotide
  Sense strand starting at position 2584 of SEQ ID NO: 1242788
gcuggucucgaacgagacu

SEQ ID NO: 1372901 - RNA, 19 nt, Artificial Sequence
  Description of Artificial Sequence: Synthetic oligonucleotide
  Antisense strand to SEQ ID NO: 1372900
agucucguucgagaccagc

SEQ ID NO: 1372902 - RNA, 19 nt, Artificial Sequence
  Description of Artificial Sequence: Synthetic oligonucleotide
  Sense strand starting at position 2666 of SEQ ID NO: 1242788
agcugauucuugcauuucu

SEQ ID NO: 1372903 - RNA, 19 nt, Artificial Sequence
  Description of Artificial Sequence: Synthetic oligonucleotide
  Antisense strand to SEQ ID NO: 1372902
agaaaugcaagaaucagcu

SEQ ID NO: 1372904 - RNA, 19 nt, Artificial Sequence
  Description of Artificial Sequence: Synthetic oligonucleotide
  Sense strand starting at position 2675 of SEQ ID NO: 1242788
uugcauuucuaagguuuga

SEQ ID NO: 1372905 - RNA, 19 nt, Artificial Sequence
  Description of Artificial Sequence: Synthetic oligonucleotide
  Antisense strand to SEQ ID NO: 1372904
ucaaaccuuagaaaugcaa

SEQ ID NO: 1372906 - RNA, 19 nt, Artificial Sequence
  Description of Artificial Sequence: Synthetic oligonucleotide
  Sense strand starting at position 2711 of SEQ ID NO: 1242788
uuaucuuaguucgggcaga

SEQ ID NO: 1372907 - RNA, 19 nt, Artificial Sequence
  Description of Artificial Sequence: Synthetic oligonucleotide
  Antisense strand to SEQ ID NO: 1372906
ucugcccgaacuaagauaa

SEQ ID NO: 1372908 - RNA, 19 nt, Artificial Sequence
  Description of Artificial Sequence: Synthetic oligonucleotide
  Sense strand starting at position 2712 of SEQ ID NO: 1242788
uaucuuaguucgggcagaa

SEQ ID NO: 1372909 - RNA, 19 nt, Artificial Sequence
  Description of Artificial Sequence: Synthetic oligonucleotide
  Antisense strand to SEQ ID NO: 1372908
uucugcccgaacuaagaua

SEQ ID NO: 1372910 - RNA, 19 nt, Artificial Sequence
  Description of Artificial Sequence: Synthetic oligonucleotide
  Sense strand starting at position 2725 of SEQ ID NO: 1242788
gcagaaguguauuuacugu

SEQ ID NO: 1372911 - RNA, 19 nt, Artificial Sequence
  Description of Artificial Sequence: Synthetic oligonucleotide
  Antisense strand to SEQ ID NO: 1372910
acaguaaauacacuucugc

SEQ ID NO: 1372912 - RNA, 19 nt, Artificial Sequence
  Description of Artificial Sequence: Synthetic oligonucleotide
  Sense strand starting at position 2729 of SEQ ID NO: 1242788
aaguguauuuacugugaac

SEQ ID NO: 1372913 - RNA, 19 nt, Artificial Sequence
  Description of Artificial Sequence: Synthetic oligonucleotide
  Antisense strand to SEQ ID NO: 1372912
guucacaguaaauacacuu

SEQ ID NO: 1372914 - RNA, 19 nt, Artificial Sequence
  Description of Artificial Sequence: Synthetic oligonucleotide
  Sense strand starting at position 2732 of SEQ ID NO: 1242788
uguauuuacugugaaccaa

SEQ ID NO: 1372915 - RNA, 19 nt, Artificial Sequence
  Description of Artificial Sequence: Synthetic oligonucleotide
  Antisense strand to SEQ ID NO: 1372914
uugguucacaguaaauaca

SEQ ID NO: 1372916 - RNA, 19 nt, Artificial Sequence
  Description of Artificial Sequence: Synthetic oligonucleotide
  Sense strand starting at position 2746 of SEQ ID NO: 1242788
accaaagucacuugugguu

SEQ ID NO: 1372917 - RNA, 19 nt, Artificial Sequence
  Description of Artificial Sequence: Synthetic oligonucleotide
  Antisense strand to SEQ ID NO: 1372916
aaccacaagugacuuuggu

SEQ ID NO: 1372918 - RNA, 19 nt, Artificial Sequence
  Description of Artificial Sequence: Synthetic oligonucleotide
  Sense strand starting at position 2748 of SEQ ID NO: 1242788
caaagucacuugugguuua

SEQ ID NO: 1372919 - RNA, 19 nt, Artificial Sequence
  Description of Artificial Sequence: Synthetic oligonucleotide
  Antisense strand to SEQ ID NO: 1372918
uaaaccacaagugacuuug

SEQ ID NO: 1372920 - RNA, 19 nt, Artificial Sequence
  Description of Artificial Sequence: Synthetic oligonucleotide
  Sense strand starting at position 2749 of SEQ ID NO: 1242788
aaagucacuugugguuuau

SEQ ID NO: 1372921 - RNA, 19 nt, Artificial Sequence
  Description of Artificial Sequence: Synthetic oligonucleotide
  Antisense strand to SEQ ID NO: 1372920
auaaaccacaagugacuuu

SEQ ID NO: 1372922 - RNA, 19 nt, Artificial Sequence
  Description of Artificial Sequence: Synthetic oligonucleotide
  Sense strand starting at position 2753 of SEQ ID NO: 1242788
ucacuugugguuuauugaa

SEQ ID NO: 1372923 - RNA, 19 nt, Artificial Sequence
  Description of Artificial Sequence: Synthetic oligonucleotide
  Antisense strand to SEQ ID NO: 1372922
uucaauaaaccacaaguga

SEQ ID NO: 1372924 - RNA, 19 nt, Artificial Sequence
  Description of Artificial Sequence: Synthetic oligonucleotide
  Sense strand starting at position 3328 of SEQ ID NO: 1242788
ucgagaucgugccauugaa

SEQ ID NO: 1372925 - RNA, 19 nt, Artificial Sequence
  Description of Artificial Sequence: Synthetic oligonucleotide
  Antisense strand to SEQ ID NO: 1372924
uucaauggcacgaucucga

SEQ ID NO: 1372926 - RNA, 19 nt, Artificial Sequence
  Description of Artificial Sequence: Synthetic oligonucleotide
  Sense strand starting at position 3847 of SEQ ID NO: 1242788
uuggaauuguccuauacuc

SEQ ID NO: 1372927 - RNA, 19 nt, Artificial Sequence
  Description of Artificial Sequence: Synthetic oligonucleotide
  Antisense strand to SEQ ID NO: 1372926
gaguauaggacaauuccaa

SEQ ID NO: 1372928 - RNA, 19 nt, Artificial Sequence
  Description of Artificial Sequence: Synthetic oligonucleotide
  Sense strand starting at position 3849 of SEQ ID NO: 1242788
ggaauuguccuauacucug

SEQ ID NO: 1372929 - RNA, 19 nt, Artificial Sequence
  Description of Artificial Sequence: Synthetic oligonucleotide
  Antisense strand to SEQ ID NO: 1372928
cagaguauaggacaauucc

SEQ ID NO: 1372930 - RNA, 19 nt, Artificial Sequence
  Description of Artificial Sequence: Synthetic oligonucleotide
  Sense strand starting at position 3854 of SEQ ID NO: 1242788
uguccuauacucuguguga

SEQ ID NO: 1372931 - RNA, 19 nt, Artificial Sequence
  Description of Artificial Sequence: Synthetic oligonucleotide
  Antisense strand to SEQ ID NO: 1372930
ucacacagaguauaggaca

SEQ ID NO: 1372932 - RNA, 19 nt, Artificial Sequence
  Description of Artificial Sequence: Synthetic oligonucleotide
  Sense strand starting at position 3855 of SEQ ID NO: 1242788
guccuauacucugugugaa

SEQ ID NO: 1372933 - RNA, 19 nt, Artificial Sequence
  Description of Artificial Sequence: Synthetic oligonucleotide
  Antisense strand to SEQ ID NO: 1372932
uucacacagaguauaggac

SEQ ID NO: 1372934 - RNA, 19 nt, Artificial Sequence
  Description of Artificial Sequence: Synthetic oligonucleotide
  Sense strand starting at position 3856 of SEQ ID NO: 1242788
uccuauacucugugugaag

SEQ ID NO: 1372935 - RNA, 19 nt, Artificial Sequence
  Description of Artificial Sequence: Synthetic oligonucleotide
  Antisense strand to SEQ ID NO: 1372934
cuucacacagaguauagga

SEQ ID NO: 1372936 - RNA, 19 nt, Artificial Sequence
  Description of Artificial Sequence: Synthetic oligonucleotide
  Sense strand starting at position 3858 of SEQ ID NO: 1242788
cuauacucugugugaagua

SEQ ID NO: 1372937 - RNA, 19 nt, Artificial Sequence
  Description of Artificial Sequence: Synthetic oligonucleotide
  Antisense strand to SEQ ID NO: 1372936
uacuucacacagaguauag

SEQ ID NO: 1372938 - RNA, 19 nt, Artificial Sequence
  Description of Artificial Sequence: Synthetic oligonucleotide
  Sense strand starting at position 3859 of SEQ ID NO: 1242788
uauacucugugugaaguaa

SEQ ID NO: 1372939 - RNA, 19 nt, Artificial Sequence
  Description of Artificial Sequence: Synthetic oligonucleotide
  Antisense strand to SEQ ID NO: 1372938
uuacuucacacagaguaua

SEQ ID NO: 1372940 - RNA, 19 nt, Artificial Sequence
  Description of Artificial Sequence: Synthetic oligonucleotide
  Sense strand starting at position 491 of SEQ ID NO: 1242789
gccguuguccgaaagcuug

SEQ ID NO: 1372941 - RNA, 19 nt, Artificial Sequence
  Description of Artificial Sequence: Synthetic oligonucleotide
  Antisense strand to SEQ ID NO: 1372940
caagcuuucggacaacggc

SEQ ID NO: 1372942 - RNA, 19 nt, Artificial Sequence
  Description of Artificial Sequence: Synthetic oligonucleotide
  Sense strand starting at position 498 of SEQ ID NO: 1242789
uccgaaagcuugcuuccaa

SEQ ID NO: 1372943 - RNA, 19 nt, Artificial Sequence
  Description of Artificial Sequence: Synthetic oligonucleotide
  Antisense strand to SEQ ID NO: 1372942
uuggaagcaagcuuucgga

SEQ ID NO: 1372944 - RNA, 19 nt, Artificial Sequence
  Description of Artificial Sequence: Synthetic oligonucleotide
  Sense strand starting at position 499 of SEQ ID NO: 1242789
ccgaaagcuugcuuccaac

SEQ ID NO: 1372945 - RNA, 19 nt, Artificial Sequence
  Description of Artificial Sequence: Synthetic oligonucleotide
  Antisense strand to SEQ ID NO: 1372944
guuggaagcaagcuuucgg

SEQ ID NO: 1372946 - RNA, 19 nt, Artificial Sequence
  Description of Artificial Sequence: Synthetic oligonucleotide
  Sense strand starting at position 688 of SEQ ID NO: 1242789
aaguauacagucugaugau

SEQ ID NO: 1372947 - RNA, 19 nt, Artificial Sequence
  Description of Artificial Sequence: Synthetic oligonucleotide
  Antisense strand to SEQ ID NO: 1372946
aucaucagacuguauacuu

SEQ ID NO: 1372948 - RNA, 19 nt, Artificial Sequence
  Description of Artificial Sequence: Synthetic oligonucleotide
  Sense strand starting at position 689 of SEQ ID NO: 1242789
aguauacagucugaugauu

SEQ ID NO: 1372949 - RNA, 19 nt, Artificial Sequence
  Description of Artificial Sequence: Synthetic oligonucleotide
  Antisense strand to SEQ ID NO: 1372948
aaucaucagacuguauacu

SEQ ID NO: 1372950 - RNA, 19 nt, Artificial Sequence
  Description of Artificial Sequence: Synthetic oligonucleotide
  Sense strand starting at position 867 of SEQ ID NO: 1242789
uuucgccuugucuaggauu

SEQ ID NO: 1372951 - RNA, 19 nt, Artificial Sequence
  Description of Artificial Sequence: Synthetic oligonucleotide
  Antisense strand to SEQ ID NO: 1372950
aauccuagacaaggcgaaa

SEQ ID NO: 1372952 - RNA, 19 nt, Artificial Sequence
  Description of Artificial Sequence: Synthetic oligonucleotide
  Sense strand starting at position 870 of SEQ ID NO: 1242789
cgccuugucuaggauuucu

SEQ ID NO: 1372953 - RNA, 19 nt, Artificial Sequence
  Description of Artificial Sequence: Synthetic oligonucleotide
  Antisense strand to SEQ ID NO: 1372952
agaaauccuagacaaggcg

SEQ ID NO: 1372954 - RNA, 19 nt, Artificial Sequence
  Description of Artificial Sequence: Synthetic oligonucleotide
  Sense strand starting at position 920 of SEQ ID NO: 1242789
aucugauucuacucgucaa

SEQ ID NO: 1372955 - RNA, 19 nt, Artificial Sequence
  Description of Artificial Sequence: Synthetic oligonucleotide
  Antisense strand to SEQ ID NO: 1372954
uugacgaguagaaucagau

SEQ ID NO: 1372956 - RNA, 19 nt, Artificial Sequence
  Description of Artificial Sequence: Synthetic oligonucleotide
  Sense strand starting at position 923 of SEQ ID NO: 1242789
ugauucuacucgucaaauu

SEQ ID NO: 1372957 - RNA, 19 nt, Artificial Sequence
  Description of Artificial Sequence: Synthetic oligonucleotide
  Antisense strand to SEQ ID NO: 1372956
aauuugacgaguagaauca

SEQ ID NO: 1372958 - RNA, 19 nt, Artificial Sequence
  Description of Artificial Sequence: Synthetic oligonucleotide
  Sense strand starting at position 1000 of SEQ ID NO: 1242789
ggcugaguuucuuucccuu

SEQ ID NO: 1372959 - RNA, 19 nt, Artificial Sequence
  Description of Artificial Sequence: Synthetic oligonucleotide
  Antisense strand to SEQ ID NO: 1372958
aagggaaagaaacucagcc

SEQ ID NO: 1372960 - RNA, 19 nt, Artificial Sequence
  Description of Artificial Sequence: Synthetic oligonucleotide
  Sense strand starting at position 1038 of SEQ ID NO: 1242789
guucguauuugggcucagu

SEQ ID NO: 1372961 - RNA, 19 nt, Artificial Sequence
  Description of Artificial Sequence: Synthetic oligonucleotide
  Antisense strand to SEQ ID NO: 1372960
acugagcccaaauacgaac

SEQ ID NO: 1372962 - RNA, 19 nt, Artificial Sequence
  Description of Artificial Sequence: Synthetic oligonucleotide
  Sense strand starting at position 1048 of SEQ ID NO: 1242789
gggcucagugacugaucaa

SEQ ID NO: 1372963 - RNA, 19 nt, Artificial Sequence
  Description of Artificial Sequence: Synthetic oligonucleotide
  Antisense strand to SEQ ID NO: 1372962
uugaucagucacugagccc

SEQ ID NO: 1372964 - RNA, 19 nt, Artificial Sequence
  Description of Artificial Sequence: Synthetic oligonucleotide
  Sense strand starting at position 1049 of SEQ ID NO: 1242789
ggcucagugacugaucaaa

SEQ ID NO: 1372965 - RNA, 19 nt, Artificial Sequence
  Description of Artificial Sequence: Synthetic oligonucleotide
  Antisense strand to SEQ ID NO: 1372964
uuugaucagucacugagcc

SEQ ID NO: 1372966 - RNA, 19 nt, Artificial Sequence
  Description of Artificial Sequence: Synthetic oligonucleotide
  Sense strand starting at position 1168 of SEQ ID NO: 1242789
uggagaaggcauuguagga

SEQ ID NO: 1372967 - RNA, 19 nt, Artificial Sequence
  Description of Artificial Sequence: Synthetic oligonucleotide
  Antisense strand to SEQ ID NO: 1372966
uccuacaaugccuucucca

SEQ ID NO: 1372968 - RNA, 19 nt, Artificial Sequence
  Description of Artificial Sequence: Synthetic oligonucleotide
  Sense strand starting at position 1485 of SEQ ID NO: 1242789
acccuuuggguugggagaa

SEQ ID NO: 1372969 - RNA, 19 nt, Artificial Sequence
  Description of Artificial Sequence: Synthetic oligonucleotide
  Antisense strand to SEQ ID NO: 1372968
uucucccaacccaaagggu

SEQ ID NO: 1372970 - RNA, 19 nt, Artificial Sequence
  Description of Artificial Sequence: Synthetic oligonucleotide
  Sense strand starting at position 2091 of SEQ ID NO: 1242789
ggcggagcgucuugauucu

SEQ ID NO: 1372971 - RNA, 19 nt, Artificial Sequence
  Description of Artificial Sequence: Synthetic oligonucleotide
  Antisense strand to SEQ ID NO: 1372970
agaaucaagacgcuccgcc

SEQ ID NO: 1372972 - RNA, 19 nt, Artificial Sequence
  Description of Artificial Sequence: Synthetic oligonucleotide
  Sense strand starting at position 2768 of SEQ ID NO: 1242789
agcguuugguuccauggau

SEQ ID NO: 1372973 - RNA, 19 nt, Artificial Sequence
  Description of Artificial Sequence: Synthetic oligonucleotide
  Antisense strand to SEQ ID NO: 1372972
auccauggaaccaaacgcu

SEQ ID NO: 1372974 - RNA, 19 nt, Artificial Sequence
  Description of Artificial Sequence: Synthetic oligonucleotide
  Sense strand starting at position 2872 of SEQ ID NO: 1242789
cgcguuuacucuggauucu

SEQ ID NO: 1372975 - RNA, 19 nt, Artificial Sequence
  Description of Artificial Sequence: Synthetic oligonucleotide
  Antisense strand to SEQ ID NO: 1372974
agaauccagaguaaacgcg

SEQ ID NO: 1372976 - RNA, 19 nt, Artificial Sequence
  Description of Artificial Sequence: Synthetic oligonucleotide
  Sense strand starting at position 3237 of SEQ ID NO: 1242789
aaaugucaucauuguuggu

SEQ ID NO: 1372977 - RNA, 19 nt, Artificial Sequence
  Description of Artificial Sequence: Synthetic oligonucleotide
  Antisense strand to SEQ ID NO: 1372976
accaacaaugaugacauuu

SEQ ID NO: 1372978 - RNA, 19 nt, Artificial Sequence
  Description of Artificial Sequence: Synthetic oligonucleotide
  Sense strand starting at position 3239 of SEQ ID NO: 1242789
augucaucauuguugguua

SEQ ID NO: 1372979 - RNA, 19 nt, Artificial Sequence
  Description of Artificial Sequence: Synthetic oligonucleotide
  Antisense strand to SEQ ID NO: 1372978
uaaccaacaaugaugacau

SEQ ID NO: 1372980 - RNA, 19 nt, Artificial Sequence
  Description of Artificial Sequence: Synthetic oligonucleotide
  Sense strand starting at position 3240 of SEQ ID NO: 1242789
ugucaucauuguugguuau

SEQ ID NO: 1372981 - RNA, 19 nt, Artificial Sequence
  Description of Artificial Sequence: Synthetic oligonucleotide
  Antisense strand to SEQ ID NO: 1372980
auaaccaacaaugaugaca

SEQ ID NO: 1372982 - RNA, 19 nt, Artificial Sequence
  Description of Artificial Sequence: Synthetic oligonucleotide
  Sense strand starting at position 3241 of SEQ ID NO: 1242789
gucaucauuguugguuauu

SEQ ID NO: 1372983 - RNA, 19 nt, Artificial Sequence
  Description of Artificial Sequence: Synthetic oligonucleotide
  Antisense strand to SEQ ID NO: 1372982
aauaaccaacaaugaugac

SEQ ID NO: 1372984 - RNA, 19 nt, Artificial Sequence
  Description of Artificial Sequence: Synthetic oligonucleotide
  Sense strand starting at position 3242 of SEQ ID NO: 1242789
ucaucauuguugguuauua

SEQ ID NO: 1372985 - RNA, 19 nt, Artificial Sequence
  Description of Artificial Sequence: Synthetic oligonucleotide
  Antisense strand to SEQ ID NO: 1372984
uaauaaccaacaaugauga

SEQ ID NO: 1372986 - RNA, 19 nt, Artificial Sequence
  Description of Artificial Sequence: Synthetic oligonucleotide
  Sense strand starting at position 3244 of SEQ ID NO: 1242789
aucauuguugguuauuaag

SEQ ID NO: 1372987 - RNA, 19 nt, Artificial Sequence
  Description of Artificial Sequence: Synthetic oligonucleotide
  Antisense strand to SEQ ID NO: 1372986
cuuaauaaccaacaaugau

SEQ ID NO: 1372988 - RNA, 19 nt, Artificial Sequence
  Description of Artificial Sequence: Synthetic oligonucleotide
  Sense strand starting at position 3247 of SEQ ID NO: 1242789
auuguugguuauuaaguga

SEQ ID NO: 1372989 - RNA, 19 nt, Artificial Sequence
  Description of Artificial Sequence: Synthetic oligonucleotide
  Antisense strand to SEQ ID NO: 1372988
ucacuuaauaaccaacaau

SEQ ID NO: 1372990 - RNA, 19 nt, Artificial Sequence
  Description of Artificial Sequence: Synthetic oligonucleotide
  Sense strand starting at position 3250 of SEQ ID NO: 1242789
guugguuauuaagugauaa

SEQ ID NO: 1372991 - RNA, 19 nt, Artificial Sequence
  Description of Artificial Sequence: Synthetic oligonucleotide
  Antisense strand to SEQ ID NO: 1372990
uuaucacuuaauaaccaac

SEQ ID NO: 1372992 - RNA, 19 nt, Artificial Sequence
  Description of Artificial Sequence: Synthetic oligonucleotide
  Sense strand starting at position 3299 of SEQ ID NO: 1242789
cagggacaauguccaauua

SEQ ID NO: 1372993 - RNA, 19 nt, Artificial Sequence
  Description of Artificial Sequence: Synthetic oligonucleotide
  Antisense strand to SEQ ID NO: 1372992
uaauuggacauugucccug

SEQ ID NO: 1372994 - RNA, 19 nt, Artificial Sequence
  Description of Artificial Sequence: Synthetic oligonucleotide
  Sense strand starting at position 3307 of SEQ ID NO: 1242789
auguccaauuaauguuaga

SEQ ID NO: 1372995 - RNA, 19 nt, Artificial Sequence
  Description of Artificial Sequence: Synthetic oligonucleotide
  Antisense strand to SEQ ID NO: 1372994
ucuaacauuaauuggacau

SEQ ID NO: 1372996 - RNA, 19 nt, Artificial Sequence
  Description of Artificial Sequence: Synthetic oligonucleotide
  Sense strand starting at position 3378 of SEQ ID NO: 1242789
agucaaucaauggguaguu

SEQ ID NO: 1372997 - RNA, 19 nt, Artificial Sequence
  Description of Artificial Sequence: Synthetic oligonucleotide
  Antisense strand to SEQ ID NO: 1372996
aacuacccauugauugacu

SEQ ID NO: 1372998 - RNA, 19 nt, Artificial Sequence
  Description of Artificial Sequence: Synthetic oligonucleotide
  Sense strand starting at position 3438 of SEQ ID NO: 1242789
ggcagaugcuguuauaaau

SEQ ID NO: 1372999 - RNA, 19 nt, Artificial Sequence
  Description of Artificial Sequence: Synthetic oligonucleotide
  Antisense strand to SEQ ID NO: 1372998
auuuauaacagcaucugcc

SEQ ID NO: 1373000 - RNA, 19 nt, Artificial Sequence
  Description of Artificial Sequence: Synthetic oligonucleotide
  Sense strand starting at position 3507 of SEQ ID NO: 1242789
acuccuugacaaggguaau

SEQ ID NO: 1373001 - RNA, 19 nt, Artificial Sequence
  Description of Artificial Sequence: Synthetic oligonucleotide
  Antisense strand to SEQ ID NO: 1373000
auuacccuugucaaggagu

SEQ ID NO: 1373002 - RNA, 19 nt, Artificial Sequence
  Description of Artificial Sequence: Synthetic oligonucleotide
  Sense strand starting at position 3554 of SEQ ID NO: 1242789
aaagguggauccuuugauc

SEQ ID NO: 1373003 - RNA, 19 nt, Artificial Sequence
  Description of Artificial Sequence: Synthetic oligonucleotide
  Antisense strand to SEQ ID NO: 1373002
gaucaaaggauccaccuuu

SEQ ID NO: 1373004 - RNA, 19 nt, Artificial Sequence
  Description of Artificial Sequence: Synthetic oligonucleotide
  Sense strand starting at position 3682 of SEQ ID NO: 1242789
aucucauaagcucaggagu

SEQ ID NO: 1373005 - RNA, 19 nt, Artificial Sequence
  Description of Artificial Sequence: Synthetic oligonucleotide
  Antisense strand to SEQ ID NO: 1373004
acuccugagcuuaugagau

SEQ ID NO: 1373006 - RNA, 19 nt, Artificial Sequence
  Description of Artificial Sequence: Synthetic oligonucleotide
  Sense strand starting at position 3875 of SEQ ID NO: 1242789
acucgagcuugagcgauaa

SEQ ID NO: 1373007 - RNA, 19 nt, Artificial Sequence
  Description of Artificial Sequence: Synthetic oligonucleotide
  Antisense strand to SEQ ID NO: 1373006
uuaucgcucaagcucgagu

SEQ ID NO: 1373008 - RNA, 19 nt, Artificial Sequence
  Description of Artificial Sequence: Synthetic oligonucleotide
  Sense strand starting at position 3949 of SEQ ID NO: 1242789
ggagcuuccuucuaaccau

SEQ ID NO: 1373009 - RNA, 19 nt, Artificial Sequence
  Description of Artificial Sequence: Synthetic oligonucleotide
  Antisense strand to SEQ ID NO: 1373008
augguuagaaggaagcucc

SEQ ID NO: 1373010 - RNA, 19 nt, Artificial Sequence
  Description of Artificial Sequence: Synthetic oligonucleotide
  Sense strand starting at position 179 of SEQ ID NO: 1242790
cccucaagagccgaauuaa

SEQ ID NO: 1373011 - RNA, 19 nt, Artificial Sequence
  Description of Artificial Sequence: Synthetic oligonucleotide
  Antisense strand to SEQ ID NO: 1373010
uuaauucggcucuugaggg

SEQ ID NO: 1373012 - RNA, 19 nt, Artificial Sequence
  Description of Artificial Sequence: Synthetic oligonucleotide
  Sense strand starting at position 600 of SEQ ID NO: 1242790
ucagguaauuaacagaaca

SEQ ID NO: 1373013 - RNA, 19 nt, Artificial Sequence
  Description of Artificial Sequence: Synthetic oligonucleotide
  Antisense strand to SEQ ID NO: 1373012
uguucuguuaauuaccuga

SEQ ID NO: 1373014 - RNA, 19 nt, Artificial Sequence
  Description of Artificial Sequence: Synthetic oligonucleotide
  Sense strand starting at position 978 of SEQ ID NO: 1242790
gcuagagaucauuaaagca

SEQ ID NO: 1373015 - RNA, 19 nt, Artificial Sequence
  Description of Artificial Sequence: Synthetic oligonucleotide
  Antisense strand to SEQ ID NO: 1373014
ugcuuuaaugaucucuagc

SEQ ID NO: 1373016 - RNA, 19 nt, Artificial Sequence
  Description of Artificial Sequence: Synthetic oligonucleotide
  Sense strand starting at position 2661 of SEQ ID NO: 1242790
ggucuuggcgcugaauaaa

SEQ ID NO: 1373017 - RNA, 19 nt, Artificial Sequence
  Description of Artificial Sequence: Synthetic oligonucleotide
  Antisense strand to SEQ ID NO: 1373016
uuuauucagcgccaagacc

SEQ ID NO: 1373018 - RNA, 19 nt, Artificial Sequence
  Description of Artificial Sequence: Synthetic oligonucleotide
  Sense strand starting at position 2731 of SEQ ID NO: 1242790
acuuuaaggcgacgaguua

SEQ ID NO: 1373019 - RNA, 19 nt, Artificial Sequence
  Description of Artificial Sequence: Synthetic oligonucleotide
  Antisense strand to SEQ ID NO: 1373018
uaacucgucgccuuaaagu

SEQ ID NO: 1373020 - RNA, 19 nt, Artificial Sequence
  Description of Artificial Sequence: Synthetic oligonucleotide
  Sense strand starting at position 2732 of SEQ ID NO: 1242790
cuuuaaggcgacgaguuau

SEQ ID NO: 1373021 - RNA, 19 nt, Artificial Sequence
  Description of Artificial Sequence: Synthetic oligonucleotide
  Antisense strand to SEQ ID NO: 1373020
auaacucgucgccuuaaag

SEQ ID NO: 1373022 - RNA, 19 nt, Artificial Sequence
  Description of Artificial Sequence: Synthetic oligonucleotide
  Sense strand starting at position 2749 of SEQ ID NO: 1242790
auacguuaguuuccugaaa

SEQ ID NO: 1373023 - RNA, 19 nt, Artificial Sequence
  Description of Artificial Sequence: Synthetic oligonucleotide
  Antisense strand to SEQ ID NO: 1373022
uuucaggaaacuaacguau

SEQ ID NO: 1373024 - RNA, 19 nt, Artificial Sequence
  Description of Artificial Sequence: Synthetic oligonucleotide
  Sense strand starting at position 2750 of SEQ ID NO: 1242790
uacguuaguuuccugaaau

SEQ ID NO: 1373025 - RNA, 19 nt, Artificial Sequence
  Description of Artificial Sequence: Synthetic oligonucleotide
  Antisense strand to SEQ ID NO: 1373024
auuucaggaaacuaacgua

SEQ ID NO: 1373026 - RNA, 19 nt, Artificial Sequence
  Description of Artificial Sequence: Synthetic oligonucleotide
  Sense strand starting at position 2760 of SEQ ID NO: 1242790
uccugaaaucaguagccuu

SEQ ID NO: 1373027 - RNA, 19 nt, Artificial Sequence
  Description of Artificial Sequence: Synthetic oligonucleotide
  Antisense strand to SEQ ID NO: 1373026
aaggcuacugauuucagga

SEQ ID NO: 1373028 - RNA, 19 nt, Artificial Sequence
  Description of Artificial Sequence: Synthetic oligonucleotide
  Sense strand starting at position 2771 of SEQ ID NO: 1242790
guagccuuuguagaaacaa

SEQ ID NO: 1373029 - RNA, 19 nt, Artificial Sequence
  Description of Artificial Sequence: Synthetic oligonucleotide
  Antisense strand to SEQ ID NO: 1373028
uuguuucuacaaaggcuac

SEQ ID NO: 1373030 - RNA, 19 nt, Artificial Sequence
  Description of Artificial Sequence: Synthetic oligonucleotide
  Sense strand starting at position 2780 of SEQ ID NO: 1242790
guagaaacaagucaucguu

SEQ ID NO: 1373031 - RNA, 19 nt, Artificial Sequence
  Description of Artificial Sequence: Synthetic oligonucleotide
  Antisense strand to SEQ ID NO: 1373030
aacgaugacuuguuucuac

SEQ ID NO: 1373032 - RNA, 19 nt, Artificial Sequence
  Description of Artificial Sequence: Synthetic oligonucleotide
  Sense strand starting at position 2815 of SEQ ID NO: 1242790
gacagaguuucccuugagg

SEQ ID NO: 1373033 - RNA, 19 nt, Artificial Sequence
  Description of Artificial Sequence: Synthetic oligonucleotide
  Antisense strand to SEQ ID NO: 1373032
ccucaagggaaacucuguc

SEQ ID NO: 1373034 - RNA, 19 nt, Artificial Sequence
  Description of Artificial Sequence: Synthetic oligonucleotide
  Sense strand starting at position 2817 of SEQ ID NO: 1242790
cagaguuucccuugaggau

SEQ ID NO: 1373035 - RNA, 19 nt, Artificial Sequence
  Description of Artificial Sequence: Synthetic oligonucleotide
  Antisense strand to SEQ ID NO: 1373034
auccucaagggaaacucug

SEQ ID NO: 1373036 - RNA, 19 nt, Artificial Sequence
  Description of Artificial Sequence: Synthetic oligonucleotide
  Sense strand starting at position 2866 of SEQ ID NO: 1242790
ggacauuaaucgcuaggau

SEQ ID NO: 1373037 - RNA, 19 nt, Artificial Sequence
  Description of Artificial Sequence: Synthetic oligonucleotide
  Antisense strand to SEQ ID NO: 1373036
auccuagcgauuaaugucc

SEQ ID NO: 1373038 - RNA, 19 nt, Artificial Sequence
  Description of Artificial Sequence: Synthetic oligonucleotide
  Sense strand starting at position 2867 of SEQ ID NO: 1242790
gacauuaaucgcuaggauu

SEQ ID NO: 1373039 - RNA, 19 nt, Artificial Sequence
  Description of Artificial Sequence: Synthetic oligonucleotide
  Antisense strand to SEQ ID NO: 1373038
aauccuagcgauuaauguc

SEQ ID NO: 1373040 - RNA, 19 nt, Artificial Sequence
  Description of Artificial Sequence: Synthetic oligonucleotide
  Sense strand starting at position 2998 of SEQ ID NO: 1242790
cauggucagaucuguguga

SEQ ID NO: 1373041 - RNA, 19 nt, Artificial Sequence
  Description of Artificial Sequence: Synthetic oligonucleotide
  Antisense strand to SEQ ID NO: 1373040
ucacacagaucugaccaug

SEQ ID NO: 1373042 - RNA, 19 nt, Artificial Sequence
  Description of Artificial Sequence: Synthetic oligonucleotide
  Sense strand starting at position 2999 of SEQ ID NO: 1242790
auggucagaucugugugau

SEQ ID NO: 1373043 - RNA, 19 nt, Artificial Sequence
  Description of Artificial Sequence: Synthetic oligonucleotide
  Antisense strand to SEQ ID NO: 1373042
aucacacagaucugaccau

SEQ ID NO: 1373044 - RNA, 19 nt, Artificial Sequence
  Description of Artificial Sequence: Synthetic oligonucleotide
  Sense strand starting at position 3000 of SEQ ID NO: 1242790
uggucagaucugugugaug

SEQ ID NO: 1373045 - RNA, 19 nt, Artificial Sequence
  Description of Artificial Sequence: Synthetic oligonucleotide
  Antisense strand to SEQ ID NO: 1373044
caucacacagaucugacca

SEQ ID NO: 1373046 - RNA, 19 nt, Artificial Sequence
  Description of Artificial Sequence: Synthetic oligonucleotide
  Sense strand starting at position 3041 of SEQ ID NO: 1242790
gauugaaugugccugagcu

SEQ ID NO: 1373047 - RNA, 19 nt, Artificial Sequence
  Description of Artificial Sequence: Synthetic oligonucleotide
  Antisense strand to SEQ ID NO: 1373046
agcucaggcacauucaauc

SEQ ID NO: 1373048 - RNA, 19 nt, Artificial Sequence
  Description of Artificial Sequence: Synthetic oligonucleotide
  Sense strand starting at position 3042 of SEQ ID NO: 1242790
auugaaugugccugagcuu

SEQ ID NO: 1373049 - RNA, 19 nt, Artificial Sequence
  Description of Artificial Sequence: Synthetic oligonucleotide
  Antisense strand to SEQ ID NO: 1373048
aagcucaggcacauucaau

SEQ ID NO: 1373050 - RNA, 19 nt, Artificial Sequence
  Description of Artificial Sequence: Synthetic oligonucleotide
  Sense strand starting at position 3043 of SEQ ID NO: 1242790
uugaaugugccugagcuuu

SEQ ID NO: 1373051 - RNA, 19 nt, Artificial Sequence
  Description of Artificial Sequence: Synthetic oligonucleotide
  Antisense strand to SEQ ID NO: 1373050
aaagcucaggcacauucaa

SEQ ID NO: 1373052 - RNA, 19 nt, Artificial Sequence
  Description of Artificial Sequence: Synthetic oligonucleotide
  Sense strand starting at position 3048 of SEQ ID NO: 1242790
ugugccugagcuuugugua

SEQ ID NO: 1373053 - RNA, 19 nt, Artificial Sequence
  Description of Artificial Sequence: Synthetic oligonucleotide
  Antisense strand to SEQ ID NO: 1373052
uacacaaagcucaggcaca

SEQ ID NO: 1373054 - RNA, 19 nt, Artificial Sequence
  Description of Artificial Sequence: Synthetic oligonucleotide
  Sense strand starting at position 3053 of SEQ ID NO: 1242790
cugagcuuuguguaaagag

SEQ ID NO: 1373055 - RNA, 19 nt, Artificial Sequence
  Description of Artificial Sequence: Synthetic oligonucleotide
  Antisense strand to SEQ ID NO: 1373054
cucuuuacacaaagcucag

SEQ ID NO: 1373056 - RNA, 19 nt, Artificial Sequence
  Description of Artificial Sequence: Synthetic oligonucleotide
  Sense strand starting at position 3073 of SEQ ID NO: 1242790
auuuguucccguuaauggu

SEQ ID NO: 1373057 - RNA, 19 nt, Artificial Sequence
  Description of Artificial Sequence: Synthetic oligonucleotide
  Antisense strand to SEQ ID NO: 1373056
accauuaacgggaacaaau

SEQ ID NO: 1373058 - RNA, 19 nt, Artificial Sequence
  Description of Artificial Sequence: Synthetic oligonucleotide
  Sense strand starting at position 3079 of SEQ ID NO: 1242790
ucccguuaaugguuaacaa

SEQ ID NO: 1373059 - RNA, 19 nt, Artificial Sequence
  Description of Artificial Sequence: Synthetic oligonucleotide
  Antisense strand to SEQ ID NO: 1373058
uuguuaaccauuaacggga

SEQ ID NO: 1373060 - RNA, 19 nt, Artificial Sequence
  Description of Artificial Sequence: Synthetic oligonucleotide
  Sense strand starting at position 3080 of SEQ ID NO: 1242790
cccguuaaugguuaacaac

SEQ ID NO: 1373061 - RNA, 19 nt, Artificial Sequence
  Description of Artificial Sequence: Synthetic oligonucleotide
  Antisense strand to SEQ ID NO: 1373060
guuguuaaccauuaacggg

SEQ ID NO: 1373062 - RNA, 19 nt, Artificial Sequence
  Description of Artificial Sequence: Synthetic oligonucleotide
  Sense strand starting at position 3453 of SEQ ID NO: 1242790
acgaauuucugugacauua

SEQ ID NO: 1373063 - RNA, 19 nt, Artificial Sequence
  Description of Artificial Sequence: Synthetic oligonucleotide
  Antisense strand to SEQ ID NO: 1373062
uaaugucacagaaauucgu

SEQ ID NO: 1373064 - RNA, 19 nt, Artificial Sequence
  Description of Artificial Sequence: Synthetic oligonucleotide
  Sense strand starting at position 3523 of SEQ ID NO: 1242790
augacagcuuuauugaagu

SEQ ID NO: 1373065 - RNA, 19 nt, Artificial Sequence
  Description of Artificial Sequence: Synthetic oligonucleotide
  Antisense strand to SEQ ID NO: 1373064
acuucaauaaagcugucau

SEQ ID NO: 1373066 - RNA, 19 nt, Artificial Sequence
  Description of Artificial Sequence: Synthetic oligonucleotide
  Sense strand starting at position 3567 of SEQ ID NO: 1242790
cagguagacuaguugguaa

SEQ ID NO: 1373067 - RNA, 19 nt, Artificial Sequence
  Description of Artificial Sequence: Synthetic oligonucleotide
  Antisense strand to SEQ ID NO: 1373066
uuaccaacuagucuaccug

SEQ ID NO: 1373068 - RNA, 19 nt, Artificial Sequence
  Description of Artificial Sequence: Synthetic oligonucleotide
  Sense strand starting at position 3569 of SEQ ID NO: 1242790
gguagacuaguugguaagu

SEQ ID NO: 1373069 - RNA, 19 nt, Artificial Sequence
  Description of Artificial Sequence: Synthetic oligonucleotide
  Antisense strand to SEQ ID NO: 1373068
acuuaccaacuagucuacc

SEQ ID NO: 1373070 - RNA, 19 nt, Artificial Sequence
  Description of Artificial Sequence: Synthetic oligonucleotide
  Sense strand starting at position 3574 of SEQ ID NO: 1242790
acuaguugguaagugaauu

SEQ ID NO: 1373071 - RNA, 19 nt, Artificial Sequence
  Description of Artificial Sequence: Synthetic oligonucleotide
  Antisense strand to SEQ ID NO: 1373070
aauucacuuaccaacuagu

SEQ ID NO: 1373072 - RNA, 19 nt, Artificial Sequence
  Description of Artificial Sequence: Synthetic oligonucleotide
  Sense strand starting at position 3609 of SEQ ID NO: 1242790
caguuccggugaucaauga

SEQ ID NO: 1373073 - RNA, 19 nt, Artificial Sequence
  Description of Artificial Sequence: Synthetic oligonucleotide
  Antisense strand to SEQ ID NO: 1373072
ucauugaucaccggaacug

SEQ ID NO: 1373074 - RNA, 19 nt, Artificial Sequence
  Description of Artificial Sequence: Synthetic oligonucleotide
  Sense strand starting at position 3644 of SEQ ID NO: 1242790
uauaaauuccaucgaguug

SEQ ID NO: 1373075 - RNA, 19 nt, Artificial Sequence
  Description of Artificial Sequence: Synthetic oligonucleotide
  Antisense strand to SEQ ID NO: 1373074
caacucgauggaauuuaua

SEQ ID NO: 1373076 - RNA, 19 nt, Artificial Sequence
  Description of Artificial Sequence: Synthetic oligonucleotide
  Sense strand starting at position 3778 of SEQ ID NO: 1242790
guaagaaguagcuaagcuu

SEQ ID NO: 1373077 - RNA, 19 nt, Artificial Sequence
  Description of Artificial Sequence: Synthetic oligonucleotide
  Antisense strand to SEQ ID NO: 1373076
aagcuuagcuacuucuuac

SEQ ID NO: 1373078 - RNA, 19 nt, Artificial Sequence
  Description of Artificial Sequence: Synthetic oligonucleotide
  Sense strand starting at position 3790 of SEQ ID NO: 1242790
uaagcuugagaagguguaa

SEQ ID NO: 1373079 - RNA, 19 nt, Artificial Sequence
  Description of Artificial Sequence: Synthetic oligonucleotide
  Antisense strand to SEQ ID NO: 1373078
uuacaccuucucaagcuua

SEQ ID NO: 1373080 - RNA, 19 nt, Artificial Sequence
  Description of Artificial Sequence: Synthetic oligonucleotide
  Sense strand starting at position 3902 of SEQ ID NO: 1242790
gucaguucugggcaagcaa

SEQ ID NO: 1373081 - RNA, 19 nt, Artificial Sequence
  Description of Artificial Sequence: Synthetic oligonucleotide
  Antisense strand to SEQ ID NO: 1373080
uugcuugcccagaacugac

SEQ ID NO: 1373082 - RNA, 19 nt, Artificial Sequence
  Description of Artificial Sequence: Synthetic oligonucleotide
  Sense strand starting at position 3921 of SEQ ID NO: 1242790
gaaguaucucugggcaaag

SEQ ID NO: 1373083 - RNA, 19 nt, Artificial Sequence
  Description of Artificial Sequence: Synthetic oligonucleotide
  Antisense strand to SEQ ID NO: 1373082
cuuugcccagagauacuuc

SEQ ID NO: 1373084 - RNA, 19 nt, Artificial Sequence
  Description of Artificial Sequence: Synthetic oligonucleotide
  Sense strand starting at position 3922 of SEQ ID NO: 1242790
aaguaucucugggcaaaga

SEQ ID NO: 1373085 - RNA, 19 nt, Artificial Sequence
  Description of Artificial Sequence: Synthetic oligonucleotide
  Antisense strand to SEQ ID NO: 1373084
ucuuugcccagagauacuu

SEQ ID NO: 1373086 - RNA, 19 nt, Artificial Sequence
  Description of Artificial Sequence: Synthetic oligonucleotide
  Sense strand starting at position 3938 of SEQ ID NO: 1242790
agaguccuggcguaagguu

SEQ ID NO: 1373087 - RNA, 19 nt, Artificial Sequence
  Description of Artificial Sequence: Synthetic oligonucleotide
  Antisense strand to SEQ ID NO: 1373086
aaccuuacgccaggacucu

SEQ ID NO: 1373088 - RNA, 19 nt, Artificial Sequence
  Description of Artificial Sequence: Synthetic oligonucleotide
  Sense strand starting at position 3966 of SEQ ID NO: 1242790
aucuuugagugccuguuaa

SEQ ID NO: 1373089 - RNA, 19 nt, Artificial Sequence
  Description of Artificial Sequence: Synthetic oligonucleotide
  Antisense strand to SEQ ID NO: 1373088
uuaacaggcacucaaagau

SEQ ID NO: 1373090 - RNA, 19 nt, Artificial Sequence
  Description of Artificial Sequence: Synthetic oligonucleotide
  Sense strand starting at position 241 of SEQ ID NO: 1242791
cagguuccucuguaauggu

SEQ ID NO: 1373091 - RNA, 19 nt, Artificial Sequence
  Description of Artificial Sequence: Synthetic oligonucleotide
  Antisense strand to SEQ ID NO: 1373090
accauuacagaggaaccug

SEQ ID NO: 1373092 - RNA, 19 nt, Artificial Sequence
  Description of Artificial Sequence: Synthetic oligonucleotide
  Sense strand starting at position 354 of SEQ ID NO: 1242791
aggcuaggagcaugugauu

SEQ ID NO: 1373093 - RNA, 19 nt, Artificial Sequence
  Description of Artificial Sequence: Synthetic oligonucleotide
  Antisense strand to SEQ ID NO: 1373092
aaucacaugcuccuagccu

SEQ ID NO: 1373094 - RNA, 19 nt, Artificial Sequence
  Description of Artificial Sequence: Synthetic oligonucleotide
  Sense strand starting at position 798 of SEQ ID NO: 1242791
gucugaaauccagagagcu

SEQ ID NO: 1373095 - RNA, 19 nt, Artificial Sequence
  Description of Artificial Sequence: Synthetic oligonucleotide
  Antisense strand to SEQ ID NO: 1373094
agcucucuggauuucagac

SEQ ID NO: 1373096 - RNA, 19 nt, Artificial Sequence
  Description of Artificial Sequence: Synthetic oligonucleotide
  Sense strand starting at position 839 of SEQ ID NO: 1242791
ucaggugucaggcaagaag

SEQ ID NO: 1373097 - RNA, 19 nt, Artificial Sequence
  Description of Artificial Sequence: Synthetic oligonucleotide
  Antisense strand to SEQ ID NO: 1373096
cuucuugccugacaccuga

SEQ ID NO: 1373098 - RNA, 19 nt, Artificial Sequence
  Description of Artificial Sequence: Synthetic oligonucleotide
  Sense strand starting at position 946 of SEQ ID NO: 1242791
ucaggucuuccucgggaga

SEQ ID NO: 1373099 - RNA, 19 nt, Artificial Sequence
  Description of Artificial Sequence: Synthetic oligonucleotide
  Antisense strand to SEQ ID NO: 1373098
ucucccgaggaagaccuga

SEQ ID NO: 1373100 - RNA, 19 nt, Artificial Sequence
  Description of Artificial Sequence: Synthetic oligonucleotide
  Sense strand starting at position 947 of SEQ ID NO: 1242791
caggucuuccucgggagaa

SEQ ID NO: 1373101 - RNA, 19 nt, Artificial Sequence
  Description of Artificial Sequence: Synthetic oligonucleotide
  Antisense strand to SEQ ID NO: 1373100
uucucccgaggaagaccug

SEQ ID NO: 1373102 - RNA, 19 nt, Artificial Sequence
  Description of Artificial Sequence: Synthetic oligonucleotide
  Sense strand starting at position 1034 of SEQ ID NO: 1242791
agccuagagcccuaauuau

SEQ ID NO: 1373103 - RNA, 19 nt, Artificial Sequence
  Description of Artificial Sequence: Synthetic oligonucleotide
  Antisense strand to SEQ ID NO: 1373102
auaauuagggcucuaggcu

SEQ ID NO: 1373104 - RNA, 19 nt, Artificial Sequence
  Description of Artificial Sequence: Synthetic oligonucleotide
  Sense strand starting at position 1382 of SEQ ID NO: 1242791
guggcuauuguggaacaga

SEQ ID NO: 1373105 - RNA, 19 nt, Artificial Sequence
  Description of Artificial Sequence: Synthetic oligonucleotide
  Antisense strand to SEQ ID NO: 1373104
ucuguuccacaauagccac

SEQ ID NO: 1373106 - RNA, 19 nt, Artificial Sequence
  Description of Artificial Sequence: Synthetic oligonucleotide
  Sense strand starting at position 1885 of SEQ ID NO: 1242791
gaggcaaagccaugauggu

SEQ ID NO: 1373107 - RNA, 19 nt, Artificial Sequence
  Description of Artificial Sequence: Synthetic oligonucleotide
  Antisense strand to SEQ ID NO: 1373106
accaucauggcuuugccuc

SEQ ID NO: 1373108 - RNA, 19 nt, Artificial Sequence
  Description of Artificial Sequence: Synthetic oligonucleotide
  Sense strand starting at position 2052 of SEQ ID NO: 1242791
aggucaucuccagacagcu

SEQ ID NO: 1373109 - RNA, 19 nt, Artificial Sequence
  Description of Artificial Sequence: Synthetic oligonucleotide
  Antisense strand to SEQ ID NO: 1373108
agcugucuggagaugaccu

SEQ ID NO: 1373110 - RNA, 19 nt, Artificial Sequence
  Description of Artificial Sequence: Synthetic oligonucleotide
  Sense strand starting at position 2072 of SEQ ID NO: 1242791
uuguccugugccucuuauu

SEQ ID NO: 1373111 - RNA, 19 nt, Artificial Sequence
  Description of Artificial Sequence: Synthetic oligonucleotide
  Antisense strand to SEQ ID NO: 1373110
aauaagaggcacaggacaa

SEQ ID NO: 1373112 - RNA, 19 nt, Artificial Sequence
  Description of Artificial Sequence: Synthetic oligonucleotide
  Sense strand starting at position 2130 of SEQ ID NO: 1242791
uauauaguugcagggaaac

SEQ ID NO: 1373113 - RNA, 19 nt, Artificial Sequence
  Description of Artificial Sequence: Synthetic oligonucleotide
  Antisense strand to SEQ ID NO: 1373112
guuucccugcaacuauaua

SEQ ID NO: 1373114 - RNA, 19 nt, Artificial Sequence
  Description of Artificial Sequence: Synthetic oligonucleotide
  Sense strand starting at position 2185 of SEQ ID NO: 1242791
acaguugggcuuuaauaaa

SEQ ID NO: 1373115 - RNA, 19 nt, Artificial Sequence
  Description of Artificial Sequence: Synthetic oligonucleotide
  Antisense strand to SEQ ID NO: 1373114
uuuauuaaagcccaacugu

SEQ ID NO: 1373116 - RNA, 19 nt, Artificial Sequence
  Description of Artificial Sequence: Synthetic oligonucleotide
  Sense strand starting at position 2208 of SEQ ID NO: 1242791
uguagaaugaauuaagugu

SEQ ID NO: 1373117 - RNA, 19 nt, Artificial Sequence
  Description of Artificial Sequence: Synthetic oligonucleotide
  Antisense strand to SEQ ID NO: 1373116
acacuuaauucauucuaca

SEQ ID NO: 1373118 - RNA, 19 nt, Artificial Sequence
  Description of Artificial Sequence: Synthetic oligonucleotide
  Sense strand starting at position 2433 of SEQ ID NO: 1242791
guuuauguaagguaggaau

SEQ ID NO: 1373119 - RNA, 19 nt, Artificial Sequence
  Description of Artificial Sequence: Synthetic oligonucleotide
  Antisense strand to SEQ ID NO: 1373118
auuccuaccuuacauaaac

SEQ ID NO: 1373120 - RNA, 19 nt, Artificial Sequence
  Description of Artificial Sequence: Synthetic oligonucleotide
  Sense strand starting at position 2472 of SEQ ID NO: 1242791
agguaacaguaguucagua

SEQ ID NO: 1373121 - RNA, 19 nt, Artificial Sequence
  Description of Artificial Sequence: Synthetic oligonucleotide
  Antisense strand to SEQ ID NO: 1373120
uacugaacuacuguuaccu

SEQ ID NO: 1373122 - RNA, 19 nt, Artificial Sequence
  Description of Artificial Sequence: Synthetic oligonucleotide
  Sense strand starting at position 2558 of SEQ ID NO: 1242791
ugagaaucuuagguagcuu

SEQ ID NO: 1373123 - RNA, 19 nt, Artificial Sequence
  Description of Artificial Sequence: Synthetic oligonucleotide
  Antisense strand to SEQ ID NO: 1373122
aagcuaccuaagauucuca

SEQ ID NO: 1373124 - RNA, 19 nt, Artificial Sequence
  Description of Artificial Sequence: Synthetic oligonucleotide
  Sense strand starting at position 2572 of SEQ ID NO: 1242791
agcuuacuaugucugauau

SEQ ID NO: 1373125 - RNA, 19 nt, Artificial Sequence
  Description of Artificial Sequence: Synthetic oligonucleotide
  Antisense strand to SEQ ID NO: 1373124
auaucagacauaguaagcu

SEQ ID NO: 1373126 - RNA, 19 nt, Artificial Sequence
  Description of Artificial Sequence: Synthetic oligonucleotide
  Sense strand starting at position 2573 of SEQ ID NO: 1242791
gcuuacuaugucugauaua

SEQ ID NO: 1373127 - RNA, 19 nt, Artificial Sequence
  Description of Artificial Sequence: Synthetic oligonucleotide
  Antisense strand to SEQ ID NO: 1373126
uauaucagacauaguaagc

SEQ ID NO: 1373128 - RNA, 19 nt, Artificial Sequence
  Description of Artificial Sequence: Synthetic oligonucleotide
  Sense strand starting at position 2582 of SEQ ID NO: 1242791
gucugauauagccagagau

SEQ ID NO: 1373129 - RNA, 19 nt, Artificial Sequence
  Description of Artificial Sequence: Synthetic oligonucleotide
  Antisense strand to SEQ ID NO: 1373128
aucucuggcuauaucagac

SEQ ID NO: 1373130 - RNA, 19 nt, Artificial Sequence
  Description of Artificial Sequence: Synthetic oligonucleotide
  Sense strand starting at position 2592 of SEQ ID NO: 1242791
gccagagaugccuacaguc

SEQ ID NO: 1373131 - RNA, 19 nt, Artificial Sequence
  Description of Artificial Sequence: Synthetic oligonucleotide
  Antisense strand to SEQ ID NO: 1373130
gacuguaggcaucucuggc

SEQ ID NO: 1373132 - RNA, 19 nt, Artificial Sequence
  Description of Artificial Sequence: Synthetic oligonucleotide
  Sense strand starting at position 2760 of SEQ ID NO: 1242791
ucaugaaaccuguauccug

SEQ ID NO: 1373133 - RNA, 19 nt, Artificial Sequence
  Description of Artificial Sequence: Synthetic oligonucleotide
  Antisense strand to SEQ ID NO: 1373132
caggauacagguuucauga

SEQ ID NO: 1373134 - RNA, 19 nt, Artificial Sequence
  Description of Artificial Sequence: Synthetic oligonucleotide
  Sense strand starting at position 2797 of SEQ ID NO: 1242791
gaauuaugugauugcacca

SEQ ID NO: 1373135 - RNA, 19 nt, Artificial Sequence
  Description of Artificial Sequence: Synthetic oligonucleotide
  Antisense strand to SEQ ID NO: 1373134
uggugcaaucacauaauuc

SEQ ID NO: 1373136 - RNA, 19 nt, Artificial Sequence
  Description of Artificial Sequence: Synthetic oligonucleotide
  Sense strand starting at position 2856 of SEQ ID NO: 1242791
gaaacugagcucuggauuc

SEQ ID NO: 1373137 - RNA, 19 nt, Artificial Sequence
  Description of Artificial Sequence: Synthetic oligonucleotide
  Antisense strand to SEQ ID NO: 1373136
gaauccagagcucaguuuc

SEQ ID NO: 1373138 - RNA, 19 nt, Artificial Sequence
  Description of Artificial Sequence: Synthetic oligonucleotide
  Sense strand starting at position 2909 of SEQ ID NO: 1242791
ccaggucuaggaugaguau

SEQ ID NO: 1373139 - RNA, 19 nt, Artificial Sequence
  Description of Artificial Sequence: Synthetic oligonucleotide
  Antisense strand to SEQ ID NO: 1373138
auacucauccuagaccugg

SEQ ID NO: 1373140 - RNA, 19 nt, Artificial Sequence
  Description of Artificial Sequence: Synthetic oligonucleotide
  Sense strand starting at position 2910 of SEQ ID NO: 1242791
caggucuaggaugaguauu

SEQ ID NO: 1373141 - RNA, 19 nt, Artificial Sequence
  Description of Artificial Sequence: Synthetic oligonucleotide
  Antisense strand to SEQ ID NO: 1373140
aauacucauccuagaccug

SEQ ID NO: 1373142 - RNA, 19 nt, Artificial Sequence
  Description of Artificial Sequence: Synthetic oligonucleotide
  Sense strand starting at position 2912 of SEQ ID NO: 1242791
ggucuaggaugaguauuca

SEQ ID NO: 1373143 - RNA, 19 nt, Artificial Sequence
  Description of Artificial Sequence: Synthetic oligonucleotide
  Antisense strand to SEQ ID NO: 1373142
ugaauacucauccuagacc

SEQ ID NO: 1373144 - RNA, 19 nt, Artificial Sequence
  Description of Artificial Sequence: Synthetic oligonucleotide
  Sense strand starting at position 3035 of SEQ ID NO: 1242791
gugugaacccucuaucaaa

SEQ ID NO: 1373145 - RNA, 19 nt, Artificial Sequence
  Description of Artificial Sequence: Synthetic oligonucleotide
  Antisense strand to SEQ ID NO: 1373144
uuugauagaggguucacac

SEQ ID NO: 1373146 - RNA, 19 nt, Artificial Sequence
  Description of Artificial Sequence: Synthetic oligonucleotide
  Sense strand starting at position 3097 of SEQ ID NO: 1242791
gccuguucuguccucagca

SEQ ID NO: 1373147 - RNA, 19 nt, Artificial Sequence
  Description of Artificial Sequence: Synthetic oligonucleotide
  Antisense strand to SEQ ID NO: 1373146
ugcugaggacagaacaggc

SEQ ID NO: 1373148 - RNA, 19 nt, Artificial Sequence
  Description of Artificial Sequence: Synthetic oligonucleotide
  Sense strand starting at position 3132 of SEQ ID NO: 1242791
gcaugaaggagguguucua

SEQ ID NO: 1373149 - RNA, 19 nt, Artificial Sequence
  Description of Artificial Sequence: Synthetic oligonucleotide
  Antisense strand to SEQ ID NO: 1373148
uagaacaccuccuucaugc

SEQ ID NO: 1373150 - RNA, 19 nt, Artificial Sequence
  Description of Artificial Sequence: Synthetic oligonucleotide
  Sense strand starting at position 3158 of SEQ ID NO: 1242791
guauguaaugaaugcuuga

SEQ ID NO: 1373151 - RNA, 19 nt, Artificial Sequence
  Description of Artificial Sequence: Synthetic oligonucleotide
  Antisense strand to SEQ ID NO: 1373150
ucaagcauucauuacauac

SEQ ID NO: 1373152 - RNA, 19 nt, Artificial Sequence
  Description of Artificial Sequence: Synthetic oligonucleotide
  Sense strand starting at position 3233 of SEQ ID NO: 1242791
ggaagcuucuagcuuugau

SEQ ID NO: 1373153 - RNA, 19 nt, Artificial Sequence
  Description of Artificial Sequence: Synthetic oligonucleotide
  Antisense strand to SEQ ID NO: 1373152
aucaaagcuagaagcuucc

SEQ ID NO: 1373154 - RNA, 19 nt, Artificial Sequence
  Description of Artificial Sequence: Synthetic oligonucleotide
  Sense strand starting at position 3243 of SEQ ID NO: 1242791
agcuuugaucaagggcuga

SEQ ID NO: 1373155 - RNA, 19 nt, Artificial Sequence
  Description of Artificial Sequence: Synthetic oligonucleotide
  Antisense strand to SEQ ID NO: 1373154
ucagcccuugaucaaagcu

SEQ ID NO: 1373156 - RNA, 19 nt, Artificial Sequence
  Description of Artificial Sequence: Synthetic oligonucleotide
  Sense strand starting at position 3247 of SEQ ID NO: 1242791
uugaucaagggcugaugua

SEQ ID NO: 1373157 - RNA, 19 nt, Artificial Sequence
  Description of Artificial Sequence: Synthetic oligonucleotide
  Antisense strand to SEQ ID NO: 1373156
uacaucagcccuugaucaa

SEQ ID NO: 1373158 - RNA, 19 nt, Artificial Sequence
  Description of Artificial Sequence: Synthetic oligonucleotide
  Sense strand starting at position 3373 of SEQ ID NO: 1242791
accuguuucucauugguaa

SEQ ID NO: 1373159 - RNA, 19 nt, Artificial Sequence
  Description of Artificial Sequence: Synthetic oligonucleotide
  Antisense strand to SEQ ID NO: 1373158
uuaccaaugagaaacaggu

SEQ ID NO: 1373160 - RNA, 19 nt, Artificial Sequence
  Description of Artificial Sequence: Synthetic oligonucleotide
  Sense strand starting at position 3498 of SEQ ID NO: 1242791
agcucucacugagcuauaa

SEQ ID NO: 1373161 - RNA, 19 nt, Artificial Sequence
  Description of Artificial Sequence: Synthetic oligonucleotide
  Antisense strand to SEQ ID NO: 1373160
uuauagcucagugagagcu

SEQ ID NO: 1373162 - RNA, 19 nt, Artificial Sequence
  Description of Artificial Sequence: Synthetic oligonucleotide
  Sense strand starting at position 3555 of SEQ ID NO: 1242791
ggcauuguugcagagaaga

SEQ ID NO: 1373163 - RNA, 19 nt, Artificial Sequence
  Description of Artificial Sequence: Synthetic oligonucleotide
  Antisense strand to SEQ ID NO: 1373162
ucuucucugcaacaaugcc

SEQ ID NO: 1373164 - RNA, 19 nt, Artificial Sequence
  Description of Artificial Sequence: Synthetic oligonucleotide
  Sense strand starting at position 3588 of SEQ ID NO: 1242791
aguuaaagauaccuggcau

SEQ ID NO: 1373165 - RNA, 19 nt, Artificial Sequence
  Description of Artificial Sequence: Synthetic oligonucleotide
  Antisense strand to SEQ ID NO: 1373164
augccagguaucuuuaacu

SEQ ID NO: 1373166 - RNA, 19 nt, Artificial Sequence
  Description of Artificial Sequence: Synthetic oligonucleotide
  Sense strand starting at position 3626 of SEQ ID NO: 1242791
ccucccuacguauauaaga

SEQ ID NO: 1373167 - RNA, 19 nt, Artificial Sequence
  Description of Artificial Sequence: Synthetic oligonucleotide
  Antisense strand to SEQ ID NO: 1373166
ucuuauauacguagggagg

SEQ ID NO: 1373168 - RNA, 19 nt, Artificial Sequence
  Description of Artificial Sequence: Synthetic oligonucleotide
  Sense strand starting at position 3971 of SEQ ID NO: 1242791
gaguaagacucucucaaga

SEQ ID NO: 1373169 - RNA, 19 nt, Artificial Sequence
  Description of Artificial Sequence: Synthetic oligonucleotide
  Antisense strand to SEQ ID NO: 1373168
ucuugagagagucuuacuc

SEQ ID NO: 1373170 - RNA, 19 nt, Artificial Sequence
  Description of Artificial Sequence: Synthetic oligonucleotide
  Sense strand starting at position 132 of SEQ ID NO: 1242792
gagggaguguccguuggaa

SEQ ID NO: 1373171 - RNA, 19 nt, Artificial Sequence
  Description of Artificial Sequence: Synthetic oligonucleotide
  Antisense strand to SEQ ID NO: 1373170
uuccaacggacacucccuc

SEQ ID NO: 1373172 - RNA, 19 nt, Artificial Sequence
  Description of Artificial Sequence: Synthetic oligonucleotide
  Sense strand starting at position 134 of SEQ ID NO: 1242792
gggaguguccguuggaaca

SEQ ID NO: 1373173 - RNA, 19 nt, Artificial Sequence
  Description of Artificial Sequence: Synthetic oligonucleotide
  Antisense strand to SEQ ID NO: 1373172
uguuccaacggacacuccc

SEQ ID NO: 1373174 - RNA, 19 nt, Artificial Sequence
  Description of Artificial Sequence: Synthetic oligonucleotide
  Sense strand starting at position 253 of SEQ ID NO: 1242792
gcuggaucaugucacaguu

SEQ ID NO: 1373175 - RNA, 19 nt, Artificial Sequence
  Description of Artificial Sequence: Synthetic oligonucleotide
  Antisense strand to SEQ ID NO: 1373174
aacugugacaugauccagc

SEQ ID NO: 1373176 - RNA, 19 nt, Artificial Sequence
  Description of Artificial Sequence: Synthetic oligonucleotide
  Sense strand starting at position 263 of SEQ ID NO: 1242792
gucacaguuugccucauuu

SEQ ID NO: 1373177 - RNA, 19 nt, Artificial Sequence
  Description of Artificial Sequence: Synthetic oligonucleotide
  Antisense strand to SEQ ID NO: 1373176
aaaugaggcaaacugugac

SEQ ID NO: 1373178 - RNA, 19 nt, Artificial Sequence
  Description of Artificial Sequence: Synthetic oligonucleotide
  Sense strand starting at position 379 of SEQ ID NO: 1242792
ugguucuuuccauggagaa

SEQ ID NO: 1373179 - RNA, 19 nt, Artificial Sequence
  Description of Artificial Sequence: Synthetic oligonucleotide
  Antisense strand to SEQ ID NO: 1373178
uucuccauggaaagaacca

SEQ ID NO: 1373180 - RNA, 19 nt, Artificial Sequence
  Description of Artificial Sequence: Synthetic oligonucleotide
  Sense strand starting at position 380 of SEQ ID NO: 1242792
gguucuuuccauggagaaa

SEQ ID NO: 1373181 - RNA, 19 nt, Artificial Sequence
  Description of Artificial Sequence: Synthetic oligonucleotide
  Antisense strand to SEQ ID NO: 1373180
uuucuccauggaaagaacc

SEQ ID NO: 1373182 - RNA, 19 nt, Artificial Sequence
  Description of Artificial Sequence: Synthetic oligonucleotide
  Sense strand starting at position 501 of SEQ ID NO: 1242792
guccauucuccaggaggca

SEQ ID NO: 1373183 - RNA, 19 nt, Artificial Sequence
  Description of Artificial Sequence: Synthetic oligonucleotide
  Antisense strand to SEQ ID NO: 1373182
ugccuccuggagaauggac

SEQ ID NO: 1373184 - RNA, 19 nt, Artificial Sequence
  Description of Artificial Sequence: Synthetic oligonucleotide
  Sense strand starting at position 655 of SEQ ID NO: 1242792
gcagcugccagggauuaca

SEQ ID NO: 1373185 - RNA, 19 nt, Artificial Sequence
  Description of Artificial Sequence: Synthetic oligonucleotide
  Antisense strand to SEQ ID NO: 1373184
uguaaucccuggcagcugc

SEQ ID NO: 1373186 - RNA, 19 nt, Artificial Sequence
  Description of Artificial Sequence: Synthetic oligonucleotide
  Sense strand starting at position 683 of SEQ ID NO: 1242792
caccgccuguuuccugaaa

SEQ ID NO: 1373187 - RNA, 19 nt, Artificial Sequence
  Description of Artificial Sequence: Synthetic oligonucleotide
  Antisense strand to SEQ ID NO: 1373186
uuucaggaaacaggcggug

SEQ ID NO: 1373188 - RNA, 19 nt, Artificial Sequence
  Description of Artificial Sequence: Synthetic oligonucleotide
  Sense strand starting at position 988 of SEQ ID NO: 1242792
aggagagcuucuugaacuc

SEQ ID NO: 1373189 - RNA, 19 nt, Artificial Sequence
  Description of Artificial Sequence: Synthetic oligonucleotide
  Antisense strand to SEQ ID NO: 1373188
gaguucaagaagcucuccu

SEQ ID NO: 1373190 - RNA, 19 nt, Artificial Sequence
  Description of Artificial Sequence: Synthetic oligonucleotide
  Sense strand starting at position 1083 of SEQ ID NO: 1242792
ggagcaucgcugugagaaa

SEQ ID NO: 1373191 - RNA, 19 nt, Artificial Sequence
  Description of Artificial Sequence: Synthetic oligonucleotide
  Antisense strand to SEQ ID NO: 1373190
uuucucacagcgaugcucc

SEQ ID NO: 1373192 - RNA, 19 nt, Artificial Sequence
  Description of Artificial Sequence: Synthetic oligonucleotide
  Sense strand starting at position 1084 of SEQ ID NO: 1242792
gagcaucgcugugagaaac

SEQ ID NO: 1373193 - RNA, 19 nt, Artificial Sequence
  Description of Artificial Sequence: Synthetic oligonucleotide
  Antisense strand to SEQ ID NO: 1373192
guuucucacagcgaugcuc

SEQ ID NO: 1373194 - RNA, 19 nt, Artificial Sequence
  Description of Artificial Sequence: Synthetic oligonucleotide
  Sense strand starting at position 1214 of SEQ ID NO: 1242792
cuccgacuucugggaagcu

SEQ ID NO: 1373195 - RNA, 19 nt, Artificial Sequence
  Description of Artificial Sequence: Synthetic oligonucleotide
  Antisense strand to SEQ ID NO: 1373194
agcuucccagaagucggag

SEQ ID NO: 1373196 - RNA, 19 nt, Artificial Sequence
  Description of Artificial Sequence: Synthetic oligonucleotide
  Sense strand starting at position 2436 of SEQ ID NO: 1242792
ggguuguauugggcaggau

SEQ ID NO: 1373197 - RNA, 19 nt, Artificial Sequence
  Description of Artificial Sequence: Synthetic oligonucleotide
  Antisense strand to SEQ ID NO: 1373196
auccugcccaauacaaccc

SEQ ID NO: 1373198 - RNA, 19 nt, Artificial Sequence
  Description of Artificial Sequence: Synthetic oligonucleotide
  Sense strand starting at position 2437 of SEQ ID NO: 1242792
gguuguauugggcaggauu

SEQ ID NO: 1373199 - RNA, 19 nt, Artificial Sequence
  Description of Artificial Sequence: Synthetic oligonucleotide
  Antisense strand to SEQ ID NO: 1373198
aauccugcccaauacaacc

SEQ ID NO: 1373200 - RNA, 19 nt, Artificial Sequence
  Description of Artificial Sequence: Synthetic oligonucleotide
  Sense strand starting at position 2451 of SEQ ID NO: 1242792
ggauuagggccgcaguguu

SEQ ID NO: 1373201 - RNA, 19 nt, Artificial Sequence
  Description of Artificial Sequence: Synthetic oligonucleotide
  Antisense strand to SEQ ID NO: 1373200
aacacugcggcccuaaucc

SEQ ID NO: 1373202 - RNA, 19 nt, Artificial Sequence
  Description of Artificial Sequence: Synthetic oligonucleotide
  Sense strand starting at position 2516 of SEQ ID NO: 1242792
gccgccagagauuggaaau

SEQ ID NO: 1373203 - RNA, 19 nt, Artificial Sequence
  Description of Artificial Sequence: Synthetic oligonucleotide
  Antisense strand to SEQ ID NO: 1373202
auuuccaaucucuggcggc

SEQ ID NO: 1373204 - RNA, 19 nt, Artificial Sequence
  Description of Artificial Sequence: Synthetic oligonucleotide
  Sense strand starting at position 2517 of SEQ ID NO: 1242792
ccgccagagauuggaaaua

SEQ ID NO: 1373205 - RNA, 19 nt, Artificial Sequence
  Description of Artificial Sequence: Synthetic oligonucleotide
  Antisense strand to SEQ ID NO: 1373204
uauuuccaaucucuggcgg

SEQ ID NO: 1373206 - RNA, 19 nt, Artificial Sequence
  Description of Artificial Sequence: Synthetic oligonucleotide
  Sense strand starting at position 2593 of SEQ ID NO: 1242792
ucuacucauccgugcggaa

SEQ ID NO: 1373207 - RNA, 19 nt, Artificial Sequence
  Description of Artificial Sequence: Synthetic oligonucleotide
  Antisense strand to SEQ ID NO: 1373206
uuccgcacggaugaguaga

SEQ ID NO: 1373208 - RNA, 19 nt, Artificial Sequence
  Description of Artificial Sequence: Synthetic oligonucleotide
  Sense strand starting at position 2665 of SEQ ID NO: 1242792
ggcaccaauucuuaggaca

SEQ ID NO: 1373209 - RNA, 19 nt, Artificial Sequence
  Description of Artificial Sequence: Synthetic oligonucleotide
  Antisense strand to SEQ ID NO: 1373208
uguccuaagaauuggugcc

SEQ ID NO: 1373210 - RNA, 19 nt, Artificial Sequence
  Description of Artificial Sequence: Synthetic oligonucleotide
  Sense strand starting at position 2729 of SEQ ID NO: 1242792
uuaggugcucucugggcaa

SEQ ID NO: 1373211 - RNA, 19 nt, Artificial Sequence
  Description of Artificial Sequence: Synthetic oligonucleotide
  Antisense strand to SEQ ID NO: 1373210
uugcccagagagcaccuaa

SEQ ID NO: 1373212 - RNA, 19 nt, Artificial Sequence
  Description of Artificial Sequence: Synthetic oligonucleotide
  Sense strand starting at position 2732 of SEQ ID NO: 1242792
ggugcucucugggcaaguu

SEQ ID NO: 1373213 - RNA, 19 nt, Artificial Sequence
  Description of Artificial Sequence: Synthetic oligonucleotide
  Antisense strand to SEQ ID NO: 1373212
aacuugcccagagagcacc

SEQ ID NO: 1373214 - RNA, 19 nt, Artificial Sequence
  Description of Artificial Sequence: Synthetic oligonucleotide
  Sense strand starting at position 2873 of SEQ ID NO: 1242792
ggguuaaugccgagugcuu

SEQ ID NO: 1373215 - RNA, 19 nt, Artificial Sequence
  Description of Artificial Sequence: Synthetic oligonucleotide
  Antisense strand to SEQ ID NO: 1373214
aagcacucggcauuaaccc

SEQ ID NO: 1373216 - RNA, 19 nt, Artificial Sequence
  Description of Artificial Sequence: Synthetic oligonucleotide
  Sense strand starting at position 2874 of SEQ ID NO: 1242792
gguuaaugccgagugcuuc

SEQ ID NO: 1373217 - RNA, 19 nt, Artificial Sequence
  Description of Artificial Sequence: Synthetic oligonucleotide
  Antisense strand to SEQ ID NO: 1373216
gaagcacucggcauuaacc

SEQ ID NO: 1373218 - RNA, 19 nt, Artificial Sequence
  Description of Artificial Sequence: Synthetic oligonucleotide
  Sense strand starting at position 2880 of SEQ ID NO: 1242792
ugccgagugcuuccauugu

SEQ ID NO: 1373219 - RNA, 19 nt, Artificial Sequence
  Description of Artificial Sequence: Synthetic oligonucleotide
  Antisense strand to SEQ ID NO: 1373218
acaauggaagcacucggca

SEQ ID NO: 1373220 - RNA, 19 nt, Artificial Sequence
  Description of Artificial Sequence: Synthetic oligonucleotide
  Sense strand starting at position 2884 of SEQ ID NO: 1242792
gagugcuuccauuguggcu

SEQ ID NO: 1373221 - RNA, 19 nt, Artificial Sequence
  Description of Artificial Sequence: Synthetic oligonucleotide
  Antisense strand to SEQ ID NO: 1373220
agccacaauggaagcacuc

SEQ ID NO: 1373222 - RNA, 19 nt, Artificial Sequence
  Description of Artificial Sequence: Synthetic oligonucleotide
  Sense strand starting at position 2972 of SEQ ID NO: 1242792
gucugagucacuggcacuu

SEQ ID NO: 1373223 - RNA, 19 nt, Artificial Sequence
  Description of Artificial Sequence: Synthetic oligonucleotide
  Antisense strand to SEQ ID NO: 1373222
aagugccagugacucagac

SEQ ID NO: 1373224 - RNA, 19 nt, Artificial Sequence
  Description of Artificial Sequence: Synthetic oligonucleotide
  Sense strand starting at position 3182 of SEQ ID NO: 1242792
ggaagacuuuccugauugc

SEQ ID NO: 1373225 - RNA, 19 nt, Artificial Sequence
  Description of Artificial Sequence: Synthetic oligonucleotide
  Antisense strand to SEQ ID NO: 1373224
gcaaucaggaaagucuucc

SEQ ID NO: 1373226 - RNA, 19 nt, Artificial Sequence
  Description of Artificial Sequence: Synthetic oligonucleotide
  Sense strand starting at position 3205 of SEQ ID NO: 1242792
gccucagaaucugucucuu

SEQ ID NO: 1373227 - RNA, 19 nt, Artificial Sequence
  Description of Artificial Sequence: Synthetic oligonucleotide
  Antisense strand to SEQ ID NO: 1373226
aagagacagauucugaggc

SEQ ID NO: 1373228 - RNA, 19 nt, Artificial Sequence
  Description of Artificial Sequence: Synthetic oligonucleotide
  Sense strand starting at position 3207 of SEQ ID NO: 1242792
cucagaaucugucucuugu

SEQ ID NO: 1373229 - RNA, 19 nt, Artificial Sequence
  Description of Artificial Sequence: Synthetic oligonucleotide
  Antisense strand to SEQ ID NO: 1373228
acaagagacagauucugag

SEQ ID NO: 1373230 - RNA, 19 nt, Artificial Sequence
  Description of Artificial Sequence: Synthetic oligonucleotide
  Sense strand starting at position 3406 of SEQ ID NO: 1242792
cagcgaggcuuccuuuaag

SEQ ID NO: 1373231 - RNA, 19 nt, Artificial Sequence
  Description of Artificial Sequence: Synthetic oligonucleotide
  Antisense strand to SEQ ID NO: 1373230
cuuaaaggaagccucgcug

SEQ ID NO: 1373232 - RNA, 19 nt, Artificial Sequence
  Description of Artificial Sequence: Synthetic oligonucleotide
  Sense strand starting at position 3409 of SEQ ID NO: 1242792
cgaggcuuccuuuaagaaa

SEQ ID NO: 1373233 - RNA, 19 nt, Artificial Sequence
  Description of Artificial Sequence: Synthetic oligonucleotide
  Antisense strand to SEQ ID NO: 1373232
uuucuuaaaggaagccucg

SEQ ID NO: 1373234 - RNA, 19 nt, Artificial Sequence
  Description of Artificial Sequence: Synthetic oligonucleotide
  Sense strand starting at position 3428 of SEQ ID NO: 1242792
ccugaaggaugagauaguu

SEQ ID NO: 1373235 - RNA, 19 nt, Artificial Sequence
  Description of Artificial Sequence: Synthetic oligonucleotide
  Antisense strand to SEQ ID NO: 1373234
aacuaucucauccuucagg

SEQ ID NO: 1373236 - RNA, 19 nt, Artificial Sequence
  Description of Artificial Sequence: Synthetic oligonucleotide
  Sense strand starting at position 3440 of SEQ ID NO: 1242792
gauaguugggccugucaag

SEQ ID NO: 1373237 - RNA, 19 nt, Artificial Sequence
  Description of Artificial Sequence: Synthetic oligonucleotide
  Antisense strand to SEQ ID NO: 1373236
cuugacaggcccaacuauc

SEQ ID NO: 1373238 - RNA, 19 nt, Artificial Sequence
  Description of Artificial Sequence: Synthetic oligonucleotide
  Sense strand starting at position 3613 of SEQ ID NO: 1242792
guggaaaccacgcaaaugu

SEQ ID NO: 1373239 - RNA, 19 nt, Artificial Sequence
  Description of Artificial Sequence: Synthetic oligonucleotide
  Antisense strand to SEQ ID NO: 1373238
acauuugcgugguuuccac

SEQ ID NO: 1373240 - RNA, 19 nt, Artificial Sequence
  Description of Artificial Sequence: Synthetic oligonucleotide
  Sense strand starting at position 3694 of SEQ ID NO: 1242792
gccauagaaagguacgaau

SEQ ID NO: 1373241 - RNA, 19 nt, Artificial Sequence
  Description of Artificial Sequence: Synthetic oligonucleotide
  Antisense strand to SEQ ID NO: 1373240
auucguaccuuucuauggc

SEQ ID NO: 1373242 - RNA, 19 nt, Artificial Sequence
  Description of Artificial Sequence: Synthetic oligonucleotide
  Sense strand starting at position 3696 of SEQ ID NO: 1242792
cauagaaagguacgaauua

SEQ ID NO: 1373243 - RNA, 19 nt, Artificial Sequence
  Description of Artificial Sequence: Synthetic oligonucleotide
  Antisense strand to SEQ ID NO: 1373242
uaauucguaccuuucuaug

SEQ ID NO: 1373244 - RNA, 19 nt, Artificial Sequence
  Description of Artificial Sequence: Synthetic oligonucleotide
  Sense strand starting at position 3705 of SEQ ID NO: 1242792
guacgaauuacuggccagu

SEQ ID NO: 1373245 - RNA, 19 nt, Artificial Sequence
  Description of Artificial Sequence: Synthetic oligonucleotide
  Antisense strand to SEQ ID NO: 1373244
acuggccaguaauucguac

SEQ ID NO: 1373246 - RNA, 19 nt, Artificial Sequence
  Description of Artificial Sequence: Synthetic oligonucleotide
  Sense strand starting at position 3928 of SEQ ID NO: 1242792
ggaaguugcagccaagauu

SEQ ID NO: 1373247 - RNA, 19 nt, Artificial Sequence
  Description of Artificial Sequence: Synthetic oligonucleotide
  Antisense strand to SEQ ID NO: 1373246
aaucuuggcugcaacuucc

SEQ ID NO: 1373248 - RNA, 19 nt, Artificial Sequence
  Description of Artificial Sequence: Synthetic oligonucleotide
  Sense strand starting at position 1126 of SEQ ID NO: 1242793
acgcguuucacgcgagaug

SEQ ID NO: 1373249 - RNA, 19 nt, Artificial Sequence
  Description of Artificial Sequence: Synthetic oligonucleotide
  Antisense strand to SEQ ID NO: 1373248
caucucgcgugaaacgcgu

SEQ ID NO: 1373250 - RNA, 19 nt, Artificial Sequence
  Description of Artificial Sequence: Synthetic oligonucleotide
  Sense strand starting at position 2497 of SEQ ID NO: 1242793
gggcugaaucgcggucuga

SEQ ID NO: 1373251 - RNA, 19 nt, Artificial Sequence
  Description of Artificial Sequence: Synthetic oligonucleotide
  Antisense strand to SEQ ID NO: 1373250
ucagaccgcgauucagccc

SEQ ID NO: 1373252 - RNA, 19 nt, Artificial Sequence
  Description of Artificial Sequence: Synthetic oligonucleotide
  Sense strand starting at position 2499 of SEQ ID NO: 1242793
gcugaaucgcggucugauu

SEQ ID NO: 1373253 - RNA, 19 nt, Artificial Sequence
  Description of Artificial Sequence: Synthetic oligonucleotide
  Antisense strand to SEQ ID NO: 1373252
aaucagaccgcgauucagc

SEQ ID NO: 1373254 - RNA, 19 nt, Artificial Sequence
  Description of Artificial Sequence: Synthetic oligonucleotide
  Sense strand starting at position 2784 of SEQ ID NO: 1242793
gggagacauuaagacugaa

SEQ ID NO: 1373255 - RNA, 19 nt, Artificial Sequence
  Description of Artificial Sequence: Synthetic oligonucleotide
  Antisense strand to SEQ ID NO: 1373254
uucagucuuaaugucuccc

SEQ ID NO: 1373256 - RNA, 19 nt, Artificial Sequence
  Description of Artificial Sequence: Synthetic oligonucleotide
  Sense strand starting at position 3463 of SEQ ID NO: 1242793
ugagguuugcucgucugca

SEQ ID NO: 1373257 - RNA, 19 nt, Artificial Sequence
  Description of Artificial Sequence: Synthetic oligonucleotide
  Antisense strand to SEQ ID NO: 1373256
ugcagacgagcaaaccuca

SEQ ID NO: 1373258 - RNA, 19 nt, Artificial Sequence
  Description of Artificial Sequence: Synthetic oligonucleotide
  Sense strand starting at position 3464 of SEQ ID NO: 1242793
gagguuugcucgucugcag

SEQ ID NO: 1373259 - RNA, 19 nt, Artificial Sequence
  Description of Artificial Sequence: Synthetic oligonucleotide
  Antisense strand to SEQ ID NO: 1373258
cugcagacgagcaaaccuc

SEQ ID NO: 1373260 - RNA, 19 nt, Artificial Sequence
  Description of Artificial Sequence: Synthetic oligonucleotide
  Sense strand starting at position 3592 of SEQ ID NO: 1242793
acagauggcuuccaagcaa

SEQ ID NO: 1373261 - RNA, 19 nt, Artificial Sequence
  Description of Artificial Sequence: Synthetic oligonucleotide
  Antisense strand to SEQ ID NO: 1373260
uugcuuggaagccaucugu

SEQ ID NO: 1373262 - RNA, 19 nt, Artificial Sequence
  Description of Artificial Sequence: Synthetic oligonucleotide
  Sense strand starting at position 3625 of SEQ ID NO: 1242793
caagaaagaucacagaguu

SEQ ID NO: 1373263 - RNA, 19 nt, Artificial Sequence
  Description of Artificial Sequence: Synthetic oligonucleotide
  Antisense strand to SEQ ID NO: 1373262
aacucugugaucuuucuug

SEQ ID NO: 1373264 - RNA, 19 nt, Artificial Sequence
  Description of Artificial Sequence: Synthetic oligonucleotide
  Sense strand starting at position 3633 of SEQ ID NO: 1242793
aucacagaguuugggaauu

SEQ ID NO: 1373265 - RNA, 19 nt, Artificial Sequence
  Description of Artificial Sequence: Synthetic oligonucleotide
  Antisense strand to SEQ ID NO: 1373264
aauucccaaacucugugau

SEQ ID NO: 1373266 - RNA, 19 nt, Artificial Sequence
  Description of Artificial Sequence: Synthetic oligonucleotide
  Sense strand starting at position 3706 of SEQ ID NO: 1242793
cuugcugucuccugacuga

SEQ ID NO: 1373267 - RNA, 19 nt, Artificial Sequence
  Description of Artificial Sequence: Synthetic oligonucleotide
  Antisense strand to SEQ ID NO: 1373266
ucagucaggagacagcaag

SEQ ID NO: 1373268 - RNA, 19 nt, Artificial Sequence
  Description of Artificial Sequence: Synthetic oligonucleotide
  Sense strand starting at position 3739 of SEQ ID NO: 1242793
gccugcucuaauggagaga

SEQ ID NO: 1373269 - RNA, 19 nt, Artificial Sequence
  Description of Artificial Sequence: Synthetic oligonucleotide
  Antisense strand to SEQ ID NO: 1373268
ucucuccauuagagcaggc

SEQ ID NO: 1373270 - RNA, 19 nt, Artificial Sequence
  Description of Artificial Sequence: Synthetic oligonucleotide
  Sense strand starting at position 3959 of SEQ ID NO: 1242793
gaauaauaaccguguuccu

SEQ ID NO: 1373271 - RNA, 19 nt, Artificial Sequence
  Description of Artificial Sequence: Synthetic oligonucleotide
  Antisense strand to SEQ ID NO: 1373270
aggaacacgguuauuauuc

SEQ ID NO: 1373272 - RNA, 19 nt, Artificial Sequence
  Description of Artificial Sequence: Synthetic oligonucleotide
  Sense strand starting at position 3966 of SEQ ID NO: 1242793
aaccguguuccuuguugaa

SEQ ID NO: 1373273 - RNA, 19 nt, Artificial Sequence
  Description of Artificial Sequence: Synthetic oligonucleotide
  Antisense strand to SEQ ID NO: 1373272
uucaacaaggaacacgguu

SEQ ID NO: 1373274 - RNA, 19 nt, Artificial Sequence
  Description of Artificial Sequence: Synthetic oligonucleotide
  Sense strand starting at position 3968 of SEQ ID NO: 1242793
ccguguuccuuguugaaau

SEQ ID NO: 1373275 - RNA, 19 nt, Artificial Sequence
  Description of Artificial Sequence: Synthetic oligonucleotide
  Antisense strand to SEQ ID NO: 1373274
auuucaacaaggaacacgg

SEQ ID NO: 1373276 - RNA, 19 nt, Artificial Sequence
  Description of Artificial Sequence: Synthetic oligonucleotide
  Sense strand starting at position 3969 of SEQ ID NO: 1242793
cguguuccuuguugaaaua

SEQ ID NO: 1373277 - RNA, 19 nt, Artificial Sequence
  Description of Artificial Sequence: Synthetic oligonucleotide
  Antisense strand to SEQ ID NO: 1373276
uauuucaacaaggaacacg

SEQ ID NO: 1373278 - RNA, 19 nt, Artificial Sequence
  Description of Artificial Sequence: Synthetic oligonucleotide
  Sense strand starting at position 3970 of SEQ ID NO: 1242793
guguuccuuguugaaauau

SEQ ID NO: 1373279 - RNA, 19 nt, Artificial Sequence
  Description of Artificial Sequence: Synthetic oligonucleotide
  Antisense strand to SEQ ID NO: 1373278
auauuucaacaaggaacac

SEQ ID NO: 1373280 - RNA, 19 nt, Artificial Sequence
  Description of Artificial Sequence: Synthetic oligonucleotide
  Sense strand starting at position 3979 of SEQ ID NO: 1242793
guugaaauauuagacaaug

SEQ ID NO: 1373281 - RNA, 19 nt, Artificial Sequence
  Description of Artificial Sequence: Synthetic oligonucleotide
  Antisense strand to SEQ ID NO: 1373280
cauugucuaauauuucaac

SEQ ID NO: 1373282 - RNA, 19 nt, Artificial Sequence
  Description of Artificial Sequence: Synthetic oligonucleotide
  Sense strand starting at position 335 of SEQ ID NO: 1242794
gguauauaaucauccaaug

SEQ ID NO: 1373283 - RNA, 19 nt, Artificial Sequence
  Description of Artificial Sequence: Synthetic oligonucleotide
  Antisense strand to SEQ ID NO: 1373282
cauuggaugauuauauacc

SEQ ID NO: 1373284 - RNA, 19 nt, Artificial Sequence
  Description of Artificial Sequence: Synthetic oligonucleotide
  Sense strand starting at position 351 of SEQ ID NO: 1242794
auggaauguugcccagcaa

SEQ ID NO: 1373285 - RNA, 19 nt, Artificial Sequence
  Description of Artificial Sequence: Synthetic oligonucleotide
  Antisense strand to SEQ ID NO: 1373284
uugcugggcaacauuccau

SEQ ID NO: 1373286 - RNA, 19 nt, Artificial Sequence
  Description of Artificial Sequence: Synthetic oligonucleotide
  Sense strand starting at position 774 of SEQ ID NO: 1242794
cagguaaagucucugagga

SEQ ID NO: 1373287 - RNA, 19 nt, Artificial Sequence
  Description of Artificial Sequence: Synthetic oligonucleotide
  Antisense strand to SEQ ID NO: 1373286
uccucagagacuuuaccug

SEQ ID NO: 1373288 - RNA, 19 nt, Artificial Sequence
  Description of Artificial Sequence: Synthetic oligonucleotide
  Sense strand starting at position 775 of SEQ ID NO: 1242794
agguaaagucucugaggaa

SEQ ID NO: 1373289 - RNA, 19 nt, Artificial Sequence
  Description of Artificial Sequence: Synthetic oligonucleotide
  Antisense strand to SEQ ID NO: 1373288
uuccucagagacuuuaccu

SEQ ID NO: 1373290 - RNA, 19 nt, Artificial Sequence
  Description of Artificial Sequence: Synthetic oligonucleotide
  Sense strand starting at position 813 of SEQ ID NO: 1242794
aggugugacgguugagaga

SEQ ID NO: 1373291 - RNA, 19 nt, Artificial Sequence
  Description of Artificial Sequence: Synthetic oligonucleotide
  Antisense strand to SEQ ID NO: 1373290
ucucucaaccgucacaccu

SEQ ID NO: 1373292 - RNA, 19 nt, Artificial Sequence
  Description of Artificial Sequence: Synthetic oligonucleotide
  Sense strand starting at position 991 of SEQ ID NO: 1242794
uggacacaagccugaucau

SEQ ID NO: 1373293 - RNA, 19 nt, Artificial Sequence
  Description of Artificial Sequence: Synthetic oligonucleotide
  Antisense strand to SEQ ID NO: 1373292
augaucaggcuugugucca

SEQ ID NO: 1373294 - RNA, 19 nt, Artificial Sequence
  Description of Artificial Sequence: Synthetic oligonucleotide
  Sense strand starting at position 1037 of SEQ ID NO: 1242794
ggguauaaagcuggugaga

SEQ ID NO: 1373295 - RNA, 19 nt, Artificial Sequence
  Description of Artificial Sequence: Synthetic oligonucleotide
  Antisense strand to SEQ ID NO: 1373294
ucucaccagcuuuauaccc

SEQ ID NO: 1373296 - RNA, 19 nt, Artificial Sequence
  Description of Artificial Sequence: Synthetic oligonucleotide
  Sense strand starting at position 1203 of SEQ ID NO: 1242794
cccuaugaggcagguauua

SEQ ID NO: 1373297 - RNA, 19 nt, Artificial Sequence
  Description of Artificial Sequence: Synthetic oligonucleotide
  Antisense strand to SEQ ID NO: 1373296
uaauaccugccucauaggg

SEQ ID NO: 1373298 - RNA, 19 nt, Artificial Sequence
  Description of Artificial Sequence: Synthetic oligonucleotide
  Sense strand starting at position 1333 of SEQ ID NO: 1242794
uucggugaaugacuuaaau

SEQ ID NO: 1373299 - RNA, 19 nt, Artificial Sequence
  Description of Artificial Sequence: Synthetic oligonucleotide
  Antisense strand to SEQ ID NO: 1373298
auuuaagucauucaccgaa

SEQ ID NO: 1373300 - RNA, 19 nt, Artificial Sequence
  Description of Artificial Sequence: Synthetic oligonucleotide
  Sense strand starting at position 1348 of SEQ ID NO: 1242794
aaauaaacgucauuaugga

SEQ ID NO: 1373301 - RNA, 19 nt, Artificial Sequence
  Description of Artificial Sequence: Synthetic oligonucleotide
  Antisense strand to SEQ ID NO: 1373300
uccauaaugacguuuauuu

SEQ ID NO: 1373302 - RNA, 19 nt, Artificial Sequence
  Description of Artificial Sequence: Synthetic oligonucleotide
  Sense strand starting at position 2177 of SEQ ID NO: 1242794
aaggcagaguuacuagauu

SEQ ID NO: 1373303 - RNA, 19 nt, Artificial Sequence
  Description of Artificial Sequence: Synthetic oligonucleotide
  Antisense strand to SEQ ID NO: 1373302
aaucuaguaacucugccuu

SEQ ID NO: 1373304 - RNA, 19 nt, Artificial Sequence
  Description of Artificial Sequence: Synthetic oligonucleotide
  Sense strand starting at position 2256 of SEQ ID NO: 1242794
aaugacugacuugguauaa

SEQ ID NO: 1373305 - RNA, 19 nt, Artificial Sequence
  Description of Artificial Sequence: Synthetic oligonucleotide
  Antisense strand to SEQ ID NO: 1373304
uuauaccaagucagucauu

SEQ ID NO: 1373306 - RNA, 19 nt, Artificial Sequence
  Description of Artificial Sequence: Synthetic oligonucleotide
  Sense strand starting at position 2257 of SEQ ID NO: 1242794
augacugacuugguauaaa

SEQ ID NO: 1373307 - RNA, 19 nt, Artificial Sequence
  Description of Artificial Sequence: Synthetic oligonucleotide
  Antisense strand to SEQ ID NO: 1373306
uuuauaccaagucagucau

SEQ ID NO: 1373308 - RNA, 19 nt, Artificial Sequence
  Description of Artificial Sequence: Synthetic oligonucleotide
  Sense strand starting at position 2267 of SEQ ID NO: 1242794
ugguauaaauauguccuau

SEQ ID NO: 1373309 - RNA, 19 nt, Artificial Sequence
  Description of Artificial Sequence: Synthetic oligonucleotide
  Antisense strand to SEQ ID NO: 1373308
auaggacauauuuauacca

SEQ ID NO: 1373310 - RNA, 19 nt, Artificial Sequence
  Description of Artificial Sequence: Synthetic oligonucleotide
  Sense strand starting at position 2293 of SEQ ID NO: 1242794
uugggagcuacuuacguua

SEQ ID NO: 1373311 - RNA, 19 nt, Artificial Sequence
  Description of Artificial Sequence: Synthetic oligonucleotide
  Antisense strand to SEQ ID NO: 1373310
uaacguaaguagcucccaa

SEQ ID NO: 1373312 - RNA, 19 nt, Artificial Sequence
  Description of Artificial Sequence: Synthetic oligonucleotide
  Sense strand starting at position 2296 of SEQ ID NO: 1242794
ggagcuacuuacguuaaau

SEQ ID NO: 1373313 - RNA, 19 nt, Artificial Sequence
  Description of Artificial Sequence: Synthetic oligonucleotide
  Antisense strand to SEQ ID NO: 1373312
auuuaacguaaguagcucc

SEQ ID NO: 1373314 - RNA, 19 nt, Artificial Sequence
  Description of Artificial Sequence: Synthetic oligonucleotide
  Sense strand starting at position 2606 of SEQ ID NO: 1242794
aagacugucucagccugaa

SEQ ID NO: 1373315 - RNA, 19 nt, Artificial Sequence
  Description of Artificial Sequence: Synthetic oligonucleotide
  Antisense strand to SEQ ID NO: 1373314
uucaggcugagacagucuu

SEQ ID NO: 1373316 - RNA, 19 nt, Artificial Sequence
  Description of Artificial Sequence: Synthetic oligonucleotide
  Sense strand starting at position 2609 of SEQ ID NO: 1242794
acugucucagccugaacuu

SEQ ID NO: 1373317 - RNA, 19 nt, Artificial Sequence
  Description of Artificial Sequence: Synthetic oligonucleotide
  Antisense strand to SEQ ID NO: 1373316
aaguucaggcugagacagu

SEQ ID NO: 1373318 - RNA, 19 nt, Artificial Sequence
  Description of Artificial Sequence: Synthetic oligonucleotide
  Sense strand starting at position 2899 of SEQ ID NO: 1242794
gcauuugucaaacguguug

SEQ ID NO: 1373319 - RNA, 19 nt, Artificial Sequence
  Description of Artificial Sequence: Synthetic oligonucleotide
  Antisense strand to SEQ ID NO: 1373318
caacacguuugacaaaugc

SEQ ID NO: 1373320 - RNA, 19 nt, Artificial Sequence
  Description of Artificial Sequence: Synthetic oligonucleotide
  Sense strand starting at position 2901 of SEQ ID NO: 1242794
auuugucaaacguguugaa

SEQ ID NO: 1373321 - RNA, 19 nt, Artificial Sequence
  Description of Artificial Sequence: Synthetic oligonucleotide
  Antisense strand to SEQ ID NO: 1373320
uucaacacguuugacaaau

SEQ ID NO: 1373322 - RNA, 19 nt, Artificial Sequence
  Description of Artificial Sequence: Synthetic oligonucleotide
  Sense strand starting at position 3159 of SEQ ID NO: 1242794
uagagacgaguuugacuau

SEQ ID NO: 1373323 - RNA, 19 nt, Artificial Sequence
  Description of Artificial Sequence: Synthetic oligonucleotide
  Antisense strand to SEQ ID NO: 1373322
auagucaaacucgucucua

SEQ ID NO: 1373324 - RNA, 19 nt, Artificial Sequence
  Description of Artificial Sequence: Synthetic oligonucleotide
  Sense strand starting at position 3162 of SEQ ID NO: 1242794
agacgaguuugacuauguu

SEQ ID NO: 1373325 - RNA, 19 nt, Artificial Sequence
  Description of Artificial Sequence: Synthetic oligonucleotide
  Antisense strand to SEQ ID NO: 1373324
aacauagucaaacucgucu

SEQ ID NO: 1373326 - RNA, 19 nt, Artificial Sequence
  Description of Artificial Sequence: Synthetic oligonucleotide
  Sense strand starting at position 3322 of SEQ ID NO: 1242794
ucuuacaaauuugggaaau

SEQ ID NO: 1373327 - RNA, 19 nt, Artificial Sequence
  Description of Artificial Sequence: Synthetic oligonucleotide
  Antisense strand to SEQ ID NO: 1373326
auuucccaaauuuguaaga

SEQ ID NO: 1373328 - RNA, 19 nt, Artificial Sequence
  Description of Artificial Sequence: Synthetic oligonucleotide
  Sense strand starting at position 3323 of SEQ ID NO: 1242794
cuuacaaauuugggaaauu

SEQ ID NO: 1373329 - RNA, 19 nt, Artificial Sequence
  Description of Artificial Sequence: Synthetic oligonucleotide
  Antisense strand to SEQ ID NO: 1373328
aauuucccaaauuuguaag

SEQ ID NO: 1373330 - RNA, 19 nt, Artificial Sequence
  Description of Artificial Sequence: Synthetic oligonucleotide
  Sense strand starting at position 3324 of SEQ ID NO: 1242794
uuacaaauuugggaaauuc

SEQ ID NO: 1373331 - RNA, 19 nt, Artificial Sequence
  Description of Artificial Sequence: Synthetic oligonucleotide
  Antisense strand to SEQ ID NO: 1373330
gaauuucccaaauuuguaa

SEQ ID NO: 1373332 - RNA, 19 nt, Artificial Sequence
  Description of Artificial Sequence: Synthetic oligonucleotide
  Sense strand starting at position 3374 of SEQ ID NO: 1242794
cuguuugaguagcuaauau

SEQ ID NO: 1373333 - RNA, 19 nt, Artificial Sequence
  Description of Artificial Sequence: Synthetic oligonucleotide
  Antisense strand to SEQ ID NO: 1373332
auauuagcuacucaaacag

SEQ ID NO: 1373334 - RNA, 19 nt, Artificial Sequence
  Description of Artificial Sequence: Synthetic oligonucleotide
  Sense strand starting at position 3384 of SEQ ID NO: 1242794
agcuaauauggccauaacu

SEQ ID NO: 1373335 - RNA, 19 nt, Artificial Sequence
  Description of Artificial Sequence: Synthetic oligonucleotide
  Antisense strand to SEQ ID NO: 1373334
aguuauggccauauuagcu

SEQ ID NO: 1373336 - RNA, 19 nt, Artificial Sequence
  Description of Artificial Sequence: Synthetic oligonucleotide
  Sense strand starting at position 3434 of SEQ ID NO: 1242794
augaaucauagugguuaag

SEQ ID NO: 1373337 - RNA, 19 nt, Artificial Sequence
  Description of Artificial Sequence: Synthetic oligonucleotide
  Antisense strand to SEQ ID NO: 1373336
cuuaaccacuaugauucau

SEQ ID NO: 1373338 - RNA, 19 nt, Artificial Sequence
  Description of Artificial Sequence: Synthetic oligonucleotide
  Sense strand starting at position 3436 of SEQ ID NO: 1242794
gaaucauagugguuaagag

SEQ ID NO: 1373339 - RNA, 19 nt, Artificial Sequence
  Description of Artificial Sequence: Synthetic oligonucleotide
  Antisense strand to SEQ ID NO: 1373338
cucuuaaccacuaugauuc

SEQ ID NO: 1373340 - RNA, 19 nt, Artificial Sequence
  Description of Artificial Sequence: Synthetic oligonucleotide
  Sense strand starting at position 3437 of SEQ ID NO: 1242794
aaucauagugguuaagagu

SEQ ID NO: 1373341 - RNA, 19 nt, Artificial Sequence
  Description of Artificial Sequence: Synthetic oligonucleotide
  Antisense strand to SEQ ID NO: 1373340
acucuuaaccacuaugauu

SEQ ID NO: 1373342 - RNA, 19 nt, Artificial Sequence
  Description of Artificial Sequence: Synthetic oligonucleotide
  Sense strand starting at position 3453 of SEQ ID NO: 1242794
aguauaaaugccuaugagu

SEQ ID NO: 1373343 - RNA, 19 nt, Artificial Sequence
  Description of Artificial Sequence: Synthetic oligonucleotide
  Antisense strand to SEQ ID NO: 1373342
acucauaggcauuuauacu

SEQ ID NO: 1373344 - RNA, 19 nt, Artificial Sequence
  Description of Artificial Sequence: Synthetic oligonucleotide
  Sense strand starting at position 3464 of SEQ ID NO: 1242794
cuaugaguccuggagucag

SEQ ID NO: 1373345 - RNA, 19 nt, Artificial Sequence
  Description of Artificial Sequence: Synthetic oligonucleotide
  Antisense strand to SEQ ID NO: 1373344
cugacuccaggacucauag

SEQ ID NO: 1373346 - RNA, 19 nt, Artificial Sequence
  Description of Artificial Sequence: Synthetic oligonucleotide
  Sense strand starting at position 3478 of SEQ ID NO: 1242794
gucagugggcuuggauuaa

SEQ ID NO: 1373347 - RNA, 19 nt, Artificial Sequence
  Description of Artificial Sequence: Synthetic oligonucleotide
  Antisense strand to SEQ ID NO: 1373346
uuaauccaagcccacugac

SEQ ID NO: 1373348 - RNA, 19 nt, Artificial Sequence
  Description of Artificial Sequence: Synthetic oligonucleotide
  Sense strand starting at position 3489 of SEQ ID NO: 1242794
uggauuaaucccgguucua

SEQ ID NO: 1373349 - RNA, 19 nt, Artificial Sequence
  Description of Artificial Sequence: Synthetic oligonucleotide
  Antisense strand to SEQ ID NO: 1373348
uagaaccgggauuaaucca

SEQ ID NO: 1373350 - RNA, 19 nt, Artificial Sequence
  Description of Artificial Sequence: Synthetic oligonucleotide
  Sense strand starting at position 3516 of SEQ ID NO: 1242794
cugguuguaugcucuugaa

SEQ ID NO: 1373351 - RNA, 19 nt, Artificial Sequence
  Description of Artificial Sequence: Synthetic oligonucleotide
  Antisense strand to SEQ ID NO: 1373350
uucaagagcauacaaccag

SEQ ID NO: 1373352 - RNA, 19 nt, Artificial Sequence
  Description of Artificial Sequence: Synthetic oligonucleotide
  Sense strand starting at position 3541 of SEQ ID NO: 1242794
auaguuucucuaugccuca

SEQ ID NO: 1373353 - RNA, 19 nt, Artificial Sequence
  Description of Artificial Sequence: Synthetic oligonucleotide
  Antisense strand to SEQ ID NO: 1373352
ugaggcauagagaaacuau

SEQ ID NO: 1373354 - RNA, 19 nt, Artificial Sequence
  Description of Artificial Sequence: Synthetic oligonucleotide
  Sense strand starting at position 3598 of SEQ ID NO: 1242794
aggucauaggguugcagaa

SEQ ID NO: 1373355 - RNA, 19 nt, Artificial Sequence
  Description of Artificial Sequence: Synthetic oligonucleotide
  Antisense strand to SEQ ID NO: 1373354
uucugcaacccuaugaccu

SEQ ID NO: 1373356 - RNA, 19 nt, Artificial Sequence
  Description of Artificial Sequence: Synthetic oligonucleotide
  Sense strand starting at position 3635 of SEQ ID NO: 1242794
guaucaaagugcuuagaau

SEQ ID NO: 1373357 - RNA, 19 nt, Artificial Sequence
  Description of Artificial Sequence: Synthetic oligonucleotide
  Antisense strand to SEQ ID NO: 1373356
auucuaagcacuuugauac

SEQ ID NO: 1373358 - RNA, 19 nt, Artificial Sequence
  Description of Artificial Sequence: Synthetic oligonucleotide
  Sense strand starting at position 3641 of SEQ ID NO: 1242794
aagugcuuagaauaauagu

SEQ ID NO: 1373359 - RNA, 19 nt, Artificial Sequence
  Description of Artificial Sequence: Synthetic oligonucleotide
  Antisense strand to SEQ ID NO: 1373358
acuauuauucuaagcacuu

SEQ ID NO: 1373360 - RNA, 19 nt, Artificial Sequence
  Description of Artificial Sequence: Synthetic oligonucleotide
  Sense strand starting at position 3792 of SEQ ID NO: 1242794
augguucaggccuguaaug

SEQ ID NO: 1373361 - RNA, 19 nt, Artificial Sequence
  Description of Artificial Sequence: Synthetic oligonucleotide
  Antisense strand to SEQ ID NO: 1373360
cauuacaggccugaaccau

SEQ ID NO: 1373362 - RNA, 19 nt, Artificial Sequence
  Description of Artificial Sequence: Synthetic oligonucleotide
  Sense strand starting at position 130 of SEQ ID NO: 1242795
cacguacacgucugagagu

SEQ ID NO: 1373363 - RNA, 19 nt, Artificial Sequence
  Description of Artificial Sequence: Synthetic oligonucleotide
  Antisense strand to SEQ ID NO: 1373362
acucucagacguguacgug

SEQ ID NO: 1373364 - RNA, 19 nt, Artificial Sequence
  Description of Artificial Sequence: Synthetic oligonucleotide
  Sense strand starting at position 199 of SEQ ID NO: 1242795
ugaaguagcugcucucauu

SEQ ID NO: 1373365 - RNA, 19 nt, Artificial Sequence
  Description of Artificial Sequence: Synthetic oligonucleotide
  Antisense strand to SEQ ID NO: 1373364
aaugagagcagcuacuuca

SEQ ID NO: 1373366 - RNA, 19 nt, Artificial Sequence
  Description of Artificial Sequence: Synthetic oligonucleotide
  Sense strand starting at position 336 of SEQ ID NO: 1242795
gcuucugaaccaugaacaa

SEQ ID NO: 1373367 - RNA, 19 nt, Artificial Sequence
  Description of Artificial Sequence: Synthetic oligonucleotide
  Antisense strand to SEQ ID NO: 1373366
uuguucaugguucagaagc

SEQ ID NO: 1373368 - RNA, 19 nt, Artificial Sequence
  Description of Artificial Sequence: Synthetic oligonucleotide
  Sense strand starting at position 376 of SEQ ID NO: 1242795
gagcuuauaugagcuuaga

SEQ ID NO: 1373369 - RNA, 19 nt, Artificial Sequence
  Description of Artificial Sequence: Synthetic oligonucleotide
  Antisense strand to SEQ ID NO: 1373368
ucuaagcucauauaagcuc

SEQ ID NO: 1373370 - RNA, 19 nt, Artificial Sequence
  Description of Artificial Sequence: Synthetic oligonucleotide
  Sense strand starting at position 379 of SEQ ID NO: 1242795
cuuauaugagcuuagacau

SEQ ID NO: 1373371 - RNA, 19 nt, Artificial Sequence
  Description of Artificial Sequence: Synthetic oligonucleotide
  Antisense strand to SEQ ID NO: 1373370
augucuaagcucauauaag

SEQ ID NO: 1373372 - RNA, 19 nt, Artificial Sequence
  Description of Artificial Sequence: Synthetic oligonucleotide
  Sense strand starting at position 562 of SEQ ID NO: 1242795
agaauucuuuaccaaugag

SEQ ID NO: 1373373 - RNA, 19 nt, Artificial Sequence
  Description of Artificial Sequence: Synthetic oligonucleotide
  Antisense strand to SEQ ID NO: 1373372
cucauugguaaagaauucu

SEQ ID NO: 1373374 - RNA, 19 nt, Artificial Sequence
  Description of Artificial Sequence: Synthetic oligonucleotide
  Sense strand starting at position 602 of SEQ ID NO: 1242795
cagccuucuucgguugaga

SEQ ID NO: 1373375 - RNA, 19 nt, Artificial Sequence
  Description of Artificial Sequence: Synthetic oligonucleotide
  Antisense strand to SEQ ID NO: 1373374
ucucaaccgaagaaggcug

SEQ ID NO: 1373376 - RNA, 19 nt, Artificial Sequence
  Description of Artificial Sequence: Synthetic oligonucleotide
  Sense strand starting at position 604 of SEQ ID NO: 1242795
gccuucuucgguugagaau

SEQ ID NO: 1373377 - RNA, 19 nt, Artificial Sequence
  Description of Artificial Sequence: Synthetic oligonucleotide
  Antisense strand to SEQ ID NO: 1373376
auucucaaccgaagaaggc

SEQ ID NO: 1373378 - RNA, 19 nt, Artificial Sequence
  Description of Artificial Sequence: Synthetic oligonucleotide
  Sense strand starting at position 605 of SEQ ID NO: 1242795
ccuucuucgguugagaaug

SEQ ID NO: 1373379 - RNA, 19 nt, Artificial Sequence
  Description of Artificial Sequence: Synthetic oligonucleotide
  Antisense strand to SEQ ID NO: 1373378
cauucucaaccgaagaagg

SEQ ID NO: 1373380 - RNA, 19 nt, Artificial Sequence
  Description of Artificial Sequence: Synthetic oligonucleotide
  Sense strand starting at position 638 of SEQ ID NO: 1242795
ggcuuaauggaacacaugu

SEQ ID NO: 1373381 - RNA, 19 nt, Artificial Sequence
  Description of Artificial Sequence: Synthetic oligonucleotide
  Antisense strand to SEQ ID NO: 1373380
acauguguuccauuaagcc

SEQ ID NO: 1373382 - RNA, 19 nt, Artificial Sequence
  Description of Artificial Sequence: Synthetic oligonucleotide
  Sense strand starting at position 657 of SEQ ID NO: 1242795
ggcacagaucuccaaagca

SEQ ID NO: 1373383 - RNA, 19 nt, Artificial Sequence
  Description of Artificial Sequence: Synthetic oligonucleotide
  Antisense strand to SEQ ID NO: 1373382
ugcuuuggagaucugugcc

SEQ ID NO: 1373384 - RNA, 19 nt, Artificial Sequence
  Description of Artificial Sequence: Synthetic oligonucleotide
  Sense strand starting at position 677 of SEQ ID NO: 1242795
guucuccauuaguucguaa

SEQ ID NO: 1373385 - RNA, 19 nt, Artificial Sequence
  Description of Artificial Sequence: Synthetic oligonucleotide
  Antisense strand to SEQ ID NO: 1373384
uuacgaacuaauggagaac

SEQ ID NO: 1373386 - RNA, 19 nt, Artificial Sequence
  Description of Artificial Sequence: Synthetic oligonucleotide
  Sense strand starting at position 679 of SEQ ID NO: 1242795
ucuccauuaguucguaaua

SEQ ID NO: 1373387 - RNA, 19 nt, Artificial Sequence
  Description of Artificial Sequence: Synthetic oligonucleotide
  Antisense strand to SEQ ID NO: 1373386
uauuacgaacuaauggaga

SEQ ID NO: 1373388 - RNA, 19 nt, Artificial Sequence
  Description of Artificial Sequence: Synthetic oligonucleotide
  Sense strand starting at position 680 of SEQ ID NO: 1242795
cuccauuaguucguaauau

SEQ ID NO: 1373389 - RNA, 19 nt, Artificial Sequence
  Description of Artificial Sequence: Synthetic oligonucleotide
  Antisense strand to SEQ ID NO: 1373388
auauuacgaacuaauggag

SEQ ID NO: 1373390 - RNA, 19 nt, Artificial Sequence
  Description of Artificial Sequence: Synthetic oligonucleotide
  Sense strand starting at position 740 of SEQ ID NO: 1242795
acgagcauuucccaaggaa

SEQ ID NO: 1373391 - RNA, 19 nt, Artificial Sequence
  Description of Artificial Sequence: Synthetic oligonucleotide
  Antisense strand to SEQ ID NO: 1373390
uuccuugggaaaugcucgu

SEQ ID NO: 1373392 - RNA, 19 nt, Artificial Sequence
  Description of Artificial Sequence: Synthetic oligonucleotide
  Sense strand starting at position 795 of SEQ ID NO: 1242795
ggaagcugauguuauauuu

SEQ ID NO: 1373393 - RNA, 19 nt, Artificial Sequence
  Description of Artificial Sequence: Synthetic oligonucleotide
  Antisense strand to SEQ ID NO: 1373392
aaauauaacaucagcuucc

SEQ ID NO: 1373394 - RNA, 19 nt, Artificial Sequence
  Description of Artificial Sequence: Synthetic oligonucleotide
  Sense strand starting at position 822 of SEQ ID NO: 1242795
uacaaagugcugcgaacau

SEQ ID NO: 1373395 - RNA, 19 nt, Artificial Sequence
  Description of Artificial Sequence: Synthetic oligonucleotide
  Antisense strand to SEQ ID NO: 1373394
auguucgcagcacuuugua

SEQ ID NO: 1373396 - RNA, 19 nt, Artificial Sequence
  Description of Artificial Sequence: Synthetic oligonucleotide
  Sense strand starting at position 831 of SEQ ID NO: 1242795
cugcgaacauggucggaaa

SEQ ID NO: 1373397 - RNA, 19 nt, Artificial Sequence
  Description of Artificial Sequence: Synthetic oligonucleotide
  Antisense strand to SEQ ID NO: 1373396
uuuccgaccauguucgcag

SEQ ID NO: 1373398 - RNA, 19 nt, Artificial Sequence
  Description of Artificial Sequence: Synthetic oligonucleotide
  Sense strand starting at position 964 of SEQ ID NO: 1242795
ucuuacuaucuugguaaga

SEQ ID NO: 1373399 - RNA, 19 nt, Artificial Sequence
  Description of Artificial Sequence: Synthetic oligonucleotide
  Antisense strand to SEQ ID NO: 1373398
ucuuaccaagauaguaaga

SEQ ID NO: 1373400 - RNA, 19 nt, Artificial Sequence
  Description of Artificial Sequence: Synthetic oligonucleotide
  Sense strand starting at position 965 of SEQ ID NO: 1242795
cuuacuaucuugguaagag

SEQ ID NO: 1373401 - RNA, 19 nt, Artificial Sequence
  Description of Artificial Sequence: Synthetic oligonucleotide
  Antisense strand to SEQ ID NO: 1373400
cucuuaccaagauaguaag

SEQ ID NO: 1373402 - RNA, 19 nt, Artificial Sequence
  Description of Artificial Sequence: Synthetic oligonucleotide
  Sense strand starting at position 966 of SEQ ID NO: 1242795
uuacuaucuugguaagaga

SEQ ID NO: 1373403 - RNA, 19 nt, Artificial Sequence
  Description of Artificial Sequence: Synthetic oligonucleotide
  Antisense strand to SEQ ID NO: 1373402
ucucuuaccaagauaguaa

SEQ ID NO: 1373404 - RNA, 19 nt, Artificial Sequence
  Description of Artificial Sequence: Synthetic oligonucleotide
  Sense strand starting at position 1079 of SEQ ID NO: 1242795
uuccuuucuuuggcacaga

SEQ ID NO: 1373405 - RNA, 19 nt, Artificial Sequence
  Description of Artificial Sequence: Synthetic oligonucleotide
  Antisense strand to SEQ ID NO: 1373404
ucugugccaaagaaaggaa

SEQ ID NO: 1373406 - RNA, 19 nt, Artificial Sequence
  Description of Artificial Sequence: Synthetic oligonucleotide
  Sense strand starting at position 1082 of SEQ ID NO: 1242795
cuuucuuuggcacagaagu

SEQ ID NO: 1373407 - RNA, 19 nt, Artificial Sequence
  Description of Artificial Sequence: Synthetic oligonucleotide
  Antisense strand to SEQ ID NO: 1373406
acuucugugccaaagaaag

SEQ ID NO: 1373408 - RNA, 19 nt, Artificial Sequence
  Description of Artificial Sequence: Synthetic oligonucleotide
  Sense strand starting at position 1275 of SEQ ID NO: 1242795
ccgccugaugucugggaaa

SEQ ID NO: 1373409 - RNA, 19 nt, Artificial Sequence
  Description of Artificial Sequence: Synthetic oligonucleotide
  Antisense strand to SEQ ID NO: 1373408
uuucccagacaucaggcgg

SEQ ID NO: 1373410 - RNA, 19 nt, Artificial Sequence
  Description of Artificial Sequence: Synthetic oligonucleotide
  Sense strand starting at position 1277 of SEQ ID NO: 1242795
gccugaugucugggaaaga

SEQ ID NO: 1373411 - RNA, 19 nt, Artificial Sequence
  Description of Artificial Sequence: Synthetic oligonucleotide
  Antisense strand to SEQ ID NO: 1373410
ucuuucccagacaucaggc

SEQ ID NO: 1373412 - RNA, 19 nt, Artificial Sequence
  Description of Artificial Sequence: Synthetic oligonucleotide
  Sense strand starting at position 1278 of SEQ ID NO: 1242795
ccugaugucugggaaagag

SEQ ID NO: 1373413 - RNA, 19 nt, Artificial Sequence
  Description of Artificial Sequence: Synthetic oligonucleotide
  Antisense strand to SEQ ID NO: 1373412
cucuuucccagacaucagg

SEQ ID NO: 1373414 - RNA, 19 nt, Artificial Sequence
  Description of Artificial Sequence: Synthetic oligonucleotide
  Sense strand starting at position 1330 of SEQ ID NO: 1242795
gaacuauuguccgcuguuu

SEQ ID NO: 1373415 - RNA, 19 nt, Artificial Sequence
  Description of Artificial Sequence: Synthetic oligonucleotide
  Antisense strand to SEQ ID NO: 1373414
aaacagcggacaauaguuc

SEQ ID NO: 1373416 - RNA, 19 nt, Artificial Sequence
  Description of Artificial Sequence: Synthetic oligonucleotide
  Sense strand starting at position 1332 of SEQ ID NO: 1242795
acuauuguccgcuguuuga

SEQ ID NO: 1373417 - RNA, 19 nt, Artificial Sequence
  Description of Artificial Sequence: Synthetic oligonucleotide
  Antisense strand to SEQ ID NO: 1373416
ucaaacagcggacaauagu

SEQ ID NO: 1373418 - RNA, 19 nt, Artificial Sequence
  Description of Artificial Sequence: Synthetic oligonucleotide
  Sense strand starting at position 1477 of SEQ ID NO: 1242795
agccucuucgaaggagaga

SEQ ID NO: 1373419 - RNA, 19 nt, Artificial Sequence
  Description of Artificial Sequence: Synthetic oligonucleotide
  Antisense strand to SEQ ID NO: 1373418
ucucuccuucgaagaggcu

SEQ ID NO: 1373420 - RNA, 19 nt, Artificial Sequence
  Description of Artificial Sequence: Synthetic oligonucleotide
  Sense strand starting at position 1525 of SEQ ID NO: 1242795
aauugagagccucagugua

SEQ ID NO: 1373421 - RNA, 19 nt, Artificial Sequence
  Description of Artificial Sequence: Synthetic oligonucleotide
  Antisense strand to SEQ ID NO: 1373420
uacacugaggcucucaauu

SEQ ID NO: 1373422 - RNA, 19 nt, Artificial Sequence
  Description of Artificial Sequence: Synthetic oligonucleotide
  Sense strand starting at position 2816 of SEQ ID NO: 1242795
gagccuguugcauggaaca

SEQ ID NO: 1373423 - RNA, 19 nt, Artificial Sequence
  Description of Artificial Sequence: Synthetic oligonucleotide
  Antisense strand to SEQ ID NO: 1373422
uguuccaugcaacaggcuc

SEQ ID NO: 1373424 - RNA, 19 nt, Artificial Sequence
  Description of Artificial Sequence: Synthetic oligonucleotide
  Sense strand starting at position 2864 of SEQ ID NO: 1242795
caguuauguccggguccag

SEQ ID NO: 1373425 - RNA, 19 nt, Artificial Sequence
  Description of Artificial Sequence: Synthetic oligonucleotide
  Antisense strand to SEQ ID NO: 1373424
cuggacccggacauaacug

SEQ ID NO: 1373426 - RNA, 19 nt, Artificial Sequence
  Description of Artificial Sequence: Synthetic oligonucleotide
  Sense strand starting at position 2894 of SEQ ID NO: 1242795
gguagaagacaaugguguu

SEQ ID NO: 1373427 - RNA, 19 nt, Artificial Sequence
  Description of Artificial Sequence: Synthetic oligonucleotide
  Antisense strand to SEQ ID NO: 1373426
aacaccauugucuucuacc

SEQ ID NO: 1373428 - RNA, 19 nt, Artificial Sequence
  Description of Artificial Sequence: Synthetic oligonucleotide
  Sense strand starting at position 2895 of SEQ ID NO: 1242795
guagaagacaaugguguua

SEQ ID NO: 1373429 - RNA, 19 nt, Artificial Sequence
  Description of Artificial Sequence: Synthetic oligonucleotide
  Antisense strand to SEQ ID NO: 1373428
uaacaccauugucuucuac

SEQ ID NO: 1373430 - RNA, 19 nt, Artificial Sequence
  Description of Artificial Sequence: Synthetic oligonucleotide
  Sense strand starting at position 2897 of SEQ ID NO: 1242795
agaagacaaugguguuaaa

SEQ ID NO: 1373431 - RNA, 19 nt, Artificial Sequence
  Description of Artificial Sequence: Synthetic oligonucleotide
  Antisense strand to SEQ ID NO: 1373430
uuuaacaccauugucuucu

SEQ ID NO: 1373432 - RNA, 19 nt, Artificial Sequence
  Description of Artificial Sequence: Synthetic oligonucleotide
  Sense strand starting at position 3123 of SEQ ID NO: 1242795
agauuagauuccucagcag

SEQ ID NO: 1373433 - RNA, 19 nt, Artificial Sequence
  Description of Artificial Sequence: Synthetic oligonucleotide
  Antisense strand to SEQ ID NO: 1373432
cugcugaggaaucuaaucu

SEQ ID NO: 1373434 - RNA, 19 nt, Artificial Sequence
  Description of Artificial Sequence: Synthetic oligonucleotide
  Sense strand starting at position 3126 of SEQ ID NO: 1242795
uuagauuccucagcagaua

SEQ ID NO: 1373435 - RNA, 19 nt, Artificial Sequence
  Description of Artificial Sequence: Synthetic oligonucleotide
  Antisense strand to SEQ ID NO: 1373434
uaucugcugaggaaucuaa

SEQ ID NO: 1373436 - RNA, 19 nt, Artificial Sequence
  Description of Artificial Sequence: Synthetic oligonucleotide
  Sense strand starting at position 3261 of SEQ ID NO: 1242795
uuccgagagaucgggaaau

SEQ ID NO: 1373437 - RNA, 19 nt, Artificial Sequence
  Description of Artificial Sequence: Synthetic oligonucleotide
  Antisense strand to SEQ ID NO: 1373436
auuucccgaucucucggaa

SEQ ID NO: 1373438 - RNA, 19 nt, Artificial Sequence
  Description of Artificial Sequence: Synthetic oligonucleotide
  Sense strand starting at position 3354 of SEQ ID NO: 1242795
ggaauuggucuagggaauc

SEQ ID NO: 1373439 - RNA, 19 nt, Artificial Sequence
  Description of Artificial Sequence: Synthetic oligonucleotide
  Antisense strand to SEQ ID NO: 1373438
gauucccuagaccaauucc

SEQ ID NO: 1373440 - RNA, 19 nt, Artificial Sequence
  Description of Artificial Sequence: Synthetic oligonucleotide
  Sense strand starting at position 3445 of SEQ ID NO: 1242795
gggauuucguggcaagacu

SEQ ID NO: 1373441 - RNA, 19 nt, Artificial Sequence
  Description of Artificial Sequence: Synthetic oligonucleotide
  Antisense strand to SEQ ID NO: 1373440
agucuugccacgaaauccc

SEQ ID NO: 1373442 - RNA, 19 nt, Artificial Sequence
  Description of Artificial Sequence: Synthetic oligonucleotide
  Sense strand starting at position 69 of SEQ ID NO: 1242796
agcugaacucgccacguau

SEQ ID NO: 1373443 - RNA, 19 nt, Artificial Sequence
  Description of Artificial Sequence: Synthetic oligonucleotide
  Antisense strand to SEQ ID NO: 1373442
auacguggcgaguucagcu

SEQ ID NO: 1373444 - RNA, 19 nt, Artificial Sequence
  Description of Artificial Sequence: Synthetic oligonucleotide
  Sense strand starting at position 71 of SEQ ID NO: 1242796
cugaacucgccacguauga

SEQ ID NO: 1373445 - RNA, 19 nt, Artificial Sequence
  Description of Artificial Sequence: Synthetic oligonucleotide
  Antisense strand to SEQ ID NO: 1373444
ucauacguggcgaguucag

SEQ ID NO: 1373446 - RNA, 19 nt, Artificial Sequence
  Description of Artificial Sequence: Synthetic oligonucleotide
  Sense strand starting at position 332 of SEQ ID NO: 1242796
agaaucuccuuaugauuga

SEQ ID NO: 1373447 - RNA, 19 nt, Artificial Sequence
  Description of Artificial Sequence: Synthetic oligonucleotide
  Antisense strand to SEQ ID NO: 1373446
ucaaucauaaggagauucu

SEQ ID NO: 1373448 - RNA, 19 nt, Artificial Sequence
  Description of Artificial Sequence: Synthetic oligonucleotide
  Sense strand starting at position 381 of SEQ ID NO: 1242796
aauauuaaacgucgcuuau

SEQ ID NO: 1373449 - RNA, 19 nt, Artificial Sequence
  Description of Artificial Sequence: Synthetic oligonucleotide
  Antisense strand to SEQ ID NO: 1373448
auaagcgacguuuaauauu

SEQ ID NO: 1373450 - RNA, 19 nt, Artificial Sequence
  Description of Artificial Sequence: Synthetic oligonucleotide
  Sense strand starting at position 383 of SEQ ID NO: 1242796
uauuaaacgucgcuuauca

SEQ ID NO: 1373451 - RNA, 19 nt, Artificial Sequence
  Description of Artificial Sequence: Synthetic oligonucleotide
  Antisense strand to SEQ ID NO: 1373450
ugauaagcgacguuuaaua

SEQ ID NO: 1373452 - RNA, 19 nt, Artificial Sequence
  Description of Artificial Sequence: Synthetic oligonucleotide
  Sense strand starting at position 385 of SEQ ID NO: 1242796
uuaaacgucgcuuaucaua

SEQ ID NO: 1373453 - RNA, 19 nt, Artificial Sequence
  Description of Artificial Sequence: Synthetic oligonucleotide
  Antisense strand to SEQ ID NO: 1373452
uaugauaagcgacguuuaa

SEQ ID NO: 1373454 - RNA, 19 nt, Artificial Sequence
  Description of Artificial Sequence: Synthetic oligonucleotide
  Sense strand starting at position 387 of SEQ ID NO: 1242796
aaacgucgcuuaucauaac

SEQ ID NO: 1373455 - RNA, 19 nt, Artificial Sequence
  Description of Artificial Sequence: Synthetic oligonucleotide
  Antisense strand to SEQ ID NO: 1373454
guuaugauaagcgacguuu

SEQ ID NO: 1373456 - RNA, 19 nt, Artificial Sequence
  Description of Artificial Sequence: Synthetic oligonucleotide
  Sense strand starting at position 393 of SEQ ID NO: 1242796
cgcuuaucauaacuugauu

SEQ ID NO: 1373457 - RNA, 19 nt, Artificial Sequence
  Description of Artificial Sequence: Synthetic oligonucleotide
  Antisense strand to SEQ ID NO: 1373456
aaucaaguuaugauaagcg

SEQ ID NO: 1373458 - RNA, 19 nt, Artificial Sequence
  Description of Artificial Sequence: Synthetic oligonucleotide
  Sense strand starting at position 401 of SEQ ID NO: 1242796
auaacuugauuccaggaau

SEQ ID NO: 1373459 - RNA, 19 nt, Artificial Sequence
  Description of Artificial Sequence: Synthetic oligonucleotide
  Antisense strand to SEQ ID NO: 1373458
auuccuggaaucaaguuau

SEQ ID NO: 1373460 - RNA, 19 nt, Artificial Sequence
  Description of Artificial Sequence: Synthetic oligonucleotide
  Sense strand starting at position 597 of SEQ ID NO: 1242796
agaugcuaccacugcaaga

SEQ ID NO: 1373461 - RNA, 19 nt, Artificial Sequence
  Description of Artificial Sequence: Synthetic oligonucleotide
  Antisense strand to SEQ ID NO: 1373460
ucuugcagugguagcaucu

SEQ ID NO: 1373462 - RNA, 19 nt, Artificial Sequence
  Description of Artificial Sequence: Synthetic oligonucleotide
  Sense strand starting at position 647 of SEQ ID NO: 1242796
ggaauuguucgcagcggca

SEQ ID NO: 1373463 - RNA, 19 nt, Artificial Sequence
  Description of Artificial Sequence: Synthetic oligonucleotide
  Antisense strand to SEQ ID NO: 1373462
ugccgcugcgaacaauucc

SEQ ID NO: 1373464 - RNA, 19 nt, Artificial Sequence
  Description of Artificial Sequence: Synthetic oligonucleotide
  Sense strand starting at position 737 of SEQ ID NO: 1242796
cgcagugggacccagaauu

SEQ ID NO: 1373465 - RNA, 19 nt, Artificial Sequence
  Description of Artificial Sequence: Synthetic oligonucleotide
  Antisense strand to SEQ ID NO: 1373464
aauucugggucccacugcg

SEQ ID NO: 1373466 - RNA, 19 nt, Artificial Sequence
  Description of Artificial Sequence: Synthetic oligonucleotide
  Sense strand starting at position 818 of SEQ ID NO: 1242796
agggaagccguuuaaugaa

SEQ ID NO: 1373467 - RNA, 19 nt, Artificial Sequence
  Description of Artificial Sequence: Synthetic oligonucleotide
  Antisense strand to SEQ ID NO: 1373466
uucauuaaacggcuucccu

SEQ ID NO: 1373468 - RNA, 19 nt, Artificial Sequence
  Description of Artificial Sequence: Synthetic oligonucleotide
  Sense strand starting at position 826 of SEQ ID NO: 1242796
cguuuaaugaaaggaaaca

SEQ ID NO: 1373469 - RNA, 19 nt, Artificial Sequence
  Description of Artificial Sequence: Synthetic oligonucleotide
  Antisense strand to SEQ ID NO: 1373468
uguuuccuuucauuaaacg

SEQ ID NO: 1373470 - RNA, 19 nt, Artificial Sequence
  Description of Artificial Sequence: Synthetic oligonucleotide
  Sense strand starting at position 863 of SEQ ID NO: 1242796
ucaguauccugcuccauuu

SEQ ID NO: 1373471 - RNA, 19 nt, Artificial Sequence
  Description of Artificial Sequence: Synthetic oligonucleotide
  Antisense strand to SEQ ID NO: 1373470
aaauggagcaggauacuga

SEQ ID NO: 1373472 - RNA, 19 nt, Artificial Sequence
  Description of Artificial Sequence: Synthetic oligonucleotide
  Sense strand starting at position 920 of SEQ ID NO: 1242796
guacaucuacacugugaaa

SEQ ID NO: 1373473 - RNA, 19 nt, Artificial Sequence
  Description of Artificial Sequence: Synthetic oligonucleotide
  Antisense strand to SEQ ID NO: 1373472
uuucacaguguagauguac

SEQ ID NO: 1373474 - RNA, 19 nt, Artificial Sequence
  Description of Artificial Sequence: Synthetic oligonucleotide
  Sense strand starting at position 957 of SEQ ID NO: 1242796
gagauugcagcccaaauga

SEQ ID NO: 1373475 - RNA, 19 nt, Artificial Sequence
  Description of Artificial Sequence: Synthetic oligonucleotide
  Antisense strand to SEQ ID NO: 1373474
ucauuugggcugcaaucuc

SEQ ID NO: 1373476 - RNA, 19 nt, Artificial Sequence
  Description of Artificial Sequence: Synthetic oligonucleotide
  Sense strand starting at position 1080 of SEQ ID NO: 1242796
uggaaugacuaguugacua

SEQ ID NO: 1373477 - RNA, 19 nt, Artificial Sequence
  Description of Artificial Sequence: Synthetic oligonucleotide
  Antisense strand to SEQ ID NO: 1373476
uagucaacuagucauucca

SEQ ID NO: 1373478 - RNA, 19 nt, Artificial Sequence
  Description of Artificial Sequence: Synthetic oligonucleotide
  Sense strand starting at position 1168 of SEQ ID NO: 1242796
cuaagcaucuuuccaagga

SEQ ID NO: 1373479 - RNA, 19 nt, Artificial Sequence
  Description of Artificial Sequence: Synthetic oligonucleotide
  Antisense strand to SEQ ID NO: 1373478
uccuuggaaagaugcuuag

SEQ ID NO: 1373480 - RNA, 19 nt, Artificial Sequence
  Description of Artificial Sequence: Synthetic oligonucleotide
  Sense strand starting at position 1172 of SEQ ID NO: 1242796
gcaucuuuccaaggaacuc

SEQ ID NO: 1373481 - RNA, 19 nt, Artificial Sequence
  Description of Artificial Sequence: Synthetic oligonucleotide
  Antisense strand to SEQ ID NO: 1373480
gaguuccuuggaaagaugc

SEQ ID NO: 1373482 - RNA, 19 nt, Artificial Sequence
  Description of Artificial Sequence: Synthetic oligonucleotide
  Sense strand starting at position 1236 of SEQ ID NO: 1242796
cugugaguguccucugaau

SEQ ID NO: 1373483 - RNA, 19 nt, Artificial Sequence
  Description of Artificial Sequence: Synthetic oligonucleotide
  Antisense strand to SEQ ID NO: 1373482
auucagaggacacucacag

SEQ ID NO: 1373484 - RNA, 19 nt, Artificial Sequence
  Description of Artificial Sequence: Synthetic oligonucleotide
  Sense strand starting at position 1238 of SEQ ID NO: 1242796
gugaguguccucugaaugc

SEQ ID NO: 1373485 - RNA, 19 nt, Artificial Sequence
  Description of Artificial Sequence: Synthetic oligonucleotide
  Antisense strand to SEQ ID NO: 1373484
gcauucagaggacacucac

SEQ ID NO: 1373486 - RNA, 19 nt, Artificial Sequence
  Description of Artificial Sequence: Synthetic oligonucleotide
  Sense strand starting at position 1308 of SEQ ID NO: 1242796
cgcgaucuugcuuucucua

SEQ ID NO: 1373487 - RNA, 19 nt, Artificial Sequence
  Description of Artificial Sequence: Synthetic oligonucleotide
  Antisense strand to SEQ ID NO: 1373486
uagagaaagcaagaucgcg

SEQ ID NO: 1373488 - RNA, 19 nt, Artificial Sequence
  Description of Artificial Sequence: Synthetic oligonucleotide
  Sense strand starting at position 1389 of SEQ ID NO: 1242796
gauggaugcguaggacauu

SEQ ID NO: 1373489 - RNA, 19 nt, Artificial Sequence
  Description of Artificial Sequence: Synthetic oligonucleotide
  Antisense strand to SEQ ID NO: 1373488
aauguccuacgcauccauc

SEQ ID NO: 1373490 - RNA, 19 nt, Artificial Sequence
  Description of Artificial Sequence: Synthetic oligonucleotide
  Sense strand starting at position 1395 of SEQ ID NO: 1242796
ugcguaggacauuaccaaa

SEQ ID NO: 1373491 - RNA, 19 nt, Artificial Sequence
  Description of Artificial Sequence: Synthetic oligonucleotide
  Antisense strand to SEQ ID NO: 1373490
uuugguaauguccuacgca

SEQ ID NO: 1373492 - RNA, 19 nt, Artificial Sequence
  Description of Artificial Sequence: Synthetic oligonucleotide
  Sense strand starting at position 1398 of SEQ ID NO: 1242796
guaggacauuaccaaacaa

SEQ ID NO: 1373493 - RNA, 19 nt, Artificial Sequence
  Description of Artificial Sequence: Synthetic oligonucleotide
  Antisense strand to SEQ ID NO: 1373492
uuguuugguaauguccuac

SEQ ID NO: 1373494 - RNA, 19 nt, Artificial Sequence
  Description of Artificial Sequence: Synthetic oligonucleotide
  Sense strand starting at position 1536 of SEQ ID NO: 1242796
gugacaguccugcgacgaa

SEQ ID NO: 1373495 - RNA, 19 nt, Artificial Sequence
  Description of Artificial Sequence: Synthetic oligonucleotide
  Antisense strand to SEQ ID NO: 1373494
uucgucgcaggacugucac

SEQ ID NO: 1373496 - RNA, 19 nt, Artificial Sequence
  Description of Artificial Sequence: Synthetic oligonucleotide
  Sense strand starting at position 1715 of SEQ ID NO: 1242796
ugcugucauucgccgagaa

SEQ ID NO: 1373497 - RNA, 19 nt, Artificial Sequence
  Description of Artificial Sequence: Synthetic oligonucleotide
  Antisense strand to SEQ ID NO: 1373496
uucucggcgaaugacagca

SEQ ID NO: 1373498 - RNA, 19 nt, Artificial Sequence
  Description of Artificial Sequence: Synthetic oligonucleotide
  Sense strand starting at position 1716 of SEQ ID NO: 1242796
gcugucauucgccgagaaa

SEQ ID NO: 1373499 - RNA, 19 nt, Artificial Sequence
  Description of Artificial Sequence: Synthetic oligonucleotide
  Antisense strand to SEQ ID NO: 1373498
uuucucggcgaaugacagc

SEQ ID NO: 1373500 - RNA, 19 nt, Artificial Sequence
  Description of Artificial Sequence: Synthetic oligonucleotide
  Sense strand starting at position 1717 of SEQ ID NO: 1242796
cugucauucgccgagaaac

SEQ ID NO: 1373501 - RNA, 19 nt, Artificial Sequence
  Description of Artificial Sequence: Synthetic oligonucleotide
  Antisense strand to SEQ ID NO: 1373500
guuucucggcgaaugacag

SEQ ID NO: 1373502 - RNA, 19 nt, Artificial Sequence
  Description of Artificial Sequence: Synthetic oligonucleotide
  Sense strand starting at position 2528 of SEQ ID NO: 1242796
cgaguagaucgcgcucgaa

SEQ ID NO: 1373503 - RNA, 19 nt, Artificial Sequence
  Description of Artificial Sequence: Synthetic oligonucleotide
  Antisense strand to SEQ ID NO: 1373502
uucgagcgcgaucuacucg

SEQ ID NO: 1373504 - RNA, 19 nt, Artificial Sequence
  Description of Artificial Sequence: Synthetic oligonucleotide
  Sense strand starting at position 2575 of SEQ ID NO: 1242796
ggcuguugauuccucaauu

SEQ ID NO: 1373505 - RNA, 19 nt, Artificial Sequence
  Description of Artificial Sequence: Synthetic oligonucleotide
  Antisense strand to SEQ ID NO: 1373504
aauugaggaaucaacagcc

SEQ ID NO: 1373506 - RNA, 19 nt, Artificial Sequence
  Description of Artificial Sequence: Synthetic oligonucleotide
  Sense strand starting at position 2576 of SEQ ID NO: 1242796
gcuguugauuccucaauua

SEQ ID NO: 1373507 - RNA, 19 nt, Artificial Sequence
  Description of Artificial Sequence: Synthetic oligonucleotide
  Antisense strand to SEQ ID NO: 1373506
uaauugaggaaucaacagc

SEQ ID NO: 1373508 - RNA, 19 nt, Artificial Sequence
  Description of Artificial Sequence: Synthetic oligonucleotide
  Sense strand starting at position 3257 of SEQ ID NO: 1242796
gcccuaccucgugacacua

SEQ ID NO: 1373509 - RNA, 19 nt, Artificial Sequence
  Description of Artificial Sequence: Synthetic oligonucleotide
  Antisense strand to SEQ ID NO: 1373508
uagugucacgagguagggc

SEQ ID NO: 1373510 - RNA, 19 nt, Artificial Sequence
  Description of Artificial Sequence: Synthetic oligonucleotide
  Sense strand starting at position 3509 of SEQ ID NO: 1242796
gggacacuucuacgaauac

SEQ ID NO: 1373511 - RNA, 19 nt, Artificial Sequence
  Description of Artificial Sequence: Synthetic oligonucleotide
  Antisense strand to SEQ ID NO: 1373510
guauucguagaaguguccc

SEQ ID NO: 1373512 - RNA, 19 nt, Artificial Sequence
  Description of Artificial Sequence: Synthetic oligonucleotide
  Sense strand starting at position 3605 of SEQ ID NO: 1242796
acuguuuccuaagccagaa

SEQ ID NO: 1373513 - RNA, 19 nt, Artificial Sequence
  Description of Artificial Sequence: Synthetic oligonucleotide
  Antisense strand to SEQ ID NO: 1373512
uucuggcuuaggaaacagu

SEQ ID NO: 1373514 - RNA, 19 nt, Artificial Sequence
  Description of Artificial Sequence: Synthetic oligonucleotide
  Sense strand starting at position 3617 of SEQ ID NO: 1242796
gccagaaacccgugaguca

SEQ ID NO: 1373515 - RNA, 19 nt, Artificial Sequence
  Description of Artificial Sequence: Synthetic oligonucleotide
  Antisense strand to SEQ ID NO: 1373514
ugacucacggguuucuggc

SEQ ID NO: 1373516 - RNA, 19 nt, Artificial Sequence
  Description of Artificial Sequence: Synthetic oligonucleotide
  Sense strand starting at position 3678 of SEQ ID NO: 1242796
acggucuuuaccugggaga

SEQ ID NO: 1373517 - RNA, 19 nt, Artificial Sequence
  Description of Artificial Sequence: Synthetic oligonucleotide
  Antisense strand to SEQ ID NO: 1373516
ucucccagguaaagaccgu

SEQ ID NO: 1373518 - RNA, 19 nt, Artificial Sequence
  Description of Artificial Sequence: Synthetic oligonucleotide
  Sense strand starting at position 3680 of SEQ ID NO: 1242796
ggucuuuaccugggagacu

SEQ ID NO: 1373519 - RNA, 19 nt, Artificial Sequence
  Description of Artificial Sequence: Synthetic oligonucleotide
  Antisense strand to SEQ ID NO: 1373518
agucucccagguaaagacc

SEQ ID NO: 1373520 - RNA, 19 nt, Artificial Sequence
  Description of Artificial Sequence: Synthetic oligonucleotide
  Sense strand starting at position 3730 of SEQ ID NO: 1242796
ggcagcuacucacuuaagu

SEQ ID NO: 1373521 - RNA, 19 nt, Artificial Sequence
  Description of Artificial Sequence: Synthetic oligonucleotide
  Antisense strand to SEQ ID NO: 1373520
acuuaagugaguagcugcc

SEQ ID NO: 1373522 - RNA, 19 nt, Artificial Sequence
  Description of Artificial Sequence: Synthetic oligonucleotide
  Sense strand starting at position 39 of SEQ ID NO: 1242797
ggcugugucauguugggca

SEQ ID NO: 1373523 - RNA, 19 nt, Artificial Sequence
  Description of Artificial Sequence: Synthetic oligonucleotide
  Antisense strand to SEQ ID NO: 1373522
ugcccaacaugacacagcc

SEQ ID NO: 1373524 - RNA, 19 nt, Artificial Sequence
  Description of Artificial Sequence: Synthetic oligonucleotide
  Sense strand starting at position 43 of SEQ ID NO: 1242797
gugucauguugggcacaca

SEQ ID NO: 1373525 - RNA, 19 nt, Artificial Sequence
  Description of Artificial Sequence: Synthetic oligonucleotide
  Antisense strand to SEQ ID NO: 1373524
ugugugcccaacaugacac

SEQ ID NO: 1373526 - RNA, 19 nt, Artificial Sequence
  Description of Artificial Sequence: Synthetic oligonucleotide
  Sense strand starting at position 124 of SEQ ID NO: 1242797
gugagcucauccguggaaa

SEQ ID NO: 1373527 - RNA, 19 nt, Artificial Sequence
  Description of Artificial Sequence: Synthetic oligonucleotide
  Antisense strand to SEQ ID NO: 1373526
uuuccacggaugagcucac

SEQ ID NO: 1373528 - RNA, 19 nt, Artificial Sequence
  Description of Artificial Sequence: Synthetic oligonucleotide
  Sense strand starting at position 125 of SEQ ID NO: 1242797
ugagcucauccguggaaac

SEQ ID NO: 1373529 - RNA, 19 nt, Artificial Sequence
  Description of Artificial Sequence: Synthetic oligonucleotide
  Antisense strand to SEQ ID NO: 1373528
guuuccacggaugagcuca

SEQ ID NO: 1373530 - RNA, 19 nt, Artificial Sequence
  Description of Artificial Sequence: Synthetic oligonucleotide
  Sense strand starting at position 150 of SEQ ID NO: 1242797
caugucuggucuguacuaa

SEQ ID NO: 1373531 - RNA, 19 nt, Artificial Sequence
  Description of Artificial Sequence: Synthetic oligonucleotide
  Antisense strand to SEQ ID NO: 1373530
uuaguacagaccagacaug

SEQ ID NO: 1373532 - RNA, 19 nt, Artificial Sequence
  Description of Artificial Sequence: Synthetic oligonucleotide
  Sense strand starting at position 174 of SEQ ID NO: 1242797
auguaaaugucagcugcuu

SEQ ID NO: 1373533 - RNA, 19 nt, Artificial Sequence
  Description of Artificial Sequence: Synthetic oligonucleotide
  Antisense strand to SEQ ID NO: 1373532
aagcagcugacauuuacau

SEQ ID NO: 1373534 - RNA, 19 nt, Artificial Sequence
  Description of Artificial Sequence: Synthetic oligonucleotide
  Sense strand starting at position 328 of SEQ ID NO: 1242797
aaacaucaccugugugaag

SEQ ID NO: 1373535 - RNA, 19 nt, Artificial Sequence
  Description of Artificial Sequence: Synthetic oligonucleotide
  Antisense strand to SEQ ID NO: 1373534
cuucacacaggugauguuu

SEQ ID NO: 1373536 - RNA, 19 nt, Artificial Sequence
  Description of Artificial Sequence: Synthetic oligonucleotide
  Sense strand starting at position 349 of SEQ ID NO: 1242797
cagguucauggguggaguu

SEQ ID NO: 1373537 - RNA, 19 nt, Artificial Sequence
  Description of Artificial Sequence: Synthetic oligonucleotide
  Antisense strand to SEQ ID NO: 1373536
aacuccacccaugaaccug

SEQ ID NO: 1373538 - RNA, 19 nt, Artificial Sequence
  Description of Artificial Sequence: Synthetic oligonucleotide
  Sense strand starting at position 378 of SEQ ID NO: 1242797
agggaagugucuuaaagaa

SEQ ID NO: 1373539 - RNA, 19 nt, Artificial Sequence
  Description of Artificial Sequence: Synthetic oligonucleotide
  Antisense strand to SEQ ID NO: 1373538
uucuuuaagacacuucccu

SEQ ID NO: 1373540 - RNA, 19 nt, Artificial Sequence
  Description of Artificial Sequence: Synthetic oligonucleotide
  Sense strand starting at position 537 of SEQ ID NO: 1242797
ggguguugcagcgaugaca

SEQ ID NO: 1373541 - RNA, 19 nt, Artificial Sequence
  Description of Artificial Sequence: Synthetic oligonucleotide
  Antisense strand to SEQ ID NO: 1373540
ugucaucgcugcaacaccc

SEQ ID NO: 1373542 - RNA, 19 nt, Artificial Sequence
  Description of Artificial Sequence: Synthetic oligonucleotide
  Sense strand starting at position 540 of SEQ ID NO: 1242797
uguugcagcgaugacaaua

SEQ ID NO: 1373543 - RNA, 19 nt, Artificial Sequence
  Description of Artificial Sequence: Synthetic oligonucleotide
  Antisense strand to SEQ ID NO: 1373542
uauugucaucgcugcaaca

SEQ ID NO: 1373544 - RNA, 19 nt, Artificial Sequence
  Description of Artificial Sequence: Synthetic oligonucleotide
  Sense strand starting at position 621 of SEQ ID NO: 1242797
cccuucuccugagugggaa

SEQ ID NO: 1373545 - RNA, 19 nt, Artificial Sequence
  Description of Artificial Sequence: Synthetic oligonucleotide
  Antisense strand to SEQ ID NO: 1373544
uucccacucaggagaaggg

SEQ ID NO: 1373546 - RNA, 19 nt, Artificial Sequence
  Description of Artificial Sequence: Synthetic oligonucleotide
  Sense strand starting at position 765 of SEQ ID NO: 1242797
ggcucuccucacugucaga

SEQ ID NO: 1373547 - RNA, 19 nt, Artificial Sequence
  Description of Artificial Sequence: Synthetic oligonucleotide
  Antisense strand to SEQ ID NO: 1373546
ucugacagugaggagagcc

SEQ ID NO: 1373548 - RNA, 19 nt, Artificial Sequence
  Description of Artificial Sequence: Synthetic oligonucleotide
  Sense strand starting at position 1164 of SEQ ID NO: 1242797
gcccgcucuggcuaaagaa

SEQ ID NO: 1373549 - RNA, 19 nt, Artificial Sequence
  Description of Artificial Sequence: Synthetic oligonucleotide
  Antisense strand to SEQ ID NO: 1373548
uucuuuagccagagcgggc

SEQ ID NO: 1373550 - RNA, 19 nt, Artificial Sequence
  Description of Artificial Sequence: Synthetic oligonucleotide
  Sense strand starting at position 1245 of SEQ ID NO: 1242797
auuugaagcucuggagaca

SEQ ID NO: 1373551 - RNA, 19 nt, Artificial Sequence
  Description of Artificial Sequence: Synthetic oligonucleotide
  Antisense strand to SEQ ID NO: 1373550
ugucuccagagcuucaaau

SEQ ID NO: 1373552 - RNA, 19 nt, Artificial Sequence
  Description of Artificial Sequence: Synthetic oligonucleotide
  Sense strand starting at position 1335 of SEQ ID NO: 1242797
ucugaaaugugggaagaag

SEQ ID NO: 1373553 - RNA, 19 nt, Artificial Sequence
  Description of Artificial Sequence: Synthetic oligonucleotide
  Antisense strand to SEQ ID NO: 1373552
cuucuucccacauuucaga

SEQ ID NO: 1373554 - RNA, 19 nt, Artificial Sequence
  Description of Artificial Sequence: Synthetic oligonucleotide
  Sense strand starting at position 1430 of SEQ ID NO: 1242797
ugguccuccagacaugagu

SEQ ID NO: 1373555 - RNA, 19 nt, Artificial Sequence
  Description of Artificial Sequence: Synthetic oligonucleotide
  Antisense strand to SEQ ID NO: 1373554
acucaugucuggaggacca

SEQ ID NO: 1373556 - RNA, 19 nt, Artificial Sequence
  Description of Artificial Sequence: Synthetic oligonucleotide
  Sense strand starting at position 1439 of SEQ ID NO: 1242797
agacaugaguaggacacau

SEQ ID NO: 1373557 - RNA, 19 nt, Artificial Sequence
  Description of Artificial Sequence: Synthetic oligonucleotide
  Antisense strand to SEQ ID NO: 1373556
auguguccuacucaugucu

SEQ ID NO: 1373558 - RNA, 19 nt, Artificial Sequence
  Description of Artificial Sequence: Synthetic oligonucleotide
  Sense strand starting at position 1604 of SEQ ID NO: 1242797
cguugaauccuggguccuu

SEQ ID NO: 1373559 - RNA, 19 nt, Artificial Sequence
  Description of Artificial Sequence: Synthetic oligonucleotide
  Antisense strand to SEQ ID NO: 1373558
aaggacccaggauucaacg

SEQ ID NO: 1373560 - RNA, 19 nt, Artificial Sequence
  Description of Artificial Sequence: Synthetic oligonucleotide
  Sense strand starting at position 1633 of SEQ ID NO: 1242797
cugcgagguccuggacaaa

SEQ ID NO: 1373561 - RNA, 19 nt, Artificial Sequence
  Description of Artificial Sequence: Synthetic oligonucleotide
  Antisense strand to SEQ ID NO: 1373560
uuuguccaggaccucgcag

SEQ ID NO: 1373562 - RNA, 19 nt, Artificial Sequence
  Description of Artificial Sequence: Synthetic oligonucleotide
  Sense strand starting at position 1645 of SEQ ID NO: 1242797
ggacaaaugaguuguccuc

SEQ ID NO: 1373563 - RNA, 19 nt, Artificial Sequence
  Description of Artificial Sequence: Synthetic oligonucleotide
  Antisense strand to SEQ ID NO: 1373562
gaggacaacucauuugucc

SEQ ID NO: 1373564 - RNA, 19 nt, Artificial Sequence
  Description of Artificial Sequence: Synthetic oligonucleotide
  Sense strand starting at position 1706 of SEQ ID NO: 1242797
agcuguguuccgcuaugca

SEQ ID NO: 1373565 - RNA, 19 nt, Artificial Sequence
  Description of Artificial Sequence: Synthetic oligonucleotide
  Antisense strand to SEQ ID NO: 1373564
ugcauagcggaacacagcu

SEQ ID NO: 1373566 - RNA, 19 nt, Artificial Sequence
  Description of Artificial Sequence: Synthetic oligonucleotide
  Sense strand starting at position 2475 of SEQ ID NO: 1242797
cucuacacgugcucagaaa

SEQ ID NO: 1373567 - RNA, 19 nt, Artificial Sequence
  Description of Artificial Sequence: Synthetic oligonucleotide
  Antisense strand to SEQ ID NO: 1373566
uuucugagcacguguagag

SEQ ID NO: 1373568 - RNA, 19 nt, Artificial Sequence
  Description of Artificial Sequence: Synthetic oligonucleotide
  Sense strand starting at position 2532 of SEQ ID NO: 1242797
ggagacuuguuuccggaug

SEQ ID NO: 1373569 - RNA, 19 nt, Artificial Sequence
  Description of Artificial Sequence: Synthetic oligonucleotide
  Antisense strand to SEQ ID NO: 1373568
cauccggaaacaagucucc

SEQ ID NO: 1373570 - RNA, 19 nt, Artificial Sequence
  Description of Artificial Sequence: Synthetic oligonucleotide
  Sense strand starting at position 2602 of SEQ ID NO: 1242797
ggacgcguucccaggaauc

SEQ ID NO: 1373571 - RNA, 19 nt, Artificial Sequence
  Description of Artificial Sequence: Synthetic oligonucleotide
  Antisense strand to SEQ ID NO: 1373570
gauuccugggaacgcgucc

SEQ ID NO: 1373572 - RNA, 19 nt, Artificial Sequence
  Description of Artificial Sequence: Synthetic oligonucleotide
  Sense strand starting at position 2604 of SEQ ID NO: 1242797
acgcguucccaggaaucca

SEQ ID NO: 1373573 - RNA, 19 nt, Artificial Sequence
  Description of Artificial Sequence: Synthetic oligonucleotide
  Antisense strand to SEQ ID NO: 1373572
uggauuccugggaacgcgu

SEQ ID NO: 1373574 - RNA, 19 nt, Artificial Sequence
  Description of Artificial Sequence: Synthetic oligonucleotide
  Sense strand starting at position 2656 of SEQ ID NO: 1242797
guagcugaggcuuggagaa

SEQ ID NO: 1373575 - RNA, 19 nt, Artificial Sequence
  Description of Artificial Sequence: Synthetic oligonucleotide
  Antisense strand to SEQ ID NO: 1373574
uucuccaagccucagcuac

SEQ ID NO: 1373576 - RNA, 19 nt, Artificial Sequence
  Description of Artificial Sequence: Synthetic oligonucleotide
  Sense strand starting at position 2793 of SEQ ID NO: 1242797
cgaaaucaccuuugaaaca

SEQ ID NO: 1373577 - RNA, 19 nt, Artificial Sequence
  Description of Artificial Sequence: Synthetic oligonucleotide
  Antisense strand to SEQ ID NO: 1373576
uguuucaaaggugauuucg

SEQ ID NO: 1373578 - RNA, 19 nt, Artificial Sequence
  Description of Artificial Sequence: Synthetic oligonucleotide
  Sense strand starting at position 2810 of SEQ ID NO: 1242797
cagguaaauccacguuccu

SEQ ID NO: 1373579 - RNA, 19 nt, Artificial Sequence
  Description of Artificial Sequence: Synthetic oligonucleotide
  Antisense strand to SEQ ID NO: 1373578
aggaacguggauuuaccug

SEQ ID NO: 1373580 - RNA, 19 nt, Artificial Sequence
  Description of Artificial Sequence: Synthetic oligonucleotide
  Sense strand starting at position 2967 of SEQ ID NO: 1242797
ggaauuagcuccuccagca

SEQ ID NO: 1373581 - RNA, 19 nt, Artificial Sequence
  Description of Artificial Sequence: Synthetic oligonucleotide
  Antisense strand to SEQ ID NO: 1373580
ugcuggaggagcuaauucc

SEQ ID NO: 1373582 - RNA, 19 nt, Artificial Sequence
  Description of Artificial Sequence: Synthetic oligonucleotide
  Sense strand starting at position 3177 of SEQ ID NO: 1242797
agggaaggcuugccuaaga

SEQ ID NO: 1373583 - RNA, 19 nt, Artificial Sequence
  Description of Artificial Sequence: Synthetic oligonucleotide
  Antisense strand to SEQ ID NO: 1373582
ucuuaggcaagccuucccu

SEQ ID NO: 1373584 - RNA, 19 nt, Artificial Sequence
  Description of Artificial Sequence: Synthetic oligonucleotide
  Sense strand starting at position 3578 of SEQ ID NO: 1242797
uuucucagucuuugaagca

SEQ ID NO: 1373585 - RNA, 19 nt, Artificial Sequence
  Description of Artificial Sequence: Synthetic oligonucleotide
  Antisense strand to SEQ ID NO: 1373584
ugcuucaaagacugagaaa

SEQ ID NO: 1373586 - RNA, 19 nt, Artificial Sequence
  Description of Artificial Sequence: Synthetic oligonucleotide
  Sense strand starting at position 3691 of SEQ ID NO: 1242797
agugaauaagacuguucca

SEQ ID NO: 1373587 - RNA, 19 nt, Artificial Sequence
  Description of Artificial Sequence: Synthetic oligonucleotide
  Antisense strand to SEQ ID NO: 1373586
uggaacagucuuauucacu

SEQ ID NO: 1373588 - RNA, 19 nt, Artificial Sequence
  Description of Artificial Sequence: Synthetic oligonucleotide
  Sense strand starting at position 3696 of SEQ ID NO: 1242797
auaagacuguuccagaaca

SEQ ID NO: 1373589 - RNA, 19 nt, Artificial Sequence
  Description of Artificial Sequence: Synthetic oligonucleotide
  Antisense strand to SEQ ID NO: 1373588
uguucuggaacagucuuau

SEQ ID NO: 1373590 - RNA, 19 nt, Artificial Sequence
  Description of Artificial Sequence: Synthetic oligonucleotide
  Sense strand starting at position 3710 of SEQ ID NO: 1242797
gaacaacaguccuuggauu

SEQ ID NO: 1373591 - RNA, 19 nt, Artificial Sequence
  Description of Artificial Sequence: Synthetic oligonucleotide
  Antisense strand to SEQ ID NO: 1373590
aauccaaggacuguuguuc

SEQ ID NO: 1373592 - RNA, 19 nt, Artificial Sequence
  Description of Artificial Sequence: Synthetic oligonucleotide
  Sense strand starting at position 3712 of SEQ ID NO: 1242797
acaacaguccuuggauuga

SEQ ID NO: 1373593 - RNA, 19 nt, Artificial Sequence
  Description of Artificial Sequence: Synthetic oligonucleotide
  Antisense strand to SEQ ID NO: 1373592
ucaauccaaggacuguugu

SEQ ID NO: 1373594 - RNA, 19 nt, Artificial Sequence
  Description of Artificial Sequence: Synthetic oligonucleotide
  Sense strand starting at position 3716 of SEQ ID NO: 1242797
caguccuuggauugacaaa

SEQ ID NO: 1373595 - RNA, 19 nt, Artificial Sequence
  Description of Artificial Sequence: Synthetic oligonucleotide
  Antisense strand to SEQ ID NO: 1373594
uuugucaauccaaggacug

SEQ ID NO: 1373596 - RNA, 19 nt, Artificial Sequence
  Description of Artificial Sequence: Synthetic oligonucleotide
  Sense strand starting at position 3749 of SEQ ID NO: 1242797
ggagaagagaucuguguua

SEQ ID NO: 1373597 - RNA, 19 nt, Artificial Sequence
  Description of Artificial Sequence: Synthetic oligonucleotide
  Antisense strand to SEQ ID NO: 1373596
uaacacagaucucuucucc

SEQ ID NO: 1373598 - RNA, 19 nt, Artificial Sequence
  Description of Artificial Sequence: Synthetic oligonucleotide
  Sense strand starting at position 3751 of SEQ ID NO: 1242797
agaagagaucuguguuagc

SEQ ID NO: 1373599 - RNA, 19 nt, Artificial Sequence
  Description of Artificial Sequence: Synthetic oligonucleotide
  Antisense strand to SEQ ID NO: 1373598
gcuaacacagaucucuucu

SEQ ID NO: 1373600 - RNA, 19 nt, Artificial Sequence
  Description of Artificial Sequence: Synthetic oligonucleotide
  Sense strand starting at position 3756 of SEQ ID NO: 1242797
agaucuguguuagcagaug

SEQ ID NO: 1373601 - RNA, 19 nt, Artificial Sequence
  Description of Artificial Sequence: Synthetic oligonucleotide
  Antisense strand to SEQ ID NO: 1373600
caucugcuaacacagaucu

SEQ ID NO: 1373602 - RNA, 19 nt, Artificial Sequence
  Description of Artificial Sequence: Synthetic oligonucleotide
  Sense strand starting at position 423 of SEQ ID NO: 1242798
cgggauaauagguggaaca

SEQ ID NO: 1373603 - RNA, 19 nt, Artificial Sequence
  Description of Artificial Sequence: Synthetic oligonucleotide
  Antisense strand to SEQ ID NO: 1373602
uguuccaccuauuaucccg

SEQ ID NO: 1373604 - RNA, 19 nt, Artificial Sequence
  Description of Artificial Sequence: Synthetic oligonucleotide
  Sense strand starting at position 896 of SEQ ID NO: 1242798
gcauauaaauccuccagag

SEQ ID NO: 1373605 - RNA, 19 nt, Artificial Sequence
  Description of Artificial Sequence: Synthetic oligonucleotide
  Antisense strand to SEQ ID NO: 1373604
cucuggaggauuuauaugc

SEQ ID NO: 1373606 - RNA, 19 nt, Artificial Sequence
  Description of Artificial Sequence: Synthetic oligonucleotide
  Sense strand starting at position 997 of SEQ ID NO: 1242798
uuauauuggcuaugcaaag

SEQ ID NO: 1373607 - RNA, 19 nt, Artificial Sequence
  Description of Artificial Sequence: Synthetic oligonucleotide
  Antisense strand to SEQ ID NO: 1373606
cuuugcauagccaauauaa

SEQ ID NO: 1373608 - RNA, 19 nt, Artificial Sequence
  Description of Artificial Sequence: Synthetic oligonucleotide
  Sense strand starting at position 1027 of SEQ ID NO: 1242798
acugacuuuggaggcaaau

SEQ ID NO: 1373609 - RNA, 19 nt, Artificial Sequence
  Description of Artificial Sequence: Synthetic oligonucleotide
  Antisense strand to SEQ ID NO: 1373608
auuugccuccaaagucagu

SEQ ID NO: 1373610 - RNA, 19 nt, Artificial Sequence
  Description of Artificial Sequence: Synthetic oligonucleotide
  Sense strand starting at position 1057 of SEQ ID NO: 1242798
aguccugacuaguccagaa

SEQ ID NO: 1373611 - RNA, 19 nt, Artificial Sequence
  Description of Artificial Sequence: Synthetic oligonucleotide
  Antisense strand to SEQ ID NO: 1373610
uucuggacuagucaggacu

SEQ ID NO: 1373612 - RNA, 19 nt, Artificial Sequence
  Description of Artificial Sequence: Synthetic oligonucleotide
  Sense strand starting at position 1059 of SEQ ID NO: 1242798
uccugacuaguccagaauu

SEQ ID NO: 1373613 - RNA, 19 nt, Artificial Sequence
  Description of Artificial Sequence: Synthetic oligonucleotide
  Antisense strand to SEQ ID NO: 1373612
aauucuggacuagucagga

SEQ ID NO: 1373614 - RNA, 19 nt, Artificial Sequence
  Description of Artificial Sequence: Synthetic oligonucleotide
  Sense strand starting at position 1187 of SEQ ID NO: 1242798
gagggcaguccugauacuu

SEQ ID NO: 1373615 - RNA, 19 nt, Artificial Sequence
  Description of Artificial Sequence: Synthetic oligonucleotide
  Antisense strand to SEQ ID NO: 1373614
aaguaucaggacugcccuc

SEQ ID NO: 1373616 - RNA, 19 nt, Artificial Sequence
  Description of Artificial Sequence: Synthetic oligonucleotide
  Sense strand starting at position 1198 of SEQ ID NO: 1242798
ugauacuuacauugcgaga

SEQ ID NO: 1373617 - RNA, 19 nt, Artificial Sequence
  Description of Artificial Sequence: Synthetic oligonucleotide
  Antisense strand to SEQ ID NO: 1373616
ucucgcaauguaaguauca

SEQ ID NO: 1373618 - RNA, 19 nt, Artificial Sequence
  Description of Artificial Sequence: Synthetic oligonucleotide
  Sense strand starting at position 1203 of SEQ ID NO: 1242798
cuuacauugcgagaacaug

SEQ ID NO: 1373619 - RNA, 19 nt, Artificial Sequence
  Description of Artificial Sequence: Synthetic oligonucleotide
  Antisense strand to SEQ ID NO: 1373618
cauguucucgcaauguaag

SEQ ID NO: 1373620 - RNA, 19 nt, Artificial Sequence
  Description of Artificial Sequence: Synthetic oligonucleotide
  Sense strand starting at position 1251 of SEQ ID NO: 1242798
uguggaaguucagugauua

SEQ ID NO: 1373621 - RNA, 19 nt, Artificial Sequence
  Description of Artificial Sequence: Synthetic oligonucleotide
  Antisense strand to SEQ ID NO: 1373620
uaaucacugaacuuccaca

SEQ ID NO: 1373622 - RNA, 19 nt, Artificial Sequence
  Description of Artificial Sequence: Synthetic oligonucleotide
  Sense strand starting at position 1252 of SEQ ID NO: 1242798
guggaaguucagugauuau

SEQ ID NO: 1373623 - RNA, 19 nt, Artificial Sequence
  Description of Artificial Sequence: Synthetic oligonucleotide
  Antisense strand to SEQ ID NO: 1373622
auaaucacugaacuuccac

SEQ ID NO: 1373624 - RNA, 19 nt, Artificial Sequence
  Description of Artificial Sequence: Synthetic oligonucleotide
  Sense strand starting at position 1262 of SEQ ID NO: 1242798
agugauuauagguaguuua

SEQ ID NO: 1373625 - RNA, 19 nt, Artificial Sequence
  Description of Artificial Sequence: Synthetic oligonucleotide
  Antisense strand to SEQ ID NO: 1373624
uaaacuaccuauaaucacu

SEQ ID NO: 1373626 - RNA, 19 nt, Artificial Sequence
  Description of Artificial Sequence: Synthetic oligonucleotide
  Sense strand starting at position 1272 of SEQ ID NO: 1242798
gguaguuuaauuugucuua

SEQ ID NO: 1373627 - RNA, 19 nt, Artificial Sequence
  Description of Artificial Sequence: Synthetic oligonucleotide
  Antisense strand to SEQ ID NO: 1373626
uaagacaaauuaaacuacc

SEQ ID NO: 1373628 - RNA, 19 nt, Artificial Sequence
  Description of Artificial Sequence: Synthetic oligonucleotide
  Sense strand starting at position 1523 of SEQ ID NO: 1242798
aggccagcuguguuugcua

SEQ ID NO: 1373629 - RNA, 19 nt, Artificial Sequence
  Description of Artificial Sequence: Synthetic oligonucleotide
  Antisense strand to SEQ ID NO: 1373628
uagcaaacacagcuggccu

SEQ ID NO: 1373630 - RNA, 19 nt, Artificial Sequence
  Description of Artificial Sequence: Synthetic oligonucleotide
  Sense strand starting at position 1542 of SEQ ID NO: 1242798
auuggcucucagggaaguu

SEQ ID NO: 1373631 - RNA, 19 nt, Artificial Sequence
  Description of Artificial Sequence: Synthetic oligonucleotide
  Antisense strand to SEQ ID NO: 1373630
aacuucccugagagccaau

SEQ ID NO: 1373632 - RNA, 19 nt, Artificial Sequence
  Description of Artificial Sequence: Synthetic oligonucleotide
  Sense strand starting at position 1543 of SEQ ID NO: 1242798
uuggcucucagggaaguua

SEQ ID NO: 1373633 - RNA, 19 nt, Artificial Sequence
  Description of Artificial Sequence: Synthetic oligonucleotide
  Antisense strand to SEQ ID NO: 1373632
uaacuucccugagagccaa

SEQ ID NO: 1373634 - RNA, 19 nt, Artificial Sequence
  Description of Artificial Sequence: Synthetic oligonucleotide
  Sense strand starting at position 1599 of SEQ ID NO: 1242798
accgucuuccuugaugauu

SEQ ID NO: 1373635 - RNA, 19 nt, Artificial Sequence
  Description of Artificial Sequence: Synthetic oligonucleotide
  Antisense strand to SEQ ID NO: 1373634
aaucaucaaggaagacggu

SEQ ID NO: 1373636 - RNA, 19 nt, Artificial Sequence
  Description of Artificial Sequence: Synthetic oligonucleotide
  Sense strand starting at position 1653 of SEQ ID NO: 1242798
agaugauucugguuuguaa

SEQ ID NO: 1373637 - RNA, 19 nt, Artificial Sequence
  Description of Artificial Sequence: Synthetic oligonucleotide
  Antisense strand to SEQ ID NO: 1373636
uuacaaaccagaaucaucu

SEQ ID NO: 1373638 - RNA, 19 nt, Artificial Sequence
  Description of Artificial Sequence: Synthetic oligonucleotide
  Sense strand starting at position 2352 of SEQ ID NO: 1242798
ggcuaugaaccauguaauu

SEQ ID NO: 1373639 - RNA, 19 nt, Artificial Sequence
  Description of Artificial Sequence: Synthetic oligonucleotide
  Antisense strand to SEQ ID NO: 1373638
aauuacaugguucauagcc

SEQ ID NO: 1373640 - RNA, 19 nt, Artificial Sequence
  Description of Artificial Sequence: Synthetic oligonucleotide
  Sense strand starting at position 2357 of SEQ ID NO: 1242798
ugaaccauguaauugcuua

SEQ ID NO: 1373641 - RNA, 19 nt, Artificial Sequence
  Description of Artificial Sequence: Synthetic oligonucleotide
  Antisense strand to SEQ ID NO: 1373640
uaagcaauuacaugguuca

SEQ ID NO: 1373642 - RNA, 19 nt, Artificial Sequence
  Description of Artificial Sequence: Synthetic oligonucleotide
  Sense strand starting at position 2541 of SEQ ID NO: 1242798
gauguugauguguacuuau

SEQ ID NO: 1373643 - RNA, 19 nt, Artificial Sequence
  Description of Artificial Sequence: Synthetic oligonucleotide
  Antisense strand to SEQ ID NO: 1373642
auaaguacacaucaacauc

SEQ ID NO: 1373644 - RNA, 19 nt, Artificial Sequence
  Description of Artificial Sequence: Synthetic oligonucleotide
  Sense strand starting at position 2585 of SEQ ID NO: 1242798
ggacucuugcgcuauaaga

SEQ ID NO: 1373645 - RNA, 19 nt, Artificial Sequence
  Description of Artificial Sequence: Synthetic oligonucleotide
  Antisense strand to SEQ ID NO: 1373644
ucuuauagcgcaagagucc

SEQ ID NO: 1373646 - RNA, 19 nt, Artificial Sequence
  Description of Artificial Sequence: Synthetic oligonucleotide
  Sense strand starting at position 2665 of SEQ ID NO: 1242798
ggcauuuccuuauugugca

SEQ ID NO: 1373647 - RNA, 19 nt, Artificial Sequence
  Description of Artificial Sequence: Synthetic oligonucleotide
  Antisense strand to SEQ ID NO: 1373646
ugcacaauaaggaaaugcc

SEQ ID NO: 1373648 - RNA, 19 nt, Artificial Sequence
  Description of Artificial Sequence: Synthetic oligonucleotide
  Sense strand starting at position 2739 of SEQ ID NO: 1242798
ugucuuuguagguauuaag

SEQ ID NO: 1373649 - RNA, 19 nt, Artificial Sequence
  Description of Artificial Sequence: Synthetic oligonucleotide
  Antisense strand to SEQ ID NO: 1373648
cuuaauaccuacaaagaca

SEQ ID NO: 1373650 - RNA, 19 nt, Artificial Sequence
  Description of Artificial Sequence: Synthetic oligonucleotide
  Sense strand starting at position 2873 of SEQ ID NO: 1242798
aaguuagugggagaguguu

SEQ ID NO: 1373651 - RNA, 19 nt, Artificial Sequence
  Description of Artificial Sequence: Synthetic oligonucleotide
  Antisense strand to SEQ ID NO: 1373650
aacacucucccacuaacuu

SEQ ID NO: 1373652 - RNA, 19 nt, Artificial Sequence
  Description of Artificial Sequence: Synthetic oligonucleotide
  Sense strand starting at position 2879 of SEQ ID NO: 1242798
gugggagaguguuucagau

SEQ ID NO: 1373653 - RNA, 19 nt, Artificial Sequence
  Description of Artificial Sequence: Synthetic oligonucleotide
  Antisense strand to SEQ ID NO: 1373652
aucugaaacacucucccac

SEQ ID NO: 1373654 - RNA, 19 nt, Artificial Sequence
  Description of Artificial Sequence: Synthetic oligonucleotide
  Sense strand starting at position 3111 of SEQ ID NO: 1242798
uccaaacaauguguuuaua

SEQ ID NO: 1373655 - RNA, 19 nt, Artificial Sequence
  Description of Artificial Sequence: Synthetic oligonucleotide
  Antisense strand to SEQ ID NO: 1373654
uauaaacacauuguuugga

SEQ ID NO: 1373656 - RNA, 19 nt, Artificial Sequence
  Description of Artificial Sequence: Synthetic oligonucleotide
  Sense strand starting at position 3170 of SEQ ID NO: 1242798
aguauauuauccucucaug

SEQ ID NO: 1373657 - RNA, 19 nt, Artificial Sequence
  Description of Artificial Sequence: Synthetic oligonucleotide
  Antisense strand to SEQ ID NO: 1373656
caugagaggauaauauacu

SEQ ID NO: 1373658 - RNA, 19 nt, Artificial Sequence
  Description of Artificial Sequence: Synthetic oligonucleotide
  Sense strand starting at position 3298 of SEQ ID NO: 1242798
uuuccaguguuaucaugaa

SEQ ID NO: 1373659 - RNA, 19 nt, Artificial Sequence
  Description of Artificial Sequence: Synthetic oligonucleotide
  Antisense strand to SEQ ID NO: 1373658
uucaugauaacacuggaaa

SEQ ID NO: 1373660 - RNA, 19 nt, Artificial Sequence
  Description of Artificial Sequence: Synthetic oligonucleotide
  Sense strand starting at position 3411 of SEQ ID NO: 1242798
uuggaucugcugcauaaau

SEQ ID NO: 1373661 - RNA, 19 nt, Artificial Sequence
  Description of Artificial Sequence: Synthetic oligonucleotide
  Antisense strand to SEQ ID NO: 1373660
auuuaugcagcagauccaa

SEQ ID NO: 1373662 - RNA, 19 nt, Artificial Sequence
  Description of Artificial Sequence: Synthetic oligonucleotide
  Sense strand starting at position 3413 of SEQ ID NO: 1242798
ggaucugcugcauaaauuc

SEQ ID NO: 1373663 - RNA, 19 nt, Artificial Sequence
  Description of Artificial Sequence: Synthetic oligonucleotide
  Antisense strand to SEQ ID NO: 1373662
gaauuuaugcagcagaucc

SEQ ID NO: 1373664 - RNA, 19 nt, Artificial Sequence
  Description of Artificial Sequence: Synthetic oligonucleotide
  Sense strand starting at position 3431 of SEQ ID NO: 1242798
ccuuuaaaguuugcagaca

SEQ ID NO: 1373665 - RNA, 19 nt, Artificial Sequence
  Description of Artificial Sequence: Synthetic oligonucleotide
  Antisense strand to SEQ ID NO: 1373664
ugucugcaaacuuuaaagg

SEQ ID NO: 1373666 - RNA, 19 nt, Artificial Sequence
  Description of Artificial Sequence: Synthetic oligonucleotide
  Sense strand starting at position 3449 of SEQ ID NO: 1242798
auguauugaguguauugau

SEQ ID NO: 1373667 - RNA, 19 nt, Artificial Sequence
  Description of Artificial Sequence: Synthetic oligonucleotide
  Antisense strand to SEQ ID NO: 1373666
aucaauacacucaauacau

SEQ ID NO: 1373668 - RNA, 19 nt, Artificial Sequence
  Description of Artificial Sequence: Synthetic oligonucleotide
  Sense strand starting at position 3480 of SEQ ID NO: 1242798
ggaguaagcaccugaugug

SEQ ID NO: 1373669 - RNA, 19 nt, Artificial Sequence
  Description of Artificial Sequence: Synthetic oligonucleotide
  Antisense strand to SEQ ID NO: 1373668
cacaucaggugcuuacucc

SEQ ID NO: 1373670 - RNA, 19 nt, Artificial Sequence
  Description of Artificial Sequence: Synthetic oligonucleotide
  Sense strand starting at position 3481 of SEQ ID NO: 1242798
gaguaagcaccugauguga

SEQ ID NO: 1373671 - RNA, 19 nt, Artificial Sequence
  Description of Artificial Sequence: Synthetic oligonucleotide
  Antisense strand to SEQ ID NO: 1373670
ucacaucaggugcuuacuc

SEQ ID NO: 1373672 - RNA, 19 nt, Artificial Sequence
  Description of Artificial Sequence: Synthetic oligonucleotide
  Sense strand starting at position 3518 of SEQ ID NO: 1242798
auccuuuaagaauggcaua

SEQ ID NO: 1373673 - RNA, 19 nt, Artificial Sequence
  Description of Artificial Sequence: Synthetic oligonucleotide
  Antisense strand to SEQ ID NO: 1373672
uaugccauucuuaaaggau

SEQ ID NO: 1373674 - RNA, 19 nt, Artificial Sequence
  Description of Artificial Sequence: Synthetic oligonucleotide
  Sense strand starting at position 3523 of SEQ ID NO: 1242798
uuaagaauggcauaguugu

SEQ ID NO: 1373675 - RNA, 19 nt, Artificial Sequence
  Description of Artificial Sequence: Synthetic oligonucleotide
  Antisense strand to SEQ ID NO: 1373674
acaacuaugccauucuuaa

SEQ ID NO: 1373676 - RNA, 19 nt, Artificial Sequence
  Description of Artificial Sequence: Synthetic oligonucleotide
  Sense strand starting at position 3545 of SEQ ID NO: 1242798
guuggaaggcuguaugaau

SEQ ID NO: 1373677 - RNA, 19 nt, Artificial Sequence
  Description of Artificial Sequence: Synthetic oligonucleotide
  Antisense strand to SEQ ID NO: 1373676
auucauacagccuuccaac

SEQ ID NO: 1373678 - RNA, 19 nt, Artificial Sequence
  Description of Artificial Sequence: Synthetic oligonucleotide
  Sense strand starting at position 3617 of SEQ ID NO: 1242798
uugauuaagauucgucaug

SEQ ID NO: 1373679 - RNA, 19 nt, Artificial Sequence
  Description of Artificial Sequence: Synthetic oligonucleotide
  Antisense strand to SEQ ID NO: 1373678
caugacgaaucuuaaucaa

SEQ ID NO: 1373680 - RNA, 19 nt, Artificial Sequence
  Description of Artificial Sequence: Synthetic oligonucleotide
  Sense strand starting at position 3619 of SEQ ID NO: 1242798
gauuaagauucgucaugua

SEQ ID NO: 1373681 - RNA, 19 nt, Artificial Sequence
  Description of Artificial Sequence: Synthetic oligonucleotide
  Antisense strand to SEQ ID NO: 1373680
uacaugacgaaucuuaauc

SEQ ID NO: 1373682 - RNA, 19 nt, Artificial Sequence
  Description of Artificial Sequence: Synthetic oligonucleotide
  Sense strand starting at position 92 of SEQ ID NO: 1242799
acaagugauuauccgcuaa

SEQ ID NO: 1373683 - RNA, 19 nt, Artificial Sequence
  Description of Artificial Sequence: Synthetic oligonucleotide
  Antisense strand to SEQ ID NO: 1373682
uuagcggauaaucacuugu

SEQ ID NO: 1373684 - RNA, 19 nt, Artificial Sequence
  Description of Artificial Sequence: Synthetic oligonucleotide
  Sense strand starting at position 94 of SEQ ID NO: 1242799
aagugauuauccgcuaagg

SEQ ID NO: 1373685 - RNA, 19 nt, Artificial Sequence
  Description of Artificial Sequence: Synthetic oligonucleotide
  Antisense strand to SEQ ID NO: 1373684
ccuuagcggauaaucacuu

SEQ ID NO: 1373686 - RNA, 19 nt, Artificial Sequence
  Description of Artificial Sequence: Synthetic oligonucleotide
  Sense strand starting at position 96 of SEQ ID NO: 1242799
gugauuauccgcuaaggaa

SEQ ID NO: 1373687 - RNA, 19 nt, Artificial Sequence
  Description of Artificial Sequence: Synthetic oligonucleotide
  Antisense strand to SEQ ID NO: 1373686
uuccuuagcggauaaucac

SEQ ID NO: 1373688 - RNA, 19 nt, Artificial Sequence
  Description of Artificial Sequence: Synthetic oligonucleotide
  Sense strand starting at position 121 of SEQ ID NO: 1242799
uccacuugggcuugaaaua

SEQ ID NO: 1373689 - RNA, 19 nt, Artificial Sequence
  Description of Artificial Sequence: Synthetic oligonucleotide
  Antisense strand to SEQ ID NO: 1373688
uauuucaagcccaagugga

SEQ ID NO: 1373690 - RNA, 19 nt, Artificial Sequence
  Description of Artificial Sequence: Synthetic oligonucleotide
  Sense strand starting at position 233 of SEQ ID NO: 1242799
uuaaauugagaguggcuuu

SEQ ID NO: 1373691 - RNA, 19 nt, Artificial Sequence
  Description of Artificial Sequence: Synthetic oligonucleotide
  Antisense strand to SEQ ID NO: 1373690
aaagccacucucaauuuaa

SEQ ID NO: 1373692 - RNA, 19 nt, Artificial Sequence
  Description of Artificial Sequence: Synthetic oligonucleotide
  Sense strand starting at position 347 of SEQ ID NO: 1242799
aacuuagauuugugauguc

SEQ ID NO: 1373693 - RNA, 19 nt, Artificial Sequence
  Description of Artificial Sequence: Synthetic oligonucleotide
  Antisense strand to SEQ ID NO: 1373692
gacaucacaaaucuaaguu

SEQ ID NO: 1373694 - RNA, 19 nt, Artificial Sequence
  Description of Artificial Sequence: Synthetic oligonucleotide
  Sense strand starting at position 354 of SEQ ID NO: 1242799
auuugugaugucugcacau

SEQ ID NO: 1373695 - RNA, 19 nt, Artificial Sequence
  Description of Artificial Sequence: Synthetic oligonucleotide
  Antisense strand to SEQ ID NO: 1373694
augugcagacaucacaaau

SEQ ID NO: 1373696 - RNA, 19 nt, Artificial Sequence
  Description of Artificial Sequence: Synthetic oligonucleotide
  Sense strand starting at position 760 of SEQ ID NO: 1242799
gcuugcauugcccauuaua

SEQ ID NO: 1373697 - RNA, 19 nt, Artificial Sequence
  Description of Artificial Sequence: Synthetic oligonucleotide
  Antisense strand to SEQ ID NO: 1373696
uauaaugggcaaugcaagc

SEQ ID NO: 1373698 - RNA, 19 nt, Artificial Sequence
  Description of Artificial Sequence: Synthetic oligonucleotide
  Sense strand starting at position 763 of SEQ ID NO: 1242799
ugcauugcccauuauagaa

SEQ ID NO: 1373699 - RNA, 19 nt, Artificial Sequence
  Description of Artificial Sequence: Synthetic oligonucleotide
  Antisense strand to SEQ ID NO: 1373698
uucuauaaugggcaaugca

SEQ ID NO: 1373700 - RNA, 19 nt, Artificial Sequence
  Description of Artificial Sequence: Synthetic oligonucleotide
  Sense strand starting at position 770 of SEQ ID NO: 1242799
cccauuauagaaugugacu

SEQ ID NO: 1373701 - RNA, 19 nt, Artificial Sequence
  Description of Artificial Sequence: Synthetic oligonucleotide
  Antisense strand to SEQ ID NO: 1373700
agucacauucuauaauggg

SEQ ID NO: 1373702 - RNA, 19 nt, Artificial Sequence
  Description of Artificial Sequence: Synthetic oligonucleotide
  Sense strand starting at position 876 of SEQ ID NO: 1242799
ucucucauuguuggugaua

SEQ ID NO: 1373703 - RNA, 19 nt, Artificial Sequence
  Description of Artificial Sequence: Synthetic oligonucleotide
  Antisense strand to SEQ ID NO: 1373702
uaucaccaacaaugagaga

SEQ ID NO: 1373704 - RNA, 19 nt, Artificial Sequence
  Description of Artificial Sequence: Synthetic oligonucleotide
  Sense strand starting at position 877 of SEQ ID NO: 1242799
cucucauuguuggugauau

SEQ ID NO: 1373705 - RNA, 19 nt, Artificial Sequence
  Description of Artificial Sequence: Synthetic oligonucleotide
  Antisense strand to SEQ ID NO: 1373704
auaucaccaacaaugagag

SEQ ID NO: 1373706 - RNA, 19 nt, Artificial Sequence
  Description of Artificial Sequence: Synthetic oligonucleotide
  Sense strand starting at position 888 of SEQ ID NO: 1242799
ggugauauuaauggccuca

SEQ ID NO: 1373707 - RNA, 19 nt, Artificial Sequence
  Description of Artificial Sequence: Synthetic oligonucleotide
  Antisense strand to SEQ ID NO: 1373706
ugaggccauuaauaucacc

SEQ ID NO: 1373708 - RNA, 19 nt, Artificial Sequence
  Description of Artificial Sequence: Synthetic oligonucleotide
  Sense strand starting at position 890 of SEQ ID NO: 1242799
ugauauuaauggccucaaa

SEQ ID NO: 1373709 - RNA, 19 nt, Artificial Sequence
  Description of Artificial Sequence: Synthetic oligonucleotide
  Antisense strand to SEQ ID NO: 1373708
uuugaggccauuaauauca

SEQ ID NO: 1373710 - RNA, 19 nt, Artificial Sequence
  Description of Artificial Sequence: Synthetic oligonucleotide
  Sense strand starting at position 937 of SEQ ID NO: 1242799
uuucgaaccaguugguaau

SEQ ID NO: 1373711 - RNA, 19 nt, Artificial Sequence
  Description of Artificial Sequence: Synthetic oligonucleotide
  Antisense strand to SEQ ID NO: 1373710
auuaccaacugguucgaaa

SEQ ID NO: 1373712 - RNA, 19 nt, Artificial Sequence
  Description of Artificial Sequence: Synthetic oligonucleotide
  Sense strand starting at position 940 of SEQ ID NO: 1242799
cgaaccaguugguaaucau

SEQ ID NO: 1373713 - RNA, 19 nt, Artificial Sequence
  Description of Artificial Sequence: Synthetic oligonucleotide
  Antisense strand to SEQ ID NO: 1373712
augauuaccaacugguucg

SEQ ID NO: 1373714 - RNA, 19 nt, Artificial Sequence
  Description of Artificial Sequence: Synthetic oligonucleotide
  Sense strand starting at position 943 of SEQ ID NO: 1242799
accaguugguaaucaucuu

SEQ ID NO: 1373715 - RNA, 19 nt, Artificial Sequence
  Description of Artificial Sequence: Synthetic oligonucleotide
  Antisense strand to SEQ ID NO: 1373714
aagaugauuaccaacuggu

SEQ ID NO: 1373716 - RNA, 19 nt, Artificial Sequence
  Description of Artificial Sequence: Synthetic oligonucleotide
  Sense strand starting at position 950 of SEQ ID NO: 1242799
gguaaucaucuugauuacu

SEQ ID NO: 1373717 - RNA, 19 nt, Artificial Sequence
  Description of Artificial Sequence: Synthetic oligonucleotide
  Antisense strand to SEQ ID NO: 1373716
aguaaucaagaugauuacc

SEQ ID NO: 1373718 - RNA, 19 nt, Artificial Sequence
  Description of Artificial Sequence: Synthetic oligonucleotide
  Sense strand starting at position 1064 of SEQ ID NO: 1242799
cuuggaagugucuauacau

SEQ ID NO: 1373719 - RNA, 19 nt, Artificial Sequence
  Description of Artificial Sequence: Synthetic oligonucleotide
  Antisense strand to SEQ ID NO: 1373718
auguauagacacuuccaag

SEQ ID NO: 1373720 - RNA, 19 nt, Artificial Sequence
  Description of Artificial Sequence: Synthetic oligonucleotide
  Sense strand starting at position 1166 of SEQ ID NO: 1242799
ucuccuaacuugggaagau

SEQ ID NO: 1373721 - RNA, 19 nt, Artificial Sequence
  Description of Artificial Sequence: Synthetic oligonucleotide
  Antisense strand to SEQ ID NO: 1373720
aucuucccaaguuaggaga

SEQ ID NO: 1373722 - RNA, 19 nt, Artificial Sequence
  Description of Artificial Sequence: Synthetic oligonucleotide
  Sense strand starting at position 1334 of SEQ ID NO: 1242799
ucuggacgucuuuaagaaa

SEQ ID NO: 1373723 - RNA, 19 nt, Artificial Sequence
  Description of Artificial Sequence: Synthetic oligonucleotide
  Antisense strand to SEQ ID NO: 1373722
uuucuuaaagacguccaga

SEQ ID NO: 1373724 - RNA, 19 nt, Artificial Sequence
  Description of Artificial Sequence: Synthetic oligonucleotide
  Sense strand starting at position 1337 of SEQ ID NO: 1242799
ggacgucuuuaagaaauuu

SEQ ID NO: 1373725 - RNA, 19 nt, Artificial Sequence
  Description of Artificial Sequence: Synthetic oligonucleotide
  Antisense strand to SEQ ID NO: 1373724
aaauuucuuaaagacgucc

SEQ ID NO: 1373726 - RNA, 19 nt, Artificial Sequence
  Description of Artificial Sequence: Synthetic oligonucleotide
  Sense strand starting at position 1437 of SEQ ID NO: 1242799
aguggaaacccagaagugu

SEQ ID NO: 1373727 - RNA, 19 nt, Artificial Sequence
  Description of Artificial Sequence: Synthetic oligonucleotide
  Antisense strand to SEQ ID NO: 1373726
acacuucuggguuuccacu

SEQ ID NO: 1373728 - RNA, 19 nt, Artificial Sequence
  Description of Artificial Sequence: Synthetic oligonucleotide
  Sense strand starting at position 1804 of SEQ ID NO: 1242799
gacuguucaccucggcgua

SEQ ID NO: 1373729 - RNA, 19 nt, Artificial Sequence
  Description of Artificial Sequence: Synthetic oligonucleotide
  Antisense strand to SEQ ID NO: 1373728
uacgccgaggugaacaguc

SEQ ID NO: 1373730 - RNA, 19 nt, Artificial Sequence
  Description of Artificial Sequence: Synthetic oligonucleotide
  Sense strand starting at position 2846 of SEQ ID NO: 1242799
uccagagccuucccugaau

SEQ ID NO: 1373731 - RNA, 19 nt, Artificial Sequence
  Description of Artificial Sequence: Synthetic oligonucleotide
  Antisense strand to SEQ ID NO: 1373730
auucagggaaggcucugga

SEQ ID NO: 1373732 - RNA, 19 nt, Artificial Sequence
  Description of Artificial Sequence: Synthetic oligonucleotide
  Sense strand starting at position 2849 of SEQ ID NO: 1242799
agagccuucccugaauauc

SEQ ID NO: 1373733 - RNA, 19 nt, Artificial Sequence
  Description of Artificial Sequence: Synthetic oligonucleotide
  Antisense strand to SEQ ID NO: 1373732
gauauucagggaaggcucu

SEQ ID NO: 1373734 - RNA, 19 nt, Artificial Sequence
  Description of Artificial Sequence: Synthetic oligonucleotide
  Sense strand starting at position 2933 of SEQ ID NO: 1242799
cuuugugauuaauaaguca

SEQ ID NO: 1373735 - RNA, 19 nt, Artificial Sequence
  Description of Artificial Sequence: Synthetic oligonucleotide
  Antisense strand to SEQ ID NO: 1373734
ugacuuauuaaucacaaag

SEQ ID NO: 1373736 - RNA, 19 nt, Artificial Sequence
  Description of Artificial Sequence: Synthetic oligonucleotide
  Sense strand starting at position 2960 of SEQ ID NO: 1242799
gagagacuuugagagugua

SEQ ID NO: 1373737 - RNA, 19 nt, Artificial Sequence
  Description of Artificial Sequence: Synthetic oligonucleotide
  Antisense strand to SEQ ID NO: 1373736
uacacucucaaagucucuc

SEQ ID NO: 1373738 - RNA, 19 nt, Artificial Sequence
  Description of Artificial Sequence: Synthetic oligonucleotide
  Sense strand starting at position 2963 of SEQ ID NO: 1242799
agacuuugagaguguaaau

SEQ ID NO: 1373739 - RNA, 19 nt, Artificial Sequence
  Description of Artificial Sequence: Synthetic oligonucleotide
  Antisense strand to SEQ ID NO: 1373738
auuuacacucucaaagucu

SEQ ID NO: 1373740 - RNA, 19 nt, Artificial Sequence
  Description of Artificial Sequence: Synthetic oligonucleotide
  Sense strand starting at position 2972 of SEQ ID NO: 1242799
gaguguaaaucuccuguuu

SEQ ID NO: 1373741 - RNA, 19 nt, Artificial Sequence
  Description of Artificial Sequence: Synthetic oligonucleotide
  Antisense strand to SEQ ID NO: 1373740
aaacaggagauuuacacuc

SEQ ID NO: 1373742 - RNA, 19 nt, Artificial Sequence
  Description of Artificial Sequence: Synthetic oligonucleotide
  Sense strand starting at position 2989 of SEQ ID NO: 1242799
uuguguuuaggaggaggga

SEQ ID NO: 1373743 - RNA, 19 nt, Artificial Sequence
  Description of Artificial Sequence: Synthetic oligonucleotide
  Antisense strand to SEQ ID NO: 1373742
ucccuccuccuaaacacaa

SEQ ID NO: 1373744 - RNA, 19 nt, Artificial Sequence
  Description of Artificial Sequence: Synthetic oligonucleotide
  Sense strand starting at position 3261 of SEQ ID NO: 1242799
ggccuuccugcuugacaca

SEQ ID NO: 1373745 - RNA, 19 nt, Artificial Sequence
  Description of Artificial Sequence: Synthetic oligonucleotide
  Antisense strand to SEQ ID NO: 1373744
ugugucaagcaggaaggcc

SEQ ID NO: 1373746 - RNA, 19 nt, Artificial Sequence
  Description of Artificial Sequence: Synthetic oligonucleotide
  Sense strand starting at position 3434 of SEQ ID NO: 1242799
caagguaaaccaugugaaa

SEQ ID NO: 1373747 - RNA, 19 nt, Artificial Sequence
  Description of Artificial Sequence: Synthetic oligonucleotide
  Antisense strand to SEQ ID NO: 1373746
uuucacaugguuuaccuug

SEQ ID NO: 1373748 - RNA, 19 nt, Artificial Sequence
  Description of Artificial Sequence: Synthetic oligonucleotide
  Sense strand starting at position 3514 of SEQ ID NO: 1242799
gggccuuucucugcucauu

SEQ ID NO: 1373749 - RNA, 19 nt, Artificial Sequence
  Description of Artificial Sequence: Synthetic oligonucleotide
  Antisense strand to SEQ ID NO: 1373748
aaugagcagagaaaggccc

SEQ ID NO: 1373750 - RNA, 19 nt, Artificial Sequence
  Description of Artificial Sequence: Synthetic oligonucleotide
  Sense strand starting at position 3688 of SEQ ID NO: 1242799
uuagaaauagggugucucu

SEQ ID NO: 1373751 - RNA, 19 nt, Artificial Sequence
  Description of Artificial Sequence: Synthetic oligonucleotide
  Antisense strand to SEQ ID NO: 1373750
agagacacccuauuucuaa

SEQ ID NO: 1373752 - RNA, 19 nt, Artificial Sequence
  Description of Artificial Sequence: Synthetic oligonucleotide
  Sense strand starting at position 3691 of SEQ ID NO: 1242799
gaaauagggugucucuaua

SEQ ID NO: 1373753 - RNA, 19 nt, Artificial Sequence
  Description of Artificial Sequence: Synthetic oligonucleotide
  Antisense strand to SEQ ID NO: 1373752
uauagagacacccuauuuc

SEQ ID NO: 1373754 - RNA, 19 nt, Artificial Sequence
  Description of Artificial Sequence: Synthetic oligonucleotide
  Sense strand starting at position 3819 of SEQ ID NO: 1242799
ccaggaggucaucauaguu

SEQ ID NO: 1373755 - RNA, 19 nt, Artificial Sequence
  Description of Artificial Sequence: Synthetic oligonucleotide
  Antisense strand to SEQ ID NO: 1373754
aacuaugaugaccuccugg

SEQ ID NO: 1373756 - RNA, 19 nt, Artificial Sequence
  Description of Artificial Sequence: Synthetic oligonucleotide
  Sense strand starting at position 3957 of SEQ ID NO: 1242799
gcucaagucucagcuuaaa

SEQ ID NO: 1373757 - RNA, 19 nt, Artificial Sequence
  Description of Artificial Sequence: Synthetic oligonucleotide
  Antisense strand to SEQ ID NO: 1373756
uuuaagcugagacuugagc

SEQ ID NO: 1373758 - RNA, 19 nt, Artificial Sequence
  Description of Artificial Sequence: Synthetic oligonucleotide
  Sense strand starting at position 3975 of SEQ ID NO: 1242799
agaucacuuucucuagagu

SEQ ID NO: 1373759 - RNA, 19 nt, Artificial Sequence
  Description of Artificial Sequence: Synthetic oligonucleotide
  Antisense strand to SEQ ID NO: 1373758
acucuagagaaagugaucu

SEQ ID NO: 1373760 - RNA, 19 nt, Artificial Sequence
  Description of Artificial Sequence: Synthetic oligonucleotide
  Sense strand starting at position 3978 of SEQ ID NO: 1242799
ucacuuucucuagaguuga

SEQ ID NO: 1373761 - RNA, 19 nt, Artificial Sequence
  Description of Artificial Sequence: Synthetic oligonucleotide
  Antisense strand to SEQ ID NO: 1373760
ucaacucuagagaaaguga

SEQ ID NO: 1373762 - RNA, 19 nt, Artificial Sequence
  Description of Artificial Sequence: Synthetic oligonucleotide
  Sense strand starting at position 8 of SEQ ID NO: 1242800
uggacaacuuugguuagga

SEQ ID NO: 1373763 - RNA, 19 nt, Artificial Sequence
  Description of Artificial Sequence: Synthetic oligonucleotide
  Antisense strand to SEQ ID NO: 1373762
uccuaaccaaaguugucca

SEQ ID NO: 1373764 - RNA, 19 nt, Artificial Sequence
  Description of Artificial Sequence: Synthetic oligonucleotide
  Sense strand starting at position 9 of SEQ ID NO: 1242800
ggacaacuuugguuaggac

SEQ ID NO: 1373765 - RNA, 19 nt, Artificial Sequence
  Description of Artificial Sequence: Synthetic oligonucleotide
  Antisense strand to SEQ ID NO: 1373764
guccuaaccaaaguugucc

SEQ ID NO: 1373766 - RNA, 19 nt, Artificial Sequence
  Description of Artificial Sequence: Synthetic oligonucleotide
  Sense strand starting at position 298 of SEQ ID NO: 1242800
uuuccuaguugaucgaaac

SEQ ID NO: 1373767 - RNA, 19 nt, Artificial Sequence
  Description of Artificial Sequence: Synthetic oligonucleotide
  Antisense strand to SEQ ID NO: 1373766
guuucgaucaacuaggaaa

SEQ ID NO: 1373768 - RNA, 19 nt, Artificial Sequence
  Description of Artificial Sequence: Synthetic oligonucleotide
  Sense strand starting at position 299 of SEQ ID NO: 1242800
uuccuaguugaucgaaacu

SEQ ID NO: 1373769 - RNA, 19 nt, Artificial Sequence
  Description of Artificial Sequence: Synthetic oligonucleotide
  Antisense strand to SEQ ID NO: 1373768
aguuucgaucaacuaggaa

SEQ ID NO: 1373770 - RNA, 19 nt, Artificial Sequence
  Description of Artificial Sequence: Synthetic oligonucleotide
  Sense strand starting at position 320 of SEQ ID NO: 1242800
aaguaugaagacuacguau

SEQ ID NO: 1373771 - RNA, 19 nt, Artificial Sequence
  Description of Artificial Sequence: Synthetic oligonucleotide
  Antisense strand to SEQ ID NO: 1373770
auacguagucuucauacuu

SEQ ID NO: 1373772 - RNA, 19 nt, Artificial Sequence
  Description of Artificial Sequence: Synthetic oligonucleotide
  Sense strand starting at position 326 of SEQ ID NO: 1242800
gaagacuacguaugcgaau

SEQ ID NO: 1373773 - RNA, 19 nt, Artificial Sequence
  Description of Artificial Sequence: Synthetic oligonucleotide
  Antisense strand to SEQ ID NO: 1373772
auucgcauacguagucuuc

SEQ ID NO: 1373774 - RNA, 19 nt, Artificial Sequence
  Description of Artificial Sequence: Synthetic oligonucleotide
  Sense strand starting at position 385 of SEQ ID NO: 1242800
acuaaacaguaguuacauu

SEQ ID NO: 1373775 - RNA, 19 nt, Artificial Sequence
  Description of Artificial Sequence: Synthetic oligonucleotide
  Antisense strand to SEQ ID NO: 1373774
aauguaacuacuguuuagu

SEQ ID NO: 1373776 - RNA, 19 nt, Artificial Sequence
  Description of Artificial Sequence: Synthetic oligonucleotide
  Sense strand starting at position 397 of SEQ ID NO: 1242800
uuacauuaggcguagauau

SEQ ID NO: 1373777 - RNA, 19 nt, Artificial Sequence
  Description of Artificial Sequence: Synthetic oligonucleotide
  Antisense strand to SEQ ID NO: 1373776
auaucuacgccuaauguaa

SEQ ID NO: 1373778 - RNA, 19 nt, Artificial Sequence
  Description of Artificial Sequence: Synthetic oligonucleotide
  Sense strand starting at position 407 of SEQ ID NO: 1242800
cguagauauuuauaaacca

SEQ ID NO: 1373779 - RNA, 19 nt, Artificial Sequence
  Description of Artificial Sequence: Synthetic oligonucleotide
  Antisense strand to SEQ ID NO: 1373778
ugguuuauaaauaucuacg

SEQ ID NO: 1373780 - RNA, 19 nt, Artificial Sequence
  Description of Artificial Sequence: Synthetic oligonucleotide
  Sense strand starting at position 534 of SEQ ID NO: 1242800
ucuagaucgaguugcacaa

SEQ ID NO: 1373781 - RNA, 19 nt, Artificial Sequence
  Description of Artificial Sequence: Synthetic oligonucleotide
  Antisense strand to SEQ ID NO: 1373780
uugugcaacucgaucuaga

SEQ ID NO: 1373782 - RNA, 19 nt, Artificial Sequence
  Description of Artificial Sequence: Synthetic oligonucleotide
  Sense strand starting at position 538 of SEQ ID NO: 1242800
gaucgaguugcacaauccu

SEQ ID NO: 1373783 - RNA, 19 nt, Artificial Sequence
  Description of Artificial Sequence: Synthetic oligonucleotide
  Antisense strand to SEQ ID NO: 1373782
aggauugugcaacucgauc

SEQ ID NO: 1373784 - RNA, 19 nt, Artificial Sequence
  Description of Artificial Sequence: Synthetic oligonucleotide
  Sense strand starting at position 671 of SEQ ID NO: 1242800
uuugucacgucacuugaga

SEQ ID NO: 1373785 - RNA, 19 nt, Artificial Sequence
  Description of Artificial Sequence: Synthetic oligonucleotide
  Antisense strand to SEQ ID NO: 1373784
ucucaagugacgugacaaa

SEQ ID NO: 1373786 - RNA, 19 nt, Artificial Sequence
  Description of Artificial Sequence: Synthetic oligonucleotide
  Sense strand starting at position 719 of SEQ ID NO: 1242800
ugagaucucugagcgcaca

SEQ ID NO: 1373787 - RNA, 19 nt, Artificial Sequence
  Description of Artificial Sequence: Synthetic oligonucleotide
  Antisense strand to SEQ ID NO: 1373786
ugugcgcucagagaucuca

SEQ ID NO: 1373788 - RNA, 19 nt, Artificial Sequence
  Description of Artificial Sequence: Synthetic oligonucleotide
  Sense strand starting at position 720 of SEQ ID NO: 1242800
gagaucucugagcgcacaa

SEQ ID NO: 1373789 - RNA, 19 nt, Artificial Sequence
  Description of Artificial Sequence: Synthetic oligonucleotide
  Antisense strand to SEQ ID NO: 1373788
uugugcgcucagagaucuc

SEQ ID NO: 1373790 - RNA, 19 nt, Artificial Sequence
  Description of Artificial Sequence: Synthetic oligonucleotide
  Sense strand starting at position 2479 of SEQ ID NO: 1242800
aucucuccgcccuagaaga

SEQ ID NO: 1373791 - RNA, 19 nt, Artificial Sequence
  Description of Artificial Sequence: Synthetic oligonucleotide
  Antisense strand to SEQ ID NO: 1373790
ucuucuagggcggagagau

SEQ ID NO: 1373792 - RNA, 19 nt, Artificial Sequence
  Description of Artificial Sequence: Synthetic oligonucleotide
  Sense strand starting at position 2645 of SEQ ID NO: 1242800
uauuuagcgcuguguaauu

SEQ ID NO: 1373793 - RNA, 19 nt, Artificial Sequence
  Description of Artificial Sequence: Synthetic oligonucleotide
  Antisense strand to SEQ ID NO: 1373792
aauuacacagcgcuaaaua

SEQ ID NO: 1373794 - RNA, 19 nt, Artificial Sequence
  Description of Artificial Sequence: Synthetic oligonucleotide
  Sense strand starting at position 2654 of SEQ ID NO: 1242800
cuguguaauucuguggaaa

SEQ ID NO: 1373795 - RNA, 19 nt, Artificial Sequence
  Description of Artificial Sequence: Synthetic oligonucleotide
  Antisense strand to SEQ ID NO: 1373794
uuuccacagaauuacacag

SEQ ID NO: 1373796 - RNA, 19 nt, Artificial Sequence
  Description of Artificial Sequence: Synthetic oligonucleotide
  Sense strand starting at position 2655 of SEQ ID NO: 1242800
uguguaauucuguggaaac

SEQ ID NO: 1373797 - RNA, 19 nt, Artificial Sequence
  Description of Artificial Sequence: Synthetic oligonucleotide
  Antisense strand to SEQ ID NO: 1373796
guuuccacagaauuacaca

SEQ ID NO: 1373798 - RNA, 19 nt, Artificial Sequence
  Description of Artificial Sequence: Synthetic oligonucleotide
  Sense strand starting at position 2657 of SEQ ID NO: 1242800
uguaauucuguggaaacgu

SEQ ID NO: 1373799 - RNA, 19 nt, Artificial Sequence
  Description of Artificial Sequence: Synthetic oligonucleotide
  Antisense strand to SEQ ID NO: 1373798
acguuuccacagaauuaca

SEQ ID NO: 1373800 - RNA, 19 nt, Artificial Sequence
  Description of Artificial Sequence: Synthetic oligonucleotide
  Sense strand starting at position 2665 of SEQ ID NO: 1242800
uguggaaacgugcauuucu

SEQ ID NO: 1373801 - RNA, 19 nt, Artificial Sequence
  Description of Artificial Sequence: Synthetic oligonucleotide
  Antisense strand to SEQ ID NO: 1373800
agaaaugcacguuuccaca

SEQ ID NO: 1373802 - RNA, 19 nt, Artificial Sequence
  Description of Artificial Sequence: Synthetic oligonucleotide
  Sense strand starting at position 2678 of SEQ ID NO: 1242800
auuucuugucuuugcggga

SEQ ID NO: 1373803 - RNA, 19 nt, Artificial Sequence
  Description of Artificial Sequence: Synthetic oligonucleotide
  Antisense strand to SEQ ID NO: 1373802
ucccgcaaagacaagaaau

SEQ ID NO: 1373804 - RNA, 19 nt, Artificial Sequence
  Description of Artificial Sequence: Synthetic oligonucleotide
  Sense strand starting at position 2771 of SEQ ID NO: 1242800
cagucaaguugaccaagaa

SEQ ID NO: 1373805 - RNA, 19 nt, Artificial Sequence
  Description of Artificial Sequence: Synthetic oligonucleotide
  Antisense strand to SEQ ID NO: 1373804
uucuuggucaacuugacug

SEQ ID NO: 1373806 - RNA, 19 nt, Artificial Sequence
  Description of Artificial Sequence: Synthetic oligonucleotide
  Sense strand starting at position 2829 of SEQ ID NO: 1242800
uugguacuuacagggaaua

SEQ ID NO: 1373807 - RNA, 19 nt, Artificial Sequence
  Description of Artificial Sequence: Synthetic oligonucleotide
  Antisense strand to SEQ ID NO: 1373806
uauucccuguaaguaccaa

SEQ ID NO: 1373808 - RNA, 19 nt, Artificial Sequence
  Description of Artificial Sequence: Synthetic oligonucleotide
  Sense strand starting at position 2830 of SEQ ID NO: 1242800
ugguacuuacagggaauau

SEQ ID NO: 1373809 - RNA, 19 nt, Artificial Sequence
  Description of Artificial Sequence: Synthetic oligonucleotide
  Antisense strand to SEQ ID NO: 1373808
auauucccuguaaguacca

SEQ ID NO: 1373810 - RNA, 19 nt, Artificial Sequence
  Description of Artificial Sequence: Synthetic oligonucleotide
  Sense strand starting at position 2994 of SEQ ID NO: 1242800
gaugucaaaucuccagagu

SEQ ID NO: 1373811 - RNA, 19 nt, Artificial Sequence
  Description of Artificial Sequence: Synthetic oligonucleotide
  Antisense strand to SEQ ID NO: 1373810
acucuggagauuugacauc

SEQ ID NO: 1373812 - RNA, 19 nt, Artificial Sequence
  Description of Artificial Sequence: Synthetic oligonucleotide
  Sense strand starting at position 2995 of SEQ ID NO: 1242800
augucaaaucuccagaguu

SEQ ID NO: 1373813 - RNA, 19 nt, Artificial Sequence
  Description of Artificial Sequence: Synthetic oligonucleotide
  Antisense strand to SEQ ID NO: 1373812
aacucuggagauuugacau

SEQ ID NO: 1373814 - RNA, 19 nt, Artificial Sequence
  Description of Artificial Sequence: Synthetic oligonucleotide
  Sense strand starting at position 3123 of SEQ ID NO: 1242800
agagaaauuccauggccaa

SEQ ID NO: 1373815 - RNA, 19 nt, Artificial Sequence
  Description of Artificial Sequence: Synthetic oligonucleotide
  Antisense strand to SEQ ID NO: 1373814
uuggccauggaauuucucu

SEQ ID NO: 1373816 - RNA, 19 nt, Artificial Sequence
  Description of Artificial Sequence: Synthetic oligonucleotide
  Sense strand starting at position 3228 of SEQ ID NO: 1242800
uguggaaucccugggcaga

SEQ ID NO: 1373817 - RNA, 19 nt, Artificial Sequence
  Description of Artificial Sequence: Synthetic oligonucleotide
  Antisense strand to SEQ ID NO: 1373816
ucugcccagggauuccaca

SEQ ID NO: 1373818 - RNA, 19 nt, Artificial Sequence
  Description of Artificial Sequence: Synthetic oligonucleotide
  Sense strand starting at position 3279 of SEQ ID NO: 1242800
gugugauaaacuugggcca

SEQ ID NO: 1373819 - RNA, 19 nt, Artificial Sequence
  Description of Artificial Sequence: Synthetic oligonucleotide
  Antisense strand to SEQ ID NO: 1373818
uggcccaaguuuaucacac

SEQ ID NO: 1373820 - RNA, 19 nt, Artificial Sequence
  Description of Artificial Sequence: Synthetic oligonucleotide
  Sense strand starting at position 3292 of SEQ ID NO: 1242800
gggccagagauguggcuau

SEQ ID NO: 1373821 - RNA, 19 nt, Artificial Sequence
  Description of Artificial Sequence: Synthetic oligonucleotide
  Antisense strand to SEQ ID NO: 1373820
auagccacaucucuggccc

SEQ ID NO: 1373822 - RNA, 19 nt, Artificial Sequence
  Description of Artificial Sequence: Synthetic oligonucleotide
  Sense strand starting at position 3296 of SEQ ID NO: 1242800
cagagauguggcuauugga

SEQ ID NO: 1373823 - RNA, 19 nt, Artificial Sequence
  Description of Artificial Sequence: Synthetic oligonucleotide
  Antisense strand to SEQ ID NO: 1373822
uccaauagccacaucucug

SEQ ID NO: 1373824 - RNA, 19 nt, Artificial Sequence
  Description of Artificial Sequence: Synthetic oligonucleotide
  Sense strand starting at position 3324 of SEQ ID NO: 1242800
cuugcaagucacuggagaa

SEQ ID NO: 1373825 - RNA, 19 nt, Artificial Sequence
  Description of Artificial Sequence: Synthetic oligonucleotide
  Antisense strand to SEQ ID NO: 1373824
uucuccagugacuugcaag

SEQ ID NO: 1373826 - RNA, 19 nt, Artificial Sequence
  Description of Artificial Sequence: Synthetic oligonucleotide
  Sense strand starting at position 3407 of SEQ ID NO: 1242800
guuaaacagucaccaggaa

SEQ ID NO: 1373827 - RNA, 19 nt, Artificial Sequence
  Description of Artificial Sequence: Synthetic oligonucleotide
  Antisense strand to SEQ ID NO: 1373826
uuccuggugacuguuuaac

SEQ ID NO: 1373828 - RNA, 19 nt, Artificial Sequence
  Description of Artificial Sequence: Synthetic oligonucleotide
  Sense strand starting at position 3451 of SEQ ID NO: 1242800
uaugcaauuugagagaggu

SEQ ID NO: 1373829 - RNA, 19 nt, Artificial Sequence
  Description of Artificial Sequence: Synthetic oligonucleotide
  Antisense strand to SEQ ID NO: 1373828
accucucucaaauugcaua

SEQ ID NO: 1373830 - RNA, 19 nt, Artificial Sequence
  Description of Artificial Sequence: Synthetic oligonucleotide
  Sense strand starting at position 3873 of SEQ ID NO: 1242800
gugccauugggagggauau

SEQ ID NO: 1373831 - RNA, 19 nt, Artificial Sequence
  Description of Artificial Sequence: Synthetic oligonucleotide
  Antisense strand to SEQ ID NO: 1373830
auaucccucccaauggcac

SEQ ID NO: 1373832 - RNA, 19 nt, Artificial Sequence
  Description of Artificial Sequence: Synthetic oligonucleotide
  Sense strand starting at position 3925 of SEQ ID NO: 1242800
ggaggcuugcuugaccuau

SEQ ID NO: 1373833 - RNA, 19 nt, Artificial Sequence
  Description of Artificial Sequence: Synthetic oligonucleotide
  Antisense strand to SEQ ID NO: 1373832
auaggucaagcaagccucc

SEQ ID NO: 1373834 - RNA, 19 nt, Artificial Sequence
  Description of Artificial Sequence: Synthetic oligonucleotide
  Sense strand starting at position 3927 of SEQ ID NO: 1242800
aggcuugcuugaccuauau

SEQ ID NO: 1373835 - RNA, 19 nt, Artificial Sequence
  Description of Artificial Sequence: Synthetic oligonucleotide
  Antisense strand to SEQ ID NO: 1373834
auauaggucaagcaagccu

SEQ ID NO: 1373836 - RNA, 19 nt, Artificial Sequence
  Description of Artificial Sequence: Synthetic oligonucleotide
  Sense strand starting at position 3931 of SEQ ID NO: 1242800
uugcuugaccuauauagga

SEQ ID NO: 1373837 - RNA, 19 nt, Artificial Sequence
  Description of Artificial Sequence: Synthetic oligonucleotide
  Antisense strand to SEQ ID NO: 1373836
uccuauauaggucaagcaa

SEQ ID NO: 1373838 - RNA, 19 nt, Artificial Sequence
  Description of Artificial Sequence: Synthetic oligonucleotide
  Sense strand starting at position 3933 of SEQ ID NO: 1242800
gcuugaccuauauaggagu

SEQ ID NO: 1373839 - RNA, 19 nt, Artificial Sequence
  Description of Artificial Sequence: Synthetic oligonucleotide
  Antisense strand to SEQ ID NO: 1373838
acuccuauauaggucaagc

SEQ ID NO: 1373840 - RNA, 19 nt, Artificial Sequence
  Description of Artificial Sequence: Synthetic oligonucleotide
  Sense strand starting at position 3939 of SEQ ID NO: 1242800
ccuauauaggagugaaauc

SEQ ID NO: 1373841 - RNA, 19 nt, Artificial Sequence
  Description of Artificial Sequence: Synthetic oligonucleotide
  Antisense strand to SEQ ID NO: 1373840
gauuucacuccuauauagg

SEQ ID NO: 1373842 - RNA, 19 nt, Artificial Sequence
  Description of Artificial Sequence: Synthetic oligonucleotide
  Sense strand starting at position 156 of SEQ ID NO: 1242801
ggcauugggcucagugguu

SEQ ID NO: 1373843 - RNA, 19 nt, Artificial Sequence
  Description of Artificial Sequence: Synthetic oligonucleotide
  Antisense strand to SEQ ID NO: 1373842
aaccacugagcccaaugcc

SEQ ID NO: 1373844 - RNA, 19 nt, Artificial Sequence
  Description of Artificial Sequence: Synthetic oligonucleotide
  Sense strand starting at position 235 of SEQ ID NO: 1242801
ucgggaccaucuggugaaa

SEQ ID NO: 1373845 - RNA, 19 nt, Artificial Sequence
  Description of Artificial Sequence: Synthetic oligonucleotide
  Antisense strand to SEQ ID NO: 1373844
uuucaccagauggucccga

SEQ ID NO: 1373846 - RNA, 19 nt, Artificial Sequence
  Description of Artificial Sequence: Synthetic oligonucleotide
  Sense strand starting at position 956 of SEQ ID NO: 1242801
ugcauagaaucuuauggga

SEQ ID NO: 1373847 - RNA, 19 nt, Artificial Sequence
  Description of Artificial Sequence: Synthetic oligonucleotide
  Antisense strand to SEQ ID NO: 1373846
ucccauaagauucuaugca

SEQ ID NO: 1373848 - RNA, 19 nt, Artificial Sequence
  Description of Artificial Sequence: Synthetic oligonucleotide
  Sense strand starting at position 1003 of SEQ ID NO: 1242801
gaccaaauguuguuaugca

SEQ ID NO: 1373849 - RNA, 19 nt, Artificial Sequence
  Description of Artificial Sequence: Synthetic oligonucleotide
  Antisense strand to SEQ ID NO: 1373848
ugcauaacaacauuugguc

SEQ ID NO: 1373850 - RNA, 19 nt, Artificial Sequence
  Description of Artificial Sequence: Synthetic oligonucleotide
  Sense strand starting at position 1044 of SEQ ID NO: 1242801
cagugaagccuccagaauc

SEQ ID NO: 1373851 - RNA, 19 nt, Artificial Sequence
  Description of Artificial Sequence: Synthetic oligonucleotide
  Antisense strand to SEQ ID NO: 1373850
gauucuggaggcuucacug

SEQ ID NO: 1373852 - RNA, 19 nt, Artificial Sequence
  Description of Artificial Sequence: Synthetic oligonucleotide
  Sense strand starting at position 1100 of SEQ ID NO: 1242801
aggccauuugcaugaguuc

SEQ ID NO: 1373853 - RNA, 19 nt, Artificial Sequence
  Description of Artificial Sequence: Synthetic oligonucleotide
  Antisense strand to SEQ ID NO: 1373852
gaacucaugcaaauggccu

SEQ ID NO: 1373854 - RNA, 19 nt, Artificial Sequence
  Description of Artificial Sequence: Synthetic oligonucleotide
  Sense strand starting at position 1107 of SEQ ID NO: 1242801
uugcaugaguuccagggua

SEQ ID NO: 1373855 - RNA, 19 nt, Artificial Sequence
  Description of Artificial Sequence: Synthetic oligonucleotide
  Antisense strand to SEQ ID NO: 1373854
uacccuggaacucaugcaa

SEQ ID NO: 1373856 - RNA, 19 nt, Artificial Sequence
  Description of Artificial Sequence: Synthetic oligonucleotide
  Sense strand starting at position 1164 of SEQ ID NO: 1242801
cugagagcccuuugaagac

SEQ ID NO: 1373857 - RNA, 19 nt, Artificial Sequence
  Description of Artificial Sequence: Synthetic oligonucleotide
  Antisense strand to SEQ ID NO: 1373856
gucuucaaagggcucucag

SEQ ID NO: 1373858 - RNA, 19 nt, Artificial Sequence
  Description of Artificial Sequence: Synthetic oligonucleotide
  Sense strand starting at position 1346 of SEQ ID NO: 1242801
cuggcuagucagcgaauca

SEQ ID NO: 1373859 - RNA, 19 nt, Artificial Sequence
  Description of Artificial Sequence: Synthetic oligonucleotide
  Antisense strand to SEQ ID NO: 1373858
ugauucgcugacuagccag

SEQ ID NO: 1373860 - RNA, 19 nt, Artificial Sequence
  Description of Artificial Sequence: Synthetic oligonucleotide
  Sense strand starting at position 1347 of SEQ ID NO: 1242801
uggcuagucagcgaaucaa

SEQ ID NO: 1373861 - RNA, 19 nt, Artificial Sequence
  Description of Artificial Sequence: Synthetic oligonucleotide
  Antisense strand to SEQ ID NO: 1373860
uugauucgcugacuagcca

SEQ ID NO: 1373862 - RNA, 19 nt, Artificial Sequence
  Description of Artificial Sequence: Synthetic oligonucleotide
  Sense strand starting at position 1489 of SEQ ID NO: 1242801
gaaguuucccagcaccagu

SEQ ID NO: 1373863 - RNA, 19 nt, Artificial Sequence
  Description of Artificial Sequence: Synthetic oligonucleotide
  Antisense strand to SEQ ID NO: 1373862
acuggugcugggaaacuuc

SEQ ID NO: 1373864 - RNA, 19 nt, Artificial Sequence
  Description of Artificial Sequence: Synthetic oligonucleotide
  Sense strand starting at position 1612 of SEQ ID NO: 1242801
cucugauucuuucccgaga

SEQ ID NO: 1373865 - RNA, 19 nt, Artificial Sequence
  Description of Artificial Sequence: Synthetic oligonucleotide
  Antisense strand to SEQ ID NO: 1373864
ucucgggaaagaaucagag

SEQ ID NO: 1373866 - RNA, 19 nt, Artificial Sequence
  Description of Artificial Sequence: Synthetic oligonucleotide
  Sense strand starting at position 1613 of SEQ ID NO: 1242801
ucugauucuuucccgagac

SEQ ID NO: 1373867 - RNA, 19 nt, Artificial Sequence
  Description of Artificial Sequence: Synthetic oligonucleotide
  Antisense strand to SEQ ID NO: 1373866
gucucgggaaagaaucaga

SEQ ID NO: 1373868 - RNA, 19 nt, Artificial Sequence
  Description of Artificial Sequence: Synthetic oligonucleotide
  Sense strand starting at position 1614 of SEQ ID NO: 1242801
cugauucuuucccgagacu

SEQ ID NO: 1373869 - RNA, 19 nt, Artificial Sequence
  Description of Artificial Sequence: Synthetic oligonucleotide
  Antisense strand to SEQ ID NO: 1373868
agucucgggaaagaaucag

SEQ ID NO: 1373870 - RNA, 19 nt, Artificial Sequence
  Description of Artificial Sequence: Synthetic oligonucleotide
  Sense strand starting at position 1615 of SEQ ID NO: 1242801
ugauucuuucccgagacuc

SEQ ID NO: 1373871 - RNA, 19 nt, Artificial Sequence
  Description of Artificial Sequence: Synthetic oligonucleotide
  Antisense strand to SEQ ID NO: 1373870
gagucucgggaaagaauca

SEQ ID NO: 1373872 - RNA, 19 nt, Artificial Sequence
  Description of Artificial Sequence: Synthetic oligonucleotide
  Sense strand starting at position 1687 of SEQ ID NO: 1242801
acucgaaccggugaucuaa

SEQ ID NO: 1373873 - RNA, 19 nt, Artificial Sequence
  Description of Artificial Sequence: Synthetic oligonucleotide
  Antisense strand to SEQ ID NO: 1373872
uuagaucaccgguucgagu

SEQ ID NO: 1373874 - RNA, 19 nt, Artificial Sequence
  Description of Artificial Sequence: Synthetic oligonucleotide
  Sense strand starting at position 1785 of SEQ ID NO: 1242801
gcucacucguuaccugaca

SEQ ID NO: 1373875 - RNA, 19 nt, Artificial Sequence
  Description of Artificial Sequence: Synthetic oligonucleotide
  Antisense strand to SEQ ID NO: 1373874
ugucagguaacgagugagc

SEQ ID NO: 1373876 - RNA, 19 nt, Artificial Sequence
  Description of Artificial Sequence: Synthetic oligonucleotide
  Sense strand starting at position 2278 of SEQ ID NO: 1242801
ggcugcuuuggguguaaag

SEQ ID NO: 1373877 - RNA, 19 nt, Artificial Sequence
  Description of Artificial Sequence: Synthetic oligonucleotide
  Antisense strand to SEQ ID NO: 1373876
cuuuacacccaaagcagcc

SEQ ID NO: 1373878 - RNA, 19 nt, Artificial Sequence
  Description of Artificial Sequence: Synthetic oligonucleotide
  Sense strand starting at position 2280 of SEQ ID NO: 1242801
cugcuuuggguguaaagcu

SEQ ID NO: 1373879 - RNA, 19 nt, Artificial Sequence
  Description of Artificial Sequence: Synthetic oligonucleotide
  Antisense strand to SEQ ID NO: 1373878
agcuuuacacccaaagcag

SEQ ID NO: 1373880 - RNA, 19 nt, Artificial Sequence
  Description of Artificial Sequence: Synthetic oligonucleotide
  Sense strand starting at position 2289 of SEQ ID NO: 1242801
guguaaagcugaggagaca

SEQ ID NO: 1373881 - RNA, 19 nt, Artificial Sequence
  Description of Artificial Sequence: Synthetic oligonucleotide
  Antisense strand to SEQ ID NO: 1373880
ugucuccucagcuuuacac

SEQ ID NO: 1373882 - RNA, 19 nt, Artificial Sequence
  Description of Artificial Sequence: Synthetic oligonucleotide
  Sense strand starting at position 2410 of SEQ ID NO: 1242801
gggcauguuuguccagaca

SEQ ID NO: 1373883 - RNA, 19 nt, Artificial Sequence
  Description of Artificial Sequence: Synthetic oligonucleotide
  Antisense strand to SEQ ID NO: 1373882
ugucuggacaaacaugccc

SEQ ID NO: 1373884 - RNA, 19 nt, Artificial Sequence
  Description of Artificial Sequence: Synthetic oligonucleotide
  Sense strand starting at position 2606 of SEQ ID NO: 1242801
ccauuaaccugguguagac

SEQ ID NO: 1373885 - RNA, 19 nt, Artificial Sequence
  Description of Artificial Sequence: Synthetic oligonucleotide
  Antisense strand to SEQ ID NO: 1373884
gucuacaccagguuaaugg

SEQ ID NO: 1373886 - RNA, 19 nt, Artificial Sequence
  Description of Artificial Sequence: Synthetic oligonucleotide
  Sense strand starting at position 2817 of SEQ ID NO: 1242801
gcgugugugcgaguggauu

SEQ ID NO: 1373887 - RNA, 19 nt, Artificial Sequence
  Description of Artificial Sequence: Synthetic oligonucleotide
  Antisense strand to SEQ ID NO: 1373886
aauccacucgcacacacgc

SEQ ID NO: 1373888 - RNA, 19 nt, Artificial Sequence
  Description of Artificial Sequence: Synthetic oligonucleotide
  Sense strand starting at position 2818 of SEQ ID NO: 1242801
cgugugugcgaguggauuu

SEQ ID NO: 1373889 - RNA, 19 nt, Artificial Sequence
  Description of Artificial Sequence: Synthetic oligonucleotide
  Antisense strand to SEQ ID NO: 1373888
aaauccacucgcacacacg

SEQ ID NO: 1373890 - RNA, 19 nt, Artificial Sequence
  Description of Artificial Sequence: Synthetic oligonucleotide
  Sense strand starting at position 2828 of SEQ ID NO: 1242801
aguggauuugugugcgugu

SEQ ID NO: 1373891 - RNA, 19 nt, Artificial Sequence
  Description of Artificial Sequence: Synthetic oligonucleotide
  Antisense strand to SEQ ID NO: 1373890
acacgcacacaaauccacu

SEQ ID NO: 1373892 - RNA, 19 nt, Artificial Sequence
  Description of Artificial Sequence: Synthetic oligonucleotide
  Sense strand starting at position 2830 of SEQ ID NO: 1242801
uggauuugugugcguguga

SEQ ID NO: 1373893 - RNA, 19 nt, Artificial Sequence
  Description of Artificial Sequence: Synthetic oligonucleotide
  Antisense strand to SEQ ID NO: 1373892
ucacacgcacacaaaucca

SEQ ID NO: 1373894 - RNA, 19 nt, Artificial Sequence
  Description of Artificial Sequence: Synthetic oligonucleotide
  Sense strand starting at position 2831 of SEQ ID NO: 1242801
ggauuugugugcgugugag

SEQ ID NO: 1373895 - RNA, 19 nt, Artificial Sequence
  Description of Artificial Sequence: Synthetic oligonucleotide
  Antisense strand to SEQ ID NO: 1373894
cucacacgcacacaaaucc

SEQ ID NO: 1373896 - RNA, 19 nt, Artificial Sequence
  Description of Artificial Sequence: Synthetic oligonucleotide
  Sense strand starting at position 2893 of SEQ ID NO: 1242801
gcguguguucgugugagug

SEQ ID NO: 1373897 - RNA, 19 nt, Artificial Sequence
  Description of Artificial Sequence: Synthetic oligonucleotide
  Antisense strand to SEQ ID NO: 1373896
cacucacacgaacacacgc

SEQ ID NO: 1373898 - RNA, 19 nt, Artificial Sequence
  Description of Artificial Sequence: Synthetic oligonucleotide
  Sense strand starting at position 2915 of SEQ ID NO: 1242801
guguguauugccgugagca

SEQ ID NO: 1373899 - RNA, 19 nt, Artificial Sequence
  Description of Artificial Sequence: Synthetic oligonucleotide
  Antisense strand to SEQ ID NO: 1373898
ugcucacggcaauacacac

SEQ ID NO: 1373900 - RNA, 19 nt, Artificial Sequence
  Description of Artificial Sequence: Synthetic oligonucleotide
  Sense strand starting at position 2916 of SEQ ID NO: 1242801
uguguauugccgugagcaa

SEQ ID NO: 1373901 - RNA, 19 nt, Artificial Sequence
  Description of Artificial Sequence: Synthetic oligonucleotide
  Antisense strand to SEQ ID NO: 1373900
uugcucacggcaauacaca

SEQ ID NO: 1373902 - RNA, 19 nt, Artificial Sequence
  Description of Artificial Sequence: Synthetic oligonucleotide
  Sense strand starting at position 2917 of SEQ ID NO: 1242801
guguauugccgugagcaau

SEQ ID NO: 1373903 - RNA, 19 nt, Artificial Sequence
  Description of Artificial Sequence: Synthetic oligonucleotide
  Antisense strand to SEQ ID NO: 1373902
auugcucacggcaauacac

SEQ ID NO: 1373904 - RNA, 19 nt, Artificial Sequence
  Description of Artificial Sequence: Synthetic oligonucleotide
  Sense strand starting at position 2927 of SEQ ID NO: 1242801
gugagcaauugcuggaaua

SEQ ID NO: 1373905 - RNA, 19 nt, Artificial Sequence
  Description of Artificial Sequence: Synthetic oligonucleotide
  Antisense strand to SEQ ID NO: 1373904
uauuccagcaauugcucac

SEQ ID NO: 1373906 - RNA, 19 nt, Artificial Sequence
  Description of Artificial Sequence: Synthetic oligonucleotide
  Sense strand starting at position 2928 of SEQ ID NO: 1242801
ugagcaauugcuggaauaa

SEQ ID NO: 1373907 - RNA, 19 nt, Artificial Sequence
  Description of Artificial Sequence: Synthetic oligonucleotide
  Antisense strand to SEQ ID NO: 1373906
uuauuccagcaauugcuca

SEQ ID NO: 1373908 - RNA, 19 nt, Artificial Sequence
  Description of Artificial Sequence: Synthetic oligonucleotide
  Sense strand starting at position 3013 of SEQ ID NO: 1242801
acaaucacauguguauuaa

SEQ ID NO: 1373909 - RNA, 19 nt, Artificial Sequence
  Description of Artificial Sequence: Synthetic oligonucleotide
  Antisense strand to SEQ ID NO: 1373908
uuaauacacaugugauugu

SEQ ID NO: 1373910 - RNA, 19 nt, Artificial Sequence
  Description of Artificial Sequence: Synthetic oligonucleotide
  Sense strand starting at position 3093 of SEQ ID NO: 1242801
uuaacuaacuccuguguua

SEQ ID NO: 1373911 - RNA, 19 nt, Artificial Sequence
  Description of Artificial Sequence: Synthetic oligonucleotide
  Antisense strand to SEQ ID NO: 1373910
uaacacaggaguuaguuaa

SEQ ID NO: 1373912 - RNA, 19 nt, Artificial Sequence
  Description of Artificial Sequence: Synthetic oligonucleotide
  Sense strand starting at position 3104 of SEQ ID NO: 1242801
cuguguuauagaugcggaa

SEQ ID NO: 1373913 - RNA, 19 nt, Artificial Sequence
  Description of Artificial Sequence: Synthetic oligonucleotide
  Antisense strand to SEQ ID NO: 1373912
uuccgcaucuauaacacag

SEQ ID NO: 1373914 - RNA, 19 nt, Artificial Sequence
  Description of Artificial Sequence: Synthetic oligonucleotide
  Sense strand starting at position 3106 of SEQ ID NO: 1242801
guguuauagaugcggaaua

SEQ ID NO: 1373915 - RNA, 19 nt, Artificial Sequence
  Description of Artificial Sequence: Synthetic oligonucleotide
  Antisense strand to SEQ ID NO: 1373914
uauuccgcaucuauaacac

SEQ ID NO: 1373916 - RNA, 19 nt, Artificial Sequence
  Description of Artificial Sequence: Synthetic oligonucleotide
  Sense strand starting at position 3108 of SEQ ID NO: 1242801
guuauagaugcggaauaga

SEQ ID NO: 1373917 - RNA, 19 nt, Artificial Sequence
  Description of Artificial Sequence: Synthetic oligonucleotide
  Antisense strand to SEQ ID NO: 1373916
ucuauuccgcaucuauaac

SEQ ID NO: 1373918 - RNA, 19 nt, Artificial Sequence
  Description of Artificial Sequence: Synthetic oligonucleotide
  Sense strand starting at position 3333 of SEQ ID NO: 1242801
auggucuuaucugcugaca

SEQ ID NO: 1373919 - RNA, 19 nt, Artificial Sequence
  Description of Artificial Sequence: Synthetic oligonucleotide
  Antisense strand to SEQ ID NO: 1373918
ugucagcagauaagaccau

SEQ ID NO: 1373920 - RNA, 19 nt, Artificial Sequence
  Description of Artificial Sequence: Synthetic oligonucleotide
  Sense strand starting at position 3335 of SEQ ID NO: 1242801
ggucuuaucugcugacaag

SEQ ID NO: 1373921 - RNA, 19 nt, Artificial Sequence
  Description of Artificial Sequence: Synthetic oligonucleotide
  Antisense strand to SEQ ID NO: 1373920
cuugucagcagauaagacc

SEQ ID NO: 1373922 - RNA, 19 nt, Artificial Sequence
  Description of Artificial Sequence: Synthetic oligonucleotide
  Sense strand starting at position 234 of SEQ ID NO: 1242802
agaacuagaugguggcaua

SEQ ID NO: 1373923 - RNA, 19 nt, Artificial Sequence
  Description of Artificial Sequence: Synthetic oligonucleotide
  Antisense strand to SEQ ID NO: 1373922
uaugccaccaucuaguucu

SEQ ID NO: 1373924 - RNA, 19 nt, Artificial Sequence
  Description of Artificial Sequence: Synthetic oligonucleotide
  Sense strand starting at position 245 of SEQ ID NO: 1242802
guggcauacucacacaaca

SEQ ID NO: 1373925 - RNA, 19 nt, Artificial Sequence
  Description of Artificial Sequence: Synthetic oligonucleotide
  Antisense strand to SEQ ID NO: 1373924
uguugugugaguaugccac

SEQ ID NO: 1373926 - RNA, 19 nt, Artificial Sequence
  Description of Artificial Sequence: Synthetic oligonucleotide
  Sense strand starting at position 283 of SEQ ID NO: 1242802
gcaggugaaugagcugaaa

SEQ ID NO: 1373927 - RNA, 19 nt, Artificial Sequence
  Description of Artificial Sequence: Synthetic oligonucleotide
  Antisense strand to SEQ ID NO: 1373926
uuucagcucauucaccugc

SEQ ID NO: 1373928 - RNA, 19 nt, Artificial Sequence
  Description of Artificial Sequence: Synthetic oligonucleotide
  Sense strand starting at position 285 of SEQ ID NO: 1242802
aggugaaugagcugaaacu

SEQ ID NO: 1373929 - RNA, 19 nt, Artificial Sequence
  Description of Artificial Sequence: Synthetic oligonucleotide
  Antisense strand to SEQ ID NO: 1373928
aguuucagcucauucaccu

SEQ ID NO: 1373930 - RNA, 19 nt, Artificial Sequence
  Description of Artificial Sequence: Synthetic oligonucleotide
  Sense strand starting at position 345 of SEQ ID NO: 1242802
aaagcacauuguuguagaa

SEQ ID NO: 1373931 - RNA, 19 nt, Artificial Sequence
  Description of Artificial Sequence: Synthetic oligonucleotide
  Antisense strand to SEQ ID NO: 1373930
uucuacaacaaugugcuuu

SEQ ID NO: 1373932 - RNA, 19 nt, Artificial Sequence
  Description of Artificial Sequence: Synthetic oligonucleotide
  Sense strand starting at position 347 of SEQ ID NO: 1242802
agcacauuguuguagaaug

SEQ ID NO: 1373933 - RNA, 19 nt, Artificial Sequence
  Description of Artificial Sequence: Synthetic oligonucleotide
  Antisense strand to SEQ ID NO: 1373932
cauucuacaacaaugugcu

SEQ ID NO: 1373934 - RNA, 19 nt, Artificial Sequence
  Description of Artificial Sequence: Synthetic oligonucleotide
  Sense strand starting at position 368 of SEQ ID NO: 1242802
gguagaauggaguauuagu

SEQ ID NO: 1373935 - RNA, 19 nt, Artificial Sequence
  Description of Artificial Sequence: Synthetic oligonucleotide
  Antisense strand to SEQ ID NO: 1373934
acuaauacuccauucuacc

SEQ ID NO: 1373936 - RNA, 19 nt, Artificial Sequence
  Description of Artificial Sequence: Synthetic oligonucleotide
  Sense strand starting at position 373 of SEQ ID NO: 1242802
aauggaguauuaguuacau

SEQ ID NO: 1373937 - RNA, 19 nt, Artificial Sequence
  Description of Artificial Sequence: Synthetic oligonucleotide
  Antisense strand to SEQ ID NO: 1373936
auguaacuaauacuccauu

SEQ ID NO: 1373938 - RNA, 19 nt, Artificial Sequence
  Description of Artificial Sequence: Synthetic oligonucleotide
  Sense strand starting at position 446 of SEQ ID NO: 1242802
agcagaucacucgagcaca

SEQ ID NO: 1373939 - RNA, 19 nt, Artificial Sequence
  Description of Artificial Sequence: Synthetic oligonucleotide
  Antisense strand to SEQ ID NO: 1373938
ugugcucgagugaucugcu

SEQ ID NO: 1373940 - RNA, 19 nt, Artificial Sequence
  Description of Artificial Sequence: Synthetic oligonucleotide
  Sense strand starting at position 1013 of SEQ ID NO: 1242802
agaauaccguuccauugau

SEQ ID NO: 1373941 - RNA, 19 nt, Artificial Sequence
  Description of Artificial Sequence: Synthetic oligonucleotide
  Antisense strand to SEQ ID NO: 1373940
aucaauggaacgguauucu

SEQ ID NO: 1373942 - RNA, 19 nt, Artificial Sequence
  Description of Artificial Sequence: Synthetic oligonucleotide
  Sense strand starting at position 1040 of SEQ ID NO: 1242802
uuugaaaccuuauguauag

SEQ ID NO: 1373943 - RNA, 19 nt, Artificial Sequence
  Description of Artificial Sequence: Synthetic oligonucleotide
  Antisense strand to SEQ ID NO: 1373942
cuauacauaagguuucaaa

SEQ ID NO: 1373944 - RNA, 19 nt, Artificial Sequence
  Description of Artificial Sequence: Synthetic oligonucleotide
  Sense strand starting at position 1041 of SEQ ID NO: 1242802
uugaaaccuuauguauaga

SEQ ID NO: 1373945 - RNA, 19 nt, Artificial Sequence
  Description of Artificial Sequence: Synthetic oligonucleotide
  Antisense strand to SEQ ID NO: 1373944
ucuauacauaagguuucaa

SEQ ID NO: 1373946 - RNA, 19 nt, Artificial Sequence
  Description of Artificial Sequence: Synthetic oligonucleotide
  Sense strand starting at position 1160 of SEQ ID NO: 1242802
agggaagccugaguacaau

SEQ ID NO: 1373947 - RNA, 19 nt, Artificial Sequence
  Description of Artificial Sequence: Synthetic oligonucleotide
  Antisense strand to SEQ ID NO: 1373946
auuguacucaggcuucccu

SEQ ID NO: 1373948 - RNA, 19 nt, Artificial Sequence
  Description of Artificial Sequence: Synthetic oligonucleotide
  Sense strand starting at position 1184 of SEQ ID NO: 1242802
uuagaaauaucugaagcaa

SEQ ID NO: 1373949 - RNA, 19 nt, Artificial Sequence
  Description of Artificial Sequence: Synthetic oligonucleotide
  Antisense strand to SEQ ID NO: 1373948
uugcuucagauauuucuaa

SEQ ID NO: 1373950 - RNA, 19 nt, Artificial Sequence
  Description of Artificial Sequence: Synthetic oligonucleotide
  Sense strand starting at position 1216 of SEQ ID NO: 1242802
uuugcugaauucugacagu

SEQ ID NO: 1373951 - RNA, 19 nt, Artificial Sequence
  Description of Artificial Sequence: Synthetic oligonucleotide
  Antisense strand to SEQ ID NO: 1373950
acugucagaauucagcaaa

SEQ ID NO: 1373952 - RNA, 19 nt, Artificial Sequence
  Description of Artificial Sequence: Synthetic oligonucleotide
  Sense strand starting at position 1219 of SEQ ID NO: 1242802
gcugaauucugacaguaga

SEQ ID NO: 1373953 - RNA, 19 nt, Artificial Sequence
  Description of Artificial Sequence: Synthetic oligonucleotide
  Antisense strand to SEQ ID NO: 1373952
ucuacugucagaauucagc

SEQ ID NO: 1373954 - RNA, 19 nt, Artificial Sequence
  Description of Artificial Sequence: Synthetic oligonucleotide
  Sense strand starting at position 1553 of SEQ ID NO: 1242802
cggcaauaggagugaaauu

SEQ ID NO: 1373955 - RNA, 19 nt, Artificial Sequence
  Description of Artificial Sequence: Synthetic oligonucleotide
  Antisense strand to SEQ ID NO: 1373954
aauuucacuccuauugccg

SEQ ID NO: 1373956 - RNA, 19 nt, Artificial Sequence
  Description of Artificial Sequence: Synthetic oligonucleotide
  Sense strand starting at position 2272 of SEQ ID NO: 1242802
aggcucuucuguucccaga

SEQ ID NO: 1373957 - RNA, 19 nt, Artificial Sequence
  Description of Artificial Sequence: Synthetic oligonucleotide
  Antisense strand to SEQ ID NO: 1373956
ucugggaacagaagagccu

SEQ ID NO: 1373958 - RNA, 19 nt, Artificial Sequence
  Description of Artificial Sequence: Synthetic oligonucleotide
  Sense strand starting at position 2382 of SEQ ID NO: 1242802
gguguuuccgccuaacacu

SEQ ID NO: 1373959 - RNA, 19 nt, Artificial Sequence
  Description of Artificial Sequence: Synthetic oligonucleotide
  Antisense strand to SEQ ID NO: 1373958
aguguuaggcggaaacacc

SEQ ID NO: 1373960 - RNA, 19 nt, Artificial Sequence
  Description of Artificial Sequence: Synthetic oligonucleotide
  Sense strand starting at position 2391 of SEQ ID NO: 1242802
gccuaacacuguccuagaa

SEQ ID NO: 1373961 - RNA, 19 nt, Artificial Sequence
  Description of Artificial Sequence: Synthetic oligonucleotide
  Antisense strand to SEQ ID NO: 1373960
uucuaggacaguguuaggc

SEQ ID NO: 1373962 - RNA, 19 nt, Artificial Sequence
  Description of Artificial Sequence: Synthetic oligonucleotide
  Sense strand starting at position 2432 of SEQ ID NO: 1242802
guggauucuccagaguguc

SEQ ID NO: 1373963 - RNA, 19 nt, Artificial Sequence
  Description of Artificial Sequence: Synthetic oligonucleotide
  Antisense strand to SEQ ID NO: 1373962
gacacucuggagaauccac

SEQ ID NO: 1373964 - RNA, 19 nt, Artificial Sequence
  Description of Artificial Sequence: Synthetic oligonucleotide
  Sense strand starting at position 2600 of SEQ ID NO: 1242802
ugcaaugacucaugauaua

SEQ ID NO: 1373965 - RNA, 19 nt, Artificial Sequence
  Description of Artificial Sequence: Synthetic oligonucleotide
  Antisense strand to SEQ ID NO: 1373964
uauaucaugagucauugca

SEQ ID NO: 1373966 - RNA, 19 nt, Artificial Sequence
  Description of Artificial Sequence: Synthetic oligonucleotide
  Sense strand starting at position 3359 of SEQ ID NO: 1242802
gucggugacugggcagaaa

SEQ ID NO: 1373967 - RNA, 19 nt, Artificial Sequence
  Description of Artificial Sequence: Synthetic oligonucleotide
  Antisense strand to SEQ ID NO: 1373966
uuucugcccagucaccgac

SEQ ID NO: 1373968 - RNA, 19 nt, Artificial Sequence
  Description of Artificial Sequence: Synthetic oligonucleotide
  Sense strand starting at position 3455 of SEQ ID NO: 1242802
gccugagacgcucaugaca

SEQ ID NO: 1373969 - RNA, 19 nt, Artificial Sequence
  Description of Artificial Sequence: Synthetic oligonucleotide
  Antisense strand to SEQ ID NO: 1373968
ugucaugagcgucucaggc

SEQ ID NO: 1373970 - RNA, 19 nt, Artificial Sequence
  Description of Artificial Sequence: Synthetic oligonucleotide
  Sense strand starting at position 3457 of SEQ ID NO: 1242802
cugagacgcucaugacaga

SEQ ID NO: 1373971 - RNA, 19 nt, Artificial Sequence
  Description of Artificial Sequence: Synthetic oligonucleotide
  Antisense strand to SEQ ID NO: 1373970
ucugucaugagcgucucag

SEQ ID NO: 1373972 - RNA, 19 nt, Artificial Sequence
  Description of Artificial Sequence: Synthetic oligonucleotide
  Sense strand starting at position 3485 of SEQ ID NO: 1242802
cacagaugagcauguaaua

SEQ ID NO: 1373973 - RNA, 19 nt, Artificial Sequence
  Description of Artificial Sequence: Synthetic oligonucleotide
  Antisense strand to SEQ ID NO: 1373972
uauuacaugcucaucugug

SEQ ID NO: 1373974 - RNA, 19 nt, Artificial Sequence
  Description of Artificial Sequence: Synthetic oligonucleotide
  Sense strand starting at position 3498 of SEQ ID NO: 1242802
guaauauagugaccacagu

SEQ ID NO: 1373975 - RNA, 19 nt, Artificial Sequence
  Description of Artificial Sequence: Synthetic oligonucleotide
  Antisense strand to SEQ ID NO: 1373974
acuguggucacuauauuac

SEQ ID NO: 1373976 - RNA, 19 nt, Artificial Sequence
  Description of Artificial Sequence: Synthetic oligonucleotide
  Sense strand starting at position 3548 of SEQ ID NO: 1242802
uacugcauuuccggacgau

SEQ ID NO: 1373977 - RNA, 19 nt, Artificial Sequence
  Description of Artificial Sequence: Synthetic oligonucleotide
  Antisense strand to SEQ ID NO: 1373976
aucguccggaaaugcagua

SEQ ID NO: 1373978 - RNA, 19 nt, Artificial Sequence
  Description of Artificial Sequence: Synthetic oligonucleotide
  Sense strand starting at position 3563 of SEQ ID NO: 1242802
cgaugaggguaugaaagua

SEQ ID NO: 1373979 - RNA, 19 nt, Artificial Sequence
  Description of Artificial Sequence: Synthetic oligonucleotide
  Antisense strand to SEQ ID NO: 1373978
uacuuucauacccucaucg

SEQ ID NO: 1373980 - RNA, 19 nt, Artificial Sequence
  Description of Artificial Sequence: Synthetic oligonucleotide
  Sense strand starting at position 3592 of SEQ ID NO: 1242802
gguggaugguguuuccaug

SEQ ID NO: 1373981 - RNA, 19 nt, Artificial Sequence
  Description of Artificial Sequence: Synthetic oligonucleotide
  Antisense strand to SEQ ID NO: 1373980
cauggaaacaccauccacc

SEQ ID NO: 1373982 - RNA, 19 nt, Artificial Sequence
  Description of Artificial Sequence: Synthetic oligonucleotide
  Sense strand starting at position 68 of SEQ ID NO: 1242803
aggagcguguuggaauuua

SEQ ID NO: 1373983 - RNA, 19 nt, Artificial Sequence
  Description of Artificial Sequence: Synthetic oligonucleotide
  Antisense strand to SEQ ID NO: 1373982
uaaauuccaacacgcuccu

SEQ ID NO: 1373984 - RNA, 19 nt, Artificial Sequence
  Description of Artificial Sequence: Synthetic oligonucleotide
  Sense strand starting at position 288 of SEQ ID NO: 1242803
gggugaugucauuguucac

SEQ ID NO: 1373985 - RNA, 19 nt, Artificial Sequence
  Description of Artificial Sequence: Synthetic oligonucleotide
  Antisense strand to SEQ ID NO: 1373984
gugaacaaugacaucaccc

SEQ ID NO: 1373986 - RNA, 19 nt, Artificial Sequence
  Description of Artificial Sequence: Synthetic oligonucleotide
  Sense strand starting at position 291 of SEQ ID NO: 1242803
ugaugucauuguucacggu

SEQ ID NO: 1373987 - RNA, 19 nt, Artificial Sequence
  Description of Artificial Sequence: Synthetic oligonucleotide
  Antisense strand to SEQ ID NO: 1373986
accgugaacaaugacauca

SEQ ID NO: 1373988 - RNA, 19 nt, Artificial Sequence
  Description of Artificial Sequence: Synthetic oligonucleotide
  Sense strand starting at position 295 of SEQ ID NO: 1242803
gucauuguucacggucaga

SEQ ID NO: 1373989 - RNA, 19 nt, Artificial Sequence
  Description of Artificial Sequence: Synthetic oligonucleotide
  Antisense strand to SEQ ID NO: 1373988
ucugaccgugaacaaugac

SEQ ID NO: 1373990 - RNA, 19 nt, Artificial Sequence
  Description of Artificial Sequence: Synthetic oligonucleotide
  Sense strand starting at position 298 of SEQ ID NO: 1242803
auuguucacggucagaaug

SEQ ID NO: 1373991 - RNA, 19 nt, Artificial Sequence
  Description of Artificial Sequence: Synthetic oligonucleotide
  Antisense strand to SEQ ID NO: 1373990
cauucugaccgugaacaau

SEQ ID NO: 1373992 - RNA, 19 nt, Artificial Sequence
  Description of Artificial Sequence: Synthetic oligonucleotide
  Sense strand starting at position 588 of SEQ ID NO: 1242803
ggauguucuccucgucaga

SEQ ID NO: 1373993 - RNA, 19 nt, Artificial Sequence
  Description of Artificial Sequence: Synthetic oligonucleotide
  Antisense strand to SEQ ID NO: 1373992
ucugacgaggagaacaucc

SEQ ID NO: 1373994 - RNA, 19 nt, Artificial Sequence
  Description of Artificial Sequence: Synthetic oligonucleotide
  Sense strand starting at position 599 of SEQ ID NO: 1242803
ucgucagagcccuggucaa

SEQ ID NO: 1373995 - RNA, 19 nt, Artificial Sequence
  Description of Artificial Sequence: Synthetic oligonucleotide
  Antisense strand to SEQ ID NO: 1373994
uugaccagggcucugacga

SEQ ID NO: 1373996 - RNA, 19 nt, Artificial Sequence
  Description of Artificial Sequence: Synthetic oligonucleotide
  Sense strand starting at position 654 of SEQ ID NO: 1242803
gagcguugugggugagaga

SEQ ID NO: 1373997 - RNA, 19 nt, Artificial Sequence
  Description of Artificial Sequence: Synthetic oligonucleotide
  Antisense strand to SEQ ID NO: 1373996
ucucucacccacaacgcuc

SEQ ID NO: 1373998 - RNA, 19 nt, Artificial Sequence
  Description of Artificial Sequence: Synthetic oligonucleotide
  Sense strand starting at position 655 of SEQ ID NO: 1242803
agcguugugggugagagaa

SEQ ID NO: 1373999 - RNA, 19 nt, Artificial Sequence
  Description of Artificial Sequence: Synthetic oligonucleotide
  Antisense strand to SEQ ID NO: 1373998
uucucucacccacaacgcu

SEQ ID NO: 1374000 - RNA, 19 nt, Artificial Sequence
  Description of Artificial Sequence: Synthetic oligonucleotide
  Sense strand starting at position 813 of SEQ ID NO: 1242803
uuuguccugugagcaagau

SEQ ID NO: 1374001 - RNA, 19 nt, Artificial Sequence
  Description of Artificial Sequence: Synthetic oligonucleotide
  Antisense strand to SEQ ID NO: 1374000
aucuugcucacaggacaaa

SEQ ID NO: 1374002 - RNA, 19 nt, Artificial Sequence
  Description of Artificial Sequence: Synthetic oligonucleotide
  Sense strand starting at position 1319 of SEQ ID NO: 1242803
cagacucuguggguuugaa

SEQ ID NO: 1374003 - RNA, 19 nt, Artificial Sequence
  Description of Artificial Sequence: Synthetic oligonucleotide
  Antisense strand to SEQ ID NO: 1374002
uucaaacccacagagucug

SEQ ID NO: 1374004 - RNA, 19 nt, Artificial Sequence
  Description of Artificial Sequence: Synthetic oligonucleotide
  Sense strand starting at position 1398 of SEQ ID NO: 1242803
cgcuguuucugaccucaca

SEQ ID NO: 1374005 - RNA, 19 nt, Artificial Sequence
  Description of Artificial Sequence: Synthetic oligonucleotide
  Antisense strand to SEQ ID NO: 1374004
ugugaggucagaaacagcg

SEQ ID NO: 1374006 - RNA, 19 nt, Artificial Sequence
  Description of Artificial Sequence: Synthetic oligonucleotide
  Sense strand starting at position 1465 of SEQ ID NO: 1242803
gggaagugcuccgugagca

SEQ ID NO: 1374007 - RNA, 19 nt, Artificial Sequence
  Description of Artificial Sequence: Synthetic oligonucleotide
  Antisense strand to SEQ ID NO: 1374006
ugcucacggagcacuuccc

SEQ ID NO: 1374008 - RNA, 19 nt, Artificial Sequence
  Description of Artificial Sequence: Synthetic oligonucleotide
  Sense strand starting at position 1466 of SEQ ID NO: 1242803
ggaagugcuccgugagcag

SEQ ID NO: 1374009 - RNA, 19 nt, Artificial Sequence
  Description of Artificial Sequence: Synthetic oligonucleotide
  Antisense strand to SEQ ID NO: 1374008
cugcucacggagcacuucc

SEQ ID NO: 1374010 - RNA, 19 nt, Artificial Sequence
  Description of Artificial Sequence: Synthetic oligonucleotide
  Sense strand starting at position 1473 of SEQ ID NO: 1242803
cuccgugagcaggaguuua

SEQ ID NO: 1374011 - RNA, 19 nt, Artificial Sequence
  Description of Artificial Sequence: Synthetic oligonucleotide
  Antisense strand to SEQ ID NO: 1374010
uaaacuccugcucacggag

SEQ ID NO: 1374012 - RNA, 19 nt, Artificial Sequence
  Description of Artificial Sequence: Synthetic oligonucleotide
  Sense strand starting at position 1512 of SEQ ID NO: 1242803
cugaaagguuuggacugaa

SEQ ID NO: 1374013 - RNA, 19 nt, Artificial Sequence
  Description of Artificial Sequence: Synthetic oligonucleotide
  Antisense strand to SEQ ID NO: 1374012
uucaguccaaaccuuucag

SEQ ID NO: 1374014 - RNA, 19 nt, Artificial Sequence
  Description of Artificial Sequence: Synthetic oligonucleotide
  Sense strand starting at position 2018 of SEQ ID NO: 1242803
cccugugugccugcuguua

SEQ ID NO: 1374015 - RNA, 19 nt, Artificial Sequence
  Description of Artificial Sequence: Synthetic oligonucleotide
  Antisense strand to SEQ ID NO: 1374014
uaacagcaggcacacaggg

SEQ ID NO: 1374016 - RNA, 19 nt, Artificial Sequence
  Description of Artificial Sequence: Synthetic oligonucleotide
  Sense strand starting at position 2026 of SEQ ID NO: 1242803
gccugcuguuaucuggaga

SEQ ID NO: 1374017 - RNA, 19 nt, Artificial Sequence
  Description of Artificial Sequence: Synthetic oligonucleotide
  Antisense strand to SEQ ID NO: 1374016
ucuccagauaacagcaggc

SEQ ID NO: 1374018 - RNA, 19 nt, Artificial Sequence
  Description of Artificial Sequence: Synthetic oligonucleotide
  Sense strand starting at position 2029 of SEQ ID NO: 1242803
ugcuguuaucuggagaccu

SEQ ID NO: 1374019 - RNA, 19 nt, Artificial Sequence
  Description of Artificial Sequence: Synthetic oligonucleotide
  Antisense strand to SEQ ID NO: 1374018
aggucuccagauaacagca

SEQ ID NO: 1374020 - RNA, 19 nt, Artificial Sequence
  Description of Artificial Sequence: Synthetic oligonucleotide
  Sense strand starting at position 2050 of SEQ ID NO: 1242803
gggcgauaaucccuucccu

SEQ ID NO: 1374021 - RNA, 19 nt, Artificial Sequence
  Description of Artificial Sequence: Synthetic oligonucleotide
  Antisense strand to SEQ ID NO: 1374020
agggaagggauuaucgccc

SEQ ID NO: 1374022 - RNA, 19 nt, Artificial Sequence
  Description of Artificial Sequence: Synthetic oligonucleotide
  Sense strand starting at position 2253 of SEQ ID NO: 1242803
gucucuugugcucugcaaa

SEQ ID NO: 1374023 - RNA, 19 nt, Artificial Sequence
  Description of Artificial Sequence: Synthetic oligonucleotide
  Antisense strand to SEQ ID NO: 1374022
uuugcagagcacaagagac

SEQ ID NO: 1374024 - RNA, 19 nt, Artificial Sequence
  Description of Artificial Sequence: Synthetic oligonucleotide
  Sense strand starting at position 2254 of SEQ ID NO: 1242803
ucucuugugcucugcaaag

SEQ ID NO: 1374025 - RNA, 19 nt, Artificial Sequence
  Description of Artificial Sequence: Synthetic oligonucleotide
  Antisense strand to SEQ ID NO: 1374024
cuuugcagagcacaagaga

SEQ ID NO: 1374026 - RNA, 19 nt, Artificial Sequence
  Description of Artificial Sequence: Synthetic oligonucleotide
  Sense strand starting at position 2256 of SEQ ID NO: 1242803
ucuugugcucugcaaagaa

SEQ ID NO: 1374027 - RNA, 19 nt, Artificial Sequence
  Description of Artificial Sequence: Synthetic oligonucleotide
  Antisense strand to SEQ ID NO: 1374026
uucuuugcagagcacaaga

SEQ ID NO: 1374028 - RNA, 19 nt, Artificial Sequence
  Description of Artificial Sequence: Synthetic oligonucleotide
  Sense strand starting at position 2920 of SEQ ID NO: 1242803
uggcaucgcccugaugaga

SEQ ID NO: 1374029 - RNA, 19 nt, Artificial Sequence
  Description of Artificial Sequence: Synthetic oligonucleotide
  Antisense strand to SEQ ID NO: 1374028
ucucaucagggcgaugcca

SEQ ID NO: 1374030 - RNA, 19 nt, Artificial Sequence
  Description of Artificial Sequence: Synthetic oligonucleotide
  Sense strand starting at position 3224 of SEQ ID NO: 1242803
ucugauccuguauguaauu

SEQ ID NO: 1374031 - RNA, 19 nt, Artificial Sequence
  Description of Artificial Sequence: Synthetic oligonucleotide
  Antisense strand to SEQ ID NO: 1374030
aauuacauacaggaucaga

SEQ ID NO: 1374032 - RNA, 19 nt, Artificial Sequence
  Description of Artificial Sequence: Synthetic oligonucleotide
  Sense strand starting at position 3229 of SEQ ID NO: 1242803
uccuguauguaauugagga

SEQ ID NO: 1374033 - RNA, 19 nt, Artificial Sequence
  Description of Artificial Sequence: Synthetic oligonucleotide
  Antisense strand to SEQ ID NO: 1374032
uccucaauuacauacagga

SEQ ID NO: 1374034 - RNA, 19 nt, Artificial Sequence
  Description of Artificial Sequence: Synthetic oligonucleotide
  Sense strand starting at position 3230 of SEQ ID NO: 1242803
ccuguauguaauugaggau

SEQ ID NO: 1374035 - RNA, 19 nt, Artificial Sequence
  Description of Artificial Sequence: Synthetic oligonucleotide
  Antisense strand to SEQ ID NO: 1374034
auccucaauuacauacagg

SEQ ID NO: 1374036 - RNA, 19 nt, Artificial Sequence
  Description of Artificial Sequence: Synthetic oligonucleotide
  Sense strand starting at position 3234 of SEQ ID NO: 1242803
uauguaauugaggaugcuu

SEQ ID NO: 1374037 - RNA, 19 nt, Artificial Sequence
  Description of Artificial Sequence: Synthetic oligonucleotide
  Antisense strand to SEQ ID NO: 1374036
aagcauccucaauuacaua

SEQ ID NO: 1374038 - RNA, 19 nt, Artificial Sequence
  Description of Artificial Sequence: Synthetic oligonucleotide
  Sense strand starting at position 3239 of SEQ ID NO: 1242803
aauugaggaugcuuagagu

SEQ ID NO: 1374039 - RNA, 19 nt, Artificial Sequence
  Description of Artificial Sequence: Synthetic oligonucleotide
  Antisense strand to SEQ ID NO: 1374038
acucuaagcauccucaauu

SEQ ID NO: 1374040 - RNA, 19 nt, Artificial Sequence
  Description of Artificial Sequence: Synthetic oligonucleotide
  Sense strand starting at position 3245 of SEQ ID NO: 1242803
ggaugcuuagaguaugggu

SEQ ID NO: 1374041 - RNA, 19 nt, Artificial Sequence
  Description of Artificial Sequence: Synthetic oligonucleotide
  Antisense strand to SEQ ID NO: 1374040
acccauacucuaagcaucc

SEQ ID NO: 1374042 - RNA, 19 nt, Artificial Sequence
  Description of Artificial Sequence: Synthetic oligonucleotide
  Sense strand starting at position 3276 of SEQ ID NO: 1242803
ggaagagccuucuugagca

SEQ ID NO: 1374043 - RNA, 19 nt, Artificial Sequence
  Description of Artificial Sequence: Synthetic oligonucleotide
  Antisense strand to SEQ ID NO: 1374042
ugcucaagaaggcucuucc

SEQ ID NO: 1374044 - RNA, 19 nt, Artificial Sequence
  Description of Artificial Sequence: Synthetic oligonucleotide
  Sense strand starting at position 3341 of SEQ ID NO: 1242803
uuccucuuucuugagugaa

SEQ ID NO: 1374045 - RNA, 19 nt, Artificial Sequence
  Description of Artificial Sequence: Synthetic oligonucleotide
  Antisense strand to SEQ ID NO: 1374044
uucacucaagaaagaggaa

SEQ ID NO: 1374046 - RNA, 19 nt, Artificial Sequence
  Description of Artificial Sequence: Synthetic oligonucleotide
  Sense strand starting at position 3343 of SEQ ID NO: 1242803
ccucuuucuugagugaauc

SEQ ID NO: 1374047 - RNA, 19 nt, Artificial Sequence
  Description of Artificial Sequence: Synthetic oligonucleotide
  Antisense strand to SEQ ID NO: 1374046
gauucacucaagaaagagg

SEQ ID NO: 1374048 - RNA, 19 nt, Artificial Sequence
  Description of Artificial Sequence: Synthetic oligonucleotide
  Sense strand starting at position 3344 of SEQ ID NO: 1242803
cucuuucuugagugaauca

SEQ ID NO: 1374049 - RNA, 19 nt, Artificial Sequence
  Description of Artificial Sequence: Synthetic oligonucleotide
  Antisense strand to SEQ ID NO: 1374048
ugauucacucaagaaagag

SEQ ID NO: 1374050 - RNA, 19 nt, Artificial Sequence
  Description of Artificial Sequence: Synthetic oligonucleotide
  Sense strand starting at position 3377 of SEQ ID NO: 1242803
ucgcucauucuagaagauu

SEQ ID NO: 1374051 - RNA, 19 nt, Artificial Sequence
  Description of Artificial Sequence: Synthetic oligonucleotide
  Antisense strand to SEQ ID NO: 1374050
aaucuucuagaaugagcga

SEQ ID NO: 1374052 - RNA, 19 nt, Artificial Sequence
  Description of Artificial Sequence: Synthetic oligonucleotide
  Sense strand starting at position 3383 of SEQ ID NO: 1242803
auucuagaagauugucuga

SEQ ID NO: 1374053 - RNA, 19 nt, Artificial Sequence
  Description of Artificial Sequence: Synthetic oligonucleotide
  Antisense strand to SEQ ID NO: 1374052
ucagacaaucuucuagaau

SEQ ID NO: 1374054 - RNA, 19 nt, Artificial Sequence
  Description of Artificial Sequence: Synthetic oligonucleotide
  Sense strand starting at position 3388 of SEQ ID NO: 1242803
agaagauugucugaggaca

SEQ ID NO: 1374055 - RNA, 19 nt, Artificial Sequence
  Description of Artificial Sequence: Synthetic oligonucleotide
  Antisense strand to SEQ ID NO: 1374054
uguccucagacaaucuucu

SEQ ID NO: 1374056 - RNA, 19 nt, Artificial Sequence
  Description of Artificial Sequence: Synthetic oligonucleotide
  Sense strand starting at position 3439 of SEQ ID NO: 1242803
uggccuggucgggaugaga

SEQ ID NO: 1374057 - RNA, 19 nt, Artificial Sequence
  Description of Artificial Sequence: Synthetic oligonucleotide
  Antisense strand to SEQ ID NO: 1374056
ucucaucccgaccaggcca

SEQ ID NO: 1374058 - RNA, 19 nt, Artificial Sequence
  Description of Artificial Sequence: Synthetic oligonucleotide
  Sense strand starting at position 3635 of SEQ ID NO: 1242803
gcuaaagaguucuucuucu

SEQ ID NO: 1374059 - RNA, 19 nt, Artificial Sequence
  Description of Artificial Sequence: Synthetic oligonucleotide
  Antisense strand to SEQ ID NO: 1374058
agaagaagaacucuuuagc

SEQ ID NO: 1374060 - RNA, 19 nt, Artificial Sequence
  Description of Artificial Sequence: Synthetic oligonucleotide
  Sense strand starting at position 3810 of SEQ ID NO: 1242803
cagcgaagagcucagaagu

SEQ ID NO: 1374061 - RNA, 19 nt, Artificial Sequence
  Description of Artificial Sequence: Synthetic oligonucleotide
  Antisense strand to SEQ ID NO: 1374060
acuucugagcucuucgcug

SEQ ID NO: 1374062 - RNA, 19 nt, Artificial Sequence
  Description of Artificial Sequence: Synthetic oligonucleotide
  Sense strand starting at position 49 of SEQ ID NO: 1242804
uguggugagcucaguugua

SEQ ID NO: 1374063 - RNA, 19 nt, Artificial Sequence
  Description of Artificial Sequence: Synthetic oligonucleotide
  Antisense strand to SEQ ID NO: 1374062
uacaacugagcucaccaca

SEQ ID NO: 1374064 - RNA, 19 nt, Artificial Sequence
  Description of Artificial Sequence: Synthetic oligonucleotide
  Sense strand starting at position 67 of SEQ ID NO: 1242804
aggcuaugaccugguugau

SEQ ID NO: 1374065 - RNA, 19 nt, Artificial Sequence
  Description of Artificial Sequence: Synthetic oligonucleotide
  Antisense strand to SEQ ID NO: 1374064
aucaaccaggucauagccu

SEQ ID NO: 1374066 - RNA, 19 nt, Artificial Sequence
  Description of Artificial Sequence: Synthetic oligonucleotide
  Sense strand starting at position 79 of SEQ ID NO: 1242804
gguugauccaggugcugaa

SEQ ID NO: 1374067 - RNA, 19 nt, Artificial Sequence
  Description of Artificial Sequence: Synthetic oligonucleotide
  Antisense strand to SEQ ID NO: 1374066
uucagcaccuggaucaacc

SEQ ID NO: 1374068 - RNA, 19 nt, Artificial Sequence
  Description of Artificial Sequence: Synthetic oligonucleotide
  Sense strand starting at position 97 of SEQ ID NO: 1242804
acuugcuaacucgaguaua

SEQ ID NO: 1374069 - RNA, 19 nt, Artificial Sequence
  Description of Artificial Sequence: Synthetic oligonucleotide
  Antisense strand to SEQ ID NO: 1374068
uauacucgaguuagcaagu

SEQ ID NO: 1374070 - RNA, 19 nt, Artificial Sequence
  Description of Artificial Sequence: Synthetic oligonucleotide
  Sense strand starting at position 100 of SEQ ID NO: 1242804
ugcuaacucgaguauacac

SEQ ID NO: 1374071 - RNA, 19 nt, Artificial Sequence
  Description of Artificial Sequence: Synthetic oligonucleotide
  Antisense strand to SEQ ID NO: 1374070
guguauacucgaguuagca

SEQ ID NO: 1374072 - RNA, 19 nt, Artificial Sequence
  Description of Artificial Sequence: Synthetic oligonucleotide
  Sense strand starting at position 581 of SEQ ID NO: 1242804
cagucagagccucguuuga

SEQ ID NO: 1374073 - RNA, 19 nt, Artificial Sequence
  Description of Artificial Sequence: Synthetic oligonucleotide
  Antisense strand to SEQ ID NO: 1374072
ucaaacgaggcucugacug

SEQ ID NO: 1374074 - RNA, 19 nt, Artificial Sequence
  Description of Artificial Sequence: Synthetic oligonucleotide
  Sense strand starting at position 617 of SEQ ID NO: 1242804
gcgagaugcguguugugua

SEQ ID NO: 1374075 - RNA, 19 nt, Artificial Sequence
  Description of Artificial Sequence: Synthetic oligonucleotide
  Antisense strand to SEQ ID NO: 1374074
uacacaacacgcaucucgc

SEQ ID NO: 1374076 - RNA, 19 nt, Artificial Sequence
  Description of Artificial Sequence: Synthetic oligonucleotide
  Sense strand starting at position 669 of SEQ ID NO: 1242804
gucauuguucaugguggua

SEQ ID NO: 1374077 - RNA, 19 nt, Artificial Sequence
  Description of Artificial Sequence: Synthetic oligonucleotide
  Antisense strand to SEQ ID NO: 1374076
uaccaccaugaacaaugac

SEQ ID NO: 1374078 - RNA, 19 nt, Artificial Sequence
  Description of Artificial Sequence: Synthetic oligonucleotide
  Sense strand starting at position 884 of SEQ ID NO: 1242804
guuugaugaucggucauac

SEQ ID NO: 1374079 - RNA, 19 nt, Artificial Sequence
  Description of Artificial Sequence: Synthetic oligonucleotide
  Antisense strand to SEQ ID NO: 1374078
guaugaccgaucaucaaac

SEQ ID NO: 1374080 - RNA, 19 nt, Artificial Sequence
  Description of Artificial Sequence: Synthetic oligonucleotide
  Sense strand starting at position 1272 of SEQ ID NO: 1242804
uugacaauccucuggcuga

SEQ ID NO: 1374081 - RNA, 19 nt, Artificial Sequence
  Description of Artificial Sequence: Synthetic oligonucleotide
  Antisense strand to SEQ ID NO: 1374080
ucagccagaggauugucaa

SEQ ID NO: 1374082 - RNA, 19 nt, Artificial Sequence
  Description of Artificial Sequence: Synthetic oligonucleotide
  Sense strand starting at position 1291 of SEQ ID NO: 1242804
agcucagugccgguuugau

SEQ ID NO: 1374083 - RNA, 19 nt, Artificial Sequence
  Description of Artificial Sequence: Synthetic oligonucleotide
  Antisense strand to SEQ ID NO: 1374082
aucaaaccggcacugagcu

SEQ ID NO: 1374084 - RNA, 19 nt, Artificial Sequence
  Description of Artificial Sequence: Synthetic oligonucleotide
  Sense strand starting at position 1416 of SEQ ID NO: 1242804
agaggucugucgagagggu

SEQ ID NO: 1374085 - RNA, 19 nt, Artificial Sequence
  Description of Artificial Sequence: Synthetic oligonucleotide
  Antisense strand to SEQ ID NO: 1374084
acccucucgacagaccucu

SEQ ID NO: 1374086 - RNA, 19 nt, Artificial Sequence
  Description of Artificial Sequence: Synthetic oligonucleotide
  Sense strand starting at position 1417 of SEQ ID NO: 1242804
gaggucugucgagagggua

SEQ ID NO: 1374087 - RNA, 19 nt, Artificial Sequence
  Description of Artificial Sequence: Synthetic oligonucleotide
  Antisense strand to SEQ ID NO: 1374086
uacccucucgacagaccuc

SEQ ID NO: 1374088 - RNA, 19 nt, Artificial Sequence
  Description of Artificial Sequence: Synthetic oligonucleotide
  Sense strand starting at position 1489 of SEQ ID NO: 1242804
cuaucuugguuaucccuau

SEQ ID NO: 1374089 - RNA, 19 nt, Artificial Sequence
  Description of Artificial Sequence: Synthetic oligonucleotide
  Antisense strand to SEQ ID NO: 1374088
auagggauaaccaagauag

SEQ ID NO: 1374090 - RNA, 19 nt, Artificial Sequence
  Description of Artificial Sequence: Synthetic oligonucleotide
  Sense strand starting at position 1493 of SEQ ID NO: 1242804
cuugguuaucccuauccac

SEQ ID NO: 1374091 - RNA, 19 nt, Artificial Sequence
  Description of Artificial Sequence: Synthetic oligonucleotide
  Antisense strand to SEQ ID NO: 1374090
guggauagggauaaccaag

SEQ ID NO: 1374092 - RNA, 19 nt, Artificial Sequence
  Description of Artificial Sequence: Synthetic oligonucleotide
  Sense strand starting at position 1632 of SEQ ID NO: 1242804
gccagaagguucuuucuaa

SEQ ID NO: 1374093 - RNA, 19 nt, Artificial Sequence
  Description of Artificial Sequence: Synthetic oligonucleotide
  Antisense strand to SEQ ID NO: 1374092
uuagaaagaaccuucuggc

SEQ ID NO: 1374094 - RNA, 19 nt, Artificial Sequence
  Description of Artificial Sequence: Synthetic oligonucleotide
  Sense strand starting at position 1633 of SEQ ID NO: 1242804
ccagaagguucuuucuaaa

SEQ ID NO: 1374095 - RNA, 19 nt, Artificial Sequence
  Description of Artificial Sequence: Synthetic oligonucleotide
  Antisense strand to SEQ ID NO: 1374094
uuuagaaagaaccuucugg

SEQ ID NO: 1374096 - RNA, 19 nt, Artificial Sequence
  Description of Artificial Sequence: Synthetic oligonucleotide
  Sense strand starting at position 1721 of SEQ ID NO: 1242804
gguccuauuugugagacca

SEQ ID NO: 1374097 - RNA, 19 nt, Artificial Sequence
  Description of Artificial Sequence: Synthetic oligonucleotide
  Antisense strand to SEQ ID NO: 1374096
uggucucacaaauaggacc

SEQ ID NO: 1374098 - RNA, 19 nt, Artificial Sequence
  Description of Artificial Sequence: Synthetic oligonucleotide
  Sense strand starting at position 2016 of SEQ ID NO: 1242804
ugggucuucucguccuuga

SEQ ID NO: 1374099 - RNA, 19 nt, Artificial Sequence
  Description of Artificial Sequence: Synthetic oligonucleotide
  Antisense strand to SEQ ID NO: 1374098
ucaaggacgagaagaccca

SEQ ID NO: 1374100 - RNA, 19 nt, Artificial Sequence
  Description of Artificial Sequence: Synthetic oligonucleotide
  Sense strand starting at position 2020 of SEQ ID NO: 1242804
ucuucucguccuugagcua

SEQ ID NO: 1374101 - RNA, 19 nt, Artificial Sequence
  Description of Artificial Sequence: Synthetic oligonucleotide
  Antisense strand to SEQ ID NO: 1374100
uagcucaaggacgagaaga

SEQ ID NO: 1374102 - RNA, 19 nt, Artificial Sequence
  Description of Artificial Sequence: Synthetic oligonucleotide
  Sense strand starting at position 2021 of SEQ ID NO: 1242804
cuucucguccuugagcuaa

SEQ ID NO: 1374103 - RNA, 19 nt, Artificial Sequence
  Description of Artificial Sequence: Synthetic oligonucleotide
  Antisense strand to SEQ ID NO: 1374102
uuagcucaaggacgagaag

SEQ ID NO: 1374104 - RNA, 19 nt, Artificial Sequence
  Description of Artificial Sequence: Synthetic oligonucleotide
  Sense strand starting at position 2261 of SEQ ID NO: 1242804
ugguuaaauuaggucuaua

SEQ ID NO: 1374105 - RNA, 19 nt, Artificial Sequence
  Description of Artificial Sequence: Synthetic oligonucleotide
  Antisense strand to SEQ ID NO: 1374104
uauagaccuaauuuaacca

SEQ ID NO: 1374106 - RNA, 19 nt, Artificial Sequence
  Description of Artificial Sequence: Synthetic oligonucleotide
  Sense strand starting at position 2264 of SEQ ID NO: 1242804
uuaaauuaggucuauagug

SEQ ID NO: 1374107 - RNA, 19 nt, Artificial Sequence
  Description of Artificial Sequence: Synthetic oligonucleotide
  Antisense strand to SEQ ID NO: 1374106
cacuauagaccuaauuuaa

SEQ ID NO: 1374108 - RNA, 19 nt, Artificial Sequence
  Description of Artificial Sequence: Synthetic oligonucleotide
  Sense strand starting at position 2305 of SEQ ID NO: 1242804
aggagucacccagggcuaa

SEQ ID NO: 1374109 - RNA, 19 nt, Artificial Sequence
  Description of Artificial Sequence: Synthetic oligonucleotide
  Antisense strand to SEQ ID NO: 1374108
uuagcccugggugacuccu

SEQ ID NO: 1374110 - RNA, 19 nt, Artificial Sequence
  Description of Artificial Sequence: Synthetic oligonucleotide
  Sense strand starting at position 2364 of SEQ ID NO: 1242804
ggguguucugacuggugga

SEQ ID NO: 1374111 - RNA, 19 nt, Artificial Sequence
  Description of Artificial Sequence: Synthetic oligonucleotide
  Antisense strand to SEQ ID NO: 1374110
uccaccagucagaacaccc

SEQ ID NO: 1374112 - RNA, 19 nt, Artificial Sequence
  Description of Artificial Sequence: Synthetic oligonucleotide
  Sense strand starting at position 2365 of SEQ ID NO: 1242804
gguguucugacugguggau

SEQ ID NO: 1374113 - RNA, 19 nt, Artificial Sequence
  Description of Artificial Sequence: Synthetic oligonucleotide
  Antisense strand to SEQ ID NO: 1374112
auccaccagucagaacacc

SEQ ID NO: 1374114 - RNA, 19 nt, Artificial Sequence
  Description of Artificial Sequence: Synthetic oligonucleotide
  Sense strand starting at position 2385 of SEQ ID NO: 1242804
gaaugcucacugcggucaa

SEQ ID NO: 1374115 - RNA, 19 nt, Artificial Sequence
  Description of Artificial Sequence: Synthetic oligonucleotide
  Antisense strand to SEQ ID NO: 1374114
uugaccgcagugagcauuc

SEQ ID NO: 1374116 - RNA, 19 nt, Artificial Sequence
  Description of Artificial Sequence: Synthetic oligonucleotide
  Sense strand starting at position 2397 of SEQ ID NO: 1242804
cggucaacuuugcugugaa

SEQ ID NO: 1374117 - RNA, 19 nt, Artificial Sequence
  Description of Artificial Sequence: Synthetic oligonucleotide
  Antisense strand to SEQ ID NO: 1374116
uucacagcaaaguugaccg

SEQ ID NO: 1374118 - RNA, 19 nt, Artificial Sequence
  Description of Artificial Sequence: Synthetic oligonucleotide
  Sense strand starting at position 2468 of SEQ ID NO: 1242804
agugguuccucguccauuu

SEQ ID NO: 1374119 - RNA, 19 nt, Artificial Sequence
  Description of Artificial Sequence: Synthetic oligonucleotide
  Antisense strand to SEQ ID NO: 1374118
aaauggacgaggaaccacu

SEQ ID NO: 1374120 - RNA, 19 nt, Artificial Sequence
  Description of Artificial Sequence: Synthetic oligonucleotide
  Sense strand starting at position 2539 of SEQ ID NO: 1242804
gguugaguuguacacaaac

SEQ ID NO: 1374121 - RNA, 19 nt, Artificial Sequence
  Description of Artificial Sequence: Synthetic oligonucleotide
  Antisense strand to SEQ ID NO: 1374120
guuuguguacaacucaacc

SEQ ID NO: 1374122 - RNA, 19 nt, Artificial Sequence
  Description of Artificial Sequence: Synthetic oligonucleotide
  Sense strand starting at position 2584 of SEQ ID NO: 1242804
cgcucuuaacaaugagaug

SEQ ID NO: 1374123 - RNA, 19 nt, Artificial Sequence
  Description of Artificial Sequence: Synthetic oligonucleotide
  Antisense strand to SEQ ID NO: 1374122
caucucauuguuaagagcg

SEQ ID NO: 1374124 - RNA, 19 nt, Artificial Sequence
  Description of Artificial Sequence: Synthetic oligonucleotide
  Sense strand starting at position 2843 of SEQ ID NO: 1242804
cggccuucugggaguguga

SEQ ID NO: 1374125 - RNA, 19 nt, Artificial Sequence
  Description of Artificial Sequence: Synthetic oligonucleotide
  Antisense strand to SEQ ID NO: 1374124
ucacacucccagaaggccg

SEQ ID NO: 1374126 - RNA, 19 nt, Artificial Sequence
  Description of Artificial Sequence: Synthetic oligonucleotide
  Sense strand starting at position 2856 of SEQ ID NO: 1242804
gugugagggcuuuaacuga

SEQ ID NO: 1374127 - RNA, 19 nt, Artificial Sequence
  Description of Artificial Sequence: Synthetic oligonucleotide
  Antisense strand to SEQ ID NO: 1374126
ucaguuaaagcccucacac

SEQ ID NO: 1374128 - RNA, 19 nt, Artificial Sequence
  Description of Artificial Sequence: Synthetic oligonucleotide
  Sense strand starting at position 3026 of SEQ ID NO: 1242804
aagaaaugagcuggguaug

SEQ ID NO: 1374129 - RNA, 19 nt, Artificial Sequence
  Description of Artificial Sequence: Synthetic oligonucleotide
  Antisense strand to SEQ ID NO: 1374128
cauacccagcucauuucuu

SEQ ID NO: 1374130 - RNA, 19 nt, Artificial Sequence
  Description of Artificial Sequence: Synthetic oligonucleotide
  Sense strand starting at position 3027 of SEQ ID NO: 1242804
agaaaugagcuggguauga

SEQ ID NO: 1374131 - RNA, 19 nt, Artificial Sequence
  Description of Artificial Sequence: Synthetic oligonucleotide
  Antisense strand to SEQ ID NO: 1374130
ucauacccagcucauuucu

SEQ ID NO: 1374132 - RNA, 19 nt, Artificial Sequence
  Description of Artificial Sequence: Synthetic oligonucleotide
  Sense strand starting at position 3091 of SEQ ID NO: 1242804
gggaucacuugagcccuua

SEQ ID NO: 1374133 - RNA, 19 nt, Artificial Sequence
  Description of Artificial Sequence: Synthetic oligonucleotide
  Antisense strand to SEQ ID NO: 1374132
uaagggcucaagugauccc

SEQ ID NO: 1374134 - RNA, 19 nt, Artificial Sequence
  Description of Artificial Sequence: Synthetic oligonucleotide
  Sense strand starting at position 3882 of SEQ ID NO: 1242804
gguagacucucccugacau

SEQ ID NO: 1374135 - RNA, 19 nt, Artificial Sequence
  Description of Artificial Sequence: Synthetic oligonucleotide
  Antisense strand to SEQ ID NO: 1374134
augucagggagagucuacc

SEQ ID NO: 1374136 - RNA, 19 nt, Artificial Sequence
  Description of Artificial Sequence: Synthetic oligonucleotide
  Sense strand starting at position 3883 of SEQ ID NO: 1242804
guagacucucccugacauu

SEQ ID NO: 1374137 - RNA, 19 nt, Artificial Sequence
  Description of Artificial Sequence: Synthetic oligonucleotide
  Antisense strand to SEQ ID NO: 1374136
aaugucagggagagucuac

SEQ ID NO: 1374138 - RNA, 19 nt, Artificial Sequence
  Description of Artificial Sequence: Synthetic oligonucleotide
  Sense strand starting at position 3892 of SEQ ID NO: 1242804
cccugacauuucugaagcu

SEQ ID NO: 1374139 - RNA, 19 nt, Artificial Sequence
  Description of Artificial Sequence: Synthetic oligonucleotide
  Antisense strand to SEQ ID NO: 1374138
agcuucagaaaugucaggg

SEQ ID NO: 1374140 - RNA, 19 nt, Artificial Sequence
  Description of Artificial Sequence: Synthetic oligonucleotide
  Sense strand starting at position 3924 of SEQ ID NO: 1242804
gccguucucgcugaggaca

SEQ ID NO: 1374141 - RNA, 19 nt, Artificial Sequence
  Description of Artificial Sequence: Synthetic oligonucleotide
  Antisense strand to SEQ ID NO: 1374140
uguccucagcgagaacggc

SEQ ID NO: 1374142 - RNA, 19 nt, Artificial Sequence
  Description of Artificial Sequence: Synthetic oligonucleotide
  Sense strand starting at position 137 of SEQ ID NO: 1242805
acgugcugaccugaaugau

SEQ ID NO: 1374143 - RNA, 19 nt, Artificial Sequence
  Description of Artificial Sequence: Synthetic oligonucleotide
  Antisense strand to SEQ ID NO: 1374142
aucauucaggucagcacgu

SEQ ID NO: 1374144 - RNA, 19 nt, Artificial Sequence
  Description of Artificial Sequence: Synthetic oligonucleotide
  Sense strand starting at position 164 of SEQ ID NO: 1242805
aucccagcucgauguagau

SEQ ID NO: 1374145 - RNA, 19 nt, Artificial Sequence
  Description of Artificial Sequence: Synthetic oligonucleotide
  Antisense strand to SEQ ID NO: 1374144
aucuacaucgagcugggau

SEQ ID NO: 1374146 - RNA, 19 nt, Artificial Sequence
  Description of Artificial Sequence: Synthetic oligonucleotide
  Sense strand starting at position 286 of SEQ ID NO: 1242805
agccucuccucagugaauu

SEQ ID NO: 1374147 - RNA, 19 nt, Artificial Sequence
  Description of Artificial Sequence: Synthetic oligonucleotide
  Antisense strand to SEQ ID NO: 1374146
aauucacugaggagaggcu

SEQ ID NO: 1374148 - RNA, 19 nt, Artificial Sequence
  Description of Artificial Sequence: Synthetic oligonucleotide
  Sense strand starting at position 287 of SEQ ID NO: 1242805
gccucuccucagugaauuc

SEQ ID NO: 1374149 - RNA, 19 nt, Artificial Sequence
  Description of Artificial Sequence: Synthetic oligonucleotide
  Antisense strand to SEQ ID NO: 1374148
gaauucacugaggagaggc

SEQ ID NO: 1374150 - RNA, 19 nt, Artificial Sequence
  Description of Artificial Sequence: Synthetic oligonucleotide
  Sense strand starting at position 315 of SEQ ID NO: 1242805
ccugguguucuuggcaauu

SEQ ID NO: 1374151 - RNA, 19 nt, Artificial Sequence
  Description of Artificial Sequence: Synthetic oligonucleotide
  Antisense strand to SEQ ID NO: 1374150
aauugccaagaacaccagg

SEQ ID NO: 1374152 - RNA, 19 nt, Artificial Sequence
  Description of Artificial Sequence: Synthetic oligonucleotide
  Sense strand starting at position 340 of SEQ ID NO: 1242805
gcuccugggugguuaaaga

SEQ ID NO: 1374153 - RNA, 19 nt, Artificial Sequence
  Description of Artificial Sequence: Synthetic oligonucleotide
  Antisense strand to SEQ ID NO: 1374152
ucuuuaaccacccaggagc

SEQ ID NO: 1374154 - RNA, 19 nt, Artificial Sequence
  Description of Artificial Sequence: Synthetic oligonucleotide
  Sense strand starting at position 754 of SEQ ID NO: 1242805
gagcuaugagucuagugga

SEQ ID NO: 1374155 - RNA, 19 nt, Artificial Sequence
  Description of Artificial Sequence: Synthetic oligonucleotide
  Antisense strand to SEQ ID NO: 1374154
uccacuagacucauagcuc

SEQ ID NO: 1374156 - RNA, 19 nt, Artificial Sequence
  Description of Artificial Sequence: Synthetic oligonucleotide
  Sense strand starting at position 757 of SEQ ID NO: 1242805
cuaugagucuaguggaaac

SEQ ID NO: 1374157 - RNA, 19 nt, Artificial Sequence
  Description of Artificial Sequence: Synthetic oligonucleotide
  Antisense strand to SEQ ID NO: 1374156
guuuccacuagacucauag

SEQ ID NO: 1374158 - RNA, 19 nt, Artificial Sequence
  Description of Artificial Sequence: Synthetic oligonucleotide
  Sense strand starting at position 875 of SEQ ID NO: 1242805
agcaucucacacgagauua

SEQ ID NO: 1374159 - RNA, 19 nt, Artificial Sequence
  Description of Artificial Sequence: Synthetic oligonucleotide
  Antisense strand to SEQ ID NO: 1374158
uaaucucgugugagaugcu

SEQ ID NO: 1374160 - RNA, 19 nt, Artificial Sequence
  Description of Artificial Sequence: Synthetic oligonucleotide
  Sense strand starting at position 1067 of SEQ ID NO: 1242805
guggcuagcucaugggaaa

SEQ ID NO: 1374161 - RNA, 19 nt, Artificial Sequence
  Description of Artificial Sequence: Synthetic oligonucleotide
  Antisense strand to SEQ ID NO: 1374160
uuucccaugagcuagccac

SEQ ID NO: 1374162 - RNA, 19 nt, Artificial Sequence
  Description of Artificial Sequence: Synthetic oligonucleotide
  Sense strand starting at position 1070 of SEQ ID NO: 1242805
gcuagcucaugggaaacuu

SEQ ID NO: 1374163 - RNA, 19 nt, Artificial Sequence
  Description of Artificial Sequence: Synthetic oligonucleotide
  Antisense strand to SEQ ID NO: 1374162
aaguuucccaugagcuagc

SEQ ID NO: 1374164 - RNA, 19 nt, Artificial Sequence
  Description of Artificial Sequence: Synthetic oligonucleotide
  Sense strand starting at position 1079 of SEQ ID NO: 1242805
ugggaaacuuucccaagca

SEQ ID NO: 1374165 - RNA, 19 nt, Artificial Sequence
  Description of Artificial Sequence: Synthetic oligonucleotide
  Antisense strand to SEQ ID NO: 1374164
ugcuugggaaaguuuccca

SEQ ID NO: 1374166 - RNA, 19 nt, Artificial Sequence
  Description of Artificial Sequence: Synthetic oligonucleotide
  Sense strand starting at position 1080 of SEQ ID NO: 1242805
gggaaacuuucccaagcag

SEQ ID NO: 1374167 - RNA, 19 nt, Artificial Sequence
  Description of Artificial Sequence: Synthetic oligonucleotide
  Antisense strand to SEQ ID NO: 1374166
cugcuugggaaaguuuccc

SEQ ID NO: 1374168 - RNA, 19 nt, Artificial Sequence
  Description of Artificial Sequence: Synthetic oligonucleotide
  Sense strand starting at position 1211 of SEQ ID NO: 1242805
gcggcuauccugucugcua

SEQ ID NO: 1374169 - RNA, 19 nt, Artificial Sequence
  Description of Artificial Sequence: Synthetic oligonucleotide
  Antisense strand to SEQ ID NO: 1374168
uagcagacaggauagccgc

SEQ ID NO: 1374170 - RNA, 19 nt, Artificial Sequence
  Description of Artificial Sequence: Synthetic oligonucleotide
  Sense strand starting at position 1418 of SEQ ID NO: 1242805
ggagacagcuccuguuucu

SEQ ID NO: 1374171 - RNA, 19 nt, Artificial Sequence
  Description of Artificial Sequence: Synthetic oligonucleotide
  Antisense strand to SEQ ID NO: 1374170
agaaacaggagcugucucc

SEQ ID NO: 1374172 - RNA, 19 nt, Artificial Sequence
  Description of Artificial Sequence: Synthetic oligonucleotide
  Sense strand starting at position 1442 of SEQ ID NO: 1242805
ugaguugggucagagaaag

SEQ ID NO: 1374173 - RNA, 19 nt, Artificial Sequence
  Description of Artificial Sequence: Synthetic oligonucleotide
  Antisense strand to SEQ ID NO: 1374172
cuuucucugacccaacuca

SEQ ID NO: 1374174 - RNA, 19 nt, Artificial Sequence
  Description of Artificial Sequence: Synthetic oligonucleotide
  Sense strand starting at position 1485 of SEQ ID NO: 1242805
aggcuuguguucuguccaa

SEQ ID NO: 1374175 - RNA, 19 nt, Artificial Sequence
  Description of Artificial Sequence: Synthetic oligonucleotide
  Antisense strand to SEQ ID NO: 1374174
uuggacagaacacaagccu

SEQ ID NO: 1374176 - RNA, 19 nt, Artificial Sequence
  Description of Artificial Sequence: Synthetic oligonucleotide
  Sense strand starting at position 1489 of SEQ ID NO: 1242805
uuguguucuguccaaacuu

SEQ ID NO: 1374177 - RNA, 19 nt, Artificial Sequence
  Description of Artificial Sequence: Synthetic oligonucleotide
  Antisense strand to SEQ ID NO: 1374176
aaguuuggacagaacacaa

SEQ ID NO: 1374178 - RNA, 19 nt, Artificial Sequence
  Description of Artificial Sequence: Synthetic oligonucleotide
  Sense strand starting at position 1623 of SEQ ID NO: 1242805
ggcaccaguucucuccgaa

SEQ ID NO: 1374179 - RNA, 19 nt, Artificial Sequence
  Description of Artificial Sequence: Synthetic oligonucleotide
  Antisense strand to SEQ ID NO: 1374178
uucggagagaacuggugcc

SEQ ID NO: 1374180 - RNA, 19 nt, Artificial Sequence
  Description of Artificial Sequence: Synthetic oligonucleotide
  Sense strand starting at position 1626 of SEQ ID NO: 1242805
accaguucucuccgaauaa

SEQ ID NO: 1374181 - RNA, 19 nt, Artificial Sequence
  Description of Artificial Sequence: Synthetic oligonucleotide
  Antisense strand to SEQ ID NO: 1374180
uuauucggagagaacuggu

SEQ ID NO: 1374182 - RNA, 19 nt, Artificial Sequence
  Description of Artificial Sequence: Synthetic oligonucleotide
  Sense strand starting at position 1627 of SEQ ID NO: 1242805
ccaguucucuccgaauaag

SEQ ID NO: 1374183 - RNA, 19 nt, Artificial Sequence
  Description of Artificial Sequence: Synthetic oligonucleotide
  Antisense strand to SEQ ID NO: 1374182
cuuauucggagagaacugg

SEQ ID NO: 1374184 - RNA, 19 nt, Artificial Sequence
  Description of Artificial Sequence: Synthetic oligonucleotide
  Sense strand starting at position 2672 of SEQ ID NO: 1242805
gggcuugugcggcuggaau

SEQ ID NO: 1374185 - RNA, 19 nt, Artificial Sequence
  Description of Artificial Sequence: Synthetic oligonucleotide
  Antisense strand to SEQ ID NO: 1374184
auuccagccgcacaagccc

SEQ ID NO: 1374186 - RNA, 19 nt, Artificial Sequence
  Description of Artificial Sequence: Synthetic oligonucleotide
  Sense strand starting at position 2683 of SEQ ID NO: 1242805
gcuggaaugggcaguugua

SEQ ID NO: 1374187 - RNA, 19 nt, Artificial Sequence
  Description of Artificial Sequence: Synthetic oligonucleotide
  Antisense strand to SEQ ID NO: 1374186
uacaacugcccauuccagc

SEQ ID NO: 1374188 - RNA, 19 nt, Artificial Sequence
  Description of Artificial Sequence: Synthetic oligonucleotide
  Sense strand starting at position 2797 of SEQ ID NO: 1242805
gggcuuguuuggagucuga

SEQ ID NO: 1374189 - RNA, 19 nt, Artificial Sequence
  Description of Artificial Sequence: Synthetic oligonucleotide
  Antisense strand to SEQ ID NO: 1374188
ucagacuccaaacaagccc

SEQ ID NO: 1374190 - RNA, 19 nt, Artificial Sequence
  Description of Artificial Sequence: Synthetic oligonucleotide
  Sense strand starting at position 2801 of SEQ ID NO: 1242805
uuguuuggagucugauguu

SEQ ID NO: 1374191 - RNA, 19 nt, Artificial Sequence
  Description of Artificial Sequence: Synthetic oligonucleotide
  Antisense strand to SEQ ID NO: 1374190
aacaucagacuccaaacaa

SEQ ID NO: 1374192 - RNA, 19 nt, Artificial Sequence
  Description of Artificial Sequence: Synthetic oligonucleotide
  Sense strand starting at position 2804 of SEQ ID NO: 1242805
uuuggagucugauguucuu

SEQ ID NO: 1374193 - RNA, 19 nt, Artificial Sequence
  Description of Artificial Sequence: Synthetic oligonucleotide
  Antisense strand to SEQ ID NO: 1374192
aagaacaucagacuccaaa

SEQ ID NO: 1374194 - RNA, 19 nt, Artificial Sequence
  Description of Artificial Sequence: Synthetic oligonucleotide
  Sense strand starting at position 2807 of SEQ ID NO: 1242805
ggagucugauguucuuagu

SEQ ID NO: 1374195 - RNA, 19 nt, Artificial Sequence
  Description of Artificial Sequence: Synthetic oligonucleotide
  Antisense strand to SEQ ID NO: 1374194
acuaagaacaucagacucc

SEQ ID NO: 1374196 - RNA, 19 nt, Artificial Sequence
  Description of Artificial Sequence: Synthetic oligonucleotide
  Sense strand starting at position 2839 of SEQ ID NO: 1242805
gaacuugagucacaccgau

SEQ ID NO: 1374197 - RNA, 19 nt, Artificial Sequence
  Description of Artificial Sequence: Synthetic oligonucleotide
  Antisense strand to SEQ ID NO: 1374196
aucggugugacucaaguuc

SEQ ID NO: 1374198 - RNA, 19 nt, Artificial Sequence
  Description of Artificial Sequence: Synthetic oligonucleotide
  Sense strand starting at position 2998 of SEQ ID NO: 1242805
gggagcugugcucaaguau

SEQ ID NO: 1374199 - RNA, 19 nt, Artificial Sequence
  Description of Artificial Sequence: Synthetic oligonucleotide
  Antisense strand to SEQ ID NO: 1374198
auacuugagcacagcuccc

SEQ ID NO: 1374200 - RNA, 19 nt, Artificial Sequence
  Description of Artificial Sequence: Synthetic oligonucleotide
  Sense strand starting at position 3007 of SEQ ID NO: 1242805
gcucaaguauucuggagcu

SEQ ID NO: 1374201 - RNA, 19 nt, Artificial Sequence
  Description of Artificial Sequence: Synthetic oligonucleotide
  Antisense strand to SEQ ID NO: 1374200
agcuccagaauacuugagc

SEQ ID NO: 1374202 - RNA, 19 nt, Artificial Sequence
  Description of Artificial Sequence: Synthetic oligonucleotide
  Sense strand starting at position 3066 of SEQ ID NO: 1242805
ccuccuaagugcugaauaa

SEQ ID NO: 1374203 - RNA, 19 nt, Artificial Sequence
  Description of Artificial Sequence: Synthetic oligonucleotide
  Antisense strand to SEQ ID NO: 1374202
uuauucagcacuuaggagg

SEQ ID NO: 1374204 - RNA, 19 nt, Artificial Sequence
  Description of Artificial Sequence: Synthetic oligonucleotide
  Sense strand starting at position 3067 of SEQ ID NO: 1242805
cuccuaagugcugaauaau

SEQ ID NO: 1374205 - RNA, 19 nt, Artificial Sequence
  Description of Artificial Sequence: Synthetic oligonucleotide
  Antisense strand to SEQ ID NO: 1374204
auuauucagcacuuaggag

SEQ ID NO: 1374206 - RNA, 19 nt, Artificial Sequence
  Description of Artificial Sequence: Synthetic oligonucleotide
  Sense strand starting at position 3070 of SEQ ID NO: 1242805
cuaagugcugaauaauaca

SEQ ID NO: 1374207 - RNA, 19 nt, Artificial Sequence
  Description of Artificial Sequence: Synthetic oligonucleotide
  Antisense strand to SEQ ID NO: 1374206
uguauuauucagcacuuag

SEQ ID NO: 1374208 - RNA, 19 nt, Artificial Sequence
  Description of Artificial Sequence: Synthetic oligonucleotide
  Sense strand starting at position 3387 of SEQ ID NO: 1242805
cuaccuacuucucuuguga

SEQ ID NO: 1374209 - RNA, 19 nt, Artificial Sequence
  Description of Artificial Sequence: Synthetic oligonucleotide
  Antisense strand to SEQ ID NO: 1374208
ucacaagagaaguagguag

SEQ ID NO: 1374210 - RNA, 19 nt, Artificial Sequence
  Description of Artificial Sequence: Synthetic oligonucleotide
  Sense strand starting at position 3438 of SEQ ID NO: 1242805
cucacuuagccgugacauu

SEQ ID NO: 1374211 - RNA, 19 nt, Artificial Sequence
  Description of Artificial Sequence: Synthetic oligonucleotide
  Antisense strand to SEQ ID NO: 1374210
aaugucacggcuaagugag

SEQ ID NO: 1374212 - RNA, 19 nt, Artificial Sequence
  Description of Artificial Sequence: Synthetic oligonucleotide
  Sense strand starting at position 3467 of SEQ ID NO: 1242805
agccucugaacgggaauau

SEQ ID NO: 1374213 - RNA, 19 nt, Artificial Sequence
  Description of Artificial Sequence: Synthetic oligonucleotide
  Antisense strand to SEQ ID NO: 1374212
auauucccguucagaggcu

SEQ ID NO: 1374214 - RNA, 19 nt, Artificial Sequence
  Description of Artificial Sequence: Synthetic oligonucleotide
  Sense strand starting at position 3468 of SEQ ID NO: 1242805
gccucugaacgggaauauu

SEQ ID NO: 1374215 - RNA, 19 nt, Artificial Sequence
  Description of Artificial Sequence: Synthetic oligonucleotide
  Antisense strand to SEQ ID NO: 1374214
aauauucccguucagaggc

SEQ ID NO: 1374216 - RNA, 19 nt, Artificial Sequence
  Description of Artificial Sequence: Synthetic oligonucleotide
  Sense strand starting at position 3782 of SEQ ID NO: 1242805
uccuucuugugagcaggua

SEQ ID NO: 1374217 - RNA, 19 nt, Artificial Sequence
  Description of Artificial Sequence: Synthetic oligonucleotide
  Antisense strand to SEQ ID NO: 1374216
uaccugcucacaagaagga

SEQ ID NO: 1374218 - RNA, 19 nt, Artificial Sequence
  Description of Artificial Sequence: Synthetic oligonucleotide
  Sense strand starting at position 3823 of SEQ ID NO: 1242805
cgcaccuucucaucuguua

SEQ ID NO: 1374219 - RNA, 19 nt, Artificial Sequence
  Description of Artificial Sequence: Synthetic oligonucleotide
  Antisense strand to SEQ ID NO: 1374218
uaacagaugagaaggugcg

SEQ ID NO: 1374220 - RNA, 19 nt, Artificial Sequence
  Description of Artificial Sequence: Synthetic oligonucleotide
  Sense strand starting at position 3847 of SEQ ID NO: 1242805
cgcugugaggcuugacuua

SEQ ID NO: 1374221 - RNA, 19 nt, Artificial Sequence
  Description of Artificial Sequence: Synthetic oligonucleotide
  Antisense strand to SEQ ID NO: 1374220
uaagucaagccucacagcg

SEQ ID NO: 1374222 - RNA, 19 nt, Artificial Sequence
  Description of Artificial Sequence: Synthetic oligonucleotide
  Sense strand starting at position 75 of SEQ ID NO: 1242806
gagugaaugcgucagcucu

SEQ ID NO: 1374223 - RNA, 19 nt, Artificial Sequence
  Description of Artificial Sequence: Synthetic oligonucleotide
  Antisense strand to SEQ ID NO: 1374222
agagcugacgcauucacuc

SEQ ID NO: 1374224 - RNA, 19 nt, Artificial Sequence
  Description of Artificial Sequence: Synthetic oligonucleotide
  Sense strand starting at position 104 of SEQ ID NO: 1242806
gggcaaugcucugcacuga

SEQ ID NO: 1374225 - RNA, 19 nt, Artificial Sequence
  Description of Artificial Sequence: Synthetic oligonucleotide
  Antisense strand to SEQ ID NO: 1374224
ucagugcagagcauugccc

SEQ ID NO: 1374226 - RNA, 19 nt, Artificial Sequence
  Description of Artificial Sequence: Synthetic oligonucleotide
  Sense strand starting at position 322 of SEQ ID NO: 1242806
cauacaugucagcguggga

SEQ ID NO: 1374227 - RNA, 19 nt, Artificial Sequence
  Description of Artificial Sequence: Synthetic oligonucleotide
  Antisense strand to SEQ ID NO: 1374226
ucccacgcugacauguaug

SEQ ID NO: 1374228 - RNA, 19 nt, Artificial Sequence
  Description of Artificial Sequence: Synthetic oligonucleotide
  Sense strand starting at position 350 of SEQ ID NO: 1242806
caaggugagccuggucaaa

SEQ ID NO: 1374229 - RNA, 19 nt, Artificial Sequence
  Description of Artificial Sequence: Synthetic oligonucleotide
  Antisense strand to SEQ ID NO: 1374228
uuugaccaggcucaccuug

SEQ ID NO: 1374230 - RNA, 19 nt, Artificial Sequence
  Description of Artificial Sequence: Synthetic oligonucleotide
  Sense strand starting at position 352 of SEQ ID NO: 1242806
aggugagccuggucaaaug

SEQ ID NO: 1374231 - RNA, 19 nt, Artificial Sequence
  Description of Artificial Sequence: Synthetic oligonucleotide
  Antisense strand to SEQ ID NO: 1374230
cauuugaccaggcucaccu

SEQ ID NO: 1374232 - RNA, 19 nt, Artificial Sequence
  Description of Artificial Sequence: Synthetic oligonucleotide
  Sense strand starting at position 400 of SEQ ID NO: 1242806
ugagaaagguuccaauaau

SEQ ID NO: 1374233 - RNA, 19 nt, Artificial Sequence
  Description of Artificial Sequence: Synthetic oligonucleotide
  Antisense strand to SEQ ID NO: 1374232
auuauuggaaccuuucuca

SEQ ID NO: 1374234 - RNA, 19 nt, Artificial Sequence
  Description of Artificial Sequence: Synthetic oligonucleotide
  Sense strand starting at position 458 of SEQ ID NO: 1242806
gcagaagccugguucuaaa

SEQ ID NO: 1374235 - RNA, 19 nt, Artificial Sequence
  Description of Artificial Sequence: Synthetic oligonucleotide
  Antisense strand to SEQ ID NO: 1374234
uuuagaaccaggcuucugc

SEQ ID NO: 1374236 - RNA, 19 nt, Artificial Sequence
  Description of Artificial Sequence: Synthetic oligonucleotide
  Sense strand starting at position 884 of SEQ ID NO: 1242806
gugaguuugcuccauggaa

SEQ ID NO: 1374237 - RNA, 19 nt, Artificial Sequence
  Description of Artificial Sequence: Synthetic oligonucleotide
  Antisense strand to SEQ ID NO: 1374236
uuccauggagcaaacucac

SEQ ID NO: 1374238 - RNA, 19 nt, Artificial Sequence
  Description of Artificial Sequence: Synthetic oligonucleotide
  Sense strand starting at position 886 of SEQ ID NO: 1242806
gaguuugcuccauggaaau

SEQ ID NO: 1374239 - RNA, 19 nt, Artificial Sequence
  Description of Artificial Sequence: Synthetic oligonucleotide
  Antisense strand to SEQ ID NO: 1374238
auuuccauggagcaaacuc

SEQ ID NO: 1374240 - RNA, 19 nt, Artificial Sequence
  Description of Artificial Sequence: Synthetic oligonucleotide
  Sense strand starting at position 1123 of SEQ ID NO: 1242806
gugcauugucaggccaguu

SEQ ID NO: 1374241 - RNA, 19 nt, Artificial Sequence
  Description of Artificial Sequence: Synthetic oligonucleotide
  Antisense strand to SEQ ID NO: 1374240
aacuggccugacaaugcac

SEQ ID NO: 1374242 - RNA, 19 nt, Artificial Sequence
  Description of Artificial Sequence: Synthetic oligonucleotide
  Sense strand starting at position 1176 of SEQ ID NO: 1242806
cagguaggaugguuaauua

SEQ ID NO: 1374243 - RNA, 19 nt, Artificial Sequence
  Description of Artificial Sequence: Synthetic oligonucleotide
  Antisense strand to SEQ ID NO: 1374242
uaauuaaccauccuaccug

SEQ ID NO: 1374244 - RNA, 19 nt, Artificial Sequence
  Description of Artificial Sequence: Synthetic oligonucleotide
  Sense strand starting at position 1180 of SEQ ID NO: 1242806
uaggaugguuaauuaugua

SEQ ID NO: 1374245 - RNA, 19 nt, Artificial Sequence
  Description of Artificial Sequence: Synthetic oligonucleotide
  Antisense strand to SEQ ID NO: 1374244
uacauaauuaaccauccua

SEQ ID NO: 1374246 - RNA, 19 nt, Artificial Sequence
  Description of Artificial Sequence: Synthetic oligonucleotide
  Sense strand starting at position 1466 of SEQ ID NO: 1242806
cacauuaacgcuugaugga

SEQ ID NO: 1374247 - RNA, 19 nt, Artificial Sequence
  Description of Artificial Sequence: Synthetic oligonucleotide
  Antisense strand to SEQ ID NO: 1374246
uccaucaagcguuaaugug

SEQ ID NO: 1374248 - RNA, 19 nt, Artificial Sequence
  Description of Artificial Sequence: Synthetic oligonucleotide
  Sense strand starting at position 1467 of SEQ ID NO: 1242806
acauuaacgcuugauggaa

SEQ ID NO: 1374249 - RNA, 19 nt, Artificial Sequence
  Description of Artificial Sequence: Synthetic oligonucleotide
  Antisense strand to SEQ ID NO: 1374248
uuccaucaagcguuaaugu

SEQ ID NO: 1374250 - RNA, 19 nt, Artificial Sequence
  Description of Artificial Sequence: Synthetic oligonucleotide
  Sense strand starting at position 1789 of SEQ ID NO: 1242806
ugaugucaggcuugaggga

SEQ ID NO: 1374251 - RNA, 19 nt, Artificial Sequence
  Description of Artificial Sequence: Synthetic oligonucleotide
  Antisense strand to SEQ ID NO: 1374250
ucccucaagccugacauca

SEQ ID NO: 1374252 - RNA, 19 nt, Artificial Sequence
  Description of Artificial Sequence: Synthetic oligonucleotide
  Sense strand starting at position 1790 of SEQ ID NO: 1242806
gaugucaggcuugagggau

SEQ ID NO: 1374253 - RNA, 19 nt, Artificial Sequence
  Description of Artificial Sequence: Synthetic oligonucleotide
  Antisense strand to SEQ ID NO: 1374252
aucccucaagccugacauc

SEQ ID NO: 1374254 - RNA, 19 nt, Artificial Sequence
  Description of Artificial Sequence: Synthetic oligonucleotide
  Sense strand starting at position 1834 of SEQ ID NO: 1242806
ccuguuugugcccaaguca

SEQ ID NO: 1374255 - RNA, 19 nt, Artificial Sequence
  Description of Artificial Sequence: Synthetic oligonucleotide
  Antisense strand to SEQ ID NO: 1374254
ugacuugggcacaaacagg

SEQ ID NO: 1374256 - RNA, 19 nt, Artificial Sequence
  Description of Artificial Sequence: Synthetic oligonucleotide
  Sense strand starting at position 2020 of SEQ ID NO: 1242806
gccagagaucuguggcuuu

SEQ ID NO: 1374257 - RNA, 19 nt, Artificial Sequence
  Description of Artificial Sequence: Synthetic oligonucleotide
  Antisense strand to SEQ ID NO: 1374256
aaagccacagaucucuggc

SEQ ID NO: 1374258 - RNA, 19 nt, Artificial Sequence
  Description of Artificial Sequence: Synthetic oligonucleotide
  Sense strand starting at position 2135 of SEQ ID NO: 1242806
ggauguugccaaggaacca

SEQ ID NO: 1374259 - RNA, 19 nt, Artificial Sequence
  Description of Artificial Sequence: Synthetic oligonucleotide
  Antisense strand to SEQ ID NO: 1374258
ugguuccuuggcaacaucc

SEQ ID NO: 1374260 - RNA, 19 nt, Artificial Sequence
  Description of Artificial Sequence: Synthetic oligonucleotide
  Sense strand starting at position 2182 of SEQ ID NO: 1242806
ccauccuaggcuugucaua

SEQ ID NO: 1374261 - RNA, 19 nt, Artificial Sequence
  Description of Artificial Sequence: Synthetic oligonucleotide
  Antisense strand to SEQ ID NO: 1374260
uaugacaagccuaggaugg

SEQ ID NO: 1374262 - RNA, 19 nt, Artificial Sequence
  Description of Artificial Sequence: Synthetic oligonucleotide
  Sense strand starting at position 2184 of SEQ ID NO: 1242806
auccuaggcuugucauacu

SEQ ID NO: 1374263 - RNA, 19 nt, Artificial Sequence
  Description of Artificial Sequence: Synthetic oligonucleotide
  Antisense strand to SEQ ID NO: 1374262
aguaugacaagccuaggau

SEQ ID NO: 1374264 - RNA, 19 nt, Artificial Sequence
  Description of Artificial Sequence: Synthetic oligonucleotide
  Sense strand starting at position 2402 of SEQ ID NO: 1242806
cugacaagcucuucuuuga

SEQ ID NO: 1374265 - RNA, 19 nt, Artificial Sequence
  Description of Artificial Sequence: Synthetic oligonucleotide
  Antisense strand to SEQ ID NO: 1374264
ucaaagaagagcuugucag

SEQ ID NO: 1374266 - RNA, 19 nt, Artificial Sequence
  Description of Artificial Sequence: Synthetic oligonucleotide
  Sense strand starting at position 2409 of SEQ ID NO: 1242806
gcucuucuuugauccagag

SEQ ID NO: 1374267 - RNA, 19 nt, Artificial Sequence
  Description of Artificial Sequence: Synthetic oligonucleotide
  Antisense strand to SEQ ID NO: 1374266
cucuggaucaaagaagagc

SEQ ID NO: 1374268 - RNA, 19 nt, Artificial Sequence
  Description of Artificial Sequence: Synthetic oligonucleotide
  Sense strand starting at position 2425 of SEQ ID NO: 1242806
gagaaugccucgcccacau

SEQ ID NO: 1374269 - RNA, 19 nt, Artificial Sequence
  Description of Artificial Sequence: Synthetic oligonucleotide
  Antisense strand to SEQ ID NO: 1374268
augugggcgaggcauucuc

SEQ ID NO: 1374270 - RNA, 19 nt, Artificial Sequence
  Description of Artificial Sequence: Synthetic oligonucleotide
  Sense strand starting at position 2495 of SEQ ID NO: 1242806
cuuguugaucuaugcaucu

SEQ ID NO: 1374271 - RNA, 19 nt, Artificial Sequence
  Description of Artificial Sequence: Synthetic oligonucleotide
  Antisense strand to SEQ ID NO: 1374270
agaugcauagaucaacaag

SEQ ID NO: 1374272 - RNA, 19 nt, Artificial Sequence
  Description of Artificial Sequence: Synthetic oligonucleotide
  Sense strand starting at position 2552 of SEQ ID NO: 1242806
ggugcagggucugcugaaa

SEQ ID NO: 1374273 - RNA, 19 nt, Artificial Sequence
  Description of Artificial Sequence: Synthetic oligonucleotide
  Antisense strand to SEQ ID NO: 1374272
uuucagcagacccugcacc

SEQ ID NO: 1374274 - RNA, 19 nt, Artificial Sequence
  Description of Artificial Sequence: Synthetic oligonucleotide
  Sense strand starting at position 2631 of SEQ ID NO: 1242806
gguuauccacagcaucaga

SEQ ID NO: 1374275 - RNA, 19 nt, Artificial Sequence
  Description of Artificial Sequence: Synthetic oligonucleotide
  Antisense strand to SEQ ID NO: 1374274
ucugaugcuguggauaacc

SEQ ID NO: 1374276 - RNA, 19 nt, Artificial Sequence
  Description of Artificial Sequence: Synthetic oligonucleotide
  Sense strand starting at position 2669 of SEQ ID NO: 1242806
ccaccaugaugagcagaau

SEQ ID NO: 1374277 - RNA, 19 nt, Artificial Sequence
  Description of Artificial Sequence: Synthetic oligonucleotide
  Antisense strand to SEQ ID NO: 1374276
auucugcucaucauggugg

SEQ ID NO: 1374278 - RNA, 19 nt, Artificial Sequence
  Description of Artificial Sequence: Synthetic oligonucleotide
  Sense strand starting at position 2827 of SEQ ID NO: 1242806
ccgauaacucuguggcucu

SEQ ID NO: 1374279 - RNA, 19 nt, Artificial Sequence
  Description of Artificial Sequence: Synthetic oligonucleotide
  Antisense strand to SEQ ID NO: 1374278
agagccacagaguuaucgg

SEQ ID NO: 1374280 - RNA, 19 nt, Artificial Sequence
  Description of Artificial Sequence: Synthetic oligonucleotide
  Sense strand starting at position 2895 of SEQ ID NO: 1242806
gggccugaguucucuaucu

SEQ ID NO: 1374281 - RNA, 19 nt, Artificial Sequence
  Description of Artificial Sequence: Synthetic oligonucleotide
  Antisense strand to SEQ ID NO: 1374280
agauagagaacucaggccc

SEQ ID NO: 1374282 - RNA, 19 nt, Artificial Sequence
  Description of Artificial Sequence: Synthetic oligonucleotide
  Sense strand starting at position 2897 of SEQ ID NO: 1242806
gccugaguucucuaucugc

SEQ ID NO: 1374283 - RNA, 19 nt, Artificial Sequence
  Description of Artificial Sequence: Synthetic oligonucleotide
  Antisense strand to SEQ ID NO: 1374282
gcagauagagaacucaggc

SEQ ID NO: 1374284 - RNA, 19 nt, Artificial Sequence
  Description of Artificial Sequence: Synthetic oligonucleotide
  Sense strand starting at position 2917 of SEQ ID NO: 1242806
caaagagagcauugggcua

SEQ ID NO: 1374285 - RNA, 19 nt, Artificial Sequence
  Description of Artificial Sequence: Synthetic oligonucleotide
  Antisense strand to SEQ ID NO: 1374284
uagcccaaugcucucuuug

SEQ ID NO: 1374286 - RNA, 19 nt, Artificial Sequence
  Description of Artificial Sequence: Synthetic oligonucleotide
  Sense strand starting at position 3066 of SEQ ID NO: 1242806
ggcaacaaucccugagacu

SEQ ID NO: 1374287 - RNA, 19 nt, Artificial Sequence
  Description of Artificial Sequence: Synthetic oligonucleotide
  Antisense strand to SEQ ID NO: 1374286
agucucagggauuguugcc

SEQ ID NO: 1374288 - RNA, 19 nt, Artificial Sequence
  Description of Artificial Sequence: Synthetic oligonucleotide
  Sense strand starting at position 3067 of SEQ ID NO: 1242806
gcaacaaucccugagacuc

SEQ ID NO: 1374289 - RNA, 19 nt, Artificial Sequence
  Description of Artificial Sequence: Synthetic oligonucleotide
  Antisense strand to SEQ ID NO: 1374288
gagucucagggauuguugc

SEQ ID NO: 1374290 - RNA, 19 nt, Artificial Sequence
  Description of Artificial Sequence: Synthetic oligonucleotide
  Sense strand starting at position 3315 of SEQ ID NO: 1242806
gaggcuagauacuucuuga

SEQ ID NO: 1374291 - RNA, 19 nt, Artificial Sequence
  Description of Artificial Sequence: Synthetic oligonucleotide
  Antisense strand to SEQ ID NO: 1374290
ucaagaaguaucuagccuc

SEQ ID NO: 1374292 - RNA, 19 nt, Artificial Sequence
  Description of Artificial Sequence: Synthetic oligonucleotide
  Sense strand starting at position 3318 of SEQ ID NO: 1242806
gcuagauacuucuugaagu

SEQ ID NO: 1374293 - RNA, 19 nt, Artificial Sequence
  Description of Artificial Sequence: Synthetic oligonucleotide
  Antisense strand to SEQ ID NO: 1374292
acuucaagaaguaucuagc

SEQ ID NO: 1374294 - RNA, 19 nt, Artificial Sequence
  Description of Artificial Sequence: Synthetic oligonucleotide
  Sense strand starting at position 3364 of SEQ ID NO: 1242806
guccacucaugcucagaga

SEQ ID NO: 1374295 - RNA, 19 nt, Artificial Sequence
  Description of Artificial Sequence: Synthetic oligonucleotide
  Antisense strand to SEQ ID NO: 1374294
ucucugagcaugaguggac

SEQ ID NO: 1374296 - RNA, 19 nt, Artificial Sequence
  Description of Artificial Sequence: Synthetic oligonucleotide
  Sense strand starting at position 3365 of SEQ ID NO: 1242806
uccacucaugcucagagaa

SEQ ID NO: 1374297 - RNA, 19 nt, Artificial Sequence
  Description of Artificial Sequence: Synthetic oligonucleotide
  Antisense strand to SEQ ID NO: 1374296
uucucugagcaugagugga

SEQ ID NO: 1374298 - RNA, 19 nt, Artificial Sequence
  Description of Artificial Sequence: Synthetic oligonucleotide
  Sense strand starting at position 3981 of SEQ ID NO: 1242806
aagugaguuuauguccaua

SEQ ID NO: 1374299 - RNA, 19 nt, Artificial Sequence
  Description of Artificial Sequence: Synthetic oligonucleotide
  Antisense strand to SEQ ID NO: 1374298
uauggacauaaacucacuu

SEQ ID NO: 1374300 - RNA, 19 nt, Artificial Sequence
  Description of Artificial Sequence: Synthetic oligonucleotide
  Sense strand starting at position 3983 of SEQ ID NO: 1242806
gugaguuuauguccauagg

SEQ ID NO: 1374301 - RNA, 19 nt, Artificial Sequence
  Description of Artificial Sequence: Synthetic oligonucleotide
  Antisense strand to SEQ ID NO: 1374300
ccuauggacauaaacucac

SEQ ID NO: 1374302 - RNA, 19 nt, Artificial Sequence
  Description of Artificial Sequence: Synthetic oligonucleotide
  Sense strand starting at position 533 of SEQ ID NO: 1242807
aguaaauucugaguuuguu

SEQ ID NO: 1374303 - RNA, 19 nt, Artificial Sequence
  Description of Artificial Sequence: Synthetic oligonucleotide
  Antisense strand to SEQ ID NO: 1374302
aacaaacucagaauuuacu

SEQ ID NO: 1374304 - RNA, 19 nt, Artificial Sequence
  Description of Artificial Sequence: Synthetic oligonucleotide
  Sense strand starting at position 906 of SEQ ID NO: 1242807
auggaaaugguuuaugucu

SEQ ID NO: 1374305 - RNA, 19 nt, Artificial Sequence
  Description of Artificial Sequence: Synthetic oligonucleotide
  Antisense strand to SEQ ID NO: 1374304
agacauaaaccauuuccau

SEQ ID NO: 1374306 - RNA, 19 nt, Artificial Sequence
  Description of Artificial Sequence: Synthetic oligonucleotide
  Sense strand starting at position 919 of SEQ ID NO: 1242807
augucuuaacauggaugaa

SEQ ID NO: 1374307 - RNA, 19 nt, Artificial Sequence
  Description of Artificial Sequence: Synthetic oligonucleotide
  Antisense strand to SEQ ID NO: 1374306
uucauccauguuaagacau

SEQ ID NO: 1374308 - RNA, 19 nt, Artificial Sequence
  Description of Artificial Sequence: Synthetic oligonucleotide
  Sense strand starting at position 977 of SEQ ID NO: 1242807
ggcacaauuuacguaugua

SEQ ID NO: 1374309 - RNA, 19 nt, Artificial Sequence
  Description of Artificial Sequence: Synthetic oligonucleotide
  Antisense strand to SEQ ID NO: 1374308
uacauacguaaauugugcc

SEQ ID NO: 1374310 - RNA, 19 nt, Artificial Sequence
  Description of Artificial Sequence: Synthetic oligonucleotide
  Sense strand starting at position 1024 of SEQ ID NO: 1242807
uuagaagucuauccuguuu

SEQ ID NO: 1374311 - RNA, 19 nt, Artificial Sequence
  Description of Artificial Sequence: Synthetic oligonucleotide
  Antisense strand to SEQ ID NO: 1374310
aaacaggauagacuucuaa

SEQ ID NO: 1374312 - RNA, 19 nt, Artificial Sequence
  Description of Artificial Sequence: Synthetic oligonucleotide
  Sense strand starting at position 1029 of SEQ ID NO: 1242807
agucuauccuguuuccuua

SEQ ID NO: 1374313 - RNA, 19 nt, Artificial Sequence
  Description of Artificial Sequence: Synthetic oligonucleotide
  Antisense strand to SEQ ID NO: 1374312
uaaggaaacaggauagacu

SEQ ID NO: 1374314 - RNA, 19 nt, Artificial Sequence
  Description of Artificial Sequence: Synthetic oligonucleotide
  Sense strand starting at position 1060 of SEQ ID NO: 1242807
guugcaccauggucucaaa

SEQ ID NO: 1374315 - RNA, 19 nt, Artificial Sequence
  Description of Artificial Sequence: Synthetic oligonucleotide
  Antisense strand to SEQ ID NO: 1374314
uuugagaccauggugcaac

SEQ ID NO: 1374316 - RNA, 19 nt, Artificial Sequence
  Description of Artificial Sequence: Synthetic oligonucleotide
  Sense strand starting at position 1096 of SEQ ID NO: 1242807
gauguaaugcaacagacuu

SEQ ID NO: 1374317 - RNA, 19 nt, Artificial Sequence
  Description of Artificial Sequence: Synthetic oligonucleotide
  Antisense strand to SEQ ID NO: 1374316
aagucuguugcauuacauc

SEQ ID NO: 1374318 - RNA, 19 nt, Artificial Sequence
  Description of Artificial Sequence: Synthetic oligonucleotide
  Sense strand starting at position 1194 of SEQ ID NO: 1242807
augaguuucuggccucaag

SEQ ID NO: 1374319 - RNA, 19 nt, Artificial Sequence
  Description of Artificial Sequence: Synthetic oligonucleotide
  Antisense strand to SEQ ID NO: 1374318
cuugaggccagaaacucau

SEQ ID NO: 1374320 - RNA, 19 nt, Artificial Sequence
  Description of Artificial Sequence: Synthetic oligonucleotide
  Sense strand starting at position 1276 of SEQ ID NO: 1242807
agagaaaucucagcuucua

SEQ ID NO: 1374321 - RNA, 19 nt, Artificial Sequence
  Description of Artificial Sequence: Synthetic oligonucleotide
  Antisense strand to SEQ ID NO: 1374320
uagaagcugagauuucucu

SEQ ID NO: 1374322 - RNA, 19 nt, Artificial Sequence
  Description of Artificial Sequence: Synthetic oligonucleotide
  Sense strand starting at position 1399 of SEQ ID NO: 1242807
acucuauggcccugagagu

SEQ ID NO: 1374323 - RNA, 19 nt, Artificial Sequence
  Description of Artificial Sequence: Synthetic oligonucleotide
  Antisense strand to SEQ ID NO: 1374322
acucucagggccauagagu

SEQ ID NO: 1374324 - RNA, 19 nt, Artificial Sequence
  Description of Artificial Sequence: Synthetic oligonucleotide
  Sense strand starting at position 1408 of SEQ ID NO: 1242807
cccugagaguccucaaccu

SEQ ID NO: 1374325 - RNA, 19 nt, Artificial Sequence
  Description of Artificial Sequence: Synthetic oligonucleotide
  Antisense strand to SEQ ID NO: 1374324
agguugaggacucucaggg

SEQ ID NO: 1374326 - RNA, 19 nt, Artificial Sequence
  Description of Artificial Sequence: Synthetic oligonucleotide
  Sense strand starting at position 1467 of SEQ ID NO: 1242807
uggcuuagaguuuagcuga

SEQ ID NO: 1374327 - RNA, 19 nt, Artificial Sequence
  Description of Artificial Sequence: Synthetic oligonucleotide
  Antisense strand to SEQ ID NO: 1374326
ucagcuaaacucuaagcca

SEQ ID NO: 1374328 - RNA, 19 nt, Artificial Sequence
  Description of Artificial Sequence: Synthetic oligonucleotide
  Sense strand starting at position 1472 of SEQ ID NO: 1242807
uagaguuuagcugagcaca

SEQ ID NO: 1374329 - RNA, 19 nt, Artificial Sequence
  Description of Artificial Sequence: Synthetic oligonucleotide
  Antisense strand to SEQ ID NO: 1374328
ugugcucagcuaaacucua

SEQ ID NO: 1374330 - RNA, 19 nt, Artificial Sequence
  Description of Artificial Sequence: Synthetic oligonucleotide
  Sense strand starting at position 1474 of SEQ ID NO: 1242807
gaguuuagcugagcacaca

SEQ ID NO: 1374331 - RNA, 19 nt, Artificial Sequence
  Description of Artificial Sequence: Synthetic oligonucleotide
  Antisense strand to SEQ ID NO: 1374330
ugugugcucagcuaaacuc

SEQ ID NO: 1374332 - RNA, 19 nt, Artificial Sequence
  Description of Artificial Sequence: Synthetic oligonucleotide
  Sense strand starting at position 1490 of SEQ ID NO: 1242807
acagcaaaugcucgacaca

SEQ ID NO: 1374333 - RNA, 19 nt, Artificial Sequence
  Description of Artificial Sequence: Synthetic oligonucleotide
  Antisense strand to SEQ ID NO: 1374332
ugugucgagcauuugcugu

SEQ ID NO: 1374334 - RNA, 19 nt, Artificial Sequence
  Description of Artificial Sequence: Synthetic oligonucleotide
  Sense strand starting at position 1493 of SEQ ID NO: 1242807
gcaaaugcucgacacauaa

SEQ ID NO: 1374335 - RNA, 19 nt, Artificial Sequence
  Description of Artificial Sequence: Synthetic oligonucleotide
  Antisense strand to SEQ ID NO: 1374334
uuaugugucgagcauuugc

SEQ ID NO: 1374336 - RNA, 19 nt, Artificial Sequence
  Description of Artificial Sequence: Synthetic oligonucleotide
  Sense strand starting at position 1543 of SEQ ID NO: 1242807
cucggagcugacuggaaau

SEQ ID NO: 1374337 - RNA, 19 nt, Artificial Sequence
  Description of Artificial Sequence: Synthetic oligonucleotide
  Antisense strand to SEQ ID NO: 1374336
auuuccagucagcuccgag

SEQ ID NO: 1374338 - RNA, 19 nt, Artificial Sequence
  Description of Artificial Sequence: Synthetic oligonucleotide
  Sense strand starting at position 2009 of SEQ ID NO: 1242807
uugagacgguuccuagcaa

SEQ ID NO: 1374339 - RNA, 19 nt, Artificial Sequence
  Description of Artificial Sequence: Synthetic oligonucleotide
  Antisense strand to SEQ ID NO: 1374338
uugcuaggaaccgucucaa

SEQ ID NO: 1374340 - RNA, 19 nt, Artificial Sequence
  Description of Artificial Sequence: Synthetic oligonucleotide
  Sense strand starting at position 2081 of SEQ ID NO: 1242807
gggaguggcucaguucgaa

SEQ ID NO: 1374341 - RNA, 19 nt, Artificial Sequence
  Description of Artificial Sequence: Synthetic oligonucleotide
  Antisense strand to SEQ ID NO: 1374340
uucgaacugagccacuccc

SEQ ID NO: 1374342 - RNA, 19 nt, Artificial Sequence
  Description of Artificial Sequence: Synthetic oligonucleotide
  Sense strand starting at position 2119 of SEQ ID NO: 1242807
cgauccuccagaugaaagu

SEQ ID NO: 1374343 - RNA, 19 nt, Artificial Sequence
  Description of Artificial Sequence: Synthetic oligonucleotide
  Antisense strand to SEQ ID NO: 1374342
acuuucaucuggaggaucg

SEQ ID NO: 1374344 - RNA, 19 nt, Artificial Sequence
  Description of Artificial Sequence: Synthetic oligonucleotide
  Sense strand starting at position 2826 of SEQ ID NO: 1242807
uaaugagagugccuguaaa

SEQ ID NO: 1374345 - RNA, 19 nt, Artificial Sequence
  Description of Artificial Sequence: Synthetic oligonucleotide
  Antisense strand to SEQ ID NO: 1374344
uuuacaggcacucucauua

SEQ ID NO: 1374346 - RNA, 19 nt, Artificial Sequence
  Description of Artificial Sequence: Synthetic oligonucleotide
  Sense strand starting at position 2872 of SEQ ID NO: 1242807
auggcagucgauuagaaag

SEQ ID NO: 1374347 - RNA, 19 nt, Artificial Sequence
  Description of Artificial Sequence: Synthetic oligonucleotide
  Antisense strand to SEQ ID NO: 1374346
cuuucuaaucgacugccau

SEQ ID NO: 1374348 - RNA, 19 nt, Artificial Sequence
  Description of Artificial Sequence: Synthetic oligonucleotide
  Sense strand starting at position 2878 of SEQ ID NO: 1242807
gucgauuagaaaggcaauu

SEQ ID NO: 1374349 - RNA, 19 nt, Artificial Sequence
  Description of Artificial Sequence: Synthetic oligonucleotide
  Antisense strand to SEQ ID NO: 1374348
aauugccuuucuaaucgac

SEQ ID NO: 1374350 - RNA, 19 nt, Artificial Sequence
  Description of Artificial Sequence: Synthetic oligonucleotide
  Sense strand starting at position 2928 of SEQ ID NO: 1242807
uggaguauccuauguuucu

SEQ ID NO: 1374351 - RNA, 19 nt, Artificial Sequence
  Description of Artificial Sequence: Synthetic oligonucleotide
  Antisense strand to SEQ ID NO: 1374350
agaaacauaggauacucca

SEQ ID NO: 1374352 - RNA, 19 nt, Artificial Sequence
  Description of Artificial Sequence: Synthetic oligonucleotide
  Sense strand starting at position 2929 of SEQ ID NO: 1242807
ggaguauccuauguuucua

SEQ ID NO: 1374353 - RNA, 19 nt, Artificial Sequence
  Description of Artificial Sequence: Synthetic oligonucleotide
  Antisense strand to SEQ ID NO: 1374352
uagaaacauaggauacucc

SEQ ID NO: 1374354 - RNA, 19 nt, Artificial Sequence
  Description of Artificial Sequence: Synthetic oligonucleotide
  Sense strand starting at position 2971 of SEQ ID NO: 1242807
aaacgaauucugugaugau

SEQ ID NO: 1374355 - RNA, 19 nt, Artificial Sequence
  Description of Artificial Sequence: Synthetic oligonucleotide
  Antisense strand to SEQ ID NO: 1374354
aucaucacagaauucguuu

SEQ ID NO: 1374356 - RNA, 19 nt, Artificial Sequence
  Description of Artificial Sequence: Synthetic oligonucleotide
  Sense strand starting at position 2991 of SEQ ID NO: 1242807
aggaucaaucggcacuauu

SEQ ID NO: 1374357 - RNA, 19 nt, Artificial Sequence
  Description of Artificial Sequence: Synthetic oligonucleotide
  Antisense strand to SEQ ID NO: 1374356
aauagugccgauugauccu

SEQ ID NO: 1374358 - RNA, 19 nt, Artificial Sequence
  Description of Artificial Sequence: Synthetic oligonucleotide
  Sense strand starting at position 3011 of SEQ ID NO: 1242807
uagucucuacgugaucuaa

SEQ ID NO: 1374359 - RNA, 19 nt, Artificial Sequence
  Description of Artificial Sequence: Synthetic oligonucleotide
  Antisense strand to SEQ ID NO: 1374358
uuagaucacguagagacua

SEQ ID NO: 1374360 - RNA, 19 nt, Artificial Sequence
  Description of Artificial Sequence: Synthetic oligonucleotide
  Sense strand starting at position 3063 of SEQ ID NO: 1242807
gucccagcacuuuggaauu

SEQ ID NO: 1374361 - RNA, 19 nt, Artificial Sequence
  Description of Artificial Sequence: Synthetic oligonucleotide
  Antisense strand to SEQ ID NO: 1374360
aauuccaaagugcugggac

SEQ ID NO: 1374362 - RNA, 19 nt, Artificial Sequence
  Description of Artificial Sequence: Synthetic oligonucleotide
  Sense strand starting at position 3077 of SEQ ID NO: 1242807
gaauuccaaguuugguuaa

SEQ ID NO: 1374363 - RNA, 19 nt, Artificial Sequence
  Description of Artificial Sequence: Synthetic oligonucleotide
  Antisense strand to SEQ ID NO: 1374362
uuaaccaaacuuggaauuc

SEQ ID NO: 1374364 - RNA, 19 nt, Artificial Sequence
  Description of Artificial Sequence: Synthetic oligonucleotide
  Sense strand starting at position 3138 of SEQ ID NO: 1242807
acagauugcucuuccuaug

SEQ ID NO: 1374365 - RNA, 19 nt, Artificial Sequence
  Description of Artificial Sequence: Synthetic oligonucleotide
  Antisense strand to SEQ ID NO: 1374364
cauaggaagagcaaucugu

SEQ ID NO: 1374366 - RNA, 19 nt, Artificial Sequence
  Description of Artificial Sequence: Synthetic oligonucleotide
  Sense strand starting at position 3290 of SEQ ID NO: 1242807
cugaaaccugcugguuuaa

SEQ ID NO: 1374367 - RNA, 19 nt, Artificial Sequence
  Description of Artificial Sequence: Synthetic oligonucleotide
  Antisense strand to SEQ ID NO: 1374366
uuaaaccagcagguuucag

SEQ ID NO: 1374368 - RNA, 19 nt, Artificial Sequence
  Description of Artificial Sequence: Synthetic oligonucleotide
  Sense strand starting at position 3308 of SEQ ID NO: 1242807
aaaccacauccguggucau

SEQ ID NO: 1374369 - RNA, 19 nt, Artificial Sequence
  Description of Artificial Sequence: Synthetic oligonucleotide
  Antisense strand to SEQ ID NO: 1374368
augaccacggaugugguuu

SEQ ID NO: 1374370 - RNA, 19 nt, Artificial Sequence
  Description of Artificial Sequence: Synthetic oligonucleotide
  Sense strand starting at position 3371 of SEQ ID NO: 1242807
agugcagauugauccugau

SEQ ID NO: 1374371 - RNA, 19 nt, Artificial Sequence
  Description of Artificial Sequence: Synthetic oligonucleotide
  Antisense strand to SEQ ID NO: 1374370
aucaggaucaaucugcacu

SEQ ID NO: 1374372 - RNA, 19 nt, Artificial Sequence
  Description of Artificial Sequence: Synthetic oligonucleotide
  Sense strand starting at position 3413 of SEQ ID NO: 1242807
cggauucugaaugguggua

SEQ ID NO: 1374373 - RNA, 19 nt, Artificial Sequence
  Description of Artificial Sequence: Synthetic oligonucleotide
  Antisense strand to SEQ ID NO: 1374372
uaccaccauucagaauccg

SEQ ID NO: 1374374 - RNA, 19 nt, Artificial Sequence
  Description of Artificial Sequence: Synthetic oligonucleotide
  Sense strand starting at position 3569 of SEQ ID NO: 1242807
cuuccaucccuuuguagua

SEQ ID NO: 1374375 - RNA, 19 nt, Artificial Sequence
  Description of Artificial Sequence: Synthetic oligonucleotide
  Antisense strand to SEQ ID NO: 1374374
uacuacaaagggauggaag

SEQ ID NO: 1374376 - RNA, 19 nt, Artificial Sequence
  Description of Artificial Sequence: Synthetic oligonucleotide
  Sense strand starting at position 3619 of SEQ ID NO: 1242807
cugcuacgucuguaaauuu

SEQ ID NO: 1374377 - RNA, 19 nt, Artificial Sequence
  Description of Artificial Sequence: Synthetic oligonucleotide
  Antisense strand to SEQ ID NO: 1374376
aaauuuacagacguagcag

SEQ ID NO: 1374378 - RNA, 19 nt, Artificial Sequence
  Description of Artificial Sequence: Synthetic oligonucleotide
  Sense strand starting at position 3754 of SEQ ID NO: 1242807
acuauuuacuguuacaagu

SEQ ID NO: 1374379 - RNA, 19 nt, Artificial Sequence
  Description of Artificial Sequence: Synthetic oligonucleotide
  Antisense strand to SEQ ID NO: 1374378
acuuguaacaguaaauagu

SEQ ID NO: 1374380 - RNA, 19 nt, Artificial Sequence
  Description of Artificial Sequence: Synthetic oligonucleotide
  Sense strand starting at position 3776 of SEQ ID NO: 1242807
augauaggcauugggagua

SEQ ID NO: 1374381 - RNA, 19 nt, Artificial Sequence
  Description of Artificial Sequence: Synthetic oligonucleotide
  Antisense strand to SEQ ID NO: 1374380
uacucccaaugccuaucau

SEQ ID NO: 1374382 - RNA, 19 nt, Artificial Sequence
  Description of Artificial Sequence: Synthetic oligonucleotide
  Sense strand starting at position 174 of SEQ ID NO: 1242808
cauggucuuguuggaagau

SEQ ID NO: 1374383 - RNA, 19 nt, Artificial Sequence
  Description of Artificial Sequence: Synthetic oligonucleotide
  Antisense strand to SEQ ID NO: 1374382
aucuuccaacaagaccaug

SEQ ID NO: 1374384 - RNA, 19 nt, Artificial Sequence
  Description of Artificial Sequence: Synthetic oligonucleotide
  Sense strand starting at position 175 of SEQ ID NO: 1242808
auggucuuguuggaagauu

SEQ ID NO: 1374385 - RNA, 19 nt, Artificial Sequence
  Description of Artificial Sequence: Synthetic oligonucleotide
  Antisense strand to SEQ ID NO: 1374384
aaucuuccaacaagaccau

SEQ ID NO: 1374386 - RNA, 19 nt, Artificial Sequence
  Description of Artificial Sequence: Synthetic oligonucleotide
  Sense strand starting at position 192 of SEQ ID NO: 1242808
uuuccuauccuugguuuga

SEQ ID NO: 1374387 - RNA, 19 nt, Artificial Sequence
  Description of Artificial Sequence: Synthetic oligonucleotide
  Antisense strand to SEQ ID NO: 1374386
ucaaaccaaggauaggaaa

SEQ ID NO: 1374388 - RNA, 19 nt, Artificial Sequence
  Description of Artificial Sequence: Synthetic oligonucleotide
  Sense strand starting at position 221 of SEQ ID NO: 1242808
acauuaacucucuggguuu

SEQ ID NO: 1374389 - RNA, 19 nt, Artificial Sequence
  Description of Artificial Sequence: Synthetic oligonucleotide
  Antisense strand to SEQ ID NO: 1374388
aaacccagagaguuaaugu

SEQ ID NO: 1374390 - RNA, 19 nt, Artificial Sequence
  Description of Artificial Sequence: Synthetic oligonucleotide
  Sense strand starting at position 265 of SEQ ID NO: 1242808
ggcaguguccuugagucua

SEQ ID NO: 1374391 - RNA, 19 nt, Artificial Sequence
  Description of Artificial Sequence: Synthetic oligonucleotide
  Antisense strand to SEQ ID NO: 1374390
uagacucaaggacacugcc

SEQ ID NO: 1374392 - RNA, 19 nt, Artificial Sequence
  Description of Artificial Sequence: Synthetic oligonucleotide
  Sense strand starting at position 273 of SEQ ID NO: 1242808
ccuugagucuacucagcca

SEQ ID NO: 1374393 - RNA, 19 nt, Artificial Sequence
  Description of Artificial Sequence: Synthetic oligonucleotide
  Antisense strand to SEQ ID NO: 1374392
uggcugaguagacucaagg

SEQ ID NO: 1374394 - RNA, 19 nt, Artificial Sequence
  Description of Artificial Sequence: Synthetic oligonucleotide
  Sense strand starting at position 276 of SEQ ID NO: 1242808
ugagucuacucagccaauu

SEQ ID NO: 1374395 - RNA, 19 nt, Artificial Sequence
  Description of Artificial Sequence: Synthetic oligonucleotide
  Antisense strand to SEQ ID NO: 1374394
aauuggcugaguagacuca

SEQ ID NO: 1374396 - RNA, 19 nt, Artificial Sequence
  Description of Artificial Sequence: Synthetic oligonucleotide
  Sense strand starting at position 288 of SEQ ID NO: 1242808
gccaauuguccaugcaucu

SEQ ID NO: 1374397 - RNA, 19 nt, Artificial Sequence
  Description of Artificial Sequence: Synthetic oligonucleotide
  Antisense strand to SEQ ID NO: 1374396
agaugcauggacaauuggc

SEQ ID NO: 1374398 - RNA, 19 nt, Artificial Sequence
  Description of Artificial Sequence: Synthetic oligonucleotide
  Sense strand starting at position 374 of SEQ ID NO: 1242808
gggaggucugaggacguau

SEQ ID NO: 1374399 - RNA, 19 nt, Artificial Sequence
  Description of Artificial Sequence: Synthetic oligonucleotide
  Antisense strand to SEQ ID NO: 1374398
auacguccucagaccuccc

SEQ ID NO: 1374400 - RNA, 19 nt, Artificial Sequence
  Description of Artificial Sequence: Synthetic oligonucleotide
  Sense strand starting at position 848 of SEQ ID NO: 1242808
gggagagcugucugaacug

SEQ ID NO: 1374401 - RNA, 19 nt, Artificial Sequence
  Description of Artificial Sequence: Synthetic oligonucleotide
  Antisense strand to SEQ ID NO: 1374400
caguucagacagcucuccc

SEQ ID NO: 1374402 - RNA, 19 nt, Artificial Sequence
  Description of Artificial Sequence: Synthetic oligonucleotide
  Sense strand starting at position 1240 of SEQ ID NO: 1242808
accagaaccucugagcaaa

SEQ ID NO: 1374403 - RNA, 19 nt, Artificial Sequence
  Description of Artificial Sequence: Synthetic oligonucleotide
  Antisense strand to SEQ ID NO: 1374402
uuugcucagagguucuggu

SEQ ID NO: 1374404 - RNA, 19 nt, Artificial Sequence
  Description of Artificial Sequence: Synthetic oligonucleotide
  Sense strand starting at position 1346 of SEQ ID NO: 1242808
gguuucggcgccuugugaa

SEQ ID NO: 1374405 - RNA, 19 nt, Artificial Sequence
  Description of Artificial Sequence: Synthetic oligonucleotide
  Antisense strand to SEQ ID NO: 1374404
uucacaaggcgccgaaacc

SEQ ID NO: 1374406 - RNA, 19 nt, Artificial Sequence
  Description of Artificial Sequence: Synthetic oligonucleotide
  Sense strand starting at position 1652 of SEQ ID NO: 1242808
agggucugcaagggaauua

SEQ ID NO: 1374407 - RNA, 19 nt, Artificial Sequence
  Description of Artificial Sequence: Synthetic oligonucleotide
  Antisense strand to SEQ ID NO: 1374406
uaauucccuugcagacccu

SEQ ID NO: 1374408 - RNA, 19 nt, Artificial Sequence
  Description of Artificial Sequence: Synthetic oligonucleotide
  Sense strand starting at position 2251 of SEQ ID NO: 1242808
gugucaaccaggcgucuau

SEQ ID NO: 1374409 - RNA, 19 nt, Artificial Sequence
  Description of Artificial Sequence: Synthetic oligonucleotide
  Antisense strand to SEQ ID NO: 1374408
auagacgccugguugacac

SEQ ID NO: 1374410 - RNA, 19 nt, Artificial Sequence
  Description of Artificial Sequence: Synthetic oligonucleotide
  Sense strand starting at position 2255 of SEQ ID NO: 1242808
caaccaggcgucuauuaau

SEQ ID NO: 1374411 - RNA, 19 nt, Artificial Sequence
  Description of Artificial Sequence: Synthetic oligonucleotide
  Antisense strand to SEQ ID NO: 1374410
auuaauagacgccugguug

SEQ ID NO: 1374412 - RNA, 19 nt, Artificial Sequence
  Description of Artificial Sequence: Synthetic oligonucleotide
  Sense strand starting at position 2264 of SEQ ID NO: 1242808
gucuauuaauagcaggaca

SEQ ID NO: 1374413 - RNA, 19 nt, Artificial Sequence
  Description of Artificial Sequence: Synthetic oligonucleotide
  Antisense strand to SEQ ID NO: 1374412
uguccugcuauuaauagac

SEQ ID NO: 1374414 - RNA, 19 nt, Artificial Sequence
  Description of Artificial Sequence: Synthetic oligonucleotide
  Sense strand starting at position 2294 of SEQ ID NO: 1242808
ucggcuuccugagcaaauc

SEQ ID NO: 1374415 - RNA, 19 nt, Artificial Sequence
  Description of Artificial Sequence: Synthetic oligonucleotide
  Antisense strand to SEQ ID NO: 1374414
gauuugcucaggaagccga

SEQ ID NO: 1374416 - RNA, 19 nt, Artificial Sequence
  Description of Artificial Sequence: Synthetic oligonucleotide
  Sense strand starting at position 2506 of SEQ ID NO: 1242808
gucacugaacugugacuga

SEQ ID NO: 1374417 - RNA, 19 nt, Artificial Sequence
  Description of Artificial Sequence: Synthetic oligonucleotide
  Antisense strand to SEQ ID NO: 1374416
ucagucacaguucagugac

SEQ ID NO: 1374418 - RNA, 19 nt, Artificial Sequence
  Description of Artificial Sequence: Synthetic oligonucleotide
  Sense strand starting at position 2510 of SEQ ID NO: 1242808
cugaacugugacugagacu

SEQ ID NO: 1374419 - RNA, 19 nt, Artificial Sequence
  Description of Artificial Sequence: Synthetic oligonucleotide
  Antisense strand to SEQ ID NO: 1374418
agucucagucacaguucag

SEQ ID NO: 1374420 - RNA, 19 nt, Artificial Sequence
  Description of Artificial Sequence: Synthetic oligonucleotide
  Sense strand starting at position 2813 of SEQ ID NO: 1242808
ccgggaugcugguuuacga

SEQ ID NO: 1374421 - RNA, 19 nt, Artificial Sequence
  Description of Artificial Sequence: Synthetic oligonucleotide
  Antisense strand to SEQ ID NO: 1374420
ucguaaaccagcaucccgg

SEQ ID NO: 1374422 - RNA, 19 nt, Artificial Sequence
  Description of Artificial Sequence: Synthetic oligonucleotide
  Sense strand starting at position 2817 of SEQ ID NO: 1242808
gaugcugguuuacgaaaca

SEQ ID NO: 1374423 - RNA, 19 nt, Artificial Sequence
  Description of Artificial Sequence: Synthetic oligonucleotide
  Antisense strand to SEQ ID NO: 1374422
uguuucguaaaccagcauc

SEQ ID NO: 1374424 - RNA, 19 nt, Artificial Sequence
  Description of Artificial Sequence: Synthetic oligonucleotide
  Sense strand starting at position 2856 of SEQ ID NO: 1242808
ggcagcaaugcugguuuau

SEQ ID NO: 1374425 - RNA, 19 nt, Artificial Sequence
  Description of Artificial Sequence: Synthetic oligonucleotide
  Antisense strand to SEQ ID NO: 1374424
auaaaccagcauugcugcc

SEQ ID NO: 1374426 - RNA, 19 nt, Artificial Sequence
  Description of Artificial Sequence: Synthetic oligonucleotide
  Sense strand starting at position 2858 of SEQ ID NO: 1242808
cagcaaugcugguuuauuc

SEQ ID NO: 1374427 - RNA, 19 nt, Artificial Sequence
  Description of Artificial Sequence: Synthetic oligonucleotide
  Antisense strand to SEQ ID NO: 1374426
gaauaaaccagcauugcug

SEQ ID NO: 1374428 - RNA, 19 nt, Artificial Sequence
  Description of Artificial Sequence: Synthetic oligonucleotide
  Sense strand starting at position 3023 of SEQ ID NO: 1242808
gugguuuccugaggcccaa

SEQ ID NO: 1374429 - RNA, 19 nt, Artificial Sequence
  Description of Artificial Sequence: Synthetic oligonucleotide
  Antisense strand to SEQ ID NO: 1374428
uugggccucaggaaaccac

SEQ ID NO: 1374430 - RNA, 19 nt, Artificial Sequence
  Description of Artificial Sequence: Synthetic oligonucleotide
  Sense strand starting at position 3102 of SEQ ID NO: 1242808
ugagcuccuuucucagaga

SEQ ID NO: 1374431 - RNA, 19 nt, Artificial Sequence
  Description of Artificial Sequence: Synthetic oligonucleotide
  Antisense strand to SEQ ID NO: 1374430
ucucugagaaaggagcuca

SEQ ID NO: 1374432 - RNA, 19 nt, Artificial Sequence
  Description of Artificial Sequence: Synthetic oligonucleotide
  Sense strand starting at position 3105 of SEQ ID NO: 1242808
gcuccuuucucagagaacu

SEQ ID NO: 1374433 - RNA, 19 nt, Artificial Sequence
  Description of Artificial Sequence: Synthetic oligonucleotide
  Antisense strand to SEQ ID NO: 1374432
aguucucugagaaaggagc

SEQ ID NO: 1374434 - RNA, 19 nt, Artificial Sequence
  Description of Artificial Sequence: Synthetic oligonucleotide
  Sense strand starting at position 3633 of SEQ ID NO: 1242808
ggguccuggucagaaggua

SEQ ID NO: 1374435 - RNA, 19 nt, Artificial Sequence
  Description of Artificial Sequence: Synthetic oligonucleotide
  Antisense strand to SEQ ID NO: 1374434
uaccuucugaccaggaccc

SEQ ID NO: 1374436 - RNA, 19 nt, Artificial Sequence
  Description of Artificial Sequence: Synthetic oligonucleotide
  Sense strand starting at position 3728 of SEQ ID NO: 1242808
gggcacugcuucugucaca

SEQ ID NO: 1374437 - RNA, 19 nt, Artificial Sequence
  Description of Artificial Sequence: Synthetic oligonucleotide
  Antisense strand to SEQ ID NO: 1374436
ugugacagaagcagugccc

SEQ ID NO: 1374438 - RNA, 19 nt, Artificial Sequence
  Description of Artificial Sequence: Synthetic oligonucleotide
  Sense strand starting at position 3820 of SEQ ID NO: 1242808
ccgugaucacuggaugcaa

SEQ ID NO: 1374439 - RNA, 19 nt, Artificial Sequence
  Description of Artificial Sequence: Synthetic oligonucleotide
  Antisense strand to SEQ ID NO: 1374438
uugcauccagugaucacgg

SEQ ID NO: 1374440 - RNA, 19 nt, Artificial Sequence
  Description of Artificial Sequence: Synthetic oligonucleotide
  Sense strand starting at position 306 of SEQ ID NO: 1242809
ccucaacuagcauguauga

SEQ ID NO: 1374441 - RNA, 19 nt, Artificial Sequence
  Description of Artificial Sequence: Synthetic oligonucleotide
  Antisense strand to SEQ ID NO: 1374440
ucauacaugcuaguugagg

SEQ ID NO: 1374442 - RNA, 19 nt, Artificial Sequence
  Description of Artificial Sequence: Synthetic oligonucleotide
  Sense strand starting at position 444 of SEQ ID NO: 1242809
guuggagacuuccuuaaau

SEQ ID NO: 1374443 - RNA, 19 nt, Artificial Sequence
  Description of Artificial Sequence: Synthetic oligonucleotide
  Antisense strand to SEQ ID NO: 1374442
auuuaaggaagucuccaac

SEQ ID NO: 1374444 - RNA, 19 nt, Artificial Sequence
  Description of Artificial Sequence: Synthetic oligonucleotide
  Sense strand starting at position 474 of SEQ ID NO: 1242809
acaguuuaggugugccaga

SEQ ID NO: 1374445 - RNA, 19 nt, Artificial Sequence
  Description of Artificial Sequence: Synthetic oligonucleotide
  Antisense strand to SEQ ID NO: 1374444
ucuggcacaccuaaacugu

SEQ ID NO: 1374446 - RNA, 19 nt, Artificial Sequence
  Description of Artificial Sequence: Synthetic oligonucleotide
  Sense strand starting at position 479 of SEQ ID NO: 1242809
uuaggugugccagacuaua

SEQ ID NO: 1374447 - RNA, 19 nt, Artificial Sequence
  Description of Artificial Sequence: Synthetic oligonucleotide
  Antisense strand to SEQ ID NO: 1374446
uauagucuggcacaccuaa

SEQ ID NO: 1374448 - RNA, 19 nt, Artificial Sequence
  Description of Artificial Sequence: Synthetic oligonucleotide
  Sense strand starting at position 501 of SEQ ID NO: 1242809
aucauugcugcuuaauguu

SEQ ID NO: 1374449 - RNA, 19 nt, Artificial Sequence
  Description of Artificial Sequence: Synthetic oligonucleotide
  Antisense strand to SEQ ID NO: 1374448
aacauuaagcagcaaugau

SEQ ID NO: 1374450 - RNA, 19 nt, Artificial Sequence
  Description of Artificial Sequence: Synthetic oligonucleotide
  Sense strand starting at position 514 of SEQ ID NO: 1242809
aauguuaguugugcuuuau

SEQ ID NO: 1374451 - RNA, 19 nt, Artificial Sequence
  Description of Artificial Sequence: Synthetic oligonucleotide
  Antisense strand to SEQ ID NO: 1374450
auaaagcacaacuaacauu

SEQ ID NO: 1374452 - RNA, 19 nt, Artificial Sequence
  Description of Artificial Sequence: Synthetic oligonucleotide
  Sense strand starting at position 609 of SEQ ID NO: 1242809
gcagcagaauauuagagaa

SEQ ID NO: 1374453 - RNA, 19 nt, Artificial Sequence
  Description of Artificial Sequence: Synthetic oligonucleotide
  Antisense strand to SEQ ID NO: 1374452
uucucuaauauucugcugc

SEQ ID NO: 1374454 - RNA, 19 nt, Artificial Sequence
  Description of Artificial Sequence: Synthetic oligonucleotide
  Sense strand starting at position 611 of SEQ ID NO: 1242809
agcagaauauuagagaaug

SEQ ID NO: 1374455 - RNA, 19 nt, Artificial Sequence
  Description of Artificial Sequence: Synthetic oligonucleotide
  Antisense strand to SEQ ID NO: 1374454
cauucucuaauauucugcu

SEQ ID NO: 1374456 - RNA, 19 nt, Artificial Sequence
  Description of Artificial Sequence: Synthetic oligonucleotide
  Sense strand starting at position 619 of SEQ ID NO: 1242809
auuagagaauguucugggu

SEQ ID NO: 1374457 - RNA, 19 nt, Artificial Sequence
  Description of Artificial Sequence: Synthetic oligonucleotide
  Antisense strand to SEQ ID NO: 1374456
acccagaacauucucuaau

SEQ ID NO: 1374458 - RNA, 19 nt, Artificial Sequence
  Description of Artificial Sequence: Synthetic oligonucleotide
  Sense strand starting at position 623 of SEQ ID NO: 1242809
gagaauguucuggguguua

SEQ ID NO: 1374459 - RNA, 19 nt, Artificial Sequence
  Description of Artificial Sequence: Synthetic oligonucleotide
  Antisense strand to SEQ ID NO: 1374458
uaacacccagaacauucuc

SEQ ID NO: 1374460 - RNA, 19 nt, Artificial Sequence
  Description of Artificial Sequence: Synthetic oligonucleotide
  Sense strand starting at position 625 of SEQ ID NO: 1242809
gaauguucuggguguuacu

SEQ ID NO: 1374461 - RNA, 19 nt, Artificial Sequence
  Description of Artificial Sequence: Synthetic oligonucleotide
  Antisense strand to SEQ ID NO: 1374460
aguaacacccagaacauuc

SEQ ID NO: 1374462 - RNA, 19 nt, Artificial Sequence
  Description of Artificial Sequence: Synthetic oligonucleotide
  Sense strand starting at position 673 of SEQ ID NO: 1242809
uccuaauacuguucuaguu

SEQ ID NO: 1374463 - RNA, 19 nt, Artificial Sequence
  Description of Artificial Sequence: Synthetic oligonucleotide
  Antisense strand to SEQ ID NO: 1374462
aacuagaacaguauuagga

SEQ ID NO: 1374464 - RNA, 19 nt, Artificial Sequence
  Description of Artificial Sequence: Synthetic oligonucleotide
  Sense strand starting at position 824 of SEQ ID NO: 1242809
gagagccaaugauugcaaa

SEQ ID NO: 1374465 - RNA, 19 nt, Artificial Sequence
  Description of Artificial Sequence: Synthetic oligonucleotide
  Antisense strand to SEQ ID NO: 1374464
uuugcaaucauuggcucuc

SEQ ID NO: 1374466 - RNA, 19 nt, Artificial Sequence
  Description of Artificial Sequence: Synthetic oligonucleotide
  Sense strand starting at position 863 of SEQ ID NO: 1242809
cccuaauuagcccgaauuc

SEQ ID NO: 1374467 - RNA, 19 nt, Artificial Sequence
  Description of Artificial Sequence: Synthetic oligonucleotide
  Antisense strand to SEQ ID NO: 1374466
gaauucgggcuaauuaggg

SEQ ID NO: 1374468 - RNA, 19 nt, Artificial Sequence
  Description of Artificial Sequence: Synthetic oligonucleotide
  Sense strand starting at position 893 of SEQ ID NO: 1242809
aggcaugcuccuuagcuga

SEQ ID NO: 1374469 - RNA, 19 nt, Artificial Sequence
  Description of Artificial Sequence: Synthetic oligonucleotide
  Antisense strand to SEQ ID NO: 1374468
ucagcuaaggagcaugccu

SEQ ID NO: 1374470 - RNA, 19 nt, Artificial Sequence
  Description of Artificial Sequence: Synthetic oligonucleotide
  Sense strand starting at position 992 of SEQ ID NO: 1242809
aggcuugguggcuggaaga

SEQ ID NO: 1374471 - RNA, 19 nt, Artificial Sequence
  Description of Artificial Sequence: Synthetic oligonucleotide
  Antisense strand to SEQ ID NO: 1374470
ucuuccagccaccaagccu

SEQ ID NO: 1374472 - RNA, 19 nt, Artificial Sequence
  Description of Artificial Sequence: Synthetic oligonucleotide
  Sense strand starting at position 1002 of SEQ ID NO: 1242809
gcuggaagaugacaacuau

SEQ ID NO: 1374473 - RNA, 19 nt, Artificial Sequence
  Description of Artificial Sequence: Synthetic oligonucleotide
  Antisense strand to SEQ ID NO: 1374472
auaguugucaucuuccagc

SEQ ID NO: 1374474 - RNA, 19 nt, Artificial Sequence
  Description of Artificial Sequence: Synthetic oligonucleotide
  Sense strand starting at position 2362 of SEQ ID NO: 1242809
uuagguuugggcuggguua

SEQ ID NO: 1374475 - RNA, 19 nt, Artificial Sequence
  Description of Artificial Sequence: Synthetic oligonucleotide
  Antisense strand to SEQ ID NO: 1374474
uaacccagcccaaaccuaa

SEQ ID NO: 1374476 - RNA, 19 nt, Artificial Sequence
  Description of Artificial Sequence: Synthetic oligonucleotide
  Sense strand starting at position 2363 of SEQ ID NO: 1242809
uagguuugggcuggguuaa

SEQ ID NO: 1374477 - RNA, 19 nt, Artificial Sequence
  Description of Artificial Sequence: Synthetic oligonucleotide
  Antisense strand to SEQ ID NO: 1374476
uuaacccagcccaaaccua

SEQ ID NO: 1374478 - RNA, 19 nt, Artificial Sequence
  Description of Artificial Sequence: Synthetic oligonucleotide
  Sense strand starting at position 2365 of SEQ ID NO: 1242809
gguuugggcuggguuaaga

SEQ ID NO: 1374479 - RNA, 19 nt, Artificial Sequence
  Description of Artificial Sequence: Synthetic oligonucleotide
  Antisense strand to SEQ ID NO: 1374478
ucuuaacccagcccaaacc

SEQ ID NO: 1374480 - RNA, 19 nt, Artificial Sequence
  Description of Artificial Sequence: Synthetic oligonucleotide
  Sense strand starting at position 2425 of SEQ ID NO: 1242809
agagcaaagcuuuagaauc

SEQ ID NO: 1374481 - RNA, 19 nt, Artificial Sequence
  Description of Artificial Sequence: Synthetic oligonucleotide
  Antisense strand to SEQ ID NO: 1374480
gauucuaaagcuuugcucu

SEQ ID NO: 1374482 - RNA, 19 nt, Artificial Sequence
  Description of Artificial Sequence: Synthetic oligonucleotide
  Sense strand starting at position 2546 of SEQ ID NO: 1242809
cauaguaucgguugucuua

SEQ ID NO: 1374483 - RNA, 19 nt, Artificial Sequence
  Description of Artificial Sequence: Synthetic oligonucleotide
  Antisense strand to SEQ ID NO: 1374482
uaagacaaccgauacuaug

SEQ ID NO: 1374484 - RNA, 19 nt, Artificial Sequence
  Description of Artificial Sequence: Synthetic oligonucleotide
  Sense strand starting at position 2548 of SEQ ID NO: 1242809
uaguaucgguugucuuaca

SEQ ID NO: 1374485 - RNA, 19 nt, Artificial Sequence
  Description of Artificial Sequence: Synthetic oligonucleotide
  Antisense strand to SEQ ID NO: 1374484
uguaagacaaccgauacua

SEQ ID NO: 1374486 - RNA, 19 nt, Artificial Sequence
  Description of Artificial Sequence: Synthetic oligonucleotide
  Sense strand starting at position 2555 of SEQ ID NO: 1242809
gguugucuuacaggauugu

SEQ ID NO: 1374487 - RNA, 19 nt, Artificial Sequence
  Description of Artificial Sequence: Synthetic oligonucleotide
  Antisense strand to SEQ ID NO: 1374486
acaauccuguaagacaacc

SEQ ID NO: 1374488 - RNA, 19 nt, Artificial Sequence
  Description of Artificial Sequence: Synthetic oligonucleotide
  Sense strand starting at position 2783 of SEQ ID NO: 1242809
ggacuuaggguguaguuaa

SEQ ID NO: 1374489 - RNA, 19 nt, Artificial Sequence
  Description of Artificial Sequence: Synthetic oligonucleotide
  Antisense strand to SEQ ID NO: 1374488
uuaacuacacccuaagucc

SEQ ID NO: 1374490 - RNA, 19 nt, Artificial Sequence
  Description of Artificial Sequence: Synthetic oligonucleotide
  Sense strand starting at position 2791 of SEQ ID NO: 1242809
gguguaguuaaggaucuuu

SEQ ID NO: 1374491 - RNA, 19 nt, Artificial Sequence
  Description of Artificial Sequence: Synthetic oligonucleotide
  Antisense strand to SEQ ID NO: 1374490
aaagauccuuaacuacacc

SEQ ID NO: 1374492 - RNA, 19 nt, Artificial Sequence
  Description of Artificial Sequence: Synthetic oligonucleotide
  Sense strand starting at position 2899 of SEQ ID NO: 1242809
ggauacuccuguuaauuaa

SEQ ID NO: 1374493 - RNA, 19 nt, Artificial Sequence
  Description of Artificial Sequence: Synthetic oligonucleotide
  Antisense strand to SEQ ID NO: 1374492
uuaauuaacaggaguaucc

SEQ ID NO: 1374494 - RNA, 19 nt, Artificial Sequence
  Description of Artificial Sequence: Synthetic oligonucleotide
  Sense strand starting at position 2939 of SEQ ID NO: 1242809
aagugcuaauuauaggaga

SEQ ID NO: 1374495 - RNA, 19 nt, Artificial Sequence
  Description of Artificial Sequence: Synthetic oligonucleotide
  Antisense strand to SEQ ID NO: 1374494
ucuccuauaauuagcacuu

SEQ ID NO: 1374496 - RNA, 19 nt, Artificial Sequence
  Description of Artificial Sequence: Synthetic oligonucleotide
  Sense strand starting at position 2941 of SEQ ID NO: 1242809
gugcuaauuauaggagaag

SEQ ID NO: 1374497 - RNA, 19 nt, Artificial Sequence
  Description of Artificial Sequence: Synthetic oligonucleotide
  Antisense strand to SEQ ID NO: 1374496
cuucuccuauaauuagcac

SEQ ID NO: 1374498 - RNA, 19 nt, Artificial Sequence
  Description of Artificial Sequence: Synthetic oligonucleotide
  Sense strand starting at position 2962 of SEQ ID NO: 1242809
gauuaacacugagaaagga

SEQ ID NO: 1374499 - RNA, 19 nt, Artificial Sequence
  Description of Artificial Sequence: Synthetic oligonucleotide
  Antisense strand to SEQ ID NO: 1374498
uccuuucucaguguuaauc

SEQ ID NO: 1374500 - RNA, 19 nt, Artificial Sequence
  Description of Artificial Sequence: Synthetic oligonucleotide
  Sense strand starting at position 3049 of SEQ ID NO: 1242809
uggaaagugacauguuucu

SEQ ID NO: 1374501 - RNA, 19 nt, Artificial Sequence
  Description of Artificial Sequence: Synthetic oligonucleotide
  Antisense strand to SEQ ID NO: 1374500
agaaacaugucacuuucca

SEQ ID NO: 1374502 - RNA, 19 nt, Artificial Sequence
  Description of Artificial Sequence: Synthetic oligonucleotide
  Sense strand starting at position 3054 of SEQ ID NO: 1242809
agugacauguuucuggaga

SEQ ID NO: 1374503 - RNA, 19 nt, Artificial Sequence
  Description of Artificial Sequence: Synthetic oligonucleotide
  Antisense strand to SEQ ID NO: 1374502
ucuccagaaacaugucacu

SEQ ID NO: 1374504 - RNA, 19 nt, Artificial Sequence
  Description of Artificial Sequence: Synthetic oligonucleotide
  Sense strand starting at position 3152 of SEQ ID NO: 1242809
ucuuccuugccauagucau

SEQ ID NO: 1374505 - RNA, 19 nt, Artificial Sequence
  Description of Artificial Sequence: Synthetic oligonucleotide
  Antisense strand to SEQ ID NO: 1374504
augacuauggcaaggaaga

SEQ ID NO: 1374506 - RNA, 19 nt, Artificial Sequence
  Description of Artificial Sequence: Synthetic oligonucleotide
  Sense strand starting at position 3282 of SEQ ID NO: 1242809
agccauaaguuggaaauca

SEQ ID NO: 1374507 - RNA, 19 nt, Artificial Sequence
  Description of Artificial Sequence: Synthetic oligonucleotide
  Antisense strand to SEQ ID NO: 1374506
ugauuuccaacuuauggcu

SEQ ID NO: 1374508 - RNA, 19 nt, Artificial Sequence
  Description of Artificial Sequence: Synthetic oligonucleotide
  Sense strand starting at position 3329 of SEQ ID NO: 1242809
gcaacaccguucucaucua

SEQ ID NO: 1374509 - RNA, 19 nt, Artificial Sequence
  Description of Artificial Sequence: Synthetic oligonucleotide
  Antisense strand to SEQ ID NO: 1374508
uagaugagaacgguguugc

SEQ ID NO: 1374510 - RNA, 19 nt, Artificial Sequence
  Description of Artificial Sequence: Synthetic oligonucleotide
  Sense strand starting at position 3352 of SEQ ID NO: 1242809
uggauucuccaacaaagcu

SEQ ID NO: 1374511 - RNA, 19 nt, Artificial Sequence
  Description of Artificial Sequence: Synthetic oligonucleotide
  Antisense strand to SEQ ID NO: 1374510
agcuuuguuggagaaucca

SEQ ID NO: 1374512 - RNA, 19 nt, Artificial Sequence
  Description of Artificial Sequence: Synthetic oligonucleotide
  Sense strand starting at position 3390 of SEQ ID NO: 1242809
aguccaacugucuggaaga

SEQ ID NO: 1374513 - RNA, 19 nt, Artificial Sequence
  Description of Artificial Sequence: Synthetic oligonucleotide
  Antisense strand to SEQ ID NO: 1374512
ucuuccagacaguuggacu

SEQ ID NO: 1374514 - RNA, 19 nt, Artificial Sequence
  Description of Artificial Sequence: Synthetic oligonucleotide
  Sense strand starting at position 3431 of SEQ ID NO: 1242809
uugccuaacccauacgaua

SEQ ID NO: 1374515 - RNA, 19 nt, Artificial Sequence
  Description of Artificial Sequence: Synthetic oligonucleotide
  Antisense strand to SEQ ID NO: 1374514
uaucguauggguuaggcaa

SEQ ID NO: 1374516 - RNA, 19 nt, Artificial Sequence
  Description of Artificial Sequence: Synthetic oligonucleotide
  Sense strand starting at position 3535 of SEQ ID NO: 1242809
cuucucuuaucugcacgau

SEQ ID NO: 1374517 - RNA, 19 nt, Artificial Sequence
  Description of Artificial Sequence: Synthetic oligonucleotide
  Antisense strand to SEQ ID NO: 1374516
aucgugcagauaagagaag

SEQ ID NO: 1374518 - RNA, 19 nt, Artificial Sequence
  Description of Artificial Sequence: Synthetic oligonucleotide
  Sense strand starting at position 3538 of SEQ ID NO: 1242809
cucuuaucugcacgaucua

SEQ ID NO: 1374519 - RNA, 19 nt, Artificial Sequence
  Description of Artificial Sequence: Synthetic oligonucleotide
  Antisense strand to SEQ ID NO: 1374518
uagaucgugcagauaagag

SEQ ID NO: 1374520 - RNA, 19 nt, Artificial Sequence
  Description of Artificial Sequence: Synthetic oligonucleotide
  Sense strand starting at position 62 of SEQ ID NO: 1242810
acacgagagccuggcauau

SEQ ID NO: 1374521 - RNA, 19 nt, Artificial Sequence
  Description of Artificial Sequence: Synthetic oligonucleotide
  Antisense strand to SEQ ID NO: 1374520
auaugccaggcucucgugu

SEQ ID NO: 1374522 - RNA, 19 nt, Artificial Sequence
  Description of Artificial Sequence: Synthetic oligonucleotide
  Sense strand starting at position 374 of SEQ ID NO: 1242810
ccucaacuagcauguauga

SEQ ID NO: 1374523 - RNA, 19 nt, Artificial Sequence
  Description of Artificial Sequence: Synthetic oligonucleotide
  Antisense strand to SEQ ID NO: 1374522
ucauacaugcuaguugagg

SEQ ID NO: 1374524 - RNA, 19 nt, Artificial Sequence
  Description of Artificial Sequence: Synthetic oligonucleotide
  Sense strand starting at position 512 of SEQ ID NO: 1242810
guuggagacuuccuuaaau

SEQ ID NO: 1374525 - RNA, 19 nt, Artificial Sequence
  Description of Artificial Sequence: Synthetic oligonucleotide
  Antisense strand to SEQ ID NO: 1374524
auuuaaggaagucuccaac

SEQ ID NO: 1374526 - RNA, 19 nt, Artificial Sequence
  Description of Artificial Sequence: Synthetic oligonucleotide
  Sense strand starting at position 542 of SEQ ID NO: 1242810
acaguuuaggugugccaga

SEQ ID NO: 1374527 - RNA, 19 nt, Artificial Sequence
  Description of Artificial Sequence: Synthetic oligonucleotide
  Antisense strand to SEQ ID NO: 1374526
ucuggcacaccuaaacugu

SEQ ID NO: 1374528 - RNA, 19 nt, Artificial Sequence
  Description of Artificial Sequence: Synthetic oligonucleotide
  Sense strand starting at position 547 of SEQ ID NO: 1242810
uuaggugugccagacuaua

SEQ ID NO: 1374529 - RNA, 19 nt, Artificial Sequence
  Description of Artificial Sequence: Synthetic oligonucleotide
  Antisense strand to SEQ ID NO: 1374528
uauagucuggcacaccuaa

SEQ ID NO: 1374530 - RNA, 19 nt, Artificial Sequence
  Description of Artificial Sequence: Synthetic oligonucleotide
  Sense strand starting at position 569 of SEQ ID NO: 1242810
aucauugcugcuuaauguu

SEQ ID NO: 1374531 - RNA, 19 nt, Artificial Sequence
  Description of Artificial Sequence: Synthetic oligonucleotide
  Antisense strand to SEQ ID NO: 1374530
aacauuaagcagcaaugau

SEQ ID NO: 1374532 - RNA, 19 nt, Artificial Sequence
  Description of Artificial Sequence: Synthetic oligonucleotide
  Sense strand starting at position 582 of SEQ ID NO: 1242810
aauguuaguugugcuuuau

SEQ ID NO: 1374533 - RNA, 19 nt, Artificial Sequence
  Description of Artificial Sequence: Synthetic oligonucleotide
  Antisense strand to SEQ ID NO: 1374532
auaaagcacaacuaacauu

SEQ ID NO: 1374534 - RNA, 19 nt, Artificial Sequence
  Description of Artificial Sequence: Synthetic oligonucleotide
  Sense strand starting at position 677 of SEQ ID NO: 1242810
gcagcagaauauuagagaa

SEQ ID NO: 1374535 - RNA, 19 nt, Artificial Sequence
  Description of Artificial Sequence: Synthetic oligonucleotide
  Antisense strand to SEQ ID NO: 1374534
uucucuaauauucugcugc

SEQ ID NO: 1374536 - RNA, 19 nt, Artificial Sequence
  Description of Artificial Sequence: Synthetic oligonucleotide
  Sense strand starting at position 679 of SEQ ID NO: 1242810
agcagaauauuagagaaug

SEQ ID NO: 1374537 - RNA, 19 nt, Artificial Sequence
  Description of Artificial Sequence: Synthetic oligonucleotide
  Antisense strand to SEQ ID NO: 1374536
cauucucuaauauucugcu

SEQ ID NO: 1374538 - RNA, 19 nt, Artificial Sequence
  Description of Artificial Sequence: Synthetic oligonucleotide
  Sense strand starting at position 687 of SEQ ID NO: 1242810
auuagagaauguucugggu

SEQ ID NO: 1374539 - RNA, 19 nt, Artificial Sequence
  Description of Artificial Sequence: Synthetic oligonucleotide
  Antisense strand to SEQ ID NO: 1374538
acccagaacauucucuaau

SEQ ID NO: 1374540 - RNA, 19 nt, Artificial Sequence
  Description of Artificial Sequence: Synthetic oligonucleotide
  Sense strand starting at position 691 of SEQ ID NO: 1242810
gagaauguucuggguguua

SEQ ID NO: 1374541 - RNA, 19 nt, Artificial Sequence
  Description of Artificial Sequence: Synthetic oligonucleotide
  Antisense strand to SEQ ID NO: 1374540
uaacacccagaacauucuc

SEQ ID NO: 1374542 - RNA, 19 nt, Artificial Sequence
  Description of Artificial Sequence: Synthetic oligonucleotide
  Sense strand starting at position 693 of SEQ ID NO: 1242810
gaauguucuggguguuacu

SEQ ID NO: 1374543 - RNA, 19 nt, Artificial Sequence
  Description of Artificial Sequence: Synthetic oligonucleotide
  Antisense strand to SEQ ID NO: 1374542
aguaacacccagaacauuc

SEQ ID NO: 1374544 - RNA, 19 nt, Artificial Sequence
  Description of Artificial Sequence: Synthetic oligonucleotide
  Sense strand starting at position 741 of SEQ ID NO: 1242810
uccuaauacuguucuaguu

SEQ ID NO: 1374545 - RNA, 19 nt, Artificial Sequence
  Description of Artificial Sequence: Synthetic oligonucleotide
  Antisense strand to SEQ ID NO: 1374544
aacuagaacaguauuagga

SEQ ID NO: 1374546 - RNA, 19 nt, Artificial Sequence
  Description of Artificial Sequence: Synthetic oligonucleotide
  Sense strand starting at position 892 of SEQ ID NO: 1242810
gagagccaaugauugcaaa

SEQ ID NO: 1374547 - RNA, 19 nt, Artificial Sequence
  Description of Artificial Sequence: Synthetic oligonucleotide
  Antisense strand to SEQ ID NO: 1374546
uuugcaaucauuggcucuc

SEQ ID NO: 1374548 - RNA, 19 nt, Artificial Sequence
  Description of Artificial Sequence: Synthetic oligonucleotide
  Sense strand starting at position 931 of SEQ ID NO: 1242810
cccuaauuagcccgaauuc

SEQ ID NO: 1374549 - RNA, 19 nt, Artificial Sequence
  Description of Artificial Sequence: Synthetic oligonucleotide
  Antisense strand to SEQ ID NO: 1374548
gaauucgggcuaauuaggg

SEQ ID NO: 1374550 - RNA, 19 nt, Artificial Sequence
  Description of Artificial Sequence: Synthetic oligonucleotide
  Sense strand starting at position 961 of SEQ ID NO: 1242810
aggcaugcuccuuagcuga

SEQ ID NO: 1374551 - RNA, 19 nt, Artificial Sequence
  Description of Artificial Sequence: Synthetic oligonucleotide
  Antisense strand to SEQ ID NO: 1374550
ucagcuaaggagcaugccu

SEQ ID NO: 1374552 - RNA, 19 nt, Artificial Sequence
  Description of Artificial Sequence: Synthetic oligonucleotide
  Sense strand starting at position 1060 of SEQ ID NO: 1242810
aggcuugguggcuggaaga

SEQ ID NO: 1374553 - RNA, 19 nt, Artificial Sequence
  Description of Artificial Sequence: Synthetic oligonucleotide
  Antisense strand to SEQ ID NO: 1374552
ucuuccagccaccaagccu

SEQ ID NO: 1374554 - RNA, 19 nt, Artificial Sequence
  Description of Artificial Sequence: Synthetic oligonucleotide
  Sense strand starting at position 1070 of SEQ ID NO: 1242810
gcuggaagaugacaacuau

SEQ ID NO: 1374555 - RNA, 19 nt, Artificial Sequence
  Description of Artificial Sequence: Synthetic oligonucleotide
  Antisense strand to SEQ ID NO: 1374554
auaguugucaucuuccagc

SEQ ID NO: 1374556 - RNA, 19 nt, Artificial Sequence
  Description of Artificial Sequence: Synthetic oligonucleotide
  Sense strand starting at position 2430 of SEQ ID NO: 1242810
uuagguuugggcuggguua

SEQ ID NO: 1374557 - RNA, 19 nt, Artificial Sequence
  Description of Artificial Sequence: Synthetic oligonucleotide
  Antisense strand to SEQ ID NO: 1374556
uaacccagcccaaaccuaa

SEQ ID NO: 1374558 - RNA, 19 nt, Artificial Sequence
  Description of Artificial Sequence: Synthetic oligonucleotide
  Sense strand starting at position 2431 of SEQ ID NO: 1242810
uagguuugggcuggguuaa

SEQ ID NO: 1374559 - RNA, 19 nt, Artificial Sequence
  Description of Artificial Sequence: Synthetic oligonucleotide
  Antisense strand to SEQ ID NO: 1374558
uuaacccagcccaaaccua

SEQ ID NO: 1374560 - RNA, 19 nt, Artificial Sequence
  Description of Artificial Sequence: Synthetic oligonucleotide
  Sense strand starting at position 2433 of SEQ ID NO: 1242810
gguuugggcuggguuaaga

SEQ ID NO: 1374561 - RNA, 19 nt, Artificial Sequence
  Description of Artificial Sequence: Synthetic oligonucleotide
  Antisense strand to SEQ ID NO: 1374560
ucuuaacccagcccaaacc

SEQ ID NO: 1374562 - RNA, 19 nt, Artificial Sequence
  Description of Artificial Sequence: Synthetic oligonucleotide
  Sense strand starting at position 2493 of SEQ ID NO: 1242810
agagcaaagcuuuagaauc

SEQ ID NO: 1374563 - RNA, 19 nt, Artificial Sequence
  Description of Artificial Sequence: Synthetic oligonucleotide
  Antisense strand to SEQ ID NO: 1374562
gauucuaaagcuuugcucu

SEQ ID NO: 1374564 - RNA, 19 nt, Artificial Sequence
  Description of Artificial Sequence: Synthetic oligonucleotide
  Sense strand starting at position 2614 of SEQ ID NO: 1242810
cauaguaucgguugucuua

SEQ ID NO: 1374565 - RNA, 19 nt, Artificial Sequence
  Description of Artificial Sequence: Synthetic oligonucleotide
  Antisense strand to SEQ ID NO: 1374564
uaagacaaccgauacuaug

SEQ ID NO: 1374566 - RNA, 19 nt, Artificial Sequence
  Description of Artificial Sequence: Synthetic oligonucleotide
  Sense strand starting at position 2616 of SEQ ID NO: 1242810
uaguaucgguugucuuaca

SEQ ID NO: 1374567 - RNA, 19 nt, Artificial Sequence
  Description of Artificial Sequence: Synthetic oligonucleotide
  Antisense strand to SEQ ID NO: 1374566
uguaagacaaccgauacua

SEQ ID NO: 1374568 - RNA, 19 nt, Artificial Sequence
  Description of Artificial Sequence: Synthetic oligonucleotide
  Sense strand starting at position 2623 of SEQ ID NO: 1242810
gguugucuuacaggauugu

SEQ ID NO: 1374569 - RNA, 19 nt, Artificial Sequence
  Description of Artificial Sequence: Synthetic oligonucleotide
  Antisense strand to SEQ ID NO: 1374568
acaauccuguaagacaacc

SEQ ID NO: 1374570 - RNA, 19 nt, Artificial Sequence
  Description of Artificial Sequence: Synthetic oligonucleotide
  Sense strand starting at position 2851 of SEQ ID NO: 1242810
ggacuuaggguguaguuaa

SEQ ID NO: 1374571 - RNA, 19 nt, Artificial Sequence
  Description of Artificial Sequence: Synthetic oligonucleotide
  Antisense strand to SEQ ID NO: 1374570
uuaacuacacccuaagucc

SEQ ID NO: 1374572 - RNA, 19 nt, Artificial Sequence
  Description of Artificial Sequence: Synthetic oligonucleotide
  Sense strand starting at position 2859 of SEQ ID NO: 1242810
gguguaguuaaggaucuuu

SEQ ID NO: 1374573 - RNA, 19 nt, Artificial Sequence
  Description of Artificial Sequence: Synthetic oligonucleotide
  Antisense strand to SEQ ID NO: 1374572
aaagauccuuaacuacacc

SEQ ID NO: 1374574 - RNA, 19 nt, Artificial Sequence
  Description of Artificial Sequence: Synthetic oligonucleotide
  Sense strand starting at position 2967 of SEQ ID NO: 1242810
ggauacuccuguuaauuaa

SEQ ID NO: 1374575 - RNA, 19 nt, Artificial Sequence
  Description of Artificial Sequence: Synthetic oligonucleotide
  Antisense strand to SEQ ID NO: 1374574
uuaauuaacaggaguaucc

SEQ ID NO: 1374576 - RNA, 19 nt, Artificial Sequence
  Description of Artificial Sequence: Synthetic oligonucleotide
  Sense strand starting at position 3007 of SEQ ID NO: 1242810
aagugcuaauuauaggaga

SEQ ID NO: 1374577 - RNA, 19 nt, Artificial Sequence
  Description of Artificial Sequence: Synthetic oligonucleotide
  Antisense strand to SEQ ID NO: 1374576
ucuccuauaauuagcacuu

SEQ ID NO: 1374578 - RNA, 19 nt, Artificial Sequence
  Description of Artificial Sequence: Synthetic oligonucleotide
  Sense strand starting at position 3009 of SEQ ID NO: 1242810
gugcuaauuauaggagaag

SEQ ID NO: 1374579 - RNA, 19 nt, Artificial Sequence
  Description of Artificial Sequence: Synthetic oligonucleotide
  Antisense strand to SEQ ID NO: 1374578
cuucuccuauaauuagcac

SEQ ID NO: 1374580 - RNA, 19 nt, Artificial Sequence
  Description of Artificial Sequence: Synthetic oligonucleotide
  Sense strand starting at position 3030 of SEQ ID NO: 1242810
gauuaacacugagaaagga

SEQ ID NO: 1374581 - RNA, 19 nt, Artificial Sequence
  Description of Artificial Sequence: Synthetic oligonucleotide
  Antisense strand to SEQ ID NO: 1374580
uccuuucucaguguuaauc

SEQ ID NO: 1374582 - RNA, 19 nt, Artificial Sequence
  Description of Artificial Sequence: Synthetic oligonucleotide
  Sense strand starting at position 3117 of SEQ ID NO: 1242810
uggaaagugacauguuucu

SEQ ID NO: 1374583 - RNA, 19 nt, Artificial Sequence
  Description of Artificial Sequence: Synthetic oligonucleotide
  Antisense strand to SEQ ID NO: 1374582
agaaacaugucacuuucca

SEQ ID NO: 1374584 - RNA, 19 nt, Artificial Sequence
  Description of Artificial Sequence: Synthetic oligonucleotide
  Sense strand starting at position 3122 of SEQ ID NO: 1242810
agugacauguuucuggaga

SEQ ID NO: 1374585 - RNA, 19 nt, Artificial Sequence
  Description of Artificial Sequence: Synthetic oligonucleotide
  Antisense strand to SEQ ID NO: 1374584
ucuccagaaacaugucacu

SEQ ID NO: 1374586 - RNA, 19 nt, Artificial Sequence
  Description of Artificial Sequence: Synthetic oligonucleotide
  Sense strand starting at position 3220 of SEQ ID NO: 1242810
ucuuccuugccauagucau

SEQ ID NO: 1374587 - RNA, 19 nt, Artificial Sequence
  Description of Artificial Sequence: Synthetic oligonucleotide
  Antisense strand to SEQ ID NO: 1374586
augacuauggcaaggaaga

SEQ ID NO: 1374588 - RNA, 19 nt, Artificial Sequence
  Description of Artificial Sequence: Synthetic oligonucleotide
  Sense strand starting at position 3397 of SEQ ID NO: 1242810
gcaacaccguucucaucua

SEQ ID NO: 1374589 - RNA, 19 nt, Artificial Sequence
  Description of Artificial Sequence: Synthetic oligonucleotide
  Antisense strand to SEQ ID NO: 1374588
uagaugagaacgguguugc

SEQ ID NO: 1374590 - RNA, 19 nt, Artificial Sequence
  Description of Artificial Sequence: Synthetic oligonucleotide
  Sense strand starting at position 3420 of SEQ ID NO: 1242810
uggauucuccaacaaagcu

SEQ ID NO: 1374591 - RNA, 19 nt, Artificial Sequence
  Description of Artificial Sequence: Synthetic oligonucleotide
  Antisense strand to SEQ ID NO: 1374590
agcuuuguuggagaaucca

SEQ ID NO: 1374592 - RNA, 19 nt, Artificial Sequence
  Description of Artificial Sequence: Synthetic oligonucleotide
  Sense strand starting at position 3458 of SEQ ID NO: 1242810
aguccaacugucuggaaga

SEQ ID NO: 1374593 - RNA, 19 nt, Artificial Sequence
  Description of Artificial Sequence: Synthetic oligonucleotide
  Antisense strand to SEQ ID NO: 1374592
ucuuccagacaguuggacu

SEQ ID NO: 1374594 - RNA, 19 nt, Artificial Sequence
  Description of Artificial Sequence: Synthetic oligonucleotide
  Sense strand starting at position 3499 of SEQ ID NO: 1242810
uugccuaacccauacgaua

SEQ ID NO: 1374595 - RNA, 19 nt, Artificial Sequence
  Description of Artificial Sequence: Synthetic oligonucleotide
  Antisense strand to SEQ ID NO: 1374594
uaucguauggguuaggcaa

SEQ ID NO: 1374596 - RNA, 19 nt, Artificial Sequence
  Description of Artificial Sequence: Synthetic oligonucleotide
  Sense strand starting at position 3603 of SEQ ID NO: 1242810
cuucucuuaucugcacgau

SEQ ID NO: 1374597 - RNA, 19 nt, Artificial Sequence
  Description of Artificial Sequence: Synthetic oligonucleotide
  Antisense strand to SEQ ID NO: 1374596
aucgugcagauaagagaag

SEQ ID NO: 1374598 - RNA, 19 nt, Artificial Sequence
  Description of Artificial Sequence: Synthetic oligonucleotide
  Sense strand starting at position 3606 of SEQ ID NO: 1242810
cucuuaucugcacgaucua

SEQ ID NO: 1374599 - RNA, 19 nt, Artificial Sequence
  Description of Artificial Sequence: Synthetic oligonucleotide
  Antisense strand to SEQ ID NO: 1374598
uagaucgugcagauaagag

SEQ ID NO: 1374600 - RNA, 19 nt, Artificial Sequence
  Description of Artificial Sequence: Synthetic oligonucleotide
  Sense strand starting at position 37 of SEQ ID NO: 1242811
ggugguagucuggagagga

SEQ ID NO: 1374601 - RNA, 19 nt, Artificial Sequence
  Description of Artificial Sequence: Synthetic oligonucleotide
  Antisense strand to SEQ ID NO: 1374600
uccucuccagacuaccacc

SEQ ID NO: 1374602 - RNA, 19 nt, Artificial Sequence
  Description of Artificial Sequence: Synthetic oligonucleotide
  Sense strand starting at position 38 of SEQ ID NO: 1242811
gugguagucuggagaggag

SEQ ID NO: 1374603 - RNA, 19 nt, Artificial Sequence
  Description of Artificial Sequence: Synthetic oligonucleotide
  Antisense strand to SEQ ID NO: 1374602
cuccucuccagacuaccac

SEQ ID NO: 1374604 - RNA, 19 nt, Artificial Sequence
  Description of Artificial Sequence: Synthetic oligonucleotide
  Sense strand starting at position 153 of SEQ ID NO: 1242811
cagagucaccaauguguga

SEQ ID NO: 1374605 - RNA, 19 nt, Artificial Sequence
  Description of Artificial Sequence: Synthetic oligonucleotide
  Antisense strand to SEQ ID NO: 1374604
ucacacauuggugacucug

SEQ ID NO: 1374606 - RNA, 19 nt, Artificial Sequence
  Description of Artificial Sequence: Synthetic oligonucleotide
  Sense strand starting at position 160 of SEQ ID NO: 1242811
accaaugugugaucucaug

SEQ ID NO: 1374607 - RNA, 19 nt, Artificial Sequence
  Description of Artificial Sequence: Synthetic oligonucleotide
  Antisense strand to SEQ ID NO: 1374606
caugagaucacacauuggu

SEQ ID NO: 1374608 - RNA, 19 nt, Artificial Sequence
  Description of Artificial Sequence: Synthetic oligonucleotide
  Sense strand starting at position 166 of SEQ ID NO: 1242811
gugugaucucaugagguuc

SEQ ID NO: 1374609 - RNA, 19 nt, Artificial Sequence
  Description of Artificial Sequence: Synthetic oligonucleotide
  Antisense strand to SEQ ID NO: 1374608
gaaccucaugagaucacac

SEQ ID NO: 1374610 - RNA, 19 nt, Artificial Sequence
  Description of Artificial Sequence: Synthetic oligonucleotide
  Sense strand starting at position 264 of SEQ ID NO: 1242811
ggcccugucuucccacuaa

SEQ ID NO: 1374611 - RNA, 19 nt, Artificial Sequence
  Description of Artificial Sequence: Synthetic oligonucleotide
  Antisense strand to SEQ ID NO: 1374610
uuagugggaagacagggcc

SEQ ID NO: 1374612 - RNA, 19 nt, Artificial Sequence
  Description of Artificial Sequence: Synthetic oligonucleotide
  Sense strand starting at position 314 of SEQ ID NO: 1242811
cugcgaccuguagguaaau

SEQ ID NO: 1374613 - RNA, 19 nt, Artificial Sequence
  Description of Artificial Sequence: Synthetic oligonucleotide
  Antisense strand to SEQ ID NO: 1374612
auuuaccuacaggucgcag

SEQ ID NO: 1374614 - RNA, 19 nt, Artificial Sequence
  Description of Artificial Sequence: Synthetic oligonucleotide
  Sense strand starting at position 315 of SEQ ID NO: 1242811
ugcgaccuguagguaaaua

SEQ ID NO: 1374615 - RNA, 19 nt, Artificial Sequence
  Description of Artificial Sequence: Synthetic oligonucleotide
  Antisense strand to SEQ ID NO: 1374614
uauuuaccuacaggucgca

SEQ ID NO: 1374616 - RNA, 19 nt, Artificial Sequence
  Description of Artificial Sequence: Synthetic oligonucleotide
  Sense strand starting at position 327 of SEQ ID NO: 1242811
guaaauaccugugcacuga

SEQ ID NO: 1374617 - RNA, 19 nt, Artificial Sequence
  Description of Artificial Sequence: Synthetic oligonucleotide
  Antisense strand to SEQ ID NO: 1374616
ucagugcacagguauuuac

SEQ ID NO: 1374618 - RNA, 19 nt, Artificial Sequence
  Description of Artificial Sequence: Synthetic oligonucleotide
  Sense strand starting at position 331 of SEQ ID NO: 1242811
auaccugugcacugauuga

SEQ ID NO: 1374619 - RNA, 19 nt, Artificial Sequence
  Description of Artificial Sequence: Synthetic oligonucleotide
  Antisense strand to SEQ ID NO: 1374618
ucaaucagugcacagguau

SEQ ID NO: 1374620 - RNA, 19 nt, Artificial Sequence
  Description of Artificial Sequence: Synthetic oligonucleotide
  Sense strand starting at position 335 of SEQ ID NO: 1242811
cugugcacugauugaguca

SEQ ID NO: 1374621 - RNA, 19 nt, Artificial Sequence
  Description of Artificial Sequence: Synthetic oligonucleotide
  Antisense strand to SEQ ID NO: 1374620
ugacucaaucagugcacag

SEQ ID NO: 1374622 - RNA, 19 nt, Artificial Sequence
  Description of Artificial Sequence: Synthetic oligonucleotide
  Sense strand starting at position 340 of SEQ ID NO: 1242811
cacugauugagucaggugu

SEQ ID NO: 1374623 - RNA, 19 nt, Artificial Sequence
  Description of Artificial Sequence: Synthetic oligonucleotide
  Antisense strand to SEQ ID NO: 1374622
acaccugacucaaucagug

SEQ ID NO: 1374624 - RNA, 19 nt, Artificial Sequence
  Description of Artificial Sequence: Synthetic oligonucleotide
  Sense strand starting at position 344 of SEQ ID NO: 1242811
gauugagucaggugucuga

SEQ ID NO: 1374625 - RNA, 19 nt, Artificial Sequence
  Description of Artificial Sequence: Synthetic oligonucleotide
  Antisense strand to SEQ ID NO: 1374624
ucagacaccugacucaauc

SEQ ID NO: 1374626 - RNA, 19 nt, Artificial Sequence
  Description of Artificial Sequence: Synthetic oligonucleotide
  Sense strand starting at position 517 of SEQ ID NO: 1242811
gcagaacugucuccacuga

SEQ ID NO: 1374627 - RNA, 19 nt, Artificial Sequence
  Description of Artificial Sequence: Synthetic oligonucleotide
  Antisense strand to SEQ ID NO: 1374626
ucaguggagacaguucugc

SEQ ID NO: 1374628 - RNA, 19 nt, Artificial Sequence
  Description of Artificial Sequence: Synthetic oligonucleotide
  Sense strand starting at position 631 of SEQ ID NO: 1242811
ggcuuccuauguccacaaa

SEQ ID NO: 1374629 - RNA, 19 nt, Artificial Sequence
  Description of Artificial Sequence: Synthetic oligonucleotide
  Antisense strand to SEQ ID NO: 1374628
uuuguggacauaggaagcc

SEQ ID NO: 1374630 - RNA, 19 nt, Artificial Sequence
  Description of Artificial Sequence: Synthetic oligonucleotide
  Sense strand starting at position 675 of SEQ ID NO: 1242811
cugggacuaucaguguuaa

SEQ ID NO: 1374631 - RNA, 19 nt, Artificial Sequence
  Description of Artificial Sequence: Synthetic oligonucleotide
  Antisense strand to SEQ ID NO: 1374630
uuaacacugauagucccag

SEQ ID NO: 1374632 - RNA, 19 nt, Artificial Sequence
  Description of Artificial Sequence: Synthetic oligonucleotide
  Sense strand starting at position 676 of SEQ ID NO: 1242811
ugggacuaucaguguuaag

SEQ ID NO: 1374633 - RNA, 19 nt, Artificial Sequence
  Description of Artificial Sequence: Synthetic oligonucleotide
  Antisense strand to SEQ ID NO: 1374632
cuuaacacugauaguccca

SEQ ID NO: 1374634 - RNA, 19 nt, Artificial Sequence
  Description of Artificial Sequence: Synthetic oligonucleotide
  Sense strand starting at position 981 of SEQ ID NO: 1242811
gguggaggagucugcaguu

SEQ ID NO: 1374635 - RNA, 19 nt, Artificial Sequence
  Description of Artificial Sequence: Synthetic oligonucleotide
  Antisense strand to SEQ ID NO: 1374634
aacugcagacuccuccacc

SEQ ID NO: 1374636 - RNA, 19 nt, Artificial Sequence
  Description of Artificial Sequence: Synthetic oligonucleotide
  Sense strand starting at position 1085 of SEQ ID NO: 1242811
gcuuucuucccguuaccga

SEQ ID NO: 1374637 - RNA, 19 nt, Artificial Sequence
  Description of Artificial Sequence: Synthetic oligonucleotide
  Antisense strand to SEQ ID NO: 1374636
ucgguaacgggaagaaagc

SEQ ID NO: 1374638 - RNA, 19 nt, Artificial Sequence
  Description of Artificial Sequence: Synthetic oligonucleotide
  Sense strand starting at position 2201 of SEQ ID NO: 1242811
uguucucuuccagguacuu

SEQ ID NO: 1374639 - RNA, 19 nt, Artificial Sequence
  Description of Artificial Sequence: Synthetic oligonucleotide
  Antisense strand to SEQ ID NO: 1374638
aaguaccuggaagagaaca

SEQ ID NO: 1374640 - RNA, 19 nt, Artificial Sequence
  Description of Artificial Sequence: Synthetic oligonucleotide
  Sense strand starting at position 2319 of SEQ ID NO: 1242811
ccuggauggcgcgaauuaa

SEQ ID NO: 1374641 - RNA, 19 nt, Artificial Sequence
  Description of Artificial Sequence: Synthetic oligonucleotide
  Antisense strand to SEQ ID NO: 1374640
uuaauucgcgccauccagg

SEQ ID NO: 1374642 - RNA, 19 nt, Artificial Sequence
  Description of Artificial Sequence: Synthetic oligonucleotide
  Sense strand starting at position 2447 of SEQ ID NO: 1242811
ggcaguuucgaugaaacug

SEQ ID NO: 1374643 - RNA, 19 nt, Artificial Sequence
  Description of Artificial Sequence: Synthetic oligonucleotide
  Antisense strand to SEQ ID NO: 1374642
caguuucaucgaaacugcc

SEQ ID NO: 1374644 - RNA, 19 nt, Artificial Sequence
  Description of Artificial Sequence: Synthetic oligonucleotide
  Sense strand starting at position 2585 of SEQ ID NO: 1242811
auuagaucauugcauuugu

SEQ ID NO: 1374645 - RNA, 19 nt, Artificial Sequence
  Description of Artificial Sequence: Synthetic oligonucleotide
  Antisense strand to SEQ ID NO: 1374644
acaaaugcaaugaucuaau

SEQ ID NO: 1374646 - RNA, 19 nt, Artificial Sequence
  Description of Artificial Sequence: Synthetic oligonucleotide
  Sense strand starting at position 2626 of SEQ ID NO: 1242811
caaagaaaguccguuugca

SEQ ID NO: 1374647 - RNA, 19 nt, Artificial Sequence
  Description of Artificial Sequence: Synthetic oligonucleotide
  Antisense strand to SEQ ID NO: 1374646
ugcaaacggacuuucuuug

SEQ ID NO: 1374648 - RNA, 19 nt, Artificial Sequence
  Description of Artificial Sequence: Synthetic oligonucleotide
  Sense strand starting at position 2645 of SEQ ID NO: 1242811
ggagcauugacucaugccu

SEQ ID NO: 1374649 - RNA, 19 nt, Artificial Sequence
  Description of Artificial Sequence: Synthetic oligonucleotide
  Antisense strand to SEQ ID NO: 1374648
aggcaugagucaaugcucc

SEQ ID NO: 1374650 - RNA, 19 nt, Artificial Sequence
  Description of Artificial Sequence: Synthetic oligonucleotide
  Sense strand starting at position 2729 of SEQ ID NO: 1242811
gugagcuaugauuguaugu

SEQ ID NO: 1374651 - RNA, 19 nt, Artificial Sequence
  Description of Artificial Sequence: Synthetic oligonucleotide
  Antisense strand to SEQ ID NO: 1374650
acauacaaucauagcucac

SEQ ID NO: 1374652 - RNA, 19 nt, Artificial Sequence
  Description of Artificial Sequence: Synthetic oligonucleotide
  Sense strand starting at position 2734 of SEQ ID NO: 1242811
cuaugauuguaugucucaa

SEQ ID NO: 1374653 - RNA, 19 nt, Artificial Sequence
  Description of Artificial Sequence: Synthetic oligonucleotide
  Antisense strand to SEQ ID NO: 1374652
uugagacauacaaucauag

SEQ ID NO: 1374654 - RNA, 19 nt, Artificial Sequence
  Description of Artificial Sequence: Synthetic oligonucleotide
  Sense strand starting at position 2823 of SEQ ID NO: 1242811
ggccuucacugaguugaug

SEQ ID NO: 1374655 - RNA, 19 nt, Artificial Sequence
  Description of Artificial Sequence: Synthetic oligonucleotide
  Antisense strand to SEQ ID NO: 1374654
caucaacucagugaaggcc

SEQ ID NO: 1374656 - RNA, 19 nt, Artificial Sequence
  Description of Artificial Sequence: Synthetic oligonucleotide
  Sense strand starting at position 2856 of SEQ ID NO: 1242811
gguuuaccugguggauagu

SEQ ID NO: 1374657 - RNA, 19 nt, Artificial Sequence
  Description of Artificial Sequence: Synthetic oligonucleotide
  Antisense strand to SEQ ID NO: 1374656
acuauccaccagguaaacc

SEQ ID NO: 1374658 - RNA, 19 nt, Artificial Sequence
  Description of Artificial Sequence: Synthetic oligonucleotide
  Sense strand starting at position 2963 of SEQ ID NO: 1242811
gccauuuaucuggguuucu

SEQ ID NO: 1374659 - RNA, 19 nt, Artificial Sequence
  Description of Artificial Sequence: Synthetic oligonucleotide
  Antisense strand to SEQ ID NO: 1374658
agaaacccagauaaauggc

SEQ ID NO: 1374660 - RNA, 19 nt, Artificial Sequence
  Description of Artificial Sequence: Synthetic oligonucleotide
  Sense strand starting at position 2989 of SEQ ID NO: 1242811
acagcuugacacugaauga

SEQ ID NO: 1374661 - RNA, 19 nt, Artificial Sequence
  Description of Artificial Sequence: Synthetic oligonucleotide
  Antisense strand to SEQ ID NO: 1374660
ucauucagugucaagcugu

SEQ ID NO: 1374662 - RNA, 19 nt, Artificial Sequence
  Description of Artificial Sequence: Synthetic oligonucleotide
  Sense strand starting at position 3175 of SEQ ID NO: 1242811
uugcucuuagcuugugaaa

SEQ ID NO: 1374663 - RNA, 19 nt, Artificial Sequence
  Description of Artificial Sequence: Synthetic oligonucleotide
  Antisense strand to SEQ ID NO: 1374662
uuucacaagcuaagagcaa

SEQ ID NO: 1374664 - RNA, 19 nt, Artificial Sequence
  Description of Artificial Sequence: Synthetic oligonucleotide
  Sense strand starting at position 3193 of SEQ ID NO: 1242811
aaaugaguacccugucuag

SEQ ID NO: 1374665 - RNA, 19 nt, Artificial Sequence
  Description of Artificial Sequence: Synthetic oligonucleotide
  Antisense strand to SEQ ID NO: 1374664
cuagacaggguacucauuu

SEQ ID NO: 1374666 - RNA, 19 nt, Artificial Sequence
  Description of Artificial Sequence: Synthetic oligonucleotide
  Sense strand starting at position 3208 of SEQ ID NO: 1242811
cuaggcuauccugagcuaa

SEQ ID NO: 1374667 - RNA, 19 nt, Artificial Sequence
  Description of Artificial Sequence: Synthetic oligonucleotide
  Antisense strand to SEQ ID NO: 1374666
uuagcucaggauagccuag

SEQ ID NO: 1374668 - RNA, 19 nt, Artificial Sequence
  Description of Artificial Sequence: Synthetic oligonucleotide
  Sense strand starting at position 3249 of SEQ ID NO: 1242811
gcugaaaggaauuauuguu

SEQ ID NO: 1374669 - RNA, 19 nt, Artificial Sequence
  Description of Artificial Sequence: Synthetic oligonucleotide
  Antisense strand to SEQ ID NO: 1374668
aacaauaauuccuuucagc

SEQ ID NO: 1374670 - RNA, 19 nt, Artificial Sequence
  Description of Artificial Sequence: Synthetic oligonucleotide
  Sense strand starting at position 3350 of SEQ ID NO: 1242811
uugugaaguaaguguuaaa

SEQ ID NO: 1374671 - RNA, 19 nt, Artificial Sequence
  Description of Artificial Sequence: Synthetic oligonucleotide
  Antisense strand to SEQ ID NO: 1374670
uuuaacacuuacuucacaa

SEQ ID NO: 1374672 - RNA, 19 nt, Artificial Sequence
  Description of Artificial Sequence: Synthetic oligonucleotide
  Sense strand starting at position 3518 of SEQ ID NO: 1242811
ggccucagggcuuacuaua

SEQ ID NO: 1374673 - RNA, 19 nt, Artificial Sequence
  Description of Artificial Sequence: Synthetic oligonucleotide
  Antisense strand to SEQ ID NO: 1374672
uauaguaagcccugaggcc

SEQ ID NO: 1374674 - RNA, 19 nt, Artificial Sequence
  Description of Artificial Sequence: Synthetic oligonucleotide
  Sense strand starting at position 3585 of SEQ ID NO: 1242811
ggcugcuccucuccaagaa

SEQ ID NO: 1374675 - RNA, 19 nt, Artificial Sequence
  Description of Artificial Sequence: Synthetic oligonucleotide
  Antisense strand to SEQ ID NO: 1374674
uucuuggagaggagcagcc

SEQ ID NO: 1374676 - RNA, 19 nt, Artificial Sequence
  Description of Artificial Sequence: Synthetic oligonucleotide
  Sense strand starting at position 3629 of SEQ ID NO: 1242811
ggaagucucucaucacagu

SEQ ID NO: 1374677 - RNA, 19 nt, Artificial Sequence
  Description of Artificial Sequence: Synthetic oligonucleotide
  Antisense strand to SEQ ID NO: 1374676
acugugaugagagacuucc

SEQ ID NO: 1374678 - RNA, 19 nt, Artificial Sequence
  Description of Artificial Sequence: Synthetic oligonucleotide
  Sense strand starting at position 3788 of SEQ ID NO: 1242811
acuuucuacgagcauggau

SEQ ID NO: 1374679 - RNA, 19 nt, Artificial Sequence
  Description of Artificial Sequence: Synthetic oligonucleotide
  Antisense strand to SEQ ID NO: 1374678
auccaugcucguagaaagu

SEQ ID NO: 1374680 - RNA, 19 nt, Artificial Sequence
  Description of Artificial Sequence: Synthetic oligonucleotide
  Sense strand starting at position 55 of SEQ ID NO: 1242812
ggcuuccuauguccacaaa

SEQ ID NO: 1374681 - RNA, 19 nt, Artificial Sequence
  Description of Artificial Sequence: Synthetic oligonucleotide
  Antisense strand to SEQ ID NO: 1374680
uuuguggacauaggaagcc

SEQ ID NO: 1374682 - RNA, 19 nt, Artificial Sequence
  Description of Artificial Sequence: Synthetic oligonucleotide
  Sense strand starting at position 99 of SEQ ID NO: 1242812
cugggacuaucaguguuaa

SEQ ID NO: 1374683 - RNA, 19 nt, Artificial Sequence
  Description of Artificial Sequence: Synthetic oligonucleotide
  Antisense strand to SEQ ID NO: 1374682
uuaacacugauagucccag

SEQ ID NO: 1374684 - RNA, 19 nt, Artificial Sequence
  Description of Artificial Sequence: Synthetic oligonucleotide
  Sense strand starting at position 100 of SEQ ID NO: 1242812
ugggacuaucaguguuaag

SEQ ID NO: 1374685 - RNA, 19 nt, Artificial Sequence
  Description of Artificial Sequence: Synthetic oligonucleotide
  Antisense strand to SEQ ID NO: 1374684
cuuaacacugauaguccca

SEQ ID NO: 1374686 - RNA, 19 nt, Artificial Sequence
  Description of Artificial Sequence: Synthetic oligonucleotide
  Sense strand starting at position 103 of SEQ ID NO: 1242812
gacuaucaguguuaagaaa

SEQ ID NO: 1374687 - RNA, 19 nt, Artificial Sequence
  Description of Artificial Sequence: Synthetic oligonucleotide
  Antisense strand to SEQ ID NO: 1374686
uuucuuaacacugauaguc

SEQ ID NO: 1374688 - RNA, 19 nt, Artificial Sequence
  Description of Artificial Sequence: Synthetic oligonucleotide
  Sense strand starting at position 405 of SEQ ID NO: 1242812
gguggaggagucugcaguu

SEQ ID NO: 1374689 - RNA, 19 nt, Artificial Sequence
  Description of Artificial Sequence: Synthetic oligonucleotide
  Antisense strand to SEQ ID NO: 1374688
aacugcagacuccuccacc

SEQ ID NO: 1374690 - RNA, 19 nt, Artificial Sequence
  Description of Artificial Sequence: Synthetic oligonucleotide
  Sense strand starting at position 509 of SEQ ID NO: 1242812
gcuuucuucccguuaccga

SEQ ID NO: 1374691 - RNA, 19 nt, Artificial Sequence
  Description of Artificial Sequence: Synthetic oligonucleotide
  Antisense strand to SEQ ID NO: 1374690
ucgguaacgggaagaaagc

SEQ ID NO: 1374692 - RNA, 19 nt, Artificial Sequence
  Description of Artificial Sequence: Synthetic oligonucleotide
  Sense strand starting at position 1625 of SEQ ID NO: 1242812
uguucucuuccagguacuu

SEQ ID NO: 1374693 - RNA, 19 nt, Artificial Sequence
  Description of Artificial Sequence: Synthetic oligonucleotide
  Antisense strand to SEQ ID NO: 1374692
aaguaccuggaagagaaca

SEQ ID NO: 1374694 - RNA, 19 nt, Artificial Sequence
  Description of Artificial Sequence: Synthetic oligonucleotide
  Sense strand starting at position 1743 of SEQ ID NO: 1242812
ccuggauggcgcgaauuaa

SEQ ID NO: 1374695 - RNA, 19 nt, Artificial Sequence
  Description of Artificial Sequence: Synthetic oligonucleotide
  Antisense strand to SEQ ID NO: 1374694
uuaauucgcgccauccagg

SEQ ID NO: 1374696 - RNA, 19 nt, Artificial Sequence
  Description of Artificial Sequence: Synthetic oligonucleotide
  Sense strand starting at position 1871 of SEQ ID NO: 1242812
ggcaguuucgaugaaacug

SEQ ID NO: 1374697 - RNA, 19 nt, Artificial Sequence
  Description of Artificial Sequence: Synthetic oligonucleotide
  Antisense strand to SEQ ID NO: 1374696
caguuucaucgaaacugcc

SEQ ID NO: 1374698 - RNA, 19 nt, Artificial Sequence
  Description of Artificial Sequence: Synthetic oligonucleotide
  Sense strand starting at position 2009 of SEQ ID NO: 1242812
auuagaucauugcauuugu

SEQ ID NO: 1374699 - RNA, 19 nt, Artificial Sequence
  Description of Artificial Sequence: Synthetic oligonucleotide
  Antisense strand to SEQ ID NO: 1374698
acaaaugcaaugaucuaau

SEQ ID NO: 1374700 - RNA, 19 nt, Artificial Sequence
  Description of Artificial Sequence: Synthetic oligonucleotide
  Sense strand starting at position 2050 of SEQ ID NO: 1242812
caaagaaaguccguuugca

SEQ ID NO: 1374701 - RNA, 19 nt, Artificial Sequence
  Description of Artificial Sequence: Synthetic oligonucleotide
  Antisense strand to SEQ ID NO: 1374700
ugcaaacggacuuucuuug

SEQ ID NO: 1374702 - RNA, 19 nt, Artificial Sequence
  Description of Artificial Sequence: Synthetic oligonucleotide
  Sense strand starting at position 2058 of SEQ ID NO: 1242812
guccguuugcaggagcauu

SEQ ID NO: 1374703 - RNA, 19 nt, Artificial Sequence
  Description of Artificial Sequence: Synthetic oligonucleotide
  Antisense strand to SEQ ID NO: 1374702
aaugcuccugcaaacggac

SEQ ID NO: 1374704 - RNA, 19 nt, Artificial Sequence
  Description of Artificial Sequence: Synthetic oligonucleotide
  Sense strand starting at position 2069 of SEQ ID NO: 1242812
ggagcauugacucaugccu

SEQ ID NO: 1374705 - RNA, 19 nt, Artificial Sequence
  Description of Artificial Sequence: Synthetic oligonucleotide
  Antisense strand to SEQ ID NO: 1374704
aggcaugagucaaugcucc

SEQ ID NO: 1374706 - RNA, 19 nt, Artificial Sequence
  Description of Artificial Sequence: Synthetic oligonucleotide
  Sense strand starting at position 2153 of SEQ ID NO: 1242812
gugagcuaugauuguaugu

SEQ ID NO: 1374707 - RNA, 19 nt, Artificial Sequence
  Description of Artificial Sequence: Synthetic oligonucleotide
  Antisense strand to SEQ ID NO: 1374706
acauacaaucauagcucac

SEQ ID NO: 1374708 - RNA, 19 nt, Artificial Sequence
  Description of Artificial Sequence: Synthetic oligonucleotide
  Sense strand starting at position 2158 of SEQ ID NO: 1242812
cuaugauuguaugucucaa

SEQ ID NO: 1374709 - RNA, 19 nt, Artificial Sequence
  Description of Artificial Sequence: Synthetic oligonucleotide
  Antisense strand to SEQ ID NO: 1374708
uugagacauacaaucauag

SEQ ID NO: 1374710 - RNA, 19 nt, Artificial Sequence
  Description of Artificial Sequence: Synthetic oligonucleotide
  Sense strand starting at position 2247 of SEQ ID NO: 1242812
ggccuucacugaguugaug

SEQ ID NO: 1374711 - RNA, 19 nt, Artificial Sequence
  Description of Artificial Sequence: Synthetic oligonucleotide
  Antisense strand to SEQ ID NO: 1374710
caucaacucagugaaggcc

SEQ ID NO: 1374712 - RNA, 19 nt, Artificial Sequence
  Description of Artificial Sequence: Synthetic oligonucleotide
  Sense strand starting at position 2277 of SEQ ID NO: 1242812
ggcgguuuaccugguggau

SEQ ID NO: 1374713 - RNA, 19 nt, Artificial Sequence
  Description of Artificial Sequence: Synthetic oligonucleotide
  Antisense strand to SEQ ID NO: 1374712
auccaccagguaaaccgcc

SEQ ID NO: 1374714 - RNA, 19 nt, Artificial Sequence
  Description of Artificial Sequence: Synthetic oligonucleotide
  Sense strand starting at position 2280 of SEQ ID NO: 1242812
gguuuaccugguggauagu

SEQ ID NO: 1374715 - RNA, 19 nt, Artificial Sequence
  Description of Artificial Sequence: Synthetic oligonucleotide
  Antisense strand to SEQ ID NO: 1374714
acuauccaccagguaaacc

SEQ ID NO: 1374716 - RNA, 19 nt, Artificial Sequence
  Description of Artificial Sequence: Synthetic oligonucleotide
  Sense strand starting at position 2387 of SEQ ID NO: 1242812
gccauuuaucuggguuucu

SEQ ID NO: 1374717 - RNA, 19 nt, Artificial Sequence
  Description of Artificial Sequence: Synthetic oligonucleotide
  Antisense strand to SEQ ID NO: 1374716
agaaacccagauaaauggc

SEQ ID NO: 1374718 - RNA, 19 nt, Artificial Sequence
  Description of Artificial Sequence: Synthetic oligonucleotide
  Sense strand starting at position 2413 of SEQ ID NO: 1242812
acagcuugacacugaauga

SEQ ID NO: 1374719 - RNA, 19 nt, Artificial Sequence
  Description of Artificial Sequence: Synthetic oligonucleotide
  Antisense strand to SEQ ID NO: 1374718
ucauucagugucaagcugu

SEQ ID NO: 1374720 - RNA, 19 nt, Artificial Sequence
  Description of Artificial Sequence: Synthetic oligonucleotide
  Sense strand starting at position 2442 of SEQ ID NO: 1242812
agccacauaugugaagaaa

SEQ ID NO: 1374721 - RNA, 19 nt, Artificial Sequence
  Description of Artificial Sequence: Synthetic oligonucleotide
  Antisense strand to SEQ ID NO: 1374720
uuucuucacauauguggcu

SEQ ID NO: 1374722 - RNA, 19 nt, Artificial Sequence
  Description of Artificial Sequence: Synthetic oligonucleotide
  Sense strand starting at position 2597 of SEQ ID NO: 1242812
gauugcucuuagcuuguga

SEQ ID NO: 1374723 - RNA, 19 nt, Artificial Sequence
  Description of Artificial Sequence: Synthetic oligonucleotide
  Antisense strand to SEQ ID NO: 1374722
ucacaagcuaagagcaauc

SEQ ID NO: 1374724 - RNA, 19 nt, Artificial Sequence
  Description of Artificial Sequence: Synthetic oligonucleotide
  Sense strand starting at position 2599 of SEQ ID NO: 1242812
uugcucuuagcuugugaaa

SEQ ID NO: 1374725 - RNA, 19 nt, Artificial Sequence
  Description of Artificial Sequence: Synthetic oligonucleotide
  Antisense strand to SEQ ID NO: 1374724
uuucacaagcuaagagcaa

SEQ ID NO: 1374726 - RNA, 19 nt, Artificial Sequence
  Description of Artificial Sequence: Synthetic oligonucleotide
  Sense strand starting at position 2617 of SEQ ID NO: 1242812
aaaugaguacccugucuag

SEQ ID NO: 1374727 - RNA, 19 nt, Artificial Sequence
  Description of Artificial Sequence: Synthetic oligonucleotide
  Antisense strand to SEQ ID NO: 1374726
cuagacaggguacucauuu

SEQ ID NO: 1374728 - RNA, 19 nt, Artificial Sequence
  Description of Artificial Sequence: Synthetic oligonucleotide
  Sense strand starting at position 2632 of SEQ ID NO: 1242812
cuaggcuauccugagcuaa

SEQ ID NO: 1374729 - RNA, 19 nt, Artificial Sequence
  Description of Artificial Sequence: Synthetic oligonucleotide
  Antisense strand to SEQ ID NO: 1374728
uuagcucaggauagccuag

SEQ ID NO: 1374730 - RNA, 19 nt, Artificial Sequence
  Description of Artificial Sequence: Synthetic oligonucleotide
  Sense strand starting at position 2673 of SEQ ID NO: 1242812
gcugaaaggaauuauuguu

SEQ ID NO: 1374731 - RNA, 19 nt, Artificial Sequence
  Description of Artificial Sequence: Synthetic oligonucleotide
  Antisense strand to SEQ ID NO: 1374730
aacaauaauuccuuucagc

SEQ ID NO: 1374732 - RNA, 19 nt, Artificial Sequence
  Description of Artificial Sequence: Synthetic oligonucleotide
  Sense strand starting at position 2774 of SEQ ID NO: 1242812
uugugaaguaaguguuaaa

SEQ ID NO: 1374733 - RNA, 19 nt, Artificial Sequence
  Description of Artificial Sequence: Synthetic oligonucleotide
  Antisense strand to SEQ ID NO: 1374732
uuuaacacuuacuucacaa

SEQ ID NO: 1374734 - RNA, 19 nt, Artificial Sequence
  Description of Artificial Sequence: Synthetic oligonucleotide
  Sense strand starting at position 2942 of SEQ ID NO: 1242812
ggccucagggcuuacuaua

SEQ ID NO: 1374735 - RNA, 19 nt, Artificial Sequence
  Description of Artificial Sequence: Synthetic oligonucleotide
  Antisense strand to SEQ ID NO: 1374734
uauaguaagcccugaggcc

SEQ ID NO: 1374736 - RNA, 19 nt, Artificial Sequence
  Description of Artificial Sequence: Synthetic oligonucleotide
  Sense strand starting at position 3009 of SEQ ID NO: 1242812
ggcugcuccucuccaagaa

SEQ ID NO: 1374737 - RNA, 19 nt, Artificial Sequence
  Description of Artificial Sequence: Synthetic oligonucleotide
  Antisense strand to SEQ ID NO: 1374736
uucuuggagaggagcagcc

SEQ ID NO: 1374738 - RNA, 19 nt, Artificial Sequence
  Description of Artificial Sequence: Synthetic oligonucleotide
  Sense strand starting at position 3053 of SEQ ID NO: 1242812
ggaagucucucaucacagu

SEQ ID NO: 1374739 - RNA, 19 nt, Artificial Sequence
  Description of Artificial Sequence: Synthetic oligonucleotide
  Antisense strand to SEQ ID NO: 1374738
acugugaugagagacuucc

SEQ ID NO: 1374740 - RNA, 19 nt, Artificial Sequence
  Description of Artificial Sequence: Synthetic oligonucleotide
  Sense strand starting at position 3212 of SEQ ID NO: 1242812
acuuucuacgagcauggau

SEQ ID NO: 1374741 - RNA, 19 nt, Artificial Sequence
  Description of Artificial Sequence: Synthetic oligonucleotide
  Antisense strand to SEQ ID NO: 1374740
auccaugcucguagaaagu

SEQ ID NO: 1374742 - RNA, 19 nt, Artificial Sequence
  Description of Artificial Sequence: Synthetic oligonucleotide
  Sense strand starting at position 3764 of SEQ ID NO: 1242812
cucagcuuucugggugaca

SEQ ID NO: 1374743 - RNA, 19 nt, Artificial Sequence
  Description of Artificial Sequence: Synthetic oligonucleotide
  Antisense strand to SEQ ID NO: 1374742
ugucacccagaaagcugag

SEQ ID NO: 1374744 - RNA, 19 nt, Artificial Sequence
  Description of Artificial Sequence: Synthetic oligonucleotide
  Sense strand starting at position 3765 of SEQ ID NO: 1242812
ucagcuuucugggugacau

SEQ ID NO: 1374745 - RNA, 19 nt, Artificial Sequence
  Description of Artificial Sequence: Synthetic oligonucleotide
  Antisense strand to SEQ ID NO: 1374744
augucacccagaaagcuga

SEQ ID NO: 1374746 - RNA, 19 nt, Artificial Sequence
  Description of Artificial Sequence: Synthetic oligonucleotide
  Sense strand starting at position 3766 of SEQ ID NO: 1242812
cagcuuucugggugacaua

SEQ ID NO: 1374747 - RNA, 19 nt, Artificial Sequence
  Description of Artificial Sequence: Synthetic oligonucleotide
  Antisense strand to SEQ ID NO: 1374746
uaugucacccagaaagcug

SEQ ID NO: 1374748 - RNA, 19 nt, Artificial Sequence
  Description of Artificial Sequence: Synthetic oligonucleotide
  Sense strand starting at position 3775 of SEQ ID NO: 1242812
gggugacauagaugguugu

SEQ ID NO: 1374749 - RNA, 19 nt, Artificial Sequence
  Description of Artificial Sequence: Synthetic oligonucleotide
  Antisense strand to SEQ ID NO: 1374748
acaaccaucuaugucaccc

SEQ ID NO: 1374750 - RNA, 19 nt, Artificial Sequence
  Description of Artificial Sequence: Synthetic oligonucleotide
  Sense strand starting at position 3776 of SEQ ID NO: 1242812
ggugacauagaugguugua

SEQ ID NO: 1374751 - RNA, 19 nt, Artificial Sequence
  Description of Artificial Sequence: Synthetic oligonucleotide
  Antisense strand to SEQ ID NO: 1374750
uacaaccaucuaugucacc

SEQ ID NO: 1374752 - RNA, 19 nt, Artificial Sequence
  Description of Artificial Sequence: Synthetic oligonucleotide
  Sense strand starting at position 3779 of SEQ ID NO: 1242812
gacauagaugguuguaugu

SEQ ID NO: 1374753 - RNA, 19 nt, Artificial Sequence
  Description of Artificial Sequence: Synthetic oligonucleotide
  Antisense strand to SEQ ID NO: 1374752
acauacaaccaucuauguc

SEQ ID NO: 1374754 - RNA, 19 nt, Artificial Sequence
  Description of Artificial Sequence: Synthetic oligonucleotide
  Sense strand starting at position 3785 of SEQ ID NO: 1242812
gaugguuguauguagguaa

SEQ ID NO: 1374755 - RNA, 19 nt, Artificial Sequence
  Description of Artificial Sequence: Synthetic oligonucleotide
  Antisense strand to SEQ ID NO: 1374754
uuaccuacauacaaccauc

SEQ ID NO: 1374756 - RNA, 19 nt, Artificial Sequence
  Description of Artificial Sequence: Synthetic oligonucleotide
  Sense strand starting at position 3807 of SEQ ID NO: 1242812
ggugguuucacggauggca

SEQ ID NO: 1374757 - RNA, 19 nt, Artificial Sequence
  Description of Artificial Sequence: Synthetic oligonucleotide
  Antisense strand to SEQ ID NO: 1374756
ugccauccgugaaaccacc

SEQ ID NO: 1374758 - RNA, 19 nt, Artificial Sequence
  Description of Artificial Sequence: Synthetic oligonucleotide
  Sense strand starting at position 3809 of SEQ ID NO: 1242812
ugguuucacggauggcaga

SEQ ID NO: 1374759 - RNA, 19 nt, Artificial Sequence
  Description of Artificial Sequence: Synthetic oligonucleotide
  Antisense strand to SEQ ID NO: 1374758
ucugccauccgugaaacca

SEQ ID NO: 1374760 - RNA, 19 nt, Artificial Sequence
  Description of Artificial Sequence: Synthetic oligonucleotide
  Sense strand starting at position 941 of SEQ ID NO: 1242813
gcaggaucugaugaguguu

SEQ ID NO: 1374761 - RNA, 19 nt, Artificial Sequence
  Description of Artificial Sequence: Synthetic oligonucleotide
  Antisense strand to SEQ ID NO: 1374760
aacacucaucagauccugc

SEQ ID NO: 1374762 - RNA, 19 nt, Artificial Sequence
  Description of Artificial Sequence: Synthetic oligonucleotide
  Sense strand starting at position 947 of SEQ ID NO: 1242813
ucugaugaguguugcguau

SEQ ID NO: 1374763 - RNA, 19 nt, Artificial Sequence
  Description of Artificial Sequence: Synthetic oligonucleotide
  Antisense strand to SEQ ID NO: 1374762
auacgcaacacucaucaga

SEQ ID NO: 1374764 - RNA, 19 nt, Artificial Sequence
  Description of Artificial Sequence: Synthetic oligonucleotide
  Sense strand starting at position 949 of SEQ ID NO: 1242813
ugaugaguguugcguauac

SEQ ID NO: 1374765 - RNA, 19 nt, Artificial Sequence
  Description of Artificial Sequence: Synthetic oligonucleotide
  Antisense strand to SEQ ID NO: 1374764
guauacgcaacacucauca

SEQ ID NO: 1374766 - RNA, 19 nt, Artificial Sequence
  Description of Artificial Sequence: Synthetic oligonucleotide
  Sense strand starting at position 951 of SEQ ID NO: 1242813
augaguguugcguauacuc

SEQ ID NO: 1374767 - RNA, 19 nt, Artificial Sequence
  Description of Artificial Sequence: Synthetic oligonucleotide
  Antisense strand to SEQ ID NO: 1374766
gaguauacgcaacacucau

SEQ ID NO: 1374768 - RNA, 19 nt, Artificial Sequence
  Description of Artificial Sequence: Synthetic oligonucleotide
  Sense strand starting at position 953 of SEQ ID NO: 1242813
gaguguugcguauacucau

SEQ ID NO: 1374769 - RNA, 19 nt, Artificial Sequence
  Description of Artificial Sequence: Synthetic oligonucleotide
  Antisense strand to SEQ ID NO: 1374768
augaguauacgcaacacuc

SEQ ID NO: 1374770 - RNA, 19 nt, Artificial Sequence
  Description of Artificial Sequence: Synthetic oligonucleotide
  Sense strand starting at position 959 of SEQ ID NO: 1242813
ugcguauacucaugacuag

SEQ ID NO: 1374771 - RNA, 19 nt, Artificial Sequence
  Description of Artificial Sequence: Synthetic oligonucleotide
  Antisense strand to SEQ ID NO: 1374770
cuagucaugaguauacgca

SEQ ID NO: 1374772 - RNA, 19 nt, Artificial Sequence
  Description of Artificial Sequence: Synthetic oligonucleotide
  Sense strand starting at position 960 of SEQ ID NO: 1242813
gcguauacucaugacuaga

SEQ ID NO: 1374773 - RNA, 19 nt, Artificial Sequence
  Description of Artificial Sequence: Synthetic oligonucleotide
  Antisense strand to SEQ ID NO: 1374772
ucuagucaugaguauacgc

SEQ ID NO: 1374774 - RNA, 19 nt, Artificial Sequence
  Description of Artificial Sequence: Synthetic oligonucleotide
  Sense strand starting at position 962 of SEQ ID NO: 1242813
guauacucaugacuagaag

SEQ ID NO: 1374775 - RNA, 19 nt, Artificial Sequence
  Description of Artificial Sequence: Synthetic oligonucleotide
  Antisense strand to SEQ ID NO: 1374774
cuucuagucaugaguauac

SEQ ID NO: 1374776 - RNA, 19 nt, Artificial Sequence
  Description of Artificial Sequence: Synthetic oligonucleotide
  Sense strand starting at position 1380 of SEQ ID NO: 1242813
gugugaggacuuggcacau

SEQ ID NO: 1374777 - RNA, 19 nt, Artificial Sequence
  Description of Artificial Sequence: Synthetic oligonucleotide
  Antisense strand to SEQ ID NO: 1374776
augugccaaguccucacac

SEQ ID NO: 1374778 - RNA, 19 nt, Artificial Sequence
  Description of Artificial Sequence: Synthetic oligonucleotide
  Sense strand starting at position 1405 of SEQ ID NO: 1242813
cuuugaaacucugggcagu

SEQ ID NO: 1374779 - RNA, 19 nt, Artificial Sequence
  Description of Artificial Sequence: Synthetic oligonucleotide
  Antisense strand to SEQ ID NO: 1374778
acugcccagaguuucaaag

SEQ ID NO: 1374780 - RNA, 19 nt, Artificial Sequence
  Description of Artificial Sequence: Synthetic oligonucleotide
  Sense strand starting at position 1540 of SEQ ID NO: 1242813
caaggaaucugagauccag

SEQ ID NO: 1374781 - RNA, 19 nt, Artificial Sequence
  Description of Artificial Sequence: Synthetic oligonucleotide
  Antisense strand to SEQ ID NO: 1374780
cuggaucucagauuccuug

SEQ ID NO: 1374782 - RNA, 19 nt, Artificial Sequence
  Description of Artificial Sequence: Synthetic oligonucleotide
  Sense strand starting at position 1784 of SEQ ID NO: 1242813
ugucguauuugaguucaga

SEQ ID NO: 1374783 - RNA, 19 nt, Artificial Sequence
  Description of Artificial Sequence: Synthetic oligonucleotide
  Antisense strand to SEQ ID NO: 1374782
ucugaacucaaauacgaca

SEQ ID NO: 1374784 - RNA, 19 nt, Artificial Sequence
  Description of Artificial Sequence: Synthetic oligonucleotide
  Sense strand starting at position 1856 of SEQ ID NO: 1242813
gccauucugugaucccuua

SEQ ID NO: 1374785 - RNA, 19 nt, Artificial Sequence
  Description of Artificial Sequence: Synthetic oligonucleotide
  Antisense strand to SEQ ID NO: 1374784
uaagggaucacagaauggc

SEQ ID NO: 1374786 - RNA, 19 nt, Artificial Sequence
  Description of Artificial Sequence: Synthetic oligonucleotide
  Sense strand starting at position 1888 of SEQ ID NO: 1242813
ccucacaguugagcaaaua

SEQ ID NO: 1374787 - RNA, 19 nt, Artificial Sequence
  Description of Artificial Sequence: Synthetic oligonucleotide
  Antisense strand to SEQ ID NO: 1374786
uauuugcucaacugugagg

SEQ ID NO: 1374788 - RNA, 19 nt, Artificial Sequence
  Description of Artificial Sequence: Synthetic oligonucleotide
  Sense strand starting at position 1889 of SEQ ID NO: 1242813
cucacaguugagcaaauau

SEQ ID NO: 1374789 - RNA, 19 nt, Artificial Sequence
  Description of Artificial Sequence: Synthetic oligonucleotide
  Antisense strand to SEQ ID NO: 1374788
auauuugcucaacugugag

SEQ ID NO: 1374790 - RNA, 19 nt, Artificial Sequence
  Description of Artificial Sequence: Synthetic oligonucleotide
  Sense strand starting at position 1899 of SEQ ID NO: 1242813
agcaaauauucuuccaggu

SEQ ID NO: 1374791 - RNA, 19 nt, Artificial Sequence
  Description of Artificial Sequence: Synthetic oligonucleotide
  Antisense strand to SEQ ID NO: 1374790
accuggaagaauauuugcu

SEQ ID NO: 1374792 - RNA, 19 nt, Artificial Sequence
  Description of Artificial Sequence: Synthetic oligonucleotide
  Sense strand starting at position 1912 of SEQ ID NO: 1242813
ccagguuucucccauguuu

SEQ ID NO: 1374793 - RNA, 19 nt, Artificial Sequence
  Description of Artificial Sequence: Synthetic oligonucleotide
  Antisense strand to SEQ ID NO: 1374792
aaacaugggagaaaccugg

SEQ ID NO: 1374794 - RNA, 19 nt, Artificial Sequence
  Description of Artificial Sequence: Synthetic oligonucleotide
  Sense strand starting at position 1914 of SEQ ID NO: 1242813
agguuucucccauguuuau

SEQ ID NO: 1374795 - RNA, 19 nt, Artificial Sequence
  Description of Artificial Sequence: Synthetic oligonucleotide
  Antisense strand to SEQ ID NO: 1374794
auaaacaugggagaaaccu

SEQ ID NO: 1374796 - RNA, 19 nt, Artificial Sequence
  Description of Artificial Sequence: Synthetic oligonucleotide
  Sense strand starting at position 2593 of SEQ ID NO: 1242813
uggcgagucuuauguccau

SEQ ID NO: 1374797 - RNA, 19 nt, Artificial Sequence
  Description of Artificial Sequence: Synthetic oligonucleotide
  Antisense strand to SEQ ID NO: 1374796
auggacauaagacucgcca

SEQ ID NO: 1374798 - RNA, 19 nt, Artificial Sequence
  Description of Artificial Sequence: Synthetic oligonucleotide
  Sense strand starting at position 2605 of SEQ ID NO: 1242813
uguccaucccuccacagau

SEQ ID NO: 1374799 - RNA, 19 nt, Artificial Sequence
  Description of Artificial Sequence: Synthetic oligonucleotide
  Antisense strand to SEQ ID NO: 1374798
aucuguggagggauggaca

SEQ ID NO: 1374800 - RNA, 19 nt, Artificial Sequence
  Description of Artificial Sequence: Synthetic oligonucleotide
  Sense strand starting at position 2703 of SEQ ID NO: 1242813
gccagugaguccuguuagu

SEQ ID NO: 1374801 - RNA, 19 nt, Artificial Sequence
  Description of Artificial Sequence: Synthetic oligonucleotide
  Antisense strand to SEQ ID NO: 1374800
acuaacaggacucacuggc

SEQ ID NO: 1374802 - RNA, 19 nt, Artificial Sequence
  Description of Artificial Sequence: Synthetic oligonucleotide
  Sense strand starting at position 2709 of SEQ ID NO: 1242813
gaguccuguuagucagagu

SEQ ID NO: 1374803 - RNA, 19 nt, Artificial Sequence
  Description of Artificial Sequence: Synthetic oligonucleotide
  Antisense strand to SEQ ID NO: 1374802
acucugacuaacaggacuc

SEQ ID NO: 1374804 - RNA, 19 nt, Artificial Sequence
  Description of Artificial Sequence: Synthetic oligonucleotide
  Sense strand starting at position 2774 of SEQ ID NO: 1242813
gggucuaucucucagggaa

SEQ ID NO: 1374805 - RNA, 19 nt, Artificial Sequence
  Description of Artificial Sequence: Synthetic oligonucleotide
  Antisense strand to SEQ ID NO: 1374804
uucccugagagauagaccc

SEQ ID NO: 1374806 - RNA, 19 nt, Artificial Sequence
  Description of Artificial Sequence: Synthetic oligonucleotide
  Sense strand starting at position 2776 of SEQ ID NO: 1242813
gucuaucucucagggaaga

SEQ ID NO: 1374807 - RNA, 19 nt, Artificial Sequence
  Description of Artificial Sequence: Synthetic oligonucleotide
  Antisense strand to SEQ ID NO: 1374806
ucuucccugagagauagac

SEQ ID NO: 1374808 - RNA, 19 nt, Artificial Sequence
  Description of Artificial Sequence: Synthetic oligonucleotide
  Sense strand starting at position 2834 of SEQ ID NO: 1242813
gcaggaaccuguuuccaga

SEQ ID NO: 1374809 - RNA, 19 nt, Artificial Sequence
  Description of Artificial Sequence: Synthetic oligonucleotide
  Antisense strand to SEQ ID NO: 1374808
ucuggaaacagguuccugc

SEQ ID NO: 1374810 - RNA, 19 nt, Artificial Sequence
  Description of Artificial Sequence: Synthetic oligonucleotide
  Sense strand starting at position 2943 of SEQ ID NO: 1242813
gcacgcuugucagauggau

SEQ ID NO: 1374811 - RNA, 19 nt, Artificial Sequence
  Description of Artificial Sequence: Synthetic oligonucleotide
  Antisense strand to SEQ ID NO: 1374810
auccaucugacaagcgugc

SEQ ID NO: 1374812 - RNA, 19 nt, Artificial Sequence
  Description of Artificial Sequence: Synthetic oligonucleotide
  Sense strand starting at position 2945 of SEQ ID NO: 1242813
acgcuugucagauggauag

SEQ ID NO: 1374813 - RNA, 19 nt, Artificial Sequence
  Description of Artificial Sequence: Synthetic oligonucleotide
  Antisense strand to SEQ ID NO: 1374812
cuauccaucugacaagcgu

SEQ ID NO: 1374814 - RNA, 19 nt, Artificial Sequence
  Description of Artificial Sequence: Synthetic oligonucleotide
  Sense strand starting at position 2947 of SEQ ID NO: 1242813
gcuugucagauggauaggu

SEQ ID NO: 1374815 - RNA, 19 nt, Artificial Sequence
  Description of Artificial Sequence: Synthetic oligonucleotide
  Antisense strand to SEQ ID NO: 1374814
accuauccaucugacaagc

SEQ ID NO: 1374816 - RNA, 19 nt, Artificial Sequence
  Description of Artificial Sequence: Synthetic oligonucleotide
  Sense strand starting at position 3458 of SEQ ID NO: 1242813
ccugccuccugucugagaa

SEQ ID NO: 1374817 - RNA, 19 nt, Artificial Sequence
  Description of Artificial Sequence: Synthetic oligonucleotide
  Antisense strand to SEQ ID NO: 1374816
uucucagacaggaggcagg

SEQ ID NO: 1374818 - RNA, 19 nt, Artificial Sequence
  Description of Artificial Sequence: Synthetic oligonucleotide
  Sense strand starting at position 3476 of SEQ ID NO: 1242813
agccgagugcugugucaug

SEQ ID NO: 1374819 - RNA, 19 nt, Artificial Sequence
  Description of Artificial Sequence: Synthetic oligonucleotide
  Antisense strand to SEQ ID NO: 1374818
caugacacagcacucggcu

SEQ ID NO: 1374820 - RNA, 19 nt, Artificial Sequence
  Description of Artificial Sequence: Synthetic oligonucleotide
  Sense strand starting at position 3543 of SEQ ID NO: 1242813
cgcggaaucugguuuccac

SEQ ID NO: 1374821 - RNA, 19 nt, Artificial Sequence
  Description of Artificial Sequence: Synthetic oligonucleotide
  Antisense strand to SEQ ID NO: 1374820
guggaaaccagauuccgcg

SEQ ID NO: 1374822 - RNA, 19 nt, Artificial Sequence
  Description of Artificial Sequence: Synthetic oligonucleotide
  Sense strand starting at position 3579 of SEQ ID NO: 1242813
gaaugagguuucugagcau

SEQ ID NO: 1374823 - RNA, 19 nt, Artificial Sequence
  Description of Artificial Sequence: Synthetic oligonucleotide
  Antisense strand to SEQ ID NO: 1374822
augcucagaaaccucauuc

SEQ ID NO: 1374824 - RNA, 19 nt, Artificial Sequence
  Description of Artificial Sequence: Synthetic oligonucleotide
  Sense strand starting at position 3582 of SEQ ID NO: 1242813
ugagguuucugagcauccu

SEQ ID NO: 1374825 - RNA, 19 nt, Artificial Sequence
  Description of Artificial Sequence: Synthetic oligonucleotide
  Antisense strand to SEQ ID NO: 1374824
aggaugcucagaaaccuca

SEQ ID NO: 1374826 - RNA, 19 nt, Artificial Sequence
  Description of Artificial Sequence: Synthetic oligonucleotide
  Sense strand starting at position 3583 of SEQ ID NO: 1242813
gagguuucugagcauccua

SEQ ID NO: 1374827 - RNA, 19 nt, Artificial Sequence
  Description of Artificial Sequence: Synthetic oligonucleotide
  Antisense strand to SEQ ID NO: 1374826
uaggaugcucagaaaccuc

SEQ ID NO: 1374828 - RNA, 19 nt, Artificial Sequence
  Description of Artificial Sequence: Synthetic oligonucleotide
  Sense strand starting at position 3687 of SEQ ID NO: 1242813
agauguggacucuguucua

SEQ ID NO: 1374829 - RNA, 19 nt, Artificial Sequence
  Description of Artificial Sequence: Synthetic oligonucleotide
  Antisense strand to SEQ ID NO: 1374828
uagaacagaguccacaucu

SEQ ID NO: 1374830 - RNA, 19 nt, Artificial Sequence
  Description of Artificial Sequence: Synthetic oligonucleotide
  Sense strand starting at position 3825 of SEQ ID NO: 1242813
gcccuuccucaaggagaga

SEQ ID NO: 1374831 - RNA, 19 nt, Artificial Sequence
  Description of Artificial Sequence: Synthetic oligonucleotide
  Antisense strand to SEQ ID NO: 1374830
ucucuccuugaggaagggc

SEQ ID NO: 1374832 - RNA, 19 nt, Artificial Sequence
  Description of Artificial Sequence: Synthetic oligonucleotide
  Sense strand starting at position 3880 of SEQ ID NO: 1242813
guguucauguccugcugga

SEQ ID NO: 1374833 - RNA, 19 nt, Artificial Sequence
  Description of Artificial Sequence: Synthetic oligonucleotide
  Antisense strand to SEQ ID NO: 1374832
uccagcaggacaugaacac

SEQ ID NO: 1374834 - RNA, 19 nt, Artificial Sequence
  Description of Artificial Sequence: Synthetic oligonucleotide
  Sense strand starting at position 3899 of SEQ ID NO: 1242813
cugugcuguggucacaauu

SEQ ID NO: 1374835 - RNA, 19 nt, Artificial Sequence
  Description of Artificial Sequence: Synthetic oligonucleotide
  Antisense strand to SEQ ID NO: 1374834
aauugugaccacagcacag

SEQ ID NO: 1374836 - RNA, 19 nt, Artificial Sequence
  Description of Artificial Sequence: Synthetic oligonucleotide
  Sense strand starting at position 275 of SEQ ID NO: 1242814
cccugcuguggugacaauu

SEQ ID NO: 1374837 - RNA, 19 nt, Artificial Sequence
  Description of Artificial Sequence: Synthetic oligonucleotide
  Antisense strand to SEQ ID NO: 1374836
aauugucaccacagcaggg

SEQ ID NO: 1374838 - RNA, 19 nt, Artificial Sequence
  Description of Artificial Sequence: Synthetic oligonucleotide
  Sense strand starting at position 281 of SEQ ID NO: 1242814
uguggugacaauuagcaga

SEQ ID NO: 1374839 - RNA, 19 nt, Artificial Sequence
  Description of Artificial Sequence: Synthetic oligonucleotide
  Antisense strand to SEQ ID NO: 1374838
ucugcuaauugucaccaca

SEQ ID NO: 1374840 - RNA, 19 nt, Artificial Sequence
  Description of Artificial Sequence: Synthetic oligonucleotide
  Sense strand starting at position 286 of SEQ ID NO: 1242814
ugacaauuagcagaacgca

SEQ ID NO: 1374841 - RNA, 19 nt, Artificial Sequence
  Description of Artificial Sequence: Synthetic oligonucleotide
  Antisense strand to SEQ ID NO: 1374840
ugcguucugcuaauuguca

SEQ ID NO: 1374842 - RNA, 19 nt, Artificial Sequence
  Description of Artificial Sequence: Synthetic oligonucleotide
  Sense strand starting at position 340 of SEQ ID NO: 1242814
uuaccuugccauugagaac

SEQ ID NO: 1374843 - RNA, 19 nt, Artificial Sequence
  Description of Artificial Sequence: Synthetic oligonucleotide
  Antisense strand to SEQ ID NO: 1374842
guucucaauggcaagguaa

SEQ ID NO: 1374844 - RNA, 19 nt, Artificial Sequence
  Description of Artificial Sequence: Synthetic oligonucleotide
  Sense strand starting at position 470 of SEQ ID NO: 1242814
gguuuccaucaagaaagcu

SEQ ID NO: 1374845 - RNA, 19 nt, Artificial Sequence
  Description of Artificial Sequence: Synthetic oligonucleotide
  Antisense strand to SEQ ID NO: 1374844
agcuuucuugauggaaacc

SEQ ID NO: 1374846 - RNA, 19 nt, Artificial Sequence
  Description of Artificial Sequence: Synthetic oligonucleotide
  Sense strand starting at position 517 of SEQ ID NO: 1242814
gggugcuguccacaaugga

SEQ ID NO: 1374847 - RNA, 19 nt, Artificial Sequence
  Description of Artificial Sequence: Synthetic oligonucleotide
  Antisense strand to SEQ ID NO: 1374846
uccauuguggacagcaccc

SEQ ID NO: 1374848 - RNA, 19 nt, Artificial Sequence
  Description of Artificial Sequence: Synthetic oligonucleotide
  Sense strand starting at position 571 of SEQ ID NO: 1242814
aggaaacuauggcugagua

SEQ ID NO: 1374849 - RNA, 19 nt, Artificial Sequence
  Description of Artificial Sequence: Synthetic oligonucleotide
  Antisense strand to SEQ ID NO: 1374848
uacucagccauaguuuccu

SEQ ID NO: 1374850 - RNA, 19 nt, Artificial Sequence
  Description of Artificial Sequence: Synthetic oligonucleotide
  Sense strand starting at position 572 of SEQ ID NO: 1242814
ggaaacuauggcugaguau

SEQ ID NO: 1374851 - RNA, 19 nt, Artificial Sequence
  Description of Artificial Sequence: Synthetic oligonucleotide
  Antisense strand to SEQ ID NO: 1374850
auacucagccauaguuucc

SEQ ID NO: 1374852 - RNA, 19 nt, Artificial Sequence
  Description of Artificial Sequence: Synthetic oligonucleotide
  Sense strand starting at position 902 of SEQ ID NO: 1242814
ggaauaaacucauaauuug

SEQ ID NO: 1374853 - RNA, 19 nt, Artificial Sequence
  Description of Artificial Sequence: Synthetic oligonucleotide
  Antisense strand to SEQ ID NO: 1374852
caaauuaugaguuuauucc

SEQ ID NO: 1374854 - RNA, 19 nt, Artificial Sequence
  Description of Artificial Sequence: Synthetic oligonucleotide
  Sense strand starting at position 1002 of SEQ ID NO: 1242814
gauaaugacuaugaguauc

SEQ ID NO: 1374855 - RNA, 19 nt, Artificial Sequence
  Description of Artificial Sequence: Synthetic oligonucleotide
  Antisense strand to SEQ ID NO: 1374854
gauacucauagucauuauc

SEQ ID NO: 1374856 - RNA, 19 nt, Artificial Sequence
  Description of Artificial Sequence: Synthetic oligonucleotide
  Sense strand starting at position 1014 of SEQ ID NO: 1242814
gaguaucagaguugugaga

SEQ ID NO: 1374857 - RNA, 19 nt, Artificial Sequence
  Description of Artificial Sequence: Synthetic oligonucleotide
  Antisense strand to SEQ ID NO: 1374856
ucucacaacucugauacuc

SEQ ID NO: 1374858 - RNA, 19 nt, Artificial Sequence
  Description of Artificial Sequence: Synthetic oligonucleotide
  Sense strand starting at position 1109 of SEQ ID NO: 1242814
auguacugaucauaaagaa

SEQ ID NO: 1374859 - RNA, 19 nt, Artificial Sequence
  Description of Artificial Sequence: Synthetic oligonucleotide
  Antisense strand to SEQ ID NO: 1374858
uucuuuaugaucaguacau

SEQ ID NO: 1374860 - RNA, 19 nt, Artificial Sequence
  Description of Artificial Sequence: Synthetic oligonucleotide
  Sense strand starting at position 1491 of SEQ ID NO: 1242814
gcccgaaguccgagcugua

SEQ ID NO: 1374861 - RNA, 19 nt, Artificial Sequence
  Description of Artificial Sequence: Synthetic oligonucleotide
  Antisense strand to SEQ ID NO: 1374860
uacagcucggacuucgggc

SEQ ID NO: 1374862 - RNA, 19 nt, Artificial Sequence
  Description of Artificial Sequence: Synthetic oligonucleotide
  Sense strand starting at position 1501 of SEQ ID NO: 1242814
cgagcuguaauucguauga

SEQ ID NO: 1374863 - RNA, 19 nt, Artificial Sequence
  Description of Artificial Sequence: Synthetic oligonucleotide
  Antisense strand to SEQ ID NO: 1374862
ucauacgaauuacagcucg

SEQ ID NO: 1374864 - RNA, 19 nt, Artificial Sequence
  Description of Artificial Sequence: Synthetic oligonucleotide
  Sense strand starting at position 1505 of SEQ ID NO: 1242814
cuguaauucguaugaacag

SEQ ID NO: 1374865 - RNA, 19 nt, Artificial Sequence
  Description of Artificial Sequence: Synthetic oligonucleotide
  Antisense strand to SEQ ID NO: 1374864
cuguucauacgaauuacag

SEQ ID NO: 1374866 - RNA, 19 nt, Artificial Sequence
  Description of Artificial Sequence: Synthetic oligonucleotide
  Sense strand starting at position 1649 of SEQ ID NO: 1242814
cuagauaauccgggacuaa

SEQ ID NO: 1374867 - RNA, 19 nt, Artificial Sequence
  Description of Artificial Sequence: Synthetic oligonucleotide
  Antisense strand to SEQ ID NO: 1374866
uuagucccggauuaucuag

SEQ ID NO: 1374868 - RNA, 19 nt, Artificial Sequence
  Description of Artificial Sequence: Synthetic oligonucleotide
  Sense strand starting at position 2025 of SEQ ID NO: 1242814
gauuuaauuggccggaguu

SEQ ID NO: 1374869 - RNA, 19 nt, Artificial Sequence
  Description of Artificial Sequence: Synthetic oligonucleotide
  Antisense strand to SEQ ID NO: 1374868
aacuccggccaauuaaauc

SEQ ID NO: 1374870 - RNA, 19 nt, Artificial Sequence
  Description of Artificial Sequence: Synthetic oligonucleotide
  Sense strand starting at position 2026 of SEQ ID NO: 1242814
auuuaauuggccggaguuu

SEQ ID NO: 1374871 - RNA, 19 nt, Artificial Sequence
  Description of Artificial Sequence: Synthetic oligonucleotide
  Antisense strand to SEQ ID NO: 1374870
aaacuccggccaauuaaau

SEQ ID NO: 1374872 - RNA, 19 nt, Artificial Sequence
  Description of Artificial Sequence: Synthetic oligonucleotide
  Sense strand starting at position 2027 of SEQ ID NO: 1242814
uuuaauuggccggaguuua

SEQ ID NO: 1374873 - RNA, 19 nt, Artificial Sequence
  Description of Artificial Sequence: Synthetic oligonucleotide
  Antisense strand to SEQ ID NO: 1374872
uaaacuccggccaauuaaa

SEQ ID NO: 1374874 - RNA, 19 nt, Artificial Sequence
  Description of Artificial Sequence: Synthetic oligonucleotide
  Sense strand starting at position 2427 of SEQ ID NO: 1242814
ucacgugguggcguuuaaa

SEQ ID NO: 1374875 - RNA, 19 nt, Artificial Sequence
  Description of Artificial Sequence: Synthetic oligonucleotide
  Antisense strand to SEQ ID NO: 1374874
uuuaaacgccaccacguga

SEQ ID NO: 1374876 - RNA, 19 nt, Artificial Sequence
  Description of Artificial Sequence: Synthetic oligonucleotide
  Sense strand starting at position 2430 of SEQ ID NO: 1242814
cgugguggcguuuaaagaa

SEQ ID NO: 1374877 - RNA, 19 nt, Artificial Sequence
  Description of Artificial Sequence: Synthetic oligonucleotide
  Antisense strand to SEQ ID NO: 1374876
uucuuuaaacgccaccacg

SEQ ID NO: 1374878 - RNA, 19 nt, Artificial Sequence
  Description of Artificial Sequence: Synthetic oligonucleotide
  Sense strand starting at position 2460 of SEQ ID NO: 1242814
acaguagcagcgcauuaau

SEQ ID NO: 1374879 - RNA, 19 nt, Artificial Sequence
  Description of Artificial Sequence: Synthetic oligonucleotide
  Antisense strand to SEQ ID NO: 1374878
auuaaugcgcugcuacugu

SEQ ID NO: 1374880 - RNA, 19 nt, Artificial Sequence
  Description of Artificial Sequence: Synthetic oligonucleotide
  Sense strand starting at position 2463 of SEQ ID NO: 1242814
guagcagcgcauuaauaca

SEQ ID NO: 1374881 - RNA, 19 nt, Artificial Sequence
  Description of Artificial Sequence: Synthetic oligonucleotide
  Antisense strand to SEQ ID NO: 1374880
uguauuaaugcgcugcuac

SEQ ID NO: 1374882 - RNA, 19 nt, Artificial Sequence
  Description of Artificial Sequence: Synthetic oligonucleotide
  Sense strand starting at position 2471 of SEQ ID NO: 1242814
gcauuaauacaauguguaa

SEQ ID NO: 1374883 - RNA, 19 nt, Artificial Sequence
  Description of Artificial Sequence: Synthetic oligonucleotide
  Antisense strand to SEQ ID NO: 1374882
uuacacauuguauuaaugc

SEQ ID NO: 1374884 - RNA, 19 nt, Artificial Sequence
  Description of Artificial Sequence: Synthetic oligonucleotide
  Sense strand starting at position 2483 of SEQ ID NO: 1242814
uguguaacaguuuguagau

SEQ ID NO: 1374885 - RNA, 19 nt, Artificial Sequence
  Description of Artificial Sequence: Synthetic oligonucleotide
  Antisense strand to SEQ ID NO: 1374884
aucuacaaacuguuacaca

SEQ ID NO: 1374886 - RNA, 19 nt, Artificial Sequence
  Description of Artificial Sequence: Synthetic oligonucleotide
  Sense strand starting at position 2484 of SEQ ID NO: 1242814
guguaacaguuuguagaua

SEQ ID NO: 1374887 - RNA, 19 nt, Artificial Sequence
  Description of Artificial Sequence: Synthetic oligonucleotide
  Antisense strand to SEQ ID NO: 1374886
uaucuacaaacuguuacac

SEQ ID NO: 1374888 - RNA, 19 nt, Artificial Sequence
  Description of Artificial Sequence: Synthetic oligonucleotide
  Sense strand starting at position 2497 of SEQ ID NO: 1242814
uagauaaagcuguaucgac

SEQ ID NO: 1374889 - RNA, 19 nt, Artificial Sequence
  Description of Artificial Sequence: Synthetic oligonucleotide
  Antisense strand to SEQ ID NO: 1374888
gucgauacagcuuuaucua

SEQ ID NO: 1374890 - RNA, 19 nt, Artificial Sequence
  Description of Artificial Sequence: Synthetic oligonucleotide
  Sense strand starting at position 2606 of SEQ ID NO: 1242814
uccuuucguguguuaaugu

SEQ ID NO: 1374891 - RNA, 19 nt, Artificial Sequence
  Description of Artificial Sequence: Synthetic oligonucleotide
  Antisense strand to SEQ ID NO: 1374890
acauuaacacacgaaagga

SEQ ID NO: 1374892 - RNA, 19 nt, Artificial Sequence
  Description of Artificial Sequence: Synthetic oligonucleotide
  Sense strand starting at position 2699 of SEQ ID NO: 1242814
cauaaaugguaugaucuga

SEQ ID NO: 1374893 - RNA, 19 nt, Artificial Sequence
  Description of Artificial Sequence: Synthetic oligonucleotide
  Antisense strand to SEQ ID NO: 1374892
ucagaucauaccauuuaug

SEQ ID NO: 1374894 - RNA, 19 nt, Artificial Sequence
  Description of Artificial Sequence: Synthetic oligonucleotide
  Sense strand starting at position 2707 of SEQ ID NO: 1242814
guaugaucugaaugguucu

SEQ ID NO: 1374895 - RNA, 19 nt, Artificial Sequence
  Description of Artificial Sequence: Synthetic oligonucleotide
  Antisense strand to SEQ ID NO: 1374894
agaaccauucagaucauac

SEQ ID NO: 1374896 - RNA, 19 nt, Artificial Sequence
  Description of Artificial Sequence: Synthetic oligonucleotide
  Sense strand starting at position 2714 of SEQ ID NO: 1242814
cugaaugguucugcagguu

SEQ ID NO: 1374897 - RNA, 19 nt, Artificial Sequence
  Description of Artificial Sequence: Synthetic oligonucleotide
  Antisense strand to SEQ ID NO: 1374896
aaccugcagaaccauucag

SEQ ID NO: 1374898 - RNA, 19 nt, Artificial Sequence
  Description of Artificial Sequence: Synthetic oligonucleotide
  Sense strand starting at position 2751 of SEQ ID NO: 1242814
aggacauguuuaucuaccu

SEQ ID NO: 1374899 - RNA, 19 nt, Artificial Sequence
  Description of Artificial Sequence: Synthetic oligonucleotide
  Antisense strand to SEQ ID NO: 1374898
agguagauaaacauguccu

SEQ ID NO: 1374900 - RNA, 19 nt, Artificial Sequence
  Description of Artificial Sequence: Synthetic oligonucleotide
  Sense strand starting at position 2752 of SEQ ID NO: 1242814
ggacauguuuaucuaccuu

SEQ ID NO: 1374901 - RNA, 19 nt, Artificial Sequence
  Description of Artificial Sequence: Synthetic oligonucleotide
  Antisense strand to SEQ ID NO: 1374900
aagguagauaaacaugucc

SEQ ID NO: 1374902 - RNA, 19 nt, Artificial Sequence
  Description of Artificial Sequence: Synthetic oligonucleotide
  Sense strand starting at position 3019 of SEQ ID NO: 1242814
gcccuugcuucuuuagacu

SEQ ID NO: 1374903 - RNA, 19 nt, Artificial Sequence
  Description of Artificial Sequence: Synthetic oligonucleotide
  Antisense strand to SEQ ID NO: 1374902
agucuaaagaagcaagggc

SEQ ID NO: 1374904 - RNA, 19 nt, Artificial Sequence
  Description of Artificial Sequence: Synthetic oligonucleotide
  Sense strand starting at position 3025 of SEQ ID NO: 1242814
gcuucuuuagacuguacuu

SEQ ID NO: 1374905 - RNA, 19 nt, Artificial Sequence
  Description of Artificial Sequence: Synthetic oligonucleotide
  Antisense strand to SEQ ID NO: 1374904
aaguacagucuaaagaagc

SEQ ID NO: 1374906 - RNA, 19 nt, Artificial Sequence
  Description of Artificial Sequence: Synthetic oligonucleotide
  Sense strand starting at position 3027 of SEQ ID NO: 1242814
uucuuuagacuguacuuua

SEQ ID NO: 1374907 - RNA, 19 nt, Artificial Sequence
  Description of Artificial Sequence: Synthetic oligonucleotide
  Antisense strand to SEQ ID NO: 1374906
uaaaguacagucuaaagaa

SEQ ID NO: 1374908 - RNA, 19 nt, Artificial Sequence
  Description of Artificial Sequence: Synthetic oligonucleotide
  Sense strand starting at position 3068 of SEQ ID NO: 1242814
ccagcuugugcugauguua

SEQ ID NO: 1374909 - RNA, 19 nt, Artificial Sequence
  Description of Artificial Sequence: Synthetic oligonucleotide
  Antisense strand to SEQ ID NO: 1374908
uaacaucagcacaagcugg

SEQ ID NO: 1374910 - RNA, 19 nt, Artificial Sequence
  Description of Artificial Sequence: Synthetic oligonucleotide
  Sense strand starting at position 3076 of SEQ ID NO: 1242814
ugcugauguuauucuuauc

SEQ ID NO: 1374911 - RNA, 19 nt, Artificial Sequence
  Description of Artificial Sequence: Synthetic oligonucleotide
  Antisense strand to SEQ ID NO: 1374910
gauaagaauaacaucagca

SEQ ID NO: 1374912 - RNA, 19 nt, Artificial Sequence
  Description of Artificial Sequence: Synthetic oligonucleotide
  Sense strand starting at position 3491 of SEQ ID NO: 1242814
guuggcaacuugucuagua

SEQ ID NO: 1374913 - RNA, 19 nt, Artificial Sequence
  Description of Artificial Sequence: Synthetic oligonucleotide
  Antisense strand to SEQ ID NO: 1374912
uacuagacaaguugccaac

SEQ ID NO: 1374914 - RNA, 19 nt, Artificial Sequence
  Description of Artificial Sequence: Synthetic oligonucleotide
  Sense strand starting at position 3549 of SEQ ID NO: 1242814
gacagacucuccgcucuau

SEQ ID NO: 1374915 - RNA, 19 nt, Artificial Sequence
  Description of Artificial Sequence: Synthetic oligonucleotide
  Antisense strand to SEQ ID NO: 1374914
auagagcggagagucuguc

SEQ ID NO: 1374916 - RNA, 19 nt, Artificial Sequence
  Description of Artificial Sequence: Synthetic oligonucleotide
  Sense strand starting at position 23 of SEQ ID NO: 1242815
ccauucucucagugaucca

SEQ ID NO: 1374917 - RNA, 19 nt, Artificial Sequence
  Description of Artificial Sequence: Synthetic oligonucleotide
  Antisense strand to SEQ ID NO: 1374916
uggaucacugagagaaugg

SEQ ID NO: 1374918 - RNA, 19 nt, Artificial Sequence
  Description of Artificial Sequence: Synthetic oligonucleotide
  Sense strand starting at position 129 of SEQ ID NO: 1242815
uaaucauaucuuugugggu

SEQ ID NO: 1374919 - RNA, 19 nt, Artificial Sequence
  Description of Artificial Sequence: Synthetic oligonucleotide
  Antisense strand to SEQ ID NO: 1374918
acccacaaagauaugauua

SEQ ID NO: 1374920 - RNA, 19 nt, Artificial Sequence
  Description of Artificial Sequence: Synthetic oligonucleotide
  Sense strand starting at position 130 of SEQ ID NO: 1242815
aaucauaucuuuguggguu

SEQ ID NO: 1374921 - RNA, 19 nt, Artificial Sequence
  Description of Artificial Sequence: Synthetic oligonucleotide
  Antisense strand to SEQ ID NO: 1374920
aacccacaaagauaugauu

SEQ ID NO: 1374922 - RNA, 19 nt, Artificial Sequence
  Description of Artificial Sequence: Synthetic oligonucleotide
  Sense strand starting at position 269 of SEQ ID NO: 1242815
uccugagaugcuuacaaug

SEQ ID NO: 1374923 - RNA, 19 nt, Artificial Sequence
  Description of Artificial Sequence: Synthetic oligonucleotide
  Antisense strand to SEQ ID NO: 1374922
cauuguaagcaucucagga

SEQ ID NO: 1374924 - RNA, 19 nt, Artificial Sequence
  Description of Artificial Sequence: Synthetic oligonucleotide
  Sense strand starting at position 295 of SEQ ID NO: 1242815
gucagauucucccugaauu

SEQ ID NO: 1374925 - RNA, 19 nt, Artificial Sequence
  Description of Artificial Sequence: Synthetic oligonucleotide
  Antisense strand to SEQ ID NO: 1374924
aauucagggagaaucugac

SEQ ID NO: 1374926 - RNA, 19 nt, Artificial Sequence
  Description of Artificial Sequence: Synthetic oligonucleotide
  Sense strand starting at position 296 of SEQ ID NO: 1242815
ucagauucucccugaauug

SEQ ID NO: 1374927 - RNA, 19 nt, Artificial Sequence
  Description of Artificial Sequence: Synthetic oligonucleotide
  Antisense strand to SEQ ID NO: 1374926
caauucagggagaaucuga

SEQ ID NO: 1374928 - RNA, 19 nt, Artificial Sequence
  Description of Artificial Sequence: Synthetic oligonucleotide
  Sense strand starting at position 377 of SEQ ID NO: 1242815
gcagguccucuacagaaua

SEQ ID NO: 1374929 - RNA, 19 nt, Artificial Sequence
  Description of Artificial Sequence: Synthetic oligonucleotide
  Antisense strand to SEQ ID NO: 1374928
uauucuguagaggaccugc

SEQ ID NO: 1374930 - RNA, 19 nt, Artificial Sequence
  Description of Artificial Sequence: Synthetic oligonucleotide
  Sense strand starting at position 783 of SEQ ID NO: 1242815
gggaccuguccugaugcuu

SEQ ID NO: 1374931 - RNA, 19 nt, Artificial Sequence
  Description of Artificial Sequence: Synthetic oligonucleotide
  Antisense strand to SEQ ID NO: 1374930
aagcaucaggacagguccc

SEQ ID NO: 1374932 - RNA, 19 nt, Artificial Sequence
  Description of Artificial Sequence: Synthetic oligonucleotide
  Sense strand starting at position 857 of SEQ ID NO: 1242815
ccgugaguccucucugcau

SEQ ID NO: 1374933 - RNA, 19 nt, Artificial Sequence
  Description of Artificial Sequence: Synthetic oligonucleotide
  Antisense strand to SEQ ID NO: 1374932
augcagagaggacucacgg

SEQ ID NO: 1374934 - RNA, 19 nt, Artificial Sequence
  Description of Artificial Sequence: Synthetic oligonucleotide
  Sense strand starting at position 919 of SEQ ID NO: 1242815
acccaugaauguuugaaga

SEQ ID NO: 1374935 - RNA, 19 nt, Artificial Sequence
  Description of Artificial Sequence: Synthetic oligonucleotide
  Antisense strand to SEQ ID NO: 1374934
ucuucaaacauucaugggu

SEQ ID NO: 1374936 - RNA, 19 nt, Artificial Sequence
  Description of Artificial Sequence: Synthetic oligonucleotide
  Sense strand starting at position 981 of SEQ ID NO: 1242815
ccaggaagcuuuccaucua

SEQ ID NO: 1374937 - RNA, 19 nt, Artificial Sequence
  Description of Artificial Sequence: Synthetic oligonucleotide
  Antisense strand to SEQ ID NO: 1374936
uagauggaaagcuuccugg

SEQ ID NO: 1374938 - RNA, 19 nt, Artificial Sequence
  Description of Artificial Sequence: Synthetic oligonucleotide
  Sense strand starting at position 1047 of SEQ ID NO: 1242815
aggagauuccgaggcugau

SEQ ID NO: 1374939 - RNA, 19 nt, Artificial Sequence
  Description of Artificial Sequence: Synthetic oligonucleotide
  Antisense strand to SEQ ID NO: 1374938
aucagccucggaaucuccu

SEQ ID NO: 1374940 - RNA, 19 nt, Artificial Sequence
  Description of Artificial Sequence: Synthetic oligonucleotide
  Sense strand starting at position 1215 of SEQ ID NO: 1242815
ccaggagauucugcaacua

SEQ ID NO: 1374941 - RNA, 19 nt, Artificial Sequence
  Description of Artificial Sequence: Synthetic oligonucleotide
  Antisense strand to SEQ ID NO: 1374940
uaguugcagaaucuccugg

SEQ ID NO: 1374942 - RNA, 19 nt, Artificial Sequence
  Description of Artificial Sequence: Synthetic oligonucleotide
  Sense strand starting at position 1257 of SEQ ID NO: 1242815
gucauuuccucuuuccgga

SEQ ID NO: 1374943 - RNA, 19 nt, Artificial Sequence
  Description of Artificial Sequence: Synthetic oligonucleotide
  Antisense strand to SEQ ID NO: 1374942
uccggaaagaggaaaugac

SEQ ID NO: 1374944 - RNA, 19 nt, Artificial Sequence
  Description of Artificial Sequence: Synthetic oligonucleotide
  Sense strand starting at position 2001 of SEQ ID NO: 1242815
gaccaauuacgggaguucu

SEQ ID NO: 1374945 - RNA, 19 nt, Artificial Sequence
  Description of Artificial Sequence: Synthetic oligonucleotide
  Antisense strand to SEQ ID NO: 1374944
agaacucccguaauugguc

SEQ ID NO: 1374946 - RNA, 19 nt, Artificial Sequence
  Description of Artificial Sequence: Synthetic oligonucleotide
  Sense strand starting at position 2102 of SEQ ID NO: 1242815
gaccaaucugagggagcuu

SEQ ID NO: 1374947 - RNA, 19 nt, Artificial Sequence
  Description of Artificial Sequence: Synthetic oligonucleotide
  Antisense strand to SEQ ID NO: 1374946
aagcucccucagauugguc

SEQ ID NO: 1374948 - RNA, 19 nt, Artificial Sequence
  Description of Artificial Sequence: Synthetic oligonucleotide
  Sense strand starting at position 2136 of SEQ ID NO: 1242815
agucuuaggcccuggaauu

SEQ ID NO: 1374949 - RNA, 19 nt, Artificial Sequence
  Description of Artificial Sequence: Synthetic oligonucleotide
  Antisense strand to SEQ ID NO: 1374948
aauuccagggccuaagacu

SEQ ID NO: 1374950 - RNA, 19 nt, Artificial Sequence
  Description of Artificial Sequence: Synthetic oligonucleotide
  Sense strand starting at position 2331 of SEQ ID NO: 1242815
cccuaugcauagguauuaa

SEQ ID NO: 1374951 - RNA, 19 nt, Artificial Sequence
  Description of Artificial Sequence: Synthetic oligonucleotide
  Antisense strand to SEQ ID NO: 1374950
uuaauaccuaugcauaggg

SEQ ID NO: 1374952 - RNA, 19 nt, Artificial Sequence
  Description of Artificial Sequence: Synthetic oligonucleotide
  Sense strand starting at position 2356 of SEQ ID NO: 1242815
gcuuaaggacguugagaaa

SEQ ID NO: 1374953 - RNA, 19 nt, Artificial Sequence
  Description of Artificial Sequence: Synthetic oligonucleotide
  Antisense strand to SEQ ID NO: 1374952
uuucucaacguccuuaagc

SEQ ID NO: 1374954 - RNA, 19 nt, Artificial Sequence
  Description of Artificial Sequence: Synthetic oligonucleotide
  Sense strand starting at position 2395 of SEQ ID NO: 1242815
cuauuuggaugggauugaa

SEQ ID NO: 1374955 - RNA, 19 nt, Artificial Sequence
  Description of Artificial Sequence: Synthetic oligonucleotide
  Antisense strand to SEQ ID NO: 1374954
uucaaucccauccaaauag

SEQ ID NO: 1374956 - RNA, 19 nt, Artificial Sequence
  Description of Artificial Sequence: Synthetic oligonucleotide
  Sense strand starting at position 2427 of SEQ ID NO: 1242815
guaagaucagacggcagua

SEQ ID NO: 1374957 - RNA, 19 nt, Artificial Sequence
  Description of Artificial Sequence: Synthetic oligonucleotide
  Antisense strand to SEQ ID NO: 1374956
uacugccgucugaucuuac

SEQ ID NO: 1374958 - RNA, 19 nt, Artificial Sequence
  Description of Artificial Sequence: Synthetic oligonucleotide
  Sense strand starting at position 2538 of SEQ ID NO: 1242815
aacguacauugcccugaaa

SEQ ID NO: 1374959 - RNA, 19 nt, Artificial Sequence
  Description of Artificial Sequence: Synthetic oligonucleotide
  Antisense strand to SEQ ID NO: 1374958
uuucagggcaauguacguu

SEQ ID NO: 1374960 - RNA, 19 nt, Artificial Sequence
  Description of Artificial Sequence: Synthetic oligonucleotide
  Sense strand starting at position 2541 of SEQ ID NO: 1242815
guacauugcccugaaacac

SEQ ID NO: 1374961 - RNA, 19 nt, Artificial Sequence
  Description of Artificial Sequence: Synthetic oligonucleotide
  Antisense strand to SEQ ID NO: 1374960
guguuucagggcaauguac

SEQ ID NO: 1374962 - RNA, 19 nt, Artificial Sequence
  Description of Artificial Sequence: Synthetic oligonucleotide
  Sense strand starting at position 2716 of SEQ ID NO: 1242815
ugaguuauuggccauggga

SEQ ID NO: 1374963 - RNA, 19 nt, Artificial Sequence
  Description of Artificial Sequence: Synthetic oligonucleotide
  Antisense strand to SEQ ID NO: 1374962
ucccauggccaauaacuca

SEQ ID NO: 1374964 - RNA, 19 nt, Artificial Sequence
  Description of Artificial Sequence: Synthetic oligonucleotide
  Sense strand starting at position 2819 of SEQ ID NO: 1242815
cucugauuuccacguuuaa

SEQ ID NO: 1374965 - RNA, 19 nt, Artificial Sequence
  Description of Artificial Sequence: Synthetic oligonucleotide
  Antisense strand to SEQ ID NO: 1374964
uuaaacguggaaaucagag

SEQ ID NO: 1374966 - RNA, 19 nt, Artificial Sequence
  Description of Artificial Sequence: Synthetic oligonucleotide
  Sense strand starting at position 2913 of SEQ ID NO: 1242815
aucccaaggcugugacaau

SEQ ID NO: 1374967 - RNA, 19 nt, Artificial Sequence
  Description of Artificial Sequence: Synthetic oligonucleotide
  Antisense strand to SEQ ID NO: 1374966
auugucacagccuugggau

SEQ ID NO: 1374968 - RNA, 19 nt, Artificial Sequence
  Description of Artificial Sequence: Synthetic oligonucleotide
  Sense strand starting at position 2930 of SEQ ID NO: 1242815
auugcaauucuagguauau

SEQ ID NO: 1374969 - RNA, 19 nt, Artificial Sequence
  Description of Artificial Sequence: Synthetic oligonucleotide
  Antisense strand to SEQ ID NO: 1374968
auauaccuagaauugcaau

SEQ ID NO: 1374970 - RNA, 19 nt, Artificial Sequence
  Description of Artificial Sequence: Synthetic oligonucleotide
  Sense strand starting at position 2931 of SEQ ID NO: 1242815
uugcaauucuagguauaug

SEQ ID NO: 1374971 - RNA, 19 nt, Artificial Sequence
  Description of Artificial Sequence: Synthetic oligonucleotide
  Antisense strand to SEQ ID NO: 1374970
cauauaccuagaauugcaa

SEQ ID NO: 1374972 - RNA, 19 nt, Artificial Sequence
  Description of Artificial Sequence: Synthetic oligonucleotide
  Sense strand starting at position 2943 of SEQ ID NO: 1242815
guauaugcccuagagaaau

SEQ ID NO: 1374973 - RNA, 19 nt, Artificial Sequence
  Description of Artificial Sequence: Synthetic oligonucleotide
  Antisense strand to SEQ ID NO: 1374972
auuucucuagggcauauac

SEQ ID NO: 1374974 - RNA, 19 nt, Artificial Sequence
  Description of Artificial Sequence: Synthetic oligonucleotide
  Sense strand starting at position 2962 of SEQ ID NO: 1242815
uaaugaauaugugcagaga

SEQ ID NO: 1374975 - RNA, 19 nt, Artificial Sequence
  Description of Artificial Sequence: Synthetic oligonucleotide
  Antisense strand to SEQ ID NO: 1374974
ucucugcacauauucauua

SEQ ID NO: 1374976 - RNA, 19 nt, Artificial Sequence
  Description of Artificial Sequence: Synthetic oligonucleotide
  Sense strand starting at position 3100 of SEQ ID NO: 1242815
gcaguuaagauuggauaca

SEQ ID NO: 1374977 - RNA, 19 nt, Artificial Sequence
  Description of Artificial Sequence: Synthetic oligonucleotide
  Antisense strand to SEQ ID NO: 1374976
uguauccaaucuuaacugc

SEQ ID NO: 1374978 - RNA, 19 nt, Artificial Sequence
  Description of Artificial Sequence: Synthetic oligonucleotide
  Sense strand starting at position 3243 of SEQ ID NO: 1242815
uggauugggcucuagcaau

SEQ ID NO: 1374979 - RNA, 19 nt, Artificial Sequence
  Description of Artificial Sequence: Synthetic oligonucleotide
  Antisense strand to SEQ ID NO: 1374978
auugcuagagcccaaucca

SEQ ID NO: 1374980 - RNA, 19 nt, Artificial Sequence
  Description of Artificial Sequence: Synthetic oligonucleotide
  Sense strand starting at position 3324 of SEQ ID NO: 1242815
aggaauuuauuguaaggau

SEQ ID NO: 1374981 - RNA, 19 nt, Artificial Sequence
  Description of Artificial Sequence: Synthetic oligonucleotide
  Antisense strand to SEQ ID NO: 1374980
auccuuacaauaaauuccu

SEQ ID NO: 1374982 - RNA, 19 nt, Artificial Sequence
  Description of Artificial Sequence: Synthetic oligonucleotide
  Sense strand starting at position 3343 of SEQ ID NO: 1242815
acaagagugucuccagaau

SEQ ID NO: 1374983 - RNA, 19 nt, Artificial Sequence
  Description of Artificial Sequence: Synthetic oligonucleotide
  Antisense strand to SEQ ID NO: 1374982
auucuggagacacucuugu

SEQ ID NO: 1374984 - RNA, 19 nt, Artificial Sequence
  Description of Artificial Sequence: Synthetic oligonucleotide
  Sense strand starting at position 3458 of SEQ ID NO: 1242815
cccuauaugguagguaaua

SEQ ID NO: 1374985 - RNA, 19 nt, Artificial Sequence
  Description of Artificial Sequence: Synthetic oligonucleotide
  Antisense strand to SEQ ID NO: 1374984
uauuaccuaccauauaggg

SEQ ID NO: 1374986 - RNA, 19 nt, Artificial Sequence
  Description of Artificial Sequence: Synthetic oligonucleotide
  Sense strand starting at position 3468 of SEQ ID NO: 1242815
uagguaauauuguugucau

SEQ ID NO: 1374987 - RNA, 19 nt, Artificial Sequence
  Description of Artificial Sequence: Synthetic oligonucleotide
  Antisense strand to SEQ ID NO: 1374986
augacaacaauauuaccua

SEQ ID NO: 1374988 - RNA, 19 nt, Artificial Sequence
  Description of Artificial Sequence: Synthetic oligonucleotide
  Sense strand starting at position 3922 of SEQ ID NO: 1242815
uaugauguauugccugaaa

SEQ ID NO: 1374989 - RNA, 19 nt, Artificial Sequence
  Description of Artificial Sequence: Synthetic oligonucleotide
  Antisense strand to SEQ ID NO: 1374988
uuucaggcaauacaucaua

SEQ ID NO: 1374990 - RNA, 19 nt, Artificial Sequence
  Description of Artificial Sequence: Synthetic oligonucleotide
  Sense strand starting at position 3924 of SEQ ID NO: 1242815
ugauguauugccugaaaug

SEQ ID NO: 1374991 - RNA, 19 nt, Artificial Sequence
  Description of Artificial Sequence: Synthetic oligonucleotide
  Antisense strand to SEQ ID NO: 1374990
cauuucaggcaauacauca

SEQ ID NO: 1374992 - RNA, 19 nt, Artificial Sequence
  Description of Artificial Sequence: Synthetic oligonucleotide
  Sense strand starting at position 3925 of SEQ ID NO: 1242815
gauguauugccugaaaugg

SEQ ID NO: 1374993 - RNA, 19 nt, Artificial Sequence
  Description of Artificial Sequence: Synthetic oligonucleotide
  Antisense strand to SEQ ID NO: 1374992
ccauuucaggcaauacauc

SEQ ID NO: 1374994 - RNA, 19 nt, Artificial Sequence
  Description of Artificial Sequence: Synthetic oligonucleotide
  Sense strand starting at position 3933 of SEQ ID NO: 1242815
gccugaaauggcgauaaau

SEQ ID NO: 1374995 - RNA, 19 nt, Artificial Sequence
  Description of Artificial Sequence: Synthetic oligonucleotide
  Antisense strand to SEQ ID NO: 1374994
auuuaucgccauuucaggc

SEQ ID NO: 1374996 - RNA, 19 nt, Artificial Sequence
  Description of Artificial Sequence: Synthetic oligonucleotide
  Sense strand starting at position 141 of SEQ ID NO: 1242816
cgauguaagcuccaugaaa

SEQ ID NO: 1374997 - RNA, 19 nt, Artificial Sequence
  Description of Artificial Sequence: Synthetic oligonucleotide
  Antisense strand to SEQ ID NO: 1374996
uuucauggagcuuacaucg

SEQ ID NO: 1374998 - RNA, 19 nt, Artificial Sequence
  Description of Artificial Sequence: Synthetic oligonucleotide
  Sense strand starting at position 173 of SEQ ID NO: 1242816
gcuuguguucaccugugua

SEQ ID NO: 1374999 - RNA, 19 nt, Artificial Sequence
  Description of Artificial Sequence: Synthetic oligonucleotide
  Antisense strand to SEQ ID NO: 1374998
uacacaggugaacacaagc

SEQ ID NO: 1375000 - RNA, 19 nt, Artificial Sequence
  Description of Artificial Sequence: Synthetic oligonucleotide
  Sense strand starting at position 246 of SEQ ID NO: 1242816
auuaaugaacugugaacuu

SEQ ID NO: 1375001 - RNA, 19 nt, Artificial Sequence
  Description of Artificial Sequence: Synthetic oligonucleotide
  Antisense strand to SEQ ID NO: 1375000
aaguucacaguucauuaau

SEQ ID NO: 1375002 - RNA, 19 nt, Artificial Sequence
  Description of Artificial Sequence: Synthetic oligonucleotide
  Sense strand starting at position 284 of SEQ ID NO: 1242816
gguucuaaaucaguuaaag

SEQ ID NO: 1375003 - RNA, 19 nt, Artificial Sequence
  Description of Artificial Sequence: Synthetic oligonucleotide
  Antisense strand to SEQ ID NO: 1375002
cuuuaacugauuuagaacc

SEQ ID NO: 1375004 - RNA, 19 nt, Artificial Sequence
  Description of Artificial Sequence: Synthetic oligonucleotide
  Sense strand starting at position 303 of SEQ ID NO: 1242816
ugagaacaguagucauucu

SEQ ID NO: 1375005 - RNA, 19 nt, Artificial Sequence
  Description of Artificial Sequence: Synthetic oligonucleotide
  Antisense strand to SEQ ID NO: 1375004
agaaugacuacuguucuca

SEQ ID NO: 1375006 - RNA, 19 nt, Artificial Sequence
  Description of Artificial Sequence: Synthetic oligonucleotide
  Sense strand starting at position 354 of SEQ ID NO: 1242816
cuguuacugguauaaucaa

SEQ ID NO: 1375007 - RNA, 19 nt, Artificial Sequence
  Description of Artificial Sequence: Synthetic oligonucleotide
  Antisense strand to SEQ ID NO: 1375006
uugauuauaccaguaacag

SEQ ID NO: 1375008 - RNA, 19 nt, Artificial Sequence
  Description of Artificial Sequence: Synthetic oligonucleotide
  Sense strand starting at position 397 of SEQ ID NO: 1242816
gcccgaaagcccugaauag

SEQ ID NO: 1375009 - RNA, 19 nt, Artificial Sequence
  Description of Artificial Sequence: Synthetic oligonucleotide
  Antisense strand to SEQ ID NO: 1375008
cuauucagggcuuucgggc

SEQ ID NO: 1375010 - RNA, 19 nt, Artificial Sequence
  Description of Artificial Sequence: Synthetic oligonucleotide
  Sense strand starting at position 616 of SEQ ID NO: 1242816
ucugauaucugucugagag

SEQ ID NO: 1375011 - RNA, 19 nt, Artificial Sequence
  Description of Artificial Sequence: Synthetic oligonucleotide
  Antisense strand to SEQ ID NO: 1375010
cucucagacagauaucaga

SEQ ID NO: 1375012 - RNA, 19 nt, Artificial Sequence
  Description of Artificial Sequence: Synthetic oligonucleotide
  Sense strand starting at position 617 of SEQ ID NO: 1242816
cugauaucugucugagagg

SEQ ID NO: 1375013 - RNA, 19 nt, Artificial Sequence
  Description of Artificial Sequence: Synthetic oligonucleotide
  Antisense strand to SEQ ID NO: 1375012
ccucucagacagauaucag

SEQ ID NO: 1375014 - RNA, 19 nt, Artificial Sequence
  Description of Artificial Sequence: Synthetic oligonucleotide
  Sense strand starting at position 636 of SEQ ID NO: 1242816
cuagaagagugcuccuuga

SEQ ID NO: 1375015 - RNA, 19 nt, Artificial Sequence
  Description of Artificial Sequence: Synthetic oligonucleotide
  Antisense strand to SEQ ID NO: 1375014
ucaaggagcacucuucuag

SEQ ID NO: 1375016 - RNA, 19 nt, Artificial Sequence
  Description of Artificial Sequence: Synthetic oligonucleotide
  Sense strand starting at position 740 of SEQ ID NO: 1242816
uguauucgcccuuaaacca

SEQ ID NO: 1375017 - RNA, 19 nt, Artificial Sequence
  Description of Artificial Sequence: Synthetic oligonucleotide
  Antisense strand to SEQ ID NO: 1375016
ugguuuaagggcgaauaca

SEQ ID NO: 1375018 - RNA, 19 nt, Artificial Sequence
  Description of Artificial Sequence: Synthetic oligonucleotide
  Sense strand starting at position 804 of SEQ ID NO: 1242816
agaaucagcuacguaaaga

SEQ ID NO: 1375019 - RNA, 19 nt, Artificial Sequence
  Description of Artificial Sequence: Synthetic oligonucleotide
  Antisense strand to SEQ ID NO: 1375018
ucuuuacguagcugauucu

SEQ ID NO: 1375020 - RNA, 19 nt, Artificial Sequence
  Description of Artificial Sequence: Synthetic oligonucleotide
  Sense strand starting at position 841 of SEQ ID NO: 1242816
gaacgugucacugaugauu

SEQ ID NO: 1375021 - RNA, 19 nt, Artificial Sequence
  Description of Artificial Sequence: Synthetic oligonucleotide
  Antisense strand to SEQ ID NO: 1375020
aaucaucagugacacguuc

SEQ ID NO: 1375022 - RNA, 19 nt, Artificial Sequence
  Description of Artificial Sequence: Synthetic oligonucleotide
  Sense strand starting at position 893 of SEQ ID NO: 1242816
agagcuauuguccaauugu

SEQ ID NO: 1375023 - RNA, 19 nt, Artificial Sequence
  Description of Artificial Sequence: Synthetic oligonucleotide
  Antisense strand to SEQ ID NO: 1375022
acaauuggacaauagcucu

SEQ ID NO: 1375024 - RNA, 19 nt, Artificial Sequence
  Description of Artificial Sequence: Synthetic oligonucleotide
  Sense strand starting at position 945 of SEQ ID NO: 1242816
ucugaagugcaucaugaaa

SEQ ID NO: 1375025 - RNA, 19 nt, Artificial Sequence
  Description of Artificial Sequence: Synthetic oligonucleotide
  Antisense strand to SEQ ID NO: 1375024
uuucaugaugcacuucaga

SEQ ID NO: 1375026 - RNA, 19 nt, Artificial Sequence
  Description of Artificial Sequence: Synthetic oligonucleotide
  Sense strand starting at position 989 of SEQ ID NO: 1242816
ccagaauuagccuagcaaa

SEQ ID NO: 1375027 - RNA, 19 nt, Artificial Sequence
  Description of Artificial Sequence: Synthetic oligonucleotide
  Antisense strand to SEQ ID NO: 1375026
uuugcuaggcuaauucugg

SEQ ID NO: 1375028 - RNA, 19 nt, Artificial Sequence
  Description of Artificial Sequence: Synthetic oligonucleotide
  Sense strand starting at position 1062 of SEQ ID NO: 1242816
gcaagagaccuugauuccu

SEQ ID NO: 1375029 - RNA, 19 nt, Artificial Sequence
  Description of Artificial Sequence: Synthetic oligonucleotide
  Antisense strand to SEQ ID NO: 1375028
aggaaucaaggucucuugc

SEQ ID NO: 1375030 - RNA, 19 nt, Artificial Sequence
  Description of Artificial Sequence: Synthetic oligonucleotide
  Sense strand starting at position 1070 of SEQ ID NO: 1242816
ccuugauuccugggcuaug

SEQ ID NO: 1375031 - RNA, 19 nt, Artificial Sequence
  Description of Artificial Sequence: Synthetic oligonucleotide
  Antisense strand to SEQ ID NO: 1375030
cauagcccaggaaucaagg

SEQ ID NO: 1375032 - RNA, 19 nt, Artificial Sequence
  Description of Artificial Sequence: Synthetic oligonucleotide
  Sense strand starting at position 1071 of SEQ ID NO: 1242816
cuugauuccugggcuauga

SEQ ID NO: 1375033 - RNA, 19 nt, Artificial Sequence
  Description of Artificial Sequence: Synthetic oligonucleotide
  Antisense strand to SEQ ID NO: 1375032
ucauagcccaggaaucaag

SEQ ID NO: 1375034 - RNA, 19 nt, Artificial Sequence
  Description of Artificial Sequence: Synthetic oligonucleotide
  Sense strand starting at position 1106 of SEQ ID NO: 1242816
uugcaaaggcucuggaauu

SEQ ID NO: 1375035 - RNA, 19 nt, Artificial Sequence
  Description of Artificial Sequence: Synthetic oligonucleotide
  Antisense strand to SEQ ID NO: 1375034
aauuccagagccuuugcaa

SEQ ID NO: 1375036 - RNA, 19 nt, Artificial Sequence
  Description of Artificial Sequence: Synthetic oligonucleotide
  Sense strand starting at position 1467 of SEQ ID NO: 1242816
ccucauuaccucggacaca

SEQ ID NO: 1375037 - RNA, 19 nt, Artificial Sequence
  Description of Artificial Sequence: Synthetic oligonucleotide
  Antisense strand to SEQ ID NO: 1375036
uguguccgagguaaugagg

SEQ ID NO: 1375038 - RNA, 19 nt, Artificial Sequence
  Description of Artificial Sequence: Synthetic oligonucleotide
  Sense strand starting at position 1480 of SEQ ID NO: 1242816
gacacagaugguuaucguu

SEQ ID NO: 1375039 - RNA, 19 nt, Artificial Sequence
  Description of Artificial Sequence: Synthetic oligonucleotide
  Antisense strand to SEQ ID NO: 1375038
aacgauaaccaucuguguc

SEQ ID NO: 1375040 - RNA, 19 nt, Artificial Sequence
  Description of Artificial Sequence: Synthetic oligonucleotide
  Sense strand starting at position 1482 of SEQ ID NO: 1242816
cacagaugguuaucguuua

SEQ ID NO: 1375041 - RNA, 19 nt, Artificial Sequence
  Description of Artificial Sequence: Synthetic oligonucleotide
  Antisense strand to SEQ ID NO: 1375040
uaaacgauaaccaucugug

SEQ ID NO: 1375042 - RNA, 19 nt, Artificial Sequence
  Description of Artificial Sequence: Synthetic oligonucleotide
  Sense strand starting at position 1541 of SEQ ID NO: 1242816
uaauuccagggcuguuaau

SEQ ID NO: 1375043 - RNA, 19 nt, Artificial Sequence
  Description of Artificial Sequence: Synthetic oligonucleotide
  Antisense strand to SEQ ID NO: 1375042
auuaacagcccuggaauua

SEQ ID NO: 1375044 - RNA, 19 nt, Artificial Sequence
  Description of Artificial Sequence: Synthetic oligonucleotide
  Sense strand starting at position 1550 of SEQ ID NO: 1242816
ggcuguuaaugauuaaaga

SEQ ID NO: 1375045 - RNA, 19 nt, Artificial Sequence
  Description of Artificial Sequence: Synthetic oligonucleotide
  Antisense strand to SEQ ID NO: 1375044
ucuuuaaucauuaacagcc

SEQ ID NO: 1375046 - RNA, 19 nt, Artificial Sequence
  Description of Artificial Sequence: Synthetic oligonucleotide
  Sense strand starting at position 2377 of SEQ ID NO: 1242816
ggauaaugaaagcguaaag

SEQ ID NO: 1375047 - RNA, 19 nt, Artificial Sequence
  Description of Artificial Sequence: Synthetic oligonucleotide
  Antisense strand to SEQ ID NO: 1375046
cuuuacgcuuucauuaucc

SEQ ID NO: 1375048 - RNA, 19 nt, Artificial Sequence
  Description of Artificial Sequence: Synthetic oligonucleotide
  Sense strand starting at position 2450 of SEQ ID NO: 1242816
uagagucagucagucgaga

SEQ ID NO: 1375049 - RNA, 19 nt, Artificial Sequence
  Description of Artificial Sequence: Synthetic oligonucleotide
  Antisense strand to SEQ ID NO: 1375048
ucucgacugacugacucua

SEQ ID NO: 1375050 - RNA, 19 nt, Artificial Sequence
  Description of Artificial Sequence: Synthetic oligonucleotide
  Sense strand starting at position 2930 of SEQ ID NO: 1242816
cccgaauguaaaugggaga

SEQ ID NO: 1375051 - RNA, 19 nt, Artificial Sequence
  Description of Artificial Sequence: Synthetic oligonucleotide
  Antisense strand to SEQ ID NO: 1375050
ucucccauuuacauucggg

SEQ ID NO: 1375052 - RNA, 19 nt, Artificial Sequence
  Description of Artificial Sequence: Synthetic oligonucleotide
  Sense strand starting at position 3087 of SEQ ID NO: 1242816
gguguugcuccguuaccuu

SEQ ID NO: 1375053 - RNA, 19 nt, Artificial Sequence
  Description of Artificial Sequence: Synthetic oligonucleotide
  Antisense strand to SEQ ID NO: 1375052
aagguaacggagcaacacc

SEQ ID NO: 1375054 - RNA, 19 nt, Artificial Sequence
  Description of Artificial Sequence: Synthetic oligonucleotide
  Sense strand starting at position 3105 of SEQ ID NO: 1242816
uccauucgugugcaggaga

SEQ ID NO: 1375055 - RNA, 19 nt, Artificial Sequence
  Description of Artificial Sequence: Synthetic oligonucleotide
  Antisense strand to SEQ ID NO: 1375054
ucuccugcacacgaaugga

SEQ ID NO: 1375056 - RNA, 19 nt, Artificial Sequence
  Description of Artificial Sequence: Synthetic oligonucleotide
  Sense strand starting at position 3147 of SEQ ID NO: 1242816
gguaucagcaagugagaaa

SEQ ID NO: 1375057 - RNA, 19 nt, Artificial Sequence
  Description of Artificial Sequence: Synthetic oligonucleotide
  Antisense strand to SEQ ID NO: 1375056
uuucucacuugcugauacc

SEQ ID NO: 1375058 - RNA, 19 nt, Artificial Sequence
  Description of Artificial Sequence: Synthetic oligonucleotide
  Sense strand starting at position 3148 of SEQ ID NO: 1242816
guaucagcaagugagaaau

SEQ ID NO: 1375059 - RNA, 19 nt, Artificial Sequence
  Description of Artificial Sequence: Synthetic oligonucleotide
  Antisense strand to SEQ ID NO: 1375058
auuucucacuugcugauac

SEQ ID NO: 1375060 - RNA, 19 nt, Artificial Sequence
  Description of Artificial Sequence: Synthetic oligonucleotide
  Sense strand starting at position 3435 of SEQ ID NO: 1242816
uuggcuaauguguaccuua

SEQ ID NO: 1375061 - RNA, 19 nt, Artificial Sequence
  Description of Artificial Sequence: Synthetic oligonucleotide
  Antisense strand to SEQ ID NO: 1375060
uaagguacacauuagccaa

SEQ ID NO: 1375062 - RNA, 19 nt, Artificial Sequence
  Description of Artificial Sequence: Synthetic oligonucleotide
  Sense strand starting at position 3440 of SEQ ID NO: 1242816
uaauguguaccuuaagggu

SEQ ID NO: 1375063 - RNA, 19 nt, Artificial Sequence
  Description of Artificial Sequence: Synthetic oligonucleotide
  Antisense strand to SEQ ID NO: 1375062
acccuuaagguacacauua

SEQ ID NO: 1375064 - RNA, 19 nt, Artificial Sequence
  Description of Artificial Sequence: Synthetic oligonucleotide
  Sense strand starting at position 3508 of SEQ ID NO: 1242816
cugccugcuggauagagaa

SEQ ID NO: 1375065 - RNA, 19 nt, Artificial Sequence
  Description of Artificial Sequence: Synthetic oligonucleotide
  Antisense strand to SEQ ID NO: 1375064
uucucuauccagcaggcag

SEQ ID NO: 1375066 - RNA, 19 nt, Artificial Sequence
  Description of Artificial Sequence: Synthetic oligonucleotide
  Sense strand starting at position 3555 of SEQ ID NO: 1242816
acuguugcacuguaagaca

SEQ ID NO: 1375067 - RNA, 19 nt, Artificial Sequence
  Description of Artificial Sequence: Synthetic oligonucleotide
  Antisense strand to SEQ ID NO: 1375066
ugucuuacagugcaacagu

SEQ ID NO: 1375068 - RNA, 19 nt, Artificial Sequence
  Description of Artificial Sequence: Synthetic oligonucleotide
  Sense strand starting at position 3925 of SEQ ID NO: 1242816
gcauauauuugggagguag

SEQ ID NO: 1375069 - RNA, 19 nt, Artificial Sequence
  Description of Artificial Sequence: Synthetic oligonucleotide
  Antisense strand to SEQ ID NO: 1375068
cuaccucccaaauauaugc

SEQ ID NO: 1375070 - RNA, 19 nt, Artificial Sequence
  Description of Artificial Sequence: Synthetic oligonucleotide
  Sense strand starting at position 3962 of SEQ ID NO: 1242816
gggaauuggaugugaagug

SEQ ID NO: 1375071 - RNA, 19 nt, Artificial Sequence
  Description of Artificial Sequence: Synthetic oligonucleotide
  Antisense strand to SEQ ID NO: 1375070
cacuucacauccaauuccc

SEQ ID NO: 1375072 - RNA, 19 nt, Artificial Sequence
  Description of Artificial Sequence: Synthetic oligonucleotide
  Sense strand starting at position 3969 of SEQ ID NO: 1242816
ggaugugaaguguguagga

SEQ ID NO: 1375073 - RNA, 19 nt, Artificial Sequence
  Description of Artificial Sequence: Synthetic oligonucleotide
  Antisense strand to SEQ ID NO: 1375072
uccuacacacuucacaucc

SEQ ID NO: 1375074 - RNA, 19 nt, Artificial Sequence
  Description of Artificial Sequence: Synthetic oligonucleotide
  Sense strand starting at position 3971 of SEQ ID NO: 1242816
augugaaguguguaggaga

SEQ ID NO: 1375075 - RNA, 19 nt, Artificial Sequence
  Description of Artificial Sequence: Synthetic oligonucleotide
  Antisense strand to SEQ ID NO: 1375074
ucuccuacacacuucacau

SEQ ID NO: 1375076 - RNA, 19 nt, Artificial Sequence
  Description of Artificial Sequence: Synthetic oligonucleotide
  Sense strand starting at position 626 of SEQ ID NO: 1242817
cuguuauugggacguuagu

SEQ ID NO: 1375077 - RNA, 19 nt, Artificial Sequence
  Description of Artificial Sequence: Synthetic oligonucleotide
  Antisense strand to SEQ ID NO: 1375076
acuaacgucccaauaacag

SEQ ID NO: 1375078 - RNA, 19 nt, Artificial Sequence
  Description of Artificial Sequence: Synthetic oligonucleotide
  Sense strand starting at position 891 of SEQ ID NO: 1242817
uugucuaauucugucaaua

SEQ ID NO: 1375079 - RNA, 19 nt, Artificial Sequence
  Description of Artificial Sequence: Synthetic oligonucleotide
  Antisense strand to SEQ ID NO: 1375078
uauugacagaauuagacaa

SEQ ID NO: 1375080 - RNA, 19 nt, Artificial Sequence
  Description of Artificial Sequence: Synthetic oligonucleotide
  Sense strand starting at position 1306 of SEQ ID NO: 1242817
caguguaugcuguaauuac

SEQ ID NO: 1375081 - RNA, 19 nt, Artificial Sequence
  Description of Artificial Sequence: Synthetic oligonucleotide
  Antisense strand to SEQ ID NO: 1375080
guaauuacagcauacacug

SEQ ID NO: 1375082 - RNA, 19 nt, Artificial Sequence
  Description of Artificial Sequence: Synthetic oligonucleotide
  Sense strand starting at position 1325 of SEQ ID NO: 1242817
auuccaguugaaugaauau

SEQ ID NO: 1375083 - RNA, 19 nt, Artificial Sequence
  Description of Artificial Sequence: Synthetic oligonucleotide
  Antisense strand to SEQ ID NO: 1375082
auauucauucaacuggaau

SEQ ID NO: 1375084 - RNA, 19 nt, Artificial Sequence
  Description of Artificial Sequence: Synthetic oligonucleotide
  Sense strand starting at position 1364 of SEQ ID NO: 1242817
acaugaaaccguuacuuua

SEQ ID NO: 1375085 - RNA, 19 nt, Artificial Sequence
  Description of Artificial Sequence: Synthetic oligonucleotide
  Antisense strand to SEQ ID NO: 1375084
uaaaguaacgguuucaugu

SEQ ID NO: 1375086 - RNA, 19 nt, Artificial Sequence
  Description of Artificial Sequence: Synthetic oligonucleotide
  Sense strand starting at position 1491 of SEQ ID NO: 1242817
cacguuaagcauggaucua

SEQ ID NO: 1375087 - RNA, 19 nt, Artificial Sequence
  Description of Artificial Sequence: Synthetic oligonucleotide
  Antisense strand to SEQ ID NO: 1375086
uagauccaugcuuaacgug

SEQ ID NO: 1375088 - RNA, 19 nt, Artificial Sequence
  Description of Artificial Sequence: Synthetic oligonucleotide
  Sense strand starting at position 1492 of SEQ ID NO: 1242817
acguuaagcauggaucuaa

SEQ ID NO: 1375089 - RNA, 19 nt, Artificial Sequence
  Description of Artificial Sequence: Synthetic oligonucleotide
  Antisense strand to SEQ ID NO: 1375088
uuagauccaugcuuaacgu

SEQ ID NO: 1375090 - RNA, 19 nt, Artificial Sequence
  Description of Artificial Sequence: Synthetic oligonucleotide
  Sense strand starting at position 1514 of SEQ ID NO: 1242817
auguuaaauacagaguagu

SEQ ID NO: 1375091 - RNA, 19 nt, Artificial Sequence
  Description of Artificial Sequence: Synthetic oligonucleotide
  Antisense strand to SEQ ID NO: 1375090
acuacucuguauuuaacau

SEQ ID NO: 1375092 - RNA, 19 nt, Artificial Sequence
  Description of Artificial Sequence: Synthetic oligonucleotide
  Sense strand starting at position 1547 of SEQ ID NO: 1242817
agaacagucgcguaaugaa

SEQ ID NO: 1375093 - RNA, 19 nt, Artificial Sequence
  Description of Artificial Sequence: Synthetic oligonucleotide
  Antisense strand to SEQ ID NO: 1375092
uucauuacgcgacuguucu

SEQ ID NO: 1375094 - RNA, 19 nt, Artificial Sequence
  Description of Artificial Sequence: Synthetic oligonucleotide
  Sense strand starting at position 1594 of SEQ ID NO: 1242817
uccuuauaaucgucaccga

SEQ ID NO: 1375095 - RNA, 19 nt, Artificial Sequence
  Description of Artificial Sequence: Synthetic oligonucleotide
  Antisense strand to SEQ ID NO: 1375094
ucggugacgauuauaagga

SEQ ID NO: 1375096 - RNA, 19 nt, Artificial Sequence
  Description of Artificial Sequence: Synthetic oligonucleotide
  Sense strand starting at position 1597 of SEQ ID NO: 1242817
uuauaaucgucaccgagga

SEQ ID NO: 1375097 - RNA, 19 nt, Artificial Sequence
  Description of Artificial Sequence: Synthetic oligonucleotide
  Antisense strand to SEQ ID NO: 1375096
uccucggugacgauuauaa

SEQ ID NO: 1375098 - RNA, 19 nt, Artificial Sequence
  Description of Artificial Sequence: Synthetic oligonucleotide
  Sense strand starting at position 1742 of SEQ ID NO: 1242817
aagugacugcccuagcaaa

SEQ ID NO: 1375099 - RNA, 19 nt, Artificial Sequence
  Description of Artificial Sequence: Synthetic oligonucleotide
  Antisense strand to SEQ ID NO: 1375098
uuugcuagggcagucacuu

SEQ ID NO: 1375100 - RNA, 19 nt, Artificial Sequence
  Description of Artificial Sequence: Synthetic oligonucleotide
  Sense strand starting at position 2195 of SEQ ID NO: 1242817
augucugagcucuacgaag

SEQ ID NO: 1375101 - RNA, 19 nt, Artificial Sequence
  Description of Artificial Sequence: Synthetic oligonucleotide
  Antisense strand to SEQ ID NO: 1375100
cuucguagagcucagacau

SEQ ID NO: 1375102 - RNA, 19 nt, Artificial Sequence
  Description of Artificial Sequence: Synthetic oligonucleotide
  Sense strand starting at position 2621 of SEQ ID NO: 1242817
acauuaaauguguaagucu

SEQ ID NO: 1375103 - RNA, 19 nt, Artificial Sequence
  Description of Artificial Sequence: Synthetic oligonucleotide
  Antisense strand to SEQ ID NO: 1375102
agacuuacacauuuaaugu

SEQ ID NO: 1375104 - RNA, 19 nt, Artificial Sequence
  Description of Artificial Sequence: Synthetic oligonucleotide
  Sense strand starting at position 2628 of SEQ ID NO: 1242817
auguguaagucucugaacu

SEQ ID NO: 1375105 - RNA, 19 nt, Artificial Sequence
  Description of Artificial Sequence: Synthetic oligonucleotide
  Antisense strand to SEQ ID NO: 1375104
aguucagagacuuacacau

SEQ ID NO: 1375106 - RNA, 19 nt, Artificial Sequence
  Description of Artificial Sequence: Synthetic oligonucleotide
  Sense strand starting at position 2629 of SEQ ID NO: 1242817
uguguaagucucugaacug

SEQ ID NO: 1375107 - RNA, 19 nt, Artificial Sequence
  Description of Artificial Sequence: Synthetic oligonucleotide
  Antisense strand to SEQ ID NO: 1375106
caguucagagacuuacaca

SEQ ID NO: 1375108 - RNA, 19 nt, Artificial Sequence
  Description of Artificial Sequence: Synthetic oligonucleotide
  Sense strand starting at position 2644 of SEQ ID NO: 1242817
acuguagggcuuugaacaa

SEQ ID NO: 1375109 - RNA, 19 nt, Artificial Sequence
  Description of Artificial Sequence: Synthetic oligonucleotide
  Antisense strand to SEQ ID NO: 1375108
uuguucaaagcccuacagu

SEQ ID NO: 1375110 - RNA, 19 nt, Artificial Sequence
  Description of Artificial Sequence: Synthetic oligonucleotide
  Sense strand starting at position 2661 of SEQ ID NO: 1242817
aaaggaaaguuccaugaga

SEQ ID NO: 1375111 - RNA, 19 nt, Artificial Sequence
  Description of Artificial Sequence: Synthetic oligonucleotide
  Antisense strand to SEQ ID NO: 1375110
ucucauggaacuuuccuuu

SEQ ID NO: 1375112 - RNA, 19 nt, Artificial Sequence
  Description of Artificial Sequence: Synthetic oligonucleotide
  Sense strand starting at position 2672 of SEQ ID NO: 1242817
ccaugagaauacuauauga

SEQ ID NO: 1375113 - RNA, 19 nt, Artificial Sequence
  Description of Artificial Sequence: Synthetic oligonucleotide
  Antisense strand to SEQ ID NO: 1375112
ucauauaguauucucaugg

SEQ ID NO: 1375114 - RNA, 19 nt, Artificial Sequence
  Description of Artificial Sequence: Synthetic oligonucleotide
  Sense strand starting at position 2701 of SEQ ID NO: 1242817
uacuguuaggaacgcgaua

SEQ ID NO: 1375115 - RNA, 19 nt, Artificial Sequence
  Description of Artificial Sequence: Synthetic oligonucleotide
  Antisense strand to SEQ ID NO: 1375114
uaucgcguuccuaacagua

SEQ ID NO: 1375116 - RNA, 19 nt, Artificial Sequence
  Description of Artificial Sequence: Synthetic oligonucleotide
  Sense strand starting at position 2713 of SEQ ID NO: 1242817
cgcgauaacagguaagaaa

SEQ ID NO: 1375117 - RNA, 19 nt, Artificial Sequence
  Description of Artificial Sequence: Synthetic oligonucleotide
  Antisense strand to SEQ ID NO: 1375116
uuucuuaccuguuaucgcg

SEQ ID NO: 1375118 - RNA, 19 nt, Artificial Sequence
  Description of Artificial Sequence: Synthetic oligonucleotide
  Sense strand starting at position 3013 of SEQ ID NO: 1242817
uccugcuaacuccagagau

SEQ ID NO: 1375119 - RNA, 19 nt, Artificial Sequence
  Description of Artificial Sequence: Synthetic oligonucleotide
  Antisense strand to SEQ ID NO: 1375118
aucucuggaguuagcagga

SEQ ID NO: 1375120 - RNA, 19 nt, Artificial Sequence
  Description of Artificial Sequence: Synthetic oligonucleotide
  Sense strand starting at position 3185 of SEQ ID NO: 1242817
agagcuuaccuguggagaa

SEQ ID NO: 1375121 - RNA, 19 nt, Artificial Sequence
  Description of Artificial Sequence: Synthetic oligonucleotide
  Antisense strand to SEQ ID NO: 1375120
uucuccacagguaagcucu

SEQ ID NO: 1375122 - RNA, 19 nt, Artificial Sequence
  Description of Artificial Sequence: Synthetic oligonucleotide
  Sense strand starting at position 3201 of SEQ ID NO: 1242817
gaaggauguuugguccaga

SEQ ID NO: 1375123 - RNA, 19 nt, Artificial Sequence
  Description of Artificial Sequence: Synthetic oligonucleotide
  Antisense strand to SEQ ID NO: 1375122
ucuggaccaaacauccuuc

SEQ ID NO: 1375124 - RNA, 19 nt, Artificial Sequence
  Description of Artificial Sequence: Synthetic oligonucleotide
  Sense strand starting at position 3202 of SEQ ID NO: 1242817
aaggauguuugguccagac

SEQ ID NO: 1375125 - RNA, 19 nt, Artificial Sequence
  Description of Artificial Sequence: Synthetic oligonucleotide
  Antisense strand to SEQ ID NO: 1375124
gucuggaccaaacauccuu

SEQ ID NO: 1375126 - RNA, 19 nt, Artificial Sequence
  Description of Artificial Sequence: Synthetic oligonucleotide
  Sense strand starting at position 3204 of SEQ ID NO: 1242817
ggauguuugguccagacac

SEQ ID NO: 1375127 - RNA, 19 nt, Artificial Sequence
  Description of Artificial Sequence: Synthetic oligonucleotide
  Antisense strand to SEQ ID NO: 1375126
gugucuggaccaaacaucc

SEQ ID NO: 1375128 - RNA, 19 nt, Artificial Sequence
  Description of Artificial Sequence: Synthetic oligonucleotide
  Sense strand starting at position 3206 of SEQ ID NO: 1242817
auguuugguccagacacaa

SEQ ID NO: 1375129 - RNA, 19 nt, Artificial Sequence
  Description of Artificial Sequence: Synthetic oligonucleotide
  Antisense strand to SEQ ID NO: 1375128
uugugucuggaccaaacau

SEQ ID NO: 1375130 - RNA, 19 nt, Artificial Sequence
  Description of Artificial Sequence: Synthetic oligonucleotide
  Sense strand starting at position 3224 of SEQ ID NO: 1242817
agagaacuuccugggugau

SEQ ID NO: 1375131 - RNA, 19 nt, Artificial Sequence
  Description of Artificial Sequence: Synthetic oligonucleotide
  Antisense strand to SEQ ID NO: 1375130
aucacccaggaaguucucu

SEQ ID NO: 1375132 - RNA, 19 nt, Artificial Sequence
  Description of Artificial Sequence: Synthetic oligonucleotide
  Sense strand starting at position 3225 of SEQ ID NO: 1242817
gagaacuuccugggugaua

SEQ ID NO: 1375133 - RNA, 19 nt, Artificial Sequence
  Description of Artificial Sequence: Synthetic oligonucleotide
  Antisense strand to SEQ ID NO: 1375132
uaucacccaggaaguucuc

SEQ ID NO: 1375134 - RNA, 19 nt, Artificial Sequence
  Description of Artificial Sequence: Synthetic oligonucleotide
  Sense strand starting at position 3226 of SEQ ID NO: 1242817
agaacuuccugggugauag

SEQ ID NO: 1375135 - RNA, 19 nt, Artificial Sequence
  Description of Artificial Sequence: Synthetic oligonucleotide
  Antisense strand to SEQ ID NO: 1375134
cuaucacccaggaaguucu

SEQ ID NO: 1375136 - RNA, 19 nt, Artificial Sequence
  Description of Artificial Sequence: Synthetic oligonucleotide
  Sense strand starting at position 3227 of SEQ ID NO: 1242817
gaacuuccugggugauaga

SEQ ID NO: 1375137 - RNA, 19 nt, Artificial Sequence
  Description of Artificial Sequence: Synthetic oligonucleotide
  Antisense strand to SEQ ID NO: 1375136
ucuaucacccaggaaguuc

SEQ ID NO: 1375138 - RNA, 19 nt, Artificial Sequence
  Description of Artificial Sequence: Synthetic oligonucleotide
  Sense strand starting at position 3238 of SEQ ID NO: 1242817
gugauagaauuauucugua

SEQ ID NO: 1375139 - RNA, 19 nt, Artificial Sequence
  Description of Artificial Sequence: Synthetic oligonucleotide
  Antisense strand to SEQ ID NO: 1375138
uacagaauaauucuaucac

SEQ ID NO: 1375140 - RNA, 19 nt, Artificial Sequence
  Description of Artificial Sequence: Synthetic oligonucleotide
  Sense strand starting at position 3243 of SEQ ID NO: 1242817
agaauuauucuguaucuug

SEQ ID NO: 1375141 - RNA, 19 nt, Artificial Sequence
  Description of Artificial Sequence: Synthetic oligonucleotide
  Antisense strand to SEQ ID NO: 1375140
caagauacagaauaauucu

SEQ ID NO: 1375142 - RNA, 19 nt, Artificial Sequence
  Description of Artificial Sequence: Synthetic oligonucleotide
  Sense strand starting at position 3265 of SEQ ID NO: 1242817
gggaccugguuacauagau

SEQ ID NO: 1375143 - RNA, 19 nt, Artificial Sequence
  Description of Artificial Sequence: Synthetic oligonucleotide
  Antisense strand to SEQ ID NO: 1375142
aucuauguaaccagguccc

SEQ ID NO: 1375144 - RNA, 19 nt, Artificial Sequence
  Description of Artificial Sequence: Synthetic oligonucleotide
  Sense strand starting at position 3269 of SEQ ID NO: 1242817
ccugguuacauagaugugu

SEQ ID NO: 1375145 - RNA, 19 nt, Artificial Sequence
  Description of Artificial Sequence: Synthetic oligonucleotide
  Antisense strand to SEQ ID NO: 1375144
acacaucuauguaaccagg

SEQ ID NO: 1375146 - RNA, 19 nt, Artificial Sequence
  Description of Artificial Sequence: Synthetic oligonucleotide
  Sense strand starting at position 3271 of SEQ ID NO: 1242817
ugguuacauagauguguaa

SEQ ID NO: 1375147 - RNA, 19 nt, Artificial Sequence
  Description of Artificial Sequence: Synthetic oligonucleotide
  Antisense strand to SEQ ID NO: 1375146
uuacacaucuauguaacca

SEQ ID NO: 1375148 - RNA, 19 nt, Artificial Sequence
  Description of Artificial Sequence: Synthetic oligonucleotide
  Sense strand starting at position 3273 of SEQ ID NO: 1242817
guuacauagauguguaaau

SEQ ID NO: 1375149 - RNA, 19 nt, Artificial Sequence
  Description of Artificial Sequence: Synthetic oligonucleotide
  Antisense strand to SEQ ID NO: 1375148
auuuacacaucuauguaac

SEQ ID NO: 1375150 - RNA, 19 nt, Artificial Sequence
  Description of Artificial Sequence: Synthetic oligonucleotide
  Sense strand starting at position 3283 of SEQ ID NO: 1242817
uguguaaauuuguuaaguc

SEQ ID NO: 1375151 - RNA, 19 nt, Artificial Sequence
  Description of Artificial Sequence: Synthetic oligonucleotide
  Antisense strand to SEQ ID NO: 1375150
gacuuaacaaauuuacaca

SEQ ID NO: 1375152 - RNA, 19 nt, Artificial Sequence
  Description of Artificial Sequence: Synthetic oligonucleotide
  Sense strand starting at position 3284 of SEQ ID NO: 1242817
guguaaauuuguuaaguca

SEQ ID NO: 1375153 - RNA, 19 nt, Artificial Sequence
  Description of Artificial Sequence: Synthetic oligonucleotide
  Antisense strand to SEQ ID NO: 1375152
ugacuuaacaaauuuacac

SEQ ID NO: 1375154 - RNA, 19 nt, Artificial Sequence
  Description of Artificial Sequence: Synthetic oligonucleotide
  Sense strand starting at position 3627 of SEQ ID NO: 1242817
agcaguucccaaggaagaa

SEQ ID NO: 1375155 - RNA, 19 nt, Artificial Sequence
  Description of Artificial Sequence: Synthetic oligonucleotide
  Antisense strand to SEQ ID NO: 1375154
uucuuccuugggaacugcu

SEQ ID NO: 1375156 - RNA, 19 nt, Artificial Sequence
  Description of Artificial Sequence: Synthetic oligonucleotide
  Sense strand starting at position 103 of SEQ ID NO: 1242818
uaugaacugugcucuaaag

SEQ ID NO: 1375157 - RNA, 19 nt, Artificial Sequence
  Description of Artificial Sequence: Synthetic oligonucleotide
  Antisense strand to SEQ ID NO: 1375156
cuuuagagcacaguucaua

SEQ ID NO: 1375158 - RNA, 19 nt, Artificial Sequence
  Description of Artificial Sequence: Synthetic oligonucleotide
  Sense strand starting at position 105 of SEQ ID NO: 1242818
ugaacugugcucuaaagac

SEQ ID NO: 1375159 - RNA, 19 nt, Artificial Sequence
  Description of Artificial Sequence: Synthetic oligonucleotide
  Antisense strand to SEQ ID NO: 1375158
gucuuuagagcacaguuca

SEQ ID NO: 1375160 - RNA, 19 nt, Artificial Sequence
  Description of Artificial Sequence: Synthetic oligonucleotide
  Sense strand starting at position 113 of SEQ ID NO: 1242818
gcucuaaagacaggaguaa

SEQ ID NO: 1375161 - RNA, 19 nt, Artificial Sequence
  Description of Artificial Sequence: Synthetic oligonucleotide
  Antisense strand to SEQ ID NO: 1375160
uuacuccugucuuuagagc

SEQ ID NO: 1375162 - RNA, 19 nt, Artificial Sequence
  Description of Artificial Sequence: Synthetic oligonucleotide
  Sense strand starting at position 124 of SEQ ID NO: 1242818
aggaguaacuaguccaauu

SEQ ID NO: 1375163 - RNA, 19 nt, Artificial Sequence
  Description of Artificial Sequence: Synthetic oligonucleotide
  Antisense strand to SEQ ID NO: 1375162
aauuggacuaguuacuccu

SEQ ID NO: 1375164 - RNA, 19 nt, Artificial Sequence
  Description of Artificial Sequence: Synthetic oligonucleotide
  Sense strand starting at position 186 of SEQ ID NO: 1242818
acuugaugagucuaagcau

SEQ ID NO: 1375165 - RNA, 19 nt, Artificial Sequence
  Description of Artificial Sequence: Synthetic oligonucleotide
  Antisense strand to SEQ ID NO: 1375164
augcuuagacucaucaagu

SEQ ID NO: 1375166 - RNA, 19 nt, Artificial Sequence
  Description of Artificial Sequence: Synthetic oligonucleotide
  Sense strand starting at position 189 of SEQ ID NO: 1242818
ugaugagucuaagcauccu

SEQ ID NO: 1375167 - RNA, 19 nt, Artificial Sequence
  Description of Artificial Sequence: Synthetic oligonucleotide
  Antisense strand to SEQ ID NO: 1375166
aggaugcuuagacucauca

SEQ ID NO: 1375168 - RNA, 19 nt, Artificial Sequence
  Description of Artificial Sequence: Synthetic oligonucleotide
  Sense strand starting at position 544 of SEQ ID NO: 1242818
gggagguuguaguuggcaa

SEQ ID NO: 1375169 - RNA, 19 nt, Artificial Sequence
  Description of Artificial Sequence: Synthetic oligonucleotide
  Antisense strand to SEQ ID NO: 1375168
uugccaacuacaaccuccc

SEQ ID NO: 1375170 - RNA, 19 nt, Artificial Sequence
  Description of Artificial Sequence: Synthetic oligonucleotide
  Sense strand starting at position 546 of SEQ ID NO: 1242818
gagguuguaguuggcaaga

SEQ ID NO: 1375171 - RNA, 19 nt, Artificial Sequence
  Description of Artificial Sequence: Synthetic oligonucleotide
  Antisense strand to SEQ ID NO: 1375170
ucuugccaacuacaaccuc

SEQ ID NO: 1375172 - RNA, 19 nt, Artificial Sequence
  Description of Artificial Sequence: Synthetic oligonucleotide
  Sense strand starting at position 1009 of SEQ ID NO: 1242818
cucuuuaaacaauguguau

SEQ ID NO: 1375173 - RNA, 19 nt, Artificial Sequence
  Description of Artificial Sequence: Synthetic oligonucleotide
  Antisense strand to SEQ ID NO: 1375172
auacacauuguuuaaagag

SEQ ID NO: 1375174 - RNA, 19 nt, Artificial Sequence
  Description of Artificial Sequence: Synthetic oligonucleotide
  Sense strand starting at position 1063 of SEQ ID NO: 1242818
agacaagguucuuauucuu

SEQ ID NO: 1375175 - RNA, 19 nt, Artificial Sequence
  Description of Artificial Sequence: Synthetic oligonucleotide
  Antisense strand to SEQ ID NO: 1375174
aagaauaagaaccuugucu

SEQ ID NO: 1375176 - RNA, 19 nt, Artificial Sequence
  Description of Artificial Sequence: Synthetic oligonucleotide
  Sense strand starting at position 1068 of SEQ ID NO: 1242818
agguucuuauucuugagga

SEQ ID NO: 1375177 - RNA, 19 nt, Artificial Sequence
  Description of Artificial Sequence: Synthetic oligonucleotide
  Antisense strand to SEQ ID NO: 1375176
uccucaagaauaagaaccu

SEQ ID NO: 1375178 - RNA, 19 nt, Artificial Sequence
  Description of Artificial Sequence: Synthetic oligonucleotide
  Sense strand starting at position 1093 of SEQ ID NO: 1242818
agcaauaaguacuaacaga

SEQ ID NO: 1375179 - RNA, 19 nt, Artificial Sequence
  Description of Artificial Sequence: Synthetic oligonucleotide
  Antisense strand to SEQ ID NO: 1375178
ucuguuaguacuuauugcu

SEQ ID NO: 1375180 - RNA, 19 nt, Artificial Sequence
  Description of Artificial Sequence: Synthetic oligonucleotide
  Sense strand starting at position 1133 of SEQ ID NO: 1242818
gauuuaaaguguuucggug

SEQ ID NO: 1375181 - RNA, 19 nt, Artificial Sequence
  Description of Artificial Sequence: Synthetic oligonucleotide
  Antisense strand to SEQ ID NO: 1375180
caccgaaacacuuuaaauc

SEQ ID NO: 1375182 - RNA, 19 nt, Artificial Sequence
  Description of Artificial Sequence: Synthetic oligonucleotide
  Sense strand starting at position 1139 of SEQ ID NO: 1242818
aaguguuucggugggagaa

SEQ ID NO: 1375183 - RNA, 19 nt, Artificial Sequence
  Description of Artificial Sequence: Synthetic oligonucleotide
  Antisense strand to SEQ ID NO: 1375182
uucucccaccgaaacacuu

SEQ ID NO: 1375184 - RNA, 19 nt, Artificial Sequence
  Description of Artificial Sequence: Synthetic oligonucleotide
  Sense strand starting at position 1140 of SEQ ID NO: 1242818
aguguuucggugggagaaa

SEQ ID NO: 1375185 - RNA, 19 nt, Artificial Sequence
  Description of Artificial Sequence: Synthetic oligonucleotide
  Antisense strand to SEQ ID NO: 1375184
uuucucccaccgaaacacu

SEQ ID NO: 1375186 - RNA, 19 nt, Artificial Sequence
  Description of Artificial Sequence: Synthetic oligonucleotide
  Sense strand starting at position 1157 of SEQ ID NO: 1242818
aauuaauucuacgcaguag

SEQ ID NO: 1375187 - RNA, 19 nt, Artificial Sequence
  Description of Artificial Sequence: Synthetic oligonucleotide
  Antisense strand to SEQ ID NO: 1375186
cuacugcguagaauuaauu

SEQ ID NO: 1375188 - RNA, 19 nt, Artificial Sequence
  Description of Artificial Sequence: Synthetic oligonucleotide
  Sense strand starting at position 1168 of SEQ ID NO: 1242818
cgcaguaguguuuaacaca

SEQ ID NO: 1375189 - RNA, 19 nt, Artificial Sequence
  Description of Artificial Sequence: Synthetic oligonucleotide
  Antisense strand to SEQ ID NO: 1375188
uguguuaaacacuacugcg

SEQ ID NO: 1375190 - RNA, 19 nt, Artificial Sequence
  Description of Artificial Sequence: Synthetic oligonucleotide
  Sense strand starting at position 1281 of SEQ ID NO: 1242818
auuuaucacugaggaagca

SEQ ID NO: 1375191 - RNA, 19 nt, Artificial Sequence
  Description of Artificial Sequence: Synthetic oligonucleotide
  Antisense strand to SEQ ID NO: 1375190
ugcuuccucagugauaaau

SEQ ID NO: 1375192 - RNA, 19 nt, Artificial Sequence
  Description of Artificial Sequence: Synthetic oligonucleotide
  Sense strand starting at position 1315 of SEQ ID NO: 1242818
agacauggucccugagcca

SEQ ID NO: 1375193 - RNA, 19 nt, Artificial Sequence
  Description of Artificial Sequence: Synthetic oligonucleotide
  Antisense strand to SEQ ID NO: 1375192
uggcucagggaccaugucu

SEQ ID NO: 1375194 - RNA, 19 nt, Artificial Sequence
  Description of Artificial Sequence: Synthetic oligonucleotide
  Sense strand starting at position 1418 of SEQ ID NO: 1242818
uaauccuggugcuuugaaa

SEQ ID NO: 1375195 - RNA, 19 nt, Artificial Sequence
  Description of Artificial Sequence: Synthetic oligonucleotide
  Antisense strand to SEQ ID NO: 1375194
uuucaaagcaccaggauua

SEQ ID NO: 1375196 - RNA, 19 nt, Artificial Sequence
  Description of Artificial Sequence: Synthetic oligonucleotide
  Sense strand starting at position 1542 of SEQ ID NO: 1242818
gggugaugggugcaaucua

SEQ ID NO: 1375197 - RNA, 19 nt, Artificial Sequence
  Description of Artificial Sequence: Synthetic oligonucleotide
  Antisense strand to SEQ ID NO: 1375196
uagauugcacccaucaccc

SEQ ID NO: 1375198 - RNA, 19 nt, Artificial Sequence
  Description of Artificial Sequence: Synthetic oligonucleotide
  Sense strand starting at position 1547 of SEQ ID NO: 1242818
augggugcaaucuaugauu

SEQ ID NO: 1375199 - RNA, 19 nt, Artificial Sequence
  Description of Artificial Sequence: Synthetic oligonucleotide
  Antisense strand to SEQ ID NO: 1375198
aaucauagauugcacccau

SEQ ID NO: 1375200 - RNA, 19 nt, Artificial Sequence
  Description of Artificial Sequence: Synthetic oligonucleotide
  Sense strand starting at position 1549 of SEQ ID NO: 1242818
gggugcaaucuaugauucu

SEQ ID NO: 1375201 - RNA, 19 nt, Artificial Sequence
  Description of Artificial Sequence: Synthetic oligonucleotide
  Antisense strand to SEQ ID NO: 1375200
agaaucauagauugcaccc

SEQ ID NO: 1375202 - RNA, 19 nt, Artificial Sequence
  Description of Artificial Sequence: Synthetic oligonucleotide
  Sense strand starting at position 1594 of SEQ ID NO: 1242818
agcugagcgcuuuaccgau

SEQ ID NO: 1375203 - RNA, 19 nt, Artificial Sequence
  Description of Artificial Sequence: Synthetic oligonucleotide
  Antisense strand to SEQ ID NO: 1375202
aucgguaaagcgcucagcu

SEQ ID NO: 1375204 - RNA, 19 nt, Artificial Sequence
  Description of Artificial Sequence: Synthetic oligonucleotide
  Sense strand starting at position 1598 of SEQ ID NO: 1242818
gagcgcuuuaccgauagga

SEQ ID NO: 1375205 - RNA, 19 nt, Artificial Sequence
  Description of Artificial Sequence: Synthetic oligonucleotide
  Antisense strand to SEQ ID NO: 1375204
uccuaucgguaaagcgcuc

SEQ ID NO: 1375206 - RNA, 19 nt, Artificial Sequence
  Description of Artificial Sequence: Synthetic oligonucleotide
  Sense strand starting at position 1727 of SEQ ID NO: 1242818
ugggaaacauucuuuccca

SEQ ID NO: 1375207 - RNA, 19 nt, Artificial Sequence
  Description of Artificial Sequence: Synthetic oligonucleotide
  Antisense strand to SEQ ID NO: 1375206
ugggaaagaauguuuccca

SEQ ID NO: 1375208 - RNA, 19 nt, Artificial Sequence
  Description of Artificial Sequence: Synthetic oligonucleotide
  Sense strand starting at position 1748 of SEQ ID NO: 1242818
gaccaagucuccgaccaga

SEQ ID NO: 1375209 - RNA, 19 nt, Artificial Sequence
  Description of Artificial Sequence: Synthetic oligonucleotide
  Antisense strand to SEQ ID NO: 1375208
ucuggucggagacuugguc

SEQ ID NO: 1375210 - RNA, 19 nt, Artificial Sequence
  Description of Artificial Sequence: Synthetic oligonucleotide
  Sense strand starting at position 2049 of SEQ ID NO: 1242818
cgauucuguugcccucaga

SEQ ID NO: 1375211 - RNA, 19 nt, Artificial Sequence
  Description of Artificial Sequence: Synthetic oligonucleotide
  Antisense strand to SEQ ID NO: 1375210
ucugagggcaacagaaucg

SEQ ID NO: 1375212 - RNA, 19 nt, Artificial Sequence
  Description of Artificial Sequence: Synthetic oligonucleotide
  Sense strand starting at position 2090 of SEQ ID NO: 1242818
agagcaagcuuuccuauca

SEQ ID NO: 1375213 - RNA, 19 nt, Artificial Sequence
  Description of Artificial Sequence: Synthetic oligonucleotide
  Antisense strand to SEQ ID NO: 1375212
ugauaggaaagcuugcucu

SEQ ID NO: 1375214 - RNA, 19 nt, Artificial Sequence
  Description of Artificial Sequence: Synthetic oligonucleotide
  Sense strand starting at position 2109 of SEQ ID NO: 1242818
agcugagguaguuaucuua

SEQ ID NO: 1375215 - RNA, 19 nt, Artificial Sequence
  Description of Artificial Sequence: Synthetic oligonucleotide
  Antisense strand to SEQ ID NO: 1375214
uaagauaacuaccucagcu

SEQ ID NO: 1375216 - RNA, 19 nt, Artificial Sequence
  Description of Artificial Sequence: Synthetic oligonucleotide
  Sense strand starting at position 2130 of SEQ ID NO: 1242818
augccuaagcucugguuaa

SEQ ID NO: 1375217 - RNA, 19 nt, Artificial Sequence
  Description of Artificial Sequence: Synthetic oligonucleotide
  Antisense strand to SEQ ID NO: 1375216
uuaaccagagcuuaggcau

SEQ ID NO: 1375218 - RNA, 19 nt, Artificial Sequence
  Description of Artificial Sequence: Synthetic oligonucleotide
  Sense strand starting at position 2334 of SEQ ID NO: 1242818
ggcaaucagcccugacaac

SEQ ID NO: 1375219 - RNA, 19 nt, Artificial Sequence
  Description of Artificial Sequence: Synthetic oligonucleotide
  Antisense strand to SEQ ID NO: 1375218
guugucagggcugauugcc

SEQ ID NO: 1375220 - RNA, 19 nt, Artificial Sequence
  Description of Artificial Sequence: Synthetic oligonucleotide
  Sense strand starting at position 2381 of SEQ ID NO: 1242818
uaugcaaucuuguuaggca

SEQ ID NO: 1375221 - RNA, 19 nt, Artificial Sequence
  Description of Artificial Sequence: Synthetic oligonucleotide
  Antisense strand to SEQ ID NO: 1375220
ugccuaacaagauugcaua

SEQ ID NO: 1375222 - RNA, 19 nt, Artificial Sequence
  Description of Artificial Sequence: Synthetic oligonucleotide
  Sense strand starting at position 2385 of SEQ ID NO: 1242818
caaucuuguuaggcaugua

SEQ ID NO: 1375223 - RNA, 19 nt, Artificial Sequence
  Description of Artificial Sequence: Synthetic oligonucleotide
  Antisense strand to SEQ ID NO: 1375222
uacaugccuaacaagauug

SEQ ID NO: 1375224 - RNA, 19 nt, Artificial Sequence
  Description of Artificial Sequence: Synthetic oligonucleotide
  Sense strand starting at position 2388 of SEQ ID NO: 1242818
ucuuguuaggcauguaaca

SEQ ID NO: 1375225 - RNA, 19 nt, Artificial Sequence
  Description of Artificial Sequence: Synthetic oligonucleotide
  Antisense strand to SEQ ID NO: 1375224
uguuacaugccuaacaaga

SEQ ID NO: 1375226 - RNA, 19 nt, Artificial Sequence
  Description of Artificial Sequence: Synthetic oligonucleotide
  Sense strand starting at position 2458 of SEQ ID NO: 1242818
cuccuauguaagcguugua

SEQ ID NO: 1375227 - RNA, 19 nt, Artificial Sequence
  Description of Artificial Sequence: Synthetic oligonucleotide
  Antisense strand to SEQ ID NO: 1375226
uacaacgcuuacauaggag

SEQ ID NO: 1375228 - RNA, 19 nt, Artificial Sequence
  Description of Artificial Sequence: Synthetic oligonucleotide
  Sense strand starting at position 2461 of SEQ ID NO: 1242818
cuauguaagcguuguagaa

SEQ ID NO: 1375229 - RNA, 19 nt, Artificial Sequence
  Description of Artificial Sequence: Synthetic oligonucleotide
  Antisense strand to SEQ ID NO: 1375228
uucuacaacgcuuacauag

SEQ ID NO: 1375230 - RNA, 19 nt, Artificial Sequence
  Description of Artificial Sequence: Synthetic oligonucleotide
  Sense strand starting at position 3405 of SEQ ID NO: 1242818
gaguaagacucugccucau

SEQ ID NO: 1375231 - RNA, 19 nt, Artificial Sequence
  Description of Artificial Sequence: Synthetic oligonucleotide
  Antisense strand to SEQ ID NO: 1375230
augaggcagagucuuacuc

SEQ ID NO: 1375232 - RNA, 19 nt, Artificial Sequence
  Description of Artificial Sequence: Synthetic oligonucleotide
  Sense strand starting at position 3407 of SEQ ID NO: 1242818
guaagacucugccucauaa

SEQ ID NO: 1375233 - RNA, 19 nt, Artificial Sequence
  Description of Artificial Sequence: Synthetic oligonucleotide
  Antisense strand to SEQ ID NO: 1375232
uuaugaggcagagucuuac

SEQ ID NO: 1375234 - RNA, 19 nt, Artificial Sequence
  Description of Artificial Sequence: Synthetic oligonucleotide
  Sense strand starting at position 3535 of SEQ ID NO: 1242818
uuguuacuucccuagaaag

SEQ ID NO: 1375235 - RNA, 19 nt, Artificial Sequence
  Description of Artificial Sequence: Synthetic oligonucleotide
  Antisense strand to SEQ ID NO: 1375234
cuuucuagggaaguaacaa

SEQ ID NO: 1375236 - RNA, 19 nt, Artificial Sequence
  Description of Artificial Sequence: Synthetic oligonucleotide
  Sense strand starting at position 191 of SEQ ID NO: 1242819
gcuagagguuaaugaaauu

SEQ ID NO: 1375237 - RNA, 19 nt, Artificial Sequence
  Description of Artificial Sequence: Synthetic oligonucleotide
  Antisense strand to SEQ ID NO: 1375236
aauuucauuaaccucuagc

SEQ ID NO: 1375238 - RNA, 19 nt, Artificial Sequence
  Description of Artificial Sequence: Synthetic oligonucleotide
  Sense strand starting at position 463 of SEQ ID NO: 1242819
gugaaaccaucgccucuua

SEQ ID NO: 1375239 - RNA, 19 nt, Artificial Sequence
  Description of Artificial Sequence: Synthetic oligonucleotide
  Antisense strand to SEQ ID NO: 1375238
uaagaggcgaugguuucac

SEQ ID NO: 1375240 - RNA, 19 nt, Artificial Sequence
  Description of Artificial Sequence: Synthetic oligonucleotide
  Sense strand starting at position 859 of SEQ ID NO: 1242819
guggauugaguaugcuuua

SEQ ID NO: 1375241 - RNA, 19 nt, Artificial Sequence
  Description of Artificial Sequence: Synthetic oligonucleotide
  Antisense strand to SEQ ID NO: 1375240
uaaagcauacucaauccac

SEQ ID NO: 1375242 - RNA, 19 nt, Artificial Sequence
  Description of Artificial Sequence: Synthetic oligonucleotide
  Sense strand starting at position 860 of SEQ ID NO: 1242819
uggauugaguaugcuuuau

SEQ ID NO: 1375243 - RNA, 19 nt, Artificial Sequence
  Description of Artificial Sequence: Synthetic oligonucleotide
  Antisense strand to SEQ ID NO: 1375242
auaaagcauacucaaucca

SEQ ID NO: 1375244 - RNA, 19 nt, Artificial Sequence
  Description of Artificial Sequence: Synthetic oligonucleotide
  Sense strand starting at position 1184 of SEQ ID NO: 1242819
auugauaaucuccguauac

SEQ ID NO: 1375245 - RNA, 19 nt, Artificial Sequence
  Description of Artificial Sequence: Synthetic oligonucleotide
  Antisense strand to SEQ ID NO: 1375244
guauacggagauuaucaau

SEQ ID NO: 1375246 - RNA, 19 nt, Artificial Sequence
  Description of Artificial Sequence: Synthetic oligonucleotide
  Sense strand starting at position 1185 of SEQ ID NO: 1242819
uugauaaucuccguauacu

SEQ ID NO: 1375247 - RNA, 19 nt, Artificial Sequence
  Description of Artificial Sequence: Synthetic oligonucleotide
  Antisense strand to SEQ ID NO: 1375246
aguauacggagauuaucaa

SEQ ID NO: 1375248 - RNA, 19 nt, Artificial Sequence
  Description of Artificial Sequence: Synthetic oligonucleotide
  Sense strand starting at position 1186 of SEQ ID NO: 1242819
ugauaaucuccguauacuc

SEQ ID NO: 1375249 - RNA, 19 nt, Artificial Sequence
  Description of Artificial Sequence: Synthetic oligonucleotide
  Antisense strand to SEQ ID NO: 1375248
gaguauacggagauuauca

SEQ ID NO: 1375250 - RNA, 19 nt, Artificial Sequence
  Description of Artificial Sequence: Synthetic oligonucleotide
  Sense strand starting at position 1225 of SEQ ID NO: 1242819
augccaaauuugguguuua

SEQ ID NO: 1375251 - RNA, 19 nt, Artificial Sequence
  Description of Artificial Sequence: Synthetic oligonucleotide
  Antisense strand to SEQ ID NO: 1375250
uaaacaccaaauuuggcau

SEQ ID NO: 1375252 - RNA, 19 nt, Artificial Sequence
  Description of Artificial Sequence: Synthetic oligonucleotide
  Sense strand starting at position 1226 of SEQ ID NO: 1242819
ugccaaauuugguguuuau

SEQ ID NO: 1375253 - RNA, 19 nt, Artificial Sequence
  Description of Artificial Sequence: Synthetic oligonucleotide
  Antisense strand to SEQ ID NO: 1375252
auaaacaccaaauuuggca

SEQ ID NO: 1375254 - RNA, 19 nt, Artificial Sequence
  Description of Artificial Sequence: Synthetic oligonucleotide
  Sense strand starting at position 1238 of SEQ ID NO: 1242819
uguuuauccuucccguaca

SEQ ID NO: 1375255 - RNA, 19 nt, Artificial Sequence
  Description of Artificial Sequence: Synthetic oligonucleotide
  Antisense strand to SEQ ID NO: 1375254
uguacgggaaggauaaaca

SEQ ID NO: 1375256 - RNA, 19 nt, Artificial Sequence
  Description of Artificial Sequence: Synthetic oligonucleotide
  Sense strand starting at position 1559 of SEQ ID NO: 1242819
acaccugcgcuuugugaga

SEQ ID NO: 1375257 - RNA, 19 nt, Artificial Sequence
  Description of Artificial Sequence: Synthetic oligonucleotide
  Antisense strand to SEQ ID NO: 1375256
ucucacaaagcgcaggugu

SEQ ID NO: 1375258 - RNA, 19 nt, Artificial Sequence
  Description of Artificial Sequence: Synthetic oligonucleotide
  Sense strand starting at position 1588 of SEQ ID NO: 1242819
gaaggaaccugguuuccaa

SEQ ID NO: 1375259 - RNA, 19 nt, Artificial Sequence
  Description of Artificial Sequence: Synthetic oligonucleotide
  Antisense strand to SEQ ID NO: 1375258
uuggaaaccagguuccuuc

SEQ ID NO: 1375260 - RNA, 19 nt, Artificial Sequence
  Description of Artificial Sequence: Synthetic oligonucleotide
  Sense strand starting at position 1641 of SEQ ID NO: 1242819
gagcaucuggauuggaauu

SEQ ID NO: 1375261 - RNA, 19 nt, Artificial Sequence
  Description of Artificial Sequence: Synthetic oligonucleotide
  Antisense strand to SEQ ID NO: 1375260
aauuccaauccagaugcuc

SEQ ID NO: 1375262 - RNA, 19 nt, Artificial Sequence
  Description of Artificial Sequence: Synthetic oligonucleotide
  Sense strand starting at position 1668 of SEQ ID NO: 1242819
ugcauuuauucccacguga

SEQ ID NO: 1375263 - RNA, 19 nt, Artificial Sequence
  Description of Artificial Sequence: Synthetic oligonucleotide
  Antisense strand to SEQ ID NO: 1375262
ucacgugggaauaaaugca

SEQ ID NO: 1375264 - RNA, 19 nt, Artificial Sequence
  Description of Artificial Sequence: Synthetic oligonucleotide
  Sense strand starting at position 1670 of SEQ ID NO: 1242819
cauuuauucccacgugagc

SEQ ID NO: 1375265 - RNA, 19 nt, Artificial Sequence
  Description of Artificial Sequence: Synthetic oligonucleotide
  Antisense strand to SEQ ID NO: 1375264
gcucacgugggaauaaaug

SEQ ID NO: 1375266 - RNA, 19 nt, Artificial Sequence
  Description of Artificial Sequence: Synthetic oligonucleotide
  Sense strand starting at position 2020 of SEQ ID NO: 1242819
uuggcugaggccuggaaau

SEQ ID NO: 1375267 - RNA, 19 nt, Artificial Sequence
  Description of Artificial Sequence: Synthetic oligonucleotide
  Antisense strand to SEQ ID NO: 1375266
auuuccaggccucagccaa

SEQ ID NO: 1375268 - RNA, 19 nt, Artificial Sequence
  Description of Artificial Sequence: Synthetic oligonucleotide
  Sense strand starting at position 2032 of SEQ ID NO: 1242819
uggaaauccugucagccaa

SEQ ID NO: 1375269 - RNA, 19 nt, Artificial Sequence
  Description of Artificial Sequence: Synthetic oligonucleotide
  Antisense strand to SEQ ID NO: 1375268
uuggcugacaggauuucca

SEQ ID NO: 1375270 - RNA, 19 nt, Artificial Sequence
  Description of Artificial Sequence: Synthetic oligonucleotide
  Sense strand starting at position 2132 of SEQ ID NO: 1242819
gggcuuuguuuccugcuaa

SEQ ID NO: 1375271 - RNA, 19 nt, Artificial Sequence
  Description of Artificial Sequence: Synthetic oligonucleotide
  Antisense strand to SEQ ID NO: 1375270
uuagcaggaaacaaagccc

SEQ ID NO: 1375272 - RNA, 19 nt, Artificial Sequence
  Description of Artificial Sequence: Synthetic oligonucleotide
  Sense strand starting at position 2133 of SEQ ID NO: 1242819
ggcuuuguuuccugcuaaa

SEQ ID NO: 1375273 - RNA, 19 nt, Artificial Sequence
  Description of Artificial Sequence: Synthetic oligonucleotide
  Antisense strand to SEQ ID NO: 1375272
uuuagcaggaaacaaagcc

SEQ ID NO: 1375274 - RNA, 19 nt, Artificial Sequence
  Description of Artificial Sequence: Synthetic oligonucleotide
  Sense strand starting at position 2136 of SEQ ID NO: 1242819
uuuguuuccugcuaaaugu

SEQ ID NO: 1375275 - RNA, 19 nt, Artificial Sequence
  Description of Artificial Sequence: Synthetic oligonucleotide
  Antisense strand to SEQ ID NO: 1375274
acauuuagcaggaaacaaa

SEQ ID NO: 1375276 - RNA, 19 nt, Artificial Sequence
  Description of Artificial Sequence: Synthetic oligonucleotide
  Sense strand starting at position 2155 of SEQ ID NO: 1242819
cuggcuuccuggugagacu

SEQ ID NO: 1375277 - RNA, 19 nt, Artificial Sequence
  Description of Artificial Sequence: Synthetic oligonucleotide
  Antisense strand to SEQ ID NO: 1375276
agucucaccaggaagccag

SEQ ID NO: 1375278 - RNA, 19 nt, Artificial Sequence
  Description of Artificial Sequence: Synthetic oligonucleotide
  Sense strand starting at position 2192 of SEQ ID NO: 1242819
gggcaagaucuuuaaucuu

SEQ ID NO: 1375279 - RNA, 19 nt, Artificial Sequence
  Description of Artificial Sequence: Synthetic oligonucleotide
  Antisense strand to SEQ ID NO: 1375278
aagauuaaagaucuugccc

SEQ ID NO: 1375280 - RNA, 19 nt, Artificial Sequence
  Description of Artificial Sequence: Synthetic oligonucleotide
  Sense strand starting at position 2207 of SEQ ID NO: 1242819
ucuugauccucagugacua

SEQ ID NO: 1375281 - RNA, 19 nt, Artificial Sequence
  Description of Artificial Sequence: Synthetic oligonucleotide
  Antisense strand to SEQ ID NO: 1375280
uagucacugaggaucaaga

SEQ ID NO: 1375282 - RNA, 19 nt, Artificial Sequence
  Description of Artificial Sequence: Synthetic oligonucleotide
  Sense strand starting at position 2208 of SEQ ID NO: 1242819
cuugauccucagugacuaa

SEQ ID NO: 1375283 - RNA, 19 nt, Artificial Sequence
  Description of Artificial Sequence: Synthetic oligonucleotide
  Antisense strand to SEQ ID NO: 1375282
uuagucacugaggaucaag

SEQ ID NO: 1375284 - RNA, 19 nt, Artificial Sequence
  Description of Artificial Sequence: Synthetic oligonucleotide
  Sense strand starting at position 2235 of SEQ ID NO: 1242819
ggucacucauuuggugaau

SEQ ID NO: 1375285 - RNA, 19 nt, Artificial Sequence
  Description of Artificial Sequence: Synthetic oligonucleotide
  Antisense strand to SEQ ID NO: 1375284
auucaccaaaugagugacc

SEQ ID NO: 1375286 - RNA, 19 nt, Artificial Sequence
  Description of Artificial Sequence: Synthetic oligonucleotide
  Sense strand starting at position 2237 of SEQ ID NO: 1242819
ucacucauuuggugaauca

SEQ ID NO: 1375287 - RNA, 19 nt, Artificial Sequence
  Description of Artificial Sequence: Synthetic oligonucleotide
  Antisense strand to SEQ ID NO: 1375286
ugauucaccaaaugaguga

SEQ ID NO: 1375288 - RNA, 19 nt, Artificial Sequence
  Description of Artificial Sequence: Synthetic oligonucleotide
  Sense strand starting at position 2247 of SEQ ID NO: 1242819
ggugaaucaugagccauua

SEQ ID NO: 1375289 - RNA, 19 nt, Artificial Sequence
  Description of Artificial Sequence: Synthetic oligonucleotide
  Antisense strand to SEQ ID NO: 1375288
uaauggcucaugauucacc

SEQ ID NO: 1375290 - RNA, 19 nt, Artificial Sequence
  Description of Artificial Sequence: Synthetic oligonucleotide
  Sense strand starting at position 2368 of SEQ ID NO: 1242819
cucucagcagcauagauau

SEQ ID NO: 1375291 - RNA, 19 nt, Artificial Sequence
  Description of Artificial Sequence: Synthetic oligonucleotide
  Antisense strand to SEQ ID NO: 1375290
auaucuaugcugcugagag

SEQ ID NO: 1375292 - RNA, 19 nt, Artificial Sequence
  Description of Artificial Sequence: Synthetic oligonucleotide
  Sense strand starting at position 2380 of SEQ ID NO: 1242819
uagauaucgccugaagccu

SEQ ID NO: 1375293 - RNA, 19 nt, Artificial Sequence
  Description of Artificial Sequence: Synthetic oligonucleotide
  Antisense strand to SEQ ID NO: 1375292
aggcuucaggcgauaucua

SEQ ID NO: 1375294 - RNA, 19 nt, Artificial Sequence
  Description of Artificial Sequence: Synthetic oligonucleotide
  Sense strand starting at position 2386 of SEQ ID NO: 1242819
ucgccugaagccuguuaaa

SEQ ID NO: 1375295 - RNA, 19 nt, Artificial Sequence
  Description of Artificial Sequence: Synthetic oligonucleotide
  Antisense strand to SEQ ID NO: 1375294
uuuaacaggcuucaggcga

SEQ ID NO: 1375296 - RNA, 19 nt, Artificial Sequence
  Description of Artificial Sequence: Synthetic oligonucleotide
  Sense strand starting at position 2773 of SEQ ID NO: 1242819
uuaagauccuaggugauuc

SEQ ID NO: 1375297 - RNA, 19 nt, Artificial Sequence
  Description of Artificial Sequence: Synthetic oligonucleotide
  Antisense strand to SEQ ID NO: 1375296
gaaucaccuaggaucuuaa

SEQ ID NO: 1375298 - RNA, 19 nt, Artificial Sequence
  Description of Artificial Sequence: Synthetic oligonucleotide
  Sense strand starting at position 2783 of SEQ ID NO: 1242819
aggugauuccuuuagcguu

SEQ ID NO: 1375299 - RNA, 19 nt, Artificial Sequence
  Description of Artificial Sequence: Synthetic oligonucleotide
  Antisense strand to SEQ ID NO: 1375298
aacgcuaaaggaaucaccu

SEQ ID NO: 1375300 - RNA, 19 nt, Artificial Sequence
  Description of Artificial Sequence: Synthetic oligonucleotide
  Sense strand starting at position 3290 of SEQ ID NO: 1242819
gaguuaagagucuagcgcu

SEQ ID NO: 1375301 - RNA, 19 nt, Artificial Sequence
  Description of Artificial Sequence: Synthetic oligonucleotide
  Antisense strand to SEQ ID NO: 1375300
agcgcuagacucuuaacuc

SEQ ID NO: 1375302 - RNA, 19 nt, Artificial Sequence
  Description of Artificial Sequence: Synthetic oligonucleotide
  Sense strand starting at position 3293 of SEQ ID NO: 1242819
uuaagagucuagcgcuaca

SEQ ID NO: 1375303 - RNA, 19 nt, Artificial Sequence
  Description of Artificial Sequence: Synthetic oligonucleotide
  Antisense strand to SEQ ID NO: 1375302
uguagcgcuagacucuuaa

SEQ ID NO: 1375304 - RNA, 19 nt, Artificial Sequence
  Description of Artificial Sequence: Synthetic oligonucleotide
  Sense strand starting at position 3303 of SEQ ID NO: 1242819
agcgcuacauccuuccaaa

SEQ ID NO: 1375305 - RNA, 19 nt, Artificial Sequence
  Description of Artificial Sequence: Synthetic oligonucleotide
  Antisense strand to SEQ ID NO: 1375304
uuuggaaggauguagcgcu

SEQ ID NO: 1375306 - RNA, 19 nt, Artificial Sequence
  Description of Artificial Sequence: Synthetic oligonucleotide
  Sense strand starting at position 3314 of SEQ ID NO: 1242819
cuuccaaagcuauguuagu

SEQ ID NO: 1375307 - RNA, 19 nt, Artificial Sequence
  Description of Artificial Sequence: Synthetic oligonucleotide
  Antisense strand to SEQ ID NO: 1375306
acuaacauagcuuuggaag

SEQ ID NO: 1375308 - RNA, 19 nt, Artificial Sequence
  Description of Artificial Sequence: Synthetic oligonucleotide
  Sense strand starting at position 3315 of SEQ ID NO: 1242819
uuccaaagcuauguuaguu

SEQ ID NO: 1375309 - RNA, 19 nt, Artificial Sequence
  Description of Artificial Sequence: Synthetic oligonucleotide
  Antisense strand to SEQ ID NO: 1375308
aacuaacauagcuuuggaa

SEQ ID NO: 1375310 - RNA, 19 nt, Artificial Sequence
  Description of Artificial Sequence: Synthetic oligonucleotide
  Sense strand starting at position 3619 of SEQ ID NO: 1242819
aucccaaaguauggugauu

SEQ ID NO: 1375311 - RNA, 19 nt, Artificial Sequence
  Description of Artificial Sequence: Synthetic oligonucleotide
  Antisense strand to SEQ ID NO: 1375310
aaucaccauacuuugggau

SEQ ID NO: 1375312 - RNA, 19 nt, Artificial Sequence
  Description of Artificial Sequence: Synthetic oligonucleotide
  Sense strand starting at position 3621 of SEQ ID NO: 1242819
cccaaaguauggugauuaa

SEQ ID NO: 1375313 - RNA, 19 nt, Artificial Sequence
  Description of Artificial Sequence: Synthetic oligonucleotide
  Antisense strand to SEQ ID NO: 1375312
uuaaucaccauacuuuggg

SEQ ID NO: 1375314 - RNA, 19 nt, Artificial Sequence
  Description of Artificial Sequence: Synthetic oligonucleotide
  Sense strand starting at position 3625 of SEQ ID NO: 1242819
aaguauggugauuaaaggu

SEQ ID NO: 1375315 - RNA, 19 nt, Artificial Sequence
  Description of Artificial Sequence: Synthetic oligonucleotide
  Antisense strand to SEQ ID NO: 1375314
accuuuaaucaccauacuu

SEQ ID NO: 1375316 - RNA, 19 nt, Artificial Sequence
  Description of Artificial Sequence: Synthetic oligonucleotide
  Sense strand starting at position 227 of SEQ ID NO: 1242820
gcuagagguuaaugaaauu

SEQ ID NO: 1375317 - RNA, 19 nt, Artificial Sequence
  Description of Artificial Sequence: Synthetic oligonucleotide
  Antisense strand to SEQ ID NO: 1375316
aauuucauuaaccucuagc

SEQ ID NO: 1375318 - RNA, 19 nt, Artificial Sequence
  Description of Artificial Sequence: Synthetic oligonucleotide
  Sense strand starting at position 499 of SEQ ID NO: 1242820
gugaaaccaucgccucuua

SEQ ID NO: 1375319 - RNA, 19 nt, Artificial Sequence
  Description of Artificial Sequence: Synthetic oligonucleotide
  Antisense strand to SEQ ID NO: 1375318
uaagaggcgaugguuucac

SEQ ID NO: 1375320 - RNA, 19 nt, Artificial Sequence
  Description of Artificial Sequence: Synthetic oligonucleotide
  Sense strand starting at position 895 of SEQ ID NO: 1242820
guggauugaguaugcuuua

SEQ ID NO: 1375321 - RNA, 19 nt, Artificial Sequence
  Description of Artificial Sequence: Synthetic oligonucleotide
  Antisense strand to SEQ ID NO: 1375320
uaaagcauacucaauccac

SEQ ID NO: 1375322 - RNA, 19 nt, Artificial Sequence
  Description of Artificial Sequence: Synthetic oligonucleotide
  Sense strand starting at position 896 of SEQ ID NO: 1242820
uggauugaguaugcuuuau

SEQ ID NO: 1375323 - RNA, 19 nt, Artificial Sequence
  Description of Artificial Sequence: Synthetic oligonucleotide
  Antisense strand to SEQ ID NO: 1375322
auaaagcauacucaaucca

SEQ ID NO: 1375324 - RNA, 19 nt, Artificial Sequence
  Description of Artificial Sequence: Synthetic oligonucleotide
  Sense strand starting at position 1220 of SEQ ID NO: 1242820
auugauaaucuccguauac

SEQ ID NO: 1375325 - RNA, 19 nt, Artificial Sequence
  Description of Artificial Sequence: Synthetic oligonucleotide
  Antisense strand to SEQ ID NO: 1375324
guauacggagauuaucaau

SEQ ID NO: 1375326 - RNA, 19 nt, Artificial Sequence
  Description of Artificial Sequence: Synthetic oligonucleotide
  Sense strand starting at position 1221 of SEQ ID NO: 1242820
uugauaaucuccguauacu

SEQ ID NO: 1375327 - RNA, 19 nt, Artificial Sequence
  Description of Artificial Sequence: Synthetic oligonucleotide
  Antisense strand to SEQ ID NO: 1375326
aguauacggagauuaucaa

SEQ ID NO: 1375328 - RNA, 19 nt, Artificial Sequence
  Description of Artificial Sequence: Synthetic oligonucleotide
  Sense strand starting at position 1222 of SEQ ID NO: 1242820
ugauaaucuccguauacuc

SEQ ID NO: 1375329 - RNA, 19 nt, Artificial Sequence
  Description of Artificial Sequence: Synthetic oligonucleotide
  Antisense strand to SEQ ID NO: 1375328
gaguauacggagauuauca

SEQ ID NO: 1375330 - RNA, 19 nt, Artificial Sequence
  Description of Artificial Sequence: Synthetic oligonucleotide
  Sense strand starting at position 1261 of SEQ ID NO: 1242820
augccaaauuugguguuua

SEQ ID NO: 1375331 - RNA, 19 nt, Artificial Sequence
  Description of Artificial Sequence: Synthetic oligonucleotide
  Antisense strand to SEQ ID NO: 1375330
uaaacaccaaauuuggcau

SEQ ID NO: 1375332 - RNA, 19 nt, Artificial Sequence
  Description of Artificial Sequence: Synthetic oligonucleotide
  Sense strand starting at position 1262 of SEQ ID NO: 1242820
ugccaaauuugguguuuau

SEQ ID NO: 1375333 - RNA, 19 nt, Artificial Sequence
  Description of Artificial Sequence: Synthetic oligonucleotide
  Antisense strand to SEQ ID NO: 1375332
auaaacaccaaauuuggca

SEQ ID NO: 1375334 - RNA, 19 nt, Artificial Sequence
  Description of Artificial Sequence: Synthetic oligonucleotide
  Sense strand starting at position 1274 of SEQ ID NO: 1242820
uguuuauccuucccguaca

SEQ ID NO: 1375335 - RNA, 19 nt, Artificial Sequence
  Description of Artificial Sequence: Synthetic oligonucleotide
  Antisense strand to SEQ ID NO: 1375334
uguacgggaaggauaaaca

SEQ ID NO: 1375336 - RNA, 19 nt, Artificial Sequence
  Description of Artificial Sequence: Synthetic oligonucleotide
  Sense strand starting at position 1595 of SEQ ID NO: 1242820
acaccugcgcuuugugaga

SEQ ID NO: 1375337 - RNA, 19 nt, Artificial Sequence
  Description of Artificial Sequence: Synthetic oligonucleotide
  Antisense strand to SEQ ID NO: 1375336
ucucacaaagcgcaggugu

SEQ ID NO: 1375338 - RNA, 19 nt, Artificial Sequence
  Description of Artificial Sequence: Synthetic oligonucleotide
  Sense strand starting at position 1624 of SEQ ID NO: 1242820
gaaggaaccugguuuccaa

SEQ ID NO: 1375339 - RNA, 19 nt, Artificial Sequence
  Description of Artificial Sequence: Synthetic oligonucleotide
  Antisense strand to SEQ ID NO: 1375338
uuggaaaccagguuccuuc

SEQ ID NO: 1375340 - RNA, 19 nt, Artificial Sequence
  Description of Artificial Sequence: Synthetic oligonucleotide
  Sense strand starting at position 1677 of SEQ ID NO: 1242820
gagcaucuggauuggaauu

SEQ ID NO: 1375341 - RNA, 19 nt, Artificial Sequence
  Description of Artificial Sequence: Synthetic oligonucleotide
  Antisense strand to SEQ ID NO: 1375340
aauuccaauccagaugcuc

SEQ ID NO: 1375342 - RNA, 19 nt, Artificial Sequence
  Description of Artificial Sequence: Synthetic oligonucleotide
  Sense strand starting at position 1704 of SEQ ID NO: 1242820
ugcauuuauucccacguga

SEQ ID NO: 1375343 - RNA, 19 nt, Artificial Sequence
  Description of Artificial Sequence: Synthetic oligonucleotide
  Antisense strand to SEQ ID NO: 1375342
ucacgugggaauaaaugca

SEQ ID NO: 1375344 - RNA, 19 nt, Artificial Sequence
  Description of Artificial Sequence: Synthetic oligonucleotide
  Sense strand starting at position 1706 of SEQ ID NO: 1242820
cauuuauucccacgugagc

SEQ ID NO: 1375345 - RNA, 19 nt, Artificial Sequence
  Description of Artificial Sequence: Synthetic oligonucleotide
  Antisense strand to SEQ ID NO: 1375344
gcucacgugggaauaaaug

SEQ ID NO: 1375346 - RNA, 19 nt, Artificial Sequence
  Description of Artificial Sequence: Synthetic oligonucleotide
  Sense strand starting at position 2056 of SEQ ID NO: 1242820
uuggcugaggccuggaaau

SEQ ID NO: 1375347 - RNA, 19 nt, Artificial Sequence
  Description of Artificial Sequence: Synthetic oligonucleotide
  Antisense strand to SEQ ID NO: 1375346
auuuccaggccucagccaa

SEQ ID NO: 1375348 - RNA, 19 nt, Artificial Sequence
  Description of Artificial Sequence: Synthetic oligonucleotide
  Sense strand starting at position 2068 of SEQ ID NO: 1242820
uggaaauccugucagccaa

SEQ ID NO: 1375349 - RNA, 19 nt, Artificial Sequence
  Description of Artificial Sequence: Synthetic oligonucleotide
  Antisense strand to SEQ ID NO: 1375348
uuggcugacaggauuucca

SEQ ID NO: 1375350 - RNA, 19 nt, Artificial Sequence
  Description of Artificial Sequence: Synthetic oligonucleotide
  Sense strand starting at position 2168 of SEQ ID NO: 1242820
gggcuuuguuuccugcuaa

SEQ ID NO: 1375351 - RNA, 19 nt, Artificial Sequence
  Description of Artificial Sequence: Synthetic oligonucleotide
  Antisense strand to SEQ ID NO: 1375350
uuagcaggaaacaaagccc

SEQ ID NO: 1375352 - RNA, 19 nt, Artificial Sequence
  Description of Artificial Sequence: Synthetic oligonucleotide
  Sense strand starting at position 2169 of SEQ ID NO: 1242820
ggcuuuguuuccugcuaaa

SEQ ID NO: 1375353 - RNA, 19 nt, Artificial Sequence
  Description of Artificial Sequence: Synthetic oligonucleotide
  Antisense strand to SEQ ID NO: 1375352
uuuagcaggaaacaaagcc

SEQ ID NO: 1375354 - RNA, 19 nt, Artificial Sequence
  Description of Artificial Sequence: Synthetic oligonucleotide
  Sense strand starting at position 2172 of SEQ ID NO: 1242820
uuuguuuccugcuaaaugu

SEQ ID NO: 1375355 - RNA, 19 nt, Artificial Sequence
  Description of Artificial Sequence: Synthetic oligonucleotide
  Antisense strand to SEQ ID NO: 1375354
acauuuagcaggaaacaaa

SEQ ID NO: 1375356 - RNA, 19 nt, Artificial Sequence
  Description of Artificial Sequence: Synthetic oligonucleotide
  Sense strand starting at position 2191 of SEQ ID NO: 1242820
cuggcuuccuggugagacu

SEQ ID NO: 1375357 - RNA, 19 nt, Artificial Sequence
  Description of Artificial Sequence: Synthetic oligonucleotide
  Antisense strand to SEQ ID NO: 1375356
agucucaccaggaagccag

SEQ ID NO: 1375358 - RNA, 19 nt, Artificial Sequence
  Description of Artificial Sequence: Synthetic oligonucleotide
  Sense strand starting at position 2228 of SEQ ID NO: 1242820
gggcaagaucuuuaaucuu

SEQ ID NO: 1375359 - RNA, 19 nt, Artificial Sequence
  Description of Artificial Sequence: Synthetic oligonucleotide
  Antisense strand to SEQ ID NO: 1375358
aagauuaaagaucuugccc

SEQ ID NO: 1375360 - RNA, 19 nt, Artificial Sequence
  Description of Artificial Sequence: Synthetic oligonucleotide
  Sense strand starting at position 2243 of SEQ ID NO: 1242820
ucuugauccucagugacua

SEQ ID NO: 1375361 - RNA, 19 nt, Artificial Sequence
  Description of Artificial Sequence: Synthetic oligonucleotide
  Antisense strand to SEQ ID NO: 1375360
uagucacugaggaucaaga

SEQ ID NO: 1375362 - RNA, 19 nt, Artificial Sequence
  Description of Artificial Sequence: Synthetic oligonucleotide
  Sense strand starting at position 2244 of SEQ ID NO: 1242820
cuugauccucagugacuaa

SEQ ID NO: 1375363 - RNA, 19 nt, Artificial Sequence
  Description of Artificial Sequence: Synthetic oligonucleotide
  Antisense strand to SEQ ID NO: 1375362
uuagucacugaggaucaag

SEQ ID NO: 1375364 - RNA, 19 nt, Artificial Sequence
  Description of Artificial Sequence: Synthetic oligonucleotide
  Sense strand starting at position 2271 of SEQ ID NO: 1242820
ggucacucauuuggugaau

SEQ ID NO: 1375365 - RNA, 19 nt, Artificial Sequence
  Description of Artificial Sequence: Synthetic oligonucleotide
  Antisense strand to SEQ ID NO: 1375364
auucaccaaaugagugacc

SEQ ID NO: 1375366 - RNA, 19 nt, Artificial Sequence
  Description of Artificial Sequence: Synthetic oligonucleotide
  Sense strand starting at position 2273 of SEQ ID NO: 1242820
ucacucauuuggugaauca

SEQ ID NO: 1375367 - RNA, 19 nt, Artificial Sequence
  Description of Artificial Sequence: Synthetic oligonucleotide
  Antisense strand to SEQ ID NO: 1375366
ugauucaccaaaugaguga

SEQ ID NO: 1375368 - RNA, 19 nt, Artificial Sequence
  Description of Artificial Sequence: Synthetic oligonucleotide
  Sense strand starting at position 2283 of SEQ ID NO: 1242820
ggugaaucaugagccauua

SEQ ID NO: 1375369 - RNA, 19 nt, Artificial Sequence
  Description of Artificial Sequence: Synthetic oligonucleotide
  Antisense strand to SEQ ID NO: 1375368
uaauggcucaugauucacc

SEQ ID NO: 1375370 - RNA, 19 nt, Artificial Sequence
  Description of Artificial Sequence: Synthetic oligonucleotide
  Sense strand starting at position 2404 of SEQ ID NO: 1242820
cucucagcagcauagauau

SEQ ID NO: 1375371 - RNA, 19 nt, Artificial Sequence
  Description of Artificial Sequence: Synthetic oligonucleotide
  Antisense strand to SEQ ID NO: 1375370
auaucuaugcugcugagag

SEQ ID NO: 1375372 - RNA, 19 nt, Artificial Sequence
  Description of Artificial Sequence: Synthetic oligonucleotide
  Sense strand starting at position 2416 of SEQ ID NO: 1242820
uagauaucgccugaagccu

SEQ ID NO: 1375373 - RNA, 19 nt, Artificial Sequence
  Description of Artificial Sequence: Synthetic oligonucleotide
  Antisense strand to SEQ ID NO: 1375372
aggcuucaggcgauaucua

SEQ ID NO: 1375374 - RNA, 19 nt, Artificial Sequence
  Description of Artificial Sequence: Synthetic oligonucleotide
  Sense strand starting at position 2422 of SEQ ID NO: 1242820
ucgccugaagccuguuaaa

SEQ ID NO: 1375375 - RNA, 19 nt, Artificial Sequence
  Description of Artificial Sequence: Synthetic oligonucleotide
  Antisense strand to SEQ ID NO: 1375374
uuuaacaggcuucaggcga

SEQ ID NO: 1375376 - RNA, 19 nt, Artificial Sequence
  Description of Artificial Sequence: Synthetic oligonucleotide
  Sense strand starting at position 2809 of SEQ ID NO: 1242820
uuaagauccuaggugauuc

SEQ ID NO: 1375377 - RNA, 19 nt, Artificial Sequence
  Description of Artificial Sequence: Synthetic oligonucleotide
  Antisense strand to SEQ ID NO: 1375376
gaaucaccuaggaucuuaa

SEQ ID NO: 1375378 - RNA, 19 nt, Artificial Sequence
  Description of Artificial Sequence: Synthetic oligonucleotide
  Sense strand starting at position 2819 of SEQ ID NO: 1242820
aggugauuccuuuagcguu

SEQ ID NO: 1375379 - RNA, 19 nt, Artificial Sequence
  Description of Artificial Sequence: Synthetic oligonucleotide
  Antisense strand to SEQ ID NO: 1375378
aacgcuaaaggaaucaccu

SEQ ID NO: 1375380 - RNA, 19 nt, Artificial Sequence
  Description of Artificial Sequence: Synthetic oligonucleotide
  Sense strand starting at position 3326 of SEQ ID NO: 1242820
gaguuaagagucuagcgcu

SEQ ID NO: 1375381 - RNA, 19 nt, Artificial Sequence
  Description of Artificial Sequence: Synthetic oligonucleotide
  Antisense strand to SEQ ID NO: 1375380
agcgcuagacucuuaacuc

SEQ ID NO: 1375382 - RNA, 19 nt, Artificial Sequence
  Description of Artificial Sequence: Synthetic oligonucleotide
  Sense strand starting at position 3329 of SEQ ID NO: 1242820
uuaagagucuagcgcuaca

SEQ ID NO: 1375383 - RNA, 19 nt, Artificial Sequence
  Description of Artificial Sequence: Synthetic oligonucleotide
  Antisense strand to SEQ ID NO: 1375382
uguagcgcuagacucuuaa

SEQ ID NO: 1375384 - RNA, 19 nt, Artificial Sequence
  Description of Artificial Sequence: Synthetic oligonucleotide
  Sense strand starting at position 3339 of SEQ ID NO: 1242820
agcgcuacauccuuccaaa

SEQ ID NO: 1375385 - RNA, 19 nt, Artificial Sequence
  Description of Artificial Sequence: Synthetic oligonucleotide
  Antisense strand to SEQ ID NO: 1375384
uuuggaaggauguagcgcu

SEQ ID NO: 1375386 - RNA, 19 nt, Artificial Sequence
  Description of Artificial Sequence: Synthetic oligonucleotide
  Sense strand starting at position 3350 of SEQ ID NO: 1242820
cuuccaaagcuauguuagu

SEQ ID NO: 1375387 - RNA, 19 nt, Artificial Sequence
  Description of Artificial Sequence: Synthetic oligonucleotide
  Antisense strand to SEQ ID NO: 1375386
acuaacauagcuuuggaag

SEQ ID NO: 1375388 - RNA, 19 nt, Artificial Sequence
  Description of Artificial Sequence: Synthetic oligonucleotide
  Sense strand starting at position 3351 of SEQ ID NO: 1242820
uuccaaagcuauguuaguu

SEQ ID NO: 1375389 - RNA, 19 nt, Artificial Sequence
  Description of Artificial Sequence: Synthetic oligonucleotide
  Antisense strand to SEQ ID NO: 1375388
aacuaacauagcuuuggaa

SEQ ID NO: 1375390 - RNA, 19 nt, Artificial Sequence
  Description of Artificial Sequence: Synthetic oligonucleotide
  Sense strand starting at position 3655 of SEQ ID NO: 1242820
aucccaaaguauggugauu

SEQ ID NO: 1375391 - RNA, 19 nt, Artificial Sequence
  Description of Artificial Sequence: Synthetic oligonucleotide
  Antisense strand to SEQ ID NO: 1375390
aaucaccauacuuugggau

SEQ ID NO: 1375392 - RNA, 19 nt, Artificial Sequence
  Description of Artificial Sequence: Synthetic oligonucleotide
  Sense strand starting at position 3657 of SEQ ID NO: 1242820
cccaaaguauggugauuaa

SEQ ID NO: 1375393 - RNA, 19 nt, Artificial Sequence
  Description of Artificial Sequence: Synthetic oligonucleotide
  Antisense strand to SEQ ID NO: 1375392
uuaaucaccauacuuuggg

SEQ ID NO: 1375394 - RNA, 19 nt, Artificial Sequence
  Description of Artificial Sequence: Synthetic oligonucleotide
  Sense strand starting at position 3661 of SEQ ID NO: 1242820
aaguauggugauuaaaggu

SEQ ID NO: 1375395 - RNA, 19 nt, Artificial Sequence
  Description of Artificial Sequence: Synthetic oligonucleotide
  Antisense strand to SEQ ID NO: 1375394
accuuuaaucaccauacuu

SEQ ID NO: 1375396 - RNA, 19 nt, Artificial Sequence
  Description of Artificial Sequence: Synthetic oligonucleotide
  Sense strand starting at position 403 of SEQ ID NO: 1242821
ggcuuagaagucugacuca

SEQ ID NO: 1375397 - RNA, 19 nt, Artificial Sequence
  Description of Artificial Sequence: Synthetic oligonucleotide
  Antisense strand to SEQ ID NO: 1375396
ugagucagacuucuaagcc

SEQ ID NO: 1375398 - RNA, 19 nt, Artificial Sequence
  Description of Artificial Sequence: Synthetic oligonucleotide
  Sense strand starting at position 415 of SEQ ID NO: 1242821
ugacucauuucccagauug

SEQ ID NO: 1375399 - RNA, 19 nt, Artificial Sequence
  Description of Artificial Sequence: Synthetic oligonucleotide
  Antisense strand to SEQ ID NO: 1375398
caaucugggaaaugaguca

SEQ ID NO: 1375400 - RNA, 19 nt, Artificial Sequence
  Description of Artificial Sequence: Synthetic oligonucleotide
  Sense strand starting at position 561 of SEQ ID NO: 1242821
guaguaguaacucaugaua

SEQ ID NO: 1375401 - RNA, 19 nt, Artificial Sequence
  Description of Artificial Sequence: Synthetic oligonucleotide
  Antisense strand to SEQ ID NO: 1375400
uaucaugaguuacuacuac

SEQ ID NO: 1375402 - RNA, 19 nt, Artificial Sequence
  Description of Artificial Sequence: Synthetic oligonucleotide
  Sense strand starting at position 631 of SEQ ID NO: 1242821
caauaaaugguagguuuga

SEQ ID NO: 1375403 - RNA, 19 nt, Artificial Sequence
  Description of Artificial Sequence: Synthetic oligonucleotide
  Antisense strand to SEQ ID NO: 1375402
ucaaaccuaccauuuauug

SEQ ID NO: 1375404 - RNA, 19 nt, Artificial Sequence
  Description of Artificial Sequence: Synthetic oligonucleotide
  Sense strand starting at position 632 of SEQ ID NO: 1242821
aauaaaugguagguuugau

SEQ ID NO: 1375405 - RNA, 19 nt, Artificial Sequence
  Description of Artificial Sequence: Synthetic oligonucleotide
  Antisense strand to SEQ ID NO: 1375404
aucaaaccuaccauuuauu

SEQ ID NO: 1375406 - RNA, 19 nt, Artificial Sequence
  Description of Artificial Sequence: Synthetic oligonucleotide
  Sense strand starting at position 641 of SEQ ID NO: 1242821
uagguuugaugauuacuau

SEQ ID NO: 1375407 - RNA, 19 nt, Artificial Sequence
  Description of Artificial Sequence: Synthetic oligonucleotide
  Antisense strand to SEQ ID NO: 1375406
auaguaaucaucaaaccua

SEQ ID NO: 1375408 - RNA, 19 nt, Artificial Sequence
  Description of Artificial Sequence: Synthetic oligonucleotide
  Sense strand starting at position 654 of SEQ ID NO: 1242821
uacuauuugugagcagcua

SEQ ID NO: 1375409 - RNA, 19 nt, Artificial Sequence
  Description of Artificial Sequence: Synthetic oligonucleotide
  Antisense strand to SEQ ID NO: 1375408
uagcugcucacaaauagua

SEQ ID NO: 1375410 - RNA, 19 nt, Artificial Sequence
  Description of Artificial Sequence: Synthetic oligonucleotide
  Sense strand starting at position 666 of SEQ ID NO: 1242821
gcagcuaugaagugggaaa

SEQ ID NO: 1375411 - RNA, 19 nt, Artificial Sequence
  Description of Artificial Sequence: Synthetic oligonucleotide
  Antisense strand to SEQ ID NO: 1375410
uuucccacuucauagcugc

SEQ ID NO: 1375412 - RNA, 19 nt, Artificial Sequence
  Description of Artificial Sequence: Synthetic oligonucleotide
  Sense strand starting at position 668 of SEQ ID NO: 1242821
agcuaugaagugggaaagu

SEQ ID NO: 1375413 - RNA, 19 nt, Artificial Sequence
  Description of Artificial Sequence: Synthetic oligonucleotide
  Antisense strand to SEQ ID NO: 1375412
acuuucccacuucauagcu

SEQ ID NO: 1375414 - RNA, 19 nt, Artificial Sequence
  Description of Artificial Sequence: Synthetic oligonucleotide
  Sense strand starting at position 775 of SEQ ID NO: 1242821
cuguauugucuguaacuug

SEQ ID NO: 1375415 - RNA, 19 nt, Artificial Sequence
  Description of Artificial Sequence: Synthetic oligonucleotide
  Antisense strand to SEQ ID NO: 1375414
caaguuacagacaauacag

SEQ ID NO: 1375416 - RNA, 19 nt, Artificial Sequence
  Description of Artificial Sequence: Synthetic oligonucleotide
  Sense strand starting at position 780 of SEQ ID NO: 1242821
uugucuguaacuugaguua

SEQ ID NO: 1375417 - RNA, 19 nt, Artificial Sequence
  Description of Artificial Sequence: Synthetic oligonucleotide
  Antisense strand to SEQ ID NO: 1375416
uaacucaaguuacagacaa

SEQ ID NO: 1375418 - RNA, 19 nt, Artificial Sequence
  Description of Artificial Sequence: Synthetic oligonucleotide
  Sense strand starting at position 783 of SEQ ID NO: 1242821
ucuguaacuugaguuauga

SEQ ID NO: 1375419 - RNA, 19 nt, Artificial Sequence
  Description of Artificial Sequence: Synthetic oligonucleotide
  Antisense strand to SEQ ID NO: 1375418
ucauaacucaaguuacaga

SEQ ID NO: 1375420 - RNA, 19 nt, Artificial Sequence
  Description of Artificial Sequence: Synthetic oligonucleotide
  Sense strand starting at position 818 of SEQ ID NO: 1242821
uuacccguguauuuggaua

SEQ ID NO: 1375421 - RNA, 19 nt, Artificial Sequence
  Description of Artificial Sequence: Synthetic oligonucleotide
  Antisense strand to SEQ ID NO: 1375420
uauccaaauacacggguaa

SEQ ID NO: 1375422 - RNA, 19 nt, Artificial Sequence
  Description of Artificial Sequence: Synthetic oligonucleotide
  Sense strand starting at position 830 of SEQ ID NO: 1242821
uuggauauaucagaugaug

SEQ ID NO: 1375423 - RNA, 19 nt, Artificial Sequence
  Description of Artificial Sequence: Synthetic oligonucleotide
  Antisense strand to SEQ ID NO: 1375422
caucaucugauauauccaa

SEQ ID NO: 1375424 - RNA, 19 nt, Artificial Sequence
  Description of Artificial Sequence: Synthetic oligonucleotide
  Sense strand starting at position 877 of SEQ ID NO: 1242821
gggcuuuggaguuaaauag

SEQ ID NO: 1375425 - RNA, 19 nt, Artificial Sequence
  Description of Artificial Sequence: Synthetic oligonucleotide
  Antisense strand to SEQ ID NO: 1375424
cuauuuaacuccaaagccc

SEQ ID NO: 1375426 - RNA, 19 nt, Artificial Sequence
  Description of Artificial Sequence: Synthetic oligonucleotide
  Sense strand starting at position 922 of SEQ ID NO: 1242821
acuuacuauugggugugaa

SEQ ID NO: 1375427 - RNA, 19 nt, Artificial Sequence
  Description of Artificial Sequence: Synthetic oligonucleotide
  Antisense strand to SEQ ID NO: 1375426
uucacacccaauaguaagu

SEQ ID NO: 1375428 - RNA, 19 nt, Artificial Sequence
  Description of Artificial Sequence: Synthetic oligonucleotide
  Sense strand starting at position 923 of SEQ ID NO: 1242821
cuuacuauugggugugaac

SEQ ID NO: 1375429 - RNA, 19 nt, Artificial Sequence
  Description of Artificial Sequence: Synthetic oligonucleotide
  Antisense strand to SEQ ID NO: 1375428
guucacacccaauaguaag

SEQ ID NO: 1375430 - RNA, 19 nt, Artificial Sequence
  Description of Artificial Sequence: Synthetic oligonucleotide
  Sense strand starting at position 925 of SEQ ID NO: 1242821
uacuauugggugugaacuu

SEQ ID NO: 1375431 - RNA, 19 nt, Artificial Sequence
  Description of Artificial Sequence: Synthetic oligonucleotide
  Antisense strand to SEQ ID NO: 1375430
aaguucacacccaauagua

SEQ ID NO: 1375432 - RNA, 19 nt, Artificial Sequence
  Description of Artificial Sequence: Synthetic oligonucleotide
  Sense strand starting at position 938 of SEQ ID NO: 1242821
gaacuugugcaagguaauu

SEQ ID NO: 1375433 - RNA, 19 nt, Artificial Sequence
  Description of Artificial Sequence: Synthetic oligonucleotide
  Antisense strand to SEQ ID NO: 1375432
aauuaccuugcacaaguuc

SEQ ID NO: 1375434 - RNA, 19 nt, Artificial Sequence
  Description of Artificial Sequence: Synthetic oligonucleotide
  Sense strand starting at position 1012 of SEQ ID NO: 1242821
augaaauaagcaugugaaa

SEQ ID NO: 1375435 - RNA, 19 nt, Artificial Sequence
  Description of Artificial Sequence: Synthetic oligonucleotide
  Antisense strand to SEQ ID NO: 1375434
uuucacaugcuuauuucau

SEQ ID NO: 1375436 - RNA, 19 nt, Artificial Sequence
  Description of Artificial Sequence: Synthetic oligonucleotide
  Sense strand starting at position 1023 of SEQ ID NO: 1242821
augugaaauguuugaugca

SEQ ID NO: 1375437 - RNA, 19 nt, Artificial Sequence
  Description of Artificial Sequence: Synthetic oligonucleotide
  Antisense strand to SEQ ID NO: 1375436
ugcaucaaacauuucacau

SEQ ID NO: 1375438 - RNA, 19 nt, Artificial Sequence
  Description of Artificial Sequence: Synthetic oligonucleotide
  Sense strand starting at position 1036 of SEQ ID NO: 1242821
gaugcaaugccucacguau

SEQ ID NO: 1375439 - RNA, 19 nt, Artificial Sequence
  Description of Artificial Sequence: Synthetic oligonucleotide
  Antisense strand to SEQ ID NO: 1375438
auacgugaggcauugcauc

SEQ ID NO: 1375440 - RNA, 19 nt, Artificial Sequence
  Description of Artificial Sequence: Synthetic oligonucleotide
  Sense strand starting at position 2029 of SEQ ID NO: 1242821
gucuaacucgaucauguga

SEQ ID NO: 1375441 - RNA, 19 nt, Artificial Sequence
  Description of Artificial Sequence: Synthetic oligonucleotide
  Antisense strand to SEQ ID NO: 1375440
ucacaugaucgaguuagac

SEQ ID NO: 1375442 - RNA, 19 nt, Artificial Sequence
  Description of Artificial Sequence: Synthetic oligonucleotide
  Sense strand starting at position 2143 of SEQ ID NO: 1242821
uggcauguugguugaccaa

SEQ ID NO: 1375443 - RNA, 19 nt, Artificial Sequence
  Description of Artificial Sequence: Synthetic oligonucleotide
  Antisense strand to SEQ ID NO: 1375442
uuggucaaccaacaugcca

SEQ ID NO: 1375444 - RNA, 19 nt, Artificial Sequence
  Description of Artificial Sequence: Synthetic oligonucleotide
  Sense strand starting at position 2146 of SEQ ID NO: 1242821
cauguugguugaccaauaa

SEQ ID NO: 1375445 - RNA, 19 nt, Artificial Sequence
  Description of Artificial Sequence: Synthetic oligonucleotide
  Antisense strand to SEQ ID NO: 1375444
uuauuggucaaccaacaug

SEQ ID NO: 1375446 - RNA, 19 nt, Artificial Sequence
  Description of Artificial Sequence: Synthetic oligonucleotide
  Sense strand starting at position 2674 of SEQ ID NO: 1242821
gccagccauuccuugauuu

SEQ ID NO: 1375447 - RNA, 19 nt, Artificial Sequence
  Description of Artificial Sequence: Synthetic oligonucleotide
  Antisense strand to SEQ ID NO: 1375446
aaaucaaggaauggcuggc

SEQ ID NO: 1375448 - RNA, 19 nt, Artificial Sequence
  Description of Artificial Sequence: Synthetic oligonucleotide
  Sense strand starting at position 2730 of SEQ ID NO: 1242821
caccgagaccgucaucuua

SEQ ID NO: 1375449 - RNA, 19 nt, Artificial Sequence
  Description of Artificial Sequence: Synthetic oligonucleotide
  Antisense strand to SEQ ID NO: 1375448
uaagaugacggucucggug

SEQ ID NO: 1375450 - RNA, 19 nt, Artificial Sequence
  Description of Artificial Sequence: Synthetic oligonucleotide
  Sense strand starting at position 2732 of SEQ ID NO: 1242821
ccgagaccgucaucuuaag

SEQ ID NO: 1375451 - RNA, 19 nt, Artificial Sequence
  Description of Artificial Sequence: Synthetic oligonucleotide
  Antisense strand to SEQ ID NO: 1375450
cuuaagaugacggucucgg

SEQ ID NO: 1375452 - RNA, 19 nt, Artificial Sequence
  Description of Artificial Sequence: Synthetic oligonucleotide
  Sense strand starting at position 2781 of SEQ ID NO: 1242821
ugugcuuugaagcauguga

SEQ ID NO: 1375453 - RNA, 19 nt, Artificial Sequence
  Description of Artificial Sequence: Synthetic oligonucleotide
  Antisense strand to SEQ ID NO: 1375452
ucacaugcuucaaagcaca

SEQ ID NO: 1375454 - RNA, 19 nt, Artificial Sequence
  Description of Artificial Sequence: Synthetic oligonucleotide
  Sense strand starting at position 2785 of SEQ ID NO: 1242821
cuuugaagcaugugaguua

SEQ ID NO: 1375455 - RNA, 19 nt, Artificial Sequence
  Description of Artificial Sequence: Synthetic oligonucleotide
  Antisense strand to SEQ ID NO: 1375454
uaacucacaugcuucaaag

SEQ ID NO: 1375456 - RNA, 19 nt, Artificial Sequence
  Description of Artificial Sequence: Synthetic oligonucleotide
  Sense strand starting at position 2788 of SEQ ID NO: 1242821
ugaagcaugugaguuaauu

SEQ ID NO: 1375457 - RNA, 19 nt, Artificial Sequence
  Description of Artificial Sequence: Synthetic oligonucleotide
  Antisense strand to SEQ ID NO: 1375456
aauuaacucacaugcuuca

SEQ ID NO: 1375458 - RNA, 19 nt, Artificial Sequence
  Description of Artificial Sequence: Synthetic oligonucleotide
  Sense strand starting at position 2816 of SEQ ID NO: 1242821
guguuaaaggauuaguaua

SEQ ID NO: 1375459 - RNA, 19 nt, Artificial Sequence
  Description of Artificial Sequence: Synthetic oligonucleotide
  Antisense strand to SEQ ID NO: 1375458
uauacuaauccuuuaacac

SEQ ID NO: 1375460 - RNA, 19 nt, Artificial Sequence
  Description of Artificial Sequence: Synthetic oligonucleotide
  Sense strand starting at position 2824 of SEQ ID NO: 1242821
ggauuaguauaccugauca

SEQ ID NO: 1375461 - RNA, 19 nt, Artificial Sequence
  Description of Artificial Sequence: Synthetic oligonucleotide
  Antisense strand to SEQ ID NO: 1375460
ugaucagguauacuaaucc

SEQ ID NO: 1375462 - RNA, 19 nt, Artificial Sequence
  Description of Artificial Sequence: Synthetic oligonucleotide
  Sense strand starting at position 2828 of SEQ ID NO: 1242821
uaguauaccugaucacgaa

SEQ ID NO: 1375463 - RNA, 19 nt, Artificial Sequence
  Description of Artificial Sequence: Synthetic oligonucleotide
  Antisense strand to SEQ ID NO: 1375462
uucgugaucagguauacua

SEQ ID NO: 1375464 - RNA, 19 nt, Artificial Sequence
  Description of Artificial Sequence: Synthetic oligonucleotide
  Sense strand starting at position 3272 of SEQ ID NO: 1242821
ccaugaagcgcguauggaa

SEQ ID NO: 1375465 - RNA, 19 nt, Artificial Sequence
  Description of Artificial Sequence: Synthetic oligonucleotide
  Antisense strand to SEQ ID NO: 1375464
uuccauacgcgcuucaugg

SEQ ID NO: 1375466 - RNA, 19 nt, Artificial Sequence
  Description of Artificial Sequence: Synthetic oligonucleotide
  Sense strand starting at position 3281 of SEQ ID NO: 1242821
gcguauggaaauuaugaag

SEQ ID NO: 1375467 - RNA, 19 nt, Artificial Sequence
  Description of Artificial Sequence: Synthetic oligonucleotide
  Antisense strand to SEQ ID NO: 1375466
cuucauaauuuccauacgc

SEQ ID NO: 1375468 - RNA, 19 nt, Artificial Sequence
  Description of Artificial Sequence: Synthetic oligonucleotide
  Sense strand starting at position 3284 of SEQ ID NO: 1242821
uauggaaauuaugaaggga

SEQ ID NO: 1375469 - RNA, 19 nt, Artificial Sequence
  Description of Artificial Sequence: Synthetic oligonucleotide
  Antisense strand to SEQ ID NO: 1375468
ucccuucauaauuuccaua

SEQ ID NO: 1375470 - RNA, 19 nt, Artificial Sequence
  Description of Artificial Sequence: Synthetic oligonucleotide
  Sense strand starting at position 3303 of SEQ ID NO: 1242821
aacacuugaggcugugaga

SEQ ID NO: 1375471 - RNA, 19 nt, Artificial Sequence
  Description of Artificial Sequence: Synthetic oligonucleotide
  Antisense strand to SEQ ID NO: 1375470
ucucacagccucaaguguu

SEQ ID NO: 1375472 - RNA, 19 nt, Artificial Sequence
  Description of Artificial Sequence: Synthetic oligonucleotide
  Sense strand starting at position 3310 of SEQ ID NO: 1242821
gaggcugugagacaguaaa

SEQ ID NO: 1375473 - RNA, 19 nt, Artificial Sequence
  Description of Artificial Sequence: Synthetic oligonucleotide
  Antisense strand to SEQ ID NO: 1375472
uuuacugucucacagccuc

SEQ ID NO: 1375474 - RNA, 19 nt, Artificial Sequence
  Description of Artificial Sequence: Synthetic oligonucleotide
  Sense strand starting at position 3682 of SEQ ID NO: 1242821
ggcugucuuaaauaagugu

SEQ ID NO: 1375475 - RNA, 19 nt, Artificial Sequence
  Description of Artificial Sequence: Synthetic oligonucleotide
  Antisense strand to SEQ ID NO: 1375474
acacuuauuuaagacagcc

SEQ ID NO: 1375476 - RNA, 19 nt, Artificial Sequence
  Description of Artificial Sequence: Synthetic oligonucleotide
  Sense strand starting at position 75 of SEQ ID NO: 1242822
uguggucauccagaauaua

SEQ ID NO: 1375477 - RNA, 19 nt, Artificial Sequence
  Description of Artificial Sequence: Synthetic oligonucleotide
  Antisense strand to SEQ ID NO: 1375476
uauauucuggaugaccaca

SEQ ID NO: 1375478 - RNA, 19 nt, Artificial Sequence
  Description of Artificial Sequence: Synthetic oligonucleotide
  Sense strand starting at position 168 of SEQ ID NO: 1242822
ugucacgaugcuugaggau

SEQ ID NO: 1375479 - RNA, 19 nt, Artificial Sequence
  Description of Artificial Sequence: Synthetic oligonucleotide
  Antisense strand to SEQ ID NO: 1375478
auccucaagcaucgugaca

SEQ ID NO: 1375480 - RNA, 19 nt, Artificial Sequence
  Description of Artificial Sequence: Synthetic oligonucleotide
  Sense strand starting at position 240 of SEQ ID NO: 1242822
ucacaugaggcaugauaca

SEQ ID NO: 1375481 - RNA, 19 nt, Artificial Sequence
  Description of Artificial Sequence: Synthetic oligonucleotide
  Antisense strand to SEQ ID NO: 1375480
uguaucaugccucauguga

SEQ ID NO: 1375482 - RNA, 19 nt, Artificial Sequence
  Description of Artificial Sequence: Synthetic oligonucleotide
  Sense strand starting at position 249 of SEQ ID NO: 1242822
gcaugauacaguggagcuu

SEQ ID NO: 1375483 - RNA, 19 nt, Artificial Sequence
  Description of Artificial Sequence: Synthetic oligonucleotide
  Antisense strand to SEQ ID NO: 1375482
aagcuccacuguaucaugc

SEQ ID NO: 1375484 - RNA, 19 nt, Artificial Sequence
  Description of Artificial Sequence: Synthetic oligonucleotide
  Sense strand starting at position 321 of SEQ ID NO: 1242822
ggccuacaccuucgggaaa

SEQ ID NO: 1375485 - RNA, 19 nt, Artificial Sequence
  Description of Artificial Sequence: Synthetic oligonucleotide
  Antisense strand to SEQ ID NO: 1375484
uuucccgaagguguaggcc

SEQ ID NO: 1375486 - RNA, 19 nt, Artificial Sequence
  Description of Artificial Sequence: Synthetic oligonucleotide
  Sense strand starting at position 357 of SEQ ID NO: 1242822
cuaacugagcuuugggauu

SEQ ID NO: 1375487 - RNA, 19 nt, Artificial Sequence
  Description of Artificial Sequence: Synthetic oligonucleotide
  Antisense strand to SEQ ID NO: 1375486
aaucccaaagcucaguuag

SEQ ID NO: 1375488 - RNA, 19 nt, Artificial Sequence
  Description of Artificial Sequence: Synthetic oligonucleotide
  Sense strand starting at position 411 of SEQ ID NO: 1242822
uguggcucuucucuaagau

SEQ ID NO: 1375489 - RNA, 19 nt, Artificial Sequence
  Description of Artificial Sequence: Synthetic oligonucleotide
  Antisense strand to SEQ ID NO: 1375488
aucuuagagaagagccaca

SEQ ID NO: 1375490 - RNA, 19 nt, Artificial Sequence
  Description of Artificial Sequence: Synthetic oligonucleotide
  Sense strand starting at position 412 of SEQ ID NO: 1242822
guggcucuucucuaagaug

SEQ ID NO: 1375491 - RNA, 19 nt, Artificial Sequence
  Description of Artificial Sequence: Synthetic oligonucleotide
  Antisense strand to SEQ ID NO: 1375490
caucuuagagaagagccac

SEQ ID NO: 1375492 - RNA, 19 nt, Artificial Sequence
  Description of Artificial Sequence: Synthetic oligonucleotide
  Sense strand starting at position 490 of SEQ ID NO: 1242822
gaaggagaguugcuccaga

SEQ ID NO: 1375493 - RNA, 19 nt, Artificial Sequence
  Description of Artificial Sequence: Synthetic oligonucleotide
  Antisense strand to SEQ ID NO: 1375492
ucuggagcaacucuccuuc

SEQ ID NO: 1375494 - RNA, 19 nt, Artificial Sequence
  Description of Artificial Sequence: Synthetic oligonucleotide
  Sense strand starting at position 495 of SEQ ID NO: 1242822
agaguugcuccagacugau

SEQ ID NO: 1375495 - RNA, 19 nt, Artificial Sequence
  Description of Artificial Sequence: Synthetic oligonucleotide
  Antisense strand to SEQ ID NO: 1375494
aucagucuggagcaacucu

SEQ ID NO: 1375496 - RNA, 19 nt, Artificial Sequence
  Description of Artificial Sequence: Synthetic oligonucleotide
  Sense strand starting at position 812 of SEQ ID NO: 1242822
ccgguuucugcggcgcaaa

SEQ ID NO: 1375497 - RNA, 19 nt, Artificial Sequence
  Description of Artificial Sequence: Synthetic oligonucleotide
  Antisense strand to SEQ ID NO: 1375496
uuugcgccgcagaaaccgg

SEQ ID NO: 1375498 - RNA, 19 nt, Artificial Sequence
  Description of Artificial Sequence: Synthetic oligonucleotide
  Sense strand starting at position 958 of SEQ ID NO: 1242822
gcccuuagacgagagcuuu

SEQ ID NO: 1375499 - RNA, 19 nt, Artificial Sequence
  Description of Artificial Sequence: Synthetic oligonucleotide
  Antisense strand to SEQ ID NO: 1375498
aaagcucucgucuaagggc

SEQ ID NO: 1375500 - RNA, 19 nt, Artificial Sequence
  Description of Artificial Sequence: Synthetic oligonucleotide
  Sense strand starting at position 1649 of SEQ ID NO: 1242822
cugggauucucuuuaguug

SEQ ID NO: 1375501 - RNA, 19 nt, Artificial Sequence
  Description of Artificial Sequence: Synthetic oligonucleotide
  Antisense strand to SEQ ID NO: 1375500
caacuaaagagaaucccag

SEQ ID NO: 1375502 - RNA, 19 nt, Artificial Sequence
  Description of Artificial Sequence: Synthetic oligonucleotide
  Sense strand starting at position 1650 of SEQ ID NO: 1242822
ugggauucucuuuaguugu

SEQ ID NO: 1375503 - RNA, 19 nt, Artificial Sequence
  Description of Artificial Sequence: Synthetic oligonucleotide
  Antisense strand to SEQ ID NO: 1375502
acaacuaaagagaauccca

SEQ ID NO: 1375504 - RNA, 19 nt, Artificial Sequence
  Description of Artificial Sequence: Synthetic oligonucleotide
  Sense strand starting at position 1669 of SEQ ID NO: 1242822
uccucauugcccugagaua

SEQ ID NO: 1375505 - RNA, 19 nt, Artificial Sequence
  Description of Artificial Sequence: Synthetic oligonucleotide
  Antisense strand to SEQ ID NO: 1375504
uaucucagggcaaugagga

SEQ ID NO: 1375506 - RNA, 19 nt, Artificial Sequence
  Description of Artificial Sequence: Synthetic oligonucleotide
  Sense strand starting at position 1670 of SEQ ID NO: 1242822
ccucauugcccugagauag

SEQ ID NO: 1375507 - RNA, 19 nt, Artificial Sequence
  Description of Artificial Sequence: Synthetic oligonucleotide
  Antisense strand to SEQ ID NO: 1375506
cuaucucagggcaaugagg

SEQ ID NO: 1375508 - RNA, 19 nt, Artificial Sequence
  Description of Artificial Sequence: Synthetic oligonucleotide
  Sense strand starting at position 1819 of SEQ ID NO: 1242822
gucauagaucugggcucaa

SEQ ID NO: 1375509 - RNA, 19 nt, Artificial Sequence
  Description of Artificial Sequence: Synthetic oligonucleotide
  Antisense strand to SEQ ID NO: 1375508
uugagcccagaucuaugac

SEQ ID NO: 1375510 - RNA, 19 nt, Artificial Sequence
  Description of Artificial Sequence: Synthetic oligonucleotide
  Sense strand starting at position 1897 of SEQ ID NO: 1242822
cucucucaagugggagaua

SEQ ID NO: 1375511 - RNA, 19 nt, Artificial Sequence
  Description of Artificial Sequence: Synthetic oligonucleotide
  Antisense strand to SEQ ID NO: 1375510
uaucucccacuugagagag

SEQ ID NO: 1375512 - RNA, 19 nt, Artificial Sequence
  Description of Artificial Sequence: Synthetic oligonucleotide
  Sense strand starting at position 2122 of SEQ ID NO: 1242822
ccuacaaagugaucaagua

SEQ ID NO: 1375513 - RNA, 19 nt, Artificial Sequence
  Description of Artificial Sequence: Synthetic oligonucleotide
  Antisense strand to SEQ ID NO: 1375512
uacuugaucacuuuguagg

SEQ ID NO: 1375514 - RNA, 19 nt, Artificial Sequence
  Description of Artificial Sequence: Synthetic oligonucleotide
  Sense strand starting at position 2159 of SEQ ID NO: 1242822
ccuggucaggcagaauauu

SEQ ID NO: 1375515 - RNA, 19 nt, Artificial Sequence
  Description of Artificial Sequence: Synthetic oligonucleotide
  Antisense strand to SEQ ID NO: 1375514
aauauucugccugaccagg

SEQ ID NO: 1375516 - RNA, 19 nt, Artificial Sequence
  Description of Artificial Sequence: Synthetic oligonucleotide
  Sense strand starting at position 2622 of SEQ ID NO: 1242822
auuaacucucugggagguu

SEQ ID NO: 1375517 - RNA, 19 nt, Artificial Sequence
  Description of Artificial Sequence: Synthetic oligonucleotide
  Antisense strand to SEQ ID NO: 1375516
aaccucccagagaguuaau

SEQ ID NO: 1375518 - RNA, 19 nt, Artificial Sequence
  Description of Artificial Sequence: Synthetic oligonucleotide
  Sense strand starting at position 2638 of SEQ ID NO: 1242822
guucguaacaucuggagaa

SEQ ID NO: 1375519 - RNA, 19 nt, Artificial Sequence
  Description of Artificial Sequence: Synthetic oligonucleotide
  Antisense strand to SEQ ID NO: 1375518
uucuccagauguuacgaac

SEQ ID NO: 1375520 - RNA, 19 nt, Artificial Sequence
  Description of Artificial Sequence: Synthetic oligonucleotide
  Sense strand starting at position 2708 of SEQ ID NO: 1242822
uuggaauaguaugaggaaa

SEQ ID NO: 1375521 - RNA, 19 nt, Artificial Sequence
  Description of Artificial Sequence: Synthetic oligonucleotide
  Antisense strand to SEQ ID NO: 1375520
uuuccucauacuauuccaa

SEQ ID NO: 1375522 - RNA, 19 nt, Artificial Sequence
  Description of Artificial Sequence: Synthetic oligonucleotide
  Sense strand starting at position 2790 of SEQ ID NO: 1242822
ccagauaaaucagaggaag

SEQ ID NO: 1375523 - RNA, 19 nt, Artificial Sequence
  Description of Artificial Sequence: Synthetic oligonucleotide
  Antisense strand to SEQ ID NO: 1375522
cuuccucugauuuaucugg

SEQ ID NO: 1375524 - RNA, 19 nt, Artificial Sequence
  Description of Artificial Sequence: Synthetic oligonucleotide
  Sense strand starting at position 2860 of SEQ ID NO: 1242822
uugaguagugaugggugaa

SEQ ID NO: 1375525 - RNA, 19 nt, Artificial Sequence
  Description of Artificial Sequence: Synthetic oligonucleotide
  Antisense strand to SEQ ID NO: 1375524
uucacccaucacuacucaa

SEQ ID NO: 1375526 - RNA, 19 nt, Artificial Sequence
  Description of Artificial Sequence: Synthetic oligonucleotide
  Sense strand starting at position 2861 of SEQ ID NO: 1242822
ugaguagugaugggugaau

SEQ ID NO: 1375527 - RNA, 19 nt, Artificial Sequence
  Description of Artificial Sequence: Synthetic oligonucleotide
  Antisense strand to SEQ ID NO: 1375526
auucacccaucacuacuca

SEQ ID NO: 1375528 - RNA, 19 nt, Artificial Sequence
  Description of Artificial Sequence: Synthetic oligonucleotide
  Sense strand starting at position 2863 of SEQ ID NO: 1242822
aguagugaugggugaauga

SEQ ID NO: 1375529 - RNA, 19 nt, Artificial Sequence
  Description of Artificial Sequence: Synthetic oligonucleotide
  Antisense strand to SEQ ID NO: 1375528
ucauucacccaucacuacu

SEQ ID NO: 1375530 - RNA, 19 nt, Artificial Sequence
  Description of Artificial Sequence: Synthetic oligonucleotide
  Sense strand starting at position 2947 of SEQ ID NO: 1242822
uugacaauggcuggauacu

SEQ ID NO: 1375531 - RNA, 19 nt, Artificial Sequence
  Description of Artificial Sequence: Synthetic oligonucleotide
  Antisense strand to SEQ ID NO: 1375530
aguauccagccauugucaa

SEQ ID NO: 1375532 - RNA, 19 nt, Artificial Sequence
  Description of Artificial Sequence: Synthetic oligonucleotide
  Sense strand starting at position 3299 of SEQ ID NO: 1242822
agggcuucuccuuauccaa

SEQ ID NO: 1375533 - RNA, 19 nt, Artificial Sequence
  Description of Artificial Sequence: Synthetic oligonucleotide
  Antisense strand to SEQ ID NO: 1375532
uuggauaaggagaagcccu

SEQ ID NO: 1375534 - RNA, 19 nt, Artificial Sequence
  Description of Artificial Sequence: Synthetic oligonucleotide
  Sense strand starting at position 3493 of SEQ ID NO: 1242822
cuuggauguuugucccaac

SEQ ID NO: 1375535 - RNA, 19 nt, Artificial Sequence
  Description of Artificial Sequence: Synthetic oligonucleotide
  Antisense strand to SEQ ID NO: 1375534
guugggacaaacauccaag

SEQ ID NO: 1375536 - RNA, 19 nt, Artificial Sequence
  Description of Artificial Sequence: Synthetic oligonucleotide
  Sense strand starting at position 3494 of SEQ ID NO: 1242822
uuggauguuugucccaaca

SEQ ID NO: 1375537 - RNA, 19 nt, Artificial Sequence
  Description of Artificial Sequence: Synthetic oligonucleotide
  Antisense strand to SEQ ID NO: 1375536
uguugggacaaacauccaa

SEQ ID NO: 1375538 - RNA, 19 nt, Artificial Sequence
  Description of Artificial Sequence: Synthetic oligonucleotide
  Sense strand starting at position 3675 of SEQ ID NO: 1242822
uaggguagcugguuaauau

SEQ ID NO: 1375539 - RNA, 19 nt, Artificial Sequence
  Description of Artificial Sequence: Synthetic oligonucleotide
  Antisense strand to SEQ ID NO: 1375538
auauuaaccagcuacccua

SEQ ID NO: 1375540 - RNA, 19 nt, Artificial Sequence
  Description of Artificial Sequence: Synthetic oligonucleotide
  Sense strand starting at position 3676 of SEQ ID NO: 1242822
aggguagcugguuaauaua

SEQ ID NO: 1375541 - RNA, 19 nt, Artificial Sequence
  Description of Artificial Sequence: Synthetic oligonucleotide
  Antisense strand to SEQ ID NO: 1375540
uauauuaaccagcuacccu

SEQ ID NO: 1375542 - RNA, 19 nt, Artificial Sequence
  Description of Artificial Sequence: Synthetic oligonucleotide
  Sense strand starting at position 3711 of SEQ ID NO: 1242822
augcuugaguccuuacaau

SEQ ID NO: 1375543 - RNA, 19 nt, Artificial Sequence
  Description of Artificial Sequence: Synthetic oligonucleotide
  Antisense strand to SEQ ID NO: 1375542
auuguaaggacucaagcau

SEQ ID NO: 1375544 - RNA, 19 nt, Artificial Sequence
  Description of Artificial Sequence: Synthetic oligonucleotide
  Sense strand starting at position 3752 of SEQ ID NO: 1242822
ggaguuagagcuugccuaa

SEQ ID NO: 1375545 - RNA, 19 nt, Artificial Sequence
  Description of Artificial Sequence: Synthetic oligonucleotide
  Antisense strand to SEQ ID NO: 1375544
uuaggcaagcucuaacucc

SEQ ID NO: 1375546 - RNA, 19 nt, Artificial Sequence
  Description of Artificial Sequence: Synthetic oligonucleotide
  Sense strand starting at position 3802 of SEQ ID NO: 1242822
cuugucacaucacuagaca

SEQ ID NO: 1375547 - RNA, 19 nt, Artificial Sequence
  Description of Artificial Sequence: Synthetic oligonucleotide
  Antisense strand to SEQ ID NO: 1375546
ugucuagugaugugacaag

SEQ ID NO: 1375548 - RNA, 19 nt, Artificial Sequence
  Description of Artificial Sequence: Synthetic oligonucleotide
  Sense strand starting at position 3893 of SEQ ID NO: 1242822
uaaguagugcuuuagaaau

SEQ ID NO: 1375549 - RNA, 19 nt, Artificial Sequence
  Description of Artificial Sequence: Synthetic oligonucleotide
  Antisense strand to SEQ ID NO: 1375548
auuucuaaagcacuacuua

SEQ ID NO: 1375550 - RNA, 19 nt, Artificial Sequence
  Description of Artificial Sequence: Synthetic oligonucleotide
  Sense strand starting at position 3911 of SEQ ID NO: 1242822
uaggaaagguauccuuauu

SEQ ID NO: 1375551 - RNA, 19 nt, Artificial Sequence
  Description of Artificial Sequence: Synthetic oligonucleotide
  Antisense strand to SEQ ID NO: 1375550
aauaaggauaccuuuccua

SEQ ID NO: 1375552 - RNA, 19 nt, Artificial Sequence
  Description of Artificial Sequence: Synthetic oligonucleotide
  Sense strand starting at position 3916 of SEQ ID NO: 1242822
aagguauccuuauugugaa

SEQ ID NO: 1375553 - RNA, 19 nt, Artificial Sequence
  Description of Artificial Sequence: Synthetic oligonucleotide
  Antisense strand to SEQ ID NO: 1375552
uucacaauaaggauaccuu

SEQ ID NO: 1375554 - RNA, 19 nt, Artificial Sequence
  Description of Artificial Sequence: Synthetic oligonucleotide
  Sense strand starting at position 3940 of SEQ ID NO: 1242822
aucuaagcuccugagauca

SEQ ID NO: 1375555 - RNA, 19 nt, Artificial Sequence
  Description of Artificial Sequence: Synthetic oligonucleotide
  Antisense strand to SEQ ID NO: 1375554
ugaucucaggagcuuagau

SEQ ID NO: 1375556 - RNA, 19 nt, Artificial Sequence
  Description of Artificial Sequence: Synthetic oligonucleotide
  Sense strand starting at position 47 of SEQ ID NO: 1242823
uugaccucuugggcuagaa

SEQ ID NO: 1375557 - RNA, 19 nt, Artificial Sequence
  Description of Artificial Sequence: Synthetic oligonucleotide
  Antisense strand to SEQ ID NO: 1375556
uucuagcccaagaggucaa

SEQ ID NO: 1375558 - RNA, 19 nt, Artificial Sequence
  Description of Artificial Sequence: Synthetic oligonucleotide
  Sense strand starting at position 51 of SEQ ID NO: 1242823
ccucuugggcuagaaggau

SEQ ID NO: 1375559 - RNA, 19 nt, Artificial Sequence
  Description of Artificial Sequence: Synthetic oligonucleotide
  Antisense strand to SEQ ID NO: 1375558
auccuucuagcccaagagg

SEQ ID NO: 1375560 - RNA, 19 nt, Artificial Sequence
  Description of Artificial Sequence: Synthetic oligonucleotide
  Sense strand starting at position 182 of SEQ ID NO: 1242823
uccugaacuugugcugaca

SEQ ID NO: 1375561 - RNA, 19 nt, Artificial Sequence
  Description of Artificial Sequence: Synthetic oligonucleotide
  Antisense strand to SEQ ID NO: 1375560
ugucagcacaaguucagga

SEQ ID NO: 1375562 - RNA, 19 nt, Artificial Sequence
  Description of Artificial Sequence: Synthetic oligonucleotide
  Sense strand starting at position 184 of SEQ ID NO: 1242823
cugaacuugugcugacaca

SEQ ID NO: 1375563 - RNA, 19 nt, Artificial Sequence
  Description of Artificial Sequence: Synthetic oligonucleotide
  Antisense strand to SEQ ID NO: 1375562
ugugucagcacaaguucag

SEQ ID NO: 1375564 - RNA, 19 nt, Artificial Sequence
  Description of Artificial Sequence: Synthetic oligonucleotide
  Sense strand starting at position 185 of SEQ ID NO: 1242823
ugaacuugugcugacacaa

SEQ ID NO: 1375565 - RNA, 19 nt, Artificial Sequence
  Description of Artificial Sequence: Synthetic oligonucleotide
  Antisense strand to SEQ ID NO: 1375564
uugugucagcacaaguuca

SEQ ID NO: 1375566 - RNA, 19 nt, Artificial Sequence
  Description of Artificial Sequence: Synthetic oligonucleotide
  Sense strand starting at position 226 of SEQ ID NO: 1242823
aaggguauuucugugucuu

SEQ ID NO: 1375567 - RNA, 19 nt, Artificial Sequence
  Description of Artificial Sequence: Synthetic oligonucleotide
  Antisense strand to SEQ ID NO: 1375566
aagacacagaaauacccuu

SEQ ID NO: 1375568 - RNA, 19 nt, Artificial Sequence
  Description of Artificial Sequence: Synthetic oligonucleotide
  Sense strand starting at position 227 of SEQ ID NO: 1242823
aggguauuucugugucuuu

SEQ ID NO: 1375569 - RNA, 19 nt, Artificial Sequence
  Description of Artificial Sequence: Synthetic oligonucleotide
  Antisense strand to SEQ ID NO: 1375568
aaagacacagaaauacccu

SEQ ID NO: 1375570 - RNA, 19 nt, Artificial Sequence
  Description of Artificial Sequence: Synthetic oligonucleotide
  Sense strand starting at position 332 of SEQ ID NO: 1242823
ccugcauggcacuaauauc

SEQ ID NO: 1375571 - RNA, 19 nt, Artificial Sequence
  Description of Artificial Sequence: Synthetic oligonucleotide
  Antisense strand to SEQ ID NO: 1375570
gauauuagugccaugcagg

SEQ ID NO: 1375572 - RNA, 19 nt, Artificial Sequence
  Description of Artificial Sequence: Synthetic oligonucleotide
  Sense strand starting at position 372 of SEQ ID NO: 1242823
gcaagcuacgucgggauaa

SEQ ID NO: 1375573 - RNA, 19 nt, Artificial Sequence
  Description of Artificial Sequence: Synthetic oligonucleotide
  Antisense strand to SEQ ID NO: 1375572
uuaucccgacguagcuugc

SEQ ID NO: 1375574 - RNA, 19 nt, Artificial Sequence
  Description of Artificial Sequence: Synthetic oligonucleotide
  Sense strand starting at position 373 of SEQ ID NO: 1242823
caagcuacgucgggauaau

SEQ ID NO: 1375575 - RNA, 19 nt, Artificial Sequence
  Description of Artificial Sequence: Synthetic oligonucleotide
  Antisense strand to SEQ ID NO: 1375574
auuaucccgacguagcuug

SEQ ID NO: 1375576 - RNA, 19 nt, Artificial Sequence
  Description of Artificial Sequence: Synthetic oligonucleotide
  Sense strand starting at position 374 of SEQ ID NO: 1242823
aagcuacgucgggauaaua

SEQ ID NO: 1375577 - RNA, 19 nt, Artificial Sequence
  Description of Artificial Sequence: Synthetic oligonucleotide
  Antisense strand to SEQ ID NO: 1375576
uauuaucccgacguagcuu

SEQ ID NO: 1375578 - RNA, 19 nt, Artificial Sequence
  Description of Artificial Sequence: Synthetic oligonucleotide
  Sense strand starting at position 418 of SEQ ID NO: 1242823
ucuuguacgcauuaaaugu

SEQ ID NO: 1375579 - RNA, 19 nt, Artificial Sequence
  Description of Artificial Sequence: Synthetic oligonucleotide
  Antisense strand to SEQ ID NO: 1375578
acauuuaaugcguacaaga

SEQ ID NO: 1375580 - RNA, 19 nt, Artificial Sequence
  Description of Artificial Sequence: Synthetic oligonucleotide
  Sense strand starting at position 425 of SEQ ID NO: 1242823
cgcauuaaauguguacuga

SEQ ID NO: 1375581 - RNA, 19 nt, Artificial Sequence
  Description of Artificial Sequence: Synthetic oligonucleotide
  Antisense strand to SEQ ID NO: 1375580
ucaguacacauuuaaugcg

SEQ ID NO: 1375582 - RNA, 19 nt, Artificial Sequence
  Description of Artificial Sequence: Synthetic oligonucleotide
  Sense strand starting at position 426 of SEQ ID NO: 1242823
gcauuaaauguguacugau

SEQ ID NO: 1375583 - RNA, 19 nt, Artificial Sequence
  Description of Artificial Sequence: Synthetic oligonucleotide
  Antisense strand to SEQ ID NO: 1375582
aucaguacacauuuaaugc

SEQ ID NO: 1375584 - RNA, 19 nt, Artificial Sequence
  Description of Artificial Sequence: Synthetic oligonucleotide
  Sense strand starting at position 434 of SEQ ID NO: 1242823
uguguacugaucgguauga

SEQ ID NO: 1375585 - RNA, 19 nt, Artificial Sequence
  Description of Artificial Sequence: Synthetic oligonucleotide
  Antisense strand to SEQ ID NO: 1375584
ucauaccgaucaguacaca

SEQ ID NO: 1375586 - RNA, 19 nt, Artificial Sequence
  Description of Artificial Sequence: Synthetic oligonucleotide
  Sense strand starting at position 436 of SEQ ID NO: 1242823
uguacugaucgguaugacu

SEQ ID NO: 1375587 - RNA, 19 nt, Artificial Sequence
  Description of Artificial Sequence: Synthetic oligonucleotide
  Antisense strand to SEQ ID NO: 1375586
agucauaccgaucaguaca

SEQ ID NO: 1375588 - RNA, 19 nt, Artificial Sequence
  Description of Artificial Sequence: Synthetic oligonucleotide
  Sense strand starting at position 443 of SEQ ID NO: 1242823
aucgguaugacuggcacaa

SEQ ID NO: 1375589 - RNA, 19 nt, Artificial Sequence
  Description of Artificial Sequence: Synthetic oligonucleotide
  Antisense strand to SEQ ID NO: 1375588
uugugccagucauaccgau

SEQ ID NO: 1375590 - RNA, 19 nt, Artificial Sequence
  Description of Artificial Sequence: Synthetic oligonucleotide
  Sense strand starting at position 465 of SEQ ID NO: 1242823
guaccagauggauggcaaa

SEQ ID NO: 1375591 - RNA, 19 nt, Artificial Sequence
  Description of Artificial Sequence: Synthetic oligonucleotide
  Antisense strand to SEQ ID NO: 1375590
uuugccauccaucugguac

SEQ ID NO: 1375592 - RNA, 19 nt, Artificial Sequence
  Description of Artificial Sequence: Synthetic oligonucleotide
  Sense strand starting at position 666 of SEQ ID NO: 1242823
caauuagcccagcguggua

SEQ ID NO: 1375593 - RNA, 19 nt, Artificial Sequence
  Description of Artificial Sequence: Synthetic oligonucleotide
  Antisense strand to SEQ ID NO: 1375592
uaccacgcugggcuaauug

SEQ ID NO: 1375594 - RNA, 19 nt, Artificial Sequence
  Description of Artificial Sequence: Synthetic oligonucleotide
  Sense strand starting at position 679 of SEQ ID NO: 1242823
gugguauugugugccuaua

SEQ ID NO: 1375595 - RNA, 19 nt, Artificial Sequence
  Description of Artificial Sequence: Synthetic oligonucleotide
  Antisense strand to SEQ ID NO: 1375594
uauaggcacacaauaccac

SEQ ID NO: 1375596 - RNA, 19 nt, Artificial Sequence
  Description of Artificial Sequence: Synthetic oligonucleotide
  Sense strand starting at position 681 of SEQ ID NO: 1242823
gguauugugugccuauagu

SEQ ID NO: 1375597 - RNA, 19 nt, Artificial Sequence
  Description of Artificial Sequence: Synthetic oligonucleotide
  Antisense strand to SEQ ID NO: 1375596
acuauaggcacacaauacc

SEQ ID NO: 1375598 - RNA, 19 nt, Artificial Sequence
  Description of Artificial Sequence: Synthetic oligonucleotide
  Sense strand starting at position 810 of SEQ ID NO: 1242823
gcagaacacucagagagaa

SEQ ID NO: 1375599 - RNA, 19 nt, Artificial Sequence
  Description of Artificial Sequence: Synthetic oligonucleotide
  Antisense strand to SEQ ID NO: 1375598
uucucucugaguguucugc

SEQ ID NO: 1375600 - RNA, 19 nt, Artificial Sequence
  Description of Artificial Sequence: Synthetic oligonucleotide
  Sense strand starting at position 824 of SEQ ID NO: 1242823
gagaauugucaauaccugu

SEQ ID NO: 1375601 - RNA, 19 nt, Artificial Sequence
  Description of Artificial Sequence: Synthetic oligonucleotide
  Antisense strand to SEQ ID NO: 1375600
acagguauugacaauucuc

SEQ ID NO: 1375602 - RNA, 19 nt, Artificial Sequence
  Description of Artificial Sequence: Synthetic oligonucleotide
  Sense strand starting at position 831 of SEQ ID NO: 1242823
gucaauaccuguccuugga

SEQ ID NO: 1375603 - RNA, 19 nt, Artificial Sequence
  Description of Artificial Sequence: Synthetic oligonucleotide
  Antisense strand to SEQ ID NO: 1375602
uccaaggacagguauugac

SEQ ID NO: 1375604 - RNA, 19 nt, Artificial Sequence
  Description of Artificial Sequence: Synthetic oligonucleotide
  Sense strand starting at position 833 of SEQ ID NO: 1242823
caauaccuguccuuggaga

SEQ ID NO: 1375605 - RNA, 19 nt, Artificial Sequence
  Description of Artificial Sequence: Synthetic oligonucleotide
  Antisense strand to SEQ ID NO: 1375604
ucuccaaggacagguauug

SEQ ID NO: 1375606 - RNA, 19 nt, Artificial Sequence
  Description of Artificial Sequence: Synthetic oligonucleotide
  Sense strand starting at position 834 of SEQ ID NO: 1242823
aauaccuguccuuggagaa

SEQ ID NO: 1375607 - RNA, 19 nt, Artificial Sequence
  Description of Artificial Sequence: Synthetic oligonucleotide
  Antisense strand to SEQ ID NO: 1375606
uucuccaaggacagguauu

SEQ ID NO: 1375608 - RNA, 19 nt, Artificial Sequence
  Description of Artificial Sequence: Synthetic oligonucleotide
  Sense strand starting at position 835 of SEQ ID NO: 1242823
auaccuguccuuggagaac

SEQ ID NO: 1375609 - RNA, 19 nt, Artificial Sequence
  Description of Artificial Sequence: Synthetic oligonucleotide
  Antisense strand to SEQ ID NO: 1375608
guucuccaaggacagguau

SEQ ID NO: 1375610 - RNA, 19 nt, Artificial Sequence
  Description of Artificial Sequence: Synthetic oligonucleotide
  Sense strand starting at position 1285 of SEQ ID NO: 1242823
gcugccuucucuugugaac

SEQ ID NO: 1375611 - RNA, 19 nt, Artificial Sequence
  Description of Artificial Sequence: Synthetic oligonucleotide
  Antisense strand to SEQ ID NO: 1375610
guucacaagagaaggcagc

SEQ ID NO: 1375612 - RNA, 19 nt, Artificial Sequence
  Description of Artificial Sequence: Synthetic oligonucleotide
  Sense strand starting at position 1287 of SEQ ID NO: 1242823
ugccuucucuugugaacac

SEQ ID NO: 1375613 - RNA, 19 nt, Artificial Sequence
  Description of Artificial Sequence: Synthetic oligonucleotide
  Antisense strand to SEQ ID NO: 1375612
guguucacaagagaaggca

SEQ ID NO: 1375614 - RNA, 19 nt, Artificial Sequence
  Description of Artificial Sequence: Synthetic oligonucleotide
  Sense strand starting at position 2993 of SEQ ID NO: 1242823
cuccuuuggcgggaucaca

SEQ ID NO: 1375615 - RNA, 19 nt, Artificial Sequence
  Description of Artificial Sequence: Synthetic oligonucleotide
  Antisense strand to SEQ ID NO: 1375614
ugugaucccgccaaaggag

SEQ ID NO: 1375616 - RNA, 19 nt, Artificial Sequence
  Description of Artificial Sequence: Synthetic oligonucleotide
  Sense strand starting at position 3031 of SEQ ID NO: 1242823
uuggguucuccggauugca

SEQ ID NO: 1375617 - RNA, 19 nt, Artificial Sequence
  Description of Artificial Sequence: Synthetic oligonucleotide
  Antisense strand to SEQ ID NO: 1375616
ugcaauccggagaacccaa

SEQ ID NO: 1375618 - RNA, 19 nt, Artificial Sequence
  Description of Artificial Sequence: Synthetic oligonucleotide
  Sense strand starting at position 3954 of SEQ ID NO: 1242823
cccugugugcccugggaga

SEQ ID NO: 1375619 - RNA, 19 nt, Artificial Sequence
  Description of Artificial Sequence: Synthetic oligonucleotide
  Antisense strand to SEQ ID NO: 1375618
ucucccagggcacacaggg

SEQ ID NO: 1375620 - RNA, 19 nt, Artificial Sequence
  Description of Artificial Sequence: Synthetic oligonucleotide
  Sense strand starting at position 29 of SEQ ID NO: 1242824
cuggccuauuacuguuauu

SEQ ID NO: 1375621 - RNA, 19 nt, Artificial Sequence
  Description of Artificial Sequence: Synthetic oligonucleotide
  Antisense strand to SEQ ID NO: 1375620
aauaacaguaauaggccag

SEQ ID NO: 1375622 - RNA, 19 nt, Artificial Sequence
  Description of Artificial Sequence: Synthetic oligonucleotide
  Sense strand starting at position 65 of SEQ ID NO: 1242824
gugugugguggcucacuuu

SEQ ID NO: 1375623 - RNA, 19 nt, Artificial Sequence
  Description of Artificial Sequence: Synthetic oligonucleotide
  Antisense strand to SEQ ID NO: 1375622
aaagugagccaccacacac

SEQ ID NO: 1375624 - RNA, 19 nt, Artificial Sequence
  Description of Artificial Sequence: Synthetic oligonucleotide
  Sense strand starting at position 365 of SEQ ID NO: 1242824
ucuccauugucuugccuau

SEQ ID NO: 1375625 - RNA, 19 nt, Artificial Sequence
  Description of Artificial Sequence: Synthetic oligonucleotide
  Antisense strand to SEQ ID NO: 1375624
auaggcaagacaauggaga

SEQ ID NO: 1375626 - RNA, 19 nt, Artificial Sequence
  Description of Artificial Sequence: Synthetic oligonucleotide
  Sense strand starting at position 422 of SEQ ID NO: 1242824
gggcuaaggacuuguuuau

SEQ ID NO: 1375627 - RNA, 19 nt, Artificial Sequence
  Description of Artificial Sequence: Synthetic oligonucleotide
  Antisense strand to SEQ ID NO: 1375626
auaaacaaguccuuagccc

SEQ ID NO: 1375628 - RNA, 19 nt, Artificial Sequence
  Description of Artificial Sequence: Synthetic oligonucleotide
  Sense strand starting at position 655 of SEQ ID NO: 1242824
ucuccuccgggcugugaaa

SEQ ID NO: 1375629 - RNA, 19 nt, Artificial Sequence
  Description of Artificial Sequence: Synthetic oligonucleotide
  Antisense strand to SEQ ID NO: 1375628
uuucacagcccggaggaga

SEQ ID NO: 1375630 - RNA, 19 nt, Artificial Sequence
  Description of Artificial Sequence: Synthetic oligonucleotide
  Sense strand starting at position 689 of SEQ ID NO: 1242824
uugccuauuuacugacagu

SEQ ID NO: 1375631 - RNA, 19 nt, Artificial Sequence
  Description of Artificial Sequence: Synthetic oligonucleotide
  Antisense strand to SEQ ID NO: 1375630
acugucaguaaauaggcaa

SEQ ID NO: 1375632 - RNA, 19 nt, Artificial Sequence
  Description of Artificial Sequence: Synthetic oligonucleotide
  Sense strand starting at position 2107 of SEQ ID NO: 1242824
gguuuccucucaucgcaga

SEQ ID NO: 1375633 - RNA, 19 nt, Artificial Sequence
  Description of Artificial Sequence: Synthetic oligonucleotide
  Antisense strand to SEQ ID NO: 1375632
ucugcgaugagaggaaacc

SEQ ID NO: 1375634 - RNA, 19 nt, Artificial Sequence
  Description of Artificial Sequence: Synthetic oligonucleotide
  Sense strand starting at position 2108 of SEQ ID NO: 1242824
guuuccucucaucgcagaa

SEQ ID NO: 1375635 - RNA, 19 nt, Artificial Sequence
  Description of Artificial Sequence: Synthetic oligonucleotide
  Antisense strand to SEQ ID NO: 1375634
uucugcgaugagaggaaac

SEQ ID NO: 1375636 - RNA, 19 nt, Artificial Sequence
  Description of Artificial Sequence: Synthetic oligonucleotide
  Sense strand starting at position 2717 of SEQ ID NO: 1242824
ccugcuuucccguuguuua

SEQ ID NO: 1375637 - RNA, 19 nt, Artificial Sequence
  Description of Artificial Sequence: Synthetic oligonucleotide
  Antisense strand to SEQ ID NO: 1375636
uaaacaacgggaaagcagg

SEQ ID NO: 1375638 - RNA, 19 nt, Artificial Sequence
  Description of Artificial Sequence: Synthetic oligonucleotide
  Sense strand starting at position 2780 of SEQ ID NO: 1242824
uuaggcuucucgcguggaa

SEQ ID NO: 1375639 - RNA, 19 nt, Artificial Sequence
  Description of Artificial Sequence: Synthetic oligonucleotide
  Antisense strand to SEQ ID NO: 1375638
uuccacgcgagaagccuaa

SEQ ID NO: 1375640 - RNA, 19 nt, Artificial Sequence
  Description of Artificial Sequence: Synthetic oligonucleotide
  Sense strand starting at position 2782 of SEQ ID NO: 1242824
aggcuucucgcguggaaga

SEQ ID NO: 1375641 - RNA, 19 nt, Artificial Sequence
  Description of Artificial Sequence: Synthetic oligonucleotide
  Antisense strand to SEQ ID NO: 1375640
ucuuccacgcgagaagccu

SEQ ID NO: 1375642 - RNA, 19 nt, Artificial Sequence
  Description of Artificial Sequence: Synthetic oligonucleotide
  Sense strand starting at position 2783 of SEQ ID NO: 1242824
ggcuucucgcguggaagau

SEQ ID NO: 1375643 - RNA, 19 nt, Artificial Sequence
  Description of Artificial Sequence: Synthetic oligonucleotide
  Antisense strand to SEQ ID NO: 1375642
aucuuccacgcgagaagcc

SEQ ID NO: 1375644 - RNA, 19 nt, Artificial Sequence
  Description of Artificial Sequence: Synthetic oligonucleotide
  Sense strand starting at position 2784 of SEQ ID NO: 1242824
gcuucucgcguggaagauu

SEQ ID NO: 1375645 - RNA, 19 nt, Artificial Sequence
  Description of Artificial Sequence: Synthetic oligonucleotide
  Antisense strand to SEQ ID NO: 1375644
aaucuuccacgcgagaagc

SEQ ID NO: 1375646 - RNA, 19 nt, Artificial Sequence
  Description of Artificial Sequence: Synthetic oligonucleotide
  Sense strand starting at position 3181 of SEQ ID NO: 1242824
acggcaaaccagugauaag

SEQ ID NO: 1375647 - RNA, 19 nt, Artificial Sequence
  Description of Artificial Sequence: Synthetic oligonucleotide
  Antisense strand to SEQ ID NO: 1375646
cuuaucacugguuugccgu

SEQ ID NO: 1375648 - RNA, 19 nt, Artificial Sequence
  Description of Artificial Sequence: Synthetic oligonucleotide
  Sense strand starting at position 3206 of SEQ ID NO: 1242824
uucuguagauauuagacua

SEQ ID NO: 1375649 - RNA, 19 nt, Artificial Sequence
  Description of Artificial Sequence: Synthetic oligonucleotide
  Antisense strand to SEQ ID NO: 1375648
uagucuaauaucuacagaa

SEQ ID NO: 1375650 - RNA, 19 nt, Artificial Sequence
  Description of Artificial Sequence: Synthetic oligonucleotide
  Sense strand starting at position 169 of SEQ ID NO: 1242825
ucugacugaugaucccaau

SEQ ID NO: 1375651 - RNA, 19 nt, Artificial Sequence
  Description of Artificial Sequence: Synthetic oligonucleotide
  Antisense strand to SEQ ID NO: 1375650
auugggaucaucagucaga

SEQ ID NO: 1375652 - RNA, 19 nt, Artificial Sequence
  Description of Artificial Sequence: Synthetic oligonucleotide
  Sense strand starting at position 172 of SEQ ID NO: 1242825
gacugaugaucccaauagu

SEQ ID NO: 1375653 - RNA, 19 nt, Artificial Sequence
  Description of Artificial Sequence: Synthetic oligonucleotide
  Antisense strand to SEQ ID NO: 1375652
acuauugggaucaucaguc

SEQ ID NO: 1375654 - RNA, 19 nt, Artificial Sequence
  Description of Artificial Sequence: Synthetic oligonucleotide
  Sense strand starting at position 175 of SEQ ID NO: 1242825
ugaugaucccaauaguuuc

SEQ ID NO: 1375655 - RNA, 19 nt, Artificial Sequence
  Description of Artificial Sequence: Synthetic oligonucleotide
  Antisense strand to SEQ ID NO: 1375654
gaaacuauugggaucauca

SEQ ID NO: 1375656 - RNA, 19 nt, Artificial Sequence
  Description of Artificial Sequence: Synthetic oligonucleotide
  Sense strand starting at position 310 of SEQ ID NO: 1242825
ggauuacaauaguaccaua

SEQ ID NO: 1375657 - RNA, 19 nt, Artificial Sequence
  Description of Artificial Sequence: Synthetic oligonucleotide
  Antisense strand to SEQ ID NO: 1375656
uaugguacuauuguaaucc

SEQ ID NO: 1375658 - RNA, 19 nt, Artificial Sequence
  Description of Artificial Sequence: Synthetic oligonucleotide
  Sense strand starting at position 329 of SEQ ID NO: 1242825
caggguuauugucaagauu

SEQ ID NO: 1375659 - RNA, 19 nt, Artificial Sequence
  Description of Artificial Sequence: Synthetic oligonucleotide
  Antisense strand to SEQ ID NO: 1375658
aaucuugacaauaacccug

SEQ ID NO: 1375660 - RNA, 19 nt, Artificial Sequence
  Description of Artificial Sequence: Synthetic oligonucleotide
  Sense strand starting at position 718 of SEQ ID NO: 1242825
cuggccuauuacuguuauu

SEQ ID NO: 1375661 - RNA, 19 nt, Artificial Sequence
  Description of Artificial Sequence: Synthetic oligonucleotide
  Antisense strand to SEQ ID NO: 1375660
aauaacaguaauaggccag

SEQ ID NO: 1375662 - RNA, 19 nt, Artificial Sequence
  Description of Artificial Sequence: Synthetic oligonucleotide
  Sense strand starting at position 754 of SEQ ID NO: 1242825
gugugugguggcucacuuu

SEQ ID NO: 1375663 - RNA, 19 nt, Artificial Sequence
  Description of Artificial Sequence: Synthetic oligonucleotide
  Antisense strand to SEQ ID NO: 1375662
aaagugagccaccacacac

SEQ ID NO: 1375664 - RNA, 19 nt, Artificial Sequence
  Description of Artificial Sequence: Synthetic oligonucleotide
  Sense strand starting at position 1054 of SEQ ID NO: 1242825
ucuccauugucuugccuau

SEQ ID NO: 1375665 - RNA, 19 nt, Artificial Sequence
  Description of Artificial Sequence: Synthetic oligonucleotide
  Antisense strand to SEQ ID NO: 1375664
auaggcaagacaauggaga

SEQ ID NO: 1375666 - RNA, 19 nt, Artificial Sequence
  Description of Artificial Sequence: Synthetic oligonucleotide
  Sense strand starting at position 1111 of SEQ ID NO: 1242825
gggcuaaggacuuguuuau

SEQ ID NO: 1375667 - RNA, 19 nt, Artificial Sequence
  Description of Artificial Sequence: Synthetic oligonucleotide
  Antisense strand to SEQ ID NO: 1375666
auaaacaaguccuuagccc

SEQ ID NO: 1375668 - RNA, 19 nt, Artificial Sequence
  Description of Artificial Sequence: Synthetic oligonucleotide
  Sense strand starting at position 1344 of SEQ ID NO: 1242825
ucuccuccgggcugugaaa

SEQ ID NO: 1375669 - RNA, 19 nt, Artificial Sequence
  Description of Artificial Sequence: Synthetic oligonucleotide
  Antisense strand to SEQ ID NO: 1375668
uuucacagcccggaggaga

SEQ ID NO: 1375670 - RNA, 19 nt, Artificial Sequence
  Description of Artificial Sequence: Synthetic oligonucleotide
  Sense strand starting at position 1378 of SEQ ID NO: 1242825
uugccuauuuacugacagu

SEQ ID NO: 1375671 - RNA, 19 nt, Artificial Sequence
  Description of Artificial Sequence: Synthetic oligonucleotide
  Antisense strand to SEQ ID NO: 1375670
acugucaguaaauaggcaa

SEQ ID NO: 1375672 - RNA, 19 nt, Artificial Sequence
  Description of Artificial Sequence: Synthetic oligonucleotide
  Sense strand starting at position 2796 of SEQ ID NO: 1242825
gguuuccucucaucgcaga

SEQ ID NO: 1375673 - RNA, 19 nt, Artificial Sequence
  Description of Artificial Sequence: Synthetic oligonucleotide
  Antisense strand to SEQ ID NO: 1375672
ucugcgaugagaggaaacc

SEQ ID NO: 1375674 - RNA, 19 nt, Artificial Sequence
  Description of Artificial Sequence: Synthetic oligonucleotide
  Sense strand starting at position 2797 of SEQ ID NO: 1242825
guuuccucucaucgcagaa

SEQ ID NO: 1375675 - RNA, 19 nt, Artificial Sequence
  Description of Artificial Sequence: Synthetic oligonucleotide
  Antisense strand to SEQ ID NO: 1375674
uucugcgaugagaggaaac

SEQ ID NO: 1375676 - RNA, 19 nt, Artificial Sequence
  Description of Artificial Sequence: Synthetic oligonucleotide
  Sense strand starting at position 3406 of SEQ ID NO: 1242825
ccugcuuucccguuguuua

SEQ ID NO: 1375677 - RNA, 19 nt, Artificial Sequence
  Description of Artificial Sequence: Synthetic oligonucleotide
  Antisense strand to SEQ ID NO: 1375676
uaaacaacgggaaagcagg

SEQ ID NO: 1375678 - RNA, 19 nt, Artificial Sequence
  Description of Artificial Sequence: Synthetic oligonucleotide
  Sense strand starting at position 3469 of SEQ ID NO: 1242825
uuaggcuucucgcguggaa

SEQ ID NO: 1375679 - RNA, 19 nt, Artificial Sequence
  Description of Artificial Sequence: Synthetic oligonucleotide
  Antisense strand to SEQ ID NO: 1375678
uuccacgcgagaagccuaa

SEQ ID NO: 1375680 - RNA, 19 nt, Artificial Sequence
  Description of Artificial Sequence: Synthetic oligonucleotide
  Sense strand starting at position 3471 of SEQ ID NO: 1242825
aggcuucucgcguggaaga

SEQ ID NO: 1375681 - RNA, 19 nt, Artificial Sequence
  Description of Artificial Sequence: Synthetic oligonucleotide
  Antisense strand to SEQ ID NO: 1375680
ucuuccacgcgagaagccu

SEQ ID NO: 1375682 - RNA, 19 nt, Artificial Sequence
  Description of Artificial Sequence: Synthetic oligonucleotide
  Sense strand starting at position 3472 of SEQ ID NO: 1242825
ggcuucucgcguggaagau

SEQ ID NO: 1375683 - RNA, 19 nt, Artificial Sequence
  Description of Artificial Sequence: Synthetic oligonucleotide
  Antisense strand to SEQ ID NO: 1375682
aucuuccacgcgagaagcc

SEQ ID NO: 1375684 - RNA, 19 nt, Artificial Sequence
  Description of Artificial Sequence: Synthetic oligonucleotide
  Sense strand starting at position 3473 of SEQ ID NO: 1242825
gcuucucgcguggaagauu

SEQ ID NO: 1375685 - RNA, 19 nt, Artificial Sequence
  Description of Artificial Sequence: Synthetic oligonucleotide
  Antisense strand to SEQ ID NO: 1375684
aaucuuccacgcgagaagc

SEQ ID NO: 1375686 - RNA, 19 nt, Artificial Sequence
  Description of Artificial Sequence: Synthetic oligonucleotide
  Sense strand starting at position 3870 of SEQ ID NO: 1242825
acggcaaaccagugauaag

SEQ ID NO: 1375687 - RNA, 19 nt, Artificial Sequence
  Description of Artificial Sequence: Synthetic oligonucleotide
  Antisense strand to SEQ ID NO: 1375686
cuuaucacugguuugccgu

SEQ ID NO: 1375688 - RNA, 19 nt, Artificial Sequence
  Description of Artificial Sequence: Synthetic oligonucleotide
  Sense strand starting at position 3895 of SEQ ID NO: 1242825
uucuguagauauuagacua

SEQ ID NO: 1375689 - RNA, 19 nt, Artificial Sequence
  Description of Artificial Sequence: Synthetic oligonucleotide
  Antisense strand to SEQ ID NO: 1375688
uagucuaauaucuacagaa

SEQ ID NO: 1375690 - RNA, 19 nt, Artificial Sequence
  Description of Artificial Sequence: Synthetic oligonucleotide
  Sense strand starting at position 236 of SEQ ID NO: 1242826
ggcucacguguucucucua

SEQ ID NO: 1375691 - RNA, 19 nt, Artificial Sequence
  Description of Artificial Sequence: Synthetic oligonucleotide
  Antisense strand to SEQ ID NO: 1375690
uagagagaacacgugagcc

SEQ ID NO: 1375692 - RNA, 19 nt, Artificial Sequence
  Description of Artificial Sequence: Synthetic oligonucleotide
  Sense strand starting at position 241 of SEQ ID NO: 1242826
acguguucucucuaauuga

SEQ ID NO: 1375693 - RNA, 19 nt, Artificial Sequence
  Description of Artificial Sequence: Synthetic oligonucleotide
  Antisense strand to SEQ ID NO: 1375692
ucaauuagagagaacacgu

SEQ ID NO: 1375694 - RNA, 19 nt, Artificial Sequence
  Description of Artificial Sequence: Synthetic oligonucleotide
  Sense strand starting at position 395 of SEQ ID NO: 1242826
uugaccaucucagugcaau

SEQ ID NO: 1375695 - RNA, 19 nt, Artificial Sequence
  Description of Artificial Sequence: Synthetic oligonucleotide
  Antisense strand to SEQ ID NO: 1375694
auugcacugagauggucaa

SEQ ID NO: 1375696 - RNA, 19 nt, Artificial Sequence
  Description of Artificial Sequence: Synthetic oligonucleotide
  Sense strand starting at position 396 of SEQ ID NO: 1242826
ugaccaucucagugcaaug

SEQ ID NO: 1375697 - RNA, 19 nt, Artificial Sequence
  Description of Artificial Sequence: Synthetic oligonucleotide
  Antisense strand to SEQ ID NO: 1375696
cauugcacugagaugguca

SEQ ID NO: 1375698 - RNA, 19 nt, Artificial Sequence
  Description of Artificial Sequence: Synthetic oligonucleotide
  Sense strand starting at position 425 of SEQ ID NO: 1242826
gccuucucccgaggaccua

SEQ ID NO: 1375699 - RNA, 19 nt, Artificial Sequence
  Description of Artificial Sequence: Synthetic oligonucleotide
  Antisense strand to SEQ ID NO: 1375698
uagguccucgggagaaggc

SEQ ID NO: 1375700 - RNA, 19 nt, Artificial Sequence
  Description of Artificial Sequence: Synthetic oligonucleotide
  Sense strand starting at position 549 of SEQ ID NO: 1242826
aguucugagcugcagaacu

SEQ ID NO: 1375701 - RNA, 19 nt, Artificial Sequence
  Description of Artificial Sequence: Synthetic oligonucleotide
  Antisense strand to SEQ ID NO: 1375700
aguucugcagcucagaacu

SEQ ID NO: 1375702 - RNA, 19 nt, Artificial Sequence
  Description of Artificial Sequence: Synthetic oligonucleotide
  Sense strand starting at position 647 of SEQ ID NO: 1242826
ugcgauuucuccucucaca

SEQ ID NO: 1375703 - RNA, 19 nt, Artificial Sequence
  Description of Artificial Sequence: Synthetic oligonucleotide
  Antisense strand to SEQ ID NO: 1375702
ugugagaggagaaaucgca

SEQ ID NO: 1375704 - RNA, 19 nt, Artificial Sequence
  Description of Artificial Sequence: Synthetic oligonucleotide
  Sense strand starting at position 727 of SEQ ID NO: 1242826
aggugauucgugccuggcu

SEQ ID NO: 1375705 - RNA, 19 nt, Artificial Sequence
  Description of Artificial Sequence: Synthetic oligonucleotide
  Antisense strand to SEQ ID NO: 1375704
agccaggcacgaaucaccu

SEQ ID NO: 1375706 - RNA, 19 nt, Artificial Sequence
  Description of Artificial Sequence: Synthetic oligonucleotide
  Sense strand starting at position 1039 of SEQ ID NO: 1242826
uccaguuagaccuggagga

SEQ ID NO: 1375707 - RNA, 19 nt, Artificial Sequence
  Description of Artificial Sequence: Synthetic oligonucleotide
  Antisense strand to SEQ ID NO: 1375706
uccuccaggucuaacugga

SEQ ID NO: 1375708 - RNA, 19 nt, Artificial Sequence
  Description of Artificial Sequence: Synthetic oligonucleotide
  Sense strand starting at position 1455 of SEQ ID NO: 1242826
cgauguacuccaugaggaa

SEQ ID NO: 1375709 - RNA, 19 nt, Artificial Sequence
  Description of Artificial Sequence: Synthetic oligonucleotide
  Antisense strand to SEQ ID NO: 1375708
uuccucauggaguacaucg

SEQ ID NO: 1375710 - RNA, 19 nt, Artificial Sequence
  Description of Artificial Sequence: Synthetic oligonucleotide
  Sense strand starting at position 2253 of SEQ ID NO: 1242826
aaucgaauucgcucugcgu

SEQ ID NO: 1375711 - RNA, 19 nt, Artificial Sequence
  Description of Artificial Sequence: Synthetic oligonucleotide
  Antisense strand to SEQ ID NO: 1375710
acgcagagcgaauucgauu

SEQ ID NO: 1375712 - RNA, 19 nt, Artificial Sequence
  Description of Artificial Sequence: Synthetic oligonucleotide
  Sense strand starting at position 2254 of SEQ ID NO: 1242826
aucgaauucgcucugcgua

SEQ ID NO: 1375713 - RNA, 19 nt, Artificial Sequence
  Description of Artificial Sequence: Synthetic oligonucleotide
  Antisense strand to SEQ ID NO: 1375712
uacgcagagcgaauucgau

SEQ ID NO: 1375714 - RNA, 19 nt, Artificial Sequence
  Description of Artificial Sequence: Synthetic oligonucleotide
  Sense strand starting at position 2261 of SEQ ID NO: 1242826
ucgcucugcguaucgaaua

SEQ ID NO: 1375715 - RNA, 19 nt, Artificial Sequence
  Description of Artificial Sequence: Synthetic oligonucleotide
  Antisense strand to SEQ ID NO: 1375714
uauucgauacgcagagcga

SEQ ID NO: 1375716 - RNA, 19 nt, Artificial Sequence
  Description of Artificial Sequence: Synthetic oligonucleotide
  Sense strand starting at position 2436 of SEQ ID NO: 1242826
gacgguugcccuggaaauu

SEQ ID NO: 1375717 - RNA, 19 nt, Artificial Sequence
  Description of Artificial Sequence: Synthetic oligonucleotide
  Antisense strand to SEQ ID NO: 1375716
aauuuccagggcaaccguc

SEQ ID NO: 1375718 - RNA, 19 nt, Artificial Sequence
  Description of Artificial Sequence: Synthetic oligonucleotide
  Sense strand starting at position 2553 of SEQ ID NO: 1242826
accugcauccuagaguuaa

SEQ ID NO: 1375719 - RNA, 19 nt, Artificial Sequence
  Description of Artificial Sequence: Synthetic oligonucleotide
  Antisense strand to SEQ ID NO: 1375718
uuaacucuaggaugcaggu

SEQ ID NO: 1375720 - RNA, 19 nt, Artificial Sequence
  Description of Artificial Sequence: Synthetic oligonucleotide
  Sense strand starting at position 2586 of SEQ ID NO: 1242826
aagagauuccgagguaguu

SEQ ID NO: 1375721 - RNA, 19 nt, Artificial Sequence
  Description of Artificial Sequence: Synthetic oligonucleotide
  Antisense strand to SEQ ID NO: 1375720
aacuaccucggaaucucuu

SEQ ID NO: 1375722 - RNA, 19 nt, Artificial Sequence
  Description of Artificial Sequence: Synthetic oligonucleotide
  Sense strand starting at position 2836 of SEQ ID NO: 1242826
ccacacugagcugaguauu

SEQ ID NO: 1375723 - RNA, 19 nt, Artificial Sequence
  Description of Artificial Sequence: Synthetic oligonucleotide
  Antisense strand to SEQ ID NO: 1375722
aauacucagcucagugugg

SEQ ID NO: 1375724 - RNA, 19 nt, Artificial Sequence
  Description of Artificial Sequence: Synthetic oligonucleotide
  Sense strand starting at position 3192 of SEQ ID NO: 1242826
caguucuuucuugagcaga

SEQ ID NO: 1375725 - RNA, 19 nt, Artificial Sequence
  Description of Artificial Sequence: Synthetic oligonucleotide
  Antisense strand to SEQ ID NO: 1375724
ucugcucaagaaagaacug

SEQ ID NO: 1375726 - RNA, 19 nt, Artificial Sequence
  Description of Artificial Sequence: Synthetic oligonucleotide
  Sense strand starting at position 3195 of SEQ ID NO: 1242826
uucuuucuugagcagaguu

SEQ ID NO: 1375727 - RNA, 19 nt, Artificial Sequence
  Description of Artificial Sequence: Synthetic oligonucleotide
  Antisense strand to SEQ ID NO: 1375726
aacucugcucaagaaagaa

SEQ ID NO: 1375728 - RNA, 19 nt, Artificial Sequence
  Description of Artificial Sequence: Synthetic oligonucleotide
  Sense strand starting at position 3197 of SEQ ID NO: 1242826
cuuucuugagcagaguuaa

SEQ ID NO: 1375729 - RNA, 19 nt, Artificial Sequence
  Description of Artificial Sequence: Synthetic oligonucleotide
  Antisense strand to SEQ ID NO: 1375728
uuaacucugcucaagaaag

SEQ ID NO: 1375730 - RNA, 19 nt, Artificial Sequence
  Description of Artificial Sequence: Synthetic oligonucleotide
  Sense strand starting at position 3231 of SEQ ID NO: 1242826
cuuuaauaagguugauaug

SEQ ID NO: 1375731 - RNA, 19 nt, Artificial Sequence
  Description of Artificial Sequence: Synthetic oligonucleotide
  Antisense strand to SEQ ID NO: 1375730
cauaucaaccuuauuaaag

SEQ ID NO: 1375732 - RNA, 19 nt, Artificial Sequence
  Description of Artificial Sequence: Synthetic oligonucleotide
  Sense strand starting at position 3238 of SEQ ID NO: 1242826
aagguugauauguagaagu

SEQ ID NO: 1375733 - RNA, 19 nt, Artificial Sequence
  Description of Artificial Sequence: Synthetic oligonucleotide
  Antisense strand to SEQ ID NO: 1375732
acuucuacauaucaaccuu

SEQ ID NO: 1375734 - RNA, 19 nt, Artificial Sequence
  Description of Artificial Sequence: Synthetic oligonucleotide
  Sense strand starting at position 3240 of SEQ ID NO: 1242826
gguugauauguagaaguga

SEQ ID NO: 1375735 - RNA, 19 nt, Artificial Sequence
  Description of Artificial Sequence: Synthetic oligonucleotide
  Antisense strand to SEQ ID NO: 1375734
ucacuucuacauaucaacc

SEQ ID NO: 1375736 - RNA, 19 nt, Artificial Sequence
  Description of Artificial Sequence: Synthetic oligonucleotide
  Sense strand starting at position 3248 of SEQ ID NO: 1242826
uguagaagugacugaauga

SEQ ID NO: 1375737 - RNA, 19 nt, Artificial Sequence
  Description of Artificial Sequence: Synthetic oligonucleotide
  Antisense strand to SEQ ID NO: 1375736
ucauucagucacuucuaca

SEQ ID NO: 1375738 - RNA, 19 nt, Artificial Sequence
  Description of Artificial Sequence: Synthetic oligonucleotide
  Sense strand starting at position 3285 of SEQ ID NO: 1242826
ugagaagucuugcccacac

SEQ ID NO: 1375739 - RNA, 19 nt, Artificial Sequence
  Description of Artificial Sequence: Synthetic oligonucleotide
  Antisense strand to SEQ ID NO: 1375738
gugugggcaagacuucuca

SEQ ID NO: 1375740 - RNA, 19 nt, Artificial Sequence
  Description of Artificial Sequence: Synthetic oligonucleotide
  Sense strand starting at position 3314 of SEQ ID NO: 1242826
acuucuaauccaggguaga

SEQ ID NO: 1375741 - RNA, 19 nt, Artificial Sequence
  Description of Artificial Sequence: Synthetic oligonucleotide
  Antisense strand to SEQ ID NO: 1375740
ucuacccuggauuagaagu

SEQ ID NO: 1375742 - RNA, 19 nt, Artificial Sequence
  Description of Artificial Sequence: Synthetic oligonucleotide
  Sense strand starting at position 3315 of SEQ ID NO: 1242826
cuucuaauccaggguagaa

SEQ ID NO: 1375743 - RNA, 19 nt, Artificial Sequence
  Description of Artificial Sequence: Synthetic oligonucleotide
  Antisense strand to SEQ ID NO: 1375742
uucuacccuggauuagaag

SEQ ID NO: 1375744 - RNA, 19 nt, Artificial Sequence
  Description of Artificial Sequence: Synthetic oligonucleotide
  Sense strand starting at position 3346 of SEQ ID NO: 1242826
cuggcucaugcagaaaguu

SEQ ID NO: 1375745 - RNA, 19 nt, Artificial Sequence
  Description of Artificial Sequence: Synthetic oligonucleotide
  Antisense strand to SEQ ID NO: 1375744
aacuuucugcaugagccag

SEQ ID NO: 1375746 - RNA, 19 nt, Artificial Sequence
  Description of Artificial Sequence: Synthetic oligonucleotide
  Sense strand starting at position 3408 of SEQ ID NO: 1242826
cauggauucuggcugaaga

SEQ ID NO: 1375747 - RNA, 19 nt, Artificial Sequence
  Description of Artificial Sequence: Synthetic oligonucleotide
  Antisense strand to SEQ ID NO: 1375746
ucuucagccagaauccaug

SEQ ID NO: 1375748 - RNA, 19 nt, Artificial Sequence
  Description of Artificial Sequence: Synthetic oligonucleotide
  Sense strand starting at position 3409 of SEQ ID NO: 1242826
auggauucuggcugaagac

SEQ ID NO: 1375749 - RNA, 19 nt, Artificial Sequence
  Description of Artificial Sequence: Synthetic oligonucleotide
  Antisense strand to SEQ ID NO: 1375748
gucuucagccagaauccau

SEQ ID NO: 1375750 - RNA, 19 nt, Artificial Sequence
  Description of Artificial Sequence: Synthetic oligonucleotide
  Sense strand starting at position 3581 of SEQ ID NO: 1242826
gacaaauaagguuguuauc

SEQ ID NO: 1375751 - RNA, 19 nt, Artificial Sequence
  Description of Artificial Sequence: Synthetic oligonucleotide
  Antisense strand to SEQ ID NO: 1375750
gauaacaaccuuauuuguc

SEQ ID NO: 1375752 - RNA, 19 nt, Artificial Sequence
  Description of Artificial Sequence: Synthetic oligonucleotide
  Sense strand starting at position 3671 of SEQ ID NO: 1242826
acuuguuaacugcaugauc

SEQ ID NO: 1375753 - RNA, 19 nt, Artificial Sequence
  Description of Artificial Sequence: Synthetic oligonucleotide
  Antisense strand to SEQ ID NO: 1375752
gaucaugcaguuaacaagu

SEQ ID NO: 1375754 - RNA, 19 nt, Artificial Sequence
  Description of Artificial Sequence: Synthetic oligonucleotide
  Sense strand starting at position 3673 of SEQ ID NO: 1242826
uuguuaacugcaugaucuu

SEQ ID NO: 1375755 - RNA, 19 nt, Artificial Sequence
  Description of Artificial Sequence: Synthetic oligonucleotide
  Antisense strand to SEQ ID NO: 1375754
aagaucaugcaguuaacaa

SEQ ID NO: 1375756 - RNA, 19 nt, Artificial Sequence
  Description of Artificial Sequence: Synthetic oligonucleotide
  Sense strand starting at position 3680 of SEQ ID NO: 1242826
cugcaugaucuuggguaag

SEQ ID NO: 1375757 - RNA, 19 nt, Artificial Sequence
  Description of Artificial Sequence: Synthetic oligonucleotide
  Antisense strand to SEQ ID NO: 1375756
cuuacccaagaucaugcag

SEQ ID NO: 1375758 - RNA, 19 nt, Artificial Sequence
  Description of Artificial Sequence: Synthetic oligonucleotide
  Sense strand starting at position 3682 of SEQ ID NO: 1242826
gcaugaucuuggguaaguc

SEQ ID NO: 1375759 - RNA, 19 nt, Artificial Sequence
  Description of Artificial Sequence: Synthetic oligonucleotide
  Antisense strand to SEQ ID NO: 1375758
gacuuacccaagaucaugc

SEQ ID NO: 1375760 - RNA, 19 nt, Artificial Sequence
  Description of Artificial Sequence: Synthetic oligonucleotide
  Sense strand starting at position 3714 of SEQ ID NO: 1242826
cuccguuucccugaugaua

SEQ ID NO: 1375761 - RNA, 19 nt, Artificial Sequence
  Description of Artificial Sequence: Synthetic oligonucleotide
  Antisense strand to SEQ ID NO: 1375760
uaucaucagggaaacggag

SEQ ID NO: 1375762 - RNA, 19 nt, Artificial Sequence
  Description of Artificial Sequence: Synthetic oligonucleotide
  Sense strand starting at position 3758 of SEQ ID NO: 1242826
uucauaggaugguugugaa

SEQ ID NO: 1375763 - RNA, 19 nt, Artificial Sequence
  Description of Artificial Sequence: Synthetic oligonucleotide
  Antisense strand to SEQ ID NO: 1375762
uucacaaccauccuaugaa

SEQ ID NO: 1375764 - RNA, 19 nt, Artificial Sequence
  Description of Artificial Sequence: Synthetic oligonucleotide
  Sense strand starting at position 3811 of SEQ ID NO: 1242826
aguggcuuugcauaguaua

SEQ ID NO: 1375765 - RNA, 19 nt, Artificial Sequence
  Description of Artificial Sequence: Synthetic oligonucleotide
  Antisense strand to SEQ ID NO: 1375764
uauacuaugcaaagccacu

SEQ ID NO: 1375766 - RNA, 19 nt, Artificial Sequence
  Description of Artificial Sequence: Synthetic oligonucleotide
  Sense strand starting at position 3885 of SEQ ID NO: 1242826
ggugacuuuccuugaccca

SEQ ID NO: 1375767 - RNA, 19 nt, Artificial Sequence
  Description of Artificial Sequence: Synthetic oligonucleotide
  Antisense strand to SEQ ID NO: 1375766
ugggucaaggaaagucacc

SEQ ID NO: 1375768 - RNA, 19 nt, Artificial Sequence
  Description of Artificial Sequence: Synthetic oligonucleotide
  Sense strand starting at position 3886 of SEQ ID NO: 1242826
gugacuuuccuugacccau

SEQ ID NO: 1375769 - RNA, 19 nt, Artificial Sequence
  Description of Artificial Sequence: Synthetic oligonucleotide
  Antisense strand to SEQ ID NO: 1375768
augggucaaggaaagucac

SEQ ID NO: 1375770 - RNA, 19 nt, Artificial Sequence
  Description of Artificial Sequence: Synthetic oligonucleotide
  Sense strand starting at position 121 of SEQ ID NO: 1242827
cugccacaugcugaguuau

SEQ ID NO: 1375771 - RNA, 19 nt, Artificial Sequence
  Description of Artificial Sequence: Synthetic oligonucleotide
  Antisense strand to SEQ ID NO: 1375770
auaacucagcauguggcag

SEQ ID NO: 1375772 - RNA, 19 nt, Artificial Sequence
  Description of Artificial Sequence: Synthetic oligonucleotide
  Sense strand starting at position 162 of SEQ ID NO: 1242827
aucaaauacugauugagca

SEQ ID NO: 1375773 - RNA, 19 nt, Artificial Sequence
  Description of Artificial Sequence: Synthetic oligonucleotide
  Antisense strand to SEQ ID NO: 1375772
ugcucaaucaguauuugau

SEQ ID NO: 1375774 - RNA, 19 nt, Artificial Sequence
  Description of Artificial Sequence: Synthetic oligonucleotide
  Sense strand starting at position 163 of SEQ ID NO: 1242827
ucaaauacugauugagcaa

SEQ ID NO: 1375775 - RNA, 19 nt, Artificial Sequence
  Description of Artificial Sequence: Synthetic oligonucleotide
  Antisense strand to SEQ ID NO: 1375774
uugcucaaucaguauuuga

SEQ ID NO: 1375776 - RNA, 19 nt, Artificial Sequence
  Description of Artificial Sequence: Synthetic oligonucleotide
  Sense strand starting at position 214 of SEQ ID NO: 1242827
uggagagugugaucuuaug

SEQ ID NO: 1375777 - RNA, 19 nt, Artificial Sequence
  Description of Artificial Sequence: Synthetic oligonucleotide
  Antisense strand to SEQ ID NO: 1375776
cauaagaucacacucucca

SEQ ID NO: 1375778 - RNA, 19 nt, Artificial Sequence
  Description of Artificial Sequence: Synthetic oligonucleotide
  Sense strand starting at position 260 of SEQ ID NO: 1242827
gcaaauauguagucauagc

SEQ ID NO: 1375779 - RNA, 19 nt, Artificial Sequence
  Description of Artificial Sequence: Synthetic oligonucleotide
  Antisense strand to SEQ ID NO: 1375778
gcuaugacuacauauuugc

SEQ ID NO: 1375780 - RNA, 19 nt, Artificial Sequence
  Description of Artificial Sequence: Synthetic oligonucleotide
  Sense strand starting at position 300 of SEQ ID NO: 1242827
guauaagguaauggaagua

SEQ ID NO: 1375781 - RNA, 19 nt, Artificial Sequence
  Description of Artificial Sequence: Synthetic oligonucleotide
  Antisense strand to SEQ ID NO: 1375780
uacuuccauuaccuuauac

SEQ ID NO: 1375782 - RNA, 19 nt, Artificial Sequence
  Description of Artificial Sequence: Synthetic oligonucleotide
  Sense strand starting at position 371 of SEQ ID NO: 1242827
gcugauacucaagggauaa

SEQ ID NO: 1375783 - RNA, 19 nt, Artificial Sequence
  Description of Artificial Sequence: Synthetic oligonucleotide
  Antisense strand to SEQ ID NO: 1375782
uuaucccuugaguaucagc

SEQ ID NO: 1375784 - RNA, 19 nt, Artificial Sequence
  Description of Artificial Sequence: Synthetic oligonucleotide
  Sense strand starting at position 477 of SEQ ID NO: 1242827
uguaaaggcucucucagua

SEQ ID NO: 1375785 - RNA, 19 nt, Artificial Sequence
  Description of Artificial Sequence: Synthetic oligonucleotide
  Antisense strand to SEQ ID NO: 1375784
uacugagagagccuuuaca

SEQ ID NO: 1375786 - RNA, 19 nt, Artificial Sequence
  Description of Artificial Sequence: Synthetic oligonucleotide
  Sense strand starting at position 515 of SEQ ID NO: 1242827
ggagaaaguuuggaacaga

SEQ ID NO: 1375787 - RNA, 19 nt, Artificial Sequence
  Description of Artificial Sequence: Synthetic oligonucleotide
  Antisense strand to SEQ ID NO: 1375786
ucuguuccaaacuuucucc

SEQ ID NO: 1375788 - RNA, 19 nt, Artificial Sequence
  Description of Artificial Sequence: Synthetic oligonucleotide
  Sense strand starting at position 1127 of SEQ ID NO: 1242827
aaagaaagucaagguuauu

SEQ ID NO: 1375789 - RNA, 19 nt, Artificial Sequence
  Description of Artificial Sequence: Synthetic oligonucleotide
  Antisense strand to SEQ ID NO: 1375788
aauaaccuugacuuucuuu

SEQ ID NO: 1375790 - RNA, 19 nt, Artificial Sequence
  Description of Artificial Sequence: Synthetic oligonucleotide
  Sense strand starting at position 1665 of SEQ ID NO: 1242827
cggucauguguucacuaag

SEQ ID NO: 1375791 - RNA, 19 nt, Artificial Sequence
  Description of Artificial Sequence: Synthetic oligonucleotide
  Antisense strand to SEQ ID NO: 1375790
cuuagugaacacaugaccg

SEQ ID NO: 1375792 - RNA, 19 nt, Artificial Sequence
  Description of Artificial Sequence: Synthetic oligonucleotide
  Sense strand starting at position 2365 of SEQ ID NO: 1242827
uacugcuguguugauauaa

SEQ ID NO: 1375793 - RNA, 19 nt, Artificial Sequence
  Description of Artificial Sequence: Synthetic oligonucleotide
  Antisense strand to SEQ ID NO: 1375792
uuauaucaacacagcagua

SEQ ID NO: 1375794 - RNA, 19 nt, Artificial Sequence
  Description of Artificial Sequence: Synthetic oligonucleotide
  Sense strand starting at position 2858 of SEQ ID NO: 1242827
gaaaguggcccugguuaua

SEQ ID NO: 1375795 - RNA, 19 nt, Artificial Sequence
  Description of Artificial Sequence: Synthetic oligonucleotide
  Antisense strand to SEQ ID NO: 1375794
uauaaccagggccacuuuc

SEQ ID NO: 1375796 - RNA, 19 nt, Artificial Sequence
  Description of Artificial Sequence: Synthetic oligonucleotide
  Sense strand starting at position 2868 of SEQ ID NO: 1242827
cugguuauaccuuggcauu

SEQ ID NO: 1375797 - RNA, 19 nt, Artificial Sequence
  Description of Artificial Sequence: Synthetic oligonucleotide
  Antisense strand to SEQ ID NO: 1375796
aaugccaagguauaaccag

SEQ ID NO: 1375798 - RNA, 19 nt, Artificial Sequence
  Description of Artificial Sequence: Synthetic oligonucleotide
  Sense strand starting at position 2881 of SEQ ID NO: 1242827
ggcauuguggugcaacaga

SEQ ID NO: 1375799 - RNA, 19 nt, Artificial Sequence
  Description of Artificial Sequence: Synthetic oligonucleotide
  Antisense strand to SEQ ID NO: 1375798
ucuguugcaccacaaugcc

SEQ ID NO: 1375800 - RNA, 19 nt, Artificial Sequence
  Description of Artificial Sequence: Synthetic oligonucleotide
  Sense strand starting at position 2892 of SEQ ID NO: 1242827
gcaacagauguggagguau

SEQ ID NO: 1375801 - RNA, 19 nt, Artificial Sequence
  Description of Artificial Sequence: Synthetic oligonucleotide
  Antisense strand to SEQ ID NO: 1375800
auaccuccacaucuguugc

SEQ ID NO: 1375802 - RNA, 19 nt, Artificial Sequence
  Description of Artificial Sequence: Synthetic oligonucleotide
  Sense strand starting at position 2929 of SEQ ID NO: 1242827
uaaucaagacccugagugu

SEQ ID NO: 1375803 - RNA, 19 nt, Artificial Sequence
  Description of Artificial Sequence: Synthetic oligonucleotide
  Antisense strand to SEQ ID NO: 1375802
acacucagggucuugauua

SEQ ID NO: 1375804 - RNA, 19 nt, Artificial Sequence
  Description of Artificial Sequence: Synthetic oligonucleotide
  Sense strand starting at position 3198 of SEQ ID NO: 1242827
augguacugcggugauuua

SEQ ID NO: 1375805 - RNA, 19 nt, Artificial Sequence
  Description of Artificial Sequence: Synthetic oligonucleotide
  Antisense strand to SEQ ID NO: 1375804
uaaaucaccgcaguaccau

SEQ ID NO: 1375806 - RNA, 19 nt, Artificial Sequence
  Description of Artificial Sequence: Synthetic oligonucleotide
  Sense strand starting at position 3199 of SEQ ID NO: 1242827
ugguacugcggugauuuau

SEQ ID NO: 1375807 - RNA, 19 nt, Artificial Sequence
  Description of Artificial Sequence: Synthetic oligonucleotide
  Antisense strand to SEQ ID NO: 1375806
auaaaucaccgcaguacca

SEQ ID NO: 1375808 - RNA, 19 nt, Artificial Sequence
  Description of Artificial Sequence: Synthetic oligonucleotide
  Sense strand starting at position 3223 of SEQ ID NO: 1242827
ccuaaugugucacuuugua

SEQ ID NO: 1375809 - RNA, 19 nt, Artificial Sequence
  Description of Artificial Sequence: Synthetic oligonucleotide
  Antisense strand to SEQ ID NO: 1375808
uacaaagugacacauuagg

SEQ ID NO: 1375810 - RNA, 19 nt, Artificial Sequence
  Description of Artificial Sequence: Synthetic oligonucleotide
  Sense strand starting at position 3252 of SEQ ID NO: 1242827
gcaaucgugcccucacgaa

SEQ ID NO: 1375811 - RNA, 19 nt, Artificial Sequence
  Description of Artificial Sequence: Synthetic oligonucleotide
  Antisense strand to SEQ ID NO: 1375810
uucgugagggcacgauugc

SEQ ID NO: 1375812 - RNA, 19 nt, Artificial Sequence
  Description of Artificial Sequence: Synthetic oligonucleotide
  Sense strand starting at position 3256 of SEQ ID NO: 1242827
ucgugcccucacgaagaau

SEQ ID NO: 1375813 - RNA, 19 nt, Artificial Sequence
  Description of Artificial Sequence: Synthetic oligonucleotide
  Antisense strand to SEQ ID NO: 1375812
auucuucgugagggcacga

SEQ ID NO: 1375814 - RNA, 19 nt, Artificial Sequence
  Description of Artificial Sequence: Synthetic oligonucleotide
  Sense strand starting at position 3277 of SEQ ID NO: 1242827
ugaaaugucuuaccuaaug

SEQ ID NO: 1375815 - RNA, 19 nt, Artificial Sequence
  Description of Artificial Sequence: Synthetic oligonucleotide
  Antisense strand to SEQ ID NO: 1375814
cauuagguaagacauuuca

SEQ ID NO: 1375816 - RNA, 19 nt, Artificial Sequence
  Description of Artificial Sequence: Synthetic oligonucleotide
  Sense strand starting at position 3311 of SEQ ID NO: 1242827
gagaauagccucuguagac

SEQ ID NO: 1375817 - RNA, 19 nt, Artificial Sequence
  Description of Artificial Sequence: Synthetic oligonucleotide
  Antisense strand to SEQ ID NO: 1375816
gucuacagaggcuauucuc

SEQ ID NO: 1375818 - RNA, 19 nt, Artificial Sequence
  Description of Artificial Sequence: Synthetic oligonucleotide
  Sense strand starting at position 3312 of SEQ ID NO: 1242827
agaauagccucuguagacu

SEQ ID NO: 1375819 - RNA, 19 nt, Artificial Sequence
  Description of Artificial Sequence: Synthetic oligonucleotide
  Antisense strand to SEQ ID NO: 1375818
agucuacagaggcuauucu

SEQ ID NO: 1375820 - RNA, 19 nt, Artificial Sequence
  Description of Artificial Sequence: Synthetic oligonucleotide
  Sense strand starting at position 3323 of SEQ ID NO: 1242827
uguagacuuaggugucaac

SEQ ID NO: 1375821 - RNA, 19 nt, Artificial Sequence
  Description of Artificial Sequence: Synthetic oligonucleotide
  Antisense strand to SEQ ID NO: 1375820
guugacaccuaagucuaca

SEQ ID NO: 1375822 - RNA, 19 nt, Artificial Sequence
  Description of Artificial Sequence: Synthetic oligonucleotide
  Sense strand starting at position 3332 of SEQ ID NO: 1242827
aggugucaacagcauuaau

SEQ ID NO: 1375823 - RNA, 19 nt, Artificial Sequence
  Description of Artificial Sequence: Synthetic oligonucleotide
  Antisense strand to SEQ ID NO: 1375822
auuaaugcuguugacaccu

SEQ ID NO: 1375824 - RNA, 19 nt, Artificial Sequence
  Description of Artificial Sequence: Synthetic oligonucleotide
  Sense strand starting at position 3422 of SEQ ID NO: 1242827
agcugaaauagcuggguua

SEQ ID NO: 1375825 - RNA, 19 nt, Artificial Sequence
  Description of Artificial Sequence: Synthetic oligonucleotide
  Antisense strand to SEQ ID NO: 1375824
uaacccagcuauuucagcu

SEQ ID NO: 1375826 - RNA, 19 nt, Artificial Sequence
  Description of Artificial Sequence: Synthetic oligonucleotide
  Sense strand starting at position 3423 of SEQ ID NO: 1242827
gcugaaauagcuggguuau

SEQ ID NO: 1375827 - RNA, 19 nt, Artificial Sequence
  Description of Artificial Sequence: Synthetic oligonucleotide
  Antisense strand to SEQ ID NO: 1375826
auaacccagcuauuucagc

SEQ ID NO: 1375828 - RNA, 19 nt, Artificial Sequence
  Description of Artificial Sequence: Synthetic oligonucleotide
  Sense strand starting at position 3424 of SEQ ID NO: 1242827
cugaaauagcuggguuauu

SEQ ID NO: 1375829 - RNA, 19 nt, Artificial Sequence
  Description of Artificial Sequence: Synthetic oligonucleotide
  Antisense strand to SEQ ID NO: 1375828
aauaacccagcuauuucag

SEQ ID NO: 1375830 - RNA, 19 nt, Artificial Sequence
  Description of Artificial Sequence: Synthetic oligonucleotide
  Sense strand starting at position 3425 of SEQ ID NO: 1242827
ugaaauagcuggguuauug

SEQ ID NO: 1375831 - RNA, 19 nt, Artificial Sequence
  Description of Artificial Sequence: Synthetic oligonucleotide
  Antisense strand to SEQ ID NO: 1375830
caauaacccagcuauuuca

SEQ ID NO: 1375832 - RNA, 19 nt, Artificial Sequence
  Description of Artificial Sequence: Synthetic oligonucleotide
  Sense strand starting at position 3440 of SEQ ID NO: 1242827
auugucguagcagaaauua

SEQ ID NO: 1375833 - RNA, 19 nt, Artificial Sequence
  Description of Artificial Sequence: Synthetic oligonucleotide
  Antisense strand to SEQ ID NO: 1375832
uaauuucugcuacgacaau

SEQ ID NO: 1375834 - RNA, 19 nt, Artificial Sequence
  Description of Artificial Sequence: Synthetic oligonucleotide
  Sense strand starting at position 3478 of SEQ ID NO: 1242827
gaaauaucuugagucaagc

SEQ ID NO: 1375835 - RNA, 19 nt, Artificial Sequence
  Description of Artificial Sequence: Synthetic oligonucleotide
  Antisense strand to SEQ ID NO: 1375834
gcuugacucaagauauuuc

SEQ ID NO: 1375836 - RNA, 19 nt, Artificial Sequence
  Description of Artificial Sequence: Synthetic oligonucleotide
  Sense strand starting at position 3509 of SEQ ID NO: 1242827
ucaucaguuguaugaagcu

SEQ ID NO: 1375837 - RNA, 19 nt, Artificial Sequence
  Description of Artificial Sequence: Synthetic oligonucleotide
  Antisense strand to SEQ ID NO: 1375836
agcuucauacaacugauga

SEQ ID NO: 1375838 - RNA, 19 nt, Artificial Sequence
  Description of Artificial Sequence: Synthetic oligonucleotide
  Sense strand starting at position 3609 of SEQ ID NO: 1242827
gucuacaugcaauagaaau

SEQ ID NO: 1375839 - RNA, 19 nt, Artificial Sequence
  Description of Artificial Sequence: Synthetic oligonucleotide
  Antisense strand to SEQ ID NO: 1375838
auuucuauugcauguagac

SEQ ID NO: 1375840 - RNA, 19 nt, Artificial Sequence
  Description of Artificial Sequence: Synthetic oligonucleotide
  Sense strand starting at position 3731 of SEQ ID NO: 1242827
auugcucaucugggacaaa

SEQ ID NO: 1375841 - RNA, 19 nt, Artificial Sequence
  Description of Artificial Sequence: Synthetic oligonucleotide
  Antisense strand to SEQ ID NO: 1375840
uuugucccagaugagcaau

SEQ ID NO: 1375842 - RNA, 19 nt, Artificial Sequence
  Description of Artificial Sequence: Synthetic oligonucleotide
  Sense strand starting at position 3762 of SEQ ID NO: 1242827
uguuuauccucaguucuga

SEQ ID NO: 1375843 - RNA, 19 nt, Artificial Sequence
  Description of Artificial Sequence: Synthetic oligonucleotide
  Antisense strand to SEQ ID NO: 1375842
ucagaacugaggauaaaca

SEQ ID NO: 1375844 - RNA, 19 nt, Artificial Sequence
  Description of Artificial Sequence: Synthetic oligonucleotide
  Sense strand starting at position 3914 of SEQ ID NO: 1242827
uacagcauuguguaagaua

SEQ ID NO: 1375845 - RNA, 19 nt, Artificial Sequence
  Description of Artificial Sequence: Synthetic oligonucleotide
  Antisense strand to SEQ ID NO: 1375844
uaucuuacacaaugcugua

SEQ ID NO: 1375846 - RNA, 19 nt, Artificial Sequence
  Description of Artificial Sequence: Synthetic oligonucleotide
  Sense strand starting at position 3922 of SEQ ID NO: 1242827
uguguaagauaccugacuu

SEQ ID NO: 1375847 - RNA, 19 nt, Artificial Sequence
  Description of Artificial Sequence: Synthetic oligonucleotide
  Antisense strand to SEQ ID NO: 1375846
aagucagguaucuuacaca

SEQ ID NO: 1375848 - RNA, 19 nt, Artificial Sequence
  Description of Artificial Sequence: Synthetic oligonucleotide
  Sense strand starting at position 3923 of SEQ ID NO: 1242827
guguaagauaccugacuug

SEQ ID NO: 1375849 - RNA, 19 nt, Artificial Sequence
  Description of Artificial Sequence: Synthetic oligonucleotide
  Antisense strand to SEQ ID NO: 1375848
caagucagguaucuuacac

SEQ ID NO: 1375850 - RNA, 19 nt, Artificial Sequence
  Description of Artificial Sequence: Synthetic oligonucleotide
  Sense strand starting at position 127 of SEQ ID NO: 1242828
aagaguagcucuuuaugua

SEQ ID NO: 1375851 - RNA, 19 nt, Artificial Sequence
  Description of Artificial Sequence: Synthetic oligonucleotide
  Antisense strand to SEQ ID NO: 1375850
uacauaaagagcuacucuu

SEQ ID NO: 1375852 - RNA, 19 nt, Artificial Sequence
  Description of Artificial Sequence: Synthetic oligonucleotide
  Sense strand starting at position 128 of SEQ ID NO: 1242828
agaguagcucuuuauguaa

SEQ ID NO: 1375853 - RNA, 19 nt, Artificial Sequence
  Description of Artificial Sequence: Synthetic oligonucleotide
  Antisense strand to SEQ ID NO: 1375852
uuacauaaagagcuacucu

SEQ ID NO: 1375854 - RNA, 19 nt, Artificial Sequence
  Description of Artificial Sequence: Synthetic oligonucleotide
  Sense strand starting at position 301 of SEQ ID NO: 1242828
guccauguucuccauacuu

SEQ ID NO: 1375855 - RNA, 19 nt, Artificial Sequence
  Description of Artificial Sequence: Synthetic oligonucleotide
  Antisense strand to SEQ ID NO: 1375854
aaguauggagaacauggac

SEQ ID NO: 1375856 - RNA, 19 nt, Artificial Sequence
  Description of Artificial Sequence: Synthetic oligonucleotide
  Sense strand starting at position 439 of SEQ ID NO: 1242828
aaagguguuacugagaagu

SEQ ID NO: 1375857 - RNA, 19 nt, Artificial Sequence
  Description of Artificial Sequence: Synthetic oligonucleotide
  Antisense strand to SEQ ID NO: 1375856
acuucucaguaacaccuuu

SEQ ID NO: 1375858 - RNA, 19 nt, Artificial Sequence
  Description of Artificial Sequence: Synthetic oligonucleotide
  Sense strand starting at position 543 of SEQ ID NO: 1242828
auaucaguucuggaugcuu

SEQ ID NO: 1375859 - RNA, 19 nt, Artificial Sequence
  Description of Artificial Sequence: Synthetic oligonucleotide
  Antisense strand to SEQ ID NO: 1375858
aagcauccagaacugauau

SEQ ID NO: 1375860 - RNA, 19 nt, Artificial Sequence
  Description of Artificial Sequence: Synthetic oligonucleotide
  Sense strand starting at position 548 of SEQ ID NO: 1242828
aguucuggaugcuuggaua

SEQ ID NO: 1375861 - RNA, 19 nt, Artificial Sequence
  Description of Artificial Sequence: Synthetic oligonucleotide
  Antisense strand to SEQ ID NO: 1375860
uauccaagcauccagaacu

SEQ ID NO: 1375862 - RNA, 19 nt, Artificial Sequence
  Description of Artificial Sequence: Synthetic oligonucleotide
  Sense strand starting at position 753 of SEQ ID NO: 1242828
cugcauauuggugacaucu

SEQ ID NO: 1375863 - RNA, 19 nt, Artificial Sequence
  Description of Artificial Sequence: Synthetic oligonucleotide
  Antisense strand to SEQ ID NO: 1375862
agaugucaccaauaugcag

SEQ ID NO: 1375864 - RNA, 19 nt, Artificial Sequence
  Description of Artificial Sequence: Synthetic oligonucleotide
  Sense strand starting at position 815 of SEQ ID NO: 1242828
ggcucuacucaauaguugu

SEQ ID NO: 1375865 - RNA, 19 nt, Artificial Sequence
  Description of Artificial Sequence: Synthetic oligonucleotide
  Antisense strand to SEQ ID NO: 1375864
acaacuauugaguagagcc

SEQ ID NO: 1375866 - RNA, 19 nt, Artificial Sequence
  Description of Artificial Sequence: Synthetic oligonucleotide
  Sense strand starting at position 821 of SEQ ID NO: 1242828
acucaauaguugucuaaac

SEQ ID NO: 1375867 - RNA, 19 nt, Artificial Sequence
  Description of Artificial Sequence: Synthetic oligonucleotide
  Antisense strand to SEQ ID NO: 1375866
guuuagacaacuauugagu

SEQ ID NO: 1375868 - RNA, 19 nt, Artificial Sequence
  Description of Artificial Sequence: Synthetic oligonucleotide
  Sense strand starting at position 822 of SEQ ID NO: 1242828
cucaauaguugucuaaacu

SEQ ID NO: 1375869 - RNA, 19 nt, Artificial Sequence
  Description of Artificial Sequence: Synthetic oligonucleotide
  Antisense strand to SEQ ID NO: 1375868
aguuuagacaacuauugag

SEQ ID NO: 1375870 - RNA, 19 nt, Artificial Sequence
  Description of Artificial Sequence: Synthetic oligonucleotide
  Sense strand starting at position 823 of SEQ ID NO: 1242828
ucaauaguugucuaaacua

SEQ ID NO: 1375871 - RNA, 19 nt, Artificial Sequence
  Description of Artificial Sequence: Synthetic oligonucleotide
  Antisense strand to SEQ ID NO: 1375870
uaguuuagacaacuauuga

SEQ ID NO: 1375872 - RNA, 19 nt, Artificial Sequence
  Description of Artificial Sequence: Synthetic oligonucleotide
  Sense strand starting at position 863 of SEQ ID NO: 1242828
auucuacgcaguugagaga

SEQ ID NO: 1375873 - RNA, 19 nt, Artificial Sequence
  Description of Artificial Sequence: Synthetic oligonucleotide
  Antisense strand to SEQ ID NO: 1375872
ucucucaacugcguagaau

SEQ ID NO: 1375874 - RNA, 19 nt, Artificial Sequence
  Description of Artificial Sequence: Synthetic oligonucleotide
  Sense strand starting at position 986 of SEQ ID NO: 1242828
ccaaacauuucuggagaca

SEQ ID NO: 1375875 - RNA, 19 nt, Artificial Sequence
  Description of Artificial Sequence: Synthetic oligonucleotide
  Antisense strand to SEQ ID NO: 1375874
ugucuccagaaauguuugg

SEQ ID NO: 1375876 - RNA, 19 nt, Artificial Sequence
  Description of Artificial Sequence: Synthetic oligonucleotide
  Sense strand starting at position 1085 of SEQ ID NO: 1242828
gcuaaagagcaagauucuu

SEQ ID NO: 1375877 - RNA, 19 nt, Artificial Sequence
  Description of Artificial Sequence: Synthetic oligonucleotide
  Antisense strand to SEQ ID NO: 1375876
aagaaucuugcucuuuagc

SEQ ID NO: 1375878 - RNA, 19 nt, Artificial Sequence
  Description of Artificial Sequence: Synthetic oligonucleotide
  Sense strand starting at position 1193 of SEQ ID NO: 1242828
gagggugucccugagccaa

SEQ ID NO: 1375879 - RNA, 19 nt, Artificial Sequence
  Description of Artificial Sequence: Synthetic oligonucleotide
  Antisense strand to SEQ ID NO: 1375878
uuggcucagggacacccuc

SEQ ID NO: 1375880 - RNA, 19 nt, Artificial Sequence
  Description of Artificial Sequence: Synthetic oligonucleotide
  Sense strand starting at position 1296 of SEQ ID NO: 1242828
accagauugccugguauaa

SEQ ID NO: 1375881 - RNA, 19 nt, Artificial Sequence
  Description of Artificial Sequence: Synthetic oligonucleotide
  Antisense strand to SEQ ID NO: 1375880
uuauaccaggcaaucuggu

SEQ ID NO: 1375882 - RNA, 19 nt, Artificial Sequence
  Description of Artificial Sequence: Synthetic oligonucleotide
  Sense strand starting at position 1300 of SEQ ID NO: 1242828
gauugccugguauaaauga

SEQ ID NO: 1375883 - RNA, 19 nt, Artificial Sequence
  Description of Artificial Sequence: Synthetic oligonucleotide
  Antisense strand to SEQ ID NO: 1375882
ucauuuauaccaggcaauc

SEQ ID NO: 1375884 - RNA, 19 nt, Artificial Sequence
  Description of Artificial Sequence: Synthetic oligonucleotide
  Sense strand starting at position 1513 of SEQ ID NO: 1242828
gcaucccugaggugaguaa

SEQ ID NO: 1375885 - RNA, 19 nt, Artificial Sequence
  Description of Artificial Sequence: Synthetic oligonucleotide
  Antisense strand to SEQ ID NO: 1375884
uuacucaccucagggaugc

SEQ ID NO: 1375886 - RNA, 19 nt, Artificial Sequence
  Description of Artificial Sequence: Synthetic oligonucleotide
  Sense strand starting at position 2013 of SEQ ID NO: 1242828
ggucgaccaucuuuaauac

SEQ ID NO: 1375887 - RNA, 19 nt, Artificial Sequence
  Description of Artificial Sequence: Synthetic oligonucleotide
  Antisense strand to SEQ ID NO: 1375886
guauuaaagauggucgacc

SEQ ID NO: 1375888 - RNA, 19 nt, Artificial Sequence
  Description of Artificial Sequence: Synthetic oligonucleotide
  Sense strand starting at position 2281 of SEQ ID NO: 1242828
cgggcucuuccgagaagug

SEQ ID NO: 1375889 - RNA, 19 nt, Artificial Sequence
  Description of Artificial Sequence: Synthetic oligonucleotide
  Antisense strand to SEQ ID NO: 1375888
cacuucucggaagagcccg

SEQ ID NO: 1375890 - RNA, 19 nt, Artificial Sequence
  Description of Artificial Sequence: Synthetic oligonucleotide
  Sense strand starting at position 2485 of SEQ ID NO: 1242828
cgcagagaugaccacugau

SEQ ID NO: 1375891 - RNA, 19 nt, Artificial Sequence
  Description of Artificial Sequence: Synthetic oligonucleotide
  Antisense strand to SEQ ID NO: 1375890
aucaguggucaucucugcg

SEQ ID NO: 1375892 - RNA, 19 nt, Artificial Sequence
  Description of Artificial Sequence: Synthetic oligonucleotide
  Sense strand starting at position 2517 of SEQ ID NO: 1242828
ucuggaauacauuguagua

SEQ ID NO: 1375893 - RNA, 19 nt, Artificial Sequence
  Description of Artificial Sequence: Synthetic oligonucleotide
  Antisense strand to SEQ ID NO: 1375892
uacuacaauguauuccaga

SEQ ID NO: 1375894 - RNA, 19 nt, Artificial Sequence
  Description of Artificial Sequence: Synthetic oligonucleotide
  Sense strand starting at position 2715 of SEQ ID NO: 1242828
gaggaaagcaguggaguua

SEQ ID NO: 1375895 - RNA, 19 nt, Artificial Sequence
  Description of Artificial Sequence: Synthetic oligonucleotide
  Antisense strand to SEQ ID NO: 1375894
uaacuccacugcuuuccuc

SEQ ID NO: 1375896 - RNA, 19 nt, Artificial Sequence
  Description of Artificial Sequence: Synthetic oligonucleotide
  Sense strand starting at position 2724 of SEQ ID NO: 1242828
aguggaguuauuggucaaa

SEQ ID NO: 1375897 - RNA, 19 nt, Artificial Sequence
  Description of Artificial Sequence: Synthetic oligonucleotide
  Antisense strand to SEQ ID NO: 1375896
uuugaccaauaacuccacu

SEQ ID NO: 1375898 - RNA, 19 nt, Artificial Sequence
  Description of Artificial Sequence: Synthetic oligonucleotide
  Sense strand starting at position 2726 of SEQ ID NO: 1242828
uggaguuauuggucaaaga

SEQ ID NO: 1375899 - RNA, 19 nt, Artificial Sequence
  Description of Artificial Sequence: Synthetic oligonucleotide
  Antisense strand to SEQ ID NO: 1375898
ucuuugaccaauaacucca

SEQ ID NO: 1375900 - RNA, 19 nt, Artificial Sequence
  Description of Artificial Sequence: Synthetic oligonucleotide
  Sense strand starting at position 2736 of SEQ ID NO: 1242828
ggucaaagaguaugucagu

SEQ ID NO: 1375901 - RNA, 19 nt, Artificial Sequence
  Description of Artificial Sequence: Synthetic oligonucleotide
  Antisense strand to SEQ ID NO: 1375900
acugacauacucuuugacc

SEQ ID NO: 1375902 - RNA, 19 nt, Artificial Sequence
  Description of Artificial Sequence: Synthetic oligonucleotide
  Sense strand starting at position 2887 of SEQ ID NO: 1242828
acugguaaagcuuaacuuu

SEQ ID NO: 1375903 - RNA, 19 nt, Artificial Sequence
  Description of Artificial Sequence: Synthetic oligonucleotide
  Antisense strand to SEQ ID NO: 1375902
aaaguuaagcuuuaccagu

SEQ ID NO: 1375904 - RNA, 19 nt, Artificial Sequence
  Description of Artificial Sequence: Synthetic oligonucleotide
  Sense strand starting at position 2940 of SEQ ID NO: 1242828
uugggaauucucugugggu

SEQ ID NO: 1375905 - RNA, 19 nt, Artificial Sequence
  Description of Artificial Sequence: Synthetic oligonucleotide
  Antisense strand to SEQ ID NO: 1375904
acccacagagaauucccaa

SEQ ID NO: 1375906 - RNA, 19 nt, Artificial Sequence
  Description of Artificial Sequence: Synthetic oligonucleotide
  Sense strand starting at position 2941 of SEQ ID NO: 1242828
ugggaauucucugugggua

SEQ ID NO: 1375907 - RNA, 19 nt, Artificial Sequence
  Description of Artificial Sequence: Synthetic oligonucleotide
  Antisense strand to SEQ ID NO: 1375906
uacccacagagaauuccca

SEQ ID NO: 1375908 - RNA, 19 nt, Artificial Sequence
  Description of Artificial Sequence: Synthetic oligonucleotide
  Sense strand starting at position 2942 of SEQ ID NO: 1242828
gggaauucucuguggguau

SEQ ID NO: 1375909 - RNA, 19 nt, Artificial Sequence
  Description of Artificial Sequence: Synthetic oligonucleotide
  Antisense strand to SEQ ID NO: 1375908
auacccacagagaauuccc

SEQ ID NO: 1375910 - RNA, 19 nt, Artificial Sequence
  Description of Artificial Sequence: Synthetic oligonucleotide
  Sense strand starting at position 2944 of SEQ ID NO: 1242828
gaauucucuguggguauca

SEQ ID NO: 1375911 - RNA, 19 nt, Artificial Sequence
  Description of Artificial Sequence: Synthetic oligonucleotide
  Antisense strand to SEQ ID NO: 1375910
ugauacccacagagaauuc

SEQ ID NO: 1375912 - RNA, 19 nt, Artificial Sequence
  Description of Artificial Sequence: Synthetic oligonucleotide
  Sense strand starting at position 2945 of SEQ ID NO: 1242828
aauucucuguggguaucau

SEQ ID NO: 1375913 - RNA, 19 nt, Artificial Sequence
  Description of Artificial Sequence: Synthetic oligonucleotide
  Antisense strand to SEQ ID NO: 1375912
augauacccacagagaauu

SEQ ID NO: 1375914 - RNA, 19 nt, Artificial Sequence
  Description of Artificial Sequence: Synthetic oligonucleotide
  Sense strand starting at position 2946 of SEQ ID NO: 1242828
auucucuguggguaucauu

SEQ ID NO: 1375915 - RNA, 19 nt, Artificial Sequence
  Description of Artificial Sequence: Synthetic oligonucleotide
  Antisense strand to SEQ ID NO: 1375914
aaugauacccacagagaau

SEQ ID NO: 1375916 - RNA, 19 nt, Artificial Sequence
  Description of Artificial Sequence: Synthetic oligonucleotide
  Sense strand starting at position 3074 of SEQ ID NO: 1242828
ucuccuuucgaucaguaac

SEQ ID NO: 1375917 - RNA, 19 nt, Artificial Sequence
  Description of Artificial Sequence: Synthetic oligonucleotide
  Antisense strand to SEQ ID NO: 1375916
guuacugaucgaaaggaga

SEQ ID NO: 1375918 - RNA, 19 nt, Artificial Sequence
  Description of Artificial Sequence: Synthetic oligonucleotide
  Sense strand starting at position 3195 of SEQ ID NO: 1242828
gucccuuugggccaucaau

SEQ ID NO: 1375919 - RNA, 19 nt, Artificial Sequence
  Description of Artificial Sequence: Synthetic oligonucleotide
  Antisense strand to SEQ ID NO: 1375918
auugauggcccaaagggac

SEQ ID NO: 1375920 - RNA, 19 nt, Artificial Sequence
  Description of Artificial Sequence: Synthetic oligonucleotide
  Sense strand starting at position 3218 of SEQ ID NO: 1242828
cuguuuaaaguaugaccua

SEQ ID NO: 1375921 - RNA, 19 nt, Artificial Sequence
  Description of Artificial Sequence: Synthetic oligonucleotide
  Antisense strand to SEQ ID NO: 1375920
uaggucauacuuuaaacag

SEQ ID NO: 1375922 - RNA, 19 nt, Artificial Sequence
  Description of Artificial Sequence: Synthetic oligonucleotide
  Sense strand starting at position 3230 of SEQ ID NO: 1242828
ugaccuauagcuggaacaa

SEQ ID NO: 1375923 - RNA, 19 nt, Artificial Sequence
  Description of Artificial Sequence: Synthetic oligonucleotide
  Antisense strand to SEQ ID NO: 1375922
uuguuccagcuauagguca

SEQ ID NO: 1375924 - RNA, 19 nt, Artificial Sequence
  Description of Artificial Sequence: Synthetic oligonucleotide
  Sense strand starting at position 3709 of SEQ ID NO: 1242828
cuaagcuucuuugucaaag

SEQ ID NO: 1375925 - RNA, 19 nt, Artificial Sequence
  Description of Artificial Sequence: Synthetic oligonucleotide
  Antisense strand to SEQ ID NO: 1375924
cuuugacaaagaagcuuag

SEQ ID NO: 1375926 - RNA, 19 nt, Artificial Sequence
  Description of Artificial Sequence: Synthetic oligonucleotide
  Sense strand starting at position 3890 of SEQ ID NO: 1242828
ucccuuguaccucaguauu

SEQ ID NO: 1375927 - RNA, 19 nt, Artificial Sequence
  Description of Artificial Sequence: Synthetic oligonucleotide
  Antisense strand to SEQ ID NO: 1375926
aauacugagguacaaggga

SEQ ID NO: 1375928 - RNA, 19 nt, Artificial Sequence
  Description of Artificial Sequence: Synthetic oligonucleotide
  Sense strand starting at position 3957 of SEQ ID NO: 1242828
ucuguuugccguguaauga

SEQ ID NO: 1375929 - RNA, 19 nt, Artificial Sequence
  Description of Artificial Sequence: Synthetic oligonucleotide
  Antisense strand to SEQ ID NO: 1375928
ucauuacacggcaaacaga

SEQ ID NO: 1375930 - RNA, 19 nt, Artificial Sequence
  Description of Artificial Sequence: Synthetic oligonucleotide
  Sense strand starting at position 1 of SEQ ID NO: 1242829
acagauaaauguuugugga

SEQ ID NO: 1375931 - RNA, 19 nt, Artificial Sequence
  Description of Artificial Sequence: Synthetic oligonucleotide
  Antisense strand to SEQ ID NO: 1375930
uccacaaacauuuaucugu

SEQ ID NO: 1375932 - RNA, 19 nt, Artificial Sequence
  Description of Artificial Sequence: Synthetic oligonucleotide
  Sense strand starting at position 2 of SEQ ID NO: 1242829
cagauaaauguuuguggaa

SEQ ID NO: 1375933 - RNA, 19 nt, Artificial Sequence
  Description of Artificial Sequence: Synthetic oligonucleotide
  Antisense strand to SEQ ID NO: 1375932
uuccacaaacauuuaucug

SEQ ID NO: 1375934 - RNA, 19 nt, Artificial Sequence
  Description of Artificial Sequence: Synthetic oligonucleotide
  Sense strand starting at position 3 of SEQ ID NO: 1242829
agauaaauguuuguggaaa

SEQ ID NO: 1375935 - RNA, 19 nt, Artificial Sequence
  Description of Artificial Sequence: Synthetic oligonucleotide
  Antisense strand to SEQ ID NO: 1375934
uuuccacaaacauuuaucu

SEQ ID NO: 1375936 - RNA, 19 nt, Artificial Sequence
  Description of Artificial Sequence: Synthetic oligonucleotide
  Sense strand starting at position 28 of SEQ ID NO: 1242829
agaauaagcgcucaauaua

SEQ ID NO: 1375937 - RNA, 19 nt, Artificial Sequence
  Description of Artificial Sequence: Synthetic oligonucleotide
  Antisense strand to SEQ ID NO: 1375936
uauauugagcgcuuauucu

SEQ ID NO: 1375938 - RNA, 19 nt, Artificial Sequence
  Description of Artificial Sequence: Synthetic oligonucleotide
  Sense strand starting at position 31 of SEQ ID NO: 1242829
auaagcgcucaauauauaa

SEQ ID NO: 1375939 - RNA, 19 nt, Artificial Sequence
  Description of Artificial Sequence: Synthetic oligonucleotide
  Antisense strand to SEQ ID NO: 1375938
uuauauauugagcgcuuau

SEQ ID NO: 1375940 - RNA, 19 nt, Artificial Sequence
  Description of Artificial Sequence: Synthetic oligonucleotide
  Sense strand starting at position 95 of SEQ ID NO: 1242829
ccacuauaugcugggacau

SEQ ID NO: 1375941 - RNA, 19 nt, Artificial Sequence
  Description of Artificial Sequence: Synthetic oligonucleotide
  Antisense strand to SEQ ID NO: 1375940
augucccagcauauagugg

SEQ ID NO: 1375942 - RNA, 19 nt, Artificial Sequence
  Description of Artificial Sequence: Synthetic oligonucleotide
  Sense strand starting at position 96 of SEQ ID NO: 1242829
cacuauaugcugggacauu

SEQ ID NO: 1375943 - RNA, 19 nt, Artificial Sequence
  Description of Artificial Sequence: Synthetic oligonucleotide
  Antisense strand to SEQ ID NO: 1375942
aaugucccagcauauagug

SEQ ID NO: 1375944 - RNA, 19 nt, Artificial Sequence
  Description of Artificial Sequence: Synthetic oligonucleotide
  Sense strand starting at position 97 of SEQ ID NO: 1242829
acuauaugcugggacauuu

SEQ ID NO: 1375945 - RNA, 19 nt, Artificial Sequence
  Description of Artificial Sequence: Synthetic oligonucleotide
  Antisense strand to SEQ ID NO: 1375944
aaaugucccagcauauagu

SEQ ID NO: 1375946 - RNA, 19 nt, Artificial Sequence
  Description of Artificial Sequence: Synthetic oligonucleotide
  Sense strand starting at position 237 of SEQ ID NO: 1242829
acuugaacccagugucaau

SEQ ID NO: 1375947 - RNA, 19 nt, Artificial Sequence
  Description of Artificial Sequence: Synthetic oligonucleotide
  Antisense strand to SEQ ID NO: 1375946
auugacacuggguucaagu

SEQ ID NO: 1375948 - RNA, 19 nt, Artificial Sequence
  Description of Artificial Sequence: Synthetic oligonucleotide
  Sense strand starting at position 263 of SEQ ID NO: 1242829
agaccagugucuuuccacu

SEQ ID NO: 1375949 - RNA, 19 nt, Artificial Sequence
  Description of Artificial Sequence: Synthetic oligonucleotide
  Antisense strand to SEQ ID NO: 1375948
aguggaaagacacuggucu

SEQ ID NO: 1375950 - RNA, 19 nt, Artificial Sequence
  Description of Artificial Sequence: Synthetic oligonucleotide
  Sense strand starting at position 265 of SEQ ID NO: 1242829
accagugucuuuccacuga

SEQ ID NO: 1375951 - RNA, 19 nt, Artificial Sequence
  Description of Artificial Sequence: Synthetic oligonucleotide
  Antisense strand to SEQ ID NO: 1375950
ucaguggaaagacacuggu

SEQ ID NO: 1375952 - RNA, 19 nt, Artificial Sequence
  Description of Artificial Sequence: Synthetic oligonucleotide
  Sense strand starting at position 316 of SEQ ID NO: 1242829
gguucaucuggacaguuga

SEQ ID NO: 1375953 - RNA, 19 nt, Artificial Sequence
  Description of Artificial Sequence: Synthetic oligonucleotide
  Antisense strand to SEQ ID NO: 1375952
ucaacuguccagaugaacc

SEQ ID NO: 1375954 - RNA, 19 nt, Artificial Sequence
  Description of Artificial Sequence: Synthetic oligonucleotide
  Sense strand starting at position 326 of SEQ ID NO: 1242829
gacaguugaugcuuaagau

SEQ ID NO: 1375955 - RNA, 19 nt, Artificial Sequence
  Description of Artificial Sequence: Synthetic oligonucleotide
  Antisense strand to SEQ ID NO: 1375954
aucuuaagcaucaacuguc

SEQ ID NO: 1375956 - RNA, 19 nt, Artificial Sequence
  Description of Artificial Sequence: Synthetic oligonucleotide
  Sense strand starting at position 327 of SEQ ID NO: 1242829
acaguugaugcuuaagaua

SEQ ID NO: 1375957 - RNA, 19 nt, Artificial Sequence
  Description of Artificial Sequence: Synthetic oligonucleotide
  Antisense strand to SEQ ID NO: 1375956
uaucuuaagcaucaacugu

SEQ ID NO: 1375958 - RNA, 19 nt, Artificial Sequence
  Description of Artificial Sequence: Synthetic oligonucleotide
  Sense strand starting at position 823 of SEQ ID NO: 1242829
ggccaugaagguuaucuuu

SEQ ID NO: 1375959 - RNA, 19 nt, Artificial Sequence
  Description of Artificial Sequence: Synthetic oligonucleotide
  Antisense strand to SEQ ID NO: 1375958
aaagauaaccuucauggcc

SEQ ID NO: 1375960 - RNA, 19 nt, Artificial Sequence
  Description of Artificial Sequence: Synthetic oligonucleotide
  Sense strand starting at position 958 of SEQ ID NO: 1242829
augucuugcccugacacaa

SEQ ID NO: 1375961 - RNA, 19 nt, Artificial Sequence
  Description of Artificial Sequence: Synthetic oligonucleotide
  Antisense strand to SEQ ID NO: 1375960
uugugucagggcaagacau

SEQ ID NO: 1375962 - RNA, 19 nt, Artificial Sequence
  Description of Artificial Sequence: Synthetic oligonucleotide
  Sense strand starting at position 993 of SEQ ID NO: 1242829
agagaaagccuuugaucuu

SEQ ID NO: 1375963 - RNA, 19 nt, Artificial Sequence
  Description of Artificial Sequence: Synthetic oligonucleotide
  Antisense strand to SEQ ID NO: 1375962
aagaucaaaggcuuucucu

SEQ ID NO: 1375964 - RNA, 19 nt, Artificial Sequence
  Description of Artificial Sequence: Synthetic oligonucleotide
  Sense strand starting at position 1454 of SEQ ID NO: 1242829
ucucuucugucacugacua

SEQ ID NO: 1375965 - RNA, 19 nt, Artificial Sequence
  Description of Artificial Sequence: Synthetic oligonucleotide
  Antisense strand to SEQ ID NO: 1375964
uagucagugacagaagaga

SEQ ID NO: 1375966 - RNA, 19 nt, Artificial Sequence
  Description of Artificial Sequence: Synthetic oligonucleotide
  Sense strand starting at position 1520 of SEQ ID NO: 1242829
uuuccuccucaguacgaaa

SEQ ID NO: 1375967 - RNA, 19 nt, Artificial Sequence
  Description of Artificial Sequence: Synthetic oligonucleotide
  Antisense strand to SEQ ID NO: 1375966
uuucguacugaggaggaaa

SEQ ID NO: 1375968 - RNA, 19 nt, Artificial Sequence
  Description of Artificial Sequence: Synthetic oligonucleotide
  Sense strand starting at position 1531 of SEQ ID NO: 1242829
guacgaaauggcgagagaa

SEQ ID NO: 1375969 - RNA, 19 nt, Artificial Sequence
  Description of Artificial Sequence: Synthetic oligonucleotide
  Antisense strand to SEQ ID NO: 1375968
uucucucgccauuucguac

SEQ ID NO: 1375970 - RNA, 19 nt, Artificial Sequence
  Description of Artificial Sequence: Synthetic oligonucleotide
  Sense strand starting at position 1565 of SEQ ID NO: 1242829
cguugcuugcuaccauuau

SEQ ID NO: 1375971 - RNA, 19 nt, Artificial Sequence
  Description of Artificial Sequence: Synthetic oligonucleotide
  Antisense strand to SEQ ID NO: 1375970
auaaugguagcaagcaacg

SEQ ID NO: 1375972 - RNA, 19 nt, Artificial Sequence
  Description of Artificial Sequence: Synthetic oligonucleotide
  Sense strand starting at position 1590 of SEQ ID NO: 1242829
uguuauuauuuggcuguga

SEQ ID NO: 1375973 - RNA, 19 nt, Artificial Sequence
  Description of Artificial Sequence: Synthetic oligonucleotide
  Antisense strand to SEQ ID NO: 1375972
ucacagccaaauaauaaca

SEQ ID NO: 1375974 - RNA, 19 nt, Artificial Sequence
  Description of Artificial Sequence: Synthetic oligonucleotide
  Sense strand starting at position 1591 of SEQ ID NO: 1242829
guuauuauuuggcugugaa

SEQ ID NO: 1375975 - RNA, 19 nt, Artificial Sequence
  Description of Artificial Sequence: Synthetic oligonucleotide
  Antisense strand to SEQ ID NO: 1375974
uucacagccaaauaauaac

SEQ ID NO: 1375976 - RNA, 19 nt, Artificial Sequence
  Description of Artificial Sequence: Synthetic oligonucleotide
  Sense strand starting at position 2637 of SEQ ID NO: 1242829
auucucauuucugaacgau

SEQ ID NO: 1375977 - RNA, 19 nt, Artificial Sequence
  Description of Artificial Sequence: Synthetic oligonucleotide
  Antisense strand to SEQ ID NO: 1375976
aucguucagaaaugagaau

SEQ ID NO: 1375978 - RNA, 19 nt, Artificial Sequence
  Description of Artificial Sequence: Synthetic oligonucleotide
  Sense strand starting at position 2728 of SEQ ID NO: 1242829
ccgaguuugcucguguuga

SEQ ID NO: 1375979 - RNA, 19 nt, Artificial Sequence
  Description of Artificial Sequence: Synthetic oligonucleotide
  Antisense strand to SEQ ID NO: 1375978
ucaacacgagcaaacucgg

SEQ ID NO: 1375980 - RNA, 19 nt, Artificial Sequence
  Description of Artificial Sequence: Synthetic oligonucleotide
  Sense strand starting at position 2730 of SEQ ID NO: 1242829
gaguuugcucguguugacu

SEQ ID NO: 1375981 - RNA, 19 nt, Artificial Sequence
  Description of Artificial Sequence: Synthetic oligonucleotide
  Antisense strand to SEQ ID NO: 1375980
agucaacacgagcaaacuc

SEQ ID NO: 1375982 - RNA, 19 nt, Artificial Sequence
  Description of Artificial Sequence: Synthetic oligonucleotide
  Sense strand starting at position 2872 of SEQ ID NO: 1242829
acaugauguguacagguga

SEQ ID NO: 1375983 - RNA, 19 nt, Artificial Sequence
  Description of Artificial Sequence: Synthetic oligonucleotide
  Antisense strand to SEQ ID NO: 1375982
ucaccuguacacaucaugu

SEQ ID NO: 1375984 - RNA, 19 nt, Artificial Sequence
  Description of Artificial Sequence: Synthetic oligonucleotide
  Sense strand starting at position 3055 of SEQ ID NO: 1242829
cugacugcgcuuuauaaga

SEQ ID NO: 1375985 - RNA, 19 nt, Artificial Sequence
  Description of Artificial Sequence: Synthetic oligonucleotide
  Antisense strand to SEQ ID NO: 1375984
ucuuauaaagcgcagucag

SEQ ID NO: 1375986 - RNA, 19 nt, Artificial Sequence
  Description of Artificial Sequence: Synthetic oligonucleotide
  Sense strand starting at position 3082 of SEQ ID NO: 1242829
agaauaaagugagacaaua

SEQ ID NO: 1375987 - RNA, 19 nt, Artificial Sequence
  Description of Artificial Sequence: Synthetic oligonucleotide
  Antisense strand to SEQ ID NO: 1375986
uauugucucacuuuauucu

SEQ ID NO: 1375988 - RNA, 19 nt, Artificial Sequence
  Description of Artificial Sequence: Synthetic oligonucleotide
  Sense strand starting at position 3090 of SEQ ID NO: 1242829
gugagacaauaggaauaaa

SEQ ID NO: 1375989 - RNA, 19 nt, Artificial Sequence
  Description of Artificial Sequence: Synthetic oligonucleotide
  Antisense strand to SEQ ID NO: 1375988
uuuauuccuauugucucac

SEQ ID NO: 1375990 - RNA, 19 nt, Artificial Sequence
  Description of Artificial Sequence: Synthetic oligonucleotide
  Sense strand starting at position 3221 of SEQ ID NO: 1242829
gaggguguugauugauuga

SEQ ID NO: 1375991 - RNA, 19 nt, Artificial Sequence
  Description of Artificial Sequence: Synthetic oligonucleotide
  Antisense strand to SEQ ID NO: 1375990
ucaaucaaucaacacccuc

SEQ ID NO: 1375992 - RNA, 19 nt, Artificial Sequence
  Description of Artificial Sequence: Synthetic oligonucleotide
  Sense strand starting at position 3224 of SEQ ID NO: 1242829
gguguugauugauugauug

SEQ ID NO: 1375993 - RNA, 19 nt, Artificial Sequence
  Description of Artificial Sequence: Synthetic oligonucleotide
  Antisense strand to SEQ ID NO: 1375992
caaucaaucaaucaacacc

SEQ ID NO: 1375994 - RNA, 19 nt, Artificial Sequence
  Description of Artificial Sequence: Synthetic oligonucleotide
  Sense strand starting at position 3559 of SEQ ID NO: 1242829
uuaaucacugcuggaauau

SEQ ID NO: 1375995 - RNA, 19 nt, Artificial Sequence
  Description of Artificial Sequence: Synthetic oligonucleotide
  Antisense strand to SEQ ID NO: 1375994
auauuccagcagugauuaa

SEQ ID NO: 1375996 - RNA, 19 nt, Artificial Sequence
  Description of Artificial Sequence: Synthetic oligonucleotide
  Sense strand starting at position 3570 of SEQ ID NO: 1242829
uggaauauucuagggcaac

SEQ ID NO: 1375997 - RNA, 19 nt, Artificial Sequence
  Description of Artificial Sequence: Synthetic oligonucleotide
  Antisense strand to SEQ ID NO: 1375996
guugcccuagaauauucca

SEQ ID NO: 1375998 - RNA, 19 nt, Artificial Sequence
  Description of Artificial Sequence: Synthetic oligonucleotide
  Sense strand starting at position 3582 of SEQ ID NO: 1242829
gggcaacagaguugaacau

SEQ ID NO: 1375999 - RNA, 19 nt, Artificial Sequence
  Description of Artificial Sequence: Synthetic oligonucleotide
  Antisense strand to SEQ ID NO: 1375998
auguucaacucuguugccc

SEQ ID NO: 1376000 - RNA, 19 nt, Artificial Sequence
  Description of Artificial Sequence: Synthetic oligonucleotide
  Sense strand starting at position 3637 of SEQ ID NO: 1242829
aucgaaaugacuuacgcau

SEQ ID NO: 1376001 - RNA, 19 nt, Artificial Sequence
  Description of Artificial Sequence: Synthetic oligonucleotide
  Antisense strand to SEQ ID NO: 1376000
augcguaagucauuucgau

SEQ ID NO: 1376002 - RNA, 19 nt, Artificial Sequence
  Description of Artificial Sequence: Synthetic oligonucleotide
  Sense strand starting at position 3643 of SEQ ID NO: 1242829
augacuuacgcaugacaua

SEQ ID NO: 1376003 - RNA, 19 nt, Artificial Sequence
  Description of Artificial Sequence: Synthetic oligonucleotide
  Antisense strand to SEQ ID NO: 1376002
uaugucaugcguaagucau

SEQ ID NO: 1376004 - RNA, 19 nt, Artificial Sequence
  Description of Artificial Sequence: Synthetic oligonucleotide
  Sense strand starting at position 3644 of SEQ ID NO: 1242829
ugacuuacgcaugacauaa

SEQ ID NO: 1376005 - RNA, 19 nt, Artificial Sequence
  Description of Artificial Sequence: Synthetic oligonucleotide
  Antisense strand to SEQ ID NO: 1376004
uuaugucaugcguaaguca

SEQ ID NO: 1376006 - RNA, 19 nt, Artificial Sequence
  Description of Artificial Sequence: Synthetic oligonucleotide
  Sense strand starting at position 3689 of SEQ ID NO: 1242829
uguauaacucaguaguucu

SEQ ID NO: 1376007 - RNA, 19 nt, Artificial Sequence
  Description of Artificial Sequence: Synthetic oligonucleotide
  Antisense strand to SEQ ID NO: 1376006
agaacuacugaguuauaca

SEQ ID NO: 1376008 - RNA, 19 nt, Artificial Sequence
  Description of Artificial Sequence: Synthetic oligonucleotide
  Sense strand starting at position 3840 of SEQ ID NO: 1242829
aucuucugucucuauggau

SEQ ID NO: 1376009 - RNA, 19 nt, Artificial Sequence
  Description of Artificial Sequence: Synthetic oligonucleotide
  Antisense strand to SEQ ID NO: 1376008
auccauagagacagaagau

SEQ ID NO: 1376010 - RNA, 19 nt, Artificial Sequence
  Description of Artificial Sequence: Synthetic oligonucleotide
  Sense strand starting at position 260 of SEQ ID NO: 1242830
acaggucccugucuggaaa

SEQ ID NO: 1376011 - RNA, 19 nt, Artificial Sequence
  Description of Artificial Sequence: Synthetic oligonucleotide
  Antisense strand to SEQ ID NO: 1376010
uuuccagacagggaccugu

SEQ ID NO: 1376012 - RNA, 19 nt, Artificial Sequence
  Description of Artificial Sequence: Synthetic oligonucleotide
  Sense strand starting at position 281 of SEQ ID NO: 1242830
ggcugagaacugugcaaca

SEQ ID NO: 1376013 - RNA, 19 nt, Artificial Sequence
  Description of Artificial Sequence: Synthetic oligonucleotide
  Antisense strand to SEQ ID NO: 1376012
uguugcacaguucucagcc

SEQ ID NO: 1376014 - RNA, 19 nt, Artificial Sequence
  Description of Artificial Sequence: Synthetic oligonucleotide
  Sense strand starting at position 355 of SEQ ID NO: 1242830
cagagagguuacuuaguca

SEQ ID NO: 1376015 - RNA, 19 nt, Artificial Sequence
  Description of Artificial Sequence: Synthetic oligonucleotide
  Antisense strand to SEQ ID NO: 1376014
ugacuaaguaaccucucug

SEQ ID NO: 1376016 - RNA, 19 nt, Artificial Sequence
  Description of Artificial Sequence: Synthetic oligonucleotide
  Sense strand starting at position 359 of SEQ ID NO: 1242830
gagguuacuuagucacaca

SEQ ID NO: 1376017 - RNA, 19 nt, Artificial Sequence
  Description of Artificial Sequence: Synthetic oligonucleotide
  Antisense strand to SEQ ID NO: 1376016
ugugugacuaaguaaccuc

SEQ ID NO: 1376018 - RNA, 19 nt, Artificial Sequence
  Description of Artificial Sequence: Synthetic oligonucleotide
  Sense strand starting at position 652 of SEQ ID NO: 1242830
ccgacuuggauccaugcaa

SEQ ID NO: 1376019 - RNA, 19 nt, Artificial Sequence
  Description of Artificial Sequence: Synthetic oligonucleotide
  Antisense strand to SEQ ID NO: 1376018
uugcauggauccaagucgg

SEQ ID NO: 1376020 - RNA, 19 nt, Artificial Sequence
  Description of Artificial Sequence: Synthetic oligonucleotide
  Sense strand starting at position 754 of SEQ ID NO: 1242830
ggaucucacuggcuuauga

SEQ ID NO: 1376021 - RNA, 19 nt, Artificial Sequence
  Description of Artificial Sequence: Synthetic oligonucleotide
  Antisense strand to SEQ ID NO: 1376020
ucauaagccagugagaucc

SEQ ID NO: 1376022 - RNA, 19 nt, Artificial Sequence
  Description of Artificial Sequence: Synthetic oligonucleotide
  Sense strand starting at position 775 of SEQ ID NO: 1242830
uucgcauuugagcagucau

SEQ ID NO: 1376023 - RNA, 19 nt, Artificial Sequence
  Description of Artificial Sequence: Synthetic oligonucleotide
  Antisense strand to SEQ ID NO: 1376022
augacugcucaaaugcgaa

SEQ ID NO: 1376024 - RNA, 19 nt, Artificial Sequence
  Description of Artificial Sequence: Synthetic oligonucleotide
  Sense strand starting at position 952 of SEQ ID NO: 1242830
ugagcuuucucacuccaag

SEQ ID NO: 1376025 - RNA, 19 nt, Artificial Sequence
  Description of Artificial Sequence: Synthetic oligonucleotide
  Antisense strand to SEQ ID NO: 1376024
cuuggagugagaaagcuca

SEQ ID NO: 1376026 - RNA, 19 nt, Artificial Sequence
  Description of Artificial Sequence: Synthetic oligonucleotide
  Sense strand starting at position 1671 of SEQ ID NO: 1242830
aggcaaaccucccuaggau

SEQ ID NO: 1376027 - RNA, 19 nt, Artificial Sequence
  Description of Artificial Sequence: Synthetic oligonucleotide
  Antisense strand to SEQ ID NO: 1376026
auccuagggagguuugccu

SEQ ID NO: 1376028 - RNA, 19 nt, Artificial Sequence
  Description of Artificial Sequence: Synthetic oligonucleotide
  Sense strand starting at position 1672 of SEQ ID NO: 1242830
ggcaaaccucccuaggauu

SEQ ID NO: 1376029 - RNA, 19 nt, Artificial Sequence
  Description of Artificial Sequence: Synthetic oligonucleotide
  Antisense strand to SEQ ID NO: 1376028
aauccuagggagguuugcc

SEQ ID NO: 1376030 - RNA, 19 nt, Artificial Sequence
  Description of Artificial Sequence: Synthetic oligonucleotide
  Sense strand starting at position 1757 of SEQ ID NO: 1242830
ugcagagagaucugcaagu

SEQ ID NO: 1376031 - RNA, 19 nt, Artificial Sequence
  Description of Artificial Sequence: Synthetic oligonucleotide
  Antisense strand to SEQ ID NO: 1376030
acuugcagaucucucugca

SEQ ID NO: 1376032 - RNA, 19 nt, Artificial Sequence
  Description of Artificial Sequence: Synthetic oligonucleotide
  Sense strand starting at position 1825 of SEQ ID NO: 1242830
cccucugaguucccauuau

SEQ ID NO: 1376033 - RNA, 19 nt, Artificial Sequence
  Description of Artificial Sequence: Synthetic oligonucleotide
  Antisense strand to SEQ ID NO: 1376032
auaaugggaacucagaggg

SEQ ID NO: 1376034 - RNA, 19 nt, Artificial Sequence
  Description of Artificial Sequence: Synthetic oligonucleotide
  Sense strand starting at position 2087 of SEQ ID NO: 1242830
ggagauuuauuuggagccu

SEQ ID NO: 1376035 - RNA, 19 nt, Artificial Sequence
  Description of Artificial Sequence: Synthetic oligonucleotide
  Antisense strand to SEQ ID NO: 1376034
aggcuccaaauaaaucucc

SEQ ID NO: 1376036 - RNA, 19 nt, Artificial Sequence
  Description of Artificial Sequence: Synthetic oligonucleotide
  Sense strand starting at position 2265 of SEQ ID NO: 1242830
gggaauugguggccaggua

SEQ ID NO: 1376037 - RNA, 19 nt, Artificial Sequence
  Description of Artificial Sequence: Synthetic oligonucleotide
  Antisense strand to SEQ ID NO: 1376036
uaccuggccaccaauuccc

SEQ ID NO: 1376038 - RNA, 19 nt, Artificial Sequence
  Description of Artificial Sequence: Synthetic oligonucleotide
  Sense strand starting at position 2413 of SEQ ID NO: 1242830
cugcuugcugcagagauga

SEQ ID NO: 1376039 - RNA, 19 nt, Artificial Sequence
  Description of Artificial Sequence: Synthetic oligonucleotide
  Antisense strand to SEQ ID NO: 1376038
ucaucucugcagcaagcag

SEQ ID NO: 1376040 - RNA, 19 nt, Artificial Sequence
  Description of Artificial Sequence: Synthetic oligonucleotide
  Sense strand starting at position 2415 of SEQ ID NO: 1242830
gcuugcugcagagaugaga

SEQ ID NO: 1376041 - RNA, 19 nt, Artificial Sequence
  Description of Artificial Sequence: Synthetic oligonucleotide
  Antisense strand to SEQ ID NO: 1376040
ucucaucucugcagcaagc

SEQ ID NO: 1376042 - RNA, 19 nt, Artificial Sequence
  Description of Artificial Sequence: Synthetic oligonucleotide
  Sense strand starting at position 2441 of SEQ ID NO: 1242830
aacugagugcugggaacau

SEQ ID NO: 1376043 - RNA, 19 nt, Artificial Sequence
  Description of Artificial Sequence: Synthetic oligonucleotide
  Antisense strand to SEQ ID NO: 1376042
auguucccagcacucaguu

SEQ ID NO: 1376044 - RNA, 19 nt, Artificial Sequence
  Description of Artificial Sequence: Synthetic oligonucleotide
  Sense strand starting at position 2579 of SEQ ID NO: 1242830
gaggaugucuagcugggau

SEQ ID NO: 1376045 - RNA, 19 nt, Artificial Sequence
  Description of Artificial Sequence: Synthetic oligonucleotide
  Antisense strand to SEQ ID NO: 1376044
aucccagcuagacauccuc

SEQ ID NO: 1376046 - RNA, 19 nt, Artificial Sequence
  Description of Artificial Sequence: Synthetic oligonucleotide
  Sense strand starting at position 2581 of SEQ ID NO: 1242830
ggaugucuagcugggauga

SEQ ID NO: 1376047 - RNA, 19 nt, Artificial Sequence
  Description of Artificial Sequence: Synthetic oligonucleotide
  Antisense strand to SEQ ID NO: 1376046
ucaucccagcuagacaucc

SEQ ID NO: 1376048 - RNA, 19 nt, Artificial Sequence
  Description of Artificial Sequence: Synthetic oligonucleotide
  Sense strand starting at position 2582 of SEQ ID NO: 1242830
gaugucuagcugggaugau

SEQ ID NO: 1376049 - RNA, 19 nt, Artificial Sequence
  Description of Artificial Sequence: Synthetic oligonucleotide
  Antisense strand to SEQ ID NO: 1376048
aucaucccagcuagacauc

SEQ ID NO: 1376050 - RNA, 19 nt, Artificial Sequence
  Description of Artificial Sequence: Synthetic oligonucleotide
  Sense strand starting at position 2678 of SEQ ID NO: 1242830
augugaggaucucucaauu

SEQ ID NO: 1376051 - RNA, 19 nt, Artificial Sequence
  Description of Artificial Sequence: Synthetic oligonucleotide
  Antisense strand to SEQ ID NO: 1376050
aauugagagauccucacau

SEQ ID NO: 1376052 - RNA, 19 nt, Artificial Sequence
  Description of Artificial Sequence: Synthetic oligonucleotide
  Sense strand starting at position 2727 of SEQ ID NO: 1242830
gcauuuguacuguagguca

SEQ ID NO: 1376053 - RNA, 19 nt, Artificial Sequence
  Description of Artificial Sequence: Synthetic oligonucleotide
  Antisense strand to SEQ ID NO: 1376052
ugaccuacaguacaaaugc

SEQ ID NO: 1376054 - RNA, 19 nt, Artificial Sequence
  Description of Artificial Sequence: Synthetic oligonucleotide
  Sense strand starting at position 2739 of SEQ ID NO: 1242830
uaggucaggucaguuuaaa

SEQ ID NO: 1376055 - RNA, 19 nt, Artificial Sequence
  Description of Artificial Sequence: Synthetic oligonucleotide
  Antisense strand to SEQ ID NO: 1376054
uuuaaacugaccugaccua

SEQ ID NO: 1376056 - RNA, 19 nt, Artificial Sequence
  Description of Artificial Sequence: Synthetic oligonucleotide
  Sense strand starting at position 2771 of SEQ ID NO: 1242830
aagauaucucuguguccag

SEQ ID NO: 1376057 - RNA, 19 nt, Artificial Sequence
  Description of Artificial Sequence: Synthetic oligonucleotide
  Antisense strand to SEQ ID NO: 1376056
cuggacacagagauaucuu

SEQ ID NO: 1376058 - RNA, 19 nt, Artificial Sequence
  Description of Artificial Sequence: Synthetic oligonucleotide
  Sense strand starting at position 2787 of SEQ ID NO: 1242830
cagccaguucugggaaaua

SEQ ID NO: 1376059 - RNA, 19 nt, Artificial Sequence
  Description of Artificial Sequence: Synthetic oligonucleotide
  Antisense strand to SEQ ID NO: 1376058
uauuucccagaacuggcug

SEQ ID NO: 1376060 - RNA, 19 nt, Artificial Sequence
  Description of Artificial Sequence: Synthetic oligonucleotide
  Sense strand starting at position 2946 of SEQ ID NO: 1242830
guuagaguauaauuacugu

SEQ ID NO: 1376061 - RNA, 19 nt, Artificial Sequence
  Description of Artificial Sequence: Synthetic oligonucleotide
  Antisense strand to SEQ ID NO: 1376060
acaguaauuauacucuaac

SEQ ID NO: 1376062 - RNA, 19 nt, Artificial Sequence
  Description of Artificial Sequence: Synthetic oligonucleotide
  Sense strand starting at position 2952 of SEQ ID NO: 1242830
guauaauuacuguggugag

SEQ ID NO: 1376063 - RNA, 19 nt, Artificial Sequence
  Description of Artificial Sequence: Synthetic oligonucleotide
  Antisense strand to SEQ ID NO: 1376062
cucaccacaguaauuauac

SEQ ID NO: 1376064 - RNA, 19 nt, Artificial Sequence
  Description of Artificial Sequence: Synthetic oligonucleotide
  Sense strand starting at position 2991 of SEQ ID NO: 1242830
ucuccuuagcagggauaga

SEQ ID NO: 1376065 - RNA, 19 nt, Artificial Sequence
  Description of Artificial Sequence: Synthetic oligonucleotide
  Antisense strand to SEQ ID NO: 1376064
ucuaucccugcuaaggaga

SEQ ID NO: 1376066 - RNA, 19 nt, Artificial Sequence
  Description of Artificial Sequence: Synthetic oligonucleotide
  Sense strand starting at position 3098 of SEQ ID NO: 1242830
gcuacuguuguacaaggaa

SEQ ID NO: 1376067 - RNA, 19 nt, Artificial Sequence
  Description of Artificial Sequence: Synthetic oligonucleotide
  Antisense strand to SEQ ID NO: 1376066
uuccuuguacaacaguagc

SEQ ID NO: 1376068 - RNA, 19 nt, Artificial Sequence
  Description of Artificial Sequence: Synthetic oligonucleotide
  Sense strand starting at position 3166 of SEQ ID NO: 1242830
gcuuucuugcuuucuguau

SEQ ID NO: 1376069 - RNA, 19 nt, Artificial Sequence
  Description of Artificial Sequence: Synthetic oligonucleotide
  Antisense strand to SEQ ID NO: 1376068
auacagaaagcaagaaagc

SEQ ID NO: 1376070 - RNA, 19 nt, Artificial Sequence
  Description of Artificial Sequence: Synthetic oligonucleotide
  Sense strand starting at position 3170 of SEQ ID NO: 1242830
ucuugcuuucuguauauuu

SEQ ID NO: 1376071 - RNA, 19 nt, Artificial Sequence
  Description of Artificial Sequence: Synthetic oligonucleotide
  Antisense strand to SEQ ID NO: 1376070
aaauauacagaaagcaaga

SEQ ID NO: 1376072 - RNA, 19 nt, Artificial Sequence
  Description of Artificial Sequence: Synthetic oligonucleotide
  Sense strand starting at position 3401 of SEQ ID NO: 1242830
uguuauaaacagggaugca

SEQ ID NO: 1376073 - RNA, 19 nt, Artificial Sequence
  Description of Artificial Sequence: Synthetic oligonucleotide
  Antisense strand to SEQ ID NO: 1376072
ugcaucccuguuuauaaca

SEQ ID NO: 1376074 - RNA, 19 nt, Artificial Sequence
  Description of Artificial Sequence: Synthetic oligonucleotide
  Sense strand starting at position 3444 of SEQ ID NO: 1242830
gagauaccuguuggauuau

SEQ ID NO: 1376075 - RNA, 19 nt, Artificial Sequence
  Description of Artificial Sequence: Synthetic oligonucleotide
  Antisense strand to SEQ ID NO: 1376074
auaauccaacagguaucuc

SEQ ID NO: 1376076 - RNA, 19 nt, Artificial Sequence
  Description of Artificial Sequence: Synthetic oligonucleotide
  Sense strand starting at position 3454 of SEQ ID NO: 1242830
uuggauuauuuccaucaug

SEQ ID NO: 1376077 - RNA, 19 nt, Artificial Sequence
  Description of Artificial Sequence: Synthetic oligonucleotide
  Antisense strand to SEQ ID NO: 1376076
caugauggaaauaauccaa

SEQ ID NO: 1376078 - RNA, 19 nt, Artificial Sequence
  Description of Artificial Sequence: Synthetic oligonucleotide
  Sense strand starting at position 3464 of SEQ ID NO: 1242830
uccaucauguuccuggaau

SEQ ID NO: 1376079 - RNA, 19 nt, Artificial Sequence
  Description of Artificial Sequence: Synthetic oligonucleotide
  Antisense strand to SEQ ID NO: 1376078
auuccaggaacaugaugga

SEQ ID NO: 1376080 - RNA, 19 nt, Artificial Sequence
  Description of Artificial Sequence: Synthetic oligonucleotide
  Sense strand starting at position 3841 of SEQ ID NO: 1242830
aguuuccaaucacuaugua

SEQ ID NO: 1376081 - RNA, 19 nt, Artificial Sequence
  Description of Artificial Sequence: Synthetic oligonucleotide
  Antisense strand to SEQ ID NO: 1376080
uacauagugauuggaaacu

SEQ ID NO: 1376082 - RNA, 19 nt, Artificial Sequence
  Description of Artificial Sequence: Synthetic oligonucleotide
  Sense strand starting at position 3842 of SEQ ID NO: 1242830
guuuccaaucacuauguau

SEQ ID NO: 1376083 - RNA, 19 nt, Artificial Sequence
  Description of Artificial Sequence: Synthetic oligonucleotide
  Antisense strand to SEQ ID NO: 1376082
auacauagugauuggaaac

SEQ ID NO: 1376084 - RNA, 19 nt, Artificial Sequence
  Description of Artificial Sequence: Synthetic oligonucleotide
  Sense strand starting at position 3903 of SEQ ID NO: 1242830
aguuauuucuuucuccagu

SEQ ID NO: 1376085 - RNA, 19 nt, Artificial Sequence
  Description of Artificial Sequence: Synthetic oligonucleotide
  Antisense strand to SEQ ID NO: 1376084
acuggagaaagaaauaacu

SEQ ID NO: 1376086 - RNA, 19 nt, Artificial Sequence
  Description of Artificial Sequence: Synthetic oligonucleotide
  Sense strand starting at position 3904 of SEQ ID NO: 1242830
guuauuucuuucuccagua

SEQ ID NO: 1376087 - RNA, 19 nt, Artificial Sequence
  Description of Artificial Sequence: Synthetic oligonucleotide
  Antisense strand to SEQ ID NO: 1376086
uacuggagaaagaaauaac

SEQ ID NO: 1376088 - RNA, 19 nt, Artificial Sequence
  Description of Artificial Sequence: Synthetic oligonucleotide
  Sense strand starting at position 3942 of SEQ ID NO: 1242830
ucaagaaucuuucuggcuu

SEQ ID NO: 1376089 - RNA, 19 nt, Artificial Sequence
  Description of Artificial Sequence: Synthetic oligonucleotide
  Antisense strand to SEQ ID NO: 1376088
aagccagaaagauucuuga

SEQ ID NO: 1376090 - RNA, 19 nt, Artificial Sequence
  Description of Artificial Sequence: Synthetic oligonucleotide
  Sense strand starting at position 23 of SEQ ID NO: 1242831
guaguacucuuauucuaaa

SEQ ID NO: 1376091 - RNA, 19 nt, Artificial Sequence
  Description of Artificial Sequence: Synthetic oligonucleotide
  Antisense strand to SEQ ID NO: 1376090
uuuagaauaagaguacuac

SEQ ID NO: 1376092 - RNA, 19 nt, Artificial Sequence
  Description of Artificial Sequence: Synthetic oligonucleotide
  Sense strand starting at position 201 of SEQ ID NO: 1242831
uucuuaucaggaugauauu

SEQ ID NO: 1376093 - RNA, 19 nt, Artificial Sequence
  Description of Artificial Sequence: Synthetic oligonucleotide
  Antisense strand to SEQ ID NO: 1376092
aauaucauccugauaagaa

SEQ ID NO: 1376094 - RNA, 19 nt, Artificial Sequence
  Description of Artificial Sequence: Synthetic oligonucleotide
  Sense strand starting at position 210 of SEQ ID NO: 1242831
ggaugauauuccuuggcua

SEQ ID NO: 1376095 - RNA, 19 nt, Artificial Sequence
  Description of Artificial Sequence: Synthetic oligonucleotide
  Antisense strand to SEQ ID NO: 1376094
uagccaaggaauaucaucc

SEQ ID NO: 1376096 - RNA, 19 nt, Artificial Sequence
  Description of Artificial Sequence: Synthetic oligonucleotide
  Sense strand starting at position 212 of SEQ ID NO: 1242831
augauauuccuuggcuaac

SEQ ID NO: 1376097 - RNA, 19 nt, Artificial Sequence
  Description of Artificial Sequence: Synthetic oligonucleotide
  Antisense strand to SEQ ID NO: 1376096
guuagccaaggaauaucau

SEQ ID NO: 1376098 - RNA, 19 nt, Artificial Sequence
  Description of Artificial Sequence: Synthetic oligonucleotide
  Sense strand starting at position 213 of SEQ ID NO: 1242831
ugauauuccuuggcuaacu

SEQ ID NO: 1376099 - RNA, 19 nt, Artificial Sequence
  Description of Artificial Sequence: Synthetic oligonucleotide
  Antisense strand to SEQ ID NO: 1376098
aguuagccaaggaauauca

SEQ ID NO: 1376100 - RNA, 19 nt, Artificial Sequence
  Description of Artificial Sequence: Synthetic oligonucleotide
  Sense strand starting at position 327 of SEQ ID NO: 1242831
aguaauguucuagaguuau

SEQ ID NO: 1376101 - RNA, 19 nt, Artificial Sequence
  Description of Artificial Sequence: Synthetic oligonucleotide
  Antisense strand to SEQ ID NO: 1376100
auaacucuagaacauuacu

SEQ ID NO: 1376102 - RNA, 19 nt, Artificial Sequence
  Description of Artificial Sequence: Synthetic oligonucleotide
  Sense strand starting at position 364 of SEQ ID NO: 1242831
ucuauucguagggauucuu

SEQ ID NO: 1376103 - RNA, 19 nt, Artificial Sequence
  Description of Artificial Sequence: Synthetic oligonucleotide
  Antisense strand to SEQ ID NO: 1376102
aagaaucccuacgaauaga

SEQ ID NO: 1376104 - RNA, 19 nt, Artificial Sequence
  Description of Artificial Sequence: Synthetic oligonucleotide
  Sense strand starting at position 549 of SEQ ID NO: 1242831
gucuuugauggccaaguaa

SEQ ID NO: 1376105 - RNA, 19 nt, Artificial Sequence
  Description of Artificial Sequence: Synthetic oligonucleotide
  Antisense strand to SEQ ID NO: 1376104
uuacuuggccaucaaagac

SEQ ID NO: 1376106 - RNA, 19 nt, Artificial Sequence
  Description of Artificial Sequence: Synthetic oligonucleotide
  Sense strand starting at position 591 of SEQ ID NO: 1242831
auucgagauaaaugacugu

SEQ ID NO: 1376107 - RNA, 19 nt, Artificial Sequence
  Description of Artificial Sequence: Synthetic oligonucleotide
  Antisense strand to SEQ ID NO: 1376106
acagucauuuaucucgaau

SEQ ID NO: 1376108 - RNA, 19 nt, Artificial Sequence
  Description of Artificial Sequence: Synthetic oligonucleotide
  Sense strand starting at position 594 of SEQ ID NO: 1242831
cgagauaaaugacuguuaa

SEQ ID NO: 1376109 - RNA, 19 nt, Artificial Sequence
  Description of Artificial Sequence: Synthetic oligonucleotide
  Antisense strand to SEQ ID NO: 1376108
uuaacagucauuuaucucg

SEQ ID NO: 1376110 - RNA, 19 nt, Artificial Sequence
  Description of Artificial Sequence: Synthetic oligonucleotide
  Sense strand starting at position 710 of SEQ ID NO: 1242831
aaguaaaggugguccuagu

SEQ ID NO: 1376111 - RNA, 19 nt, Artificial Sequence
  Description of Artificial Sequence: Synthetic oligonucleotide
  Antisense strand to SEQ ID NO: 1376110
acuaggaccaccuuuacuu

SEQ ID NO: 1376112 - RNA, 19 nt, Artificial Sequence
  Description of Artificial Sequence: Synthetic oligonucleotide
  Sense strand starting at position 860 of SEQ ID NO: 1242831
aggcucgugaauuauauaa

SEQ ID NO: 1376113 - RNA, 19 nt, Artificial Sequence
  Description of Artificial Sequence: Synthetic oligonucleotide
  Antisense strand to SEQ ID NO: 1376112
uuauauaauucacgagccu

SEQ ID NO: 1376114 - RNA, 19 nt, Artificial Sequence
  Description of Artificial Sequence: Synthetic oligonucleotide
  Sense strand starting at position 1139 of SEQ ID NO: 1242831
gguacaggacauuagcauu

SEQ ID NO: 1376115 - RNA, 19 nt, Artificial Sequence
  Description of Artificial Sequence: Synthetic oligonucleotide
  Antisense strand to SEQ ID NO: 1376114
aaugcuaauguccuguacc

SEQ ID NO: 1376116 - RNA, 19 nt, Artificial Sequence
  Description of Artificial Sequence: Synthetic oligonucleotide
  Sense strand starting at position 1152 of SEQ ID NO: 1242831
agcauuaccugcccaaaga

SEQ ID NO: 1376117 - RNA, 19 nt, Artificial Sequence
  Description of Artificial Sequence: Synthetic oligonucleotide
  Antisense strand to SEQ ID NO: 1376116
ucuuugggcagguaaugcu

SEQ ID NO: 1376118 - RNA, 19 nt, Artificial Sequence
  Description of Artificial Sequence: Synthetic oligonucleotide
  Sense strand starting at position 1153 of SEQ ID NO: 1242831
gcauuaccugcccaaagaa

SEQ ID NO: 1376119 - RNA, 19 nt, Artificial Sequence
  Description of Artificial Sequence: Synthetic oligonucleotide
  Antisense strand to SEQ ID NO: 1376118
uucuuugggcagguaaugc

SEQ ID NO: 1376120 - RNA, 19 nt, Artificial Sequence
  Description of Artificial Sequence: Synthetic oligonucleotide
  Sense strand starting at position 2063 of SEQ ID NO: 1242831
ggucgaaguauugaagagu

SEQ ID NO: 1376121 - RNA, 19 nt, Artificial Sequence
  Description of Artificial Sequence: Synthetic oligonucleotide
  Antisense strand to SEQ ID NO: 1376120
acucuucaauacuucgacc

SEQ ID NO: 1376122 - RNA, 19 nt, Artificial Sequence
  Description of Artificial Sequence: Synthetic oligonucleotide
  Sense strand starting at position 2206 of SEQ ID NO: 1242831
gcguguuuaaccucgcacu

SEQ ID NO: 1376123 - RNA, 19 nt, Artificial Sequence
  Description of Artificial Sequence: Synthetic oligonucleotide
  Antisense strand to SEQ ID NO: 1376122
agugcgagguuaaacacgc

SEQ ID NO: 1376124 - RNA, 19 nt, Artificial Sequence
  Description of Artificial Sequence: Synthetic oligonucleotide
  Sense strand starting at position 2257 of SEQ ID NO: 1242831
agcuucguuagcuucgaaa

SEQ ID NO: 1376125 - RNA, 19 nt, Artificial Sequence
  Description of Artificial Sequence: Synthetic oligonucleotide
  Antisense strand to SEQ ID NO: 1376124
uuucgaagcuaacgaagcu

SEQ ID NO: 1376126 - RNA, 19 nt, Artificial Sequence
  Description of Artificial Sequence: Synthetic oligonucleotide
  Sense strand starting at position 2313 of SEQ ID NO: 1242831
cgcgcagaugucguuauua

SEQ ID NO: 1376127 - RNA, 19 nt, Artificial Sequence
  Description of Artificial Sequence: Synthetic oligonucleotide
  Antisense strand to SEQ ID NO: 1376126
uaauaacgacaucugcgcg

SEQ ID NO: 1376128 - RNA, 19 nt, Artificial Sequence
  Description of Artificial Sequence: Synthetic oligonucleotide
  Sense strand starting at position 2553 of SEQ ID NO: 1242831
ucauaaauacccuaagugu

SEQ ID NO: 1376129 - RNA, 19 nt, Artificial Sequence
  Description of Artificial Sequence: Synthetic oligonucleotide
  Antisense strand to SEQ ID NO: 1376128
acacuuaggguauuuauga

SEQ ID NO: 1376130 - RNA, 19 nt, Artificial Sequence
  Description of Artificial Sequence: Synthetic oligonucleotide
  Sense strand starting at position 2559 of SEQ ID NO: 1242831
auacccuaaguguauauau

SEQ ID NO: 1376131 - RNA, 19 nt, Artificial Sequence
  Description of Artificial Sequence: Synthetic oligonucleotide
  Antisense strand to SEQ ID NO: 1376130
auauauacacuuaggguau

SEQ ID NO: 1376132 - RNA, 19 nt, Artificial Sequence
  Description of Artificial Sequence: Synthetic oligonucleotide
  Sense strand starting at position 2602 of SEQ ID NO: 1242831
aaggcauaacgauguaauc

SEQ ID NO: 1376133 - RNA, 19 nt, Artificial Sequence
  Description of Artificial Sequence: Synthetic oligonucleotide
  Antisense strand to SEQ ID NO: 1376132
gauuacaucguuaugccuu

SEQ ID NO: 1376134 - RNA, 19 nt, Artificial Sequence
  Description of Artificial Sequence: Synthetic oligonucleotide
  Sense strand starting at position 2604 of SEQ ID NO: 1242831
ggcauaacgauguaaucuc

SEQ ID NO: 1376135 - RNA, 19 nt, Artificial Sequence
  Description of Artificial Sequence: Synthetic oligonucleotide
  Antisense strand to SEQ ID NO: 1376134
gagauuacaucguuaugcc

SEQ ID NO: 1376136 - RNA, 19 nt, Artificial Sequence
  Description of Artificial Sequence: Synthetic oligonucleotide
  Sense strand starting at position 2790 of SEQ ID NO: 1242831
uagcuaacaccagagguuu

SEQ ID NO: 1376137 - RNA, 19 nt, Artificial Sequence
  Description of Artificial Sequence: Synthetic oligonucleotide
  Antisense strand to SEQ ID NO: 1376136
aaaccucugguguuagcua

SEQ ID NO: 1376138 - RNA, 19 nt, Artificial Sequence
  Description of Artificial Sequence: Synthetic oligonucleotide
  Sense strand starting at position 2801 of SEQ ID NO: 1242831
agagguuuagaugguguaa

SEQ ID NO: 1376139 - RNA, 19 nt, Artificial Sequence
  Description of Artificial Sequence: Synthetic oligonucleotide
  Antisense strand to SEQ ID NO: 1376138
uuacaccaucuaaaccucu

SEQ ID NO: 1376140 - RNA, 19 nt, Artificial Sequence
  Description of Artificial Sequence: Synthetic oligonucleotide
  Sense strand starting at position 2858 of SEQ ID NO: 1242831
uuuaguuucgcucagaaag

SEQ ID NO: 1376141 - RNA, 19 nt, Artificial Sequence
  Description of Artificial Sequence: Synthetic oligonucleotide
  Antisense strand to SEQ ID NO: 1376140
cuuucugagcgaaacuaaa

SEQ ID NO: 1376142 - RNA, 19 nt, Artificial Sequence
  Description of Artificial Sequence: Synthetic oligonucleotide
  Sense strand starting at position 2994 of SEQ ID NO: 1242831
uucugaucccuuggaaccu

SEQ ID NO: 1376143 - RNA, 19 nt, Artificial Sequence
  Description of Artificial Sequence: Synthetic oligonucleotide
  Antisense strand to SEQ ID NO: 1376142
agguuccaagggaucagaa

SEQ ID NO: 1376144 - RNA, 19 nt, Artificial Sequence
  Description of Artificial Sequence: Synthetic oligonucleotide
  Sense strand starting at position 3051 of SEQ ID NO: 1242831
aggauaauguuucuuccuu

SEQ ID NO: 1376145 - RNA, 19 nt, Artificial Sequence
  Description of Artificial Sequence: Synthetic oligonucleotide
  Antisense strand to SEQ ID NO: 1376144
aaggaagaaacauuauccu

SEQ ID NO: 1376146 - RNA, 19 nt, Artificial Sequence
  Description of Artificial Sequence: Synthetic oligonucleotide
  Sense strand starting at position 3052 of SEQ ID NO: 1242831
ggauaauguuucuuccuug

SEQ ID NO: 1376147 - RNA, 19 nt, Artificial Sequence
  Description of Artificial Sequence: Synthetic oligonucleotide
  Antisense strand to SEQ ID NO: 1376146
caaggaagaaacauuaucc

SEQ ID NO: 1376148 - RNA, 19 nt, Artificial Sequence
  Description of Artificial Sequence: Synthetic oligonucleotide
  Sense strand starting at position 3098 of SEQ ID NO: 1242831
gccugaauuccaugacaag

SEQ ID NO: 1376149 - RNA, 19 nt, Artificial Sequence
  Description of Artificial Sequence: Synthetic oligonucleotide
  Antisense strand to SEQ ID NO: 1376148
cuugucauggaauucaggc

SEQ ID NO: 1376150 - RNA, 19 nt, Artificial Sequence
  Description of Artificial Sequence: Synthetic oligonucleotide
  Sense strand starting at position 3140 of SEQ ID NO: 1242831
cccuaagaguaaucaguga

SEQ ID NO: 1376151 - RNA, 19 nt, Artificial Sequence
  Description of Artificial Sequence: Synthetic oligonucleotide
  Antisense strand to SEQ ID NO: 1376150
ucacugauuacucuuaggg

SEQ ID NO: 1376152 - RNA, 19 nt, Artificial Sequence
  Description of Artificial Sequence: Synthetic oligonucleotide
  Sense strand starting at position 3154 of SEQ ID NO: 1242831
agugauaagucauuaauag

SEQ ID NO: 1376153 - RNA, 19 nt, Artificial Sequence
  Description of Artificial Sequence: Synthetic oligonucleotide
  Antisense strand to SEQ ID NO: 1376152
cuauuaaugacuuaucacu

SEQ ID NO: 1376154 - RNA, 19 nt, Artificial Sequence
  Description of Artificial Sequence: Synthetic oligonucleotide
  Sense strand starting at position 3155 of SEQ ID NO: 1242831
gugauaagucauuaauagu

SEQ ID NO: 1376155 - RNA, 19 nt, Artificial Sequence
  Description of Artificial Sequence: Synthetic oligonucleotide
  Antisense strand to SEQ ID NO: 1376154
acuauuaaugacuuaucac

SEQ ID NO: 1376156 - RNA, 19 nt, Artificial Sequence
  Description of Artificial Sequence: Synthetic oligonucleotide
  Sense strand starting at position 3161 of SEQ ID NO: 1242831
agucauuaauaguccuuaa

SEQ ID NO: 1376157 - RNA, 19 nt, Artificial Sequence
  Description of Artificial Sequence: Synthetic oligonucleotide
  Antisense strand to SEQ ID NO: 1376156
uuaaggacuauuaaugacu

SEQ ID NO: 1376158 - RNA, 19 nt, Artificial Sequence
  Description of Artificial Sequence: Synthetic oligonucleotide
  Sense strand starting at position 3362 of SEQ ID NO: 1242831
ucguuaugucgcucaggcu

SEQ ID NO: 1376159 - RNA, 19 nt, Artificial Sequence
  Description of Artificial Sequence: Synthetic oligonucleotide
  Antisense strand to SEQ ID NO: 1376158
agccugagcgacauaacga

SEQ ID NO: 1376160 - RNA, 19 nt, Artificial Sequence
  Description of Artificial Sequence: Synthetic oligonucleotide
  Sense strand starting at position 3633 of SEQ ID NO: 1242831
accgccauugccguguaaa

SEQ ID NO: 1376161 - RNA, 19 nt, Artificial Sequence
  Description of Artificial Sequence: Synthetic oligonucleotide
  Antisense strand to SEQ ID NO: 1376160
uuuacacggcaauggcggu

SEQ ID NO: 1376162 - RNA, 19 nt, Artificial Sequence
  Description of Artificial Sequence: Synthetic oligonucleotide
  Sense strand starting at position 3635 of SEQ ID NO: 1242831
cgccauugccguguaaaug

SEQ ID NO: 1376163 - RNA, 19 nt, Artificial Sequence
  Description of Artificial Sequence: Synthetic oligonucleotide
  Antisense strand to SEQ ID NO: 1376162
cauuuacacggcaauggcg

SEQ ID NO: 1376164 - RNA, 19 nt, Artificial Sequence
  Description of Artificial Sequence: Synthetic oligonucleotide
  Sense strand starting at position 3731 of SEQ ID NO: 1242831
uaaaguuauggcgagguua

SEQ ID NO: 1376165 - RNA, 19 nt, Artificial Sequence
  Description of Artificial Sequence: Synthetic oligonucleotide
  Antisense strand to SEQ ID NO: 1376164
uaaccucgccauaacuuua

SEQ ID NO: 1376166 - RNA, 19 nt, Artificial Sequence
  Description of Artificial Sequence: Synthetic oligonucleotide
  Sense strand starting at position 3774 of SEQ ID NO: 1242831
ucugccauuuaggaacaau

SEQ ID NO: 1376167 - RNA, 19 nt, Artificial Sequence
  Description of Artificial Sequence: Synthetic oligonucleotide
  Antisense strand to SEQ ID NO: 1376166
auuguuccuaaauggcaga

SEQ ID NO: 1376168 - RNA, 19 nt, Artificial Sequence
  Description of Artificial Sequence: Synthetic oligonucleotide
  Sense strand starting at position 3962 of SEQ ID NO: 1242831
gccucaaguccugaucacu

SEQ ID NO: 1376169 - RNA, 19 nt, Artificial Sequence
  Description of Artificial Sequence: Synthetic oligonucleotide
  Antisense strand to SEQ ID NO: 1376168
agugaucaggacuugaggc

SEQ ID NO: 1376170 - RNA, 19 nt, Artificial Sequence
  Description of Artificial Sequence: Synthetic oligonucleotide
  Sense strand starting at position 213 of SEQ ID NO: 1242832
gcauacaauuggccucaau

SEQ ID NO: 1376171 - RNA, 19 nt, Artificial Sequence
  Description of Artificial Sequence: Synthetic oligonucleotide
  Antisense strand to SEQ ID NO: 1376170
auugaggccaauuguaugc

SEQ ID NO: 1376172 - RNA, 19 nt, Artificial Sequence
  Description of Artificial Sequence: Synthetic oligonucleotide
  Sense strand starting at position 339 of SEQ ID NO: 1242832
cuuuacauugcaugaagua

SEQ ID NO: 1376173 - RNA, 19 nt, Artificial Sequence
  Description of Artificial Sequence: Synthetic oligonucleotide
  Antisense strand to SEQ ID NO: 1376172
uacuucaugcaauguaaag

SEQ ID NO: 1376174 - RNA, 19 nt, Artificial Sequence
  Description of Artificial Sequence: Synthetic oligonucleotide
  Sense strand starting at position 340 of SEQ ID NO: 1242832
uuuacauugcaugaaguaa

SEQ ID NO: 1376175 - RNA, 19 nt, Artificial Sequence
  Description of Artificial Sequence: Synthetic oligonucleotide
  Antisense strand to SEQ ID NO: 1376174
uuacuucaugcaauguaaa

SEQ ID NO: 1376176 - RNA, 19 nt, Artificial Sequence
  Description of Artificial Sequence: Synthetic oligonucleotide
  Sense strand starting at position 418 of SEQ ID NO: 1242832
acaggaaguuaguugguau

SEQ ID NO: 1376177 - RNA, 19 nt, Artificial Sequence
  Description of Artificial Sequence: Synthetic oligonucleotide
  Antisense strand to SEQ ID NO: 1376176
auaccaacuaacuuccugu

SEQ ID NO: 1376178 - RNA, 19 nt, Artificial Sequence
  Description of Artificial Sequence: Synthetic oligonucleotide
  Sense strand starting at position 419 of SEQ ID NO: 1242832
caggaaguuaguugguaua

SEQ ID NO: 1376179 - RNA, 19 nt, Artificial Sequence
  Description of Artificial Sequence: Synthetic oligonucleotide
  Antisense strand to SEQ ID NO: 1376178
uauaccaacuaacuuccug

SEQ ID NO: 1376180 - RNA, 19 nt, Artificial Sequence
  Description of Artificial Sequence: Synthetic oligonucleotide
  Sense strand starting at position 421 of SEQ ID NO: 1242832
ggaaguuaguugguauaaa

SEQ ID NO: 1376181 - RNA, 19 nt, Artificial Sequence
  Description of Artificial Sequence: Synthetic oligonucleotide
  Antisense strand to SEQ ID NO: 1376180
uuuauaccaacuaacuucc

SEQ ID NO: 1376182 - RNA, 19 nt, Artificial Sequence
  Description of Artificial Sequence: Synthetic oligonucleotide
  Sense strand starting at position 432 of SEQ ID NO: 1242832
gguauaaauuaucuuguca

SEQ ID NO: 1376183 - RNA, 19 nt, Artificial Sequence
  Description of Artificial Sequence: Synthetic oligonucleotide
  Antisense strand to SEQ ID NO: 1376182
ugacaagauaauuuauacc

SEQ ID NO: 1376184 - RNA, 19 nt, Artificial Sequence
  Description of Artificial Sequence: Synthetic oligonucleotide
  Sense strand starting at position 984 of SEQ ID NO: 1242832
uuauaagugguuuaacauc

SEQ ID NO: 1376185 - RNA, 19 nt, Artificial Sequence
  Description of Artificial Sequence: Synthetic oligonucleotide
  Antisense strand to SEQ ID NO: 1376184
gauguuaaaccacuuauaa

SEQ ID NO: 1376186 - RNA, 19 nt, Artificial Sequence
  Description of Artificial Sequence: Synthetic oligonucleotide
  Sense strand starting at position 1025 of SEQ ID NO: 1242832
auggaauaacagugccuau

SEQ ID NO: 1376187 - RNA, 19 nt, Artificial Sequence
  Description of Artificial Sequence: Synthetic oligonucleotide
  Antisense strand to SEQ ID NO: 1376186
auaggcacuguuauuccau

SEQ ID NO: 1376188 - RNA, 19 nt, Artificial Sequence
  Description of Artificial Sequence: Synthetic oligonucleotide
  Sense strand starting at position 1036 of SEQ ID NO: 1242832
gugccuaucauguggaaau

SEQ ID NO: 1376189 - RNA, 19 nt, Artificial Sequence
  Description of Artificial Sequence: Synthetic oligonucleotide
  Antisense strand to SEQ ID NO: 1376188
auuuccacaugauaggcac

SEQ ID NO: 1376190 - RNA, 19 nt, Artificial Sequence
  Description of Artificial Sequence: Synthetic oligonucleotide
  Sense strand starting at position 1038 of SEQ ID NO: 1242832
gccuaucauguggaaaugu

SEQ ID NO: 1376191 - RNA, 19 nt, Artificial Sequence
  Description of Artificial Sequence: Synthetic oligonucleotide
  Antisense strand to SEQ ID NO: 1376190
acauuuccacaugauaggc

SEQ ID NO: 1376192 - RNA, 19 nt, Artificial Sequence
  Description of Artificial Sequence: Synthetic oligonucleotide
  Sense strand starting at position 1096 of SEQ ID NO: 1242832
ucaauaaaugucugacugu

SEQ ID NO: 1376193 - RNA, 19 nt, Artificial Sequence
  Description of Artificial Sequence: Synthetic oligonucleotide
  Antisense strand to SEQ ID NO: 1376192
acagucagacauuuauuga

SEQ ID NO: 1376194 - RNA, 19 nt, Artificial Sequence
  Description of Artificial Sequence: Synthetic oligonucleotide
  Sense strand starting at position 1099 of SEQ ID NO: 1242832
auaaaugucugacuguguu

SEQ ID NO: 1376195 - RNA, 19 nt, Artificial Sequence
  Description of Artificial Sequence: Synthetic oligonucleotide
  Antisense strand to SEQ ID NO: 1376194
aacacagucagacauuuau

SEQ ID NO: 1376196 - RNA, 19 nt, Artificial Sequence
  Description of Artificial Sequence: Synthetic oligonucleotide
  Sense strand starting at position 1107 of SEQ ID NO: 1242832
cugacuguguuauuauuac

SEQ ID NO: 1376197 - RNA, 19 nt, Artificial Sequence
  Description of Artificial Sequence: Synthetic oligonucleotide
  Antisense strand to SEQ ID NO: 1376196
guaauaauaacacagucag

SEQ ID NO: 1376198 - RNA, 19 nt, Artificial Sequence
  Description of Artificial Sequence: Synthetic oligonucleotide
  Sense strand starting at position 1187 of SEQ ID NO: 1242832
guagaaagagcguaaacua

SEQ ID NO: 1376199 - RNA, 19 nt, Artificial Sequence
  Description of Artificial Sequence: Synthetic oligonucleotide
  Antisense strand to SEQ ID NO: 1376198
uaguuuacgcucuuucuac

SEQ ID NO: 1376200 - RNA, 19 nt, Artificial Sequence
  Description of Artificial Sequence: Synthetic oligonucleotide
  Sense strand starting at position 1194 of SEQ ID NO: 1242832
gagcguaaacuaugacaug

SEQ ID NO: 1376201 - RNA, 19 nt, Artificial Sequence
  Description of Artificial Sequence: Synthetic oligonucleotide
  Antisense strand to SEQ ID NO: 1376200
caugucauaguuuacgcuc

SEQ ID NO: 1376202 - RNA, 19 nt, Artificial Sequence
  Description of Artificial Sequence: Synthetic oligonucleotide
  Sense strand starting at position 1208 of SEQ ID NO: 1242832
acaugacugcuuuggguuu

SEQ ID NO: 1376203 - RNA, 19 nt, Artificial Sequence
  Description of Artificial Sequence: Synthetic oligonucleotide
  Antisense strand to SEQ ID NO: 1376202
aaacccaaagcagucaugu

SEQ ID NO: 1376204 - RNA, 19 nt, Artificial Sequence
  Description of Artificial Sequence: Synthetic oligonucleotide
  Sense strand starting at position 1214 of SEQ ID NO: 1242832
cugcuuuggguuugagaca

SEQ ID NO: 1376205 - RNA, 19 nt, Artificial Sequence
  Description of Artificial Sequence: Synthetic oligonucleotide
  Antisense strand to SEQ ID NO: 1376204
ugucucaaacccaaagcag

SEQ ID NO: 1376206 - RNA, 19 nt, Artificial Sequence
  Description of Artificial Sequence: Synthetic oligonucleotide
  Sense strand starting at position 1226 of SEQ ID NO: 1242832
ugagacaacucuucuaguc

SEQ ID NO: 1376207 - RNA, 19 nt, Artificial Sequence
  Description of Artificial Sequence: Synthetic oligonucleotide
  Antisense strand to SEQ ID NO: 1376206
gacuagaagaguugucuca

SEQ ID NO: 1376208 - RNA, 19 nt, Artificial Sequence
  Description of Artificial Sequence: Synthetic oligonucleotide
  Sense strand starting at position 1447 of SEQ ID NO: 1242832
cagaaauguugacagagag

SEQ ID NO: 1376209 - RNA, 19 nt, Artificial Sequence
  Description of Artificial Sequence: Synthetic oligonucleotide
  Antisense strand to SEQ ID NO: 1376208
cucucugucaacauuucug

SEQ ID NO: 1376210 - RNA, 19 nt, Artificial Sequence
  Description of Artificial Sequence: Synthetic oligonucleotide
  Sense strand starting at position 2089 of SEQ ID NO: 1242832
ugaagaguguuguuaggua

SEQ ID NO: 1376211 - RNA, 19 nt, Artificial Sequence
  Description of Artificial Sequence: Synthetic oligonucleotide
  Antisense strand to SEQ ID NO: 1376210
uaccuaacaacacucuuca

SEQ ID NO: 1376212 - RNA, 19 nt, Artificial Sequence
  Description of Artificial Sequence: Synthetic oligonucleotide
  Sense strand starting at position 2093 of SEQ ID NO: 1242832
gaguguuguuagguagacu

SEQ ID NO: 1376213 - RNA, 19 nt, Artificial Sequence
  Description of Artificial Sequence: Synthetic oligonucleotide
  Antisense strand to SEQ ID NO: 1376212
agucuaccuaacaacacuc

SEQ ID NO: 1376214 - RNA, 19 nt, Artificial Sequence
  Description of Artificial Sequence: Synthetic oligonucleotide
  Sense strand starting at position 2145 of SEQ ID NO: 1242832
aaccaauggguguacguua

SEQ ID NO: 1376215 - RNA, 19 nt, Artificial Sequence
  Description of Artificial Sequence: Synthetic oligonucleotide
  Antisense strand to SEQ ID NO: 1376214
uaacguacacccauugguu

SEQ ID NO: 1376216 - RNA, 19 nt, Artificial Sequence
  Description of Artificial Sequence: Synthetic oligonucleotide
  Sense strand starting at position 2158 of SEQ ID NO: 1242832
acguuaucgguguaaggac

SEQ ID NO: 1376217 - RNA, 19 nt, Artificial Sequence
  Description of Artificial Sequence: Synthetic oligonucleotide
  Antisense strand to SEQ ID NO: 1376216
guccuuacaccgauaacgu

SEQ ID NO: 1376218 - RNA, 19 nt, Artificial Sequence
  Description of Artificial Sequence: Synthetic oligonucleotide
  Sense strand starting at position 2287 of SEQ ID NO: 1242832
cgugguuuccuccugcuga

SEQ ID NO: 1376219 - RNA, 19 nt, Artificial Sequence
  Description of Artificial Sequence: Synthetic oligonucleotide
  Antisense strand to SEQ ID NO: 1376218
ucagcaggaggaaaccacg

SEQ ID NO: 1376220 - RNA, 19 nt, Artificial Sequence
  Description of Artificial Sequence: Synthetic oligonucleotide
  Sense strand starting at position 2778 of SEQ ID NO: 1242832
gcguguuagccuucuccaa

SEQ ID NO: 1376221 - RNA, 19 nt, Artificial Sequence
  Description of Artificial Sequence: Synthetic oligonucleotide
  Antisense strand to SEQ ID NO: 1376220
uuggagaaggcuaacacgc

SEQ ID NO: 1376222 - RNA, 19 nt, Artificial Sequence
  Description of Artificial Sequence: Synthetic oligonucleotide
  Sense strand starting at position 2879 of SEQ ID NO: 1242832
ugucaugcauguucuagaa

SEQ ID NO: 1376223 - RNA, 19 nt, Artificial Sequence
  Description of Artificial Sequence: Synthetic oligonucleotide
  Antisense strand to SEQ ID NO: 1376222
uucuagaacaugcaugaca

SEQ ID NO: 1376224 - RNA, 19 nt, Artificial Sequence
  Description of Artificial Sequence: Synthetic oligonucleotide
  Sense strand starting at position 2883 of SEQ ID NO: 1242832
augcauguucuagaauauc

SEQ ID NO: 1376225 - RNA, 19 nt, Artificial Sequence
  Description of Artificial Sequence: Synthetic oligonucleotide
  Antisense strand to SEQ ID NO: 1376224
gauauucuagaacaugcau

SEQ ID NO: 1376226 - RNA, 19 nt, Artificial Sequence
  Description of Artificial Sequence: Synthetic oligonucleotide
  Sense strand starting at position 2907 of SEQ ID NO: 1242832
uacagugaugccugauaca

SEQ ID NO: 1376227 - RNA, 19 nt, Artificial Sequence
  Description of Artificial Sequence: Synthetic oligonucleotide
  Antisense strand to SEQ ID NO: 1376226
uguaucaggcaucacugua

SEQ ID NO: 1376228 - RNA, 19 nt, Artificial Sequence
  Description of Artificial Sequence: Synthetic oligonucleotide
  Sense strand starting at position 2959 of SEQ ID NO: 1242832
gagagaggcuccuuagcaa

SEQ ID NO: 1376229 - RNA, 19 nt, Artificial Sequence
  Description of Artificial Sequence: Synthetic oligonucleotide
  Antisense strand to SEQ ID NO: 1376228
uugcuaaggagccucucuc

SEQ ID NO: 1376230 - RNA, 19 nt, Artificial Sequence
  Description of Artificial Sequence: Synthetic oligonucleotide
  Sense strand starting at position 3001 of SEQ ID NO: 1242832
aggaauaagcacuguuaca

SEQ ID NO: 1376231 - RNA, 19 nt, Artificial Sequence
  Description of Artificial Sequence: Synthetic oligonucleotide
  Antisense strand to SEQ ID NO: 1376230
uguaacagugcuuauuccu

SEQ ID NO: 1376232 - RNA, 19 nt, Artificial Sequence
  Description of Artificial Sequence: Synthetic oligonucleotide
  Sense strand starting at position 3082 of SEQ ID NO: 1242832
gggcuucuaagagguaaga

SEQ ID NO: 1376233 - RNA, 19 nt, Artificial Sequence
  Description of Artificial Sequence: Synthetic oligonucleotide
  Antisense strand to SEQ ID NO: 1376232
ucuuaccucuuagaagccc

SEQ ID NO: 1376234 - RNA, 19 nt, Artificial Sequence
  Description of Artificial Sequence: Synthetic oligonucleotide
  Sense strand starting at position 3084 of SEQ ID NO: 1242832
gcuucuaagagguaagauu

SEQ ID NO: 1376235 - RNA, 19 nt, Artificial Sequence
  Description of Artificial Sequence: Synthetic oligonucleotide
  Antisense strand to SEQ ID NO: 1376234
aaucuuaccucuuagaagc

SEQ ID NO: 1376236 - RNA, 19 nt, Artificial Sequence
  Description of Artificial Sequence: Synthetic oligonucleotide
  Sense strand starting at position 3122 of SEQ ID NO: 1242832
aagugugucagguagggau

SEQ ID NO: 1376237 - RNA, 19 nt, Artificial Sequence
  Description of Artificial Sequence: Synthetic oligonucleotide
  Antisense strand to SEQ ID NO: 1376236
aucccuaccugacacacuu

SEQ ID NO: 1376238 - RNA, 19 nt, Artificial Sequence
  Description of Artificial Sequence: Synthetic oligonucleotide
  Sense strand starting at position 3184 of SEQ ID NO: 1242832
auaugaaaguguuugccuu

SEQ ID NO: 1376239 - RNA, 19 nt, Artificial Sequence
  Description of Artificial Sequence: Synthetic oligonucleotide
  Antisense strand to SEQ ID NO: 1376238
aaggcaaacacuuucauau

SEQ ID NO: 1376240 - RNA, 19 nt, Artificial Sequence
  Description of Artificial Sequence: Synthetic oligonucleotide
  Sense strand starting at position 3214 of SEQ ID NO: 1242832
cccuaaauuuaagaguaug

SEQ ID NO: 1376241 - RNA, 19 nt, Artificial Sequence
  Description of Artificial Sequence: Synthetic oligonucleotide
  Antisense strand to SEQ ID NO: 1376240
cauacucuuaaauuuaggg

SEQ ID NO: 1376242 - RNA, 19 nt, Artificial Sequence
  Description of Artificial Sequence: Synthetic oligonucleotide
  Sense strand starting at position 3867 of SEQ ID NO: 1242832
gagaccugaccugguuagu

SEQ ID NO: 1376243 - RNA, 19 nt, Artificial Sequence
  Description of Artificial Sequence: Synthetic oligonucleotide
  Antisense strand to SEQ ID NO: 1376242
acuaaccaggucaggucuc

SEQ ID NO: 1376244 - RNA, 19 nt, Artificial Sequence
  Description of Artificial Sequence: Synthetic oligonucleotide
  Sense strand starting at position 3953 of SEQ ID NO: 1242832
ugaggauucuuguuuggau

SEQ ID NO: 1376245 - RNA, 19 nt, Artificial Sequence
  Description of Artificial Sequence: Synthetic oligonucleotide
  Antisense strand to SEQ ID NO: 1376244
auccaaacaagaauccuca

SEQ ID NO: 1376246 - RNA, 19 nt, Artificial Sequence
  Description of Artificial Sequence: Synthetic oligonucleotide
  Sense strand starting at position 3954 of SEQ ID NO: 1242832
gaggauucuuguuuggauu

SEQ ID NO: 1376247 - RNA, 19 nt, Artificial Sequence
  Description of Artificial Sequence: Synthetic oligonucleotide
  Antisense strand to SEQ ID NO: 1376246
aauccaaacaagaauccuc

SEQ ID NO: 1376248 - RNA, 19 nt, Artificial Sequence
  Description of Artificial Sequence: Synthetic oligonucleotide
  Sense strand starting at position 3957 of SEQ ID NO: 1242832
gauucuuguuuggauuuaa

SEQ ID NO: 1376249 - RNA, 19 nt, Artificial Sequence
  Description of Artificial Sequence: Synthetic oligonucleotide
  Antisense strand to SEQ ID NO: 1376248
uuaaauccaaacaagaauc

SEQ ID NO: 1376250 - RNA, 19 nt, Artificial Sequence
  Description of Artificial Sequence: Synthetic oligonucleotide
  Sense strand starting at position 2057 of SEQ ID NO: 1242833
gcgggauucagguaugaga

SEQ ID NO: 1376251 - RNA, 19 nt, Artificial Sequence
  Description of Artificial Sequence: Synthetic oligonucleotide
  Antisense strand to SEQ ID NO: 1376250
ucucauaccugaaucccgc

SEQ ID NO: 1376252 - RNA, 19 nt, Artificial Sequence
  Description of Artificial Sequence: Synthetic oligonucleotide
  Sense strand starting at position 2060 of SEQ ID NO: 1242833
ggauucagguaugagaacu

SEQ ID NO: 1376253 - RNA, 19 nt, Artificial Sequence
  Description of Artificial Sequence: Synthetic oligonucleotide
  Antisense strand to SEQ ID NO: 1376252
aguucucauaccugaaucc

SEQ ID NO: 1376254 - RNA, 19 nt, Artificial Sequence
  Description of Artificial Sequence: Synthetic oligonucleotide
  Sense strand starting at position 2142 of SEQ ID NO: 1242833
ggucgaaagucaggaaagu

SEQ ID NO: 1376255 - RNA, 19 nt, Artificial Sequence
  Description of Artificial Sequence: Synthetic oligonucleotide
  Antisense strand to SEQ ID NO: 1376254
acuuuccugacuuucgacc

SEQ ID NO: 1376256 - RNA, 19 nt, Artificial Sequence
  Description of Artificial Sequence: Synthetic oligonucleotide
  Sense strand starting at position 2151 of SEQ ID NO: 1242833
ucaggaaagugcucggucu

SEQ ID NO: 1376257 - RNA, 19 nt, Artificial Sequence
  Description of Artificial Sequence: Synthetic oligonucleotide
  Antisense strand to SEQ ID NO: 1376256
agaccgagcacuuuccuga

SEQ ID NO: 1376258 - RNA, 19 nt, Artificial Sequence
  Description of Artificial Sequence: Synthetic oligonucleotide
  Sense strand starting at position 2327 of SEQ ID NO: 1242833
cggcgucuaccagauggaa

SEQ ID NO: 1376259 - RNA, 19 nt, Artificial Sequence
  Description of Artificial Sequence: Synthetic oligonucleotide
  Antisense strand to SEQ ID NO: 1376258
uuccaucugguagacgccg

SEQ ID NO: 1376260 - RNA, 19 nt, Artificial Sequence
  Description of Artificial Sequence: Synthetic oligonucleotide
  Sense strand starting at position 2329 of SEQ ID NO: 1242833
gcgucuaccagauggaaac

SEQ ID NO: 1376261 - RNA, 19 nt, Artificial Sequence
  Description of Artificial Sequence: Synthetic oligonucleotide
  Antisense strand to SEQ ID NO: 1376260
guuuccaucugguagacgc

SEQ ID NO: 1376262 - RNA, 19 nt, Artificial Sequence
  Description of Artificial Sequence: Synthetic oligonucleotide
  Sense strand starting at position 2486 of SEQ ID NO: 1242833
gaguauucgguguagggac

SEQ ID NO: 1376263 - RNA, 19 nt, Artificial Sequence
  Description of Artificial Sequence: Synthetic oligonucleotide
  Antisense strand to SEQ ID NO: 1376262
gucccuacaccgaauacuc

SEQ ID NO: 1376264 - RNA, 19 nt, Artificial Sequence
  Description of Artificial Sequence: Synthetic oligonucleotide
  Sense strand starting at position 2501 of SEQ ID NO: 1242833
ggacuaguccucugccuuu

SEQ ID NO: 1376265 - RNA, 19 nt, Artificial Sequence
  Description of Artificial Sequence: Synthetic oligonucleotide
  Antisense strand to SEQ ID NO: 1376264
aaaggcagaggacuagucc

SEQ ID NO: 1376266 - RNA, 19 nt, Artificial Sequence
  Description of Artificial Sequence: Synthetic oligonucleotide
  Sense strand starting at position 2830 of SEQ ID NO: 1242833
gggccucgcuuguacaaau

SEQ ID NO: 1376267 - RNA, 19 nt, Artificial Sequence
  Description of Artificial Sequence: Synthetic oligonucleotide
  Antisense strand to SEQ ID NO: 1376266
auuuguacaagcgaggccc

SEQ ID NO: 1376268 - RNA, 19 nt, Artificial Sequence
  Description of Artificial Sequence: Synthetic oligonucleotide
  Sense strand starting at position 2912 of SEQ ID NO: 1242833
ggaggagccuggucugaca

SEQ ID NO: 1376269 - RNA, 19 nt, Artificial Sequence
  Description of Artificial Sequence: Synthetic oligonucleotide
  Antisense strand to SEQ ID NO: 1376268
ugucagaccaggcuccucc

SEQ ID NO: 1376270 - RNA, 19 nt, Artificial Sequence
  Description of Artificial Sequence: Synthetic oligonucleotide
  Sense strand starting at position 2976 of SEQ ID NO: 1242833
cucuaugucuuccucugau

SEQ ID NO: 1376271 - RNA, 19 nt, Artificial Sequence
  Description of Artificial Sequence: Synthetic oligonucleotide
  Antisense strand to SEQ ID NO: 1376270
aucagaggaagacauagag

SEQ ID NO: 1376272 - RNA, 19 nt, Artificial Sequence
  Description of Artificial Sequence: Synthetic oligonucleotide
  Sense strand starting at position 2980 of SEQ ID NO: 1242833
augucuuccucugauagau

SEQ ID NO: 1376273 - RNA, 19 nt, Artificial Sequence
  Description of Artificial Sequence: Synthetic oligonucleotide
  Antisense strand to SEQ ID NO: 1376272
aucuaucagaggaagacau

SEQ ID NO: 1376274 - RNA, 19 nt, Artificial Sequence
  Description of Artificial Sequence: Synthetic oligonucleotide
  Sense strand starting at position 2982 of SEQ ID NO: 1242833
gucuuccucugauagauuc

SEQ ID NO: 1376275 - RNA, 19 nt, Artificial Sequence
  Description of Artificial Sequence: Synthetic oligonucleotide
  Antisense strand to SEQ ID NO: 1376274
gaaucuaucagaggaagac

SEQ ID NO: 1376276 - RNA, 19 nt, Artificial Sequence
  Description of Artificial Sequence: Synthetic oligonucleotide
  Sense strand starting at position 2990 of SEQ ID NO: 1242833
cugauagauucccagaaca

SEQ ID NO: 1376277 - RNA, 19 nt, Artificial Sequence
  Description of Artificial Sequence: Synthetic oligonucleotide
  Antisense strand to SEQ ID NO: 1376276
uguucugggaaucuaucag

SEQ ID NO: 1376278 - RNA, 19 nt, Artificial Sequence
  Description of Artificial Sequence: Synthetic oligonucleotide
  Sense strand starting at position 3075 of SEQ ID NO: 1242833
ucacuucucccucguggau

SEQ ID NO: 1376279 - RNA, 19 nt, Artificial Sequence
  Description of Artificial Sequence: Synthetic oligonucleotide
  Antisense strand to SEQ ID NO: 1376278
auccacgagggagaaguga

SEQ ID NO: 1376280 - RNA, 19 nt, Artificial Sequence
  Description of Artificial Sequence: Synthetic oligonucleotide
  Sense strand starting at position 3103 of SEQ ID NO: 1242833
gucugugucagucaaugcu

SEQ ID NO: 1376281 - RNA, 19 nt, Artificial Sequence
  Description of Artificial Sequence: Synthetic oligonucleotide
  Antisense strand to SEQ ID NO: 1376280
agcauugacugacacagac

SEQ ID NO: 1376282 - RNA, 19 nt, Artificial Sequence
  Description of Artificial Sequence: Synthetic oligonucleotide
  Sense strand starting at position 3112 of SEQ ID NO: 1242833
agucaaugcugccauguaa

SEQ ID NO: 1376283 - RNA, 19 nt, Artificial Sequence
  Description of Artificial Sequence: Synthetic oligonucleotide
  Antisense strand to SEQ ID NO: 1376282
uuacauggcagcauugacu

SEQ ID NO: 1376284 - RNA, 19 nt, Artificial Sequence
  Description of Artificial Sequence: Synthetic oligonucleotide
  Sense strand starting at position 3137 of SEQ ID NO: 1242833
ccugcaaacucaguguaua

SEQ ID NO: 1376285 - RNA, 19 nt, Artificial Sequence
  Description of Artificial Sequence: Synthetic oligonucleotide
  Antisense strand to SEQ ID NO: 1376284
uauacacugaguuugcagg

SEQ ID NO: 1376286 - RNA, 19 nt, Artificial Sequence
  Description of Artificial Sequence: Synthetic oligonucleotide
  Sense strand starting at position 3138 of SEQ ID NO: 1242833
cugcaaacucaguguauac

SEQ ID NO: 1376287 - RNA, 19 nt, Artificial Sequence
  Description of Artificial Sequence: Synthetic oligonucleotide
  Antisense strand to SEQ ID NO: 1376286
guauacacugaguuugcag

SEQ ID NO: 1376288 - RNA, 19 nt, Artificial Sequence
  Description of Artificial Sequence: Synthetic oligonucleotide
  Sense strand starting at position 3599 of SEQ ID NO: 1242833
gcagccuucucagguuaaa

SEQ ID NO: 1376289 - RNA, 19 nt, Artificial Sequence
  Description of Artificial Sequence: Synthetic oligonucleotide
  Antisense strand to SEQ ID NO: 1376288
uuuaaccugagaaggcugc

SEQ ID NO: 1376290 - RNA, 19 nt, Artificial Sequence
  Description of Artificial Sequence: Synthetic oligonucleotide
  Sense strand starting at position 3602 of SEQ ID NO: 1242833
gccuucucagguuaaauua

SEQ ID NO: 1376291 - RNA, 19 nt, Artificial Sequence
  Description of Artificial Sequence: Synthetic oligonucleotide
  Antisense strand to SEQ ID NO: 1376290
uaauuuaaccugagaaggc

SEQ ID NO: 1376292 - RNA, 19 nt, Artificial Sequence
  Description of Artificial Sequence: Synthetic oligonucleotide
  Sense strand starting at position 3738 of SEQ ID NO: 1242833
gcaccauggcuggaaacaa

SEQ ID NO: 1376293 - RNA, 19 nt, Artificial Sequence
  Description of Artificial Sequence: Synthetic oligonucleotide
  Antisense strand to SEQ ID NO: 1376292
uuguuuccagccauggugc

SEQ ID NO: 1376294 - RNA, 19 nt, Artificial Sequence
  Description of Artificial Sequence: Synthetic oligonucleotide
  Sense strand starting at position 3802 of SEQ ID NO: 1242833
gccaguguugugugaccca

SEQ ID NO: 1376295 - RNA, 19 nt, Artificial Sequence
  Description of Artificial Sequence: Synthetic oligonucleotide
  Antisense strand to SEQ ID NO: 1376294
ugggucacacaacacuggc

SEQ ID NO: 1376296 - RNA, 19 nt, Artificial Sequence
  Description of Artificial Sequence: Synthetic oligonucleotide
  Sense strand starting at position 3839 of SEQ ID NO: 1242833
aggguacccuucuacugau

SEQ ID NO: 1376297 - RNA, 19 nt, Artificial Sequence
  Description of Artificial Sequence: Synthetic oligonucleotide
  Antisense strand to SEQ ID NO: 1376296
aucaguagaaggguacccu

SEQ ID NO: 1376298 - RNA, 19 nt, Artificial Sequence
  Description of Artificial Sequence: Synthetic oligonucleotide
  Sense strand starting at position 310 of SEQ ID NO: 1242834
ucuccaggguccuuggaaa

SEQ ID NO: 1376299 - RNA, 19 nt, Artificial Sequence
  Description of Artificial Sequence: Synthetic oligonucleotide
  Antisense strand to SEQ ID NO: 1376298
uuuccaaggacccuggaga

SEQ ID NO: 1376300 - RNA, 19 nt, Artificial Sequence
  Description of Artificial Sequence: Synthetic oligonucleotide
  Sense strand starting at position 1082 of SEQ ID NO: 1242834
ccgcgucuuuccuaggaga

SEQ ID NO: 1376301 - RNA, 19 nt, Artificial Sequence
  Description of Artificial Sequence: Synthetic oligonucleotide
  Antisense strand to SEQ ID NO: 1376300
ucuccuaggaaagacgcgg

SEQ ID NO: 1376302 - RNA, 19 nt, Artificial Sequence
  Description of Artificial Sequence: Synthetic oligonucleotide
  Sense strand starting at position 1084 of SEQ ID NO: 1242834
gcgucuuuccuaggagaug

SEQ ID NO: 1376303 - RNA, 19 nt, Artificial Sequence
  Description of Artificial Sequence: Synthetic oligonucleotide
  Antisense strand to SEQ ID NO: 1376302
caucuccuaggaaagacgc

SEQ ID NO: 1376304 - RNA, 19 nt, Artificial Sequence
  Description of Artificial Sequence: Synthetic oligonucleotide
  Sense strand starting at position 2299 of SEQ ID NO: 1242834
gaaauuaggucgccuagac

SEQ ID NO: 1376305 - RNA, 19 nt, Artificial Sequence
  Description of Artificial Sequence: Synthetic oligonucleotide
  Antisense strand to SEQ ID NO: 1376304
gucuaggcgaccuaauuuc

SEQ ID NO: 1376306 - RNA, 19 nt, Artificial Sequence
  Description of Artificial Sequence: Synthetic oligonucleotide
  Sense strand starting at position 2534 of SEQ ID NO: 1242834
ggaggcuguuggucaacau

SEQ ID NO: 1376307 - RNA, 19 nt, Artificial Sequence
  Description of Artificial Sequence: Synthetic oligonucleotide
  Antisense strand to SEQ ID NO: 1376306
auguugaccaacagccucc

SEQ ID NO: 1376308 - RNA, 19 nt, Artificial Sequence
  Description of Artificial Sequence: Synthetic oligonucleotide
  Sense strand starting at position 2724 of SEQ ID NO: 1242834
gcugcagguucucauguuu

SEQ ID NO: 1376309 - RNA, 19 nt, Artificial Sequence
  Description of Artificial Sequence: Synthetic oligonucleotide
  Antisense strand to SEQ ID NO: 1376308
aaacaugagaaccugcagc

SEQ ID NO: 1376310 - RNA, 19 nt, Artificial Sequence
  Description of Artificial Sequence: Synthetic oligonucleotide
  Sense strand starting at position 3887 of SEQ ID NO: 1242834
uguggagacaccugucagu

SEQ ID NO: 1376311 - RNA, 19 nt, Artificial Sequence
  Description of Artificial Sequence: Synthetic oligonucleotide
  Antisense strand to SEQ ID NO: 1376310
acugacaggugucuccaca

SEQ ID NO: 1376312 - RNA, 19 nt, Artificial Sequence
  Description of Artificial Sequence: Synthetic oligonucleotide
  Sense strand starting at position 231 of SEQ ID NO: 1242835
cagggaugguaucuccuuu

SEQ ID NO: 1376313 - RNA, 19 nt, Artificial Sequence
  Description of Artificial Sequence: Synthetic oligonucleotide
  Antisense strand to SEQ ID NO: 1376312
aaaggagauaccaucccug

SEQ ID NO: 1376314 - RNA, 19 nt, Artificial Sequence
  Description of Artificial Sequence: Synthetic oligonucleotide
  Sense strand starting at position 235 of SEQ ID NO: 1242835
gaugguaucuccuuuggga

SEQ ID NO: 1376315 - RNA, 19 nt, Artificial Sequence
  Description of Artificial Sequence: Synthetic oligonucleotide
  Antisense strand to SEQ ID NO: 1376314
ucccaaaggagauaccauc

SEQ ID NO: 1376316 - RNA, 19 nt, Artificial Sequence
  Description of Artificial Sequence: Synthetic oligonucleotide
  Sense strand starting at position 237 of SEQ ID NO: 1242835
ugguaucuccuuugggaac

SEQ ID NO: 1376317 - RNA, 19 nt, Artificial Sequence
  Description of Artificial Sequence: Synthetic oligonucleotide
  Antisense strand to SEQ ID NO: 1376316
guucccaaaggagauacca

SEQ ID NO: 1376318 - RNA, 19 nt, Artificial Sequence
  Description of Artificial Sequence: Synthetic oligonucleotide
  Sense strand starting at position 578 of SEQ ID NO: 1242835
uagggaucuuggcucacau

SEQ ID NO: 1376319 - RNA, 19 nt, Artificial Sequence
  Description of Artificial Sequence: Synthetic oligonucleotide
  Antisense strand to SEQ ID NO: 1376318
augugagccaagaucccua

SEQ ID NO: 1376320 - RNA, 19 nt, Artificial Sequence
  Description of Artificial Sequence: Synthetic oligonucleotide
  Sense strand starting at position 765 of SEQ ID NO: 1242835
gcggcugauucaucuggga

SEQ ID NO: 1376321 - RNA, 19 nt, Artificial Sequence
  Description of Artificial Sequence: Synthetic oligonucleotide
  Antisense strand to SEQ ID NO: 1376320
ucccagaugaaucagccgc

SEQ ID NO: 1376322 - RNA, 19 nt, Artificial Sequence
  Description of Artificial Sequence: Synthetic oligonucleotide
  Sense strand starting at position 768 of SEQ ID NO: 1242835
gcugauucaucugggaguc

SEQ ID NO: 1376323 - RNA, 19 nt, Artificial Sequence
  Description of Artificial Sequence: Synthetic oligonucleotide
  Antisense strand to SEQ ID NO: 1376322
gacucccagaugaaucagc

SEQ ID NO: 1376324 - RNA, 19 nt, Artificial Sequence
  Description of Artificial Sequence: Synthetic oligonucleotide
  Sense strand starting at position 823 of SEQ ID NO: 1242835
aucucuaagugcuguuauu

SEQ ID NO: 1376325 - RNA, 19 nt, Artificial Sequence
  Description of Artificial Sequence: Synthetic oligonucleotide
  Antisense strand to SEQ ID NO: 1376324
aauaacagcacuuagagau

SEQ ID NO: 1376326 - RNA, 19 nt, Artificial Sequence
  Description of Artificial Sequence: Synthetic oligonucleotide
  Sense strand starting at position 915 of SEQ ID NO: 1242835
gaugguacauuucgauaug

SEQ ID NO: 1376327 - RNA, 19 nt, Artificial Sequence
  Description of Artificial Sequence: Synthetic oligonucleotide
  Antisense strand to SEQ ID NO: 1376326
cauaucgaaauguaccauc

SEQ ID NO: 1376328 - RNA, 19 nt, Artificial Sequence
  Description of Artificial Sequence: Synthetic oligonucleotide
  Sense strand starting at position 918 of SEQ ID NO: 1242835
gguacauuucgauaugcgu

SEQ ID NO: 1376329 - RNA, 19 nt, Artificial Sequence
  Description of Artificial Sequence: Synthetic oligonucleotide
  Antisense strand to SEQ ID NO: 1376328
acgcauaucgaaauguacc

SEQ ID NO: 1376330 - RNA, 19 nt, Artificial Sequence
  Description of Artificial Sequence: Synthetic oligonucleotide
  Sense strand starting at position 921 of SEQ ID NO: 1242835
acauuucgauaugcguauu

SEQ ID NO: 1376331 - RNA, 19 nt, Artificial Sequence
  Description of Artificial Sequence: Synthetic oligonucleotide
  Antisense strand to SEQ ID NO: 1376330
aauacgcauaucgaaaugu

SEQ ID NO: 1376332 - RNA, 19 nt, Artificial Sequence
  Description of Artificial Sequence: Synthetic oligonucleotide
  Sense strand starting at position 931 of SEQ ID NO: 1242835
augcguauuucacggcaau

SEQ ID NO: 1376333 - RNA, 19 nt, Artificial Sequence
  Description of Artificial Sequence: Synthetic oligonucleotide
  Antisense strand to SEQ ID NO: 1376332
auugccgugaaauacgcau

SEQ ID NO: 1376334 - RNA, 19 nt, Artificial Sequence
  Description of Artificial Sequence: Synthetic oligonucleotide
  Sense strand starting at position 932 of SEQ ID NO: 1242835
ugcguauuucacggcaauu

SEQ ID NO: 1376335 - RNA, 19 nt, Artificial Sequence
  Description of Artificial Sequence: Synthetic oligonucleotide
  Antisense strand to SEQ ID NO: 1376334
aauugccgugaaauacgca

SEQ ID NO: 1376336 - RNA, 19 nt, Artificial Sequence
  Description of Artificial Sequence: Synthetic oligonucleotide
  Sense strand starting at position 1031 of SEQ ID NO: 1242835
agaggaucgcuugagugaa

SEQ ID NO: 1376337 - RNA, 19 nt, Artificial Sequence
  Description of Artificial Sequence: Synthetic oligonucleotide
  Antisense strand to SEQ ID NO: 1376336
uucacucaagcgauccucu

SEQ ID NO: 1376338 - RNA, 19 nt, Artificial Sequence
  Description of Artificial Sequence: Synthetic oligonucleotide
  Sense strand starting at position 1273 of SEQ ID NO: 1242835
ggugguaugugucuuggga

SEQ ID NO: 1376339 - RNA, 19 nt, Artificial Sequence
  Description of Artificial Sequence: Synthetic oligonucleotide
  Antisense strand to SEQ ID NO: 1376338
ucccaagacacauaccacc

SEQ ID NO: 1376340 - RNA, 19 nt, Artificial Sequence
  Description of Artificial Sequence: Synthetic oligonucleotide
  Sense strand starting at position 1277 of SEQ ID NO: 1242835
guaugugucuugggaggcu

SEQ ID NO: 1376341 - RNA, 19 nt, Artificial Sequence
  Description of Artificial Sequence: Synthetic oligonucleotide
  Antisense strand to SEQ ID NO: 1376340
agccucccaagacacauac

SEQ ID NO: 1376342 - RNA, 19 nt, Artificial Sequence
  Description of Artificial Sequence: Synthetic oligonucleotide
  Sense strand starting at position 1498 of SEQ ID NO: 1242835
gacugaucccuugagcuca

SEQ ID NO: 1376343 - RNA, 19 nt, Artificial Sequence
  Description of Artificial Sequence: Synthetic oligonucleotide
  Antisense strand to SEQ ID NO: 1376342
ugagcucaagggaucaguc

SEQ ID NO: 1376344 - RNA, 19 nt, Artificial Sequence
  Description of Artificial Sequence: Synthetic oligonucleotide
  Sense strand starting at position 2272 of SEQ ID NO: 1242835
cccacacuuggcuaaguuu

SEQ ID NO: 1376345 - RNA, 19 nt, Artificial Sequence
  Description of Artificial Sequence: Synthetic oligonucleotide
  Antisense strand to SEQ ID NO: 1376344
aaacuuagccaaguguggg

SEQ ID NO: 1376346 - RNA, 19 nt, Artificial Sequence
  Description of Artificial Sequence: Synthetic oligonucleotide
  Sense strand starting at position 2492 of SEQ ID NO: 1242835
ccaguuaaaucagucauga

SEQ ID NO: 1376347 - RNA, 19 nt, Artificial Sequence
  Description of Artificial Sequence: Synthetic oligonucleotide
  Antisense strand to SEQ ID NO: 1376346
ucaugacugauuuaacugg

SEQ ID NO: 1376348 - RNA, 19 nt, Artificial Sequence
  Description of Artificial Sequence: Synthetic oligonucleotide
  Sense strand starting at position 2496 of SEQ ID NO: 1242835
uuaaaucagucaugaugua

SEQ ID NO: 1376349 - RNA, 19 nt, Artificial Sequence
  Description of Artificial Sequence: Synthetic oligonucleotide
  Antisense strand to SEQ ID NO: 1376348
uacaucaugacugauuuaa

SEQ ID NO: 1376350 - RNA, 19 nt, Artificial Sequence
  Description of Artificial Sequence: Synthetic oligonucleotide
  Sense strand starting at position 2509 of SEQ ID NO: 1242835
gauguaauuccaugcagug

SEQ ID NO: 1376351 - RNA, 19 nt, Artificial Sequence
  Description of Artificial Sequence: Synthetic oligonucleotide
  Antisense strand to SEQ ID NO: 1376350
cacugcauggaauuacauc

SEQ ID NO: 1376352 - RNA, 19 nt, Artificial Sequence
  Description of Artificial Sequence: Synthetic oligonucleotide
  Sense strand starting at position 2557 of SEQ ID NO: 1242835
ugcucuuguuuagaaucau

SEQ ID NO: 1376353 - RNA, 19 nt, Artificial Sequence
  Description of Artificial Sequence: Synthetic oligonucleotide
  Antisense strand to SEQ ID NO: 1376352
augauucuaaacaagagca

SEQ ID NO: 1376354 - RNA, 19 nt, Artificial Sequence
  Description of Artificial Sequence: Synthetic oligonucleotide
  Sense strand starting at position 3382 of SEQ ID NO: 1242835
agagaagcaugcuuggaau

SEQ ID NO: 1376355 - RNA, 19 nt, Artificial Sequence
  Description of Artificial Sequence: Synthetic oligonucleotide
  Antisense strand to SEQ ID NO: 1376354
auuccaagcaugcuucucu

SEQ ID NO: 1376356 - RNA, 19 nt, Artificial Sequence
  Description of Artificial Sequence: Synthetic oligonucleotide
  Sense strand starting at position 3385 of SEQ ID NO: 1242835
gaagcaugcuuggaauacu

SEQ ID NO: 1376357 - RNA, 19 nt, Artificial Sequence
  Description of Artificial Sequence: Synthetic oligonucleotide
  Antisense strand to SEQ ID NO: 1376356
aguauuccaagcaugcuuc

SEQ ID NO: 1376358 - RNA, 19 nt, Artificial Sequence
  Description of Artificial Sequence: Synthetic oligonucleotide
  Sense strand starting at position 3394 of SEQ ID NO: 1242835
uuggaauacugccauuuga

SEQ ID NO: 1376359 - RNA, 19 nt, Artificial Sequence
  Description of Artificial Sequence: Synthetic oligonucleotide
  Antisense strand to SEQ ID NO: 1376358
ucaaauggcaguauuccaa

SEQ ID NO: 1376360 - RNA, 19 nt, Artificial Sequence
  Description of Artificial Sequence: Synthetic oligonucleotide
  Sense strand starting at position 3431 of SEQ ID NO: 1242835
guguuugcuuaguuguuca

SEQ ID NO: 1376361 - RNA, 19 nt, Artificial Sequence
  Description of Artificial Sequence: Synthetic oligonucleotide
  Antisense strand to SEQ ID NO: 1376360
ugaacaacuaagcaaacac

SEQ ID NO: 1376362 - RNA, 19 nt, Artificial Sequence
  Description of Artificial Sequence: Synthetic oligonucleotide
  Sense strand starting at position 3470 of SEQ ID NO: 1242835
gcacaagaaugguaacugu

SEQ ID NO: 1376363 - RNA, 19 nt, Artificial Sequence
  Description of Artificial Sequence: Synthetic oligonucleotide
  Antisense strand to SEQ ID NO: 1376362
acaguuaccauucuugugc

SEQ ID NO: 1376364 - RNA, 19 nt, Artificial Sequence
  Description of Artificial Sequence: Synthetic oligonucleotide
  Sense strand starting at position 3481 of SEQ ID NO: 1242835
guaacugugucucuugaca

SEQ ID NO: 1376365 - RNA, 19 nt, Artificial Sequence
  Description of Artificial Sequence: Synthetic oligonucleotide
  Antisense strand to SEQ ID NO: 1376364
ugucaagagacacaguuac

SEQ ID NO: 1376366 - RNA, 19 nt, Artificial Sequence
  Description of Artificial Sequence: Synthetic oligonucleotide
  Sense strand starting at position 3483 of SEQ ID NO: 1242835
aacugugucucuugacaag

SEQ ID NO: 1376367 - RNA, 19 nt, Artificial Sequence
  Description of Artificial Sequence: Synthetic oligonucleotide
  Antisense strand to SEQ ID NO: 1376366
cuugucaagagacacaguu

SEQ ID NO: 1376368 - RNA, 19 nt, Artificial Sequence
  Description of Artificial Sequence: Synthetic oligonucleotide
  Sense strand starting at position 3647 of SEQ ID NO: 1242835
gugccacaugcauagguua

SEQ ID NO: 1376369 - RNA, 19 nt, Artificial Sequence
  Description of Artificial Sequence: Synthetic oligonucleotide
  Antisense strand to SEQ ID NO: 1376368
uaaccuaugcauguggcac

SEQ ID NO: 1376370 - RNA, 19 nt, Artificial Sequence
  Description of Artificial Sequence: Synthetic oligonucleotide
  Sense strand starting at position 3659 of SEQ ID NO: 1242835
uagguuaccuguuccaaag

SEQ ID NO: 1376371 - RNA, 19 nt, Artificial Sequence
  Description of Artificial Sequence: Synthetic oligonucleotide
  Antisense strand to SEQ ID NO: 1376370
cuuuggaacagguaaccua

SEQ ID NO: 1376372 - RNA, 19 nt, Artificial Sequence
  Description of Artificial Sequence: Synthetic oligonucleotide
  Sense strand starting at position 3661 of SEQ ID NO: 1242835
gguuaccuguuccaaagaa

SEQ ID NO: 1376373 - RNA, 19 nt, Artificial Sequence
  Description of Artificial Sequence: Synthetic oligonucleotide
  Antisense strand to SEQ ID NO: 1376372
uucuuuggaacagguaacc

SEQ ID NO: 1376374 - RNA, 19 nt, Artificial Sequence
  Description of Artificial Sequence: Synthetic oligonucleotide
  Sense strand starting at position 3699 of SEQ ID NO: 1242835
uugguauuucuuuguuugu

SEQ ID NO: 1376375 - RNA, 19 nt, Artificial Sequence
  Description of Artificial Sequence: Synthetic oligonucleotide
  Antisense strand to SEQ ID NO: 1376374
acaaacaaagaaauaccaa

SEQ ID NO: 1376376 - RNA, 19 nt, Artificial Sequence
  Description of Artificial Sequence: Synthetic oligonucleotide
  Sense strand starting at position 3700 of SEQ ID NO: 1242835
ugguauuucuuuguuuguu

SEQ ID NO: 1376377 - RNA, 19 nt, Artificial Sequence
  Description of Artificial Sequence: Synthetic oligonucleotide
  Antisense strand to SEQ ID NO: 1376376
aacaaacaaagaaauacca

SEQ ID NO: 1376378 - RNA, 19 nt, Artificial Sequence
  Description of Artificial Sequence: Synthetic oligonucleotide
  Sense strand starting at position 3821 of SEQ ID NO: 1242835
gugauucucccgcgucaca

SEQ ID NO: 1376379 - RNA, 19 nt, Artificial Sequence
  Description of Artificial Sequence: Synthetic oligonucleotide
  Antisense strand to SEQ ID NO: 1376378
ugugacgcgggagaaucac

SEQ ID NO: 1376380 - RNA, 19 nt, Artificial Sequence
  Description of Artificial Sequence: Synthetic oligonucleotide
  Sense strand starting at position 3832 of SEQ ID NO: 1242835
gcgucacacuccugaguag

SEQ ID NO: 1376381 - RNA, 19 nt, Artificial Sequence
  Description of Artificial Sequence: Synthetic oligonucleotide
  Antisense strand to SEQ ID NO: 1376380
cuacucaggagugugacgc

SEQ ID NO: 1376382 - RNA, 19 nt, Artificial Sequence
  Description of Artificial Sequence: Synthetic oligonucleotide
  Sense strand starting at position 98 of SEQ ID NO: 1242836
ggucguagagaaggucaaa

SEQ ID NO: 1376383 - RNA, 19 nt, Artificial Sequence
  Description of Artificial Sequence: Synthetic oligonucleotide
  Antisense strand to SEQ ID NO: 1376382
uuugaccuucucuacgacc

SEQ ID NO: 1376384 - RNA, 19 nt, Artificial Sequence
  Description of Artificial Sequence: Synthetic oligonucleotide
  Sense strand starting at position 325 of SEQ ID NO: 1242836
gguggagugucucagcaga

SEQ ID NO: 1376385 - RNA, 19 nt, Artificial Sequence
  Description of Artificial Sequence: Synthetic oligonucleotide
  Antisense strand to SEQ ID NO: 1376384
ucugcugagacacuccacc

SEQ ID NO: 1376386 - RNA, 19 nt, Artificial Sequence
  Description of Artificial Sequence: Synthetic oligonucleotide
  Sense strand starting at position 327 of SEQ ID NO: 1242836
uggagugucucagcagaaa

SEQ ID NO: 1376387 - RNA, 19 nt, Artificial Sequence
  Description of Artificial Sequence: Synthetic oligonucleotide
  Antisense strand to SEQ ID NO: 1376386
uuucugcugagacacucca

SEQ ID NO: 1376388 - RNA, 19 nt, Artificial Sequence
  Description of Artificial Sequence: Synthetic oligonucleotide
  Sense strand starting at position 330 of SEQ ID NO: 1242836
agugucucagcagaaauac

SEQ ID NO: 1376389 - RNA, 19 nt, Artificial Sequence
  Description of Artificial Sequence: Synthetic oligonucleotide
  Antisense strand to SEQ ID NO: 1376388
guauuucugcugagacacu

SEQ ID NO: 1376390 - RNA, 19 nt, Artificial Sequence
  Description of Artificial Sequence: Synthetic oligonucleotide
  Sense strand starting at position 539 of SEQ ID NO: 1242836
cuggcaucauccgagucau

SEQ ID NO: 1376391 - RNA, 19 nt, Artificial Sequence
  Description of Artificial Sequence: Synthetic oligonucleotide
  Antisense strand to SEQ ID NO: 1376390
augacucggaugaugccag

SEQ ID NO: 1376392 - RNA, 19 nt, Artificial Sequence
  Description of Artificial Sequence: Synthetic oligonucleotide
  Sense strand starting at position 759 of SEQ ID NO: 1242836
ccuggauguugauggucau

SEQ ID NO: 1376393 - RNA, 19 nt, Artificial Sequence
  Description of Artificial Sequence: Synthetic oligonucleotide
  Antisense strand to SEQ ID NO: 1376392
augaccaucaacauccagg

SEQ ID NO: 1376394 - RNA, 19 nt, Artificial Sequence
  Description of Artificial Sequence: Synthetic oligonucleotide
  Sense strand starting at position 765 of SEQ ID NO: 1242836
uguugauggucaugcgauc

SEQ ID NO: 1376395 - RNA, 19 nt, Artificial Sequence
  Description of Artificial Sequence: Synthetic oligonucleotide
  Antisense strand to SEQ ID NO: 1376394
gaucgcaugaccaucaaca

SEQ ID NO: 1376396 - RNA, 19 nt, Artificial Sequence
  Description of Artificial Sequence: Synthetic oligonucleotide
  Sense strand starting at position 1073 of SEQ ID NO: 1242836
cuagguugucccuguauca

SEQ ID NO: 1376397 - RNA, 19 nt, Artificial Sequence
  Description of Artificial Sequence: Synthetic oligonucleotide
  Antisense strand to SEQ ID NO: 1376396
ugauacagggacaaccuag

SEQ ID NO: 1376398 - RNA, 19 nt, Artificial Sequence
  Description of Artificial Sequence: Synthetic oligonucleotide
  Sense strand starting at position 1216 of SEQ ID NO: 1242836
uggucuagucaggguguca

SEQ ID NO: 1376399 - RNA, 19 nt, Artificial Sequence
  Description of Artificial Sequence: Synthetic oligonucleotide
  Antisense strand to SEQ ID NO: 1376398
ugacacccugacuagacca

SEQ ID NO: 1376400 - RNA, 19 nt, Artificial Sequence
  Description of Artificial Sequence: Synthetic oligonucleotide
  Sense strand starting at position 1898 of SEQ ID NO: 1242836
ggcacacuuacccggagaa

SEQ ID NO: 1376401 - RNA, 19 nt, Artificial Sequence
  Description of Artificial Sequence: Synthetic oligonucleotide
  Antisense strand to SEQ ID NO: 1376400
uucuccggguaagugugcc

SEQ ID NO: 1376402 - RNA, 19 nt, Artificial Sequence
  Description of Artificial Sequence: Synthetic oligonucleotide
  Sense strand starting at position 1975 of SEQ ID NO: 1242836
gccagaaucgccggguguu

SEQ ID NO: 1376403 - RNA, 19 nt, Artificial Sequence
  Description of Artificial Sequence: Synthetic oligonucleotide
  Antisense strand to SEQ ID NO: 1376402
aacacccggcgauucuggc

SEQ ID NO: 1376404 - RNA, 19 nt, Artificial Sequence
  Description of Artificial Sequence: Synthetic oligonucleotide
  Sense strand starting at position 1995 of SEQ ID NO: 1242836
cccaacuacuccugggaga

SEQ ID NO: 1376405 - RNA, 19 nt, Artificial Sequence
  Description of Artificial Sequence: Synthetic oligonucleotide
  Antisense strand to SEQ ID NO: 1376404
ucucccaggaguaguuggg

SEQ ID NO: 1376406 - RNA, 19 nt, Artificial Sequence
  Description of Artificial Sequence: Synthetic oligonucleotide
  Sense strand starting at position 2406 of SEQ ID NO: 1242836
cagggaugguaucuccuuu

SEQ ID NO: 1376407 - RNA, 19 nt, Artificial Sequence
  Description of Artificial Sequence: Synthetic oligonucleotide
  Antisense strand to SEQ ID NO: 1376406
aaaggagauaccaucccug

SEQ ID NO: 1376408 - RNA, 19 nt, Artificial Sequence
  Description of Artificial Sequence: Synthetic oligonucleotide
  Sense strand starting at position 2410 of SEQ ID NO: 1242836
gaugguaucuccuuuggga

SEQ ID NO: 1376409 - RNA, 19 nt, Artificial Sequence
  Description of Artificial Sequence: Synthetic oligonucleotide
  Antisense strand to SEQ ID NO: 1376408
ucccaaaggagauaccauc

SEQ ID NO: 1376410 - RNA, 19 nt, Artificial Sequence
  Description of Artificial Sequence: Synthetic oligonucleotide
  Sense strand starting at position 2412 of SEQ ID NO: 1242836
ugguaucuccuuugggaac

SEQ ID NO: 1376411 - RNA, 19 nt, Artificial Sequence
  Description of Artificial Sequence: Synthetic oligonucleotide
  Antisense strand to SEQ ID NO: 1376410
guucccaaaggagauacca

SEQ ID NO: 1376412 - RNA, 19 nt, Artificial Sequence
  Description of Artificial Sequence: Synthetic oligonucleotide
  Sense strand starting at position 2753 of SEQ ID NO: 1242836
uagggaucuuggcucacau

SEQ ID NO: 1376413 - RNA, 19 nt, Artificial Sequence
  Description of Artificial Sequence: Synthetic oligonucleotide
  Antisense strand to SEQ ID NO: 1376412
augugagccaagaucccua

SEQ ID NO: 1376414 - RNA, 19 nt, Artificial Sequence
  Description of Artificial Sequence: Synthetic oligonucleotide
  Sense strand starting at position 2940 of SEQ ID NO: 1242836
gcggcugauucaucuggga

SEQ ID NO: 1376415 - RNA, 19 nt, Artificial Sequence
  Description of Artificial Sequence: Synthetic oligonucleotide
  Antisense strand to SEQ ID NO: 1376414
ucccagaugaaucagccgc

SEQ ID NO: 1376416 - RNA, 19 nt, Artificial Sequence
  Description of Artificial Sequence: Synthetic oligonucleotide
  Sense strand starting at position 2943 of SEQ ID NO: 1242836
gcugauucaucugggaguc

SEQ ID NO: 1376417 - RNA, 19 nt, Artificial Sequence
  Description of Artificial Sequence: Synthetic oligonucleotide
  Antisense strand to SEQ ID NO: 1376416
gacucccagaugaaucagc

SEQ ID NO: 1376418 - RNA, 19 nt, Artificial Sequence
  Description of Artificial Sequence: Synthetic oligonucleotide
  Sense strand starting at position 2998 of SEQ ID NO: 1242836
aucucuaagugcuguuauu

SEQ ID NO: 1376419 - RNA, 19 nt, Artificial Sequence
  Description of Artificial Sequence: Synthetic oligonucleotide
  Antisense strand to SEQ ID NO: 1376418
aauaacagcacuuagagau

SEQ ID NO: 1376420 - RNA, 19 nt, Artificial Sequence
  Description of Artificial Sequence: Synthetic oligonucleotide
  Sense strand starting at position 3090 of SEQ ID NO: 1242836
gaugguacauuucgauaug

SEQ ID NO: 1376421 - RNA, 19 nt, Artificial Sequence
  Description of Artificial Sequence: Synthetic oligonucleotide
  Antisense strand to SEQ ID NO: 1376420
cauaucgaaauguaccauc

SEQ ID NO: 1376422 - RNA, 19 nt, Artificial Sequence
  Description of Artificial Sequence: Synthetic oligonucleotide
  Sense strand starting at position 3093 of SEQ ID NO: 1242836
gguacauuucgauaugcgu

SEQ ID NO: 1376423 - RNA, 19 nt, Artificial Sequence
  Description of Artificial Sequence: Synthetic oligonucleotide
  Antisense strand to SEQ ID NO: 1376422
acgcauaucgaaauguacc

SEQ ID NO: 1376424 - RNA, 19 nt, Artificial Sequence
  Description of Artificial Sequence: Synthetic oligonucleotide
  Sense strand starting at position 3096 of SEQ ID NO: 1242836
acauuucgauaugcguauu

SEQ ID NO: 1376425 - RNA, 19 nt, Artificial Sequence
  Description of Artificial Sequence: Synthetic oligonucleotide
  Antisense strand to SEQ ID NO: 1376424
aauacgcauaucgaaaugu

SEQ ID NO: 1376426 - RNA, 19 nt, Artificial Sequence
  Description of Artificial Sequence: Synthetic oligonucleotide
  Sense strand starting at position 3106 of SEQ ID NO: 1242836
augcguauuucacggcaau

SEQ ID NO: 1376427 - RNA, 19 nt, Artificial Sequence
  Description of Artificial Sequence: Synthetic oligonucleotide
  Antisense strand to SEQ ID NO: 1376426
auugccgugaaauacgcau

SEQ ID NO: 1376428 - RNA, 19 nt, Artificial Sequence
  Description of Artificial Sequence: Synthetic oligonucleotide
  Sense strand starting at position 3107 of SEQ ID NO: 1242836
ugcguauuucacggcaauu

SEQ ID NO: 1376429 - RNA, 19 nt, Artificial Sequence
  Description of Artificial Sequence: Synthetic oligonucleotide
  Antisense strand to SEQ ID NO: 1376428
aauugccgugaaauacgca

SEQ ID NO: 1376430 - RNA, 19 nt, Artificial Sequence
  Description of Artificial Sequence: Synthetic oligonucleotide
  Sense strand starting at position 3206 of SEQ ID NO: 1242836
agaggaucgcuugagugaa

SEQ ID NO: 1376431 - RNA, 19 nt, Artificial Sequence
  Description of Artificial Sequence: Synthetic oligonucleotide
  Antisense strand to SEQ ID NO: 1376430
uucacucaagcgauccucu

SEQ ID NO: 1376432 - RNA, 19 nt, Artificial Sequence
  Description of Artificial Sequence: Synthetic oligonucleotide
  Sense strand starting at position 3448 of SEQ ID NO: 1242836
ggugguaugugucuuggga

SEQ ID NO: 1376433 - RNA, 19 nt, Artificial Sequence
  Description of Artificial Sequence: Synthetic oligonucleotide
  Antisense strand to SEQ ID NO: 1376432
ucccaagacacauaccacc

SEQ ID NO: 1376434 - RNA, 19 nt, Artificial Sequence
  Description of Artificial Sequence: Synthetic oligonucleotide
  Sense strand starting at position 3452 of SEQ ID NO: 1242836
guaugugucuugggaggcu

SEQ ID NO: 1376435 - RNA, 19 nt, Artificial Sequence
  Description of Artificial Sequence: Synthetic oligonucleotide
  Antisense strand to SEQ ID NO: 1376434
agccucccaagacacauac

SEQ ID NO: 1376436 - RNA, 19 nt, Artificial Sequence
  Description of Artificial Sequence: Synthetic oligonucleotide
  Sense strand starting at position 3673 of SEQ ID NO: 1242836
gacugaucccuugagcuca

SEQ ID NO: 1376437 - RNA, 19 nt, Artificial Sequence
  Description of Artificial Sequence: Synthetic oligonucleotide
  Antisense strand to SEQ ID NO: 1376436
ugagcucaagggaucaguc

SEQ ID NO: 1376438 - RNA, 19 nt, Artificial Sequence
  Description of Artificial Sequence: Synthetic oligonucleotide
  Sense strand starting at position 146 of SEQ ID NO: 1242837
cuagguugucccuguauca

SEQ ID NO: 1376439 - RNA, 19 nt, Artificial Sequence
  Description of Artificial Sequence: Synthetic oligonucleotide
  Antisense strand to SEQ ID NO: 1376438
ugauacagggacaaccuag

SEQ ID NO: 1376440 - RNA, 19 nt, Artificial Sequence
  Description of Artificial Sequence: Synthetic oligonucleotide
  Sense strand starting at position 289 of SEQ ID NO: 1242837
uggucuagucaggguguca

SEQ ID NO: 1376441 - RNA, 19 nt, Artificial Sequence
  Description of Artificial Sequence: Synthetic oligonucleotide
  Antisense strand to SEQ ID NO: 1376440
ugacacccugacuagacca

SEQ ID NO: 1376442 - RNA, 19 nt, Artificial Sequence
  Description of Artificial Sequence: Synthetic oligonucleotide
  Sense strand starting at position 971 of SEQ ID NO: 1242837
ggcacacuuacccggagaa

SEQ ID NO: 1376443 - RNA, 19 nt, Artificial Sequence
  Description of Artificial Sequence: Synthetic oligonucleotide
  Antisense strand to SEQ ID NO: 1376442
uucuccggguaagugugcc

SEQ ID NO: 1376444 - RNA, 19 nt, Artificial Sequence
  Description of Artificial Sequence: Synthetic oligonucleotide
  Sense strand starting at position 1048 of SEQ ID NO: 1242837
gccagaaucgccggguguu

SEQ ID NO: 1376445 - RNA, 19 nt, Artificial Sequence
  Description of Artificial Sequence: Synthetic oligonucleotide
  Antisense strand to SEQ ID NO: 1376444
aacacccggcgauucuggc

SEQ ID NO: 1376446 - RNA, 19 nt, Artificial Sequence
  Description of Artificial Sequence: Synthetic oligonucleotide
  Sense strand starting at position 1068 of SEQ ID NO: 1242837
cccaacuacuccugggaga

SEQ ID NO: 1376447 - RNA, 19 nt, Artificial Sequence
  Description of Artificial Sequence: Synthetic oligonucleotide
  Antisense strand to SEQ ID NO: 1376446
ucucccaggaguaguuggg

SEQ ID NO: 1376448 - RNA, 19 nt, Artificial Sequence
  Description of Artificial Sequence: Synthetic oligonucleotide
  Sense strand starting at position 1479 of SEQ ID NO: 1242837
cagggaugguaucuccuuu

SEQ ID NO: 1376449 - RNA, 19 nt, Artificial Sequence
  Description of Artificial Sequence: Synthetic oligonucleotide
  Antisense strand to SEQ ID NO: 1376448
aaaggagauaccaucccug

SEQ ID NO: 1376450 - RNA, 19 nt, Artificial Sequence
  Description of Artificial Sequence: Synthetic oligonucleotide
  Sense strand starting at position 1483 of SEQ ID NO: 1242837
gaugguaucuccuuuggga

SEQ ID NO: 1376451 - RNA, 19 nt, Artificial Sequence
  Description of Artificial Sequence: Synthetic oligonucleotide
  Antisense strand to SEQ ID NO: 1376450
ucccaaaggagauaccauc

SEQ ID NO: 1376452 - RNA, 19 nt, Artificial Sequence
  Description of Artificial Sequence: Synthetic oligonucleotide
  Sense strand starting at position 1485 of SEQ ID NO: 1242837
ugguaucuccuuugggaac

SEQ ID NO: 1376453 - RNA, 19 nt, Artificial Sequence
  Description of Artificial Sequence: Synthetic oligonucleotide
  Antisense strand to SEQ ID NO: 1376452
guucccaaaggagauacca

SEQ ID NO: 1376454 - RNA, 19 nt, Artificial Sequence
  Description of Artificial Sequence: Synthetic oligonucleotide
  Sense strand starting at position 1826 of SEQ ID NO: 1242837
uagggaucuuggcucacau

SEQ ID NO: 1376455 - RNA, 19 nt, Artificial Sequence
  Description of Artificial Sequence: Synthetic oligonucleotide
  Antisense strand to SEQ ID NO: 1376454
augugagccaagaucccua

SEQ ID NO: 1376456 - RNA, 19 nt, Artificial Sequence
  Description of Artificial Sequence: Synthetic oligonucleotide
  Sense strand starting at position 2013 of SEQ ID NO: 1242837
gcggcugauucaucuggga

SEQ ID NO: 1376457 - RNA, 19 nt, Artificial Sequence
  Description of Artificial Sequence: Synthetic oligonucleotide
  Antisense strand to SEQ ID NO: 1376456
ucccagaugaaucagccgc

SEQ ID NO: 1376458 - RNA, 19 nt, Artificial Sequence
  Description of Artificial Sequence: Synthetic oligonucleotide
  Sense strand starting at position 2016 of SEQ ID NO: 1242837
gcugauucaucugggaguc

SEQ ID NO: 1376459 - RNA, 19 nt, Artificial Sequence
  Description of Artificial Sequence: Synthetic oligonucleotide
  Antisense strand to SEQ ID NO: 1376458
gacucccagaugaaucagc

SEQ ID NO: 1376460 - RNA, 19 nt, Artificial Sequence
  Description of Artificial Sequence: Synthetic oligonucleotide
  Sense strand starting at position 2071 of SEQ ID NO: 1242837
aucucuaagugcuguuauu

SEQ ID NO: 1376461 - RNA, 19 nt, Artificial Sequence
  Description of Artificial Sequence: Synthetic oligonucleotide
  Antisense strand to SEQ ID NO: 1376460
aauaacagcacuuagagau

SEQ ID NO: 1376462 - RNA, 19 nt, Artificial Sequence
  Description of Artificial Sequence: Synthetic oligonucleotide
  Sense strand starting at position 2163 of SEQ ID NO: 1242837
gaugguacauuucgauaug

SEQ ID NO: 1376463 - RNA, 19 nt, Artificial Sequence
  Description of Artificial Sequence: Synthetic oligonucleotide
  Antisense strand to SEQ ID NO: 1376462
cauaucgaaauguaccauc

SEQ ID NO: 1376464 - RNA, 19 nt, Artificial Sequence
  Description of Artificial Sequence: Synthetic oligonucleotide
  Sense strand starting at position 2166 of SEQ ID NO: 1242837
gguacauuucgauaugcgu

SEQ ID NO: 1376465 - RNA, 19 nt, Artificial Sequence
  Description of Artificial Sequence: Synthetic oligonucleotide
  Antisense strand to SEQ ID NO: 1376464
acgcauaucgaaauguacc

SEQ ID NO: 1376466 - RNA, 19 nt, Artificial Sequence
  Description of Artificial Sequence: Synthetic oligonucleotide
  Sense strand starting at position 2169 of SEQ ID NO: 1242837
acauuucgauaugcguauu

SEQ ID NO: 1376467 - RNA, 19 nt, Artificial Sequence
  Description of Artificial Sequence: Synthetic oligonucleotide
  Antisense strand to SEQ ID NO: 1376466
aauacgcauaucgaaaugu

SEQ ID NO: 1376468 - RNA, 19 nt, Artificial Sequence
  Description of Artificial Sequence: Synthetic oligonucleotide
  Sense strand starting at position 2179 of SEQ ID NO: 1242837
augcguauuucacggcaau

SEQ ID NO: 1376469 - RNA, 19 nt, Artificial Sequence
  Description of Artificial Sequence: Synthetic oligonucleotide
  Antisense strand to SEQ ID NO: 1376468
auugccgugaaauacgcau

SEQ ID NO: 1376470 - RNA, 19 nt, Artificial Sequence
  Description of Artificial Sequence: Synthetic oligonucleotide
  Sense strand starting at position 2180 of SEQ ID NO: 1242837
ugcguauuucacggcaauu

SEQ ID NO: 1376471 - RNA, 19 nt, Artificial Sequence
  Description of Artificial Sequence: Synthetic oligonucleotide
  Antisense strand to SEQ ID NO: 1376470
aauugccgugaaauacgca

SEQ ID NO: 1376472 - RNA, 19 nt, Artificial Sequence
  Description of Artificial Sequence: Synthetic oligonucleotide
  Sense strand starting at position 2279 of SEQ ID NO: 1242837
agaggaucgcuugagugaa

SEQ ID NO: 1376473 - RNA, 19 nt, Artificial Sequence
  Description of Artificial Sequence: Synthetic oligonucleotide
  Antisense strand to SEQ ID NO: 1376472
uucacucaagcgauccucu

SEQ ID NO: 1376474 - RNA, 19 nt, Artificial Sequence
  Description of Artificial Sequence: Synthetic oligonucleotide
  Sense strand starting at position 2521 of SEQ ID NO: 1242837
ggugguaugugucuuggga

SEQ ID NO: 1376475 - RNA, 19 nt, Artificial Sequence
  Description of Artificial Sequence: Synthetic oligonucleotide
  Antisense strand to SEQ ID NO: 1376474
ucccaagacacauaccacc

SEQ ID NO: 1376476 - RNA, 19 nt, Artificial Sequence
  Description of Artificial Sequence: Synthetic oligonucleotide
  Sense strand starting at position 2525 of SEQ ID NO: 1242837
guaugugucuugggaggcu

SEQ ID NO: 1376477 - RNA, 19 nt, Artificial Sequence
  Description of Artificial Sequence: Synthetic oligonucleotide
  Antisense strand to SEQ ID NO: 1376476
agccucccaagacacauac

SEQ ID NO: 1376478 - RNA, 19 nt, Artificial Sequence
  Description of Artificial Sequence: Synthetic oligonucleotide
  Sense strand starting at position 2746 of SEQ ID NO: 1242837
gacugaucccuugagcuca

SEQ ID NO: 1376479 - RNA, 19 nt, Artificial Sequence
  Description of Artificial Sequence: Synthetic oligonucleotide
  Antisense strand to SEQ ID NO: 1376478
ugagcucaagggaucaguc

SEQ ID NO: 1376480 - RNA, 19 nt, Artificial Sequence
  Description of Artificial Sequence: Synthetic oligonucleotide
  Sense strand starting at position 3520 of SEQ ID NO: 1242837
cccacacuuggcuaaguuu

SEQ ID NO: 1376481 - RNA, 19 nt, Artificial Sequence
  Description of Artificial Sequence: Synthetic oligonucleotide
  Antisense strand to SEQ ID NO: 1376480
aaacuuagccaaguguggg

SEQ ID NO: 1376482 - RNA, 19 nt, Artificial Sequence
  Description of Artificial Sequence: Synthetic oligonucleotide
  Sense strand starting at position 3740 of SEQ ID NO: 1242837
ccaguuaaaucagucauga

SEQ ID NO: 1376483 - RNA, 19 nt, Artificial Sequence
  Description of Artificial Sequence: Synthetic oligonucleotide
  Antisense strand to SEQ ID NO: 1376482
ucaugacugauuuaacugg

SEQ ID NO: 1376484 - RNA, 19 nt, Artificial Sequence
  Description of Artificial Sequence: Synthetic oligonucleotide
  Sense strand starting at position 3744 of SEQ ID NO: 1242837
uuaaaucagucaugaugua

SEQ ID NO: 1376485 - RNA, 19 nt, Artificial Sequence
  Description of Artificial Sequence: Synthetic oligonucleotide
  Antisense strand to SEQ ID NO: 1376484
uacaucaugacugauuuaa

SEQ ID NO: 1376486 - RNA, 19 nt, Artificial Sequence
  Description of Artificial Sequence: Synthetic oligonucleotide
  Sense strand starting at position 3757 of SEQ ID NO: 1242837
gauguaauuccaugcagug

SEQ ID NO: 1376487 - RNA, 19 nt, Artificial Sequence
  Description of Artificial Sequence: Synthetic oligonucleotide
  Antisense strand to SEQ ID NO: 1376486
cacugcauggaauuacauc

SEQ ID NO: 1376488 - RNA, 19 nt, Artificial Sequence
  Description of Artificial Sequence: Synthetic oligonucleotide
  Sense strand starting at position 3805 of SEQ ID NO: 1242837
ugcucuuguuuagaaucau

SEQ ID NO: 1376489 - RNA, 19 nt, Artificial Sequence
  Description of Artificial Sequence: Synthetic oligonucleotide
  Antisense strand to SEQ ID NO: 1376488
augauucuaaacaagagca

SEQ ID NO: 1376490 - RNA, 19 nt, Artificial Sequence
  Description of Artificial Sequence: Synthetic oligonucleotide
  Sense strand starting at position 15 of SEQ ID NO: 1242838
agcuuauuggccugggaug

SEQ ID NO: 1376491 - RNA, 19 nt, Artificial Sequence
  Description of Artificial Sequence: Synthetic oligonucleotide
  Antisense strand to SEQ ID NO: 1376490
caucccaggccaauaagcu

SEQ ID NO: 1376492 - RNA, 19 nt, Artificial Sequence
  Description of Artificial Sequence: Synthetic oligonucleotide
  Sense strand starting at position 16 of SEQ ID NO: 1242838
gcuuauuggccugggaugu

SEQ ID NO: 1376493 - RNA, 19 nt, Artificial Sequence
  Description of Artificial Sequence: Synthetic oligonucleotide
  Antisense strand to SEQ ID NO: 1376492
acaucccaggccaauaagc

SEQ ID NO: 1376494 - RNA, 19 nt, Artificial Sequence
  Description of Artificial Sequence: Synthetic oligonucleotide
  Sense strand starting at position 38 of SEQ ID NO: 1242838
gaugaaagguucucaauac

SEQ ID NO: 1376495 - RNA, 19 nt, Artificial Sequence
  Description of Artificial Sequence: Synthetic oligonucleotide
  Antisense strand to SEQ ID NO: 1376494
guauugagaaccuuucauc

SEQ ID NO: 1376496 - RNA, 19 nt, Artificial Sequence
  Description of Artificial Sequence: Synthetic oligonucleotide
  Sense strand starting at position 107 of SEQ ID NO: 1242838
agaggaggcuguuaccuua

SEQ ID NO: 1376497 - RNA, 19 nt, Artificial Sequence
  Description of Artificial Sequence: Synthetic oligonucleotide
  Antisense strand to SEQ ID NO: 1376496
uaagguaacagccuccucu

SEQ ID NO: 1376498 - RNA, 19 nt, Artificial Sequence
  Description of Artificial Sequence: Synthetic oligonucleotide
  Sense strand starting at position 163 of SEQ ID NO: 1242838
cggcgaggccauugaaauc

SEQ ID NO: 1376499 - RNA, 19 nt, Artificial Sequence
  Description of Artificial Sequence: Synthetic oligonucleotide
  Antisense strand to SEQ ID NO: 1376498
gauuucaauggccucgccg

SEQ ID NO: 1376500 - RNA, 19 nt, Artificial Sequence
  Description of Artificial Sequence: Synthetic oligonucleotide
  Sense strand starting at position 174 of SEQ ID NO: 1242838
uugaaauccaugggcuuga

SEQ ID NO: 1376501 - RNA, 19 nt, Artificial Sequence
  Description of Artificial Sequence: Synthetic oligonucleotide
  Antisense strand to SEQ ID NO: 1376500
ucaagcccauggauuucaa

SEQ ID NO: 1376502 - RNA, 19 nt, Artificial Sequence
  Description of Artificial Sequence: Synthetic oligonucleotide
  Sense strand starting at position 439 of SEQ ID NO: 1242838
ggucguagagaaggucaaa

SEQ ID NO: 1376503 - RNA, 19 nt, Artificial Sequence
  Description of Artificial Sequence: Synthetic oligonucleotide
  Antisense strand to SEQ ID NO: 1376502
uuugaccuucucuacgacc

SEQ ID NO: 1376504 - RNA, 19 nt, Artificial Sequence
  Description of Artificial Sequence: Synthetic oligonucleotide
  Sense strand starting at position 666 of SEQ ID NO: 1242838
gguggagugucucagcaga

SEQ ID NO: 1376505 - RNA, 19 nt, Artificial Sequence
  Description of Artificial Sequence: Synthetic oligonucleotide
  Antisense strand to SEQ ID NO: 1376504
ucugcugagacacuccacc

SEQ ID NO: 1376506 - RNA, 19 nt, Artificial Sequence
  Description of Artificial Sequence: Synthetic oligonucleotide
  Sense strand starting at position 668 of SEQ ID NO: 1242838
uggagugucucagcagaaa

SEQ ID NO: 1376507 - RNA, 19 nt, Artificial Sequence
  Description of Artificial Sequence: Synthetic oligonucleotide
  Antisense strand to SEQ ID NO: 1376506
uuucugcugagacacucca

SEQ ID NO: 1376508 - RNA, 19 nt, Artificial Sequence
  Description of Artificial Sequence: Synthetic oligonucleotide
  Sense strand starting at position 671 of SEQ ID NO: 1242838
agugucucagcagaaauac

SEQ ID NO: 1376509 - RNA, 19 nt, Artificial Sequence
  Description of Artificial Sequence: Synthetic oligonucleotide
  Antisense strand to SEQ ID NO: 1376508
guauuucugcugagacacu

SEQ ID NO: 1376510 - RNA, 19 nt, Artificial Sequence
  Description of Artificial Sequence: Synthetic oligonucleotide
  Sense strand starting at position 880 of SEQ ID NO: 1242838
cuggcaucauccgagucau

SEQ ID NO: 1376511 - RNA, 19 nt, Artificial Sequence
  Description of Artificial Sequence: Synthetic oligonucleotide
  Antisense strand to SEQ ID NO: 1376510
augacucggaugaugccag

SEQ ID NO: 1376512 - RNA, 19 nt, Artificial Sequence
  Description of Artificial Sequence: Synthetic oligonucleotide
  Sense strand starting at position 1100 of SEQ ID NO: 1242838
ccuggauguugauggucau

SEQ ID NO: 1376513 - RNA, 19 nt, Artificial Sequence
  Description of Artificial Sequence: Synthetic oligonucleotide
  Antisense strand to SEQ ID NO: 1376512
augaccaucaacauccagg

SEQ ID NO: 1376514 - RNA, 19 nt, Artificial Sequence
  Description of Artificial Sequence: Synthetic oligonucleotide
  Sense strand starting at position 1106 of SEQ ID NO: 1242838
uguugauggucaugcgauc

SEQ ID NO: 1376515 - RNA, 19 nt, Artificial Sequence
  Description of Artificial Sequence: Synthetic oligonucleotide
  Antisense strand to SEQ ID NO: 1376514
gaucgcaugaccaucaaca

SEQ ID NO: 1376516 - RNA, 19 nt, Artificial Sequence
  Description of Artificial Sequence: Synthetic oligonucleotide
  Sense strand starting at position 1414 of SEQ ID NO: 1242838
cuagguugucccuguauca

SEQ ID NO: 1376517 - RNA, 19 nt, Artificial Sequence
  Description of Artificial Sequence: Synthetic oligonucleotide
  Antisense strand to SEQ ID NO: 1376516
ugauacagggacaaccuag

SEQ ID NO: 1376518 - RNA, 19 nt, Artificial Sequence
  Description of Artificial Sequence: Synthetic oligonucleotide
  Sense strand starting at position 1557 of SEQ ID NO: 1242838
uggucuagucaggguguca

SEQ ID NO: 1376519 - RNA, 19 nt, Artificial Sequence
  Description of Artificial Sequence: Synthetic oligonucleotide
  Antisense strand to SEQ ID NO: 1376518
ugacacccugacuagacca

SEQ ID NO: 1376520 - RNA, 19 nt, Artificial Sequence
  Description of Artificial Sequence: Synthetic oligonucleotide
  Sense strand starting at position 2239 of SEQ ID NO: 1242838
ggcacacuuacccggagaa

SEQ ID NO: 1376521 - RNA, 19 nt, Artificial Sequence
  Description of Artificial Sequence: Synthetic oligonucleotide
  Antisense strand to SEQ ID NO: 1376520
uucuccggguaagugugcc

SEQ ID NO: 1376522 - RNA, 19 nt, Artificial Sequence
  Description of Artificial Sequence: Synthetic oligonucleotide
  Sense strand starting at position 2316 of SEQ ID NO: 1242838
gccagaaucgccggguguu

SEQ ID NO: 1376523 - RNA, 19 nt, Artificial Sequence
  Description of Artificial Sequence: Synthetic oligonucleotide
  Antisense strand to SEQ ID NO: 1376522
aacacccggcgauucuggc

SEQ ID NO: 1376524 - RNA, 19 nt, Artificial Sequence
  Description of Artificial Sequence: Synthetic oligonucleotide
  Sense strand starting at position 2336 of SEQ ID NO: 1242838
cccaacuacuccugggaga

SEQ ID NO: 1376525 - RNA, 19 nt, Artificial Sequence
  Description of Artificial Sequence: Synthetic oligonucleotide
  Antisense strand to SEQ ID NO: 1376524
ucucccaggaguaguuggg

SEQ ID NO: 1376526 - RNA, 19 nt, Artificial Sequence
  Description of Artificial Sequence: Synthetic oligonucleotide
  Sense strand starting at position 2747 of SEQ ID NO: 1242838
cagggaugguaucuccuuu

SEQ ID NO: 1376527 - RNA, 19 nt, Artificial Sequence
  Description of Artificial Sequence: Synthetic oligonucleotide
  Antisense strand to SEQ ID NO: 1376526
aaaggagauaccaucccug

SEQ ID NO: 1376528 - RNA, 19 nt, Artificial Sequence
  Description of Artificial Sequence: Synthetic oligonucleotide
  Sense strand starting at position 2751 of SEQ ID NO: 1242838
gaugguaucuccuuuggga

SEQ ID NO: 1376529 - RNA, 19 nt, Artificial Sequence
  Description of Artificial Sequence: Synthetic oligonucleotide
  Antisense strand to SEQ ID NO: 1376528
ucccaaaggagauaccauc

SEQ ID NO: 1376530 - RNA, 19 nt, Artificial Sequence
  Description of Artificial Sequence: Synthetic oligonucleotide
  Sense strand starting at position 2753 of SEQ ID NO: 1242838
ugguaucuccuuugggaac

SEQ ID NO: 1376531 - RNA, 19 nt, Artificial Sequence
  Description of Artificial Sequence: Synthetic oligonucleotide
  Antisense strand to SEQ ID NO: 1376530
guucccaaaggagauacca

SEQ ID NO: 1376532 - RNA, 19 nt, Artificial Sequence
  Description of Artificial Sequence: Synthetic oligonucleotide
  Sense strand starting at position 3094 of SEQ ID NO: 1242838
uagggaucuuggcucacau

SEQ ID NO: 1376533 - RNA, 19 nt, Artificial Sequence
  Description of Artificial Sequence: Synthetic oligonucleotide
  Antisense strand to SEQ ID NO: 1376532
augugagccaagaucccua

SEQ ID NO: 1376534 - RNA, 19 nt, Artificial Sequence
  Description of Artificial Sequence: Synthetic oligonucleotide
  Sense strand starting at position 3281 of SEQ ID NO: 1242838
gcggcugauucaucuggga

SEQ ID NO: 1376535 - RNA, 19 nt, Artificial Sequence
  Description of Artificial Sequence: Synthetic oligonucleotide
  Antisense strand to SEQ ID NO: 1376534
ucccagaugaaucagccgc

SEQ ID NO: 1376536 - RNA, 19 nt, Artificial Sequence
  Description of Artificial Sequence: Synthetic oligonucleotide
  Sense strand starting at position 3284 of SEQ ID NO: 1242838
gcugauucaucugggaguc

SEQ ID NO: 1376537 - RNA, 19 nt, Artificial Sequence
  Description of Artificial Sequence: Synthetic oligonucleotide
  Antisense strand to SEQ ID NO: 1376536
gacucccagaugaaucagc

SEQ ID NO: 1376538 - RNA, 19 nt, Artificial Sequence
  Description of Artificial Sequence: Synthetic oligonucleotide
  Sense strand starting at position 3339 of SEQ ID NO: 1242838
aucucuaagugcuguuauu

SEQ ID NO: 1376539 - RNA, 19 nt, Artificial Sequence
  Description of Artificial Sequence: Synthetic oligonucleotide
  Antisense strand to SEQ ID NO: 1376538
aauaacagcacuuagagau

SEQ ID NO: 1376540 - RNA, 19 nt, Artificial Sequence
  Description of Artificial Sequence: Synthetic oligonucleotide
  Sense strand starting at position 3431 of SEQ ID NO: 1242838
gaugguacauuucgauaug

SEQ ID NO: 1376541 - RNA, 19 nt, Artificial Sequence
  Description of Artificial Sequence: Synthetic oligonucleotide
  Antisense strand to SEQ ID NO: 1376540
cauaucgaaauguaccauc

SEQ ID NO: 1376542 - RNA, 19 nt, Artificial Sequence
  Description of Artificial Sequence: Synthetic oligonucleotide
  Sense strand starting at position 3434 of SEQ ID NO: 1242838
gguacauuucgauaugcgu

SEQ ID NO: 1376543 - RNA, 19 nt, Artificial Sequence
  Description of Artificial Sequence: Synthetic oligonucleotide
  Antisense strand to SEQ ID NO: 1376542
acgcauaucgaaauguacc

SEQ ID NO: 1376544 - RNA, 19 nt, Artificial Sequence
  Description of Artificial Sequence: Synthetic oligonucleotide
  Sense strand starting at position 3437 of SEQ ID NO: 1242838
acauuucgauaugcguauu

SEQ ID NO: 1376545 - RNA, 19 nt, Artificial Sequence
  Description of Artificial Sequence: Synthetic oligonucleotide
  Antisense strand to SEQ ID NO: 1376544
aauacgcauaucgaaaugu

SEQ ID NO: 1376546 - RNA, 19 nt, Artificial Sequence
  Description of Artificial Sequence: Synthetic oligonucleotide
  Sense strand starting at position 3447 of SEQ ID NO: 1242838
augcguauuucacggcaau

SEQ ID NO: 1376547 - RNA, 19 nt, Artificial Sequence
  Description of Artificial Sequence: Synthetic oligonucleotide
  Antisense strand to SEQ ID NO: 1376546
auugccgugaaauacgcau

SEQ ID NO: 1376548 - RNA, 19 nt, Artificial Sequence
  Description of Artificial Sequence: Synthetic oligonucleotide
  Sense strand starting at position 3448 of SEQ ID NO: 1242838
ugcguauuucacggcaauu

SEQ ID NO: 1376549 - RNA, 19 nt, Artificial Sequence
  Description of Artificial Sequence: Synthetic oligonucleotide
  Antisense strand to SEQ ID NO: 1376548
aauugccgugaaauacgca

SEQ ID NO: 1376550 - RNA, 19 nt, Artificial Sequence
  Description of Artificial Sequence: Synthetic oligonucleotide
  Sense strand starting at position 3547 of SEQ ID NO: 1242838
agaggaucgcuugagugaa

SEQ ID NO: 1376551 - RNA, 19 nt, Artificial Sequence
  Description of Artificial Sequence: Synthetic oligonucleotide
  Antisense strand to SEQ ID NO: 1376550
uucacucaagcgauccucu

SEQ ID NO: 1376552 - RNA, 19 nt, Artificial Sequence
  Description of Artificial Sequence: Synthetic oligonucleotide
  Sense strand starting at position 3789 of SEQ ID NO: 1242838
ggugguaugugucuuggga

SEQ ID NO: 1376553 - RNA, 19 nt, Artificial Sequence
  Description of Artificial Sequence: Synthetic oligonucleotide
  Antisense strand to SEQ ID NO: 1376552
ucccaagacacauaccacc

SEQ ID NO: 1376554 - RNA, 19 nt, Artificial Sequence
  Description of Artificial Sequence: Synthetic oligonucleotide
  Sense strand starting at position 3793 of SEQ ID NO: 1242838
guaugugucuugggaggcu

SEQ ID NO: 1376555 - RNA, 19 nt, Artificial Sequence
  Description of Artificial Sequence: Synthetic oligonucleotide
  Antisense strand to SEQ ID NO: 1376554
agccucccaagacacauac

SEQ ID NO: 1376556 - RNA, 19 nt, Artificial Sequence
  Description of Artificial Sequence: Synthetic oligonucleotide
  Sense strand starting at position 91 of SEQ ID NO: 1242839
cccuuaagccaggagagua

SEQ ID NO: 1376557 - RNA, 19 nt, Artificial Sequence
  Description of Artificial Sequence: Synthetic oligonucleotide
  Antisense strand to SEQ ID NO: 1376556
uacucuccuggcuuaaggg

SEQ ID NO: 1376558 - RNA, 19 nt, Artificial Sequence
  Description of Artificial Sequence: Synthetic oligonucleotide
  Sense strand starting at position 353 of SEQ ID NO: 1242839
cgcacaucaccaugggauu

SEQ ID NO: 1376559 - RNA, 19 nt, Artificial Sequence
  Description of Artificial Sequence: Synthetic oligonucleotide
  Antisense strand to SEQ ID NO: 1376558
aaucccauggugaugugcg

SEQ ID NO: 1376560 - RNA, 19 nt, Artificial Sequence
  Description of Artificial Sequence: Synthetic oligonucleotide
  Sense strand starting at position 377 of SEQ ID NO: 1242839
guucuuacaucuguccauu

SEQ ID NO: 1376561 - RNA, 19 nt, Artificial Sequence
  Description of Artificial Sequence: Synthetic oligonucleotide
  Antisense strand to SEQ ID NO: 1376560
aauggacagauguaagaac

SEQ ID NO: 1376562 - RNA, 19 nt, Artificial Sequence
  Description of Artificial Sequence: Synthetic oligonucleotide
  Sense strand starting at position 391 of SEQ ID NO: 1242839
ccauuuguuucuggccaca

SEQ ID NO: 1376563 - RNA, 19 nt, Artificial Sequence
  Description of Artificial Sequence: Synthetic oligonucleotide
  Antisense strand to SEQ ID NO: 1376562
uguggccagaaacaaaugg

SEQ ID NO: 1376564 - RNA, 19 nt, Artificial Sequence
  Description of Artificial Sequence: Synthetic oligonucleotide
  Sense strand starting at position 445 of SEQ ID NO: 1242839
ggccucgucugucuaguua

SEQ ID NO: 1376565 - RNA, 19 nt, Artificial Sequence
  Description of Artificial Sequence: Synthetic oligonucleotide
  Antisense strand to SEQ ID NO: 1376564
uaacuagacagacgaggcc

SEQ ID NO: 1376566 - RNA, 19 nt, Artificial Sequence
  Description of Artificial Sequence: Synthetic oligonucleotide
  Sense strand starting at position 449 of SEQ ID NO: 1242839
ucgucugucuaguuaacag

SEQ ID NO: 1376567 - RNA, 19 nt, Artificial Sequence
  Description of Artificial Sequence: Synthetic oligonucleotide
  Antisense strand to SEQ ID NO: 1376566
cuguuaacuagacagacga

SEQ ID NO: 1376568 - RNA, 19 nt, Artificial Sequence
  Description of Artificial Sequence: Synthetic oligonucleotide
  Sense strand starting at position 532 of SEQ ID NO: 1242839
acguaauucucuccaggac

SEQ ID NO: 1376569 - RNA, 19 nt, Artificial Sequence
  Description of Artificial Sequence: Synthetic oligonucleotide
  Antisense strand to SEQ ID NO: 1376568
guccuggagagaauuacgu

SEQ ID NO: 1376570 - RNA, 19 nt, Artificial Sequence
  Description of Artificial Sequence: Synthetic oligonucleotide
  Sense strand starting at position 533 of SEQ ID NO: 1242839
cguaauucucuccaggacu

SEQ ID NO: 1376571 - RNA, 19 nt, Artificial Sequence
  Description of Artificial Sequence: Synthetic oligonucleotide
  Antisense strand to SEQ ID NO: 1376570
aguccuggagagaauuacg

SEQ ID NO: 1376572 - RNA, 19 nt, Artificial Sequence
  Description of Artificial Sequence: Synthetic oligonucleotide
  Sense strand starting at position 684 of SEQ ID NO: 1242839
ggcuguuguuacuggagaa

SEQ ID NO: 1376573 - RNA, 19 nt, Artificial Sequence
  Description of Artificial Sequence: Synthetic oligonucleotide
  Antisense strand to SEQ ID NO: 1376572
uucuccaguaacaacagcc

SEQ ID NO: 1376574 - RNA, 19 nt, Artificial Sequence
  Description of Artificial Sequence: Synthetic oligonucleotide
  Sense strand starting at position 685 of SEQ ID NO: 1242839
gcuguuguuacuggagaac

SEQ ID NO: 1376575 - RNA, 19 nt, Artificial Sequence
  Description of Artificial Sequence: Synthetic oligonucleotide
  Antisense strand to SEQ ID NO: 1376574
guucuccaguaacaacagc

SEQ ID NO: 1376576 - RNA, 19 nt, Artificial Sequence
  Description of Artificial Sequence: Synthetic oligonucleotide
  Sense strand starting at position 721 of SEQ ID NO: 1242839
cgcaguuugguucagagcu

SEQ ID NO: 1376577 - RNA, 19 nt, Artificial Sequence
  Description of Artificial Sequence: Synthetic oligonucleotide
  Antisense strand to SEQ ID NO: 1376576
agcucugaaccaaacugcg

SEQ ID NO: 1376578 - RNA, 19 nt, Artificial Sequence
  Description of Artificial Sequence: Synthetic oligonucleotide
  Sense strand starting at position 849 of SEQ ID NO: 1242839
gagggaagugcugggagua

SEQ ID NO: 1376579 - RNA, 19 nt, Artificial Sequence
  Description of Artificial Sequence: Synthetic oligonucleotide
  Antisense strand to SEQ ID NO: 1376578
uacucccagcacuucccuc

SEQ ID NO: 1376580 - RNA, 19 nt, Artificial Sequence
  Description of Artificial Sequence: Synthetic oligonucleotide
  Sense strand starting at position 850 of SEQ ID NO: 1242839
agggaagugcugggaguaa

SEQ ID NO: 1376581 - RNA, 19 nt, Artificial Sequence
  Description of Artificial Sequence: Synthetic oligonucleotide
  Antisense strand to SEQ ID NO: 1376580
uuacucccagcacuucccu

SEQ ID NO: 1376582 - RNA, 19 nt, Artificial Sequence
  Description of Artificial Sequence: Synthetic oligonucleotide
  Sense strand starting at position 910 of SEQ ID NO: 1242839
cacagcuccugggaucaga

SEQ ID NO: 1376583 - RNA, 19 nt, Artificial Sequence
  Description of Artificial Sequence: Synthetic oligonucleotide
  Antisense strand to SEQ ID NO: 1376582
ucugaucccaggagcugug

SEQ ID NO: 1376584 - RNA, 19 nt, Artificial Sequence
  Description of Artificial Sequence: Synthetic oligonucleotide
  Sense strand starting at position 1028 of SEQ ID NO: 1242839
aguggagucuccuagagau

SEQ ID NO: 1376585 - RNA, 19 nt, Artificial Sequence
  Description of Artificial Sequence: Synthetic oligonucleotide
  Antisense strand to SEQ ID NO: 1376584
aucucuaggagacuccacu

SEQ ID NO: 1376586 - RNA, 19 nt, Artificial Sequence
  Description of Artificial Sequence: Synthetic oligonucleotide
  Sense strand starting at position 1320 of SEQ ID NO: 1242839
ggcagcuggccaugaguuu

SEQ ID NO: 1376587 - RNA, 19 nt, Artificial Sequence
  Description of Artificial Sequence: Synthetic oligonucleotide
  Antisense strand to SEQ ID NO: 1376586
aaacucauggccagcugcc

SEQ ID NO: 1376588 - RNA, 19 nt, Artificial Sequence
  Description of Artificial Sequence: Synthetic oligonucleotide
  Sense strand starting at position 1541 of SEQ ID NO: 1242839
ggguugcucggaugagguu

SEQ ID NO: 1376589 - RNA, 19 nt, Artificial Sequence
  Description of Artificial Sequence: Synthetic oligonucleotide
  Antisense strand to SEQ ID NO: 1376588
aaccucauccgagcaaccc

SEQ ID NO: 1376590 - RNA, 19 nt, Artificial Sequence
  Description of Artificial Sequence: Synthetic oligonucleotide
  Sense strand starting at position 1550 of SEQ ID NO: 1242839
ggaugagguuugugugggu

SEQ ID NO: 1376591 - RNA, 19 nt, Artificial Sequence
  Description of Artificial Sequence: Synthetic oligonucleotide
  Antisense strand to SEQ ID NO: 1376590
acccacacaaaccucaucc

SEQ ID NO: 1376592 - RNA, 19 nt, Artificial Sequence
  Description of Artificial Sequence: Synthetic oligonucleotide
  Sense strand starting at position 1713 of SEQ ID NO: 1242839
gacggagcguccucagguu

SEQ ID NO: 1376593 - RNA, 19 nt, Artificial Sequence
  Description of Artificial Sequence: Synthetic oligonucleotide
  Antisense strand to SEQ ID NO: 1376592
aaccugaggacgcuccguc

SEQ ID NO: 1376594 - RNA, 19 nt, Artificial Sequence
  Description of Artificial Sequence: Synthetic oligonucleotide
  Sense strand starting at position 2645 of SEQ ID NO: 1242839
gugguugacucacugaucu

SEQ ID NO: 1376595 - RNA, 19 nt, Artificial Sequence
  Description of Artificial Sequence: Synthetic oligonucleotide
  Antisense strand to SEQ ID NO: 1376594
agaucagugagucaaccac

SEQ ID NO: 1376596 - RNA, 19 nt, Artificial Sequence
  Description of Artificial Sequence: Synthetic oligonucleotide
  Sense strand starting at position 2647 of SEQ ID NO: 1242839
gguugacucacugaucugu

SEQ ID NO: 1376597 - RNA, 19 nt, Artificial Sequence
  Description of Artificial Sequence: Synthetic oligonucleotide
  Antisense strand to SEQ ID NO: 1376596
acagaucagugagucaacc

SEQ ID NO: 1376598 - RNA, 19 nt, Artificial Sequence
  Description of Artificial Sequence: Synthetic oligonucleotide
  Sense strand starting at position 2652 of SEQ ID NO: 1242839
acucacugaucugucggaa

SEQ ID NO: 1376599 - RNA, 19 nt, Artificial Sequence
  Description of Artificial Sequence: Synthetic oligonucleotide
  Antisense strand to SEQ ID NO: 1376598
uuccgacagaucagugagu

SEQ ID NO: 1376600 - RNA, 19 nt, Artificial Sequence
  Description of Artificial Sequence: Synthetic oligonucleotide
  Sense strand starting at position 2893 of SEQ ID NO: 1242839
ggguuuccagcagaaaugu

SEQ ID NO: 1376601 - RNA, 19 nt, Artificial Sequence
  Description of Artificial Sequence: Synthetic oligonucleotide
  Antisense strand to SEQ ID NO: 1376600
acauuucugcuggaaaccc

SEQ ID NO: 1376602 - RNA, 19 nt, Artificial Sequence
  Description of Artificial Sequence: Synthetic oligonucleotide
  Sense strand starting at position 2899 of SEQ ID NO: 1242839
ccagcagaaauguguguuu

SEQ ID NO: 1376603 - RNA, 19 nt, Artificial Sequence
  Description of Artificial Sequence: Synthetic oligonucleotide
  Antisense strand to SEQ ID NO: 1376602
aaacacacauuucugcugg

SEQ ID NO: 1376604 - RNA, 19 nt, Artificial Sequence
  Description of Artificial Sequence: Synthetic oligonucleotide
  Sense strand starting at position 2931 of SEQ ID NO: 1242839
gauucugaugcacacgaau

SEQ ID NO: 1376605 - RNA, 19 nt, Artificial Sequence
  Description of Artificial Sequence: Synthetic oligonucleotide
  Antisense strand to SEQ ID NO: 1376604
auucgugugcaucagaauc

SEQ ID NO: 1376606 - RNA, 19 nt, Artificial Sequence
  Description of Artificial Sequence: Synthetic oligonucleotide
  Sense strand starting at position 3054 of SEQ ID NO: 1242839
ccaggugucucagaggaau

SEQ ID NO: 1376607 - RNA, 19 nt, Artificial Sequence
  Description of Artificial Sequence: Synthetic oligonucleotide
  Antisense strand to SEQ ID NO: 1376606
auuccucugagacaccugg

SEQ ID NO: 1376608 - RNA, 19 nt, Artificial Sequence
  Description of Artificial Sequence: Synthetic oligonucleotide
  Sense strand starting at position 3056 of SEQ ID NO: 1242839
aggugucucagaggaauag

SEQ ID NO: 1376609 - RNA, 19 nt, Artificial Sequence
  Description of Artificial Sequence: Synthetic oligonucleotide
  Antisense strand to SEQ ID NO: 1376608
cuauuccucugagacaccu

SEQ ID NO: 1376610 - RNA, 19 nt, Artificial Sequence
  Description of Artificial Sequence: Synthetic oligonucleotide
  Sense strand starting at position 3216 of SEQ ID NO: 1242839
cauuguggugucugugauc

SEQ ID NO: 1376611 - RNA, 19 nt, Artificial Sequence
  Description of Artificial Sequence: Synthetic oligonucleotide
  Antisense strand to SEQ ID NO: 1376610
gaucacagacaccacaaug

SEQ ID NO: 1376612 - RNA, 19 nt, Artificial Sequence
  Description of Artificial Sequence: Synthetic oligonucleotide
  Sense strand starting at position 3227 of SEQ ID NO: 1242839
cugugaucagccugagcua

SEQ ID NO: 1376613 - RNA, 19 nt, Artificial Sequence
  Description of Artificial Sequence: Synthetic oligonucleotide
  Antisense strand to SEQ ID NO: 1376612
uagcucaggcugaucacag

SEQ ID NO: 1376614 - RNA, 19 nt, Artificial Sequence
  Description of Artificial Sequence: Synthetic oligonucleotide
  Sense strand starting at position 3228 of SEQ ID NO: 1242839
ugugaucagccugagcuaa

SEQ ID NO: 1376615 - RNA, 19 nt, Artificial Sequence
  Description of Artificial Sequence: Synthetic oligonucleotide
  Antisense strand to SEQ ID NO: 1376614
uuagcucaggcugaucaca

SEQ ID NO: 1376616 - RNA, 19 nt, Artificial Sequence
  Description of Artificial Sequence: Synthetic oligonucleotide
  Sense strand starting at position 3755 of SEQ ID NO: 1242839
acuguugaauuucgagagu

SEQ ID NO: 1376617 - RNA, 19 nt, Artificial Sequence
  Description of Artificial Sequence: Synthetic oligonucleotide
  Antisense strand to SEQ ID NO: 1376616
acucucgaaauucaacagu

SEQ ID NO: 1376618 - RNA, 19 nt, Artificial Sequence
  Description of Artificial Sequence: Synthetic oligonucleotide
  Sense strand starting at position 3764 of SEQ ID NO: 1242839
uuucgagaguuguauauuc

SEQ ID NO: 1376619 - RNA, 19 nt, Artificial Sequence
  Description of Artificial Sequence: Synthetic oligonucleotide
  Antisense strand to SEQ ID NO: 1376618
gaauauacaacucucgaaa

SEQ ID NO: 1376620 - RNA, 19 nt, Artificial Sequence
  Description of Artificial Sequence: Synthetic oligonucleotide
  Sense strand starting at position 3766 of SEQ ID NO: 1242839
ucgagaguuguauauucua

SEQ ID NO: 1376621 - RNA, 19 nt, Artificial Sequence
  Description of Artificial Sequence: Synthetic oligonucleotide
  Antisense strand to SEQ ID NO: 1376620
uagaauauacaacucucga

SEQ ID NO: 1376622 - RNA, 19 nt, Artificial Sequence
  Description of Artificial Sequence: Synthetic oligonucleotide
  Sense strand starting at position 3769 of SEQ ID NO: 1242839
agaguuguauauucuaccu

SEQ ID NO: 1376623 - RNA, 19 nt, Artificial Sequence
  Description of Artificial Sequence: Synthetic oligonucleotide
  Antisense strand to SEQ ID NO: 1376622
agguagaauauacaacucu

SEQ ID NO: 1376624 - RNA, 19 nt, Artificial Sequence
  Description of Artificial Sequence: Synthetic oligonucleotide
  Sense strand starting at position 3774 of SEQ ID NO: 1242839
uguauauucuaccuacuag

SEQ ID NO: 1376625 - RNA, 19 nt, Artificial Sequence
  Description of Artificial Sequence: Synthetic oligonucleotide
  Antisense strand to SEQ ID NO: 1376624
cuaguagguagaauauaca

SEQ ID NO: 1376626 - RNA, 19 nt, Artificial Sequence
  Description of Artificial Sequence: Synthetic oligonucleotide
  Sense strand starting at position 3786 of SEQ ID NO: 1242839
cuacuaguccuuuguugaa

SEQ ID NO: 1376627 - RNA, 19 nt, Artificial Sequence
  Description of Artificial Sequence: Synthetic oligonucleotide
  Antisense strand to SEQ ID NO: 1376626
uucaacaaaggacuaguag

SEQ ID NO: 1376628 - RNA, 19 nt, Artificial Sequence
  Description of Artificial Sequence: Synthetic oligonucleotide
  Sense strand starting at position 3892 of SEQ ID NO: 1242839
uucgauaaagucugaauua

SEQ ID NO: 1376629 - RNA, 19 nt, Artificial Sequence
  Description of Artificial Sequence: Synthetic oligonucleotide
  Antisense strand to SEQ ID NO: 1376628
uaauucagacuuuaucgaa

SEQ ID NO: 1376630 - RNA, 19 nt, Artificial Sequence
  Description of Artificial Sequence: Synthetic oligonucleotide
  Sense strand starting at position 3893 of SEQ ID NO: 1242839
ucgauaaagucugaauuau

SEQ ID NO: 1376631 - RNA, 19 nt, Artificial Sequence
  Description of Artificial Sequence: Synthetic oligonucleotide
  Antisense strand to SEQ ID NO: 1376630
auaauucagacuuuaucga

SEQ ID NO: 1376632 - RNA, 19 nt, Artificial Sequence
  Description of Artificial Sequence: Synthetic oligonucleotide
  Sense strand starting at position 201 of SEQ ID NO: 1242840
uagagacacuuccacguuu

SEQ ID NO: 1376633 - RNA, 19 nt, Artificial Sequence
  Description of Artificial Sequence: Synthetic oligonucleotide
  Antisense strand to SEQ ID NO: 1376632
aaacguggaagugucucua

SEQ ID NO: 1376634 - RNA, 19 nt, Artificial Sequence
  Description of Artificial Sequence: Synthetic oligonucleotide
  Sense strand starting at position 278 of SEQ ID NO: 1242840
gacgccaaucagcaagaau

SEQ ID NO: 1376635 - RNA, 19 nt, Artificial Sequence
  Description of Artificial Sequence: Synthetic oligonucleotide
  Antisense strand to SEQ ID NO: 1376634
auucuugcugauuggcguc

SEQ ID NO: 1376636 - RNA, 19 nt, Artificial Sequence
  Description of Artificial Sequence: Synthetic oligonucleotide
  Sense strand starting at position 287 of SEQ ID NO: 1242840
cagcaagaauucgccaaga

SEQ ID NO: 1376637 - RNA, 19 nt, Artificial Sequence
  Description of Artificial Sequence: Synthetic oligonucleotide
  Antisense strand to SEQ ID NO: 1376636
ucuuggcgaauucuugcug

SEQ ID NO: 1376638 - RNA, 19 nt, Artificial Sequence
  Description of Artificial Sequence: Synthetic oligonucleotide
  Sense strand starting at position 289 of SEQ ID NO: 1242840
gcaagaauucgccaagaga

SEQ ID NO: 1376639 - RNA, 19 nt, Artificial Sequence
  Description of Artificial Sequence: Synthetic oligonucleotide
  Antisense strand to SEQ ID NO: 1376638
ucucuuggcgaauucuugc

SEQ ID NO: 1376640 - RNA, 19 nt, Artificial Sequence
  Description of Artificial Sequence: Synthetic oligonucleotide
  Sense strand starting at position 292 of SEQ ID NO: 1242840
agaauucgccaagagaugu

SEQ ID NO: 1376641 - RNA, 19 nt, Artificial Sequence
  Description of Artificial Sequence: Synthetic oligonucleotide
  Antisense strand to SEQ ID NO: 1376640
acaucucuuggcgaauucu

SEQ ID NO: 1376642 - RNA, 19 nt, Artificial Sequence
  Description of Artificial Sequence: Synthetic oligonucleotide
  Sense strand starting at position 338 of SEQ ID NO: 1242840
auagcuuggcuguguaaga

SEQ ID NO: 1376643 - RNA, 19 nt, Artificial Sequence
  Description of Artificial Sequence: Synthetic oligonucleotide
  Antisense strand to SEQ ID NO: 1376642
ucuuacacagccaagcuau

SEQ ID NO: 1376644 - RNA, 19 nt, Artificial Sequence
  Description of Artificial Sequence: Synthetic oligonucleotide
  Sense strand starting at position 354 of SEQ ID NO: 1242840
agagccauuggccgaagua

SEQ ID NO: 1376645 - RNA, 19 nt, Artificial Sequence
  Description of Artificial Sequence: Synthetic oligonucleotide
  Antisense strand to SEQ ID NO: 1376644
uacuucggccaauggcucu

SEQ ID NO: 1376646 - RNA, 19 nt, Artificial Sequence
  Description of Artificial Sequence: Synthetic oligonucleotide
  Sense strand starting at position 443 of SEQ ID NO: 1242840
uagcauguccugugauaac

SEQ ID NO: 1376647 - RNA, 19 nt, Artificial Sequence
  Description of Artificial Sequence: Synthetic oligonucleotide
  Antisense strand to SEQ ID NO: 1376646
guuaucacaggacaugcua

SEQ ID NO: 1376648 - RNA, 19 nt, Artificial Sequence
  Description of Artificial Sequence: Synthetic oligonucleotide
  Sense strand starting at position 452 of SEQ ID NO: 1242840
cugugauaacccugaagcu

SEQ ID NO: 1376649 - RNA, 19 nt, Artificial Sequence
  Description of Artificial Sequence: Synthetic oligonucleotide
  Antisense strand to SEQ ID NO: 1376648
agcuucaggguuaucacag

SEQ ID NO: 1376650 - RNA, 19 nt, Artificial Sequence
  Description of Artificial Sequence: Synthetic oligonucleotide
  Sense strand starting at position 887 of SEQ ID NO: 1242840
gcagaugacugcgcagaga

SEQ ID NO: 1376651 - RNA, 19 nt, Artificial Sequence
  Description of Artificial Sequence: Synthetic oligonucleotide
  Antisense strand to SEQ ID NO: 1376650
ucucugcgcagucaucugc

SEQ ID NO: 1376652 - RNA, 19 nt, Artificial Sequence
  Description of Artificial Sequence: Synthetic oligonucleotide
  Sense strand starting at position 890 of SEQ ID NO: 1242840
gaugacugcgcagagaauu

SEQ ID NO: 1376653 - RNA, 19 nt, Artificial Sequence
  Description of Artificial Sequence: Synthetic oligonucleotide
  Antisense strand to SEQ ID NO: 1376652
aauucucugcgcagucauc

SEQ ID NO: 1376654 - RNA, 19 nt, Artificial Sequence
  Description of Artificial Sequence: Synthetic oligonucleotide
  Sense strand starting at position 898 of SEQ ID NO: 1242840
cgcagagaauuccagaaca

SEQ ID NO: 1376655 - RNA, 19 nt, Artificial Sequence
  Description of Artificial Sequence: Synthetic oligonucleotide
  Antisense strand to SEQ ID NO: 1376654
uguucuggaauucucugcg

SEQ ID NO: 1376656 - RNA, 19 nt, Artificial Sequence
  Description of Artificial Sequence: Synthetic oligonucleotide
  Sense strand starting at position 1278 of SEQ ID NO: 1242840
ccuagaaucccaggaagca

SEQ ID NO: 1376657 - RNA, 19 nt, Artificial Sequence
  Description of Artificial Sequence: Synthetic oligonucleotide
  Antisense strand to SEQ ID NO: 1376656
ugcuuccugggauucuagg

SEQ ID NO: 1376658 - RNA, 19 nt, Artificial Sequence
  Description of Artificial Sequence: Synthetic oligonucleotide
  Sense strand starting at position 1323 of SEQ ID NO: 1242840
gugccagccuccuagaauc

SEQ ID NO: 1376659 - RNA, 19 nt, Artificial Sequence
  Description of Artificial Sequence: Synthetic oligonucleotide
  Antisense strand to SEQ ID NO: 1376658
gauucuaggaggcuggcac

SEQ ID NO: 1376660 - RNA, 19 nt, Artificial Sequence
  Description of Artificial Sequence: Synthetic oligonucleotide
  Sense strand starting at position 1333 of SEQ ID NO: 1242840
ccuagaaucccaggaagcu

SEQ ID NO: 1376661 - RNA, 19 nt, Artificial Sequence
  Description of Artificial Sequence: Synthetic oligonucleotide
  Antisense strand to SEQ ID NO: 1376660
agcuuccugggauucuagg

SEQ ID NO: 1376662 - RNA, 19 nt, Artificial Sequence
  Description of Artificial Sequence: Synthetic oligonucleotide
  Sense strand starting at position 1743 of SEQ ID NO: 1242840
cccuguguucucugaaagu

SEQ ID NO: 1376663 - RNA, 19 nt, Artificial Sequence
  Description of Artificial Sequence: Synthetic oligonucleotide
  Antisense strand to SEQ ID NO: 1376662
acuuucagagaacacaggg

SEQ ID NO: 1376664 - RNA, 19 nt, Artificial Sequence
  Description of Artificial Sequence: Synthetic oligonucleotide
  Sense strand starting at position 1871 of SEQ ID NO: 1242840
aacuuugcuccaggagaug

SEQ ID NO: 1376665 - RNA, 19 nt, Artificial Sequence
  Description of Artificial Sequence: Synthetic oligonucleotide
  Antisense strand to SEQ ID NO: 1376664
caucuccuggagcaaaguu

SEQ ID NO: 1376666 - RNA, 19 nt, Artificial Sequence
  Description of Artificial Sequence: Synthetic oligonucleotide
  Sense strand starting at position 2050 of SEQ ID NO: 1242840
gaugucagaucuuagagaa

SEQ ID NO: 1376667 - RNA, 19 nt, Artificial Sequence
  Description of Artificial Sequence: Synthetic oligonucleotide
  Antisense strand to SEQ ID NO: 1376666
uucucuaagaucugacauc

SEQ ID NO: 1376668 - RNA, 19 nt, Artificial Sequence
  Description of Artificial Sequence: Synthetic oligonucleotide
  Sense strand starting at position 2060 of SEQ ID NO: 1242840
cuuagagaaugcuacacau

SEQ ID NO: 1376669 - RNA, 19 nt, Artificial Sequence
  Description of Artificial Sequence: Synthetic oligonucleotide
  Antisense strand to SEQ ID NO: 1376668
auguguagcauucucuaag

SEQ ID NO: 1376670 - RNA, 19 nt, Artificial Sequence
  Description of Artificial Sequence: Synthetic oligonucleotide
  Sense strand starting at position 2070 of SEQ ID NO: 1242840
gcuacacaucaguacacau

SEQ ID NO: 1376671 - RNA, 19 nt, Artificial Sequence
  Description of Artificial Sequence: Synthetic oligonucleotide
  Antisense strand to SEQ ID NO: 1376670
auguguacugauguguagc

SEQ ID NO: 1376672 - RNA, 19 nt, Artificial Sequence
  Description of Artificial Sequence: Synthetic oligonucleotide
  Sense strand starting at position 2191 of SEQ ID NO: 1242840
caugauguccuuuggaaug

SEQ ID NO: 1376673 - RNA, 19 nt, Artificial Sequence
  Description of Artificial Sequence: Synthetic oligonucleotide
  Antisense strand to SEQ ID NO: 1376672
cauuccaaaggacaucaug

SEQ ID NO: 1376674 - RNA, 19 nt, Artificial Sequence
  Description of Artificial Sequence: Synthetic oligonucleotide
  Sense strand starting at position 2302 of SEQ ID NO: 1242840
ccggcacagcuguaaucau

SEQ ID NO: 1376675 - RNA, 19 nt, Artificial Sequence
  Description of Artificial Sequence: Synthetic oligonucleotide
  Antisense strand to SEQ ID NO: 1376674
augauuacagcugugccgg

SEQ ID NO: 1376676 - RNA, 19 nt, Artificial Sequence
  Description of Artificial Sequence: Synthetic oligonucleotide
  Sense strand starting at position 2311 of SEQ ID NO: 1242840
cuguaaucaugugcuuaau

SEQ ID NO: 1376677 - RNA, 19 nt, Artificial Sequence
  Description of Artificial Sequence: Synthetic oligonucleotide
  Antisense strand to SEQ ID NO: 1376676
auuaagcacaugauuacag

SEQ ID NO: 1376678 - RNA, 19 nt, Artificial Sequence
  Description of Artificial Sequence: Synthetic oligonucleotide
  Sense strand starting at position 2578 of SEQ ID NO: 1242840
acagguguucguagcagga

SEQ ID NO: 1376679 - RNA, 19 nt, Artificial Sequence
  Description of Artificial Sequence: Synthetic oligonucleotide
  Antisense strand to SEQ ID NO: 1376678
uccugcuacgaacaccugu

SEQ ID NO: 1376680 - RNA, 19 nt, Artificial Sequence
  Description of Artificial Sequence: Synthetic oligonucleotide
  Sense strand starting at position 2580 of SEQ ID NO: 1242840
agguguucguagcaggaca

SEQ ID NO: 1376681 - RNA, 19 nt, Artificial Sequence
  Description of Artificial Sequence: Synthetic oligonucleotide
  Antisense strand to SEQ ID NO: 1376680
uguccugcuacgaacaccu

SEQ ID NO: 1376682 - RNA, 19 nt, Artificial Sequence
  Description of Artificial Sequence: Synthetic oligonucleotide
  Sense strand starting at position 2582 of SEQ ID NO: 1242840
guguucguagcaggacaau

SEQ ID NO: 1376683 - RNA, 19 nt, Artificial Sequence
  Description of Artificial Sequence: Synthetic oligonucleotide
  Antisense strand to SEQ ID NO: 1376682
auuguccugcuacgaacac

SEQ ID NO: 1376684 - RNA, 19 nt, Artificial Sequence
  Description of Artificial Sequence: Synthetic oligonucleotide
  Sense strand starting at position 2647 of SEQ ID NO: 1242840
acagauaaaugugucucuu

SEQ ID NO: 1376685 - RNA, 19 nt, Artificial Sequence
  Description of Artificial Sequence: Synthetic oligonucleotide
  Antisense strand to SEQ ID NO: 1376684
aagagacacauuuaucugu

SEQ ID NO: 1376686 - RNA, 19 nt, Artificial Sequence
  Description of Artificial Sequence: Synthetic oligonucleotide
  Sense strand starting at position 2704 of SEQ ID NO: 1242840
cgugcugacacgugcuaua

SEQ ID NO: 1376687 - RNA, 19 nt, Artificial Sequence
  Description of Artificial Sequence: Synthetic oligonucleotide
  Antisense strand to SEQ ID NO: 1376686
uauagcacgugucagcacg

SEQ ID NO: 1376688 - RNA, 19 nt, Artificial Sequence
  Description of Artificial Sequence: Synthetic oligonucleotide
  Sense strand starting at position 2707 of SEQ ID NO: 1242840
gcugacacgugcuauaaca

SEQ ID NO: 1376689 - RNA, 19 nt, Artificial Sequence
  Description of Artificial Sequence: Synthetic oligonucleotide
  Antisense strand to SEQ ID NO: 1376688
uguuauagcacgugucagc

SEQ ID NO: 1376690 - RNA, 19 nt, Artificial Sequence
  Description of Artificial Sequence: Synthetic oligonucleotide
  Sense strand starting at position 2714 of SEQ ID NO: 1242840
cgugcuauaacaugaagaa

SEQ ID NO: 1376691 - RNA, 19 nt, Artificial Sequence
  Description of Artificial Sequence: Synthetic oligonucleotide
  Antisense strand to SEQ ID NO: 1376690
uucuucauguuauagcacg

SEQ ID NO: 1376692 - RNA, 19 nt, Artificial Sequence
  Description of Artificial Sequence: Synthetic oligonucleotide
  Sense strand starting at position 2726 of SEQ ID NO: 1242840
ugaagaaccucagaaacau

SEQ ID NO: 1376693 - RNA, 19 nt, Artificial Sequence
  Description of Artificial Sequence: Synthetic oligonucleotide
  Antisense strand to SEQ ID NO: 1376692
auguuucugagguucuuca

SEQ ID NO: 1376694 - RNA, 19 nt, Artificial Sequence
  Description of Artificial Sequence: Synthetic oligonucleotide
  Sense strand starting at position 2735 of SEQ ID NO: 1242840
ucagaaacauuucgcuaag

SEQ ID NO: 1376695 - RNA, 19 nt, Artificial Sequence
  Description of Artificial Sequence: Synthetic oligonucleotide
  Antisense strand to SEQ ID NO: 1376694
cuuagcgaaauguuucuga

SEQ ID NO: 1376696 - RNA, 19 nt, Artificial Sequence
  Description of Artificial Sequence: Synthetic oligonucleotide
  Sense strand starting at position 2897 of SEQ ID NO: 1242840
gugggagccugucucagaa

SEQ ID NO: 1376697 - RNA, 19 nt, Artificial Sequence
  Description of Artificial Sequence: Synthetic oligonucleotide
  Antisense strand to SEQ ID NO: 1376696
uucugagacaggcucccac

SEQ ID NO: 1376698 - RNA, 19 nt, Artificial Sequence
  Description of Artificial Sequence: Synthetic oligonucleotide
  Sense strand starting at position 3008 of SEQ ID NO: 1242840
guggauucaugguuguuga

SEQ ID NO: 1376699 - RNA, 19 nt, Artificial Sequence
  Description of Artificial Sequence: Synthetic oligonucleotide
  Antisense strand to SEQ ID NO: 1376698
ucaacaaccaugaauccac

SEQ ID NO: 1376700 - RNA, 19 nt, Artificial Sequence
  Description of Artificial Sequence: Synthetic oligonucleotide
  Sense strand starting at position 3343 of SEQ ID NO: 1242840
ucggccucccagugugaua

SEQ ID NO: 1376701 - RNA, 19 nt, Artificial Sequence
  Description of Artificial Sequence: Synthetic oligonucleotide
  Antisense strand to SEQ ID NO: 1376700
uaucacacugggaggccga

SEQ ID NO: 1376702 - RNA, 19 nt, Artificial Sequence
  Description of Artificial Sequence: Synthetic oligonucleotide
  Sense strand starting at position 3468 of SEQ ID NO: 1242840
gcuuaacuagugugacuga

SEQ ID NO: 1376703 - RNA, 19 nt, Artificial Sequence
  Description of Artificial Sequence: Synthetic oligonucleotide
  Antisense strand to SEQ ID NO: 1376702
ucagucacacuaguuaagc

SEQ ID NO: 1376704 - RNA, 19 nt, Artificial Sequence
  Description of Artificial Sequence: Synthetic oligonucleotide
  Sense strand starting at position 3961 of SEQ ID NO: 1242840
aguagugauggcugugcga

SEQ ID NO: 1376705 - RNA, 19 nt, Artificial Sequence
  Description of Artificial Sequence: Synthetic oligonucleotide
  Antisense strand to SEQ ID NO: 1376704
ucgcacagccaucacuacu

SEQ ID NO: 1376706 - RNA, 19 nt, Artificial Sequence
  Description of Artificial Sequence: Synthetic oligonucleotide
  Sense strand starting at position 3963 of SEQ ID NO: 1242840
uagugauggcugugcgacu

SEQ ID NO: 1376707 - RNA, 19 nt, Artificial Sequence
  Description of Artificial Sequence: Synthetic oligonucleotide
  Antisense strand to SEQ ID NO: 1376706
agucgcacagccaucacua

SEQ ID NO: 1376708 - RNA, 19 nt, Artificial Sequence
  Description of Artificial Sequence: Synthetic oligonucleotide
  Sense strand starting at position 3972 of SEQ ID NO: 1242840
cugugcgacucugaauauu

SEQ ID NO: 1376709 - RNA, 19 nt, Artificial Sequence
  Description of Artificial Sequence: Synthetic oligonucleotide
  Antisense strand to SEQ ID NO: 1376708
aauauucagagucgcacag

SEQ ID NO: 1376710 - RNA, 19 nt, Artificial Sequence
  Description of Artificial Sequence: Synthetic oligonucleotide
  Sense strand starting at position 3975 of SEQ ID NO: 1242840
ugcgacucugaauauucua

SEQ ID NO: 1376711 - RNA, 19 nt, Artificial Sequence
  Description of Artificial Sequence: Synthetic oligonucleotide
  Antisense strand to SEQ ID NO: 1376710
uagaauauucagagucgca

SEQ ID NO: 1376712 - RNA, 19 nt, Artificial Sequence
  Description of Artificial Sequence: Synthetic oligonucleotide
  Sense strand starting at position 87 of SEQ ID NO: 1242841
gcccgagugcguuauucuu

SEQ ID NO: 1376713 - RNA, 19 nt, Artificial Sequence
  Description of Artificial Sequence: Synthetic oligonucleotide
  Antisense strand to SEQ ID NO: 1376712
aagaauaacgcacucgggc

SEQ ID NO: 1376714 - RNA, 19 nt, Artificial Sequence
  Description of Artificial Sequence: Synthetic oligonucleotide
  Sense strand starting at position 144 of SEQ ID NO: 1242841
ggaggaaaugcuugugccu

SEQ ID NO: 1376715 - RNA, 19 nt, Artificial Sequence
  Description of Artificial Sequence: Synthetic oligonucleotide
  Antisense strand to SEQ ID NO: 1376714
aggcacaagcauuuccucc

SEQ ID NO: 1376716 - RNA, 19 nt, Artificial Sequence
  Description of Artificial Sequence: Synthetic oligonucleotide
  Sense strand starting at position 146 of SEQ ID NO: 1242841
aggaaaugcuugugccuua

SEQ ID NO: 1376717 - RNA, 19 nt, Artificial Sequence
  Description of Artificial Sequence: Synthetic oligonucleotide
  Antisense strand to SEQ ID NO: 1376716
uaaggcacaagcauuuccu

SEQ ID NO: 1376718 - RNA, 19 nt, Artificial Sequence
  Description of Artificial Sequence: Synthetic oligonucleotide
  Sense strand starting at position 195 of SEQ ID NO: 1242841
gcagaguugcggugggaaa

SEQ ID NO: 1376719 - RNA, 19 nt, Artificial Sequence
  Description of Artificial Sequence: Synthetic oligonucleotide
  Antisense strand to SEQ ID NO: 1376718
uuucccaccgcaacucugc

SEQ ID NO: 1376720 - RNA, 19 nt, Artificial Sequence
  Description of Artificial Sequence: Synthetic oligonucleotide
  Sense strand starting at position 213 of SEQ ID NO: 1242841
agguucaggguguguuuaa

SEQ ID NO: 1376721 - RNA, 19 nt, Artificial Sequence
  Description of Artificial Sequence: Synthetic oligonucleotide
  Antisense strand to SEQ ID NO: 1376720
uuaaacacacccugaaccu

SEQ ID NO: 1376722 - RNA, 19 nt, Artificial Sequence
  Description of Artificial Sequence: Synthetic oligonucleotide
  Sense strand starting at position 214 of SEQ ID NO: 1242841
gguucaggguguguuuaau

SEQ ID NO: 1376723 - RNA, 19 nt, Artificial Sequence
  Description of Artificial Sequence: Synthetic oligonucleotide
  Antisense strand to SEQ ID NO: 1376722
auuaaacacacccugaacc

SEQ ID NO: 1376724 - RNA, 19 nt, Artificial Sequence
  Description of Artificial Sequence: Synthetic oligonucleotide
  Sense strand starting at position 224 of SEQ ID NO: 1242841
guguuuaauucuguuucuu

SEQ ID NO: 1376725 - RNA, 19 nt, Artificial Sequence
  Description of Artificial Sequence: Synthetic oligonucleotide
  Antisense strand to SEQ ID NO: 1376724
aagaaacagaauuaaacac

SEQ ID NO: 1376726 - RNA, 19 nt, Artificial Sequence
  Description of Artificial Sequence: Synthetic oligonucleotide
  Sense strand starting at position 251 of SEQ ID NO: 1242841
ucugguugugcgucuuuca

SEQ ID NO: 1376727 - RNA, 19 nt, Artificial Sequence
  Description of Artificial Sequence: Synthetic oligonucleotide
  Antisense strand to SEQ ID NO: 1376726
ugaaagacgcacaaccaga

SEQ ID NO: 1376728 - RNA, 19 nt, Artificial Sequence
  Description of Artificial Sequence: Synthetic oligonucleotide
  Sense strand starting at position 252 of SEQ ID NO: 1242841
cugguugugcgucuuucau

SEQ ID NO: 1376729 - RNA, 19 nt, Artificial Sequence
  Description of Artificial Sequence: Synthetic oligonucleotide
  Antisense strand to SEQ ID NO: 1376728
augaaagacgcacaaccag

SEQ ID NO: 1376730 - RNA, 19 nt, Artificial Sequence
  Description of Artificial Sequence: Synthetic oligonucleotide
  Sense strand starting at position 254 of SEQ ID NO: 1242841
gguugugcgucuuucaugu

SEQ ID NO: 1376731 - RNA, 19 nt, Artificial Sequence
  Description of Artificial Sequence: Synthetic oligonucleotide
  Antisense strand to SEQ ID NO: 1376730
acaugaaagacgcacaacc

SEQ ID NO: 1376732 - RNA, 19 nt, Artificial Sequence
  Description of Artificial Sequence: Synthetic oligonucleotide
  Sense strand starting at position 376 of SEQ ID NO: 1242841
cccgaaaguuaauguuuag

SEQ ID NO: 1376733 - RNA, 19 nt, Artificial Sequence
  Description of Artificial Sequence: Synthetic oligonucleotide
  Antisense strand to SEQ ID NO: 1376732
cuaaacauuaacuuucggg

SEQ ID NO: 1376734 - RNA, 19 nt, Artificial Sequence
  Description of Artificial Sequence: Synthetic oligonucleotide
  Sense strand starting at position 379 of SEQ ID NO: 1242841
gaaaguuaauguuuagaga

SEQ ID NO: 1376735 - RNA, 19 nt, Artificial Sequence
  Description of Artificial Sequence: Synthetic oligonucleotide
  Antisense strand to SEQ ID NO: 1376734
ucucuaaacauuaacuuuc

SEQ ID NO: 1376736 - RNA, 19 nt, Artificial Sequence
  Description of Artificial Sequence: Synthetic oligonucleotide
  Sense strand starting at position 425 of SEQ ID NO: 1242841
ggagcagugcucugugaag

SEQ ID NO: 1376737 - RNA, 19 nt, Artificial Sequence
  Description of Artificial Sequence: Synthetic oligonucleotide
  Antisense strand to SEQ ID NO: 1376736
cuucacagagcacugcucc

SEQ ID NO: 1376738 - RNA, 19 nt, Artificial Sequence
  Description of Artificial Sequence: Synthetic oligonucleotide
  Sense strand starting at position 427 of SEQ ID NO: 1242841
agcagugcucugugaagag

SEQ ID NO: 1376739 - RNA, 19 nt, Artificial Sequence
  Description of Artificial Sequence: Synthetic oligonucleotide
  Antisense strand to SEQ ID NO: 1376738
cucuucacagagcacugcu

SEQ ID NO: 1376740 - RNA, 19 nt, Artificial Sequence
  Description of Artificial Sequence: Synthetic oligonucleotide
  Sense strand starting at position 459 of SEQ ID NO: 1242841
augagaguccuggguccau

SEQ ID NO: 1376741 - RNA, 19 nt, Artificial Sequence
  Description of Artificial Sequence: Synthetic oligonucleotide
  Antisense strand to SEQ ID NO: 1376740
auggacccaggacucucau

SEQ ID NO: 1376742 - RNA, 19 nt, Artificial Sequence
  Description of Artificial Sequence: Synthetic oligonucleotide
  Sense strand starting at position 573 of SEQ ID NO: 1242841
agugaugucuguguuucca

SEQ ID NO: 1376743 - RNA, 19 nt, Artificial Sequence
  Description of Artificial Sequence: Synthetic oligonucleotide
  Antisense strand to SEQ ID NO: 1376742
uggaaacacagacaucacu

SEQ ID NO: 1376744 - RNA, 19 nt, Artificial Sequence
  Description of Artificial Sequence: Synthetic oligonucleotide
  Sense strand starting at position 654 of SEQ ID NO: 1242841
guggccauuucggaugaua

SEQ ID NO: 1376745 - RNA, 19 nt, Artificial Sequence
  Description of Artificial Sequence: Synthetic oligonucleotide
  Antisense strand to SEQ ID NO: 1376744
uaucauccgaaauggccac

SEQ ID NO: 1376746 - RNA, 19 nt, Artificial Sequence
  Description of Artificial Sequence: Synthetic oligonucleotide
  Sense strand starting at position 774 of SEQ ID NO: 1242841
ggucagauacguccgcgua

SEQ ID NO: 1376747 - RNA, 19 nt, Artificial Sequence
  Description of Artificial Sequence: Synthetic oligonucleotide
  Antisense strand to SEQ ID NO: 1376746
uacgcggacguaucugacc

SEQ ID NO: 1376748 - RNA, 19 nt, Artificial Sequence
  Description of Artificial Sequence: Synthetic oligonucleotide
  Sense strand starting at position 778 of SEQ ID NO: 1242841
agauacguccgcguaccua

SEQ ID NO: 1376749 - RNA, 19 nt, Artificial Sequence
  Description of Artificial Sequence: Synthetic oligonucleotide
  Antisense strand to SEQ ID NO: 1376748
uagguacgcggacguaucu

SEQ ID NO: 1376750 - RNA, 19 nt, Artificial Sequence
  Description of Artificial Sequence: Synthetic oligonucleotide
  Sense strand starting at position 811 of SEQ ID NO: 1242841
agacuuucccacgggauga

SEQ ID NO: 1376751 - RNA, 19 nt, Artificial Sequence
  Description of Artificial Sequence: Synthetic oligonucleotide
  Antisense strand to SEQ ID NO: 1376750
ucaucccgugggaaagucu

SEQ ID NO: 1376752 - RNA, 19 nt, Artificial Sequence
  Description of Artificial Sequence: Synthetic oligonucleotide
  Sense strand starting at position 1000 of SEQ ID NO: 1242841
ccaaauaagccuugagaag

SEQ ID NO: 1376753 - RNA, 19 nt, Artificial Sequence
  Description of Artificial Sequence: Synthetic oligonucleotide
  Antisense strand to SEQ ID NO: 1376752
cuucucaaggcuuauuugg

SEQ ID NO: 1376754 - RNA, 19 nt, Artificial Sequence
  Description of Artificial Sequence: Synthetic oligonucleotide
  Sense strand starting at position 1348 of SEQ ID NO: 1242841
gcgagcucuuccucccagu

SEQ ID NO: 1376755 - RNA, 19 nt, Artificial Sequence
  Description of Artificial Sequence: Synthetic oligonucleotide
  Antisense strand to SEQ ID NO: 1376754
acugggaggaagagcucgc

SEQ ID NO: 1376756 - RNA, 19 nt, Artificial Sequence
  Description of Artificial Sequence: Synthetic oligonucleotide
  Sense strand starting at position 1361 of SEQ ID NO: 1242841
cccagugaaucccagugaa

SEQ ID NO: 1376757 - RNA, 19 nt, Artificial Sequence
  Description of Artificial Sequence: Synthetic oligonucleotide
  Antisense strand to SEQ ID NO: 1376756
uucacugggauucacuggg

SEQ ID NO: 1376758 - RNA, 19 nt, Artificial Sequence
  Description of Artificial Sequence: Synthetic oligonucleotide
  Sense strand starting at position 1364 of SEQ ID NO: 1242841
agugaaucccagugaagca

SEQ ID NO: 1376759 - RNA, 19 nt, Artificial Sequence
  Description of Artificial Sequence: Synthetic oligonucleotide
  Antisense strand to SEQ ID NO: 1376758
ugcuucacugggauucacu

SEQ ID NO: 1376760 - RNA, 19 nt, Artificial Sequence
  Description of Artificial Sequence: Synthetic oligonucleotide
  Sense strand starting at position 1592 of SEQ ID NO: 1242841
ccgguuccauccucugaga

SEQ ID NO: 1376761 - RNA, 19 nt, Artificial Sequence
  Description of Artificial Sequence: Synthetic oligonucleotide
  Antisense strand to SEQ ID NO: 1376760
ucucagaggauggaaccgg

SEQ ID NO: 1376762 - RNA, 19 nt, Artificial Sequence
  Description of Artificial Sequence: Synthetic oligonucleotide
  Sense strand starting at position 1594 of SEQ ID NO: 1242841
gguuccauccucugagacu

SEQ ID NO: 1376763 - RNA, 19 nt, Artificial Sequence
  Description of Artificial Sequence: Synthetic oligonucleotide
  Antisense strand to SEQ ID NO: 1376762
agucucagaggauggaacc

SEQ ID NO: 1376764 - RNA, 19 nt, Artificial Sequence
  Description of Artificial Sequence: Synthetic oligonucleotide
  Sense strand starting at position 1653 of SEQ ID NO: 1242841
guagaugccuacucucuga

SEQ ID NO: 1376765 - RNA, 19 nt, Artificial Sequence
  Description of Artificial Sequence: Synthetic oligonucleotide
  Antisense strand to SEQ ID NO: 1376764
ucagagaguaggcaucuac

SEQ ID NO: 1376766 - RNA, 19 nt, Artificial Sequence
  Description of Artificial Sequence: Synthetic oligonucleotide
  Sense strand starting at position 1657 of SEQ ID NO: 1242841
augccuacucucugagguu

SEQ ID NO: 1376767 - RNA, 19 nt, Artificial Sequence
  Description of Artificial Sequence: Synthetic oligonucleotide
  Antisense strand to SEQ ID NO: 1376766
aaccucagagaguaggcau

SEQ ID NO: 1376768 - RNA, 19 nt, Artificial Sequence
  Description of Artificial Sequence: Synthetic oligonucleotide
  Sense strand starting at position 2012 of SEQ ID NO: 1242841
gggcuaaagccucacacau

SEQ ID NO: 1376769 - RNA, 19 nt, Artificial Sequence
  Description of Artificial Sequence: Synthetic oligonucleotide
  Antisense strand to SEQ ID NO: 1376768
augugugaggcuuuagccc

SEQ ID NO: 1376770 - RNA, 19 nt, Artificial Sequence
  Description of Artificial Sequence: Synthetic oligonucleotide
  Sense strand starting at position 2035 of SEQ ID NO: 1242841
gcugguucuuguuuccgaa

SEQ ID NO: 1376771 - RNA, 19 nt, Artificial Sequence
  Description of Artificial Sequence: Synthetic oligonucleotide
  Antisense strand to SEQ ID NO: 1376770
uucggaaacaagaaccagc

SEQ ID NO: 1376772 - RNA, 19 nt, Artificial Sequence
  Description of Artificial Sequence: Synthetic oligonucleotide
  Sense strand starting at position 2037 of SEQ ID NO: 1242841
ugguucuuguuuccgaaga

SEQ ID NO: 1376773 - RNA, 19 nt, Artificial Sequence
  Description of Artificial Sequence: Synthetic oligonucleotide
  Antisense strand to SEQ ID NO: 1376772
ucuucggaaacaagaacca

SEQ ID NO: 1376774 - RNA, 19 nt, Artificial Sequence
  Description of Artificial Sequence: Synthetic oligonucleotide
  Sense strand starting at position 2039 of SEQ ID NO: 1242841
guucuuguuuccgaagaua

SEQ ID NO: 1376775 - RNA, 19 nt, Artificial Sequence
  Description of Artificial Sequence: Synthetic oligonucleotide
  Antisense strand to SEQ ID NO: 1376774
uaucuucggaaacaagaac

SEQ ID NO: 1376776 - RNA, 19 nt, Artificial Sequence
  Description of Artificial Sequence: Synthetic oligonucleotide
  Sense strand starting at position 2390 of SEQ ID NO: 1242841
guuucuuuaucuguaagug

SEQ ID NO: 1376777 - RNA, 19 nt, Artificial Sequence
  Description of Artificial Sequence: Synthetic oligonucleotide
  Antisense strand to SEQ ID NO: 1376776
cacuuacagauaaagaaac

SEQ ID NO: 1376778 - RNA, 19 nt, Artificial Sequence
  Description of Artificial Sequence: Synthetic oligonucleotide
  Sense strand starting at position 2402 of SEQ ID NO: 1242841
guaagugcgauggguugau

SEQ ID NO: 1376779 - RNA, 19 nt, Artificial Sequence
  Description of Artificial Sequence: Synthetic oligonucleotide
  Antisense strand to SEQ ID NO: 1376778
aucaacccaucgcacuuac

SEQ ID NO: 1376780 - RNA, 19 nt, Artificial Sequence
  Description of Artificial Sequence: Synthetic oligonucleotide
  Sense strand starting at position 2449 of SEQ ID NO: 1242841
auuggaauguccucuggca

SEQ ID NO: 1376781 - RNA, 19 nt, Artificial Sequence
  Description of Artificial Sequence: Synthetic oligonucleotide
  Antisense strand to SEQ ID NO: 1376780
ugccagaggacauuccaau

SEQ ID NO: 1376782 - RNA, 19 nt, Artificial Sequence
  Description of Artificial Sequence: Synthetic oligonucleotide
  Sense strand starting at position 2673 of SEQ ID NO: 1242841
gcccuuggagucugacauu

SEQ ID NO: 1376783 - RNA, 19 nt, Artificial Sequence
  Description of Artificial Sequence: Synthetic oligonucleotide
  Antisense strand to SEQ ID NO: 1376782
aaugucagacuccaagggc

SEQ ID NO: 1376784 - RNA, 19 nt, Artificial Sequence
  Description of Artificial Sequence: Synthetic oligonucleotide
  Sense strand starting at position 3715 of SEQ ID NO: 1242841
ggugggaugugcguacgua

SEQ ID NO: 1376785 - RNA, 19 nt, Artificial Sequence
  Description of Artificial Sequence: Synthetic oligonucleotide
  Antisense strand to SEQ ID NO: 1376784
uacguacgcacaucccacc

SEQ ID NO: 1376786 - RNA, 19 nt, Artificial Sequence
  Description of Artificial Sequence: Synthetic oligonucleotide
  Sense strand starting at position 3716 of SEQ ID NO: 1242841
gugggaugugcguacguaa

SEQ ID NO: 1376787 - RNA, 19 nt, Artificial Sequence
  Description of Artificial Sequence: Synthetic oligonucleotide
  Antisense strand to SEQ ID NO: 1376786
uuacguacgcacaucccac

SEQ ID NO: 1376788 - RNA, 19 nt, Artificial Sequence
  Description of Artificial Sequence: Synthetic oligonucleotide
  Sense strand starting at position 3719 of SEQ ID NO: 1242841
ggaugugcguacguaaaga

SEQ ID NO: 1376789 - RNA, 19 nt, Artificial Sequence
  Description of Artificial Sequence: Synthetic oligonucleotide
  Antisense strand to SEQ ID NO: 1376788
ucuuuacguacgcacaucc

SEQ ID NO: 1376790 - RNA, 19 nt, Artificial Sequence
  Description of Artificial Sequence: Synthetic oligonucleotide
  Sense strand starting at position 3816 of SEQ ID NO: 1242841
augcgaauugugcaacuuu

SEQ ID NO: 1376791 - RNA, 19 nt, Artificial Sequence
  Description of Artificial Sequence: Synthetic oligonucleotide
  Antisense strand to SEQ ID NO: 1376790
aaaguugcacaauucgcau

SEQ ID NO: 1376792 - RNA, 19 nt, Artificial Sequence
  Description of Artificial Sequence: Synthetic oligonucleotide
  Sense strand starting at position 155 of SEQ ID NO: 1242842
aagaaauagguauggcuuu

SEQ ID NO: 1376793 - RNA, 19 nt, Artificial Sequence
  Description of Artificial Sequence: Synthetic oligonucleotide
  Antisense strand to SEQ ID NO: 1376792
aaagccauaccuauuucuu

SEQ ID NO: 1376794 - RNA, 19 nt, Artificial Sequence
  Description of Artificial Sequence: Synthetic oligonucleotide
  Sense strand starting at position 260 of SEQ ID NO: 1242842
aggagacauuccugggaca

SEQ ID NO: 1376795 - RNA, 19 nt, Artificial Sequence
  Description of Artificial Sequence: Synthetic oligonucleotide
  Antisense strand to SEQ ID NO: 1376794
ugucccaggaaugucuccu

SEQ ID NO: 1376796 - RNA, 19 nt, Artificial Sequence
  Description of Artificial Sequence: Synthetic oligonucleotide
  Sense strand starting at position 263 of SEQ ID NO: 1242842
agacauuccugggacaugu

SEQ ID NO: 1376797 - RNA, 19 nt, Artificial Sequence
  Description of Artificial Sequence: Synthetic oligonucleotide
  Antisense strand to SEQ ID NO: 1376796
acaugucccaggaaugucu

SEQ ID NO: 1376798 - RNA, 19 nt, Artificial Sequence
  Description of Artificial Sequence: Synthetic oligonucleotide
  Sense strand starting at position 271 of SEQ ID NO: 1242842
cugggacauguuuggaagu

SEQ ID NO: 1376799 - RNA, 19 nt, Artificial Sequence
  Description of Artificial Sequence: Synthetic oligonucleotide
  Antisense strand to SEQ ID NO: 1376798
acuuccaaacaugucccag

SEQ ID NO: 1376800 - RNA, 19 nt, Artificial Sequence
  Description of Artificial Sequence: Synthetic oligonucleotide
  Sense strand starting at position 341 of SEQ ID NO: 1242842
ggaggaaucagcggugaca

SEQ ID NO: 1376801 - RNA, 19 nt, Artificial Sequence
  Description of Artificial Sequence: Synthetic oligonucleotide
  Antisense strand to SEQ ID NO: 1376800
ugucaccgcugauuccucc

SEQ ID NO: 1376802 - RNA, 19 nt, Artificial Sequence
  Description of Artificial Sequence: Synthetic oligonucleotide
  Sense strand starting at position 343 of SEQ ID NO: 1242842
aggaaucagcggugacacu

SEQ ID NO: 1376803 - RNA, 19 nt, Artificial Sequence
  Description of Artificial Sequence: Synthetic oligonucleotide
  Antisense strand to SEQ ID NO: 1376802
agugucaccgcugauuccu

SEQ ID NO: 1376804 - RNA, 19 nt, Artificial Sequence
  Description of Artificial Sequence: Synthetic oligonucleotide
  Sense strand starting at position 375 of SEQ ID NO: 1242842
ggagucaggcccugaguuu

SEQ ID NO: 1376805 - RNA, 19 nt, Artificial Sequence
  Description of Artificial Sequence: Synthetic oligonucleotide
  Antisense strand to SEQ ID NO: 1376804
aaacucagggccugacucc

SEQ ID NO: 1376806 - RNA, 19 nt, Artificial Sequence
  Description of Artificial Sequence: Synthetic oligonucleotide
  Sense strand starting at position 427 of SEQ ID NO: 1242842
gccagcaucuagcuaacuu

SEQ ID NO: 1376807 - RNA, 19 nt, Artificial Sequence
  Description of Artificial Sequence: Synthetic oligonucleotide
  Antisense strand to SEQ ID NO: 1376806
aaguuagcuagaugcuggc

SEQ ID NO: 1376808 - RNA, 19 nt, Artificial Sequence
  Description of Artificial Sequence: Synthetic oligonucleotide
  Sense strand starting at position 485 of SEQ ID NO: 1242842
gucugugccacugauauug

SEQ ID NO: 1376809 - RNA, 19 nt, Artificial Sequence
  Description of Artificial Sequence: Synthetic oligonucleotide
  Antisense strand to SEQ ID NO: 1376808
caauaucaguggcacagac

SEQ ID NO: 1376810 - RNA, 19 nt, Artificial Sequence
  Description of Artificial Sequence: Synthetic oligonucleotide
  Sense strand starting at position 1147 of SEQ ID NO: 1242842
gccaguugugcuccugagu

SEQ ID NO: 1376811 - RNA, 19 nt, Artificial Sequence
  Description of Artificial Sequence: Synthetic oligonucleotide
  Antisense strand to SEQ ID NO: 1376810
acucaggagcacaacuggc

SEQ ID NO: 1376812 - RNA, 19 nt, Artificial Sequence
  Description of Artificial Sequence: Synthetic oligonucleotide
  Sense strand starting at position 1188 of SEQ ID NO: 1242842
uuacgucuagcucaggauu

SEQ ID NO: 1376813 - RNA, 19 nt, Artificial Sequence
  Description of Artificial Sequence: Synthetic oligonucleotide
  Antisense strand to SEQ ID NO: 1376812
aauccugagcuagacguaa

SEQ ID NO: 1376814 - RNA, 19 nt, Artificial Sequence
  Description of Artificial Sequence: Synthetic oligonucleotide
  Sense strand starting at position 1191 of SEQ ID NO: 1242842
cgucuagcucaggauugua

SEQ ID NO: 1376815 - RNA, 19 nt, Artificial Sequence
  Description of Artificial Sequence: Synthetic oligonucleotide
  Antisense strand to SEQ ID NO: 1376814
uacaauccugagcuagacg

SEQ ID NO: 1376816 - RNA, 19 nt, Artificial Sequence
  Description of Artificial Sequence: Synthetic oligonucleotide
  Sense strand starting at position 1350 of SEQ ID NO: 1242842
ugucgacacucuguauuua

SEQ ID NO: 1376817 - RNA, 19 nt, Artificial Sequence
  Description of Artificial Sequence: Synthetic oligonucleotide
  Antisense strand to SEQ ID NO: 1376816
uaaauacagagugucgaca

SEQ ID NO: 1376818 - RNA, 19 nt, Artificial Sequence
  Description of Artificial Sequence: Synthetic oligonucleotide
  Sense strand starting at position 1994 of SEQ ID NO: 1242842
cagagauggcuuuggguga

SEQ ID NO: 1376819 - RNA, 19 nt, Artificial Sequence
  Description of Artificial Sequence: Synthetic oligonucleotide
  Antisense strand to SEQ ID NO: 1376818
ucacccaaagccaucucug

SEQ ID NO: 1376820 - RNA, 19 nt, Artificial Sequence
  Description of Artificial Sequence: Synthetic oligonucleotide
  Sense strand starting at position 1998 of SEQ ID NO: 1242842
gauggcuuugggugagguu

SEQ ID NO: 1376821 - RNA, 19 nt, Artificial Sequence
  Description of Artificial Sequence: Synthetic oligonucleotide
  Antisense strand to SEQ ID NO: 1376820
aaccucacccaaagccauc

SEQ ID NO: 1376822 - RNA, 19 nt, Artificial Sequence
  Description of Artificial Sequence: Synthetic oligonucleotide
  Sense strand starting at position 2041 of SEQ ID NO: 1242842
ggcuaacacuuguuuacuu

SEQ ID NO: 1376823 - RNA, 19 nt, Artificial Sequence
  Description of Artificial Sequence: Synthetic oligonucleotide
  Antisense strand to SEQ ID NO: 1376822
aaguaaacaaguguuagcc

SEQ ID NO: 1376824 - RNA, 19 nt, Artificial Sequence
  Description of Artificial Sequence: Synthetic oligonucleotide
  Sense strand starting at position 2063 of SEQ ID NO: 1242842
gggcaugaguguucaugug

SEQ ID NO: 1376825 - RNA, 19 nt, Artificial Sequence
  Description of Artificial Sequence: Synthetic oligonucleotide
  Antisense strand to SEQ ID NO: 1376824
cacaugaacacucaugccc

SEQ ID NO: 1376826 - RNA, 19 nt, Artificial Sequence
  Description of Artificial Sequence: Synthetic oligonucleotide
  Sense strand starting at position 2112 of SEQ ID NO: 1242842
aacaaagucugguaggaca

SEQ ID NO: 1376827 - RNA, 19 nt, Artificial Sequence
  Description of Artificial Sequence: Synthetic oligonucleotide
  Antisense strand to SEQ ID NO: 1376826
uguccuaccagacuuuguu

SEQ ID NO: 1376828 - RNA, 19 nt, Artificial Sequence
  Description of Artificial Sequence: Synthetic oligonucleotide
  Sense strand starting at position 2194 of SEQ ID NO: 1242842
gagguuugagaccagucua

SEQ ID NO: 1376829 - RNA, 19 nt, Artificial Sequence
  Description of Artificial Sequence: Synthetic oligonucleotide
  Antisense strand to SEQ ID NO: 1376828
uagacuggucucaaaccuc

SEQ ID NO: 1376830 - RNA, 19 nt, Artificial Sequence
  Description of Artificial Sequence: Synthetic oligonucleotide
  Sense strand starting at position 2214 of SEQ ID NO: 1242842
gcaacauaaugagaacucu

SEQ ID NO: 1376831 - RNA, 19 nt, Artificial Sequence
  Description of Artificial Sequence: Synthetic oligonucleotide
  Antisense strand to SEQ ID NO: 1376830
agaguucucauuauguugc

SEQ ID NO: 1376832 - RNA, 19 nt, Artificial Sequence
  Description of Artificial Sequence: Synthetic oligonucleotide
  Sense strand starting at position 2438 of SEQ ID NO: 1242842
cguggcuucucauugcaga

SEQ ID NO: 1376833 - RNA, 19 nt, Artificial Sequence
  Description of Artificial Sequence: Synthetic oligonucleotide
  Antisense strand to SEQ ID NO: 1376832
ucugcaaugagaagccacg

SEQ ID NO: 1376834 - RNA, 19 nt, Artificial Sequence
  Description of Artificial Sequence: Synthetic oligonucleotide
  Sense strand starting at position 2439 of SEQ ID NO: 1242842
guggcuucucauugcagaa

SEQ ID NO: 1376835 - RNA, 19 nt, Artificial Sequence
  Description of Artificial Sequence: Synthetic oligonucleotide
  Antisense strand to SEQ ID NO: 1376834
uucugcaaugagaagccac

SEQ ID NO: 1376836 - RNA, 19 nt, Artificial Sequence
  Description of Artificial Sequence: Synthetic oligonucleotide
  Sense strand starting at position 2452 of SEQ ID NO: 1242842
gcagaaaucuaccgaauuu

SEQ ID NO: 1376837 - RNA, 19 nt, Artificial Sequence
  Description of Artificial Sequence: Synthetic oligonucleotide
  Antisense strand to SEQ ID NO: 1376836
aaauucgguagauuucugc

SEQ ID NO: 1376838 - RNA, 19 nt, Artificial Sequence
  Description of Artificial Sequence: Synthetic oligonucleotide
  Sense strand starting at position 2562 of SEQ ID NO: 1242842
ggccaccucagugaugcua

SEQ ID NO: 1376839 - RNA, 19 nt, Artificial Sequence
  Description of Artificial Sequence: Synthetic oligonucleotide
  Antisense strand to SEQ ID NO: 1376838
uagcaucacugagguggcc

SEQ ID NO: 1376840 - RNA, 19 nt, Artificial Sequence
  Description of Artificial Sequence: Synthetic oligonucleotide
  Sense strand starting at position 2711 of SEQ ID NO: 1242842
cuaugcaguguuugcauaa

SEQ ID NO: 1376841 - RNA, 19 nt, Artificial Sequence
  Description of Artificial Sequence: Synthetic oligonucleotide
  Antisense strand to SEQ ID NO: 1376840
uuaugcaaacacugcauag

SEQ ID NO: 1376842 - RNA, 19 nt, Artificial Sequence
  Description of Artificial Sequence: Synthetic oligonucleotide
  Sense strand starting at position 2712 of SEQ ID NO: 1242842
uaugcaguguuugcauaaa

SEQ ID NO: 1376843 - RNA, 19 nt, Artificial Sequence
  Description of Artificial Sequence: Synthetic oligonucleotide
  Antisense strand to SEQ ID NO: 1376842
uuuaugcaaacacugcaua

SEQ ID NO: 1376844 - RNA, 19 nt, Artificial Sequence
  Description of Artificial Sequence: Synthetic oligonucleotide
  Sense strand starting at position 2810 of SEQ ID NO: 1242842
ccuacucaucuccagugua

SEQ ID NO: 1376845 - RNA, 19 nt, Artificial Sequence
  Description of Artificial Sequence: Synthetic oligonucleotide
  Antisense strand to SEQ ID NO: 1376844
uacacuggagaugaguagg

SEQ ID NO: 1376846 - RNA, 19 nt, Artificial Sequence
  Description of Artificial Sequence: Synthetic oligonucleotide
  Sense strand starting at position 2862 of SEQ ID NO: 1242842
cugaguuauagcugcacag

SEQ ID NO: 1376847 - RNA, 19 nt, Artificial Sequence
  Description of Artificial Sequence: Synthetic oligonucleotide
  Antisense strand to SEQ ID NO: 1376846
cugugcagcuauaacucag

SEQ ID NO: 1376848 - RNA, 19 nt, Artificial Sequence
  Description of Artificial Sequence: Synthetic oligonucleotide
  Sense strand starting at position 2949 of SEQ ID NO: 1242842
agaugaugaucaucugcau

SEQ ID NO: 1376849 - RNA, 19 nt, Artificial Sequence
  Description of Artificial Sequence: Synthetic oligonucleotide
  Antisense strand to SEQ ID NO: 1376848
augcagaugaucaucaucu

SEQ ID NO: 1376850 - RNA, 19 nt, Artificial Sequence
  Description of Artificial Sequence: Synthetic oligonucleotide
  Sense strand starting at position 3025 of SEQ ID NO: 1242842
ucccaugaugucugauaca

SEQ ID NO: 1376851 - RNA, 19 nt, Artificial Sequence
  Description of Artificial Sequence: Synthetic oligonucleotide
  Antisense strand to SEQ ID NO: 1376850
uguaucagacaucauggga

SEQ ID NO: 1376852 - RNA, 19 nt, Artificial Sequence
  Description of Artificial Sequence: Synthetic oligonucleotide
  Sense strand starting at position 3028 of SEQ ID NO: 1242842
caugaugucugauacagac

SEQ ID NO: 1376853 - RNA, 19 nt, Artificial Sequence
  Description of Artificial Sequence: Synthetic oligonucleotide
  Antisense strand to SEQ ID NO: 1376852
gucuguaucagacaucaug

SEQ ID NO: 1376854 - RNA, 19 nt, Artificial Sequence
  Description of Artificial Sequence: Synthetic oligonucleotide
  Sense strand starting at position 3178 of SEQ ID NO: 1242842
aaaggaagucaauguuuau

SEQ ID NO: 1376855 - RNA, 19 nt, Artificial Sequence
  Description of Artificial Sequence: Synthetic oligonucleotide
  Antisense strand to SEQ ID NO: 1376854
auaaacauugacuuccuuu

SEQ ID NO: 1376856 - RNA, 19 nt, Artificial Sequence
  Description of Artificial Sequence: Synthetic oligonucleotide
  Sense strand starting at position 3181 of SEQ ID NO: 1242842
ggaagucaauguuuauguu

SEQ ID NO: 1376857 - RNA, 19 nt, Artificial Sequence
  Description of Artificial Sequence: Synthetic oligonucleotide
  Antisense strand to SEQ ID NO: 1376856
aacauaaacauugacuucc

SEQ ID NO: 1376858 - RNA, 19 nt, Artificial Sequence
  Description of Artificial Sequence: Synthetic oligonucleotide
  Sense strand starting at position 3182 of SEQ ID NO: 1242842
gaagucaauguuuauguuu

SEQ ID NO: 1376859 - RNA, 19 nt, Artificial Sequence
  Description of Artificial Sequence: Synthetic oligonucleotide
  Antisense strand to SEQ ID NO: 1376858
aaacauaaacauugacuuc

SEQ ID NO: 1376860 - RNA, 19 nt, Artificial Sequence
  Description of Artificial Sequence: Synthetic oligonucleotide
  Sense strand starting at position 3185 of SEQ ID NO: 1242842
gucaauguuuauguuucua

SEQ ID NO: 1376861 - RNA, 19 nt, Artificial Sequence
  Description of Artificial Sequence: Synthetic oligonucleotide
  Antisense strand to SEQ ID NO: 1376860
uagaaacauaaacauugac

SEQ ID NO: 1376862 - RNA, 19 nt, Artificial Sequence
  Description of Artificial Sequence: Synthetic oligonucleotide
  Sense strand starting at position 3193 of SEQ ID NO: 1242842
uuauguuucuaggagaagu

SEQ ID NO: 1376863 - RNA, 19 nt, Artificial Sequence
  Description of Artificial Sequence: Synthetic oligonucleotide
  Antisense strand to SEQ ID NO: 1376862
acuucuccuagaaacauaa

SEQ ID NO: 1376864 - RNA, 19 nt, Artificial Sequence
  Description of Artificial Sequence: Synthetic oligonucleotide
  Sense strand starting at position 3503 of SEQ ID NO: 1242842
gaggcuggauugucucgaa

SEQ ID NO: 1376865 - RNA, 19 nt, Artificial Sequence
  Description of Artificial Sequence: Synthetic oligonucleotide
  Antisense strand to SEQ ID NO: 1376864
uucgagacaauccagccuc

SEQ ID NO: 1376866 - RNA, 19 nt, Artificial Sequence
  Description of Artificial Sequence: Synthetic oligonucleotide
  Sense strand starting at position 3907 of SEQ ID NO: 1242842
ugcuuucugauggagacga

SEQ ID NO: 1376867 - RNA, 19 nt, Artificial Sequence
  Description of Artificial Sequence: Synthetic oligonucleotide
  Antisense strand to SEQ ID NO: 1376866
ucgucuccaucagaaagca

SEQ ID NO: 1376868 - RNA, 19 nt, Artificial Sequence
  Description of Artificial Sequence: Synthetic oligonucleotide
  Sense strand starting at position 3911 of SEQ ID NO: 1242842
uucugauggagacgauuga

SEQ ID NO: 1376869 - RNA, 19 nt, Artificial Sequence
  Description of Artificial Sequence: Synthetic oligonucleotide
  Antisense strand to SEQ ID NO: 1376868
ucaaucgucuccaucagaa

SEQ ID NO: 1376870 - RNA, 19 nt, Artificial Sequence
  Description of Artificial Sequence: Synthetic oligonucleotide
  Sense strand starting at position 3970 of SEQ ID NO: 1242842
cuggguucugccugauuuc

SEQ ID NO: 1376871 - RNA, 19 nt, Artificial Sequence
  Description of Artificial Sequence: Synthetic oligonucleotide
  Antisense strand to SEQ ID NO: 1376870
gaaaucaggcagaacccag

SEQ ID NO: 1376872 - RNA, 19 nt, Artificial Sequence
  Description of Artificial Sequence: Synthetic oligonucleotide
  Sense strand starting at position 34 of SEQ ID NO: 1242843
gcagucugguccugggacu

SEQ ID NO: 1376873 - RNA, 19 nt, Artificial Sequence
  Description of Artificial Sequence: Synthetic oligonucleotide
  Antisense strand to SEQ ID NO: 1376872
agucccaggaccagacugc

SEQ ID NO: 1376874 - RNA, 19 nt, Artificial Sequence
  Description of Artificial Sequence: Synthetic oligonucleotide
  Sense strand starting at position 207 of SEQ ID NO: 1242843
augguaccuugaugacuuu

SEQ ID NO: 1376875 - RNA, 19 nt, Artificial Sequence
  Description of Artificial Sequence: Synthetic oligonucleotide
  Antisense strand to SEQ ID NO: 1376874
aaagucaucaagguaccau

SEQ ID NO: 1376876 - RNA, 19 nt, Artificial Sequence
  Description of Artificial Sequence: Synthetic oligonucleotide
  Sense strand starting at position 398 of SEQ ID NO: 1242843
gagccugguuccuugauga

SEQ ID NO: 1376877 - RNA, 19 nt, Artificial Sequence
  Description of Artificial Sequence: Synthetic oligonucleotide
  Antisense strand to SEQ ID NO: 1376876
ucaucaaggaaccaggcuc

SEQ ID NO: 1376878 - RNA, 19 nt, Artificial Sequence
  Description of Artificial Sequence: Synthetic oligonucleotide
  Sense strand starting at position 427 of SEQ ID NO: 1242843
ccagcagucaaaugaugga

SEQ ID NO: 1376879 - RNA, 19 nt, Artificial Sequence
  Description of Artificial Sequence: Synthetic oligonucleotide
  Antisense strand to SEQ ID NO: 1376878
uccaucauuugacugcugg

SEQ ID NO: 1376880 - RNA, 19 nt, Artificial Sequence
  Description of Artificial Sequence: Synthetic oligonucleotide
  Sense strand starting at position 789 of SEQ ID NO: 1242843
gcuguuaguccaugugcua

SEQ ID NO: 1376881 - RNA, 19 nt, Artificial Sequence
  Description of Artificial Sequence: Synthetic oligonucleotide
  Antisense strand to SEQ ID NO: 1376880
uagcacauggacuaacagc

SEQ ID NO: 1376882 - RNA, 19 nt, Artificial Sequence
  Description of Artificial Sequence: Synthetic oligonucleotide
  Sense strand starting at position 794 of SEQ ID NO: 1242843
uaguccaugugcuauguga

SEQ ID NO: 1376883 - RNA, 19 nt, Artificial Sequence
  Description of Artificial Sequence: Synthetic oligonucleotide
  Antisense strand to SEQ ID NO: 1376882
ucacauagcacauggacua

SEQ ID NO: 1376884 - RNA, 19 nt, Artificial Sequence
  Description of Artificial Sequence: Synthetic oligonucleotide
  Sense strand starting at position 796 of SEQ ID NO: 1242843
guccaugugcuaugugaau

SEQ ID NO: 1376885 - RNA, 19 nt, Artificial Sequence
  Description of Artificial Sequence: Synthetic oligonucleotide
  Antisense strand to SEQ ID NO: 1376884
auucacauagcacauggac

SEQ ID NO: 1376886 - RNA, 19 nt, Artificial Sequence
  Description of Artificial Sequence: Synthetic oligonucleotide
  Sense strand starting at position 830 of SEQ ID NO: 1242843
cacuauguccuuugugguu

SEQ ID NO: 1376887 - RNA, 19 nt, Artificial Sequence
  Description of Artificial Sequence: Synthetic oligonucleotide
  Antisense strand to SEQ ID NO: 1376886
aaccacaaaggacauagug

SEQ ID NO: 1376888 - RNA, 19 nt, Artificial Sequence
  Description of Artificial Sequence: Synthetic oligonucleotide
  Sense strand starting at position 1130 of SEQ ID NO: 1242843
gucugaccauggcugaaau

SEQ ID NO: 1376889 - RNA, 19 nt, Artificial Sequence
  Description of Artificial Sequence: Synthetic oligonucleotide
  Antisense strand to SEQ ID NO: 1376888
auuucagccauggucagac

SEQ ID NO: 1376890 - RNA, 19 nt, Artificial Sequence
  Description of Artificial Sequence: Synthetic oligonucleotide
  Sense strand starting at position 1131 of SEQ ID NO: 1242843
ucugaccauggcugaaauu

SEQ ID NO: 1376891 - RNA, 19 nt, Artificial Sequence
  Description of Artificial Sequence: Synthetic oligonucleotide
  Antisense strand to SEQ ID NO: 1376890
aauuucagccauggucaga

SEQ ID NO: 1376892 - RNA, 19 nt, Artificial Sequence
  Description of Artificial Sequence: Synthetic oligonucleotide
  Sense strand starting at position 1140 of SEQ ID NO: 1242843
ggcugaaauuucgcagguu

SEQ ID NO: 1376893 - RNA, 19 nt, Artificial Sequence
  Description of Artificial Sequence: Synthetic oligonucleotide
  Antisense strand to SEQ ID NO: 1376892
aaccugcgaaauuucagcc

SEQ ID NO: 1376894 - RNA, 19 nt, Artificial Sequence
  Description of Artificial Sequence: Synthetic oligonucleotide
  Sense strand starting at position 1141 of SEQ ID NO: 1242843
gcugaaauuucgcagguua

SEQ ID NO: 1376895 - RNA, 19 nt, Artificial Sequence
  Description of Artificial Sequence: Synthetic oligonucleotide
  Antisense strand to SEQ ID NO: 1376894
uaaccugcgaaauuucagc

SEQ ID NO: 1376896 - RNA, 19 nt, Artificial Sequence
  Description of Artificial Sequence: Synthetic oligonucleotide
  Sense strand starting at position 1154 of SEQ ID NO: 1242843
agguuaacauccugaagca

SEQ ID NO: 1376897 - RNA, 19 nt, Artificial Sequence
  Description of Artificial Sequence: Synthetic oligonucleotide
  Antisense strand to SEQ ID NO: 1376896
ugcuucaggauguuaaccu

SEQ ID NO: 1376898 - RNA, 19 nt, Artificial Sequence
  Description of Artificial Sequence: Synthetic oligonucleotide
  Sense strand starting at position 1223 of SEQ ID NO: 1242843
gugugaaggucagauggaa

SEQ ID NO: 1376899 - RNA, 19 nt, Artificial Sequence
  Description of Artificial Sequence: Synthetic oligonucleotide
  Antisense strand to SEQ ID NO: 1376898
uuccaucugaccuucacac

SEQ ID NO: 1376900 - RNA, 19 nt, Artificial Sequence
  Description of Artificial Sequence: Synthetic oligonucleotide
  Sense strand starting at position 1251 of SEQ ID NO: 1242843
ccagaucagucaggauaua

SEQ ID NO: 1376901 - RNA, 19 nt, Artificial Sequence
  Description of Artificial Sequence: Synthetic oligonucleotide
  Antisense strand to SEQ ID NO: 1376900
uauauccugacugaucugg

SEQ ID NO: 1376902 - RNA, 19 nt, Artificial Sequence
  Description of Artificial Sequence: Synthetic oligonucleotide
  Sense strand starting at position 1261 of SEQ ID NO: 1242843
caggauauaucaggugcuu

SEQ ID NO: 1376903 - RNA, 19 nt, Artificial Sequence
  Description of Artificial Sequence: Synthetic oligonucleotide
  Antisense strand to SEQ ID NO: 1376902
aagcaccugauauauccug

SEQ ID NO: 1376904 - RNA, 19 nt, Artificial Sequence
  Description of Artificial Sequence: Synthetic oligonucleotide
  Sense strand starting at position 1443 of SEQ ID NO: 1242843
gagggagccuccuugauag

SEQ ID NO: 1376905 - RNA, 19 nt, Artificial Sequence
  Description of Artificial Sequence: Synthetic oligonucleotide
  Antisense strand to SEQ ID NO: 1376904
cuaucaaggaggcucccuc

SEQ ID NO: 1376906 - RNA, 19 nt, Artificial Sequence
  Description of Artificial Sequence: Synthetic oligonucleotide
  Sense strand starting at position 1455 of SEQ ID NO: 1242843
uugauagccuccuugauag

SEQ ID NO: 1376907 - RNA, 19 nt, Artificial Sequence
  Description of Artificial Sequence: Synthetic oligonucleotide
  Antisense strand to SEQ ID NO: 1376906
cuaucaaggaggcuaucaa

SEQ ID NO: 1376908 - RNA, 19 nt, Artificial Sequence
  Description of Artificial Sequence: Synthetic oligonucleotide
  Sense strand starting at position 1467 of SEQ ID NO: 1242843
uugauagcaugcucagaac

SEQ ID NO: 1376909 - RNA, 19 nt, Artificial Sequence
  Description of Artificial Sequence: Synthetic oligonucleotide
  Antisense strand to SEQ ID NO: 1376908
guucugagcaugcuaucaa

SEQ ID NO: 1376910 - RNA, 19 nt, Artificial Sequence
  Description of Artificial Sequence: Synthetic oligonucleotide
  Sense strand starting at position 2132 of SEQ ID NO: 1242843
cagggaucuuccugaucuc

SEQ ID NO: 1376911 - RNA, 19 nt, Artificial Sequence
  Description of Artificial Sequence: Synthetic oligonucleotide
  Antisense strand to SEQ ID NO: 1376910
gagaucaggaagaucccug

SEQ ID NO: 1376912 - RNA, 19 nt, Artificial Sequence
  Description of Artificial Sequence: Synthetic oligonucleotide
  Sense strand starting at position 2209 of SEQ ID NO: 1242843
ggucaaauauucuaagcug

SEQ ID NO: 1376913 - RNA, 19 nt, Artificial Sequence
  Description of Artificial Sequence: Synthetic oligonucleotide
  Antisense strand to SEQ ID NO: 1376912
cagcuuagaauauuugacc

SEQ ID NO: 1376914 - RNA, 19 nt, Artificial Sequence
  Description of Artificial Sequence: Synthetic oligonucleotide
  Sense strand starting at position 2226 of SEQ ID NO: 1242843
ugcgacucagaagaguuaa

SEQ ID NO: 1376915 - RNA, 19 nt, Artificial Sequence
  Description of Artificial Sequence: Synthetic oligonucleotide
  Antisense strand to SEQ ID NO: 1376914
uuaacucuucugagucgca

SEQ ID NO: 1376916 - RNA, 19 nt, Artificial Sequence
  Description of Artificial Sequence: Synthetic oligonucleotide
  Sense strand starting at position 2236 of SEQ ID NO: 1242843
aagaguuaauucggucugu

SEQ ID NO: 1376917 - RNA, 19 nt, Artificial Sequence
  Description of Artificial Sequence: Synthetic oligonucleotide
  Antisense strand to SEQ ID NO: 1376916
acagaccgaauuaacucuu

SEQ ID NO: 1376918 - RNA, 19 nt, Artificial Sequence
  Description of Artificial Sequence: Synthetic oligonucleotide
  Sense strand starting at position 2247 of SEQ ID NO: 1242843
cggucugucugguuugaug

SEQ ID NO: 1376919 - RNA, 19 nt, Artificial Sequence
  Description of Artificial Sequence: Synthetic oligonucleotide
  Antisense strand to SEQ ID NO: 1376918
caucaaaccagacagaccg

SEQ ID NO: 1376920 - RNA, 19 nt, Artificial Sequence
  Description of Artificial Sequence: Synthetic oligonucleotide
  Sense strand starting at position 2249 of SEQ ID NO: 1242843
gucugucugguuugaugga

SEQ ID NO: 1376921 - RNA, 19 nt, Artificial Sequence
  Description of Artificial Sequence: Synthetic oligonucleotide
  Antisense strand to SEQ ID NO: 1376920
uccaucaaaccagacagac

SEQ ID NO: 1376922 - RNA, 19 nt, Artificial Sequence
  Description of Artificial Sequence: Synthetic oligonucleotide
  Sense strand starting at position 2753 of SEQ ID NO: 1242843
ugcugcagccuugaucaua

SEQ ID NO: 1376923 - RNA, 19 nt, Artificial Sequence
  Description of Artificial Sequence: Synthetic oligonucleotide
  Antisense strand to SEQ ID NO: 1376922
uaugaucaaggcugcagca

SEQ ID NO: 1376924 - RNA, 19 nt, Artificial Sequence
  Description of Artificial Sequence: Synthetic oligonucleotide
  Sense strand starting at position 88 of SEQ ID NO: 1242844
uguguuggcccagagaaca

SEQ ID NO: 1376925 - RNA, 19 nt, Artificial Sequence
  Description of Artificial Sequence: Synthetic oligonucleotide
  Antisense strand to SEQ ID NO: 1376924
uguucucugggccaacaca

SEQ ID NO: 1376926 - RNA, 19 nt, Artificial Sequence
  Description of Artificial Sequence: Synthetic oligonucleotide
  Sense strand starting at position 135 of SEQ ID NO: 1242844
gccacaugugcucaccaua

SEQ ID NO: 1376927 - RNA, 19 nt, Artificial Sequence
  Description of Artificial Sequence: Synthetic oligonucleotide
  Antisense strand to SEQ ID NO: 1376926
uauggugagcacauguggc

SEQ ID NO: 1376928 - RNA, 19 nt, Artificial Sequence
  Description of Artificial Sequence: Synthetic oligonucleotide
  Sense strand starting at position 138 of SEQ ID NO: 1242844
acaugugcucaccauaugu

SEQ ID NO: 1376929 - RNA, 19 nt, Artificial Sequence
  Description of Artificial Sequence: Synthetic oligonucleotide
  Antisense strand to SEQ ID NO: 1376928
acauauggugagcacaugu

SEQ ID NO: 1376930 - RNA, 19 nt, Artificial Sequence
  Description of Artificial Sequence: Synthetic oligonucleotide
  Sense strand starting at position 663 of SEQ ID NO: 1242844
uuccauuucuguccucgaa

SEQ ID NO: 1376931 - RNA, 19 nt, Artificial Sequence
  Description of Artificial Sequence: Synthetic oligonucleotide
  Antisense strand to SEQ ID NO: 1376930
uucgaggacagaaauggaa

SEQ ID NO: 1376932 - RNA, 19 nt, Artificial Sequence
  Description of Artificial Sequence: Synthetic oligonucleotide
  Sense strand starting at position 1071 of SEQ ID NO: 1242844
gacauucugugcucuggga

SEQ ID NO: 1376933 - RNA, 19 nt, Artificial Sequence
  Description of Artificial Sequence: Synthetic oligonucleotide
  Antisense strand to SEQ ID NO: 1376932
ucccagagcacagaauguc

SEQ ID NO: 1376934 - RNA, 19 nt, Artificial Sequence
  Description of Artificial Sequence: Synthetic oligonucleotide
  Sense strand starting at position 1194 of SEQ ID NO: 1242844
agcacuucucagugaucag

SEQ ID NO: 1376935 - RNA, 19 nt, Artificial Sequence
  Description of Artificial Sequence: Synthetic oligonucleotide
  Antisense strand to SEQ ID NO: 1376934
cugaucacugagaagugcu

SEQ ID NO: 1376936 - RNA, 19 nt, Artificial Sequence
  Description of Artificial Sequence: Synthetic oligonucleotide
  Sense strand starting at position 1197 of SEQ ID NO: 1242844
acuucucagugaucagauc

SEQ ID NO: 1376937 - RNA, 19 nt, Artificial Sequence
  Description of Artificial Sequence: Synthetic oligonucleotide
  Antisense strand to SEQ ID NO: 1376936
gaucugaucacugagaagu

SEQ ID NO: 1376938 - RNA, 19 nt, Artificial Sequence
  Description of Artificial Sequence: Synthetic oligonucleotide
  Sense strand starting at position 1259 of SEQ ID NO: 1242844
ggcagucaucaccauuaca

SEQ ID NO: 1376939 - RNA, 19 nt, Artificial Sequence
  Description of Artificial Sequence: Synthetic oligonucleotide
  Antisense strand to SEQ ID NO: 1376938
uguaauggugaugacugcc

SEQ ID NO: 1376940 - RNA, 19 nt, Artificial Sequence
  Description of Artificial Sequence: Synthetic oligonucleotide
  Sense strand starting at position 1280 of SEQ ID NO: 1242844
gcauuuacaguuugcugaa

SEQ ID NO: 1376941 - RNA, 19 nt, Artificial Sequence
  Description of Artificial Sequence: Synthetic oligonucleotide
  Antisense strand to SEQ ID NO: 1376940
uucagcaaacuguaaaugc

SEQ ID NO: 1376942 - RNA, 19 nt, Artificial Sequence
  Description of Artificial Sequence: Synthetic oligonucleotide
  Sense strand starting at position 1325 of SEQ ID NO: 1242844
gaggguuguacggagauca

SEQ ID NO: 1376943 - RNA, 19 nt, Artificial Sequence
  Description of Artificial Sequence: Synthetic oligonucleotide
  Antisense strand to SEQ ID NO: 1376942
ugaucuccguacaacccuc

SEQ ID NO: 1376944 - RNA, 19 nt, Artificial Sequence
  Description of Artificial Sequence: Synthetic oligonucleotide
  Sense strand starting at position 1428 of SEQ ID NO: 1242844
aagugcacugcuuaaggua

SEQ ID NO: 1376945 - RNA, 19 nt, Artificial Sequence
  Description of Artificial Sequence: Synthetic oligonucleotide
  Antisense strand to SEQ ID NO: 1376944
uaccuuaagcagugcacuu

SEQ ID NO: 1376946 - RNA, 19 nt, Artificial Sequence
  Description of Artificial Sequence: Synthetic oligonucleotide
  Sense strand starting at position 1481 of SEQ ID NO: 1242844
cuguauuucugguugugaa

SEQ ID NO: 1376947 - RNA, 19 nt, Artificial Sequence
  Description of Artificial Sequence: Synthetic oligonucleotide
  Antisense strand to SEQ ID NO: 1376946
uucacaaccagaaauacag

SEQ ID NO: 1376948 - RNA, 19 nt, Artificial Sequence
  Description of Artificial Sequence: Synthetic oligonucleotide
  Sense strand starting at position 1482 of SEQ ID NO: 1242844
uguauuucugguugugaaa

SEQ ID NO: 1376949 - RNA, 19 nt, Artificial Sequence
  Description of Artificial Sequence: Synthetic oligonucleotide
  Antisense strand to SEQ ID NO: 1376948
uuucacaaccagaaauaca

SEQ ID NO: 1376950 - RNA, 19 nt, Artificial Sequence
  Description of Artificial Sequence: Synthetic oligonucleotide
  Sense strand starting at position 1712 of SEQ ID NO: 1242844
aaggcagucuuaucucaag

SEQ ID NO: 1376951 - RNA, 19 nt, Artificial Sequence
  Description of Artificial Sequence: Synthetic oligonucleotide
  Antisense strand to SEQ ID NO: 1376950
cuugagauaagacugccuu

SEQ ID NO: 1376952 - RNA, 19 nt, Artificial Sequence
  Description of Artificial Sequence: Synthetic oligonucleotide
  Sense strand starting at position 1723 of SEQ ID NO: 1242844
aucucaagguuccuuagau

SEQ ID NO: 1376953 - RNA, 19 nt, Artificial Sequence
  Description of Artificial Sequence: Synthetic oligonucleotide
  Antisense strand to SEQ ID NO: 1376952
aucuaaggaaccuugagau

SEQ ID NO: 1376954 - RNA, 19 nt, Artificial Sequence
  Description of Artificial Sequence: Synthetic oligonucleotide
  Sense strand starting at position 1724 of SEQ ID NO: 1242844
ucucaagguuccuuagauu

SEQ ID NO: 1376955 - RNA, 19 nt, Artificial Sequence
  Description of Artificial Sequence: Synthetic oligonucleotide
  Antisense strand to SEQ ID NO: 1376954
aaucuaaggaaccuugaga

SEQ ID NO: 1376956 - RNA, 19 nt, Artificial Sequence
  Description of Artificial Sequence: Synthetic oligonucleotide
  Sense strand starting at position 2099 of SEQ ID NO: 1242844
gggcaucaacuugauaguu

SEQ ID NO: 1376957 - RNA, 19 nt, Artificial Sequence
  Description of Artificial Sequence: Synthetic oligonucleotide
  Antisense strand to SEQ ID NO: 1376956
aacuaucaaguugaugccc

SEQ ID NO: 1376958 - RNA, 19 nt, Artificial Sequence
  Description of Artificial Sequence: Synthetic oligonucleotide
  Sense strand starting at position 2104 of SEQ ID NO: 1242844
ucaacuugauaguuguuaa

SEQ ID NO: 1376959 - RNA, 19 nt, Artificial Sequence
  Description of Artificial Sequence: Synthetic oligonucleotide
  Antisense strand to SEQ ID NO: 1376958
uuaacaacuaucaaguuga

SEQ ID NO: 1376960 - RNA, 19 nt, Artificial Sequence
  Description of Artificial Sequence: Synthetic oligonucleotide
  Sense strand starting at position 2434 of SEQ ID NO: 1242844
ggccuugaucgagacagac

SEQ ID NO: 1376961 - RNA, 19 nt, Artificial Sequence
  Description of Artificial Sequence: Synthetic oligonucleotide
  Antisense strand to SEQ ID NO: 1376960
gucugucucgaucaaggcc

SEQ ID NO: 1376962 - RNA, 19 nt, Artificial Sequence
  Description of Artificial Sequence: Synthetic oligonucleotide
  Sense strand starting at position 2513 of SEQ ID NO: 1242844
gacugaguccuggguucua

SEQ ID NO: 1376963 - RNA, 19 nt, Artificial Sequence
  Description of Artificial Sequence: Synthetic oligonucleotide
  Antisense strand to SEQ ID NO: 1376962
uagaacccaggacucaguc

SEQ ID NO: 1376964 - RNA, 19 nt, Artificial Sequence
  Description of Artificial Sequence: Synthetic oligonucleotide
  Sense strand starting at position 2541 of SEQ ID NO: 1242844
ggagcugugauguagaaca

SEQ ID NO: 1376965 - RNA, 19 nt, Artificial Sequence
  Description of Artificial Sequence: Synthetic oligonucleotide
  Antisense strand to SEQ ID NO: 1376964
uguucuacaucacagcucc

SEQ ID NO: 1376966 - RNA, 19 nt, Artificial Sequence
  Description of Artificial Sequence: Synthetic oligonucleotide
  Sense strand starting at position 2551 of SEQ ID NO: 1242844
uguagaacauuaccucgaa

SEQ ID NO: 1376967 - RNA, 19 nt, Artificial Sequence
  Description of Artificial Sequence: Synthetic oligonucleotide
  Antisense strand to SEQ ID NO: 1376966
uucgagguaauguucuaca

SEQ ID NO: 1376968 - RNA, 19 nt, Artificial Sequence
  Description of Artificial Sequence: Synthetic oligonucleotide
  Sense strand starting at position 2554 of SEQ ID NO: 1242844
agaacauuaccucgaagua

SEQ ID NO: 1376969 - RNA, 19 nt, Artificial Sequence
  Description of Artificial Sequence: Synthetic oligonucleotide
  Antisense strand to SEQ ID NO: 1376968
uacuucgagguaauguucu

SEQ ID NO: 1376970 - RNA, 19 nt, Artificial Sequence
  Description of Artificial Sequence: Synthetic oligonucleotide
  Sense strand starting at position 2555 of SEQ ID NO: 1242844
gaacauuaccucgaaguac

SEQ ID NO: 1376971 - RNA, 19 nt, Artificial Sequence
  Description of Artificial Sequence: Synthetic oligonucleotide
  Antisense strand to SEQ ID NO: 1376970
guacuucgagguaauguuc

SEQ ID NO: 1376972 - RNA, 19 nt, Artificial Sequence
  Description of Artificial Sequence: Synthetic oligonucleotide
  Sense strand starting at position 2592 of SEQ ID NO: 1242844
aggcuaguggcucaugaaa

SEQ ID NO: 1376973 - RNA, 19 nt, Artificial Sequence
  Description of Artificial Sequence: Synthetic oligonucleotide
  Antisense strand to SEQ ID NO: 1376972
uuucaugagccacuagccu

SEQ ID NO: 1376974 - RNA, 19 nt, Artificial Sequence
  Description of Artificial Sequence: Synthetic oligonucleotide
  Sense strand starting at position 2656 of SEQ ID NO: 1242844
augacuauauaagugugaa

SEQ ID NO: 1376975 - RNA, 19 nt, Artificial Sequence
  Description of Artificial Sequence: Synthetic oligonucleotide
  Antisense strand to SEQ ID NO: 1376974
uucacacuuauauagucau

SEQ ID NO: 1376976 - RNA, 19 nt, Artificial Sequence
  Description of Artificial Sequence: Synthetic oligonucleotide
  Sense strand starting at position 2659 of SEQ ID NO: 1242844
acuauauaagugugaaucu

SEQ ID NO: 1376977 - RNA, 19 nt, Artificial Sequence
  Description of Artificial Sequence: Synthetic oligonucleotide
  Antisense strand to SEQ ID NO: 1376976
agauucacacuuauauagu

SEQ ID NO: 1376978 - RNA, 19 nt, Artificial Sequence
  Description of Artificial Sequence: Synthetic oligonucleotide
  Sense strand starting at position 2670 of SEQ ID NO: 1242844
gugaaucugcccugaauua

SEQ ID NO: 1376979 - RNA, 19 nt, Artificial Sequence
  Description of Artificial Sequence: Synthetic oligonucleotide
  Antisense strand to SEQ ID NO: 1376978
uaauucagggcagauucac

SEQ ID NO: 1376980 - RNA, 19 nt, Artificial Sequence
  Description of Artificial Sequence: Synthetic oligonucleotide
  Sense strand starting at position 2671 of SEQ ID NO: 1242844
ugaaucugcccugaauuau

SEQ ID NO: 1376981 - RNA, 19 nt, Artificial Sequence
  Description of Artificial Sequence: Synthetic oligonucleotide
  Antisense strand to SEQ ID NO: 1376980
auaauucagggcagauuca

SEQ ID NO: 1376982 - RNA, 19 nt, Artificial Sequence
  Description of Artificial Sequence: Synthetic oligonucleotide
  Sense strand starting at position 2680 of SEQ ID NO: 1242844
ccugaauuauaucuguguu

SEQ ID NO: 1376983 - RNA, 19 nt, Artificial Sequence
  Description of Artificial Sequence: Synthetic oligonucleotide
  Antisense strand to SEQ ID NO: 1376982
aacacagauauaauucagg

SEQ ID NO: 1376984 - RNA, 19 nt, Artificial Sequence
  Description of Artificial Sequence: Synthetic oligonucleotide
  Sense strand starting at position 2837 of SEQ ID NO: 1242844
guguuacugcuagaaacuu

SEQ ID NO: 1376985 - RNA, 19 nt, Artificial Sequence
  Description of Artificial Sequence: Synthetic oligonucleotide
  Antisense strand to SEQ ID NO: 1376984
aaguuucuagcaguaacac

SEQ ID NO: 1376986 - RNA, 19 nt, Artificial Sequence
  Description of Artificial Sequence: Synthetic oligonucleotide
  Sense strand starting at position 2942 of SEQ ID NO: 1242844
gaucaauugcacuguggag

SEQ ID NO: 1376987 - RNA, 19 nt, Artificial Sequence
  Description of Artificial Sequence: Synthetic oligonucleotide
  Antisense strand to SEQ ID NO: 1376986
cuccacagugcaauugauc

SEQ ID NO: 1376988 - RNA, 19 nt, Artificial Sequence
  Description of Artificial Sequence: Synthetic oligonucleotide
  Sense strand starting at position 3147 of SEQ ID NO: 1242844
augcguuaugcuaguggga

SEQ ID NO: 1376989 - RNA, 19 nt, Artificial Sequence
  Description of Artificial Sequence: Synthetic oligonucleotide
  Antisense strand to SEQ ID NO: 1376988
ucccacuagcauaacgcau

SEQ ID NO: 1376990 - RNA, 19 nt, Artificial Sequence
  Description of Artificial Sequence: Synthetic oligonucleotide
  Sense strand starting at position 3311 of SEQ ID NO: 1242844
aaaugaguauuguuuggca

SEQ ID NO: 1376991 - RNA, 19 nt, Artificial Sequence
  Description of Artificial Sequence: Synthetic oligonucleotide
  Antisense strand to SEQ ID NO: 1376990
ugccaaacaauacucauuu

SEQ ID NO: 1376992 - RNA, 19 nt, Artificial Sequence
  Description of Artificial Sequence: Synthetic oligonucleotide
  Sense strand starting at position 3373 of SEQ ID NO: 1242844
auauccuucugguucuuau

SEQ ID NO: 1376993 - RNA, 19 nt, Artificial Sequence
  Description of Artificial Sequence: Synthetic oligonucleotide
  Antisense strand to SEQ ID NO: 1376992
auaagaaccagaaggauau

SEQ ID NO: 1376994 - RNA, 19 nt, Artificial Sequence
  Description of Artificial Sequence: Synthetic oligonucleotide
  Sense strand starting at position 3414 of SEQ ID NO: 1242844
uuaagaucucuccacguua

SEQ ID NO: 1376995 - RNA, 19 nt, Artificial Sequence
  Description of Artificial Sequence: Synthetic oligonucleotide
  Antisense strand to SEQ ID NO: 1376994
uaacguggagagaucuuaa

SEQ ID NO: 1376996 - RNA, 19 nt, Artificial Sequence
  Description of Artificial Sequence: Synthetic oligonucleotide
  Sense strand starting at position 3493 of SEQ ID NO: 1242844
guguucuagagggagcuuu

SEQ ID NO: 1376997 - RNA, 19 nt, Artificial Sequence
  Description of Artificial Sequence: Synthetic oligonucleotide
  Antisense strand to SEQ ID NO: 1376996
aaagcucccucuagaacac

SEQ ID NO: 1376998 - RNA, 19 nt, Artificial Sequence
  Description of Artificial Sequence: Synthetic oligonucleotide
  Sense strand starting at position 3522 of SEQ ID NO: 1242844
aggcacugauaguuguuua

SEQ ID NO: 1376999 - RNA, 19 nt, Artificial Sequence
  Description of Artificial Sequence: Synthetic oligonucleotide
  Antisense strand to SEQ ID NO: 1376998
uaaacaacuaucagugccu

SEQ ID NO: 1377000 - RNA, 19 nt, Artificial Sequence
  Description of Artificial Sequence: Synthetic oligonucleotide
  Sense strand starting at position 3672 of SEQ ID NO: 1242844
gcugucugucaugagaaca

SEQ ID NO: 1377001 - RNA, 19 nt, Artificial Sequence
  Description of Artificial Sequence: Synthetic oligonucleotide
  Antisense strand to SEQ ID NO: 1377000
uguucucaugacagacagc

SEQ ID NO: 1377002 - RNA, 19 nt, Artificial Sequence
  Description of Artificial Sequence: Synthetic oligonucleotide
  Sense strand starting at position 3752 of SEQ ID NO: 1242844
gcgcuuaguguuuauuucu

SEQ ID NO: 1377003 - RNA, 19 nt, Artificial Sequence
  Description of Artificial Sequence: Synthetic oligonucleotide
  Antisense strand to SEQ ID NO: 1377002
agaaauaaacacuaagcgc

SEQ ID NO: 1377004 - RNA, 19 nt, Artificial Sequence
  Description of Artificial Sequence: Synthetic oligonucleotide
  Sense strand starting at position 79 of SEQ ID NO: 1242845
cagugagacugucuauaaa

SEQ ID NO: 1377005 - RNA, 19 nt, Artificial Sequence
  Description of Artificial Sequence: Synthetic oligonucleotide
  Antisense strand to SEQ ID NO: 1377004
uuuauagacagucucacug

SEQ ID NO: 1377006 - RNA, 19 nt, Artificial Sequence
  Description of Artificial Sequence: Synthetic oligonucleotide
  Sense strand starting at position 277 of SEQ ID NO: 1242845
ugauuuaucugguaacucu

SEQ ID NO: 1377007 - RNA, 19 nt, Artificial Sequence
  Description of Artificial Sequence: Synthetic oligonucleotide
  Antisense strand to SEQ ID NO: 1377006
agaguuaccagauaaauca

SEQ ID NO: 1377008 - RNA, 19 nt, Artificial Sequence
  Description of Artificial Sequence: Synthetic oligonucleotide
  Sense strand starting at position 284 of SEQ ID NO: 1242845
ucugguaacucuccagaaa

SEQ ID NO: 1377009 - RNA, 19 nt, Artificial Sequence
  Description of Artificial Sequence: Synthetic oligonucleotide
  Antisense strand to SEQ ID NO: 1377008
uuucuggagaguuaccaga

SEQ ID NO: 1377010 - RNA, 19 nt, Artificial Sequence
  Description of Artificial Sequence: Synthetic oligonucleotide
  Sense strand starting at position 287 of SEQ ID NO: 1242845
gguaacucuccagaaaguc

SEQ ID NO: 1377011 - RNA, 19 nt, Artificial Sequence
  Description of Artificial Sequence: Synthetic oligonucleotide
  Antisense strand to SEQ ID NO: 1377010
gacuuucuggagaguuacc

SEQ ID NO: 1377012 - RNA, 19 nt, Artificial Sequence
  Description of Artificial Sequence: Synthetic oligonucleotide
  Sense strand starting at position 297 of SEQ ID NO: 1242845
cagaaagucuaauugugua

SEQ ID NO: 1377013 - RNA, 19 nt, Artificial Sequence
  Description of Artificial Sequence: Synthetic oligonucleotide
  Antisense strand to SEQ ID NO: 1377012
uacacaauuagacuuucug

SEQ ID NO: 1377014 - RNA, 19 nt, Artificial Sequence
  Description of Artificial Sequence: Synthetic oligonucleotide
  Sense strand starting at position 302 of SEQ ID NO: 1242845
agucuaauuguguagcaca

SEQ ID NO: 1377015 - RNA, 19 nt, Artificial Sequence
  Description of Artificial Sequence: Synthetic oligonucleotide
  Antisense strand to SEQ ID NO: 1377014
ugugcuacacaauuagacu

SEQ ID NO: 1377016 - RNA, 19 nt, Artificial Sequence
  Description of Artificial Sequence: Synthetic oligonucleotide
  Sense strand starting at position 320 of SEQ ID NO: 1242845
aaggguagaguguacuuaa

SEQ ID NO: 1377017 - RNA, 19 nt, Artificial Sequence
  Description of Artificial Sequence: Synthetic oligonucleotide
  Antisense strand to SEQ ID NO: 1377016
uuaaguacacucuacccuu

SEQ ID NO: 1377018 - RNA, 19 nt, Artificial Sequence
  Description of Artificial Sequence: Synthetic oligonucleotide
  Sense strand starting at position 539 of SEQ ID NO: 1242845
gaaguaucuguugggcaug

SEQ ID NO: 1377019 - RNA, 19 nt, Artificial Sequence
  Description of Artificial Sequence: Synthetic oligonucleotide
  Antisense strand to SEQ ID NO: 1377018
caugcccaacagauacuuc

SEQ ID NO: 1377020 - RNA, 19 nt, Artificial Sequence
  Description of Artificial Sequence: Synthetic oligonucleotide
  Sense strand starting at position 848 of SEQ ID NO: 1242845
aagugacucguauaguucu

SEQ ID NO: 1377021 - RNA, 19 nt, Artificial Sequence
  Description of Artificial Sequence: Synthetic oligonucleotide
  Antisense strand to SEQ ID NO: 1377020
agaacuauacgagucacuu

SEQ ID NO: 1377022 - RNA, 19 nt, Artificial Sequence
  Description of Artificial Sequence: Synthetic oligonucleotide
  Sense strand starting at position 1041 of SEQ ID NO: 1242845
guggguucuggaugagaag

SEQ ID NO: 1377023 - RNA, 19 nt, Artificial Sequence
  Description of Artificial Sequence: Synthetic oligonucleotide
  Antisense strand to SEQ ID NO: 1377022
cuucucauccagaacccac

SEQ ID NO: 1377024 - RNA, 19 nt, Artificial Sequence
  Description of Artificial Sequence: Synthetic oligonucleotide
  Sense strand starting at position 1083 of SEQ ID NO: 1242845
gagagugaaccuuggcuua

SEQ ID NO: 1377025 - RNA, 19 nt, Artificial Sequence
  Description of Artificial Sequence: Synthetic oligonucleotide
  Antisense strand to SEQ ID NO: 1377024
uaagccaagguucacucuc

SEQ ID NO: 1377026 - RNA, 19 nt, Artificial Sequence
  Description of Artificial Sequence: Synthetic oligonucleotide
  Sense strand starting at position 1085 of SEQ ID NO: 1242845
gagugaaccuuggcuuaaa

SEQ ID NO: 1377027 - RNA, 19 nt, Artificial Sequence
  Description of Artificial Sequence: Synthetic oligonucleotide
  Antisense strand to SEQ ID NO: 1377026
uuuaagccaagguucacuc

SEQ ID NO: 1377028 - RNA, 19 nt, Artificial Sequence
  Description of Artificial Sequence: Synthetic oligonucleotide
  Sense strand starting at position 1387 of SEQ ID NO: 1242845
aagcuaucucagggcaaug

SEQ ID NO: 1377029 - RNA, 19 nt, Artificial Sequence
  Description of Artificial Sequence: Synthetic oligonucleotide
  Antisense strand to SEQ ID NO: 1377028
cauugcccugagauagcuu

SEQ ID NO: 1377030 - RNA, 19 nt, Artificial Sequence
  Description of Artificial Sequence: Synthetic oligonucleotide
  Sense strand starting at position 2097 of SEQ ID NO: 1242845
gugcgaaagcucucgucua

SEQ ID NO: 1377031 - RNA, 19 nt, Artificial Sequence
  Description of Artificial Sequence: Synthetic oligonucleotide
  Antisense strand to SEQ ID NO: 1377030
uagacgagagcuuucgcac

SEQ ID NO: 1377032 - RNA, 19 nt, Artificial Sequence
  Description of Artificial Sequence: Synthetic oligonucleotide
  Sense strand starting at position 2368 of SEQ ID NO: 1242845
uuguuccuucccgagaauu

SEQ ID NO: 1377033 - RNA, 19 nt, Artificial Sequence
  Description of Artificial Sequence: Synthetic oligonucleotide
  Antisense strand to SEQ ID NO: 1377032
aauucucgggaaggaacaa

SEQ ID NO: 1377034 - RNA, 19 nt, Artificial Sequence
  Description of Artificial Sequence: Synthetic oligonucleotide
  Sense strand starting at position 2560 of SEQ ID NO: 1242845
gacugaucagucuggagca

SEQ ID NO: 1377035 - RNA, 19 nt, Artificial Sequence
  Description of Artificial Sequence: Synthetic oligonucleotide
  Antisense strand to SEQ ID NO: 1377034
ugcuccagacugaucaguc

SEQ ID NO: 1377036 - RNA, 19 nt, Artificial Sequence
  Description of Artificial Sequence: Synthetic oligonucleotide
  Sense strand starting at position 2619 of SEQ ID NO: 1242845
gaugaaagcuuccuggaac

SEQ ID NO: 1377037 - RNA, 19 nt, Artificial Sequence
  Description of Artificial Sequence: Synthetic oligonucleotide
  Antisense strand to SEQ ID NO: 1377036
guuccaggaagcuuucauc

SEQ ID NO: 1377038 - RNA, 19 nt, Artificial Sequence
  Description of Artificial Sequence: Synthetic oligonucleotide
  Sense strand starting at position 2753 of SEQ ID NO: 1242845
aggccaguugcugaauaaa

SEQ ID NO: 1377039 - RNA, 19 nt, Artificial Sequence
  Description of Artificial Sequence: Synthetic oligonucleotide
  Antisense strand to SEQ ID NO: 1377038
uuuauucagcaacuggccu

SEQ ID NO: 1377040 - RNA, 19 nt, Artificial Sequence
  Description of Artificial Sequence: Synthetic oligonucleotide
  Sense strand starting at position 2820 of SEQ ID NO: 1242845
uguaucaugccucauguga

SEQ ID NO: 1377041 - RNA, 19 nt, Artificial Sequence
  Description of Artificial Sequence: Synthetic oligonucleotide
  Antisense strand to SEQ ID NO: 1377040
ucacaugaggcaugauaca

SEQ ID NO: 1377042 - RNA, 19 nt, Artificial Sequence
  Description of Artificial Sequence: Synthetic oligonucleotide
  Sense strand starting at position 2885 of SEQ ID NO: 1242845
ggugcacauccucaagcau

SEQ ID NO: 1377043 - RNA, 19 nt, Artificial Sequence
  Description of Artificial Sequence: Synthetic oligonucleotide
  Antisense strand to SEQ ID NO: 1377042
augcuugaggaugugcacc

SEQ ID NO: 1377044 - RNA, 19 nt, Artificial Sequence
  Description of Artificial Sequence: Synthetic oligonucleotide
  Sense strand starting at position 2951 of SEQ ID NO: 1242845
cuguaauagcuccagcacu

SEQ ID NO: 1377045 - RNA, 19 nt, Artificial Sequence
  Description of Artificial Sequence: Synthetic oligonucleotide
  Antisense strand to SEQ ID NO: 1377044
agugcuggagcuauuacag

SEQ ID NO: 1377046 - RNA, 19 nt, Artificial Sequence
  Description of Artificial Sequence: Synthetic oligonucleotide
  Sense strand starting at position 2968 of SEQ ID NO: 1242845
cugugaacuggcugggaua

SEQ ID NO: 1377047 - RNA, 19 nt, Artificial Sequence
  Description of Artificial Sequence: Synthetic oligonucleotide
  Antisense strand to SEQ ID NO: 1377046
uaucccagccaguucacag

SEQ ID NO: 1377048 - RNA, 19 nt, Artificial Sequence
  Description of Artificial Sequence: Synthetic oligonucleotide
  Sense strand starting at position 2969 of SEQ ID NO: 1242845
ugugaacuggcugggauau

SEQ ID NO: 1377049 - RNA, 19 nt, Artificial Sequence
  Description of Artificial Sequence: Synthetic oligonucleotide
  Antisense strand to SEQ ID NO: 1377048
auaucccagccaguucaca

SEQ ID NO: 1377050 - RNA, 19 nt, Artificial Sequence
  Description of Artificial Sequence: Synthetic oligonucleotide
  Sense strand starting at position 2970 of SEQ ID NO: 1242845
gugaacuggcugggauaua

SEQ ID NO: 1377051 - RNA, 19 nt, Artificial Sequence
  Description of Artificial Sequence: Synthetic oligonucleotide
  Antisense strand to SEQ ID NO: 1377050
uauaucccagccaguucac

SEQ ID NO: 1377052 - RNA, 19 nt, Artificial Sequence
  Description of Artificial Sequence: Synthetic oligonucleotide
  Sense strand starting at position 3265 of SEQ ID NO: 1242845
augugagccugguucagaa

SEQ ID NO: 1377053 - RNA, 19 nt, Artificial Sequence
  Description of Artificial Sequence: Synthetic oligonucleotide
  Antisense strand to SEQ ID NO: 1377052
uucugaaccaggcucacau

SEQ ID NO: 1377054 - RNA, 19 nt, Artificial Sequence
  Description of Artificial Sequence: Synthetic oligonucleotide
  Sense strand starting at position 3309 of SEQ ID NO: 1242845
agaagucuuccaggacuag

SEQ ID NO: 1377055 - RNA, 19 nt, Artificial Sequence
  Description of Artificial Sequence: Synthetic oligonucleotide
  Antisense strand to SEQ ID NO: 1377054
cuaguccuggaagacuucu

SEQ ID NO: 1377056 - RNA, 19 nt, Artificial Sequence
  Description of Artificial Sequence: Synthetic oligonucleotide
  Sense strand starting at position 3323 of SEQ ID NO: 1242845
acuagcauccucggugaaa

SEQ ID NO: 1377057 - RNA, 19 nt, Artificial Sequence
  Description of Artificial Sequence: Synthetic oligonucleotide
  Antisense strand to SEQ ID NO: 1377056
uuucaccgaggaugcuagu

SEQ ID NO: 1377058 - RNA, 19 nt, Artificial Sequence
  Description of Artificial Sequence: Synthetic oligonucleotide
  Sense strand starting at position 3324 of SEQ ID NO: 1242845
cuagcauccucggugaaag

SEQ ID NO: 1377059 - RNA, 19 nt, Artificial Sequence
  Description of Artificial Sequence: Synthetic oligonucleotide
  Antisense strand to SEQ ID NO: 1377058
cuuucaccgaggaugcuag

SEQ ID NO: 1377060 - RNA, 19 nt, Artificial Sequence
  Description of Artificial Sequence: Synthetic oligonucleotide
  Sense strand starting at position 3325 of SEQ ID NO: 1242845
uagcauccucggugaaaga

SEQ ID NO: 1377061 - RNA, 19 nt, Artificial Sequence
  Description of Artificial Sequence: Synthetic oligonucleotide
  Antisense strand to SEQ ID NO: 1377060
ucuuucaccgaggaugcua

SEQ ID NO: 1377062 - RNA, 19 nt, Artificial Sequence
  Description of Artificial Sequence: Synthetic oligonucleotide
  Sense strand starting at position 3400 of SEQ ID NO: 1242845
cagggaucuuucccaguau

SEQ ID NO: 1377063 - RNA, 19 nt, Artificial Sequence
  Description of Artificial Sequence: Synthetic oligonucleotide
  Antisense strand to SEQ ID NO: 1377062
auacugggaaagaucccug

SEQ ID NO: 1377064 - RNA, 19 nt, Artificial Sequence
  Description of Artificial Sequence: Synthetic oligonucleotide
  Sense strand starting at position 3413 of SEQ ID NO: 1242845
caguaucuugaguggguga

SEQ ID NO: 1377065 - RNA, 19 nt, Artificial Sequence
  Description of Artificial Sequence: Synthetic oligonucleotide
  Antisense strand to SEQ ID NO: 1377064
ucacccacucaagauacug

SEQ ID NO: 1377066 - RNA, 19 nt, Artificial Sequence
  Description of Artificial Sequence: Synthetic oligonucleotide
  Sense strand starting at position 3485 of SEQ ID NO: 1242845
gaugaacugcuuugugacu

SEQ ID NO: 1377067 - RNA, 19 nt, Artificial Sequence
  Description of Artificial Sequence: Synthetic oligonucleotide
  Antisense strand to SEQ ID NO: 1377066
agucacaaagcaguucauc

SEQ ID NO: 1377068 - RNA, 19 nt, Artificial Sequence
  Description of Artificial Sequence: Synthetic oligonucleotide
  Sense strand starting at position 3490 of SEQ ID NO: 1242845
acugcuuugugacuuggaa

SEQ ID NO: 1377069 - RNA, 19 nt, Artificial Sequence
  Description of Artificial Sequence: Synthetic oligonucleotide
  Antisense strand to SEQ ID NO: 1377068
uuccaagucacaaagcagu

SEQ ID NO: 1377070 - RNA, 19 nt, Artificial Sequence
  Description of Artificial Sequence: Synthetic oligonucleotide
  Sense strand starting at position 3492 of SEQ ID NO: 1242845
ugcuuugugacuuggaaag

SEQ ID NO: 1377071 - RNA, 19 nt, Artificial Sequence
  Description of Artificial Sequence: Synthetic oligonucleotide
  Antisense strand to SEQ ID NO: 1377070
cuuuccaagucacaaagca

SEQ ID NO: 1377072 - RNA, 19 nt, Artificial Sequence
  Description of Artificial Sequence: Synthetic oligonucleotide
  Sense strand starting at position 3556 of SEQ ID NO: 1242845
uucuguagucuuuagcaag

SEQ ID NO: 1377073 - RNA, 19 nt, Artificial Sequence
  Description of Artificial Sequence: Synthetic oligonucleotide
  Antisense strand to SEQ ID NO: 1377072
cuugcuaaagacuacagaa

SEQ ID NO: 1377074 - RNA, 19 nt, Artificial Sequence
  Description of Artificial Sequence: Synthetic oligonucleotide
  Sense strand starting at position 3562 of SEQ ID NO: 1242845
agucuuuagcaagacacaa

SEQ ID NO: 1377075 - RNA, 19 nt, Artificial Sequence
  Description of Artificial Sequence: Synthetic oligonucleotide
  Antisense strand to SEQ ID NO: 1377074
uugugucuugcuaaagacu

SEQ ID NO: 1377076 - RNA, 19 nt, Artificial Sequence
  Description of Artificial Sequence: Synthetic oligonucleotide
  Sense strand starting at position 3665 of SEQ ID NO: 1242845
ggcggaauucaguaguuuc

SEQ ID NO: 1377077 - RNA, 19 nt, Artificial Sequence
  Description of Artificial Sequence: Synthetic oligonucleotide
  Antisense strand to SEQ ID NO: 1377076
gaaacuacugaauuccgcc

SEQ ID NO: 1377078 - RNA, 19 nt, Artificial Sequence
  Description of Artificial Sequence: Synthetic oligonucleotide
  Sense strand starting at position 3817 of SEQ ID NO: 1242845
aggaaaugugacuagcagu

SEQ ID NO: 1377079 - RNA, 19 nt, Artificial Sequence
  Description of Artificial Sequence: Synthetic oligonucleotide
  Antisense strand to SEQ ID NO: 1377078
acugcuagucacauuuccu

SEQ ID NO: 1377080 - RNA, 19 nt, Artificial Sequence
  Description of Artificial Sequence: Synthetic oligonucleotide
  Sense strand starting at position 3873 of SEQ ID NO: 1242845
ggcgucuuggcgaaaucuc

SEQ ID NO: 1377081 - RNA, 19 nt, Artificial Sequence
  Description of Artificial Sequence: Synthetic oligonucleotide
  Antisense strand to SEQ ID NO: 1377080
gagauuucgccaagacgcc

SEQ ID NO: 1377082 - RNA, 19 nt, Artificial Sequence
  Description of Artificial Sequence: Synthetic oligonucleotide
  Sense strand starting at position 3882 of SEQ ID NO: 1242845
gcgaaaucucuggaaggua

SEQ ID NO: 1377083 - RNA, 19 nt, Artificial Sequence
  Description of Artificial Sequence: Synthetic oligonucleotide
  Antisense strand to SEQ ID NO: 1377082
uaccuuccagagauuucgc

SEQ ID NO: 1377084 - RNA, 19 nt, Artificial Sequence
  Description of Artificial Sequence: Synthetic oligonucleotide
  Sense strand starting at position 15 of SEQ ID NO: 1242846
uaggguuaguuucucacaa

SEQ ID NO: 1377085 - RNA, 19 nt, Artificial Sequence
  Description of Artificial Sequence: Synthetic oligonucleotide
  Antisense strand to SEQ ID NO: 1377084
uugugagaaacuaacccua

SEQ ID NO: 1377086 - RNA, 19 nt, Artificial Sequence
  Description of Artificial Sequence: Synthetic oligonucleotide
  Sense strand starting at position 16 of SEQ ID NO: 1242846
aggguuaguuucucacaag

SEQ ID NO: 1377087 - RNA, 19 nt, Artificial Sequence
  Description of Artificial Sequence: Synthetic oligonucleotide
  Antisense strand to SEQ ID NO: 1377086
cuugugagaaacuaacccu

SEQ ID NO: 1377088 - RNA, 19 nt, Artificial Sequence
  Description of Artificial Sequence: Synthetic oligonucleotide
  Sense strand starting at position 247 of SEQ ID NO: 1242846
aguacaaucucaguuaauu

SEQ ID NO: 1377089 - RNA, 19 nt, Artificial Sequence
  Description of Artificial Sequence: Synthetic oligonucleotide
  Antisense strand to SEQ ID NO: 1377088
aauuaacugagauuguacu

SEQ ID NO: 1377090 - RNA, 19 nt, Artificial Sequence
  Description of Artificial Sequence: Synthetic oligonucleotide
  Sense strand starting at position 332 of SEQ ID NO: 1242846
ggagaaccaucgccaaaca

SEQ ID NO: 1377091 - RNA, 19 nt, Artificial Sequence
  Description of Artificial Sequence: Synthetic oligonucleotide
  Antisense strand to SEQ ID NO: 1377090
uguuuggcgaugguucucc

SEQ ID NO: 1377092 - RNA, 19 nt, Artificial Sequence
  Description of Artificial Sequence: Synthetic oligonucleotide
  Sense strand starting at position 366 of SEQ ID NO: 1242846
gccauuuaauaauauggaa

SEQ ID NO: 1377093 - RNA, 19 nt, Artificial Sequence
  Description of Artificial Sequence: Synthetic oligonucleotide
  Antisense strand to SEQ ID NO: 1377092
uuccauauuauuaaauggc

SEQ ID NO: 1377094 - RNA, 19 nt, Artificial Sequence
  Description of Artificial Sequence: Synthetic oligonucleotide
  Sense strand starting at position 408 of SEQ ID NO: 1242846
gcagucaguccacagauca

SEQ ID NO: 1377095 - RNA, 19 nt, Artificial Sequence
  Description of Artificial Sequence: Synthetic oligonucleotide
  Antisense strand to SEQ ID NO: 1377094
ugaucuguggacugacugc

SEQ ID NO: 1377096 - RNA, 19 nt, Artificial Sequence
  Description of Artificial Sequence: Synthetic oligonucleotide
  Sense strand starting at position 568 of SEQ ID NO: 1242846
cagaucuggugaucuugau

SEQ ID NO: 1377097 - RNA, 19 nt, Artificial Sequence
  Description of Artificial Sequence: Synthetic oligonucleotide
  Antisense strand to SEQ ID NO: 1377096
aucaagaucaccagaucug

SEQ ID NO: 1377098 - RNA, 19 nt, Artificial Sequence
  Description of Artificial Sequence: Synthetic oligonucleotide
  Sense strand starting at position 684 of SEQ ID NO: 1242846
cagugauucccaugggaau

SEQ ID NO: 1377099 - RNA, 19 nt, Artificial Sequence
  Description of Artificial Sequence: Synthetic oligonucleotide
  Antisense strand to SEQ ID NO: 1377098
auucccaugggaaucacug

SEQ ID NO: 1377100 - RNA, 19 nt, Artificial Sequence
  Description of Artificial Sequence: Synthetic oligonucleotide
  Sense strand starting at position 685 of SEQ ID NO: 1242846
agugauucccaugggaauu

SEQ ID NO: 1377101 - RNA, 19 nt, Artificial Sequence
  Description of Artificial Sequence: Synthetic oligonucleotide
  Antisense strand to SEQ ID NO: 1377100
aauucccaugggaaucacu

SEQ ID NO: 1377102 - RNA, 19 nt, Artificial Sequence
  Description of Artificial Sequence: Synthetic oligonucleotide
  Sense strand starting at position 686 of SEQ ID NO: 1242846
gugauucccaugggaauug

SEQ ID NO: 1377103 - RNA, 19 nt, Artificial Sequence
  Description of Artificial Sequence: Synthetic oligonucleotide
  Antisense strand to SEQ ID NO: 1377102
caauucccaugggaaucac

SEQ ID NO: 1377104 - RNA, 19 nt, Artificial Sequence
  Description of Artificial Sequence: Synthetic oligonucleotide
  Sense strand starting at position 993 of SEQ ID NO: 1242846
cuuccaccagacugagauu

SEQ ID NO: 1377105 - RNA, 19 nt, Artificial Sequence
  Description of Artificial Sequence: Synthetic oligonucleotide
  Antisense strand to SEQ ID NO: 1377104
aaucucagucugguggaag

SEQ ID NO: 1377106 - RNA, 19 nt, Artificial Sequence
  Description of Artificial Sequence: Synthetic oligonucleotide
  Sense strand starting at position 1002 of SEQ ID NO: 1242846
gacugagauucuucuauag

SEQ ID NO: 1377107 - RNA, 19 nt, Artificial Sequence
  Description of Artificial Sequence: Synthetic oligonucleotide
  Antisense strand to SEQ ID NO: 1377106
cuauagaagaaucucaguc

SEQ ID NO: 1377108 - RNA, 19 nt, Artificial Sequence
  Description of Artificial Sequence: Synthetic oligonucleotide
  Sense strand starting at position 1006 of SEQ ID NO: 1242846
gagauucuucuauaguguu

SEQ ID NO: 1377109 - RNA, 19 nt, Artificial Sequence
  Description of Artificial Sequence: Synthetic oligonucleotide
  Antisense strand to SEQ ID NO: 1377108
aacacuauagaagaaucuc

SEQ ID NO: 1377110 - RNA, 19 nt, Artificial Sequence
  Description of Artificial Sequence: Synthetic oligonucleotide
  Sense strand starting at position 1012 of SEQ ID NO: 1242846
cuucuauaguguuuaagag

SEQ ID NO: 1377111 - RNA, 19 nt, Artificial Sequence
  Description of Artificial Sequence: Synthetic oligonucleotide
  Antisense strand to SEQ ID NO: 1377110
cucuuaaacacuauagaag

SEQ ID NO: 1377112 - RNA, 19 nt, Artificial Sequence
  Description of Artificial Sequence: Synthetic oligonucleotide
  Sense strand starting at position 1013 of SEQ ID NO: 1242846
uucuauaguguuuaagagu

SEQ ID NO: 1377113 - RNA, 19 nt, Artificial Sequence
  Description of Artificial Sequence: Synthetic oligonucleotide
  Antisense strand to SEQ ID NO: 1377112
acucuuaaacacuauagaa

SEQ ID NO: 1377114 - RNA, 19 nt, Artificial Sequence
  Description of Artificial Sequence: Synthetic oligonucleotide
  Sense strand starting at position 1238 of SEQ ID NO: 1242846
cggacuaugcacuacugau

SEQ ID NO: 1377115 - RNA, 19 nt, Artificial Sequence
  Description of Artificial Sequence: Synthetic oligonucleotide
  Antisense strand to SEQ ID NO: 1377114
aucaguagugcauaguccg

SEQ ID NO: 1377116 - RNA, 19 nt, Artificial Sequence
  Description of Artificial Sequence: Synthetic oligonucleotide
  Sense strand starting at position 1405 of SEQ ID NO: 1242846
gggccaagugacugaaaca

SEQ ID NO: 1377117 - RNA, 19 nt, Artificial Sequence
  Description of Artificial Sequence: Synthetic oligonucleotide
  Antisense strand to SEQ ID NO: 1377116
uguuucagucacuuggccc

SEQ ID NO: 1377118 - RNA, 19 nt, Artificial Sequence
  Description of Artificial Sequence: Synthetic oligonucleotide
  Sense strand starting at position 1700 of SEQ ID NO: 1242846
ggacacuucgcucagaaug

SEQ ID NO: 1377119 - RNA, 19 nt, Artificial Sequence
  Description of Artificial Sequence: Synthetic oligonucleotide
  Antisense strand to SEQ ID NO: 1377118
cauucugagcgaagugucc

SEQ ID NO: 1377120 - RNA, 19 nt, Artificial Sequence
  Description of Artificial Sequence: Synthetic oligonucleotide
  Sense strand starting at position 2358 of SEQ ID NO: 1242846
aggcuuugggaaugagacu

SEQ ID NO: 1377121 - RNA, 19 nt, Artificial Sequence
  Description of Artificial Sequence: Synthetic oligonucleotide
  Antisense strand to SEQ ID NO: 1377120
agucucauucccaaagccu

SEQ ID NO: 1377122 - RNA, 19 nt, Artificial Sequence
  Description of Artificial Sequence: Synthetic oligonucleotide
  Sense strand starting at position 2390 of SEQ ID NO: 1242846
gcgccauuuaucuagagcu

SEQ ID NO: 1377123 - RNA, 19 nt, Artificial Sequence
  Description of Artificial Sequence: Synthetic oligonucleotide
  Antisense strand to SEQ ID NO: 1377122
agcucuagauaaauggcgc

SEQ ID NO: 1377124 - RNA, 19 nt, Artificial Sequence
  Description of Artificial Sequence: Synthetic oligonucleotide
  Sense strand starting at position 2523 of SEQ ID NO: 1242846
gauaacauucgguacuucu

SEQ ID NO: 1377125 - RNA, 19 nt, Artificial Sequence
  Description of Artificial Sequence: Synthetic oligonucleotide
  Antisense strand to SEQ ID NO: 1377124
agaaguaccgaauguuauc

SEQ ID NO: 1377126 - RNA, 19 nt, Artificial Sequence
  Description of Artificial Sequence: Synthetic oligonucleotide
  Sense strand starting at position 2677 of SEQ ID NO: 1242846
gacuaaagacugugaagua

SEQ ID NO: 1377127 - RNA, 19 nt, Artificial Sequence
  Description of Artificial Sequence: Synthetic oligonucleotide
  Antisense strand to SEQ ID NO: 1377126
uacuucacagucuuuaguc

SEQ ID NO: 1377128 - RNA, 19 nt, Artificial Sequence
  Description of Artificial Sequence: Synthetic oligonucleotide
  Sense strand starting at position 2952 of SEQ ID NO: 1242846
cuugccauucucuauggaa

SEQ ID NO: 1377129 - RNA, 19 nt, Artificial Sequence
  Description of Artificial Sequence: Synthetic oligonucleotide
  Antisense strand to SEQ ID NO: 1377128
uuccauagagaauggcaag

SEQ ID NO: 1377130 - RNA, 19 nt, Artificial Sequence
  Description of Artificial Sequence: Synthetic oligonucleotide
  Sense strand starting at position 2954 of SEQ ID NO: 1242846
ugccauucucuauggaaac

SEQ ID NO: 1377131 - RNA, 19 nt, Artificial Sequence
  Description of Artificial Sequence: Synthetic oligonucleotide
  Antisense strand to SEQ ID NO: 1377130
guuuccauagagaauggca

SEQ ID NO: 1377132 - RNA, 19 nt, Artificial Sequence
  Description of Artificial Sequence: Synthetic oligonucleotide
  Sense strand starting at position 3039 of SEQ ID NO: 1242846
gguuucagaugaguaggau

SEQ ID NO: 1377133 - RNA, 19 nt, Artificial Sequence
  Description of Artificial Sequence: Synthetic oligonucleotide
  Antisense strand to SEQ ID NO: 1377132
auccuacucaucugaaacc

SEQ ID NO: 1377134 - RNA, 19 nt, Artificial Sequence
  Description of Artificial Sequence: Synthetic oligonucleotide
  Sense strand starting at position 3040 of SEQ ID NO: 1242846
guuucagaugaguaggauu

SEQ ID NO: 1377135 - RNA, 19 nt, Artificial Sequence
  Description of Artificial Sequence: Synthetic oligonucleotide
  Antisense strand to SEQ ID NO: 1377134
aauccuacucaucugaaac

SEQ ID NO: 1377136 - RNA, 19 nt, Artificial Sequence
  Description of Artificial Sequence: Synthetic oligonucleotide
  Sense strand starting at position 3051 of SEQ ID NO: 1242846
guaggauugugauccugau

SEQ ID NO: 1377137 - RNA, 19 nt, Artificial Sequence
  Description of Artificial Sequence: Synthetic oligonucleotide
  Antisense strand to SEQ ID NO: 1377136
aucaggaucacaauccuac

SEQ ID NO: 1377138 - RNA, 19 nt, Artificial Sequence
  Description of Artificial Sequence: Synthetic oligonucleotide
  Sense strand starting at position 3055 of SEQ ID NO: 1242846
gauugugauccugaugcca

SEQ ID NO: 1377139 - RNA, 19 nt, Artificial Sequence
  Description of Artificial Sequence: Synthetic oligonucleotide
  Antisense strand to SEQ ID NO: 1377138
uggcaucaggaucacaauc

SEQ ID NO: 1377140 - RNA, 19 nt, Artificial Sequence
  Description of Artificial Sequence: Synthetic oligonucleotide
  Sense strand starting at position 3086 of SEQ ID NO: 1242846
gcaugaauuacgggauaaa

SEQ ID NO: 1377141 - RNA, 19 nt, Artificial Sequence
  Description of Artificial Sequence: Synthetic oligonucleotide
  Antisense strand to SEQ ID NO: 1377140
uuuaucccguaauucaugc

SEQ ID NO: 1377142 - RNA, 19 nt, Artificial Sequence
  Description of Artificial Sequence: Synthetic oligonucleotide
  Sense strand starting at position 3171 of SEQ ID NO: 1242846
gaguuccucccuuggaaau

SEQ ID NO: 1377143 - RNA, 19 nt, Artificial Sequence
  Description of Artificial Sequence: Synthetic oligonucleotide
  Antisense strand to SEQ ID NO: 1377142
auuuccaagggaggaacuc

SEQ ID NO: 1377144 - RNA, 19 nt, Artificial Sequence
  Description of Artificial Sequence: Synthetic oligonucleotide
  Sense strand starting at position 3288 of SEQ ID NO: 1242846
cuuaaucagcacuaaguga

SEQ ID NO: 1377145 - RNA, 19 nt, Artificial Sequence
  Description of Artificial Sequence: Synthetic oligonucleotide
  Antisense strand to SEQ ID NO: 1377144
ucacuuagugcugauuaag

SEQ ID NO: 1377146 - RNA, 19 nt, Artificial Sequence
  Description of Artificial Sequence: Synthetic oligonucleotide
  Sense strand starting at position 3339 of SEQ ID NO: 1242846
auaccagauuuacacagua

SEQ ID NO: 1377147 - RNA, 19 nt, Artificial Sequence
  Description of Artificial Sequence: Synthetic oligonucleotide
  Antisense strand to SEQ ID NO: 1377146
uacuguguaaaucugguau

SEQ ID NO: 1377148 - RNA, 19 nt, Artificial Sequence
  Description of Artificial Sequence: Synthetic oligonucleotide
  Sense strand starting at position 3455 of SEQ ID NO: 1242846
aagugaaaucaaugcugga

SEQ ID NO: 1377149 - RNA, 19 nt, Artificial Sequence
  Description of Artificial Sequence: Synthetic oligonucleotide
  Antisense strand to SEQ ID NO: 1377148
uccagcauugauuucacuu

SEQ ID NO: 1377150 - RNA, 19 nt, Artificial Sequence
  Description of Artificial Sequence: Synthetic oligonucleotide
  Sense strand starting at position 3459 of SEQ ID NO: 1242846
gaaaucaaugcuggaugau

SEQ ID NO: 1377151 - RNA, 19 nt, Artificial Sequence
  Description of Artificial Sequence: Synthetic oligonucleotide
  Antisense strand to SEQ ID NO: 1377150
aucauccagcauugauuuc

SEQ ID NO: 1377152 - RNA, 19 nt, Artificial Sequence
  Description of Artificial Sequence: Synthetic oligonucleotide
  Sense strand starting at position 3471 of SEQ ID NO: 1242846
ggaugauagcacugaggcu

SEQ ID NO: 1377153 - RNA, 19 nt, Artificial Sequence
  Description of Artificial Sequence: Synthetic oligonucleotide
  Antisense strand to SEQ ID NO: 1377152
agccucagugcuaucaucc

SEQ ID NO: 1377154 - RNA, 19 nt, Artificial Sequence
  Description of Artificial Sequence: Synthetic oligonucleotide
  Sense strand starting at position 3478 of SEQ ID NO: 1242846
agcacugaggcuuauuaaa

SEQ ID NO: 1377155 - RNA, 19 nt, Artificial Sequence
  Description of Artificial Sequence: Synthetic oligonucleotide
  Antisense strand to SEQ ID NO: 1377154
uuuaauaagccucagugcu

SEQ ID NO: 1377156 - RNA, 19 nt, Artificial Sequence
  Description of Artificial Sequence: Synthetic oligonucleotide
  Sense strand starting at position 3503 of SEQ ID NO: 1242846
cccagagguggcugaugaa

SEQ ID NO: 1377157 - RNA, 19 nt, Artificial Sequence
  Description of Artificial Sequence: Synthetic oligonucleotide
  Antisense strand to SEQ ID NO: 1377156
uucaucagccaccucuggg

SEQ ID NO: 1377158 - RNA, 19 nt, Artificial Sequence
  Description of Artificial Sequence: Synthetic oligonucleotide
  Sense strand starting at position 3730 of SEQ ID NO: 1242846
auuaaaguccuguggaaga

SEQ ID NO: 1377159 - RNA, 19 nt, Artificial Sequence
  Description of Artificial Sequence: Synthetic oligonucleotide
  Antisense strand to SEQ ID NO: 1377158
ucuuccacaggacuuuaau

SEQ ID NO: 1377160 - RNA, 19 nt, Artificial Sequence
  Description of Artificial Sequence: Synthetic oligonucleotide
  Sense strand starting at position 3732 of SEQ ID NO: 1242846
uaaaguccuguggaagagu

SEQ ID NO: 1377161 - RNA, 19 nt, Artificial Sequence
  Description of Artificial Sequence: Synthetic oligonucleotide
  Antisense strand to SEQ ID NO: 1377160
acucuuccacaggacuuua

SEQ ID NO: 1377162 - RNA, 19 nt, Artificial Sequence
  Description of Artificial Sequence: Synthetic oligonucleotide
  Sense strand starting at position 3735 of SEQ ID NO: 1242846
aguccuguggaagaguuua

SEQ ID NO: 1377163 - RNA, 19 nt, Artificial Sequence
  Description of Artificial Sequence: Synthetic oligonucleotide
  Antisense strand to SEQ ID NO: 1377162
uaaacucuuccacaggacu

SEQ ID NO: 1377164 - RNA, 19 nt, Artificial Sequence
  Description of Artificial Sequence: Synthetic oligonucleotide
  Sense strand starting at position 84 of SEQ ID NO: 1242847
uuuauagagcuauaucaug

SEQ ID NO: 1377165 - RNA, 19 nt, Artificial Sequence
  Description of Artificial Sequence: Synthetic oligonucleotide
  Antisense strand to SEQ ID NO: 1377164
caugauauagcucuauaaa

SEQ ID NO: 1377166 - RNA, 19 nt, Artificial Sequence
  Description of Artificial Sequence: Synthetic oligonucleotide
  Sense strand starting at position 165 of SEQ ID NO: 1242847
caguucggaugauuaaauu

SEQ ID NO: 1377167 - RNA, 19 nt, Artificial Sequence
  Description of Artificial Sequence: Synthetic oligonucleotide
  Antisense strand to SEQ ID NO: 1377166
aauuuaaucauccgaacug

SEQ ID NO: 1377168 - RNA, 19 nt, Artificial Sequence
  Description of Artificial Sequence: Synthetic oligonucleotide
  Sense strand starting at position 277 of SEQ ID NO: 1242847
augagugauuauucuggaa

SEQ ID NO: 1377169 - RNA, 19 nt, Artificial Sequence
  Description of Artificial Sequence: Synthetic oligonucleotide
  Antisense strand to SEQ ID NO: 1377168
uuccagaauaaucacucau

SEQ ID NO: 1377170 - RNA, 19 nt, Artificial Sequence
  Description of Artificial Sequence: Synthetic oligonucleotide
  Sense strand starting at position 323 of SEQ ID NO: 1242847
gaaucuuauguguagagug

SEQ ID NO: 1377171 - RNA, 19 nt, Artificial Sequence
  Description of Artificial Sequence: Synthetic oligonucleotide
  Antisense strand to SEQ ID NO: 1377170
cacucuacacauaagauuc

SEQ ID NO: 1377172 - RNA, 19 nt, Artificial Sequence
  Description of Artificial Sequence: Synthetic oligonucleotide
  Sense strand starting at position 417 of SEQ ID NO: 1242847
cugagcaaucacuggauau

SEQ ID NO: 1377173 - RNA, 19 nt, Artificial Sequence
  Description of Artificial Sequence: Synthetic oligonucleotide
  Antisense strand to SEQ ID NO: 1377172
auauccagugauugcucag

SEQ ID NO: 1377174 - RNA, 19 nt, Artificial Sequence
  Description of Artificial Sequence: Synthetic oligonucleotide
  Sense strand starting at position 655 of SEQ ID NO: 1242847
cuauuuaucuagguguucu

SEQ ID NO: 1377175 - RNA, 19 nt, Artificial Sequence
  Description of Artificial Sequence: Synthetic oligonucleotide
  Antisense strand to SEQ ID NO: 1377174
agaacaccuagauaaauag

SEQ ID NO: 1377176 - RNA, 19 nt, Artificial Sequence
  Description of Artificial Sequence: Synthetic oligonucleotide
  Sense strand starting at position 663 of SEQ ID NO: 1242847
cuagguguucuuuaaauua

SEQ ID NO: 1377177 - RNA, 19 nt, Artificial Sequence
  Description of Artificial Sequence: Synthetic oligonucleotide
  Antisense strand to SEQ ID NO: 1377176
uaauuuaaagaacaccuag

SEQ ID NO: 1377178 - RNA, 19 nt, Artificial Sequence
  Description of Artificial Sequence: Synthetic oligonucleotide
  Sense strand starting at position 944 of SEQ ID NO: 1242847
uagucugaagguugaacaa

SEQ ID NO: 1377179 - RNA, 19 nt, Artificial Sequence
  Description of Artificial Sequence: Synthetic oligonucleotide
  Antisense strand to SEQ ID NO: 1377178
uuguucaaccuucagacua

SEQ ID NO: 1377180 - RNA, 19 nt, Artificial Sequence
  Description of Artificial Sequence: Synthetic oligonucleotide
  Sense strand starting at position 971 of SEQ ID NO: 1242847
aggaauaacuuucucacga

SEQ ID NO: 1377181 - RNA, 19 nt, Artificial Sequence
  Description of Artificial Sequence: Synthetic oligonucleotide
  Antisense strand to SEQ ID NO: 1377180
ucgugagaaaguuauuccu

SEQ ID NO: 1377182 - RNA, 19 nt, Artificial Sequence
  Description of Artificial Sequence: Synthetic oligonucleotide
  Sense strand starting at position 972 of SEQ ID NO: 1242847
ggaauaacuuucucacgau

SEQ ID NO: 1377183 - RNA, 19 nt, Artificial Sequence
  Description of Artificial Sequence: Synthetic oligonucleotide
  Antisense strand to SEQ ID NO: 1377182
aucgugagaaaguuauucc

SEQ ID NO: 1377184 - RNA, 19 nt, Artificial Sequence
  Description of Artificial Sequence: Synthetic oligonucleotide
  Sense strand starting at position 976 of SEQ ID NO: 1242847
uaacuuucucacgauguga

SEQ ID NO: 1377185 - RNA, 19 nt, Artificial Sequence
  Description of Artificial Sequence: Synthetic oligonucleotide
  Antisense strand to SEQ ID NO: 1377184
ucacaucgugagaaaguua

SEQ ID NO: 1377186 - RNA, 19 nt, Artificial Sequence
  Description of Artificial Sequence: Synthetic oligonucleotide
  Sense strand starting at position 1009 of SEQ ID NO: 1242847
gcauuucucggccaucuua

SEQ ID NO: 1377187 - RNA, 19 nt, Artificial Sequence
  Description of Artificial Sequence: Synthetic oligonucleotide
  Antisense strand to SEQ ID NO: 1377186
uaagauggccgagaaaugc

SEQ ID NO: 1377188 - RNA, 19 nt, Artificial Sequence
  Description of Artificial Sequence: Synthetic oligonucleotide
  Sense strand starting at position 1044 of SEQ ID NO: 1242847
ugcaucugacuuugagaaa

SEQ ID NO: 1377189 - RNA, 19 nt, Artificial Sequence
  Description of Artificial Sequence: Synthetic oligonucleotide
  Antisense strand to SEQ ID NO: 1377188
uuucucaaagucagaugca

SEQ ID NO: 1377190 - RNA, 19 nt, Artificial Sequence
  Description of Artificial Sequence: Synthetic oligonucleotide
  Sense strand starting at position 1152 of SEQ ID NO: 1242847
gccacuguguccuuauuua

SEQ ID NO: 1377191 - RNA, 19 nt, Artificial Sequence
  Description of Artificial Sequence: Synthetic oligonucleotide
  Antisense strand to SEQ ID NO: 1377190
uaaauaaggacacaguggc

SEQ ID NO: 1377192 - RNA, 19 nt, Artificial Sequence
  Description of Artificial Sequence: Synthetic oligonucleotide
  Sense strand starting at position 1156 of SEQ ID NO: 1242847
cuguguccuuauuuaucuu

SEQ ID NO: 1377193 - RNA, 19 nt, Artificial Sequence
  Description of Artificial Sequence: Synthetic oligonucleotide
  Antisense strand to SEQ ID NO: 1377192
aagauaaauaaggacacag

SEQ ID NO: 1377194 - RNA, 19 nt, Artificial Sequence
  Description of Artificial Sequence: Synthetic oligonucleotide
  Sense strand starting at position 1684 of SEQ ID NO: 1242847
uccagucaucuagacaucu

SEQ ID NO: 1377195 - RNA, 19 nt, Artificial Sequence
  Description of Artificial Sequence: Synthetic oligonucleotide
  Antisense strand to SEQ ID NO: 1377194
agaugucuagaugacugga

SEQ ID NO: 1377196 - RNA, 19 nt, Artificial Sequence
  Description of Artificial Sequence: Synthetic oligonucleotide
  Sense strand starting at position 2567 of SEQ ID NO: 1242847
acucuaagaucaguagagu

SEQ ID NO: 1377197 - RNA, 19 nt, Artificial Sequence
  Description of Artificial Sequence: Synthetic oligonucleotide
  Antisense strand to SEQ ID NO: 1377196
acucuacugaucuuagagu

SEQ ID NO: 1377198 - RNA, 19 nt, Artificial Sequence
  Description of Artificial Sequence: Synthetic oligonucleotide
  Sense strand starting at position 2639 of SEQ ID NO: 1242847
ucucaacuccauugaagag

SEQ ID NO: 1377199 - RNA, 19 nt, Artificial Sequence
  Description of Artificial Sequence: Synthetic oligonucleotide
  Antisense strand to SEQ ID NO: 1377198
cucuucaauggaguugaga

SEQ ID NO: 1377200 - RNA, 19 nt, Artificial Sequence
  Description of Artificial Sequence: Synthetic oligonucleotide
  Sense strand starting at position 2660 of SEQ ID NO: 1242847
gcuacuugucaguauuucu

SEQ ID NO: 1377201 - RNA, 19 nt, Artificial Sequence
  Description of Artificial Sequence: Synthetic oligonucleotide
  Antisense strand to SEQ ID NO: 1377200
agaaauacugacaaguagc

SEQ ID NO: 1377202 - RNA, 19 nt, Artificial Sequence
  Description of Artificial Sequence: Synthetic oligonucleotide
  Sense strand starting at position 2686 of SEQ ID NO: 1242847
gucaguauccauuaggauc

SEQ ID NO: 1377203 - RNA, 19 nt, Artificial Sequence
  Description of Artificial Sequence: Synthetic oligonucleotide
  Antisense strand to SEQ ID NO: 1377202
gauccuaauggauacugac

SEQ ID NO: 1377204 - RNA, 19 nt, Artificial Sequence
  Description of Artificial Sequence: Synthetic oligonucleotide
  Sense strand starting at position 2897 of SEQ ID NO: 1242847
ccuuauagccuaggaggaa

SEQ ID NO: 1377205 - RNA, 19 nt, Artificial Sequence
  Description of Artificial Sequence: Synthetic oligonucleotide
  Antisense strand to SEQ ID NO: 1377204
uuccuccuaggcuauaagg

SEQ ID NO: 1377206 - RNA, 19 nt, Artificial Sequence
  Description of Artificial Sequence: Synthetic oligonucleotide
  Sense strand starting at position 2972 of SEQ ID NO: 1242847
uuaugacuuccugagguua

SEQ ID NO: 1377207 - RNA, 19 nt, Artificial Sequence
  Description of Artificial Sequence: Synthetic oligonucleotide
  Antisense strand to SEQ ID NO: 1377206
uaaccucaggaagucauaa

SEQ ID NO: 1377208 - RNA, 19 nt, Artificial Sequence
  Description of Artificial Sequence: Synthetic oligonucleotide
  Sense strand starting at position 3102 of SEQ ID NO: 1242847
uccagaaaguagucucaca

SEQ ID NO: 1377209 - RNA, 19 nt, Artificial Sequence
  Description of Artificial Sequence: Synthetic oligonucleotide
  Antisense strand to SEQ ID NO: 1377208
ugugagacuacuuucugga

SEQ ID NO: 1377210 - RNA, 19 nt, Artificial Sequence
  Description of Artificial Sequence: Synthetic oligonucleotide
  Sense strand starting at position 3110 of SEQ ID NO: 1242847
guagucucacacugaacaa

SEQ ID NO: 1377211 - RNA, 19 nt, Artificial Sequence
  Description of Artificial Sequence: Synthetic oligonucleotide
  Antisense strand to SEQ ID NO: 1377210
uuguucagugugagacuac

SEQ ID NO: 1377212 - RNA, 19 nt, Artificial Sequence
  Description of Artificial Sequence: Synthetic oligonucleotide
  Sense strand starting at position 3144 of SEQ ID NO: 1242847
aggaaugucaacuggauuc

SEQ ID NO: 1377213 - RNA, 19 nt, Artificial Sequence
  Description of Artificial Sequence: Synthetic oligonucleotide
  Antisense strand to SEQ ID NO: 1377212
gaauccaguugacauuccu

SEQ ID NO: 1377214 - RNA, 19 nt, Artificial Sequence
  Description of Artificial Sequence: Synthetic oligonucleotide
  Sense strand starting at position 3155 of SEQ ID NO: 1242847
cuggauucugaauggucca

SEQ ID NO: 1377215 - RNA, 19 nt, Artificial Sequence
  Description of Artificial Sequence: Synthetic oligonucleotide
  Antisense strand to SEQ ID NO: 1377214
uggaccauucagaauccag

SEQ ID NO: 1377216 - RNA, 19 nt, Artificial Sequence
  Description of Artificial Sequence: Synthetic oligonucleotide
  Sense strand starting at position 3156 of SEQ ID NO: 1242847
uggauucugaaugguccau

SEQ ID NO: 1377217 - RNA, 19 nt, Artificial Sequence
  Description of Artificial Sequence: Synthetic oligonucleotide
  Antisense strand to SEQ ID NO: 1377216
auggaccauucagaaucca

SEQ ID NO: 1377218 - RNA, 19 nt, Artificial Sequence
  Description of Artificial Sequence: Synthetic oligonucleotide
  Sense strand starting at position 3160 of SEQ ID NO: 1242847
uucugaaugguccauguua

SEQ ID NO: 1377219 - RNA, 19 nt, Artificial Sequence
  Description of Artificial Sequence: Synthetic oligonucleotide
  Antisense strand to SEQ ID NO: 1377218
uaacauggaccauucagaa

SEQ ID NO: 1377220 - RNA, 19 nt, Artificial Sequence
  Description of Artificial Sequence: Synthetic oligonucleotide
  Sense strand starting at position 3215 of SEQ ID NO: 1242847
cuuggacucgaugauccau

SEQ ID NO: 1377221 - RNA, 19 nt, Artificial Sequence
  Description of Artificial Sequence: Synthetic oligonucleotide
  Antisense strand to SEQ ID NO: 1377220
auggaucaucgaguccaag

SEQ ID NO: 1377222 - RNA, 19 nt, Artificial Sequence
  Description of Artificial Sequence: Synthetic oligonucleotide
  Sense strand starting at position 3428 of SEQ ID NO: 1242847
cugguacuccaacaaaguu

SEQ ID NO: 1377223 - RNA, 19 nt, Artificial Sequence
  Description of Artificial Sequence: Synthetic oligonucleotide
  Antisense strand to SEQ ID NO: 1377222
aacuuuguuggaguaccag

SEQ ID NO: 1377224 - RNA, 19 nt, Artificial Sequence
  Description of Artificial Sequence: Synthetic oligonucleotide
  Sense strand starting at position 3449 of SEQ ID NO: 1242847
uuuggaaaggacugcuaua

SEQ ID NO: 1377225 - RNA, 19 nt, Artificial Sequence
  Description of Artificial Sequence: Synthetic oligonucleotide
  Antisense strand to SEQ ID NO: 1377224
uauagcaguccuuuccaaa

SEQ ID NO: 1377226 - RNA, 19 nt, Artificial Sequence
  Description of Artificial Sequence: Synthetic oligonucleotide
  Sense strand starting at position 3616 of SEQ ID NO: 1242847
cagaaauacuggcugaguu

SEQ ID NO: 1377227 - RNA, 19 nt, Artificial Sequence
  Description of Artificial Sequence: Synthetic oligonucleotide
  Antisense strand to SEQ ID NO: 1377226
aacucagccaguauuucug

SEQ ID NO: 1377228 - RNA, 19 nt, Artificial Sequence
  Description of Artificial Sequence: Synthetic oligonucleotide
  Sense strand starting at position 3626 of SEQ ID NO: 1242847
ggcugaguugaaugaagag

SEQ ID NO: 1377229 - RNA, 19 nt, Artificial Sequence
  Description of Artificial Sequence: Synthetic oligonucleotide
  Antisense strand to SEQ ID NO: 1377228
cucuucauucaacucagcc

SEQ ID NO: 1377230 - RNA, 19 nt, Artificial Sequence
  Description of Artificial Sequence: Synthetic oligonucleotide
  Sense strand starting at position 3633 of SEQ ID NO: 1242847
uugaaugaagagugauucu

SEQ ID NO: 1377231 - RNA, 19 nt, Artificial Sequence
  Description of Artificial Sequence: Synthetic oligonucleotide
  Antisense strand to SEQ ID NO: 1377230
agaaucacucuucauucaa

SEQ ID NO: 1377232 - RNA, 19 nt, Artificial Sequence
  Description of Artificial Sequence: Synthetic oligonucleotide
  Sense strand starting at position 3662 of SEQ ID NO: 1242847
ggguguuucugaucaagga

SEQ ID NO: 1377233 - RNA, 19 nt, Artificial Sequence
  Description of Artificial Sequence: Synthetic oligonucleotide
  Antisense strand to SEQ ID NO: 1377232
uccuugaucagaaacaccc

SEQ ID NO: 1377234 - RNA, 19 nt, Artificial Sequence
  Description of Artificial Sequence: Synthetic oligonucleotide
  Sense strand starting at position 3663 of SEQ ID NO: 1242847
gguguuucugaucaaggag

SEQ ID NO: 1377235 - RNA, 19 nt, Artificial Sequence
  Description of Artificial Sequence: Synthetic oligonucleotide
  Antisense strand to SEQ ID NO: 1377234
cuccuugaucagaaacacc

SEQ ID NO: 1377236 - RNA, 19 nt, Artificial Sequence
  Description of Artificial Sequence: Synthetic oligonucleotide
  Sense strand starting at position 3666 of SEQ ID NO: 1242847
guuucugaucaaggagauu

SEQ ID NO: 1377237 - RNA, 19 nt, Artificial Sequence
  Description of Artificial Sequence: Synthetic oligonucleotide
  Antisense strand to SEQ ID NO: 1377236
aaucuccuugaucagaaac

SEQ ID NO: 1377238 - RNA, 19 nt, Artificial Sequence
  Description of Artificial Sequence: Synthetic oligonucleotide
  Sense strand starting at position 3678 of SEQ ID NO: 1242847
ggagauuccacuugauugu

SEQ ID NO: 1377239 - RNA, 19 nt, Artificial Sequence
  Description of Artificial Sequence: Synthetic oligonucleotide
  Antisense strand to SEQ ID NO: 1377238
acaaucaaguggaaucucc

SEQ ID NO: 1377240 - RNA, 19 nt, Artificial Sequence
  Description of Artificial Sequence: Synthetic oligonucleotide
  Sense strand starting at position 3750 of SEQ ID NO: 1242847
gucaaucagcuuuaaugaa

SEQ ID NO: 1377241 - RNA, 19 nt, Artificial Sequence
  Description of Artificial Sequence: Synthetic oligonucleotide
  Antisense strand to SEQ ID NO: 1377240
uucauuaaagcugauugac

SEQ ID NO: 1377242 - RNA, 19 nt, Artificial Sequence
  Description of Artificial Sequence: Synthetic oligonucleotide
  Sense strand starting at position 3792 of SEQ ID NO: 1242847
gugugaauuuccuuguuuc

SEQ ID NO: 1377243 - RNA, 19 nt, Artificial Sequence
  Description of Artificial Sequence: Synthetic oligonucleotide
  Antisense strand to SEQ ID NO: 1377242
gaaacaaggaaauucacac

SEQ ID NO: 1377244 - RNA, 19 nt, Artificial Sequence
  Description of Artificial Sequence: Synthetic oligonucleotide
  Sense strand starting at position 24 of SEQ ID NO: 1242848
auggcugaucccuagguga

SEQ ID NO: 1377245 - RNA, 19 nt, Artificial Sequence
  Description of Artificial Sequence: Synthetic oligonucleotide
  Antisense strand to SEQ ID NO: 1377244
ucaccuagggaucagccau

SEQ ID NO: 1377246 - RNA, 19 nt, Artificial Sequence
  Description of Artificial Sequence: Synthetic oligonucleotide
  Sense strand starting at position 689 of SEQ ID NO: 1242848
gccaaagugugaggguuaa

SEQ ID NO: 1377247 - RNA, 19 nt, Artificial Sequence
  Description of Artificial Sequence: Synthetic oligonucleotide
  Antisense strand to SEQ ID NO: 1377246
uuaacccucacacuuuggc

SEQ ID NO: 1377248 - RNA, 19 nt, Artificial Sequence
  Description of Artificial Sequence: Synthetic oligonucleotide
  Sense strand starting at position 766 of SEQ ID NO: 1242848
uuagcuaaggucugacaca

SEQ ID NO: 1377249 - RNA, 19 nt, Artificial Sequence
  Description of Artificial Sequence: Synthetic oligonucleotide
  Antisense strand to SEQ ID NO: 1377248
ugugucagaccuuagcuaa

SEQ ID NO: 1377250 - RNA, 19 nt, Artificial Sequence
  Description of Artificial Sequence: Synthetic oligonucleotide
  Sense strand starting at position 1190 of SEQ ID NO: 1242848
cugagaacucuggguccca

SEQ ID NO: 1377251 - RNA, 19 nt, Artificial Sequence
  Description of Artificial Sequence: Synthetic oligonucleotide
  Antisense strand to SEQ ID NO: 1377250
ugggacccagaguucucag

SEQ ID NO: 1377252 - RNA, 19 nt, Artificial Sequence
  Description of Artificial Sequence: Synthetic oligonucleotide
  Sense strand starting at position 1247 of SEQ ID NO: 1242848
gacacuucugggugggaga

SEQ ID NO: 1377253 - RNA, 19 nt, Artificial Sequence
  Description of Artificial Sequence: Synthetic oligonucleotide
  Antisense strand to SEQ ID NO: 1377252
ucucccacccagaaguguc

SEQ ID NO: 1377254 - RNA, 19 nt, Artificial Sequence
  Description of Artificial Sequence: Synthetic oligonucleotide
  Sense strand starting at position 1668 of SEQ ID NO: 1242848
cggcuucucuccugugaga

SEQ ID NO: 1377255 - RNA, 19 nt, Artificial Sequence
  Description of Artificial Sequence: Synthetic oligonucleotide
  Antisense strand to SEQ ID NO: 1377254
ucucacaggagagaagccg

SEQ ID NO: 1377256 - RNA, 19 nt, Artificial Sequence
  Description of Artificial Sequence: Synthetic oligonucleotide
  Sense strand starting at position 1670 of SEQ ID NO: 1242848
gcuucucuccugugagaaa

SEQ ID NO: 1377257 - RNA, 19 nt, Artificial Sequence
  Description of Artificial Sequence: Synthetic oligonucleotide
  Antisense strand to SEQ ID NO: 1377256
uuucucacaggagagaagc

SEQ ID NO: 1377258 - RNA, 19 nt, Artificial Sequence
  Description of Artificial Sequence: Synthetic oligonucleotide
  Sense strand starting at position 2250 of SEQ ID NO: 1242848
ucggaacuuuccuugccaa

SEQ ID NO: 1377259 - RNA, 19 nt, Artificial Sequence
  Description of Artificial Sequence: Synthetic oligonucleotide
  Antisense strand to SEQ ID NO: 1377258
uuggcaaggaaaguuccga

SEQ ID NO: 1377260 - RNA, 19 nt, Artificial Sequence
  Description of Artificial Sequence: Synthetic oligonucleotide
  Sense strand starting at position 2251 of SEQ ID NO: 1242848
cggaacuuuccuugccaau

SEQ ID NO: 1377261 - RNA, 19 nt, Artificial Sequence
  Description of Artificial Sequence: Synthetic oligonucleotide
  Antisense strand to SEQ ID NO: 1377260
auuggcaaggaaaguuccg

SEQ ID NO: 1377262 - RNA, 19 nt, Artificial Sequence
  Description of Artificial Sequence: Synthetic oligonucleotide
  Sense strand starting at position 2565 of SEQ ID NO: 1242848
cucgucuuguccucacagu

SEQ ID NO: 1377263 - RNA, 19 nt, Artificial Sequence
  Description of Artificial Sequence: Synthetic oligonucleotide
  Antisense strand to SEQ ID NO: 1377262
acugugaggacaagacgag

SEQ ID NO: 1377264 - RNA, 19 nt, Artificial Sequence
  Description of Artificial Sequence: Synthetic oligonucleotide
  Sense strand starting at position 2566 of SEQ ID NO: 1242848
ucgucuuguccucacagua

SEQ ID NO: 1377265 - RNA, 19 nt, Artificial Sequence
  Description of Artificial Sequence: Synthetic oligonucleotide
  Antisense strand to SEQ ID NO: 1377264
uacugugaggacaagacga

SEQ ID NO: 1377266 - RNA, 19 nt, Artificial Sequence
  Description of Artificial Sequence: Synthetic oligonucleotide
  Sense strand starting at position 2579 of SEQ ID NO: 1242848
acaguacagugcucagaga

SEQ ID NO: 1377267 - RNA, 19 nt, Artificial Sequence
  Description of Artificial Sequence: Synthetic oligonucleotide
  Antisense strand to SEQ ID NO: 1377266
ucucugagcacuguacugu

SEQ ID NO: 1377268 - RNA, 19 nt, Artificial Sequence
  Description of Artificial Sequence: Synthetic oligonucleotide
  Sense strand starting at position 2624 of SEQ ID NO: 1242848
augcaaacguguuuaccua

SEQ ID NO: 1377269 - RNA, 19 nt, Artificial Sequence
  Description of Artificial Sequence: Synthetic oligonucleotide
  Antisense strand to SEQ ID NO: 1377268
uagguaaacacguuugcau

SEQ ID NO: 1377270 - RNA, 19 nt, Artificial Sequence
  Description of Artificial Sequence: Synthetic oligonucleotide
  Sense strand starting at position 2625 of SEQ ID NO: 1242848
ugcaaacguguuuaccuau

SEQ ID NO: 1377271 - RNA, 19 nt, Artificial Sequence
  Description of Artificial Sequence: Synthetic oligonucleotide
  Antisense strand to SEQ ID NO: 1377270
auagguaaacacguuugca

SEQ ID NO: 1377272 - RNA, 19 nt, Artificial Sequence
  Description of Artificial Sequence: Synthetic oligonucleotide
  Sense strand starting at position 2631 of SEQ ID NO: 1242848
cguguuuaccuauguguaa

SEQ ID NO: 1377273 - RNA, 19 nt, Artificial Sequence
  Description of Artificial Sequence: Synthetic oligonucleotide
  Antisense strand to SEQ ID NO: 1377272
uuacacauagguaaacacg

SEQ ID NO: 1377274 - RNA, 19 nt, Artificial Sequence
  Description of Artificial Sequence: Synthetic oligonucleotide
  Sense strand starting at position 2632 of SEQ ID NO: 1242848
guguuuaccuauguguaaa

SEQ ID NO: 1377275 - RNA, 19 nt, Artificial Sequence
  Description of Artificial Sequence: Synthetic oligonucleotide
  Antisense strand to SEQ ID NO: 1377274
uuuacacauagguaaacac

SEQ ID NO: 1377276 - RNA, 19 nt, Artificial Sequence
  Description of Artificial Sequence: Synthetic oligonucleotide
  Sense strand starting at position 2634 of SEQ ID NO: 1242848
guuuaccuauguguaaaua

SEQ ID NO: 1377277 - RNA, 19 nt, Artificial Sequence
  Description of Artificial Sequence: Synthetic oligonucleotide
  Antisense strand to SEQ ID NO: 1377276
uauuuacacauagguaaac

SEQ ID NO: 1377278 - RNA, 19 nt, Artificial Sequence
  Description of Artificial Sequence: Synthetic oligonucleotide
  Sense strand starting at position 2644 of SEQ ID NO: 1242848
guguaaauaucaguaaagc

SEQ ID NO: 1377279 - RNA, 19 nt, Artificial Sequence
  Description of Artificial Sequence: Synthetic oligonucleotide
  Antisense strand to SEQ ID NO: 1377278
gcuuuacugauauuuacac

SEQ ID NO: 1377280 - RNA, 19 nt, Artificial Sequence
  Description of Artificial Sequence: Synthetic oligonucleotide
  Sense strand starting at position 2645 of SEQ ID NO: 1242848
uguaaauaucaguaaagca

SEQ ID NO: 1377281 - RNA, 19 nt, Artificial Sequence
  Description of Artificial Sequence: Synthetic oligonucleotide
  Antisense strand to SEQ ID NO: 1377280
ugcuuuacugauauuuaca

SEQ ID NO: 1377282 - RNA, 19 nt, Artificial Sequence
  Description of Artificial Sequence: Synthetic oligonucleotide
  Sense strand starting at position 2679 of SEQ ID NO: 1242848
caugcaggaaugugugaua

SEQ ID NO: 1377283 - RNA, 19 nt, Artificial Sequence
  Description of Artificial Sequence: Synthetic oligonucleotide
  Antisense strand to SEQ ID NO: 1377282
uaucacacauuccugcaug

SEQ ID NO: 1377284 - RNA, 19 nt, Artificial Sequence
  Description of Artificial Sequence: Synthetic oligonucleotide
  Sense strand starting at position 2686 of SEQ ID NO: 1242848
gaaugugugauacggucau

SEQ ID NO: 1377285 - RNA, 19 nt, Artificial Sequence
  Description of Artificial Sequence: Synthetic oligonucleotide
  Antisense strand to SEQ ID NO: 1377284
augaccguaucacacauuc

SEQ ID NO: 1377286 - RNA, 19 nt, Artificial Sequence
  Description of Artificial Sequence: Synthetic oligonucleotide
  Sense strand starting at position 2751 of SEQ ID NO: 1242848
ucagguccucugggaaaug

SEQ ID NO: 1377287 - RNA, 19 nt, Artificial Sequence
  Description of Artificial Sequence: Synthetic oligonucleotide
  Antisense strand to SEQ ID NO: 1377286
cauuucccagaggaccuga

SEQ ID NO: 1377288 - RNA, 19 nt, Artificial Sequence
  Description of Artificial Sequence: Synthetic oligonucleotide
  Sense strand starting at position 3264 of SEQ ID NO: 1242848
gagagacucagugguguga

SEQ ID NO: 1377289 - RNA, 19 nt, Artificial Sequence
  Description of Artificial Sequence: Synthetic oligonucleotide
  Antisense strand to SEQ ID NO: 1377288
ucacaccacugagucucuc

SEQ ID NO: 1377290 - RNA, 19 nt, Artificial Sequence
  Description of Artificial Sequence: Synthetic oligonucleotide
  Sense strand starting at position 3266 of SEQ ID NO: 1242848
gagacucaguggugugauc

SEQ ID NO: 1377291 - RNA, 19 nt, Artificial Sequence
  Description of Artificial Sequence: Synthetic oligonucleotide
  Antisense strand to SEQ ID NO: 1377290
gaucacaccacugagucuc

SEQ ID NO: 1377292 - RNA, 19 nt, Artificial Sequence
  Description of Artificial Sequence: Synthetic oligonucleotide
  Sense strand starting at position 3268 of SEQ ID NO: 1242848
gacucaguggugugaucuc

SEQ ID NO: 1377293 - RNA, 19 nt, Artificial Sequence
  Description of Artificial Sequence: Synthetic oligonucleotide
  Antisense strand to SEQ ID NO: 1377292
gagaucacaccacugaguc

SEQ ID NO: 1377294 - RNA, 19 nt, Artificial Sequence
  Description of Artificial Sequence: Synthetic oligonucleotide
  Sense strand starting at position 3277 of SEQ ID NO: 1242848
gugugaucucaguagccua

SEQ ID NO: 1377295 - RNA, 19 nt, Artificial Sequence
  Description of Artificial Sequence: Synthetic oligonucleotide
  Antisense strand to SEQ ID NO: 1377294
uaggcuacugagaucacac

SEQ ID NO: 1377296 - RNA, 19 nt, Artificial Sequence
  Description of Artificial Sequence: Synthetic oligonucleotide
  Sense strand starting at position 3317 of SEQ ID NO: 1242848
gagcacuucuguccugaag

SEQ ID NO: 1377297 - RNA, 19 nt, Artificial Sequence
  Description of Artificial Sequence: Synthetic oligonucleotide
  Antisense strand to SEQ ID NO: 1377296
cuucaggacagaagugcuc

SEQ ID NO: 1377298 - RNA, 19 nt, Artificial Sequence
  Description of Artificial Sequence: Synthetic oligonucleotide
  Sense strand starting at position 3721 of SEQ ID NO: 1242848
ugaugucgucugcauccau

SEQ ID NO: 1377299 - RNA, 19 nt, Artificial Sequence
  Description of Artificial Sequence: Synthetic oligonucleotide
  Antisense strand to SEQ ID NO: 1377298
auggaugcagacgacauca

SEQ ID NO: 1377300 - RNA, 19 nt, Artificial Sequence
  Description of Artificial Sequence: Synthetic oligonucleotide
  Sense strand starting at position 3831 of SEQ ID NO: 1242848
ggucaagacugguugagua

SEQ ID NO: 1377301 - RNA, 19 nt, Artificial Sequence
  Description of Artificial Sequence: Synthetic oligonucleotide
  Antisense strand to SEQ ID NO: 1377300
uacucaaccagucuugacc

SEQ ID NO: 1377302 - RNA, 19 nt, Artificial Sequence
  Description of Artificial Sequence: Synthetic oligonucleotide
  Sense strand starting at position 3917 of SEQ ID NO: 1242848
acucuuuccuguugggaau

SEQ ID NO: 1377303 - RNA, 19 nt, Artificial Sequence
  Description of Artificial Sequence: Synthetic oligonucleotide
  Antisense strand to SEQ ID NO: 1377302
auucccaacaggaaagagu

SEQ ID NO: 1377304 - RNA, 19 nt, Artificial Sequence
  Description of Artificial Sequence: Synthetic oligonucleotide
  Sense strand starting at position 3918 of SEQ ID NO: 1242848
cucuuuccuguugggaaua

SEQ ID NO: 1377305 - RNA, 19 nt, Artificial Sequence
  Description of Artificial Sequence: Synthetic oligonucleotide
  Antisense strand to SEQ ID NO: 1377304
uauucccaacaggaaagag

SEQ ID NO: 1377306 - RNA, 19 nt, Artificial Sequence
  Description of Artificial Sequence: Synthetic oligonucleotide
  Sense strand starting at position 3919 of SEQ ID NO: 1242848
ucuuuccuguugggaauaa

SEQ ID NO: 1377307 - RNA, 19 nt, Artificial Sequence
  Description of Artificial Sequence: Synthetic oligonucleotide
  Antisense strand to SEQ ID NO: 1377306
uuauucccaacaggaaaga

SEQ ID NO: 1377308 - RNA, 19 nt, Artificial Sequence
  Description of Artificial Sequence: Synthetic oligonucleotide
  Sense strand starting at position 3920 of SEQ ID NO: 1242848
cuuuccuguugggaauaaa

SEQ ID NO: 1377309 - RNA, 19 nt, Artificial Sequence
  Description of Artificial Sequence: Synthetic oligonucleotide
  Antisense strand to SEQ ID NO: 1377308
uuuauucccaacaggaaag

SEQ ID NO: 1377310 - RNA, 19 nt, Artificial Sequence
  Description of Artificial Sequence: Synthetic oligonucleotide
  Sense strand starting at position 585 of SEQ ID NO: 1242849
gcuucuaugaggcagcaga

SEQ ID NO: 1377311 - RNA, 19 nt, Artificial Sequence
  Description of Artificial Sequence: Synthetic oligonucleotide
  Antisense strand to SEQ ID NO: 1377310
ucugcugccucauagaagc

SEQ ID NO: 1377312 - RNA, 19 nt, Artificial Sequence
  Description of Artificial Sequence: Synthetic oligonucleotide
  Sense strand starting at position 676 of SEQ ID NO: 1242849
cugggugacccuggucauu

SEQ ID NO: 1377313 - RNA, 19 nt, Artificial Sequence
  Description of Artificial Sequence: Synthetic oligonucleotide
  Antisense strand to SEQ ID NO: 1377312
aaugaccagggucacccag

SEQ ID NO: 1377314 - RNA, 19 nt, Artificial Sequence
  Description of Artificial Sequence: Synthetic oligonucleotide
  Sense strand starting at position 1057 of SEQ ID NO: 1242849
ucaggacugguuugagaau

SEQ ID NO: 1377315 - RNA, 19 nt, Artificial Sequence
  Description of Artificial Sequence: Synthetic oligonucleotide
  Antisense strand to SEQ ID NO: 1377314
auucucaaaccaguccuga

SEQ ID NO: 1377316 - RNA, 19 nt, Artificial Sequence
  Description of Artificial Sequence: Synthetic oligonucleotide
  Sense strand starting at position 1091 of SEQ ID NO: 1242849
aggauaagggcuuguuaca

SEQ ID NO: 1377317 - RNA, 19 nt, Artificial Sequence
  Description of Artificial Sequence: Synthetic oligonucleotide
  Antisense strand to SEQ ID NO: 1377316
uguaacaagcccuuauccu

SEQ ID NO: 1377318 - RNA, 19 nt, Artificial Sequence
  Description of Artificial Sequence: Synthetic oligonucleotide
  Sense strand starting at position 1292 of SEQ ID NO: 1242849
agcccagauccuggagaaa

SEQ ID NO: 1377319 - RNA, 19 nt, Artificial Sequence
  Description of Artificial Sequence: Synthetic oligonucleotide
  Antisense strand to SEQ ID NO: 1377318
uuucuccaggaucugggcu

SEQ ID NO: 1377320 - RNA, 19 nt, Artificial Sequence
  Description of Artificial Sequence: Synthetic oligonucleotide
  Sense strand starting at position 2139 of SEQ ID NO: 1242849
ggcagaaggaccuauguuc

SEQ ID NO: 1377321 - RNA, 19 nt, Artificial Sequence
  Description of Artificial Sequence: Synthetic oligonucleotide
  Antisense strand to SEQ ID NO: 1377320
gaacauagguccuucugcc

SEQ ID NO: 1377322 - RNA, 19 nt, Artificial Sequence
  Description of Artificial Sequence: Synthetic oligonucleotide
  Sense strand starting at position 2341 of SEQ ID NO: 1242849
guuagagccucccaagaug

SEQ ID NO: 1377323 - RNA, 19 nt, Artificial Sequence
  Description of Artificial Sequence: Synthetic oligonucleotide
  Antisense strand to SEQ ID NO: 1377322
caucuugggaggcucuaac

SEQ ID NO: 1377324 - RNA, 19 nt, Artificial Sequence
  Description of Artificial Sequence: Synthetic oligonucleotide
  Sense strand starting at position 2801 of SEQ ID NO: 1242849
gggucuugcuguuuagacu

SEQ ID NO: 1377325 - RNA, 19 nt, Artificial Sequence
  Description of Artificial Sequence: Synthetic oligonucleotide
  Antisense strand to SEQ ID NO: 1377324
agucuaaacagcaagaccc

SEQ ID NO: 1377326 - RNA, 19 nt, Artificial Sequence
  Description of Artificial Sequence: Synthetic oligonucleotide
  Sense strand starting at position 2802 of SEQ ID NO: 1242849
ggucuugcuguuuagacua

SEQ ID NO: 1377327 - RNA, 19 nt, Artificial Sequence
  Description of Artificial Sequence: Synthetic oligonucleotide
  Antisense strand to SEQ ID NO: 1377326
uagucuaaacagcaagacc

SEQ ID NO: 1377328 - RNA, 19 nt, Artificial Sequence
  Description of Artificial Sequence: Synthetic oligonucleotide
  Sense strand starting at position 3718 of SEQ ID NO: 1242849
ugccuaggcugcuauagaa

SEQ ID NO: 1377329 - RNA, 19 nt, Artificial Sequence
  Description of Artificial Sequence: Synthetic oligonucleotide
  Antisense strand to SEQ ID NO: 1377328
uucuauagcagccuaggca

SEQ ID NO: 1377330 - RNA, 19 nt, Artificial Sequence
  Description of Artificial Sequence: Synthetic oligonucleotide
  Sense strand starting at position 204 of SEQ ID NO: 1242850
uuuggcauucuacauaagu

SEQ ID NO: 1377331 - RNA, 19 nt, Artificial Sequence
  Description of Artificial Sequence: Synthetic oligonucleotide
  Antisense strand to SEQ ID NO: 1377330
acuuauguagaaugccaaa

SEQ ID NO: 1377332 - RNA, 19 nt, Artificial Sequence
  Description of Artificial Sequence: Synthetic oligonucleotide
  Sense strand starting at position 287 of SEQ ID NO: 1242850
uacagaaacugagaguaaa

SEQ ID NO: 1377333 - RNA, 19 nt, Artificial Sequence
  Description of Artificial Sequence: Synthetic oligonucleotide
  Antisense strand to SEQ ID NO: 1377332
uuuacucucaguuucugua

SEQ ID NO: 1377334 - RNA, 19 nt, Artificial Sequence
  Description of Artificial Sequence: Synthetic oligonucleotide
  Sense strand starting at position 503 of SEQ ID NO: 1242850
ccauauuggccaggcgaaa

SEQ ID NO: 1377335 - RNA, 19 nt, Artificial Sequence
  Description of Artificial Sequence: Synthetic oligonucleotide
  Antisense strand to SEQ ID NO: 1377334
uuucgccuggccaauaugg

SEQ ID NO: 1377336 - RNA, 19 nt, Artificial Sequence
  Description of Artificial Sequence: Synthetic oligonucleotide
  Sense strand starting at position 529 of SEQ ID NO: 1242850
agcaaucuggcagaaugau

SEQ ID NO: 1377337 - RNA, 19 nt, Artificial Sequence
  Description of Artificial Sequence: Synthetic oligonucleotide
  Antisense strand to SEQ ID NO: 1377336
aucauucugccagauugcu

SEQ ID NO: 1377338 - RNA, 19 nt, Artificial Sequence
  Description of Artificial Sequence: Synthetic oligonucleotide
  Sense strand starting at position 570 of SEQ ID NO: 1242850
aaaugagauugguuuguau

SEQ ID NO: 1377339 - RNA, 19 nt, Artificial Sequence
  Description of Artificial Sequence: Synthetic oligonucleotide
  Antisense strand to SEQ ID NO: 1377338
auacaaaccaaucucauuu

SEQ ID NO: 1377340 - RNA, 19 nt, Artificial Sequence
  Description of Artificial Sequence: Synthetic oligonucleotide
  Sense strand starting at position 741 of SEQ ID NO: 1242850
ugucauguauagcugggau

SEQ ID NO: 1377341 - RNA, 19 nt, Artificial Sequence
  Description of Artificial Sequence: Synthetic oligonucleotide
  Antisense strand to SEQ ID NO: 1377340
aucccagcuauacaugaca

SEQ ID NO: 1377342 - RNA, 19 nt, Artificial Sequence
  Description of Artificial Sequence: Synthetic oligonucleotide
  Sense strand starting at position 764 of SEQ ID NO: 1242850
cuacaaagaucuuuguaug

SEQ ID NO: 1377343 - RNA, 19 nt, Artificial Sequence
  Description of Artificial Sequence: Synthetic oligonucleotide
  Antisense strand to SEQ ID NO: 1377342
cauacaaagaucuuuguag

SEQ ID NO: 1377344 - RNA, 19 nt, Artificial Sequence
  Description of Artificial Sequence: Synthetic oligonucleotide
  Sense strand starting at position 805 of SEQ ID NO: 1242850
gaggcauacuccguguaga

SEQ ID NO: 1377345 - RNA, 19 nt, Artificial Sequence
  Description of Artificial Sequence: Synthetic oligonucleotide
  Antisense strand to SEQ ID NO: 1377344
ucuacacggaguaugccuc

SEQ ID NO: 1377346 - RNA, 19 nt, Artificial Sequence
  Description of Artificial Sequence: Synthetic oligonucleotide
  Sense strand starting at position 808 of SEQ ID NO: 1242850
gcauacuccguguagagaa

SEQ ID NO: 1377347 - RNA, 19 nt, Artificial Sequence
  Description of Artificial Sequence: Synthetic oligonucleotide
  Antisense strand to SEQ ID NO: 1377346
uucucuacacggaguaugc

SEQ ID NO: 1377348 - RNA, 19 nt, Artificial Sequence
  Description of Artificial Sequence: Synthetic oligonucleotide
  Sense strand starting at position 868 of SEQ ID NO: 1242850
cgagaucuccaacaggcua

SEQ ID NO: 1377349 - RNA, 19 nt, Artificial Sequence
  Description of Artificial Sequence: Synthetic oligonucleotide
  Antisense strand to SEQ ID NO: 1377348
uagccuguuggagaucucg

SEQ ID NO: 1377350 - RNA, 19 nt, Artificial Sequence
  Description of Artificial Sequence: Synthetic oligonucleotide
  Sense strand starting at position 969 of SEQ ID NO: 1242850
cccagaagguuccuucuuu

SEQ ID NO: 1377351 - RNA, 19 nt, Artificial Sequence
  Description of Artificial Sequence: Synthetic oligonucleotide
  Antisense strand to SEQ ID NO: 1377350
aaagaaggaaccuucuggg

SEQ ID NO: 1377352 - RNA, 19 nt, Artificial Sequence
  Description of Artificial Sequence: Synthetic oligonucleotide
  Sense strand starting at position 1193 of SEQ ID NO: 1242850
gcucucaagugauccacuu

SEQ ID NO: 1377353 - RNA, 19 nt, Artificial Sequence
  Description of Artificial Sequence: Synthetic oligonucleotide
  Antisense strand to SEQ ID NO: 1377352
aaguggaucacuugagagc

SEQ ID NO: 1377354 - RNA, 19 nt, Artificial Sequence
  Description of Artificial Sequence: Synthetic oligonucleotide
  Sense strand starting at position 1205 of SEQ ID NO: 1242850
uccacuugaccucaaguga

SEQ ID NO: 1377355 - RNA, 19 nt, Artificial Sequence
  Description of Artificial Sequence: Synthetic oligonucleotide
  Antisense strand to SEQ ID NO: 1377354
ucacuugaggucaagugga

SEQ ID NO: 1377356 - RNA, 19 nt, Artificial Sequence
  Description of Artificial Sequence: Synthetic oligonucleotide
  Sense strand starting at position 1284 of SEQ ID NO: 1242850
uccagaagguuccuucuau

SEQ ID NO: 1377357 - RNA, 19 nt, Artificial Sequence
  Description of Artificial Sequence: Synthetic oligonucleotide
  Antisense strand to SEQ ID NO: 1377356
auagaaggaaccuucugga

SEQ ID NO: 1377358 - RNA, 19 nt, Artificial Sequence
  Description of Artificial Sequence: Synthetic oligonucleotide
  Sense strand starting at position 1285 of SEQ ID NO: 1242850
ccagaagguuccuucuaua

SEQ ID NO: 1377359 - RNA, 19 nt, Artificial Sequence
  Description of Artificial Sequence: Synthetic oligonucleotide
  Antisense strand to SEQ ID NO: 1377358
uauagaaggaaccuucugg

SEQ ID NO: 1377360 - RNA, 19 nt, Artificial Sequence
  Description of Artificial Sequence: Synthetic oligonucleotide
  Sense strand starting at position 1350 of SEQ ID NO: 1242850
auguuaccugcucaguaaa

SEQ ID NO: 1377361 - RNA, 19 nt, Artificial Sequence
  Description of Artificial Sequence: Synthetic oligonucleotide
  Antisense strand to SEQ ID NO: 1377360
uuuacugagcagguaacau

SEQ ID NO: 1377362 - RNA, 19 nt, Artificial Sequence
  Description of Artificial Sequence: Synthetic oligonucleotide
  Sense strand starting at position 1425 of SEQ ID NO: 1242850
uggcacaugugacucuaaa

SEQ ID NO: 1377363 - RNA, 19 nt, Artificial Sequence
  Description of Artificial Sequence: Synthetic oligonucleotide
  Antisense strand to SEQ ID NO: 1377362
uuuagagucacaugugcca

SEQ ID NO: 1377364 - RNA, 19 nt, Artificial Sequence
  Description of Artificial Sequence: Synthetic oligonucleotide
  Sense strand starting at position 1556 of SEQ ID NO: 1242850
uuacacagguugucaucaa

SEQ ID NO: 1377365 - RNA, 19 nt, Artificial Sequence
  Description of Artificial Sequence: Synthetic oligonucleotide
  Antisense strand to SEQ ID NO: 1377364
uugaugacaaccuguguaa

SEQ ID NO: 1377366 - RNA, 19 nt, Artificial Sequence
  Description of Artificial Sequence: Synthetic oligonucleotide
  Sense strand starting at position 1560 of SEQ ID NO: 1242850
acagguugucaucaaugca

SEQ ID NO: 1377367 - RNA, 19 nt, Artificial Sequence
  Description of Artificial Sequence: Synthetic oligonucleotide
  Antisense strand to SEQ ID NO: 1377366
ugcauugaugacaaccugu

SEQ ID NO: 1377368 - RNA, 19 nt, Artificial Sequence
  Description of Artificial Sequence: Synthetic oligonucleotide
  Sense strand starting at position 1563 of SEQ ID NO: 1242850
gguugucaucaaugcacau

SEQ ID NO: 1377369 - RNA, 19 nt, Artificial Sequence
  Description of Artificial Sequence: Synthetic oligonucleotide
  Antisense strand to SEQ ID NO: 1377368
augugcauugaugacaacc

SEQ ID NO: 1377370 - RNA, 19 nt, Artificial Sequence
  Description of Artificial Sequence: Synthetic oligonucleotide
  Sense strand starting at position 1567 of SEQ ID NO: 1242850
gucaucaaugcacauguau

SEQ ID NO: 1377371 - RNA, 19 nt, Artificial Sequence
  Description of Artificial Sequence: Synthetic oligonucleotide
  Antisense strand to SEQ ID NO: 1377370
auacaugugcauugaugac

SEQ ID NO: 1377372 - RNA, 19 nt, Artificial Sequence
  Description of Artificial Sequence: Synthetic oligonucleotide
  Sense strand starting at position 1578 of SEQ ID NO: 1242850
acauguauggaaugcauga

SEQ ID NO: 1377373 - RNA, 19 nt, Artificial Sequence
  Description of Artificial Sequence: Synthetic oligonucleotide
  Antisense strand to SEQ ID NO: 1377372
ucaugcauuccauacaugu

SEQ ID NO: 1377374 - RNA, 19 nt, Artificial Sequence
  Description of Artificial Sequence: Synthetic oligonucleotide
  Sense strand starting at position 1963 of SEQ ID NO: 1242850
cgccaugugggauggaaua

SEQ ID NO: 1377375 - RNA, 19 nt, Artificial Sequence
  Description of Artificial Sequence: Synthetic oligonucleotide
  Antisense strand to SEQ ID NO: 1377374
uauuccaucccacauggcg

SEQ ID NO: 1377376 - RNA, 19 nt, Artificial Sequence
  Description of Artificial Sequence: Synthetic oligonucleotide
  Sense strand starting at position 3017 of SEQ ID NO: 1242850
cagucuucugaaggauacu

SEQ ID NO: 1377377 - RNA, 19 nt, Artificial Sequence
  Description of Artificial Sequence: Synthetic oligonucleotide
  Antisense strand to SEQ ID NO: 1377376
aguauccuucagaagacug

SEQ ID NO: 1377378 - RNA, 19 nt, Artificial Sequence
  Description of Artificial Sequence: Synthetic oligonucleotide
  Sense strand starting at position 3071 of SEQ ID NO: 1242850
aguuuauagagcuaguaag

SEQ ID NO: 1377379 - RNA, 19 nt, Artificial Sequence
  Description of Artificial Sequence: Synthetic oligonucleotide
  Antisense strand to SEQ ID NO: 1377378
cuuacuagcucuauaaacu

SEQ ID NO: 1377380 - RNA, 19 nt, Artificial Sequence
  Description of Artificial Sequence: Synthetic oligonucleotide
  Sense strand starting at position 3089 of SEQ ID NO: 1242850
guugcagagcugggauuaa

SEQ ID NO: 1377381 - RNA, 19 nt, Artificial Sequence
  Description of Artificial Sequence: Synthetic oligonucleotide
  Antisense strand to SEQ ID NO: 1377380
uuaaucccagcucugcaac

SEQ ID NO: 1377382 - RNA, 19 nt, Artificial Sequence
  Description of Artificial Sequence: Synthetic oligonucleotide
  Sense strand starting at position 3130 of SEQ ID NO: 1242850
cccaguuucucauugaugu

SEQ ID NO: 1377383 - RNA, 19 nt, Artificial Sequence
  Description of Artificial Sequence: Synthetic oligonucleotide
  Antisense strand to SEQ ID NO: 1377382
acaucaaugagaaacuggg

SEQ ID NO: 1377384 - RNA, 19 nt, Artificial Sequence
  Description of Artificial Sequence: Synthetic oligonucleotide
  Sense strand starting at position 3131 of SEQ ID NO: 1242850
ccaguuucucauugauguu

SEQ ID NO: 1377385 - RNA, 19 nt, Artificial Sequence
  Description of Artificial Sequence: Synthetic oligonucleotide
  Antisense strand to SEQ ID NO: 1377384
aacaucaaugagaaacugg

SEQ ID NO: 1377386 - RNA, 19 nt, Artificial Sequence
  Description of Artificial Sequence: Synthetic oligonucleotide
  Sense strand starting at position 3204 of SEQ ID NO: 1242850
ggcccuuucccaggagauu

SEQ ID NO: 1377387 - RNA, 19 nt, Artificial Sequence
  Description of Artificial Sequence: Synthetic oligonucleotide
  Antisense strand to SEQ ID NO: 1377386
aaucuccugggaaagggcc

SEQ ID NO: 1377388 - RNA, 19 nt, Artificial Sequence
  Description of Artificial Sequence: Synthetic oligonucleotide
  Sense strand starting at position 3237 of SEQ ID NO: 1242850
cugggauguagccaggaau

SEQ ID NO: 1377389 - RNA, 19 nt, Artificial Sequence
  Description of Artificial Sequence: Synthetic oligonucleotide
  Antisense strand to SEQ ID NO: 1377388
auuccuggcuacaucccag

SEQ ID NO: 1377390 - RNA, 19 nt, Artificial Sequence
  Description of Artificial Sequence: Synthetic oligonucleotide
  Sense strand starting at position 3274 of SEQ ID NO: 1242850
uuagguaauucuucuaagu

SEQ ID NO: 1377391 - RNA, 19 nt, Artificial Sequence
  Description of Artificial Sequence: Synthetic oligonucleotide
  Antisense strand to SEQ ID NO: 1377390
acuuagaagaauuaccuaa

SEQ ID NO: 1377392 - RNA, 19 nt, Artificial Sequence
  Description of Artificial Sequence: Synthetic oligonucleotide
  Sense strand starting at position 3341 of SEQ ID NO: 1242850
cgauucuguuucuuaauuu

SEQ ID NO: 1377393 - RNA, 19 nt, Artificial Sequence
  Description of Artificial Sequence: Synthetic oligonucleotide
  Antisense strand to SEQ ID NO: 1377392
aaauuaagaaacagaaucg

SEQ ID NO: 1377394 - RNA, 19 nt, Artificial Sequence
  Description of Artificial Sequence: Synthetic oligonucleotide
  Sense strand starting at position 3743 of SEQ ID NO: 1242850
gccuguggauucucacuua

SEQ ID NO: 1377395 - RNA, 19 nt, Artificial Sequence
  Description of Artificial Sequence: Synthetic oligonucleotide
  Antisense strand to SEQ ID NO: 1377394
uaagugagaauccacaggc

SEQ ID NO: 1377396 - RNA, 19 nt, Artificial Sequence
  Description of Artificial Sequence: Synthetic oligonucleotide
  Sense strand starting at position 3746 of SEQ ID NO: 1242850
uguggauucucacuuaaua

SEQ ID NO: 1377397 - RNA, 19 nt, Artificial Sequence
  Description of Artificial Sequence: Synthetic oligonucleotide
  Antisense strand to SEQ ID NO: 1377396
uauuaagugagaauccaca

SEQ ID NO: 1377398 - RNA, 19 nt, Artificial Sequence
  Description of Artificial Sequence: Synthetic oligonucleotide
  Sense strand starting at position 3766 of SEQ ID NO: 1242850
gugaaugauuuagaugacu

SEQ ID NO: 1377399 - RNA, 19 nt, Artificial Sequence
  Description of Artificial Sequence: Synthetic oligonucleotide
  Antisense strand to SEQ ID NO: 1377398
agucaucuaaaucauucac

SEQ ID NO: 1377400 - RNA, 19 nt, Artificial Sequence
  Description of Artificial Sequence: Synthetic oligonucleotide
  Sense strand starting at position 3806 of SEQ ID NO: 1242850
gagagcuaguacuuacuga

SEQ ID NO: 1377401 - RNA, 19 nt, Artificial Sequence
  Description of Artificial Sequence: Synthetic oligonucleotide
  Antisense strand to SEQ ID NO: 1377400
ucaguaaguacuagcucuc

SEQ ID NO: 1377402 - RNA, 19 nt, Artificial Sequence
  Description of Artificial Sequence: Synthetic oligonucleotide
  Sense strand starting at position 3881 of SEQ ID NO: 1242850
ugaaacaggucuguacaga

SEQ ID NO: 1377403 - RNA, 19 nt, Artificial Sequence
  Description of Artificial Sequence: Synthetic oligonucleotide
  Antisense strand to SEQ ID NO: 1377402
ucuguacagaccuguuuca

SEQ ID NO: 1377404 - RNA, 19 nt, Artificial Sequence
  Description of Artificial Sequence: Synthetic oligonucleotide
  Sense strand starting at position 3926 of SEQ ID NO: 1242850
aguucuagaaacugagguu

SEQ ID NO: 1377405 - RNA, 19 nt, Artificial Sequence
  Description of Artificial Sequence: Synthetic oligonucleotide
  Antisense strand to SEQ ID NO: 1377404
aaccucaguuucuagaacu

SEQ ID NO: 1377406 - RNA, 19 nt, Artificial Sequence
  Description of Artificial Sequence: Synthetic oligonucleotide
  Sense strand starting at position 3940 of SEQ ID NO: 1242850
agguucagagguuguaaau

SEQ ID NO: 1377407 - RNA, 19 nt, Artificial Sequence
  Description of Artificial Sequence: Synthetic oligonucleotide
  Antisense strand to SEQ ID NO: 1377406
auuuacaaccucugaaccu

SEQ ID NO: 1377408 - RNA, 19 nt, Artificial Sequence
  Description of Artificial Sequence: Synthetic oligonucleotide
  Sense strand starting at position 3949 of SEQ ID NO: 1242850
gguuguaaaucucccaagu

SEQ ID NO: 1377409 - RNA, 19 nt, Artificial Sequence
  Description of Artificial Sequence: Synthetic oligonucleotide
  Antisense strand to SEQ ID NO: 1377408
acuugggagauuuacaacc

SEQ ID NO: 1377410 - RNA, 19 nt, Artificial Sequence
  Description of Artificial Sequence: Synthetic oligonucleotide
  Sense strand starting at position 327 of SEQ ID NO: 1242851
gaaagucaggccugacuga

SEQ ID NO: 1377411 - RNA, 19 nt, Artificial Sequence
  Description of Artificial Sequence: Synthetic oligonucleotide
  Antisense strand to SEQ ID NO: 1377410
ucagucaggccugacuuuc

SEQ ID NO: 1377412 - RNA, 19 nt, Artificial Sequence
  Description of Artificial Sequence: Synthetic oligonucleotide
  Sense strand starting at position 688 of SEQ ID NO: 1242851
caguuugaaguuggucuua

SEQ ID NO: 1377413 - RNA, 19 nt, Artificial Sequence
  Description of Artificial Sequence: Synthetic oligonucleotide
  Antisense strand to SEQ ID NO: 1377412
uaagaccaacuucaaacug

SEQ ID NO: 1377414 - RNA, 19 nt, Artificial Sequence
  Description of Artificial Sequence: Synthetic oligonucleotide
  Sense strand starting at position 703 of SEQ ID NO: 1242851
cuuaguuugucccucucaa

SEQ ID NO: 1377415 - RNA, 19 nt, Artificial Sequence
  Description of Artificial Sequence: Synthetic oligonucleotide
  Antisense strand to SEQ ID NO: 1377414
uugagagggacaaacuaag

SEQ ID NO: 1377416 - RNA, 19 nt, Artificial Sequence
  Description of Artificial Sequence: Synthetic oligonucleotide
  Sense strand starting at position 707 of SEQ ID NO: 1242851
guuugucccucucaaguuu

SEQ ID NO: 1377417 - RNA, 19 nt, Artificial Sequence
  Description of Artificial Sequence: Synthetic oligonucleotide
  Antisense strand to SEQ ID NO: 1377416
aaacuugagagggacaaac

SEQ ID NO: 1377418 - RNA, 19 nt, Artificial Sequence
  Description of Artificial Sequence: Synthetic oligonucleotide
  Sense strand starting at position 714 of SEQ ID NO: 1242851
ccucucaaguuuguagaga

SEQ ID NO: 1377419 - RNA, 19 nt, Artificial Sequence
  Description of Artificial Sequence: Synthetic oligonucleotide
  Antisense strand to SEQ ID NO: 1377418
ucucuacaaacuugagagg

SEQ ID NO: 1377420 - RNA, 19 nt, Artificial Sequence
  Description of Artificial Sequence: Synthetic oligonucleotide
  Sense strand starting at position 803 of SEQ ID NO: 1242851
uccugaagcugugcaaagu

SEQ ID NO: 1377421 - RNA, 19 nt, Artificial Sequence
  Description of Artificial Sequence: Synthetic oligonucleotide
  Antisense strand to SEQ ID NO: 1377420
acuuugcacagcuucagga

SEQ ID NO: 1377422 - RNA, 19 nt, Artificial Sequence
  Description of Artificial Sequence: Synthetic oligonucleotide
  Sense strand starting at position 804 of SEQ ID NO: 1242851
ccugaagcugugcaaaguu

SEQ ID NO: 1377423 - RNA, 19 nt, Artificial Sequence
  Description of Artificial Sequence: Synthetic oligonucleotide
  Antisense strand to SEQ ID NO: 1377422
aacuuugcacagcuucagg

SEQ ID NO: 1377424 - RNA, 19 nt, Artificial Sequence
  Description of Artificial Sequence: Synthetic oligonucleotide
  Sense strand starting at position 1111 of SEQ ID NO: 1242851
gccacaugggaguguuaac

SEQ ID NO: 1377425 - RNA, 19 nt, Artificial Sequence
  Description of Artificial Sequence: Synthetic oligonucleotide
  Antisense strand to SEQ ID NO: 1377424
guuaacacucccauguggc

SEQ ID NO: 1377426 - RNA, 19 nt, Artificial Sequence
  Description of Artificial Sequence: Synthetic oligonucleotide
  Sense strand starting at position 1465 of SEQ ID NO: 1242851
cgccucugccucuuaaagu

SEQ ID NO: 1377427 - RNA, 19 nt, Artificial Sequence
  Description of Artificial Sequence: Synthetic oligonucleotide
  Antisense strand to SEQ ID NO: 1377426
acuuuaagaggcagaggcg

SEQ ID NO: 1377428 - RNA, 19 nt, Artificial Sequence
  Description of Artificial Sequence: Synthetic oligonucleotide
  Sense strand starting at position 1575 of SEQ ID NO: 1242851
cggcaagguucuguuucga

SEQ ID NO: 1377429 - RNA, 19 nt, Artificial Sequence
  Description of Artificial Sequence: Synthetic oligonucleotide
  Antisense strand to SEQ ID NO: 1377428
ucgaaacagaaccuugccg

SEQ ID NO: 1377430 - RNA, 19 nt, Artificial Sequence
  Description of Artificial Sequence: Synthetic oligonucleotide
  Sense strand starting at position 1580 of SEQ ID NO: 1242851
agguucuguuucgaaacuu

SEQ ID NO: 1377431 - RNA, 19 nt, Artificial Sequence
  Description of Artificial Sequence: Synthetic oligonucleotide
  Antisense strand to SEQ ID NO: 1377430
aaguuucgaaacagaaccu

SEQ ID NO: 1377432 - RNA, 19 nt, Artificial Sequence
  Description of Artificial Sequence: Synthetic oligonucleotide
  Sense strand starting at position 1588 of SEQ ID NO: 1242851
uuucgaaacuuggguucua

SEQ ID NO: 1377433 - RNA, 19 nt, Artificial Sequence
  Description of Artificial Sequence: Synthetic oligonucleotide
  Antisense strand to SEQ ID NO: 1377432
uagaacccaaguuucgaaa

SEQ ID NO: 1377434 - RNA, 19 nt, Artificial Sequence
  Description of Artificial Sequence: Synthetic oligonucleotide
  Sense strand starting at position 1589 of SEQ ID NO: 1242851
uucgaaacuuggguucuaa

SEQ ID NO: 1377435 - RNA, 19 nt, Artificial Sequence
  Description of Artificial Sequence: Synthetic oligonucleotide
  Antisense strand to SEQ ID NO: 1377434
uuagaacccaaguuucgaa

SEQ ID NO: 1377436 - RNA, 19 nt, Artificial Sequence
  Description of Artificial Sequence: Synthetic oligonucleotide
  Sense strand starting at position 2312 of SEQ ID NO: 1242851
ugcaguaucggcgcuggaa

SEQ ID NO: 1377437 - RNA, 19 nt, Artificial Sequence
  Description of Artificial Sequence: Synthetic oligonucleotide
  Antisense strand to SEQ ID NO: 1377436
uuccagcgccgauacugca

SEQ ID NO: 1377438 - RNA, 19 nt, Artificial Sequence
  Description of Artificial Sequence: Synthetic oligonucleotide
  Sense strand starting at position 2313 of SEQ ID NO: 1242851
gcaguaucggcgcuggaaa

SEQ ID NO: 1377439 - RNA, 19 nt, Artificial Sequence
  Description of Artificial Sequence: Synthetic oligonucleotide
  Antisense strand to SEQ ID NO: 1377438
uuuccagcgccgauacugc

SEQ ID NO: 1377440 - RNA, 19 nt, Artificial Sequence
  Description of Artificial Sequence: Synthetic oligonucleotide
  Sense strand starting at position 2424 of SEQ ID NO: 1242851
ggaucagagcugcagguuu

SEQ ID NO: 1377441 - RNA, 19 nt, Artificial Sequence
  Description of Artificial Sequence: Synthetic oligonucleotide
  Antisense strand to SEQ ID NO: 1377440
aaaccugcagcucugaucc

SEQ ID NO: 1377442 - RNA, 19 nt, Artificial Sequence
  Description of Artificial Sequence: Synthetic oligonucleotide
  Sense strand starting at position 2436 of SEQ ID NO: 1242851
cagguuuagucaccgaaau

SEQ ID NO: 1377443 - RNA, 19 nt, Artificial Sequence
  Description of Artificial Sequence: Synthetic oligonucleotide
  Antisense strand to SEQ ID NO: 1377442
auuucggugacuaaaccug

SEQ ID NO: 1377444 - RNA, 19 nt, Artificial Sequence
  Description of Artificial Sequence: Synthetic oligonucleotide
  Sense strand starting at position 2437 of SEQ ID NO: 1242851
agguuuagucaccgaaaug

SEQ ID NO: 1377445 - RNA, 19 nt, Artificial Sequence
  Description of Artificial Sequence: Synthetic oligonucleotide
  Antisense strand to SEQ ID NO: 1377444
cauuucggugacuaaaccu

SEQ ID NO: 1377446 - RNA, 19 nt, Artificial Sequence
  Description of Artificial Sequence: Synthetic oligonucleotide
  Sense strand starting at position 2438 of SEQ ID NO: 1242851
gguuuagucaccgaaaugg

SEQ ID NO: 1377447 - RNA, 19 nt, Artificial Sequence
  Description of Artificial Sequence: Synthetic oligonucleotide
  Antisense strand to SEQ ID NO: 1377446
ccauuucggugacuaaacc

SEQ ID NO: 1377448 - RNA, 19 nt, Artificial Sequence
  Description of Artificial Sequence: Synthetic oligonucleotide
  Sense strand starting at position 2568 of SEQ ID NO: 1242851
gccgaaagauaagaauaca

SEQ ID NO: 1377449 - RNA, 19 nt, Artificial Sequence
  Description of Artificial Sequence: Synthetic oligonucleotide
  Antisense strand to SEQ ID NO: 1377448
uguauucuuaucuuucggc

SEQ ID NO: 1377450 - RNA, 19 nt, Artificial Sequence
  Description of Artificial Sequence: Synthetic oligonucleotide
  Sense strand starting at position 2865 of SEQ ID NO: 1242851
gcaacaacuuguugcuaca

SEQ ID NO: 1377451 - RNA, 19 nt, Artificial Sequence
  Description of Artificial Sequence: Synthetic oligonucleotide
  Antisense strand to SEQ ID NO: 1377450
uguagcaacaaguuguugc

SEQ ID NO: 1377452 - RNA, 19 nt, Artificial Sequence
  Description of Artificial Sequence: Synthetic oligonucleotide
  Sense strand starting at position 3264 of SEQ ID NO: 1242851
cuaugaucgcaccauggua

SEQ ID NO: 1377453 - RNA, 19 nt, Artificial Sequence
  Description of Artificial Sequence: Synthetic oligonucleotide
  Antisense strand to SEQ ID NO: 1377452
uaccauggugcgaucauag

SEQ ID NO: 1377454 - RNA, 19 nt, Artificial Sequence
  Description of Artificial Sequence: Synthetic oligonucleotide
  Sense strand starting at position 3411 of SEQ ID NO: 1242851
cuagguucuccuggcugaa

SEQ ID NO: 1377455 - RNA, 19 nt, Artificial Sequence
  Description of Artificial Sequence: Synthetic oligonucleotide
  Antisense strand to SEQ ID NO: 1377454
uucagccaggagaaccuag

SEQ ID NO: 1377456 - RNA, 19 nt, Artificial Sequence
  Description of Artificial Sequence: Synthetic oligonucleotide
  Sense strand starting at position 3516 of SEQ ID NO: 1242851
agauuugcauuccgaucuu

SEQ ID NO: 1377457 - RNA, 19 nt, Artificial Sequence
  Description of Artificial Sequence: Synthetic oligonucleotide
  Antisense strand to SEQ ID NO: 1377456
aagaucggaaugcaaaucu

SEQ ID NO: 1377458 - RNA, 19 nt, Artificial Sequence
  Description of Artificial Sequence: Synthetic oligonucleotide
  Sense strand starting at position 3525 of SEQ ID NO: 1242851
uuccgaucuuggguuuauu

SEQ ID NO: 1377459 - RNA, 19 nt, Artificial Sequence
  Description of Artificial Sequence: Synthetic oligonucleotide
  Antisense strand to SEQ ID NO: 1377458
aauaaacccaagaucggaa

SEQ ID NO: 1377460 - RNA, 19 nt, Artificial Sequence
  Description of Artificial Sequence: Synthetic oligonucleotide
  Sense strand starting at position 3741 of SEQ ID NO: 1242851
gcgugaugacuccgcagag

SEQ ID NO: 1377461 - RNA, 19 nt, Artificial Sequence
  Description of Artificial Sequence: Synthetic oligonucleotide
  Antisense strand to SEQ ID NO: 1377460
cucugcggagucaucacgc

SEQ ID NO: 1377462 - RNA, 19 nt, Artificial Sequence
  Description of Artificial Sequence: Synthetic oligonucleotide
  Sense strand starting at position 223 of SEQ ID NO: 1242852
uccucaauagucugaguuc

SEQ ID NO: 1377463 - RNA, 19 nt, Artificial Sequence
  Description of Artificial Sequence: Synthetic oligonucleotide
  Antisense strand to SEQ ID NO: 1377462
gaacucagacuauugagga

SEQ ID NO: 1377464 - RNA, 19 nt, Artificial Sequence
  Description of Artificial Sequence: Synthetic oligonucleotide
  Sense strand starting at position 226 of SEQ ID NO: 1242852
ucaauagucugaguucuga

SEQ ID NO: 1377465 - RNA, 19 nt, Artificial Sequence
  Description of Artificial Sequence: Synthetic oligonucleotide
  Antisense strand to SEQ ID NO: 1377464
ucagaacucagacuauuga

SEQ ID NO: 1377466 - RNA, 19 nt, Artificial Sequence
  Description of Artificial Sequence: Synthetic oligonucleotide
  Sense strand starting at position 271 of SEQ ID NO: 1242852
gaaagagcugcuuggcaaa

SEQ ID NO: 1377467 - RNA, 19 nt, Artificial Sequence
  Description of Artificial Sequence: Synthetic oligonucleotide
  Antisense strand to SEQ ID NO: 1377466
uuugccaagcagcucuuuc

SEQ ID NO: 1377468 - RNA, 19 nt, Artificial Sequence
  Description of Artificial Sequence: Synthetic oligonucleotide
  Sense strand starting at position 474 of SEQ ID NO: 1242852
uaccaaaucucugcggagu

SEQ ID NO: 1377469 - RNA, 19 nt, Artificial Sequence
  Description of Artificial Sequence: Synthetic oligonucleotide
  Antisense strand to SEQ ID NO: 1377468
acuccgcagagauuuggua

SEQ ID NO: 1377470 - RNA, 19 nt, Artificial Sequence
  Description of Artificial Sequence: Synthetic oligonucleotide
  Sense strand starting at position 477 of SEQ ID NO: 1242852
caaaucucugcggagucua

SEQ ID NO: 1377471 - RNA, 19 nt, Artificial Sequence
  Description of Artificial Sequence: Synthetic oligonucleotide
  Antisense strand to SEQ ID NO: 1377470
uagacuccgcagagauuug

SEQ ID NO: 1377472 - RNA, 19 nt, Artificial Sequence
  Description of Artificial Sequence: Synthetic oligonucleotide
  Sense strand starting at position 485 of SEQ ID NO: 1242852
ugcggagucuagucuacaa

SEQ ID NO: 1377473 - RNA, 19 nt, Artificial Sequence
  Description of Artificial Sequence: Synthetic oligonucleotide
  Antisense strand to SEQ ID NO: 1377472
uuguagacuagacuccgca

SEQ ID NO: 1377474 - RNA, 19 nt, Artificial Sequence
  Description of Artificial Sequence: Synthetic oligonucleotide
  Sense strand starting at position 487 of SEQ ID NO: 1242852
cggagucuagucuacaaag

SEQ ID NO: 1377475 - RNA, 19 nt, Artificial Sequence
  Description of Artificial Sequence: Synthetic oligonucleotide
  Antisense strand to SEQ ID NO: 1377474
cuuuguagacuagacuccg

SEQ ID NO: 1377476 - RNA, 19 nt, Artificial Sequence
  Description of Artificial Sequence: Synthetic oligonucleotide
  Sense strand starting at position 489 of SEQ ID NO: 1242852
gagucuagucuacaaagca

SEQ ID NO: 1377477 - RNA, 19 nt, Artificial Sequence
  Description of Artificial Sequence: Synthetic oligonucleotide
  Antisense strand to SEQ ID NO: 1377476
ugcuuuguagacuagacuc

SEQ ID NO: 1377478 - RNA, 19 nt, Artificial Sequence
  Description of Artificial Sequence: Synthetic oligonucleotide
  Sense strand starting at position 530 of SEQ ID NO: 1242852
cgcccaacucaugaguaaa

SEQ ID NO: 1377479 - RNA, 19 nt, Artificial Sequence
  Description of Artificial Sequence: Synthetic oligonucleotide
  Antisense strand to SEQ ID NO: 1377478
uuuacucaugaguugggcg

SEQ ID NO: 1377480 - RNA, 19 nt, Artificial Sequence
  Description of Artificial Sequence: Synthetic oligonucleotide
  Sense strand starting at position 699 of SEQ ID NO: 1242852
agaacaagaucugaggaaa

SEQ ID NO: 1377481 - RNA, 19 nt, Artificial Sequence
  Description of Artificial Sequence: Synthetic oligonucleotide
  Antisense strand to SEQ ID NO: 1377480
uuuccucagaucuuguucu

SEQ ID NO: 1377482 - RNA, 19 nt, Artificial Sequence
  Description of Artificial Sequence: Synthetic oligonucleotide
  Sense strand starting at position 771 of SEQ ID NO: 1242852
cuaaaccugucaguaaacu

SEQ ID NO: 1377483 - RNA, 19 nt, Artificial Sequence
  Description of Artificial Sequence: Synthetic oligonucleotide
  Antisense strand to SEQ ID NO: 1377482
aguuuacugacagguuuag

SEQ ID NO: 1377484 - RNA, 19 nt, Artificial Sequence
  Description of Artificial Sequence: Synthetic oligonucleotide
  Sense strand starting at position 965 of SEQ ID NO: 1242852
ucgagacacuccuuucuuu

SEQ ID NO: 1377485 - RNA, 19 nt, Artificial Sequence
  Description of Artificial Sequence: Synthetic oligonucleotide
  Antisense strand to SEQ ID NO: 1377484
aaagaaaggagugucucga

SEQ ID NO: 1377486 - RNA, 19 nt, Artificial Sequence
  Description of Artificial Sequence: Synthetic oligonucleotide
  Sense strand starting at position 1096 of SEQ ID NO: 1242852
ccaauuagggcuugcagau

SEQ ID NO: 1377487 - RNA, 19 nt, Artificial Sequence
  Description of Artificial Sequence: Synthetic oligonucleotide
  Antisense strand to SEQ ID NO: 1377486
aucugcaagcccuaauugg

SEQ ID NO: 1377488 - RNA, 19 nt, Artificial Sequence
  Description of Artificial Sequence: Synthetic oligonucleotide
  Sense strand starting at position 1108 of SEQ ID NO: 1242852
ugcagauauuuguagcaua

SEQ ID NO: 1377489 - RNA, 19 nt, Artificial Sequence
  Description of Artificial Sequence: Synthetic oligonucleotide
  Antisense strand to SEQ ID NO: 1377488
uaugcuacaaauaucugca

SEQ ID NO: 1377490 - RNA, 19 nt, Artificial Sequence
  Description of Artificial Sequence: Synthetic oligonucleotide
  Sense strand starting at position 1138 of SEQ ID NO: 1242852
guggugcggucugugauuu

SEQ ID NO: 1377491 - RNA, 19 nt, Artificial Sequence
  Description of Artificial Sequence: Synthetic oligonucleotide
  Antisense strand to SEQ ID NO: 1377490
aaaucacagaccgcaccac

SEQ ID NO: 1377492 - RNA, 19 nt, Artificial Sequence
  Description of Artificial Sequence: Synthetic oligonucleotide
  Sense strand starting at position 1340 of SEQ ID NO: 1242852
gccucugaaccauggagaa

SEQ ID NO: 1377493 - RNA, 19 nt, Artificial Sequence
  Description of Artificial Sequence: Synthetic oligonucleotide
  Antisense strand to SEQ ID NO: 1377492
uucuccaugguucagaggc

SEQ ID NO: 1377494 - RNA, 19 nt, Artificial Sequence
  Description of Artificial Sequence: Synthetic oligonucleotide
  Sense strand starting at position 2271 of SEQ ID NO: 1242852
ucagguucccuuugggaau

SEQ ID NO: 1377495 - RNA, 19 nt, Artificial Sequence
  Description of Artificial Sequence: Synthetic oligonucleotide
  Antisense strand to SEQ ID NO: 1377494
auucccaaagggaaccuga

SEQ ID NO: 1377496 - RNA, 19 nt, Artificial Sequence
  Description of Artificial Sequence: Synthetic oligonucleotide
  Sense strand starting at position 2282 of SEQ ID NO: 1242852
uugggaaugggucggaaua

SEQ ID NO: 1377497 - RNA, 19 nt, Artificial Sequence
  Description of Artificial Sequence: Synthetic oligonucleotide
  Antisense strand to SEQ ID NO: 1377496
uauuccgacccauucccaa

SEQ ID NO: 1377498 - RNA, 19 nt, Artificial Sequence
  Description of Artificial Sequence: Synthetic oligonucleotide
  Sense strand starting at position 2283 of SEQ ID NO: 1242852
ugggaaugggucggaauaa

SEQ ID NO: 1377499 - RNA, 19 nt, Artificial Sequence
  Description of Artificial Sequence: Synthetic oligonucleotide
  Antisense strand to SEQ ID NO: 1377498
uuauuccgacccauuccca

SEQ ID NO: 1377500 - RNA, 19 nt, Artificial Sequence
  Description of Artificial Sequence: Synthetic oligonucleotide
  Sense strand starting at position 2284 of SEQ ID NO: 1242852
gggaaugggucggaauaac

SEQ ID NO: 1377501 - RNA, 19 nt, Artificial Sequence
  Description of Artificial Sequence: Synthetic oligonucleotide
  Antisense strand to SEQ ID NO: 1377500
guuauuccgacccauuccc

SEQ ID NO: 1377502 - RNA, 19 nt, Artificial Sequence
  Description of Artificial Sequence: Synthetic oligonucleotide
  Sense strand starting at position 2295 of SEQ ID NO: 1242852
ggaauaacucaaggccuga

SEQ ID NO: 1377503 - RNA, 19 nt, Artificial Sequence
  Description of Artificial Sequence: Synthetic oligonucleotide
  Antisense strand to SEQ ID NO: 1377502
ucaggccuugaguuauucc

SEQ ID NO: 1377504 - RNA, 19 nt, Artificial Sequence
  Description of Artificial Sequence: Synthetic oligonucleotide
  Sense strand starting at position 2314 of SEQ ID NO: 1242852
ggcuacccucgaggucaua

SEQ ID NO: 1377505 - RNA, 19 nt, Artificial Sequence
  Description of Artificial Sequence: Synthetic oligonucleotide
  Antisense strand to SEQ ID NO: 1377504
uaugaccucgaggguagcc

SEQ ID NO: 1377506 - RNA, 19 nt, Artificial Sequence
  Description of Artificial Sequence: Synthetic oligonucleotide
  Sense strand starting at position 2356 of SEQ ID NO: 1242852
gggagaugaucccacuaca

SEQ ID NO: 1377507 - RNA, 19 nt, Artificial Sequence
  Description of Artificial Sequence: Synthetic oligonucleotide
  Antisense strand to SEQ ID NO: 1377506
uguagugggaucaucuccc

SEQ ID NO: 1377508 - RNA, 19 nt, Artificial Sequence
  Description of Artificial Sequence: Synthetic oligonucleotide
  Sense strand starting at position 2381 of SEQ ID NO: 1242852
agucauuguucccuacugu

SEQ ID NO: 1377509 - RNA, 19 nt, Artificial Sequence
  Description of Artificial Sequence: Synthetic oligonucleotide
  Antisense strand to SEQ ID NO: 1377508
acaguagggaacaaugacu

SEQ ID NO: 1377510 - RNA, 19 nt, Artificial Sequence
  Description of Artificial Sequence: Synthetic oligonucleotide
  Sense strand starting at position 2468 of SEQ ID NO: 1242852
uucuuuauugcagacaguu

SEQ ID NO: 1377511 - RNA, 19 nt, Artificial Sequence
  Description of Artificial Sequence: Synthetic oligonucleotide
  Antisense strand to SEQ ID NO: 1377510
aacugucugcaauaaagaa

SEQ ID NO: 1377512 - RNA, 19 nt, Artificial Sequence
  Description of Artificial Sequence: Synthetic oligonucleotide
  Sense strand starting at position 2597 of SEQ ID NO: 1242852
agagaucauucccacugaa

SEQ ID NO: 1377513 - RNA, 19 nt, Artificial Sequence
  Description of Artificial Sequence: Synthetic oligonucleotide
  Antisense strand to SEQ ID NO: 1377512
uucagugggaaugaucucu

SEQ ID NO: 1377514 - RNA, 19 nt, Artificial Sequence
  Description of Artificial Sequence: Synthetic oligonucleotide
  Sense strand starting at position 2611 of SEQ ID NO: 1242852
cugaaaucuccugagcaug

SEQ ID NO: 1377515 - RNA, 19 nt, Artificial Sequence
  Description of Artificial Sequence: Synthetic oligonucleotide
  Antisense strand to SEQ ID NO: 1377514
caugcucaggagauuucag

SEQ ID NO: 1377516 - RNA, 19 nt, Artificial Sequence
  Description of Artificial Sequence: Synthetic oligonucleotide
  Sense strand starting at position 2664 of SEQ ID NO: 1242852
gcccaaugucaccaggcaa

SEQ ID NO: 1377517 - RNA, 19 nt, Artificial Sequence
  Description of Artificial Sequence: Synthetic oligonucleotide
  Antisense strand to SEQ ID NO: 1377516
uugccuggugacauugggc

SEQ ID NO: 1377518 - RNA, 19 nt, Artificial Sequence
  Description of Artificial Sequence: Synthetic oligonucleotide
  Sense strand starting at position 2751 of SEQ ID NO: 1242852
gucagauuuagcuguggug

SEQ ID NO: 1377519 - RNA, 19 nt, Artificial Sequence
  Description of Artificial Sequence: Synthetic oligonucleotide
  Antisense strand to SEQ ID NO: 1377518
caccacagcuaaaucugac

SEQ ID NO: 1377520 - RNA, 19 nt, Artificial Sequence
  Description of Artificial Sequence: Synthetic oligonucleotide
  Sense strand starting at position 2828 of SEQ ID NO: 1242852
agccuaugguugcuacauu

SEQ ID NO: 1377521 - RNA, 19 nt, Artificial Sequence
  Description of Artificial Sequence: Synthetic oligonucleotide
  Antisense strand to SEQ ID NO: 1377520
aauguagcaaccauaggcu

SEQ ID NO: 1377522 - RNA, 19 nt, Artificial Sequence
  Description of Artificial Sequence: Synthetic oligonucleotide
  Sense strand starting at position 2931 of SEQ ID NO: 1242852
agcagaaacugcccuaaua

SEQ ID NO: 1377523 - RNA, 19 nt, Artificial Sequence
  Description of Artificial Sequence: Synthetic oligonucleotide
  Antisense strand to SEQ ID NO: 1377522
uauuagggcaguuucugcu

SEQ ID NO: 1377524 - RNA, 19 nt, Artificial Sequence
  Description of Artificial Sequence: Synthetic oligonucleotide
  Sense strand starting at position 2977 of SEQ ID NO: 1242852
gcaugaagucuguaugcug

SEQ ID NO: 1377525 - RNA, 19 nt, Artificial Sequence
  Description of Artificial Sequence: Synthetic oligonucleotide
  Antisense strand to SEQ ID NO: 1377524
cagcauacagacuucaugc

SEQ ID NO: 1377526 - RNA, 19 nt, Artificial Sequence
  Description of Artificial Sequence: Synthetic oligonucleotide
  Sense strand starting at position 3006 of SEQ ID NO: 1242852
uggagagaggccuggcaau

SEQ ID NO: 1377527 - RNA, 19 nt, Artificial Sequence
  Description of Artificial Sequence: Synthetic oligonucleotide
  Antisense strand to SEQ ID NO: 1377526
auugccaggccucucucca

SEQ ID NO: 1377528 - RNA, 19 nt, Artificial Sequence
  Description of Artificial Sequence: Synthetic oligonucleotide
  Sense strand starting at position 3158 of SEQ ID NO: 1242852
guuaccugccuuuggguaa

SEQ ID NO: 1377529 - RNA, 19 nt, Artificial Sequence
  Description of Artificial Sequence: Synthetic oligonucleotide
  Antisense strand to SEQ ID NO: 1377528
uuacccaaaggcagguaac

SEQ ID NO: 1377530 - RNA, 19 nt, Artificial Sequence
  Description of Artificial Sequence: Synthetic oligonucleotide
  Sense strand starting at position 3162 of SEQ ID NO: 1242852
ccugccuuuggguaaagau

SEQ ID NO: 1377531 - RNA, 19 nt, Artificial Sequence
  Description of Artificial Sequence: Synthetic oligonucleotide
  Antisense strand to SEQ ID NO: 1377530
aucuuuacccaaaggcagg

SEQ ID NO: 1377532 - RNA, 19 nt, Artificial Sequence
  Description of Artificial Sequence: Synthetic oligonucleotide
  Sense strand starting at position 3237 of SEQ ID NO: 1242852
gggcauccuggauaugauc

SEQ ID NO: 1377533 - RNA, 19 nt, Artificial Sequence
  Description of Artificial Sequence: Synthetic oligonucleotide
  Antisense strand to SEQ ID NO: 1377532
gaucauauccaggaugccc

SEQ ID NO: 1377534 - RNA, 19 nt, Artificial Sequence
  Description of Artificial Sequence: Synthetic oligonucleotide
  Sense strand starting at position 3288 of SEQ ID NO: 1242852
cuugauacugcugacaacu

SEQ ID NO: 1377535 - RNA, 19 nt, Artificial Sequence
  Description of Artificial Sequence: Synthetic oligonucleotide
  Antisense strand to SEQ ID NO: 1377534
aguugucagcaguaucaag

SEQ ID NO: 1377536 - RNA, 19 nt, Artificial Sequence
  Description of Artificial Sequence: Synthetic oligonucleotide
  Sense strand starting at position 3371 of SEQ ID NO: 1242852
aggaucaucucuccugcua

SEQ ID NO: 1377537 - RNA, 19 nt, Artificial Sequence
  Description of Artificial Sequence: Synthetic oligonucleotide
  Antisense strand to SEQ ID NO: 1377536
uagcaggagagaugauccu

SEQ ID NO: 1377538 - RNA, 19 nt, Artificial Sequence
  Description of Artificial Sequence: Synthetic oligonucleotide
  Sense strand starting at position 3413 of SEQ ID NO: 1242852
gcagaagucacaggaggua

SEQ ID NO: 1377539 - RNA, 19 nt, Artificial Sequence
  Description of Artificial Sequence: Synthetic oligonucleotide
  Antisense strand to SEQ ID NO: 1377538
uaccuccugugacuucugc

SEQ ID NO: 1377540 - RNA, 19 nt, Artificial Sequence
  Description of Artificial Sequence: Synthetic oligonucleotide
  Sense strand starting at position 3489 of SEQ ID NO: 1242852
ccugccugcuuuccaaaga

SEQ ID NO: 1377541 - RNA, 19 nt, Artificial Sequence
  Description of Artificial Sequence: Synthetic oligonucleotide
  Antisense strand to SEQ ID NO: 1377540
ucuuuggaaagcaggcagg

SEQ ID NO: 1377542 - RNA, 19 nt, Artificial Sequence
  Description of Artificial Sequence: Synthetic oligonucleotide
  Sense strand starting at position 52 of SEQ ID NO: 1242853
uggaauguacaccgaugau

SEQ ID NO: 1377543 - RNA, 19 nt, Artificial Sequence
  Description of Artificial Sequence: Synthetic oligonucleotide
  Antisense strand to SEQ ID NO: 1377542
aucaucgguguacauucca

SEQ ID NO: 1377544 - RNA, 19 nt, Artificial Sequence
  Description of Artificial Sequence: Synthetic oligonucleotide
  Sense strand starting at position 55 of SEQ ID NO: 1242853
aauguacaccgaugauuau

SEQ ID NO: 1377545 - RNA, 19 nt, Artificial Sequence
  Description of Artificial Sequence: Synthetic oligonucleotide
  Antisense strand to SEQ ID NO: 1377544
auaaucaucgguguacauu

SEQ ID NO: 1377546 - RNA, 19 nt, Artificial Sequence
  Description of Artificial Sequence: Synthetic oligonucleotide
  Sense strand starting at position 62 of SEQ ID NO: 1242853
accgaugauuauguguaaa

SEQ ID NO: 1377547 - RNA, 19 nt, Artificial Sequence
  Description of Artificial Sequence: Synthetic oligonucleotide
  Antisense strand to SEQ ID NO: 1377546
uuuacacauaaucaucggu

SEQ ID NO: 1377548 - RNA, 19 nt, Artificial Sequence
  Description of Artificial Sequence: Synthetic oligonucleotide
  Sense strand starting at position 64 of SEQ ID NO: 1242853
cgaugauuauguguaaacu

SEQ ID NO: 1377549 - RNA, 19 nt, Artificial Sequence
  Description of Artificial Sequence: Synthetic oligonucleotide
  Antisense strand to SEQ ID NO: 1377548
aguuuacacauaaucaucg

SEQ ID NO: 1377550 - RNA, 19 nt, Artificial Sequence
  Description of Artificial Sequence: Synthetic oligonucleotide
  Sense strand starting at position 236 of SEQ ID NO: 1242853
acuguaguuguugaauuaa

SEQ ID NO: 1377551 - RNA, 19 nt, Artificial Sequence
  Description of Artificial Sequence: Synthetic oligonucleotide
  Antisense strand to SEQ ID NO: 1377550
uuaauucaacaacuacagu

SEQ ID NO: 1377552 - RNA, 19 nt, Artificial Sequence
  Description of Artificial Sequence: Synthetic oligonucleotide
  Sense strand starting at position 246 of SEQ ID NO: 1242853
uugaauuaauagcugaaca

SEQ ID NO: 1377553 - RNA, 19 nt, Artificial Sequence
  Description of Artificial Sequence: Synthetic oligonucleotide
  Antisense strand to SEQ ID NO: 1377552
uguucagcuauuaauucaa

SEQ ID NO: 1377554 - RNA, 19 nt, Artificial Sequence
  Description of Artificial Sequence: Synthetic oligonucleotide
  Sense strand starting at position 454 of SEQ ID NO: 1242853
ugcucuguauucccauuua

SEQ ID NO: 1377555 - RNA, 19 nt, Artificial Sequence
  Description of Artificial Sequence: Synthetic oligonucleotide
  Antisense strand to SEQ ID NO: 1377554
uaaaugggaauacagagca

SEQ ID NO: 1377556 - RNA, 19 nt, Artificial Sequence
  Description of Artificial Sequence: Synthetic oligonucleotide
  Sense strand starting at position 486 of SEQ ID NO: 1242853
uuuagaaucuguuuaugug

SEQ ID NO: 1377557 - RNA, 19 nt, Artificial Sequence
  Description of Artificial Sequence: Synthetic oligonucleotide
  Antisense strand to SEQ ID NO: 1377556
cacauaaacagauucuaaa

SEQ ID NO: 1377558 - RNA, 19 nt, Artificial Sequence
  Description of Artificial Sequence: Synthetic oligonucleotide
  Sense strand starting at position 487 of SEQ ID NO: 1242853
uuagaaucuguuuauguga

SEQ ID NO: 1377559 - RNA, 19 nt, Artificial Sequence
  Description of Artificial Sequence: Synthetic oligonucleotide
  Antisense strand to SEQ ID NO: 1377558
ucacauaaacagauucuaa

SEQ ID NO: 1377560 - RNA, 19 nt, Artificial Sequence
  Description of Artificial Sequence: Synthetic oligonucleotide
  Sense strand starting at position 585 of SEQ ID NO: 1242853
uagacuacgugacucaauu

SEQ ID NO: 1377561 - RNA, 19 nt, Artificial Sequence
  Description of Artificial Sequence: Synthetic oligonucleotide
  Antisense strand to SEQ ID NO: 1377560
aauugagucacguagucua

SEQ ID NO: 1377562 - RNA, 19 nt, Artificial Sequence
  Description of Artificial Sequence: Synthetic oligonucleotide
  Sense strand starting at position 642 of SEQ ID NO: 1242853
agggcucuuggccaucaga

SEQ ID NO: 1377563 - RNA, 19 nt, Artificial Sequence
  Description of Artificial Sequence: Synthetic oligonucleotide
  Antisense strand to SEQ ID NO: 1377562
ucugauggccaagagcccu

SEQ ID NO: 1377564 - RNA, 19 nt, Artificial Sequence
  Description of Artificial Sequence: Synthetic oligonucleotide
  Sense strand starting at position 671 of SEQ ID NO: 1242853
ggccauagacuaugacacu

SEQ ID NO: 1377565 - RNA, 19 nt, Artificial Sequence
  Description of Artificial Sequence: Synthetic oligonucleotide
  Antisense strand to SEQ ID NO: 1377564
agugucauagucuauggcc

SEQ ID NO: 1377566 - RNA, 19 nt, Artificial Sequence
  Description of Artificial Sequence: Synthetic oligonucleotide
  Sense strand starting at position 746 of SEQ ID NO: 1242853
aggauacuaagugguagau

SEQ ID NO: 1377567 - RNA, 19 nt, Artificial Sequence
  Description of Artificial Sequence: Synthetic oligonucleotide
  Antisense strand to SEQ ID NO: 1377566
aucuaccacuuaguauccu

SEQ ID NO: 1377568 - RNA, 19 nt, Artificial Sequence
  Description of Artificial Sequence: Synthetic oligonucleotide
  Sense strand starting at position 810 of SEQ ID NO: 1242853
gagcauaaaugagcuagaa

SEQ ID NO: 1377569 - RNA, 19 nt, Artificial Sequence
  Description of Artificial Sequence: Synthetic oligonucleotide
  Antisense strand to SEQ ID NO: 1377568
uucuagcucauuuaugcuc

SEQ ID NO: 1377570 - RNA, 19 nt, Artificial Sequence
  Description of Artificial Sequence: Synthetic oligonucleotide
  Sense strand starting at position 1155 of SEQ ID NO: 1242853
cuauacaguccuggagguu

SEQ ID NO: 1377571 - RNA, 19 nt, Artificial Sequence
  Description of Artificial Sequence: Synthetic oligonucleotide
  Antisense strand to SEQ ID NO: 1377570
aaccuccaggacuguauag

SEQ ID NO: 1377572 - RNA, 19 nt, Artificial Sequence
  Description of Artificial Sequence: Synthetic oligonucleotide
  Sense strand starting at position 1330 of SEQ ID NO: 1242853
cgcccauugcuugccaauu

SEQ ID NO: 1377573 - RNA, 19 nt, Artificial Sequence
  Description of Artificial Sequence: Synthetic oligonucleotide
  Antisense strand to SEQ ID NO: 1377572
aauuggcaagcaaugggcg

SEQ ID NO: 1377574 - RNA, 19 nt, Artificial Sequence
  Description of Artificial Sequence: Synthetic oligonucleotide
  Sense strand starting at position 2131 of SEQ ID NO: 1242853
ggugcaaugguuagcgcua

SEQ ID NO: 1377575 - RNA, 19 nt, Artificial Sequence
  Description of Artificial Sequence: Synthetic oligonucleotide
  Antisense strand to SEQ ID NO: 1377574
uagcgcuaaccauugcacc

SEQ ID NO: 1377576 - RNA, 19 nt, Artificial Sequence
  Description of Artificial Sequence: Synthetic oligonucleotide
  Sense strand starting at position 2225 of SEQ ID NO: 1242853
gggcaauucgagggaguga

SEQ ID NO: 1377577 - RNA, 19 nt, Artificial Sequence
  Description of Artificial Sequence: Synthetic oligonucleotide
  Antisense strand to SEQ ID NO: 1377576
ucacucccucgaauugccc

SEQ ID NO: 1377578 - RNA, 19 nt, Artificial Sequence
  Description of Artificial Sequence: Synthetic oligonucleotide
  Sense strand starting at position 2339 of SEQ ID NO: 1242853
agcccaucgcuuguuugua

SEQ ID NO: 1377579 - RNA, 19 nt, Artificial Sequence
  Description of Artificial Sequence: Synthetic oligonucleotide
  Antisense strand to SEQ ID NO: 1377578
uacaaacaagcgaugggcu

SEQ ID NO: 1377580 - RNA, 19 nt, Artificial Sequence
  Description of Artificial Sequence: Synthetic oligonucleotide
  Sense strand starting at position 2411 of SEQ ID NO: 1242853
ccugauuucugcuuuguaa

SEQ ID NO: 1377581 - RNA, 19 nt, Artificial Sequence
  Description of Artificial Sequence: Synthetic oligonucleotide
  Antisense strand to SEQ ID NO: 1377580
uuacaaagcagaaaucagg

SEQ ID NO: 1377582 - RNA, 19 nt, Artificial Sequence
  Description of Artificial Sequence: Synthetic oligonucleotide
  Sense strand starting at position 2447 of SEQ ID NO: 1242853
gauugcaauuauuugugua

SEQ ID NO: 1377583 - RNA, 19 nt, Artificial Sequence
  Description of Artificial Sequence: Synthetic oligonucleotide
  Antisense strand to SEQ ID NO: 1377582
uacacaaauaauugcaauc

SEQ ID NO: 1377584 - RNA, 19 nt, Artificial Sequence
  Description of Artificial Sequence: Synthetic oligonucleotide
  Sense strand starting at position 2449 of SEQ ID NO: 1242853
uugcaauuauuuguguagu

SEQ ID NO: 1377585 - RNA, 19 nt, Artificial Sequence
  Description of Artificial Sequence: Synthetic oligonucleotide
  Antisense strand to SEQ ID NO: 1377584
acuacacaaauaauugcaa

SEQ ID NO: 1377586 - RNA, 19 nt, Artificial Sequence
  Description of Artificial Sequence: Synthetic oligonucleotide
  Sense strand starting at position 2451 of SEQ ID NO: 1242853
gcaauuauuuguguaguuu

SEQ ID NO: 1377587 - RNA, 19 nt, Artificial Sequence
  Description of Artificial Sequence: Synthetic oligonucleotide
  Antisense strand to SEQ ID NO: 1377586
aaacuacacaaauaauugc

SEQ ID NO: 1377588 - RNA, 19 nt, Artificial Sequence
  Description of Artificial Sequence: Synthetic oligonucleotide
  Sense strand starting at position 2635 of SEQ ID NO: 1242853
ccuuccagauacuuuguua

SEQ ID NO: 1377589 - RNA, 19 nt, Artificial Sequence
  Description of Artificial Sequence: Synthetic oligonucleotide
  Antisense strand to SEQ ID NO: 1377588
uaacaaaguaucuggaagg

SEQ ID NO: 1377590 - RNA, 19 nt, Artificial Sequence
  Description of Artificial Sequence: Synthetic oligonucleotide
  Sense strand starting at position 2638 of SEQ ID NO: 1242853
uccagauacuuuguuagug

SEQ ID NO: 1377591 - RNA, 19 nt, Artificial Sequence
  Description of Artificial Sequence: Synthetic oligonucleotide
  Antisense strand to SEQ ID NO: 1377590
cacuaacaaaguaucugga

SEQ ID NO: 1377592 - RNA, 19 nt, Artificial Sequence
  Description of Artificial Sequence: Synthetic oligonucleotide
  Sense strand starting at position 2639 of SEQ ID NO: 1242853
ccagauacuuuguuaguga

SEQ ID NO: 1377593 - RNA, 19 nt, Artificial Sequence
  Description of Artificial Sequence: Synthetic oligonucleotide
  Antisense strand to SEQ ID NO: 1377592
ucacuaacaaaguaucugg

SEQ ID NO: 1377594 - RNA, 19 nt, Artificial Sequence
  Description of Artificial Sequence: Synthetic oligonucleotide
  Sense strand starting at position 2642 of SEQ ID NO: 1242853
gauacuuuguuagugaaau

SEQ ID NO: 1377595 - RNA, 19 nt, Artificial Sequence
  Description of Artificial Sequence: Synthetic oligonucleotide
  Antisense strand to SEQ ID NO: 1377594
auuucacuaacaaaguauc

SEQ ID NO: 1377596 - RNA, 19 nt, Artificial Sequence
  Description of Artificial Sequence: Synthetic oligonucleotide
  Sense strand starting at position 2714 of SEQ ID NO: 1242853
agggauuucucucauucca

SEQ ID NO: 1377597 - RNA, 19 nt, Artificial Sequence
  Description of Artificial Sequence: Synthetic oligonucleotide
  Antisense strand to SEQ ID NO: 1377596
uggaaugagagaaaucccu

SEQ ID NO: 1377598 - RNA, 19 nt, Artificial Sequence
  Description of Artificial Sequence: Synthetic oligonucleotide
  Sense strand starting at position 3083 of SEQ ID NO: 1242853
gcaguaaauccagacuucu

SEQ ID NO: 1377599 - RNA, 19 nt, Artificial Sequence
  Description of Artificial Sequence: Synthetic oligonucleotide
  Antisense strand to SEQ ID NO: 1377598
agaagucuggauuuacugc

SEQ ID NO: 1377600 - RNA, 19 nt, Artificial Sequence
  Description of Artificial Sequence: Synthetic oligonucleotide
  Sense strand starting at position 3159 of SEQ ID NO: 1242853
gagaguaaacuccagcuuu

SEQ ID NO: 1377601 - RNA, 19 nt, Artificial Sequence
  Description of Artificial Sequence: Synthetic oligonucleotide
  Antisense strand to SEQ ID NO: 1377600
aaagcuggaguuuacucuc

SEQ ID NO: 1377602 - RNA, 19 nt, Artificial Sequence
  Description of Artificial Sequence: Synthetic oligonucleotide
  Sense strand starting at position 3389 of SEQ ID NO: 1242853
ugcauuagcgucuugguua

SEQ ID NO: 1377603 - RNA, 19 nt, Artificial Sequence
  Description of Artificial Sequence: Synthetic oligonucleotide
  Antisense strand to SEQ ID NO: 1377602
uaaccaagacgcuaaugca

SEQ ID NO: 1377604 - RNA, 19 nt, Artificial Sequence
  Description of Artificial Sequence: Synthetic oligonucleotide
  Sense strand starting at position 3400 of SEQ ID NO: 1242853
cuugguuagucuucaggga

SEQ ID NO: 1377605 - RNA, 19 nt, Artificial Sequence
  Description of Artificial Sequence: Synthetic oligonucleotide
  Antisense strand to SEQ ID NO: 1377604
ucccugaagacuaaccaag

SEQ ID NO: 1377606 - RNA, 19 nt, Artificial Sequence
  Description of Artificial Sequence: Synthetic oligonucleotide
  Sense strand starting at position 3401 of SEQ ID NO: 1242853
uugguuagucuucagggaa

SEQ ID NO: 1377607 - RNA, 19 nt, Artificial Sequence
  Description of Artificial Sequence: Synthetic oligonucleotide
  Antisense strand to SEQ ID NO: 1377606
uucccugaagacuaaccaa

SEQ ID NO: 1377608 - RNA, 19 nt, Artificial Sequence
  Description of Artificial Sequence: Synthetic oligonucleotide
  Sense strand starting at position 3541 of SEQ ID NO: 1242853
cagggaugagcaugugauc

SEQ ID NO: 1377609 - RNA, 19 nt, Artificial Sequence
  Description of Artificial Sequence: Synthetic oligonucleotide
  Antisense strand to SEQ ID NO: 1377608
gaucacaugcucaucccug

SEQ ID NO: 1377610 - RNA, 19 nt, Artificial Sequence
  Description of Artificial Sequence: Synthetic oligonucleotide
  Sense strand starting at position 3546 of SEQ ID NO: 1242853
augagcaugugauccaagu

SEQ ID NO: 1377611 - RNA, 19 nt, Artificial Sequence
  Description of Artificial Sequence: Synthetic oligonucleotide
  Antisense strand to SEQ ID NO: 1377610
acuuggaucacaugcucau

SEQ ID NO: 1377612 - RNA, 19 nt, Artificial Sequence
  Description of Artificial Sequence: Synthetic oligonucleotide
  Sense strand starting at position 3639 of SEQ ID NO: 1242853
gcagauaggauguaauagu

SEQ ID NO: 1377613 - RNA, 19 nt, Artificial Sequence
  Description of Artificial Sequence: Synthetic oligonucleotide
  Antisense strand to SEQ ID NO: 1377612
acuauuacauccuaucugc

SEQ ID NO: 1377614 - RNA, 19 nt, Artificial Sequence
  Description of Artificial Sequence: Synthetic oligonucleotide
  Sense strand starting at position 3653 of SEQ ID NO: 1242853
auaguagaguuucugagca

SEQ ID NO: 1377615 - RNA, 19 nt, Artificial Sequence
  Description of Artificial Sequence: Synthetic oligonucleotide
  Antisense strand to SEQ ID NO: 1377614
ugcucagaaacucuacuau

SEQ ID NO: 1377616 - RNA, 19 nt, Artificial Sequence
  Description of Artificial Sequence: Synthetic oligonucleotide
  Sense strand starting at position 3657 of SEQ ID NO: 1242853
uagaguuucugagcauuaa

SEQ ID NO: 1377617 - RNA, 19 nt, Artificial Sequence
  Description of Artificial Sequence: Synthetic oligonucleotide
  Antisense strand to SEQ ID NO: 1377616
uuaaugcucagaaacucua

SEQ ID NO: 1377618 - RNA, 19 nt, Artificial Sequence
  Description of Artificial Sequence: Synthetic oligonucleotide
  Sense strand starting at position 3658 of SEQ ID NO: 1242853
agaguuucugagcauuaau

SEQ ID NO: 1377619 - RNA, 19 nt, Artificial Sequence
  Description of Artificial Sequence: Synthetic oligonucleotide
  Antisense strand to SEQ ID NO: 1377618
auuaaugcucagaaacucu

SEQ ID NO: 1377620 - RNA, 19 nt, Artificial Sequence
  Description of Artificial Sequence: Synthetic oligonucleotide
  Sense strand starting at position 3661 of SEQ ID NO: 1242853
guuucugagcauuaauucu

SEQ ID NO: 1377621 - RNA, 19 nt, Artificial Sequence
  Description of Artificial Sequence: Synthetic oligonucleotide
  Antisense strand to SEQ ID NO: 1377620
agaauuaaugcucagaaac

SEQ ID NO: 1377622 - RNA, 19 nt, Artificial Sequence
  Description of Artificial Sequence: Synthetic oligonucleotide
  Sense strand starting at position 39 of SEQ ID NO: 1242854
cccauaccagccugaguua

SEQ ID NO: 1377623 - RNA, 19 nt, Artificial Sequence
  Description of Artificial Sequence: Synthetic oligonucleotide
  Antisense strand to SEQ ID NO: 1377622
uaacucaggcugguauggg

SEQ ID NO: 1377624 - RNA, 19 nt, Artificial Sequence
  Description of Artificial Sequence: Synthetic oligonucleotide
  Sense strand starting at position 42 of SEQ ID NO: 1242854
auaccagccugaguuacau

SEQ ID NO: 1377625 - RNA, 19 nt, Artificial Sequence
  Description of Artificial Sequence: Synthetic oligonucleotide
  Antisense strand to SEQ ID NO: 1377624
auguaacucaggcugguau

SEQ ID NO: 1377626 - RNA, 19 nt, Artificial Sequence
  Description of Artificial Sequence: Synthetic oligonucleotide
  Sense strand starting at position 51 of SEQ ID NO: 1242854
ugaguuacauuauccucuu

SEQ ID NO: 1377627 - RNA, 19 nt, Artificial Sequence
  Description of Artificial Sequence: Synthetic oligonucleotide
  Antisense strand to SEQ ID NO: 1377626
aagaggauaauguaacuca

SEQ ID NO: 1377628 - RNA, 19 nt, Artificial Sequence
  Description of Artificial Sequence: Synthetic oligonucleotide
  Sense strand starting at position 94 of SEQ ID NO: 1242854
agccuuggcucccgaguua

SEQ ID NO: 1377629 - RNA, 19 nt, Artificial Sequence
  Description of Artificial Sequence: Synthetic oligonucleotide
  Antisense strand to SEQ ID NO: 1377628
uaacucgggagccaaggcu

SEQ ID NO: 1377630 - RNA, 19 nt, Artificial Sequence
  Description of Artificial Sequence: Synthetic oligonucleotide
  Sense strand starting at position 284 of SEQ ID NO: 1242854
ugguguuguuccucaacca

SEQ ID NO: 1377631 - RNA, 19 nt, Artificial Sequence
  Description of Artificial Sequence: Synthetic oligonucleotide
  Antisense strand to SEQ ID NO: 1377630
ugguugaggaacaacacca

SEQ ID NO: 1377632 - RNA, 19 nt, Artificial Sequence
  Description of Artificial Sequence: Synthetic oligonucleotide
  Sense strand starting at position 438 of SEQ ID NO: 1242854
ggugacucuucuucccagu

SEQ ID NO: 1377633 - RNA, 19 nt, Artificial Sequence
  Description of Artificial Sequence: Synthetic oligonucleotide
  Antisense strand to SEQ ID NO: 1377632
acugggaagaagagucacc

SEQ ID NO: 1377634 - RNA, 19 nt, Artificial Sequence
  Description of Artificial Sequence: Synthetic oligonucleotide
  Sense strand starting at position 1053 of SEQ ID NO: 1242854
acgaauuucucuugaccag

SEQ ID NO: 1377635 - RNA, 19 nt, Artificial Sequence
  Description of Artificial Sequence: Synthetic oligonucleotide
  Antisense strand to SEQ ID NO: 1377634
cuggucaagagaaauucgu

SEQ ID NO: 1377636 - RNA, 19 nt, Artificial Sequence
  Description of Artificial Sequence: Synthetic oligonucleotide
  Sense strand starting at position 1199 of SEQ ID NO: 1242854
gcacaugaauuacaaauga

SEQ ID NO: 1377637 - RNA, 19 nt, Artificial Sequence
  Description of Artificial Sequence: Synthetic oligonucleotide
  Antisense strand to SEQ ID NO: 1377636
ucauuuguaauucaugugc

SEQ ID NO: 1377638 - RNA, 19 nt, Artificial Sequence
  Description of Artificial Sequence: Synthetic oligonucleotide
  Sense strand starting at position 1269 of SEQ ID NO: 1242854
augggccugugcugagaau

SEQ ID NO: 1377639 - RNA, 19 nt, Artificial Sequence
  Description of Artificial Sequence: Synthetic oligonucleotide
  Antisense strand to SEQ ID NO: 1377638
auucucagcacaggcccau

SEQ ID NO: 1377640 - RNA, 19 nt, Artificial Sequence
  Description of Artificial Sequence: Synthetic oligonucleotide
  Sense strand starting at position 1368 of SEQ ID NO: 1242854
gauucugugcagugcucaa

SEQ ID NO: 1377641 - RNA, 19 nt, Artificial Sequence
  Description of Artificial Sequence: Synthetic oligonucleotide
  Antisense strand to SEQ ID NO: 1377640
uugagcacugcacagaauc

SEQ ID NO: 1377642 - RNA, 19 nt, Artificial Sequence
  Description of Artificial Sequence: Synthetic oligonucleotide
  Sense strand starting at position 2080 of SEQ ID NO: 1242854
gggccaggaugauuguuau

SEQ ID NO: 1377643 - RNA, 19 nt, Artificial Sequence
  Description of Artificial Sequence: Synthetic oligonucleotide
  Antisense strand to SEQ ID NO: 1377642
auaacaaucauccuggccc

SEQ ID NO: 1377644 - RNA, 19 nt, Artificial Sequence
  Description of Artificial Sequence: Synthetic oligonucleotide
  Sense strand starting at position 2083 of SEQ ID NO: 1242854
ccaggaugauuguuaugag

SEQ ID NO: 1377645 - RNA, 19 nt, Artificial Sequence
  Description of Artificial Sequence: Synthetic oligonucleotide
  Antisense strand to SEQ ID NO: 1377644
cucauaacaaucauccugg

SEQ ID NO: 1377646 - RNA, 19 nt, Artificial Sequence
  Description of Artificial Sequence: Synthetic oligonucleotide
  Sense strand starting at position 2306 of SEQ ID NO: 1242854
ggcauuagggcagggauaa

SEQ ID NO: 1377647 - RNA, 19 nt, Artificial Sequence
  Description of Artificial Sequence: Synthetic oligonucleotide
  Antisense strand to SEQ ID NO: 1377646
uuaucccugcccuaaugcc

SEQ ID NO: 1377648 - RNA, 19 nt, Artificial Sequence
  Description of Artificial Sequence: Synthetic oligonucleotide
  Sense strand starting at position 3612 of SEQ ID NO: 1242854
agagcuaauuuguaaagua

SEQ ID NO: 1377649 - RNA, 19 nt, Artificial Sequence
  Description of Artificial Sequence: Synthetic oligonucleotide
  Antisense strand to SEQ ID NO: 1377648
uacuuuacaaauuagcucu

SEQ ID NO: 1377650 - RNA, 19 nt, Artificial Sequence
  Description of Artificial Sequence: Synthetic oligonucleotide
  Sense strand starting at position 3622 of SEQ ID NO: 1242854
uguaaaguauacuugcaga

SEQ ID NO: 1377651 - RNA, 19 nt, Artificial Sequence
  Description of Artificial Sequence: Synthetic oligonucleotide
  Antisense strand to SEQ ID NO: 1377650
ucugcaaguauacuuuaca

SEQ ID NO: 1377652 - RNA, 19 nt, Artificial Sequence
  Description of Artificial Sequence: Synthetic oligonucleotide
  Sense strand starting at position 3724 of SEQ ID NO: 1242854
gggaauuaauucuaauaga

SEQ ID NO: 1377653 - RNA, 19 nt, Artificial Sequence
  Description of Artificial Sequence: Synthetic oligonucleotide
  Antisense strand to SEQ ID NO: 1377652
ucuauuagaauuaauuccc

SEQ ID NO: 1377654 - RNA, 19 nt, Artificial Sequence
  Description of Artificial Sequence: Synthetic oligonucleotide
  Sense strand starting at position 3741 of SEQ ID NO: 1242854
gaauacacuuguucucgca

SEQ ID NO: 1377655 - RNA, 19 nt, Artificial Sequence
  Description of Artificial Sequence: Synthetic oligonucleotide
  Antisense strand to SEQ ID NO: 1377654
ugcgagaacaaguguauuc

SEQ ID NO: 1377656 - RNA, 19 nt, Artificial Sequence
  Description of Artificial Sequence: Synthetic oligonucleotide
  Sense strand starting at position 3743 of SEQ ID NO: 1242854
auacacuuguucucgcaua

SEQ ID NO: 1377657 - RNA, 19 nt, Artificial Sequence
  Description of Artificial Sequence: Synthetic oligonucleotide
  Antisense strand to SEQ ID NO: 1377656
uaugcgagaacaaguguau

SEQ ID NO: 1377658 - RNA, 19 nt, Artificial Sequence
  Description of Artificial Sequence: Synthetic oligonucleotide
  Sense strand starting at position 3958 of SEQ ID NO: 1242854
agagucaccugauaaucca

SEQ ID NO: 1377659 - RNA, 19 nt, Artificial Sequence
  Description of Artificial Sequence: Synthetic oligonucleotide
  Antisense strand to SEQ ID NO: 1377658
uggauuaucaggugacucu

SEQ ID NO: 1377660 - RNA, 19 nt, Artificial Sequence
  Description of Artificial Sequence: Synthetic oligonucleotide
  Sense strand starting at position 689 of SEQ ID NO: 1242855
ccuggauuauuugguauuu

SEQ ID NO: 1377661 - RNA, 19 nt, Artificial Sequence
  Description of Artificial Sequence: Synthetic oligonucleotide
  Antisense strand to SEQ ID NO: 1377660
aaauaccaaauaauccagg

SEQ ID NO: 1377662 - RNA, 19 nt, Artificial Sequence
  Description of Artificial Sequence: Synthetic oligonucleotide
  Sense strand starting at position 722 of SEQ ID NO: 1242855
cugguuuccaccuguggaa

SEQ ID NO: 1377663 - RNA, 19 nt, Artificial Sequence
  Description of Artificial Sequence: Synthetic oligonucleotide
  Antisense strand to SEQ ID NO: 1377662
uuccacagguggaaaccag

SEQ ID NO: 1377664 - RNA, 19 nt, Artificial Sequence
  Description of Artificial Sequence: Synthetic oligonucleotide
  Sense strand starting at position 746 of SEQ ID NO: 1242855
acgaaaccauaugcauauu

SEQ ID NO: 1377665 - RNA, 19 nt, Artificial Sequence
  Description of Artificial Sequence: Synthetic oligonucleotide
  Antisense strand to SEQ ID NO: 1377664
aauaugcauaugguuucgu

SEQ ID NO: 1377666 - RNA, 19 nt, Artificial Sequence
  Description of Artificial Sequence: Synthetic oligonucleotide
  Sense strand starting at position 757 of SEQ ID NO: 1242855
ugcauauuggcauauacau

SEQ ID NO: 1377667 - RNA, 19 nt, Artificial Sequence
  Description of Artificial Sequence: Synthetic oligonucleotide
  Antisense strand to SEQ ID NO: 1377666
auguauaugccaauaugca

SEQ ID NO: 1377668 - RNA, 19 nt, Artificial Sequence
  Description of Artificial Sequence: Synthetic oligonucleotide
  Sense strand starting at position 809 of SEQ ID NO: 1242855
cguggcagauguuuaagaa

SEQ ID NO: 1377669 - RNA, 19 nt, Artificial Sequence
  Description of Artificial Sequence: Synthetic oligonucleotide
  Antisense strand to SEQ ID NO: 1377668
uucuuaaacaucugccacg

SEQ ID NO: 1377670 - RNA, 19 nt, Artificial Sequence
  Description of Artificial Sequence: Synthetic oligonucleotide
  Sense strand starting at position 810 of SEQ ID NO: 1242855
guggcagauguuuaagaaa

SEQ ID NO: 1377671 - RNA, 19 nt, Artificial Sequence
  Description of Artificial Sequence: Synthetic oligonucleotide
  Antisense strand to SEQ ID NO: 1377670
uuucuuaaacaucugccac

SEQ ID NO: 1377672 - RNA, 19 nt, Artificial Sequence
  Description of Artificial Sequence: Synthetic oligonucleotide
  Sense strand starting at position 1028 of SEQ ID NO: 1242855
ggaggaucgcuugagaucu

SEQ ID NO: 1377673 - RNA, 19 nt, Artificial Sequence
  Description of Artificial Sequence: Synthetic oligonucleotide
  Antisense strand to SEQ ID NO: 1377672
agaucucaagcgauccucc

SEQ ID NO: 1377674 - RNA, 19 nt, Artificial Sequence
  Description of Artificial Sequence: Synthetic oligonucleotide
  Sense strand starting at position 1034 of SEQ ID NO: 1242855
ucgcuugagaucugaaggu

SEQ ID NO: 1377675 - RNA, 19 nt, Artificial Sequence
  Description of Artificial Sequence: Synthetic oligonucleotide
  Antisense strand to SEQ ID NO: 1377674
accuucagaucucaagcga

SEQ ID NO: 1377676 - RNA, 19 nt, Artificial Sequence
  Description of Artificial Sequence: Synthetic oligonucleotide
  Sense strand starting at position 1162 of SEQ ID NO: 1242855
gcggauggguauuuacgua

SEQ ID NO: 1377677 - RNA, 19 nt, Artificial Sequence
  Description of Artificial Sequence: Synthetic oligonucleotide
  Antisense strand to SEQ ID NO: 1377676
uacguaaauacccauccgc

SEQ ID NO: 1377678 - RNA, 19 nt, Artificial Sequence
  Description of Artificial Sequence: Synthetic oligonucleotide
  Sense strand starting at position 1291 of SEQ ID NO: 1242855
uucugugagcagugagaag

SEQ ID NO: 1377679 - RNA, 19 nt, Artificial Sequence
  Description of Artificial Sequence: Synthetic oligonucleotide
  Antisense strand to SEQ ID NO: 1377678
cuucucacugcucacagaa

SEQ ID NO: 1377680 - RNA, 19 nt, Artificial Sequence
  Description of Artificial Sequence: Synthetic oligonucleotide
  Sense strand starting at position 1314 of SEQ ID NO: 1242855
uaaggacuucucggcggua

SEQ ID NO: 1377681 - RNA, 19 nt, Artificial Sequence
  Description of Artificial Sequence: Synthetic oligonucleotide
  Antisense strand to SEQ ID NO: 1377680
uaccgccgagaaguccuua

SEQ ID NO: 1377682 - RNA, 19 nt, Artificial Sequence
  Description of Artificial Sequence: Synthetic oligonucleotide
  Sense strand starting at position 1315 of SEQ ID NO: 1242855
aaggacuucucggcgguaa

SEQ ID NO: 1377683 - RNA, 19 nt, Artificial Sequence
  Description of Artificial Sequence: Synthetic oligonucleotide
  Antisense strand to SEQ ID NO: 1377682
uuaccgccgagaaguccuu

SEQ ID NO: 1377684 - RNA, 19 nt, Artificial Sequence
  Description of Artificial Sequence: Synthetic oligonucleotide
  Sense strand starting at position 1316 of SEQ ID NO: 1242855
aggacuucucggcgguaaa

SEQ ID NO: 1377685 - RNA, 19 nt, Artificial Sequence
  Description of Artificial Sequence: Synthetic oligonucleotide
  Antisense strand to SEQ ID NO: 1377684
uuuaccgccgagaaguccu

SEQ ID NO: 1377686 - RNA, 19 nt, Artificial Sequence
  Description of Artificial Sequence: Synthetic oligonucleotide
  Sense strand starting at position 1359 of SEQ ID NO: 1242855
uagacuuaaggccaguuaa

SEQ ID NO: 1377687 - RNA, 19 nt, Artificial Sequence
  Description of Artificial Sequence: Synthetic oligonucleotide
  Antisense strand to SEQ ID NO: 1377686
uuaacuggccuuaagucua

SEQ ID NO: 1377688 - RNA, 19 nt, Artificial Sequence
  Description of Artificial Sequence: Synthetic oligonucleotide
  Sense strand starting at position 1390 of SEQ ID NO: 1242855
acagaucuggcuugggaaa

SEQ ID NO: 1377689 - RNA, 19 nt, Artificial Sequence
  Description of Artificial Sequence: Synthetic oligonucleotide
  Antisense strand to SEQ ID NO: 1377688
uuucccaagccagaucugu

SEQ ID NO: 1377690 - RNA, 19 nt, Artificial Sequence
  Description of Artificial Sequence: Synthetic oligonucleotide
  Sense strand starting at position 1401 of SEQ ID NO: 1242855
uugggaaaccucugugauu

SEQ ID NO: 1377691 - RNA, 19 nt, Artificial Sequence
  Description of Artificial Sequence: Synthetic oligonucleotide
  Antisense strand to SEQ ID NO: 1377690
aaucacagagguuucccaa

SEQ ID NO: 1377692 - RNA, 19 nt, Artificial Sequence
  Description of Artificial Sequence: Synthetic oligonucleotide
  Sense strand starting at position 1402 of SEQ ID NO: 1242855
ugggaaaccucugugauuc

SEQ ID NO: 1377693 - RNA, 19 nt, Artificial Sequence
  Description of Artificial Sequence: Synthetic oligonucleotide
  Antisense strand to SEQ ID NO: 1377692
gaaucacagagguuuccca

SEQ ID NO: 1377694 - RNA, 19 nt, Artificial Sequence
  Description of Artificial Sequence: Synthetic oligonucleotide
  Sense strand starting at position 1403 of SEQ ID NO: 1242855
gggaaaccucugugauucu

SEQ ID NO: 1377695 - RNA, 19 nt, Artificial Sequence
  Description of Artificial Sequence: Synthetic oligonucleotide
  Antisense strand to SEQ ID NO: 1377694
agaaucacagagguuuccc

SEQ ID NO: 1377696 - RNA, 19 nt, Artificial Sequence
  Description of Artificial Sequence: Synthetic oligonucleotide
  Sense strand starting at position 1404 of SEQ ID NO: 1242855
ggaaaccucugugauucua

SEQ ID NO: 1377697 - RNA, 19 nt, Artificial Sequence
  Description of Artificial Sequence: Synthetic oligonucleotide
  Antisense strand to SEQ ID NO: 1377696
uagaaucacagagguuucc

SEQ ID NO: 1377698 - RNA, 19 nt, Artificial Sequence
  Description of Artificial Sequence: Synthetic oligonucleotide
  Sense strand starting at position 1412 of SEQ ID NO: 1242855
cugugauucuaucccuugu

SEQ ID NO: 1377699 - RNA, 19 nt, Artificial Sequence
  Description of Artificial Sequence: Synthetic oligonucleotide
  Antisense strand to SEQ ID NO: 1377698
acaagggauagaaucacag

SEQ ID NO: 1377700 - RNA, 19 nt, Artificial Sequence
  Description of Artificial Sequence: Synthetic oligonucleotide
  Sense strand starting at position 1498 of SEQ ID NO: 1242855
ugcaaacucuggucauugu

SEQ ID NO: 1377701 - RNA, 19 nt, Artificial Sequence
  Description of Artificial Sequence: Synthetic oligonucleotide
  Antisense strand to SEQ ID NO: 1377700
acaaugaccagaguuugca

SEQ ID NO: 1377702 - RNA, 19 nt, Artificial Sequence
  Description of Artificial Sequence: Synthetic oligonucleotide
  Sense strand starting at position 1701 of SEQ ID NO: 1242855
guccgaaccgguggugaaa

SEQ ID NO: 1377703 - RNA, 19 nt, Artificial Sequence
  Description of Artificial Sequence: Synthetic oligonucleotide
  Antisense strand to SEQ ID NO: 1377702
uuucaccaccgguucggac

SEQ ID NO: 1377704 - RNA, 19 nt, Artificial Sequence
  Description of Artificial Sequence: Synthetic oligonucleotide
  Sense strand starting at position 2083 of SEQ ID NO: 1242855
gcaggcgucgcgaauccua

SEQ ID NO: 1377705 - RNA, 19 nt, Artificial Sequence
  Description of Artificial Sequence: Synthetic oligonucleotide
  Antisense strand to SEQ ID NO: 1377704
uaggauucgcgacgccugc

SEQ ID NO: 1377706 - RNA, 19 nt, Artificial Sequence
  Description of Artificial Sequence: Synthetic oligonucleotide
  Sense strand starting at position 2107 of SEQ ID NO: 1242855
cguuggugucgggauuuaa

SEQ ID NO: 1377707 - RNA, 19 nt, Artificial Sequence
  Description of Artificial Sequence: Synthetic oligonucleotide
  Antisense strand to SEQ ID NO: 1377706
uuaaaucccgacaccaacg

SEQ ID NO: 1377708 - RNA, 19 nt, Artificial Sequence
  Description of Artificial Sequence: Synthetic oligonucleotide
  Sense strand starting at position 2150 of SEQ ID NO: 1242855
uggcucacgcguguaauua

SEQ ID NO: 1377709 - RNA, 19 nt, Artificial Sequence
  Description of Artificial Sequence: Synthetic oligonucleotide
  Antisense strand to SEQ ID NO: 1377708
uaauuacacgcgugagcca

SEQ ID NO: 1377710 - RNA, 19 nt, Artificial Sequence
  Description of Artificial Sequence: Synthetic oligonucleotide
  Sense strand starting at position 2151 of SEQ ID NO: 1242855
ggcucacgcguguaauuac

SEQ ID NO: 1377711 - RNA, 19 nt, Artificial Sequence
  Description of Artificial Sequence: Synthetic oligonucleotide
  Antisense strand to SEQ ID NO: 1377710
guaauuacacgcgugagcc

SEQ ID NO: 1377712 - RNA, 19 nt, Artificial Sequence
  Description of Artificial Sequence: Synthetic oligonucleotide
  Sense strand starting at position 2160 of SEQ ID NO: 1242855
guguaauuacagcauuaau

SEQ ID NO: 1377713 - RNA, 19 nt, Artificial Sequence
  Description of Artificial Sequence: Synthetic oligonucleotide
  Antisense strand to SEQ ID NO: 1377712
auuaaugcuguaauuacac

SEQ ID NO: 1377714 - RNA, 19 nt, Artificial Sequence
  Description of Artificial Sequence: Synthetic oligonucleotide
  Sense strand starting at position 2179 of SEQ ID NO: 1242855
aggcauuaauaguauagaa

SEQ ID NO: 1377715 - RNA, 19 nt, Artificial Sequence
  Description of Artificial Sequence: Synthetic oligonucleotide
  Antisense strand to SEQ ID NO: 1377714
uucuauacuauuaaugccu

SEQ ID NO: 1377716 - RNA, 19 nt, Artificial Sequence
  Description of Artificial Sequence: Synthetic oligonucleotide
  Sense strand starting at position 2181 of SEQ ID NO: 1242855
gcauuaauaguauagaagu

SEQ ID NO: 1377717 - RNA, 19 nt, Artificial Sequence
  Description of Artificial Sequence: Synthetic oligonucleotide
  Antisense strand to SEQ ID NO: 1377716
acuucuauacuauuaaugc

SEQ ID NO: 1377718 - RNA, 19 nt, Artificial Sequence
  Description of Artificial Sequence: Synthetic oligonucleotide
  Sense strand starting at position 2851 of SEQ ID NO: 1242855
ucuuuauaggccugugguu

SEQ ID NO: 1377719 - RNA, 19 nt, Artificial Sequence
  Description of Artificial Sequence: Synthetic oligonucleotide
  Antisense strand to SEQ ID NO: 1377718
aaccacaggccuauaaaga

SEQ ID NO: 1377720 - RNA, 19 nt, Artificial Sequence
  Description of Artificial Sequence: Synthetic oligonucleotide
  Sense strand starting at position 2895 of SEQ ID NO: 1242855
agugcaagggacuguguua

SEQ ID NO: 1377721 - RNA, 19 nt, Artificial Sequence
  Description of Artificial Sequence: Synthetic oligonucleotide
  Antisense strand to SEQ ID NO: 1377720
uaacacagucccuugcacu

SEQ ID NO: 1377722 - RNA, 19 nt, Artificial Sequence
  Description of Artificial Sequence: Synthetic oligonucleotide
  Sense strand starting at position 2900 of SEQ ID NO: 1242855
aagggacuguguuacauuu

SEQ ID NO: 1377723 - RNA, 19 nt, Artificial Sequence
  Description of Artificial Sequence: Synthetic oligonucleotide
  Antisense strand to SEQ ID NO: 1377722
aaauguaacacagucccuu

SEQ ID NO: 1377724 - RNA, 19 nt, Artificial Sequence
  Description of Artificial Sequence: Synthetic oligonucleotide
  Sense strand starting at position 2969 of SEQ ID NO: 1242855
agagcaugcucuuccaaag

SEQ ID NO: 1377725 - RNA, 19 nt, Artificial Sequence
  Description of Artificial Sequence: Synthetic oligonucleotide
  Antisense strand to SEQ ID NO: 1377724
cuuuggaagagcaugcucu

SEQ ID NO: 1377726 - RNA, 19 nt, Artificial Sequence
  Description of Artificial Sequence: Synthetic oligonucleotide
  Sense strand starting at position 3443 of SEQ ID NO: 1242855
gguucauuguacgucugua

SEQ ID NO: 1377727 - RNA, 19 nt, Artificial Sequence
  Description of Artificial Sequence: Synthetic oligonucleotide
  Antisense strand to SEQ ID NO: 1377726
uacagacguacaaugaacc

SEQ ID NO: 1377728 - RNA, 19 nt, Artificial Sequence
  Description of Artificial Sequence: Synthetic oligonucleotide
  Sense strand starting at position 3447 of SEQ ID NO: 1242855
cauuguacgucuguaaauc

SEQ ID NO: 1377729 - RNA, 19 nt, Artificial Sequence
  Description of Artificial Sequence: Synthetic oligonucleotide
  Antisense strand to SEQ ID NO: 1377728
gauuuacagacguacaaug

SEQ ID NO: 1377730 - RNA, 19 nt, Artificial Sequence
  Description of Artificial Sequence: Synthetic oligonucleotide
  Sense strand starting at position 3919 of SEQ ID NO: 1242855
acacaauugucaguuuaua

SEQ ID NO: 1377731 - RNA, 19 nt, Artificial Sequence
  Description of Artificial Sequence: Synthetic oligonucleotide
  Antisense strand to SEQ ID NO: 1377730
uauaaacugacaauugugu

SEQ ID NO: 1377732 - RNA, 19 nt, Artificial Sequence
  Description of Artificial Sequence: Synthetic oligonucleotide
  Sense strand starting at position 3930 of SEQ ID NO: 1242855
aguuuauagcguuaucuuc

SEQ ID NO: 1377733 - RNA, 19 nt, Artificial Sequence
  Description of Artificial Sequence: Synthetic oligonucleotide
  Antisense strand to SEQ ID NO: 1377732
gaagauaacgcuauaaacu

SEQ ID NO: 1377734 - RNA, 19 nt, Artificial Sequence
  Description of Artificial Sequence: Synthetic oligonucleotide
  Sense strand starting at position 3939 of SEQ ID NO: 1242855
cguuaucuuccagauguca

SEQ ID NO: 1377735 - RNA, 19 nt, Artificial Sequence
  Description of Artificial Sequence: Synthetic oligonucleotide
  Antisense strand to SEQ ID NO: 1377734
ugacaucuggaagauaacg

SEQ ID NO: 1377736 - RNA, 19 nt, Artificial Sequence
  Description of Artificial Sequence: Synthetic oligonucleotide
  Sense strand starting at position 3975 of SEQ ID NO: 1242855
ccguaucucucuuugugua

SEQ ID NO: 1377737 - RNA, 19 nt, Artificial Sequence
  Description of Artificial Sequence: Synthetic oligonucleotide
  Antisense strand to SEQ ID NO: 1377736
uacacaaagagagauacgg

SEQ ID NO: 1377738 - RNA, 19 nt, Artificial Sequence
  Description of Artificial Sequence: Synthetic oligonucleotide
  Sense strand starting at position 3976 of SEQ ID NO: 1242855
cguaucucucuuuguguau

SEQ ID NO: 1377739 - RNA, 19 nt, Artificial Sequence
  Description of Artificial Sequence: Synthetic oligonucleotide
  Antisense strand to SEQ ID NO: 1377738
auacacaaagagagauacg

SEQ ID NO: 1377740 - RNA, 19 nt, Artificial Sequence
  Description of Artificial Sequence: Synthetic oligonucleotide
  Sense strand starting at position 144 of SEQ ID NO: 1242856
aggagaaagucucaauggu

SEQ ID NO: 1377741 - RNA, 19 nt, Artificial Sequence
  Description of Artificial Sequence: Synthetic oligonucleotide
  Antisense strand to SEQ ID NO: 1377740
accauugagacuuucuccu

SEQ ID NO: 1377742 - RNA, 19 nt, Artificial Sequence
  Description of Artificial Sequence: Synthetic oligonucleotide
  Sense strand starting at position 690 of SEQ ID NO: 1242856
ccuggauuauuugguauuu

SEQ ID NO: 1377743 - RNA, 19 nt, Artificial Sequence
  Description of Artificial Sequence: Synthetic oligonucleotide
  Antisense strand to SEQ ID NO: 1377742
aaauaccaaauaauccagg

SEQ ID NO: 1377744 - RNA, 19 nt, Artificial Sequence
  Description of Artificial Sequence: Synthetic oligonucleotide
  Sense strand starting at position 723 of SEQ ID NO: 1242856
cugguuuccaccuguggaa

SEQ ID NO: 1377745 - RNA, 19 nt, Artificial Sequence
  Description of Artificial Sequence: Synthetic oligonucleotide
  Antisense strand to SEQ ID NO: 1377744
uuccacagguggaaaccag

SEQ ID NO: 1377746 - RNA, 19 nt, Artificial Sequence
  Description of Artificial Sequence: Synthetic oligonucleotide
  Sense strand starting at position 747 of SEQ ID NO: 1242856
acgaaaccauaugcauauu

SEQ ID NO: 1377747 - RNA, 19 nt, Artificial Sequence
  Description of Artificial Sequence: Synthetic oligonucleotide
  Antisense strand to SEQ ID NO: 1377746
aauaugcauaugguuucgu

SEQ ID NO: 1377748 - RNA, 19 nt, Artificial Sequence
  Description of Artificial Sequence: Synthetic oligonucleotide
  Sense strand starting at position 755 of SEQ ID NO: 1242856
auaugcauauuggcauaua

SEQ ID NO: 1377749 - RNA, 19 nt, Artificial Sequence
  Description of Artificial Sequence: Synthetic oligonucleotide
  Antisense strand to SEQ ID NO: 1377748
uauaugccaauaugcauau

SEQ ID NO: 1377750 - RNA, 19 nt, Artificial Sequence
  Description of Artificial Sequence: Synthetic oligonucleotide
  Sense strand starting at position 758 of SEQ ID NO: 1242856
ugcauauuggcauauacau

SEQ ID NO: 1377751 - RNA, 19 nt, Artificial Sequence
  Description of Artificial Sequence: Synthetic oligonucleotide
  Antisense strand to SEQ ID NO: 1377750
auguauaugccaauaugca

SEQ ID NO: 1377752 - RNA, 19 nt, Artificial Sequence
  Description of Artificial Sequence: Synthetic oligonucleotide
  Sense strand starting at position 810 of SEQ ID NO: 1242856
cguggcagauguuuaagaa

SEQ ID NO: 1377753 - RNA, 19 nt, Artificial Sequence
  Description of Artificial Sequence: Synthetic oligonucleotide
  Antisense strand to SEQ ID NO: 1377752
uucuuaaacaucugccacg

SEQ ID NO: 1377754 - RNA, 19 nt, Artificial Sequence
  Description of Artificial Sequence: Synthetic oligonucleotide
  Sense strand starting at position 811 of SEQ ID NO: 1242856
guggcagauguuuaagaaa

SEQ ID NO: 1377755 - RNA, 19 nt, Artificial Sequence
  Description of Artificial Sequence: Synthetic oligonucleotide
  Antisense strand to SEQ ID NO: 1377754
uuucuuaaacaucugccac

SEQ ID NO: 1377756 - RNA, 19 nt, Artificial Sequence
  Description of Artificial Sequence: Synthetic oligonucleotide
  Sense strand starting at position 1035 of SEQ ID NO: 1242856
ucgcuugagaucugaaggu

SEQ ID NO: 1377757 - RNA, 19 nt, Artificial Sequence
  Description of Artificial Sequence: Synthetic oligonucleotide
  Antisense strand to SEQ ID NO: 1377756
accuucagaucucaagcga

SEQ ID NO: 1377758 - RNA, 19 nt, Artificial Sequence
  Description of Artificial Sequence: Synthetic oligonucleotide
  Sense strand starting at position 1163 of SEQ ID NO: 1242856
gcggauggguauuuacgua

SEQ ID NO: 1377759 - RNA, 19 nt, Artificial Sequence
  Description of Artificial Sequence: Synthetic oligonucleotide
  Antisense strand to SEQ ID NO: 1377758
uacguaaauacccauccgc

SEQ ID NO: 1377760 - RNA, 19 nt, Artificial Sequence
  Description of Artificial Sequence: Synthetic oligonucleotide
  Sense strand starting at position 1292 of SEQ ID NO: 1242856
uucugugagcagugagaag

SEQ ID NO: 1377761 - RNA, 19 nt, Artificial Sequence
  Description of Artificial Sequence: Synthetic oligonucleotide
  Antisense strand to SEQ ID NO: 1377760
cuucucacugcucacagaa

SEQ ID NO: 1377762 - RNA, 19 nt, Artificial Sequence
  Description of Artificial Sequence: Synthetic oligonucleotide
  Sense strand starting at position 1315 of SEQ ID NO: 1242856
uaaggacuucucggcggua

SEQ ID NO: 1377763 - RNA, 19 nt, Artificial Sequence
  Description of Artificial Sequence: Synthetic oligonucleotide
  Antisense strand to SEQ ID NO: 1377762
uaccgccgagaaguccuua

SEQ ID NO: 1377764 - RNA, 19 nt, Artificial Sequence
  Description of Artificial Sequence: Synthetic oligonucleotide
  Sense strand starting at position 1316 of SEQ ID NO: 1242856
aaggacuucucggcgguaa

SEQ ID NO: 1377765 - RNA, 19 nt, Artificial Sequence
  Description of Artificial Sequence: Synthetic oligonucleotide
  Antisense strand to SEQ ID NO: 1377764
uuaccgccgagaaguccuu

SEQ ID NO: 1377766 - RNA, 19 nt, Artificial Sequence
  Description of Artificial Sequence: Synthetic oligonucleotide
  Sense strand starting at position 1317 of SEQ ID NO: 1242856
aggacuucucggcgguaaa

SEQ ID NO: 1377767 - RNA, 19 nt, Artificial Sequence
  Description of Artificial Sequence: Synthetic oligonucleotide
  Antisense strand to SEQ ID NO: 1377766
uuuaccgccgagaaguccu

SEQ ID NO: 1377768 - RNA, 19 nt, Artificial Sequence
  Description of Artificial Sequence: Synthetic oligonucleotide
  Sense strand starting at position 1360 of SEQ ID NO: 1242856
uagacuuaaggccaguuaa

SEQ ID NO: 1377769 - RNA, 19 nt, Artificial Sequence
  Description of Artificial Sequence: Synthetic oligonucleotide
  Antisense strand to SEQ ID NO: 1377768
uuaacuggccuuaagucua

SEQ ID NO: 1377770 - RNA, 19 nt, Artificial Sequence
  Description of Artificial Sequence: Synthetic oligonucleotide
  Sense strand starting at position 1391 of SEQ ID NO: 1242856
acagaucuggcuugggaaa

SEQ ID NO: 1377771 - RNA, 19 nt, Artificial Sequence
  Description of Artificial Sequence: Synthetic oligonucleotide
  Antisense strand to SEQ ID NO: 1377770
uuucccaagccagaucugu

SEQ ID NO: 1377772 - RNA, 19 nt, Artificial Sequence
  Description of Artificial Sequence: Synthetic oligonucleotide
  Sense strand starting at position 1402 of SEQ ID NO: 1242856
uugggaaaccucugugauu

SEQ ID NO: 1377773 - RNA, 19 nt, Artificial Sequence
  Description of Artificial Sequence: Synthetic oligonucleotide
  Antisense strand to SEQ ID NO: 1377772
aaucacagagguuucccaa

SEQ ID NO: 1377774 - RNA, 19 nt, Artificial Sequence
  Description of Artificial Sequence: Synthetic oligonucleotide
  Sense strand starting at position 1403 of SEQ ID NO: 1242856
ugggaaaccucugugauuc

SEQ ID NO: 1377775 - RNA, 19 nt, Artificial Sequence
  Description of Artificial Sequence: Synthetic oligonucleotide
  Antisense strand to SEQ ID NO: 1377774
gaaucacagagguuuccca

SEQ ID NO: 1377776 - RNA, 19 nt, Artificial Sequence
  Description of Artificial Sequence: Synthetic oligonucleotide
  Sense strand starting at position 1404 of SEQ ID NO: 1242856
gggaaaccucugugauucu

SEQ ID NO: 1377777 - RNA, 19 nt, Artificial Sequence
  Description of Artificial Sequence: Synthetic oligonucleotide
  Antisense strand to SEQ ID NO: 1377776
agaaucacagagguuuccc

SEQ ID NO: 1377778 - RNA, 19 nt, Artificial Sequence
  Description of Artificial Sequence: Synthetic oligonucleotide
  Sense strand starting at position 1405 of SEQ ID NO: 1242856
ggaaaccucugugauucua

SEQ ID NO: 1377779 - RNA, 19 nt, Artificial Sequence
  Description of Artificial Sequence: Synthetic oligonucleotide
  Antisense strand to SEQ ID NO: 1377778
uagaaucacagagguuucc

SEQ ID NO: 1377780 - RNA, 19 nt, Artificial Sequence
  Description of Artificial Sequence: Synthetic oligonucleotide
  Sense strand starting at position 1413 of SEQ ID NO: 1242856
cugugauucuaucccuugu

SEQ ID NO: 1377781 - RNA, 19 nt, Artificial Sequence
  Description of Artificial Sequence: Synthetic oligonucleotide
  Antisense strand to SEQ ID NO: 1377780
acaagggauagaaucacag

SEQ ID NO: 1377782 - RNA, 19 nt, Artificial Sequence
  Description of Artificial Sequence: Synthetic oligonucleotide
  Sense strand starting at position 1499 of SEQ ID NO: 1242856
ugcaaacucuggucauugu

SEQ ID NO: 1377783 - RNA, 19 nt, Artificial Sequence
  Description of Artificial Sequence: Synthetic oligonucleotide
  Antisense strand to SEQ ID NO: 1377782
acaaugaccagaguuugca

SEQ ID NO: 1377784 - RNA, 19 nt, Artificial Sequence
  Description of Artificial Sequence: Synthetic oligonucleotide
  Sense strand starting at position 2084 of SEQ ID NO: 1242856
gcaggcgucgcgaauccua

SEQ ID NO: 1377785 - RNA, 19 nt, Artificial Sequence
  Description of Artificial Sequence: Synthetic oligonucleotide
  Antisense strand to SEQ ID NO: 1377784
uaggauucgcgacgccugc

SEQ ID NO: 1377786 - RNA, 19 nt, Artificial Sequence
  Description of Artificial Sequence: Synthetic oligonucleotide
  Sense strand starting at position 2108 of SEQ ID NO: 1242856
cguuggugucgggauuuaa

SEQ ID NO: 1377787 - RNA, 19 nt, Artificial Sequence
  Description of Artificial Sequence: Synthetic oligonucleotide
  Antisense strand to SEQ ID NO: 1377786
uuaaaucccgacaccaacg

SEQ ID NO: 1377788 - RNA, 19 nt, Artificial Sequence
  Description of Artificial Sequence: Synthetic oligonucleotide
  Sense strand starting at position 2151 of SEQ ID NO: 1242856
uggcucacgcguguaauua

SEQ ID NO: 1377789 - RNA, 19 nt, Artificial Sequence
  Description of Artificial Sequence: Synthetic oligonucleotide
  Antisense strand to SEQ ID NO: 1377788
uaauuacacgcgugagcca

SEQ ID NO: 1377790 - RNA, 19 nt, Artificial Sequence
  Description of Artificial Sequence: Synthetic oligonucleotide
  Sense strand starting at position 2161 of SEQ ID NO: 1242856
guguaauuacagcauuaau

SEQ ID NO: 1377791 - RNA, 19 nt, Artificial Sequence
  Description of Artificial Sequence: Synthetic oligonucleotide
  Antisense strand to SEQ ID NO: 1377790
auuaaugcuguaauuacac

SEQ ID NO: 1377792 - RNA, 19 nt, Artificial Sequence
  Description of Artificial Sequence: Synthetic oligonucleotide
  Sense strand starting at position 2180 of SEQ ID NO: 1242856
aggcauuaauaguauagaa

SEQ ID NO: 1377793 - RNA, 19 nt, Artificial Sequence
  Description of Artificial Sequence: Synthetic oligonucleotide
  Antisense strand to SEQ ID NO: 1377792
uucuauacuauuaaugccu

SEQ ID NO: 1377794 - RNA, 19 nt, Artificial Sequence
  Description of Artificial Sequence: Synthetic oligonucleotide
  Sense strand starting at position 2182 of SEQ ID NO: 1242856
gcauuaauaguauagaagu

SEQ ID NO: 1377795 - RNA, 19 nt, Artificial Sequence
  Description of Artificial Sequence: Synthetic oligonucleotide
  Antisense strand to SEQ ID NO: 1377794
acuucuauacuauuaaugc

SEQ ID NO: 1377796 - RNA, 19 nt, Artificial Sequence
  Description of Artificial Sequence: Synthetic oligonucleotide
  Sense strand starting at position 2361 of SEQ ID NO: 1242856
ggugcaugccuguaagcca

SEQ ID NO: 1377797 - RNA, 19 nt, Artificial Sequence
  Description of Artificial Sequence: Synthetic oligonucleotide
  Antisense strand to SEQ ID NO: 1377796
uggcuuacaggcaugcacc

SEQ ID NO: 1377798 - RNA, 19 nt, Artificial Sequence
  Description of Artificial Sequence: Synthetic oligonucleotide
  Sense strand starting at position 2666 of SEQ ID NO: 1242856
agugucaccugccuguaau

SEQ ID NO: 1377799 - RNA, 19 nt, Artificial Sequence
  Description of Artificial Sequence: Synthetic oligonucleotide
  Antisense strand to SEQ ID NO: 1377798
auuacaggcaggugacacu

SEQ ID NO: 1377800 - RNA, 19 nt, Artificial Sequence
  Description of Artificial Sequence: Synthetic oligonucleotide
  Sense strand starting at position 2852 of SEQ ID NO: 1242856
ucuuuauaggccugugguu

SEQ ID NO: 1377801 - RNA, 19 nt, Artificial Sequence
  Description of Artificial Sequence: Synthetic oligonucleotide
  Antisense strand to SEQ ID NO: 1377800
aaccacaggccuauaaaga

SEQ ID NO: 1377802 - RNA, 19 nt, Artificial Sequence
  Description of Artificial Sequence: Synthetic oligonucleotide
  Sense strand starting at position 2896 of SEQ ID NO: 1242856
agugcaagggacuguguua

SEQ ID NO: 1377803 - RNA, 19 nt, Artificial Sequence
  Description of Artificial Sequence: Synthetic oligonucleotide
  Antisense strand to SEQ ID NO: 1377802
uaacacagucccuugcacu

SEQ ID NO: 1377804 - RNA, 19 nt, Artificial Sequence
  Description of Artificial Sequence: Synthetic oligonucleotide
  Sense strand starting at position 2901 of SEQ ID NO: 1242856
aagggacuguguuacauuu

SEQ ID NO: 1377805 - RNA, 19 nt, Artificial Sequence
  Description of Artificial Sequence: Synthetic oligonucleotide
  Antisense strand to SEQ ID NO: 1377804
aaauguaacacagucccuu

SEQ ID NO: 1377806 - RNA, 19 nt, Artificial Sequence
  Description of Artificial Sequence: Synthetic oligonucleotide
  Sense strand starting at position 2970 of SEQ ID NO: 1242856
agagcaugcucuuccaaag

SEQ ID NO: 1377807 - RNA, 19 nt, Artificial Sequence
  Description of Artificial Sequence: Synthetic oligonucleotide
  Antisense strand to SEQ ID NO: 1377806
cuuuggaagagcaugcucu

SEQ ID NO: 1377808 - RNA, 19 nt, Artificial Sequence
  Description of Artificial Sequence: Synthetic oligonucleotide
  Sense strand starting at position 3448 of SEQ ID NO: 1242856
cauuguacgucuguaaauc

SEQ ID NO: 1377809 - RNA, 19 nt, Artificial Sequence
  Description of Artificial Sequence: Synthetic oligonucleotide
  Antisense strand to SEQ ID NO: 1377808
gauuuacagacguacaaug

SEQ ID NO: 1377810 - RNA, 19 nt, Artificial Sequence
  Description of Artificial Sequence: Synthetic oligonucleotide
  Sense strand starting at position 3920 of SEQ ID NO: 1242856
acacaauugucaguuuaua

SEQ ID NO: 1377811 - RNA, 19 nt, Artificial Sequence
  Description of Artificial Sequence: Synthetic oligonucleotide
  Antisense strand to SEQ ID NO: 1377810
uauaaacugacaauugugu

SEQ ID NO: 1377812 - RNA, 19 nt, Artificial Sequence
  Description of Artificial Sequence: Synthetic oligonucleotide
  Sense strand starting at position 3931 of SEQ ID NO: 1242856
aguuuauagcguuaucuuc

SEQ ID NO: 1377813 - RNA, 19 nt, Artificial Sequence
  Description of Artificial Sequence: Synthetic oligonucleotide
  Antisense strand to SEQ ID NO: 1377812
gaagauaacgcuauaaacu

SEQ ID NO: 1377814 - RNA, 19 nt, Artificial Sequence
  Description of Artificial Sequence: Synthetic oligonucleotide
  Sense strand starting at position 3940 of SEQ ID NO: 1242856
cguuaucuuccagauguca

SEQ ID NO: 1377815 - RNA, 19 nt, Artificial Sequence
  Description of Artificial Sequence: Synthetic oligonucleotide
  Antisense strand to SEQ ID NO: 1377814
ugacaucuggaagauaacg

SEQ ID NO: 1377816 - RNA, 19 nt, Artificial Sequence
  Description of Artificial Sequence: Synthetic oligonucleotide
  Sense strand starting at position 3976 of SEQ ID NO: 1242856
ccuuaucucucuuugugua

SEQ ID NO: 1377817 - RNA, 19 nt, Artificial Sequence
  Description of Artificial Sequence: Synthetic oligonucleotide
  Antisense strand to SEQ ID NO: 1377816
uacacaaagagagauaagg

SEQ ID NO: 1377818 - RNA, 19 nt, Artificial Sequence
  Description of Artificial Sequence: Synthetic oligonucleotide
  Sense strand starting at position 3978 of SEQ ID NO: 1242856
uuaucucucuuuguguaua

SEQ ID NO: 1377819 - RNA, 19 nt, Artificial Sequence
  Description of Artificial Sequence: Synthetic oligonucleotide
  Antisense strand to SEQ ID NO: 1377818
uauacacaaagagagauaa

SEQ ID NO: 1377820 - RNA, 19 nt, Artificial Sequence
  Description of Artificial Sequence: Synthetic oligonucleotide
  Sense strand starting at position 119 of SEQ ID NO: 1242857
ccgccugacccagauauua

SEQ ID NO: 1377821 - RNA, 19 nt, Artificial Sequence
  Description of Artificial Sequence: Synthetic oligonucleotide
  Antisense strand to SEQ ID NO: 1377820
uaauaucugggucaggcgg

SEQ ID NO: 1377822 - RNA, 19 nt, Artificial Sequence
  Description of Artificial Sequence: Synthetic oligonucleotide
  Sense strand starting at position 163 of SEQ ID NO: 1242857
cgcaaagacucucucccaa

SEQ ID NO: 1377823 - RNA, 19 nt, Artificial Sequence
  Description of Artificial Sequence: Synthetic oligonucleotide
  Antisense strand to SEQ ID NO: 1377822
uugggagagagucuuugcg

SEQ ID NO: 1377824 - RNA, 19 nt, Artificial Sequence
  Description of Artificial Sequence: Synthetic oligonucleotide
  Sense strand starting at position 570 of SEQ ID NO: 1242857
uuaucaguucuuggaacuu

SEQ ID NO: 1377825 - RNA, 19 nt, Artificial Sequence
  Description of Artificial Sequence: Synthetic oligonucleotide
  Antisense strand to SEQ ID NO: 1377824
aaguuccaagaacugauaa

SEQ ID NO: 1377826 - RNA, 19 nt, Artificial Sequence
  Description of Artificial Sequence: Synthetic oligonucleotide
  Sense strand starting at position 947 of SEQ ID NO: 1242857
cccuuacagucaucguuau

SEQ ID NO: 1377827 - RNA, 19 nt, Artificial Sequence
  Description of Artificial Sequence: Synthetic oligonucleotide
  Antisense strand to SEQ ID NO: 1377826
auaacgaugacuguaaggg

SEQ ID NO: 1377828 - RNA, 19 nt, Artificial Sequence
  Description of Artificial Sequence: Synthetic oligonucleotide
  Sense strand starting at position 948 of SEQ ID NO: 1242857
ccuuacagucaucguuauu

SEQ ID NO: 1377829 - RNA, 19 nt, Artificial Sequence
  Description of Artificial Sequence: Synthetic oligonucleotide
  Antisense strand to SEQ ID NO: 1377828
aauaacgaugacuguaagg

SEQ ID NO: 1377830 - RNA, 19 nt, Artificial Sequence
  Description of Artificial Sequence: Synthetic oligonucleotide
  Sense strand starting at position 951 of SEQ ID NO: 1242857
uacagucaucguuauugac

SEQ ID NO: 1377831 - RNA, 19 nt, Artificial Sequence
  Description of Artificial Sequence: Synthetic oligonucleotide
  Antisense strand to SEQ ID NO: 1377830
gucaauaacgaugacugua

SEQ ID NO: 1377832 - RNA, 19 nt, Artificial Sequence
  Description of Artificial Sequence: Synthetic oligonucleotide
  Sense strand starting at position 953 of SEQ ID NO: 1242857
cagucaucguuauugacau

SEQ ID NO: 1377833 - RNA, 19 nt, Artificial Sequence
  Description of Artificial Sequence: Synthetic oligonucleotide
  Antisense strand to SEQ ID NO: 1377832
augucaauaacgaugacug

SEQ ID NO: 1377834 - RNA, 19 nt, Artificial Sequence
  Description of Artificial Sequence: Synthetic oligonucleotide
  Sense strand starting at position 1015 of SEQ ID NO: 1242857
uggaguugguacuuuauaa

SEQ ID NO: 1377835 - RNA, 19 nt, Artificial Sequence
  Description of Artificial Sequence: Synthetic oligonucleotide
  Antisense strand to SEQ ID NO: 1377834
uuauaaaguaccaacucca

SEQ ID NO: 1377836 - RNA, 19 nt, Artificial Sequence
  Description of Artificial Sequence: Synthetic oligonucleotide
  Sense strand starting at position 1044 of SEQ ID NO: 1242857
uaggcaacagucugauuaa

SEQ ID NO: 1377837 - RNA, 19 nt, Artificial Sequence
  Description of Artificial Sequence: Synthetic oligonucleotide
  Antisense strand to SEQ ID NO: 1377836
uuaaucagacuguugccua

SEQ ID NO: 1377838 - RNA, 19 nt, Artificial Sequence
  Description of Artificial Sequence: Synthetic oligonucleotide
  Sense strand starting at position 1045 of SEQ ID NO: 1242857
aggcaacagucugauuaac

SEQ ID NO: 1377839 - RNA, 19 nt, Artificial Sequence
  Description of Artificial Sequence: Synthetic oligonucleotide
  Antisense strand to SEQ ID NO: 1377838
guuaaucagacuguugccu

SEQ ID NO: 1377840 - RNA, 19 nt, Artificial Sequence
  Description of Artificial Sequence: Synthetic oligonucleotide
  Sense strand starting at position 1047 of SEQ ID NO: 1242857
gcaacagucugauuaacuc

SEQ ID NO: 1377841 - RNA, 19 nt, Artificial Sequence
  Description of Artificial Sequence: Synthetic oligonucleotide
  Antisense strand to SEQ ID NO: 1377840
gaguuaaucagacuguugc

SEQ ID NO: 1377842 - RNA, 19 nt, Artificial Sequence
  Description of Artificial Sequence: Synthetic oligonucleotide
  Sense strand starting at position 1054 of SEQ ID NO: 1242857
ucugauuaacucgaugcca

SEQ ID NO: 1377843 - RNA, 19 nt, Artificial Sequence
  Description of Artificial Sequence: Synthetic oligonucleotide
  Antisense strand to SEQ ID NO: 1377842
uggcaucgaguuaaucaga

SEQ ID NO: 1377844 - RNA, 19 nt, Artificial Sequence
  Description of Artificial Sequence: Synthetic oligonucleotide
  Sense strand starting at position 1056 of SEQ ID NO: 1242857
ugauuaacucgaugccaca

SEQ ID NO: 1377845 - RNA, 19 nt, Artificial Sequence
  Description of Artificial Sequence: Synthetic oligonucleotide
  Antisense strand to SEQ ID NO: 1377844
uguggcaucgaguuaauca

SEQ ID NO: 1377846 - RNA, 19 nt, Artificial Sequence
  Description of Artificial Sequence: Synthetic oligonucleotide
  Sense strand starting at position 1162 of SEQ ID NO: 1242857
aaaugcuauccuuguggau

SEQ ID NO: 1377847 - RNA, 19 nt, Artificial Sequence
  Description of Artificial Sequence: Synthetic oligonucleotide
  Antisense strand to SEQ ID NO: 1377846
auccacaaggauagcauuu

SEQ ID NO: 1377848 - RNA, 19 nt, Artificial Sequence
  Description of Artificial Sequence: Synthetic oligonucleotide
  Sense strand starting at position 1202 of SEQ ID NO: 1242857
guaauaaugcuacaucgau

SEQ ID NO: 1377849 - RNA, 19 nt, Artificial Sequence
  Description of Artificial Sequence: Synthetic oligonucleotide
  Antisense strand to SEQ ID NO: 1377848
aucgauguagcauuauuac

SEQ ID NO: 1377850 - RNA, 19 nt, Artificial Sequence
  Description of Artificial Sequence: Synthetic oligonucleotide
  Sense strand starting at position 1238 of SEQ ID NO: 1242857
gcggaaaccacagagucau

SEQ ID NO: 1377851 - RNA, 19 nt, Artificial Sequence
  Description of Artificial Sequence: Synthetic oligonucleotide
  Antisense strand to SEQ ID NO: 1377850
augacucugugguuuccgc

SEQ ID NO: 1377852 - RNA, 19 nt, Artificial Sequence
  Description of Artificial Sequence: Synthetic oligonucleotide
  Sense strand starting at position 1300 of SEQ ID NO: 1242857
gauugugacuaagugugaa

SEQ ID NO: 1377853 - RNA, 19 nt, Artificial Sequence
  Description of Artificial Sequence: Synthetic oligonucleotide
  Antisense strand to SEQ ID NO: 1377852
uucacacuuagucacaauc

SEQ ID NO: 1377854 - RNA, 19 nt, Artificial Sequence
  Description of Artificial Sequence: Synthetic oligonucleotide
  Sense strand starting at position 1303 of SEQ ID NO: 1242857
ugugacuaagugugaauca

SEQ ID NO: 1377855 - RNA, 19 nt, Artificial Sequence
  Description of Artificial Sequence: Synthetic oligonucleotide
  Antisense strand to SEQ ID NO: 1377854
ugauucacacuuagucaca

SEQ ID NO: 1377856 - RNA, 19 nt, Artificial Sequence
  Description of Artificial Sequence: Synthetic oligonucleotide
  Sense strand starting at position 1960 of SEQ ID NO: 1242857
guugaaugccacugugugu

SEQ ID NO: 1377857 - RNA, 19 nt, Artificial Sequence
  Description of Artificial Sequence: Synthetic oligonucleotide
  Antisense strand to SEQ ID NO: 1377856
acacacaguggcauucaac

SEQ ID NO: 1377858 - RNA, 19 nt, Artificial Sequence
  Description of Artificial Sequence: Synthetic oligonucleotide
  Sense strand starting at position 2076 of SEQ ID NO: 1242857
gaagaaauguuugccaguu

SEQ ID NO: 1377859 - RNA, 19 nt, Artificial Sequence
  Description of Artificial Sequence: Synthetic oligonucleotide
  Antisense strand to SEQ ID NO: 1377858
aacuggcaaacauuucuuc

SEQ ID NO: 1377860 - RNA, 19 nt, Artificial Sequence
  Description of Artificial Sequence: Synthetic oligonucleotide
  Sense strand starting at position 2077 of SEQ ID NO: 1242857
aagaaauguuugccaguuc

SEQ ID NO: 1377861 - RNA, 19 nt, Artificial Sequence
  Description of Artificial Sequence: Synthetic oligonucleotide
  Antisense strand to SEQ ID NO: 1377860
gaacuggcaaacauuucuu

SEQ ID NO: 1377862 - RNA, 19 nt, Artificial Sequence
  Description of Artificial Sequence: Synthetic oligonucleotide
  Sense strand starting at position 2162 of SEQ ID NO: 1242857
accaguaugugcucauggu

SEQ ID NO: 1377863 - RNA, 19 nt, Artificial Sequence
  Description of Artificial Sequence: Synthetic oligonucleotide
  Antisense strand to SEQ ID NO: 1377862
accaugagcacauacuggu

SEQ ID NO: 1377864 - RNA, 19 nt, Artificial Sequence
  Description of Artificial Sequence: Synthetic oligonucleotide
  Sense strand starting at position 2163 of SEQ ID NO: 1242857
ccaguaugugcucauggua

SEQ ID NO: 1377865 - RNA, 19 nt, Artificial Sequence
  Description of Artificial Sequence: Synthetic oligonucleotide
  Antisense strand to SEQ ID NO: 1377864
uaccaugagcacauacugg

SEQ ID NO: 1377866 - RNA, 19 nt, Artificial Sequence
  Description of Artificial Sequence: Synthetic oligonucleotide
  Sense strand starting at position 2310 of SEQ ID NO: 1242857
gugacaaucugggcucauu

SEQ ID NO: 1377867 - RNA, 19 nt, Artificial Sequence
  Description of Artificial Sequence: Synthetic oligonucleotide
  Antisense strand to SEQ ID NO: 1377866
aaugagcccagauugucac

SEQ ID NO: 1377868 - RNA, 19 nt, Artificial Sequence
  Description of Artificial Sequence: Synthetic oligonucleotide
  Sense strand starting at position 2410 of SEQ ID NO: 1242857
cccggcuaauguuuauuua

SEQ ID NO: 1377869 - RNA, 19 nt, Artificial Sequence
  Description of Artificial Sequence: Synthetic oligonucleotide
  Antisense strand to SEQ ID NO: 1377868
uaaauaaacauuagccggg

SEQ ID NO: 1377870 - RNA, 19 nt, Artificial Sequence
  Description of Artificial Sequence: Synthetic oligonucleotide
  Sense strand starting at position 2623 of SEQ ID NO: 1242857
aucucaaccguugaauaua

SEQ ID NO: 1377871 - RNA, 19 nt, Artificial Sequence
  Description of Artificial Sequence: Synthetic oligonucleotide
  Antisense strand to SEQ ID NO: 1377870
uauauucaacgguugagau

SEQ ID NO: 1377872 - RNA, 19 nt, Artificial Sequence
  Description of Artificial Sequence: Synthetic oligonucleotide
  Sense strand starting at position 2648 of SEQ ID NO: 1242857
cuuaauauucugcguguca

SEQ ID NO: 1377873 - RNA, 19 nt, Artificial Sequence
  Description of Artificial Sequence: Synthetic oligonucleotide
  Antisense strand to SEQ ID NO: 1377872
ugacacgcagaauauuaag

SEQ ID NO: 1377874 - RNA, 19 nt, Artificial Sequence
  Description of Artificial Sequence: Synthetic oligonucleotide
  Sense strand starting at position 2649 of SEQ ID NO: 1242857
uuaauauucugcgugucaa

SEQ ID NO: 1377875 - RNA, 19 nt, Artificial Sequence
  Description of Artificial Sequence: Synthetic oligonucleotide
  Antisense strand to SEQ ID NO: 1377874
uugacacgcagaauauuaa

SEQ ID NO: 1377876 - RNA, 19 nt, Artificial Sequence
  Description of Artificial Sequence: Synthetic oligonucleotide
  Sense strand starting at position 2650 of SEQ ID NO: 1242857
uaauauucugcgugucaaa

SEQ ID NO: 1377877 - RNA, 19 nt, Artificial Sequence
  Description of Artificial Sequence: Synthetic oligonucleotide
  Antisense strand to SEQ ID NO: 1377876
uuugacacgcagaauauua

SEQ ID NO: 1377878 - RNA, 19 nt, Artificial Sequence
  Description of Artificial Sequence: Synthetic oligonucleotide
  Sense strand starting at position 2679 of SEQ ID NO: 1242857
uggauaaaguguuuagauu

SEQ ID NO: 1377879 - RNA, 19 nt, Artificial Sequence
  Description of Artificial Sequence: Synthetic oligonucleotide
  Antisense strand to SEQ ID NO: 1377878
aaucuaaacacuuuaucca

SEQ ID NO: 1377880 - RNA, 19 nt, Artificial Sequence
  Description of Artificial Sequence: Synthetic oligonucleotide
  Sense strand starting at position 2710 of SEQ ID NO: 1242857
aaugguuaccucuggaaag

SEQ ID NO: 1377881 - RNA, 19 nt, Artificial Sequence
  Description of Artificial Sequence: Synthetic oligonucleotide
  Antisense strand to SEQ ID NO: 1377880
cuuuccagagguaaccauu

SEQ ID NO: 1377882 - RNA, 19 nt, Artificial Sequence
  Description of Artificial Sequence: Synthetic oligonucleotide
  Sense strand starting at position 2722 of SEQ ID NO: 1242857
uggaaaggcucucagagau

SEQ ID NO: 1377883 - RNA, 19 nt, Artificial Sequence
  Description of Artificial Sequence: Synthetic oligonucleotide
  Antisense strand to SEQ ID NO: 1377882
aucucugagagccuuucca

SEQ ID NO: 1377884 - RNA, 19 nt, Artificial Sequence
  Description of Artificial Sequence: Synthetic oligonucleotide
  Sense strand starting at position 2728 of SEQ ID NO: 1242857
ggcucucagagauggaguu

SEQ ID NO: 1377885 - RNA, 19 nt, Artificial Sequence
  Description of Artificial Sequence: Synthetic oligonucleotide
  Antisense strand to SEQ ID NO: 1377884
aacuccaucucugagagcc

SEQ ID NO: 1377886 - RNA, 19 nt, Artificial Sequence
  Description of Artificial Sequence: Synthetic oligonucleotide
  Sense strand starting at position 2734 of SEQ ID NO: 1242857
cagagauggaguuguggga

SEQ ID NO: 1377887 - RNA, 19 nt, Artificial Sequence
  Description of Artificial Sequence: Synthetic oligonucleotide
  Antisense strand to SEQ ID NO: 1377886
ucccacaacuccaucucug

SEQ ID NO: 1377888 - RNA, 19 nt, Artificial Sequence
  Description of Artificial Sequence: Synthetic oligonucleotide
  Sense strand starting at position 2741 of SEQ ID NO: 1242857
ggaguugugggaugagcca

SEQ ID NO: 1377889 - RNA, 19 nt, Artificial Sequence
  Description of Artificial Sequence: Synthetic oligonucleotide
  Antisense strand to SEQ ID NO: 1377888
uggcucaucccacaacucc

SEQ ID NO: 1377890 - RNA, 19 nt, Artificial Sequence
  Description of Artificial Sequence: Synthetic oligonucleotide
  Sense strand starting at position 3004 of SEQ ID NO: 1242857
ccauguugugcugggauua

SEQ ID NO: 1377891 - RNA, 19 nt, Artificial Sequence
  Description of Artificial Sequence: Synthetic oligonucleotide
  Antisense strand to SEQ ID NO: 1377890
uaaucccagcacaacaugg

SEQ ID NO: 1377892 - RNA, 19 nt, Artificial Sequence
  Description of Artificial Sequence: Synthetic oligonucleotide
  Sense strand starting at position 3005 of SEQ ID NO: 1242857
cauguugugcugggauuau

SEQ ID NO: 1377893 - RNA, 19 nt, Artificial Sequence
  Description of Artificial Sequence: Synthetic oligonucleotide
  Antisense strand to SEQ ID NO: 1377892
auaaucccagcacaacaug

SEQ ID NO: 1377894 - RNA, 19 nt, Artificial Sequence
  Description of Artificial Sequence: Synthetic oligonucleotide
  Sense strand starting at position 3097 of SEQ ID NO: 1242857
ugaacugagucggucacau

SEQ ID NO: 1377895 - RNA, 19 nt, Artificial Sequence
  Description of Artificial Sequence: Synthetic oligonucleotide
  Antisense strand to SEQ ID NO: 1377894
augugaccgacucaguuca

SEQ ID NO: 1377896 - RNA, 19 nt, Artificial Sequence
  Description of Artificial Sequence: Synthetic oligonucleotide
  Sense strand starting at position 3132 of SEQ ID NO: 1242857
cagugcuaccaaugaugaa

SEQ ID NO: 1377897 - RNA, 19 nt, Artificial Sequence
  Description of Artificial Sequence: Synthetic oligonucleotide
  Antisense strand to SEQ ID NO: 1377896
uucaucauugguagcacug

SEQ ID NO: 1377898 - RNA, 19 nt, Artificial Sequence
  Description of Artificial Sequence: Synthetic oligonucleotide
  Sense strand starting at position 3233 of SEQ ID NO: 1242857
ugccaagaucucggcucau

SEQ ID NO: 1377899 - RNA, 19 nt, Artificial Sequence
  Description of Artificial Sequence: Synthetic oligonucleotide
  Antisense strand to SEQ ID NO: 1377898
augagccgagaucuuggca

SEQ ID NO: 1377900 - RNA, 19 nt, Artificial Sequence
  Description of Artificial Sequence: Synthetic oligonucleotide
  Sense strand starting at position 568 of SEQ ID NO: 1242858
cuuaucaguucuuggaacu

SEQ ID NO: 1377901 - RNA, 19 nt, Artificial Sequence
  Description of Artificial Sequence: Synthetic oligonucleotide
  Antisense strand to SEQ ID NO: 1377900
aguuccaagaacugauaag

SEQ ID NO: 1377902 - RNA, 19 nt, Artificial Sequence
  Description of Artificial Sequence: Synthetic oligonucleotide
  Sense strand starting at position 569 of SEQ ID NO: 1242858
uuaucaguucuuggaacuu

SEQ ID NO: 1377903 - RNA, 19 nt, Artificial Sequence
  Description of Artificial Sequence: Synthetic oligonucleotide
  Antisense strand to SEQ ID NO: 1377902
aaguuccaagaacugauaa

SEQ ID NO: 1377904 - RNA, 19 nt, Artificial Sequence
  Description of Artificial Sequence: Synthetic oligonucleotide
  Sense strand starting at position 1315 of SEQ ID NO: 1242858
gugugaaucaaagagagcu

SEQ ID NO: 1377905 - RNA, 19 nt, Artificial Sequence
  Description of Artificial Sequence: Synthetic oligonucleotide
  Antisense strand to SEQ ID NO: 1377904
agcucucuuugauucacac

SEQ ID NO: 1377906 - RNA, 19 nt, Artificial Sequence
  Description of Artificial Sequence: Synthetic oligonucleotide
  Sense strand starting at position 2647 of SEQ ID NO: 1242858
uucuuaauauucugugugu

SEQ ID NO: 1377907 - RNA, 19 nt, Artificial Sequence
  Description of Artificial Sequence: Synthetic oligonucleotide
  Antisense strand to SEQ ID NO: 1377906
acacacagaauauuaagaa

SEQ ID NO: 1377908 - RNA, 19 nt, Artificial Sequence
  Description of Artificial Sequence: Synthetic oligonucleotide
  Sense strand starting at position 2649 of SEQ ID NO: 1242858
cuuaauauucuguguguca

SEQ ID NO: 1377909 - RNA, 19 nt, Artificial Sequence
  Description of Artificial Sequence: Synthetic oligonucleotide
  Antisense strand to SEQ ID NO: 1377908
ugacacacagaauauuaag

SEQ ID NO: 1377910 - RNA, 19 nt, Artificial Sequence
  Description of Artificial Sequence: Synthetic oligonucleotide
  Sense strand starting at position 2650 of SEQ ID NO: 1242858
uuaauauucugugugucaa

SEQ ID NO: 1377911 - RNA, 19 nt, Artificial Sequence
  Description of Artificial Sequence: Synthetic oligonucleotide
  Antisense strand to SEQ ID NO: 1377910
uugacacacagaauauuaa

SEQ ID NO: 1377912 - RNA, 19 nt, Artificial Sequence
  Description of Artificial Sequence: Synthetic oligonucleotide
  Sense strand starting at position 12 of SEQ ID NO: 1242859
agugcuaauuuacugugua

SEQ ID NO: 1377913 - RNA, 19 nt, Artificial Sequence
  Description of Artificial Sequence: Synthetic oligonucleotide
  Antisense strand to SEQ ID NO: 1377912
uacacaguaaauuagcacu

SEQ ID NO: 1377914 - RNA, 19 nt, Artificial Sequence
  Description of Artificial Sequence: Synthetic oligonucleotide
  Sense strand starting at position 15 of SEQ ID NO: 1242859
gcuaauuuacuguguaacu

SEQ ID NO: 1377915 - RNA, 19 nt, Artificial Sequence
  Description of Artificial Sequence: Synthetic oligonucleotide
  Antisense strand to SEQ ID NO: 1377914
aguuacacaguaaauuagc

SEQ ID NO: 1377916 - RNA, 19 nt, Artificial Sequence
  Description of Artificial Sequence: Synthetic oligonucleotide
  Sense strand starting at position 20 of SEQ ID NO: 1242859
uuuacuguguaacuaauga

SEQ ID NO: 1377917 - RNA, 19 nt, Artificial Sequence
  Description of Artificial Sequence: Synthetic oligonucleotide
  Antisense strand to SEQ ID NO: 1377916
ucauuaguuacacaguaaa

SEQ ID NO: 1377918 - RNA, 19 nt, Artificial Sequence
  Description of Artificial Sequence: Synthetic oligonucleotide
  Sense strand starting at position 736 of SEQ ID NO: 1242859
ccuggauuauuugguauuu

SEQ ID NO: 1377919 - RNA, 19 nt, Artificial Sequence
  Description of Artificial Sequence: Synthetic oligonucleotide
  Antisense strand to SEQ ID NO: 1377918
aaauaccaaauaauccagg

SEQ ID NO: 1377920 - RNA, 19 nt, Artificial Sequence
  Description of Artificial Sequence: Synthetic oligonucleotide
  Sense strand starting at position 769 of SEQ ID NO: 1242859
cugguuuccaccuguggaa

SEQ ID NO: 1377921 - RNA, 19 nt, Artificial Sequence
  Description of Artificial Sequence: Synthetic oligonucleotide
  Antisense strand to SEQ ID NO: 1377920
uuccacagguggaaaccag

SEQ ID NO: 1377922 - RNA, 19 nt, Artificial Sequence
  Description of Artificial Sequence: Synthetic oligonucleotide
  Sense strand starting at position 793 of SEQ ID NO: 1242859
acgaaaccauaugcauauu

SEQ ID NO: 1377923 - RNA, 19 nt, Artificial Sequence
  Description of Artificial Sequence: Synthetic oligonucleotide
  Antisense strand to SEQ ID NO: 1377922
aauaugcauaugguuucgu

SEQ ID NO: 1377924 - RNA, 19 nt, Artificial Sequence
  Description of Artificial Sequence: Synthetic oligonucleotide
  Sense strand starting at position 804 of SEQ ID NO: 1242859
ugcauauuggcauauacau

SEQ ID NO: 1377925 - RNA, 19 nt, Artificial Sequence
  Description of Artificial Sequence: Synthetic oligonucleotide
  Antisense strand to SEQ ID NO: 1377924
auguauaugccaauaugca

SEQ ID NO: 1377926 - RNA, 19 nt, Artificial Sequence
  Description of Artificial Sequence: Synthetic oligonucleotide
  Sense strand starting at position 856 of SEQ ID NO: 1242859
cguggcagauguuuaagaa

SEQ ID NO: 1377927 - RNA, 19 nt, Artificial Sequence
  Description of Artificial Sequence: Synthetic oligonucleotide
  Antisense strand to SEQ ID NO: 1377926
uucuuaaacaucugccacg

SEQ ID NO: 1377928 - RNA, 19 nt, Artificial Sequence
  Description of Artificial Sequence: Synthetic oligonucleotide
  Sense strand starting at position 857 of SEQ ID NO: 1242859
guggcagauguuuaagaaa

SEQ ID NO: 1377929 - RNA, 19 nt, Artificial Sequence
  Description of Artificial Sequence: Synthetic oligonucleotide
  Antisense strand to SEQ ID NO: 1377928
uuucuuaaacaucugccac

SEQ ID NO: 1377930 - RNA, 19 nt, Artificial Sequence
  Description of Artificial Sequence: Synthetic oligonucleotide
  Sense strand starting at position 1075 of SEQ ID NO: 1242859
ggaggaucgcuugagaucu

SEQ ID NO: 1377931 - RNA, 19 nt, Artificial Sequence
  Description of Artificial Sequence: Synthetic oligonucleotide
  Antisense strand to SEQ ID NO: 1377930
agaucucaagcgauccucc

SEQ ID NO: 1377932 - RNA, 19 nt, Artificial Sequence
  Description of Artificial Sequence: Synthetic oligonucleotide
  Sense strand starting at position 1081 of SEQ ID NO: 1242859
ucgcuugagaucugaaggu

SEQ ID NO: 1377933 - RNA, 19 nt, Artificial Sequence
  Description of Artificial Sequence: Synthetic oligonucleotide
  Antisense strand to SEQ ID NO: 1377932
accuucagaucucaagcga

SEQ ID NO: 1377934 - RNA, 19 nt, Artificial Sequence
  Description of Artificial Sequence: Synthetic oligonucleotide
  Sense strand starting at position 1209 of SEQ ID NO: 1242859
gcggauggguauuuacgua

SEQ ID NO: 1377935 - RNA, 19 nt, Artificial Sequence
  Description of Artificial Sequence: Synthetic oligonucleotide
  Antisense strand to SEQ ID NO: 1377934
uacguaaauacccauccgc

SEQ ID NO: 1377936 - RNA, 19 nt, Artificial Sequence
  Description of Artificial Sequence: Synthetic oligonucleotide
  Sense strand starting at position 1338 of SEQ ID NO: 1242859
uucugugagcagugagaag

SEQ ID NO: 1377937 - RNA, 19 nt, Artificial Sequence
  Description of Artificial Sequence: Synthetic oligonucleotide
  Antisense strand to SEQ ID NO: 1377936
cuucucacugcucacagaa

SEQ ID NO: 1377938 - RNA, 19 nt, Artificial Sequence
  Description of Artificial Sequence: Synthetic oligonucleotide
  Sense strand starting at position 1361 of SEQ ID NO: 1242859
uaaggacuucucggcggua

SEQ ID NO: 1377939 - RNA, 19 nt, Artificial Sequence
  Description of Artificial Sequence: Synthetic oligonucleotide
  Antisense strand to SEQ ID NO: 1377938
uaccgccgagaaguccuua

SEQ ID NO: 1377940 - RNA, 19 nt, Artificial Sequence
  Description of Artificial Sequence: Synthetic oligonucleotide
  Sense strand starting at position 1362 of SEQ ID NO: 1242859
aaggacuucucggcgguaa

SEQ ID NO: 1377941 - RNA, 19 nt, Artificial Sequence
  Description of Artificial Sequence: Synthetic oligonucleotide
  Antisense strand to SEQ ID NO: 1377940
uuaccgccgagaaguccuu

SEQ ID NO: 1377942 - RNA, 19 nt, Artificial Sequence
  Description of Artificial Sequence: Synthetic oligonucleotide
  Sense strand starting at position 1363 of SEQ ID NO: 1242859
aggacuucucggcgguaaa

SEQ ID NO: 1377943 - RNA, 19 nt, Artificial Sequence
  Description of Artificial Sequence: Synthetic oligonucleotide
  Antisense strand to SEQ ID NO: 1377942
uuuaccgccgagaaguccu

SEQ ID NO: 1377944 - RNA, 19 nt, Artificial Sequence
  Description of Artificial Sequence: Synthetic oligonucleotide
  Sense strand starting at position 1406 of SEQ ID NO: 1242859
uagacuuaaggccaguuaa

SEQ ID NO: 1377945 - RNA, 19 nt, Artificial Sequence
  Description of Artificial Sequence: Synthetic oligonucleotide
  Antisense strand to SEQ ID NO: 1377944
uuaacuggccuuaagucua

SEQ ID NO: 1377946 - RNA, 19 nt, Artificial Sequence
  Description of Artificial Sequence: Synthetic oligonucleotide
  Sense strand starting at position 1437 of SEQ ID NO: 1242859
acagaucuggcuugggaaa

SEQ ID NO: 1377947 - RNA, 19 nt, Artificial Sequence
  Description of Artificial Sequence: Synthetic oligonucleotide
  Antisense strand to SEQ ID NO: 1377946
uuucccaagccagaucugu

SEQ ID NO: 1377948 - RNA, 19 nt, Artificial Sequence
  Description of Artificial Sequence: Synthetic oligonucleotide
  Sense strand starting at position 1448 of SEQ ID NO: 1242859
uugggaaaccucugugauu

SEQ ID NO: 1377949 - RNA, 19 nt, Artificial Sequence
  Description of Artificial Sequence: Synthetic oligonucleotide
  Antisense strand to SEQ ID NO: 1377948
aaucacagagguuucccaa

SEQ ID NO: 1377950 - RNA, 19 nt, Artificial Sequence
  Description of Artificial Sequence: Synthetic oligonucleotide
  Sense strand starting at position 1449 of SEQ ID NO: 1242859
ugggaaaccucugugauuc

SEQ ID NO: 1377951 - RNA, 19 nt, Artificial Sequence
  Description of Artificial Sequence: Synthetic oligonucleotide
  Antisense strand to SEQ ID NO: 1377950
gaaucacagagguuuccca

SEQ ID NO: 1377952 - RNA, 19 nt, Artificial Sequence
  Description of Artificial Sequence: Synthetic oligonucleotide
  Sense strand starting at position 1450 of SEQ ID NO: 1242859
gggaaaccucugugauucu

SEQ ID NO: 1377953 - RNA, 19 nt, Artificial Sequence
  Description of Artificial Sequence: Synthetic oligonucleotide
  Antisense strand to SEQ ID NO: 1377952
agaaucacagagguuuccc

SEQ ID NO: 1377954 - RNA, 19 nt, Artificial Sequence
  Description of Artificial Sequence: Synthetic oligonucleotide
  Sense strand starting at position 1451 of SEQ ID NO: 1242859
ggaaaccucugugauucua

SEQ ID NO: 1377955 - RNA, 19 nt, Artificial Sequence
  Description of Artificial Sequence: Synthetic oligonucleotide
  Antisense strand to SEQ ID NO: 1377954
uagaaucacagagguuucc

SEQ ID NO: 1377956 - RNA, 19 nt, Artificial Sequence
  Description of Artificial Sequence: Synthetic oligonucleotide
  Sense strand starting at position 1459 of SEQ ID NO: 1242859
cugugauucuaucccuugu

SEQ ID NO: 1377957 - RNA, 19 nt, Artificial Sequence
  Description of Artificial Sequence: Synthetic oligonucleotide
  Antisense strand to SEQ ID NO: 1377956
acaagggauagaaucacag

SEQ ID NO: 1377958 - RNA, 19 nt, Artificial Sequence
  Description of Artificial Sequence: Synthetic oligonucleotide
  Sense strand starting at position 1545 of SEQ ID NO: 1242859
ugcaaacucuggucauugu

SEQ ID NO: 1377959 - RNA, 19 nt, Artificial Sequence
  Description of Artificial Sequence: Synthetic oligonucleotide
  Antisense strand to SEQ ID NO: 1377958
acaaugaccagaguuugca

SEQ ID NO: 1377960 - RNA, 19 nt, Artificial Sequence
  Description of Artificial Sequence: Synthetic oligonucleotide
  Sense strand starting at position 1748 of SEQ ID NO: 1242859
guccgaaccgguggugaaa

SEQ ID NO: 1377961 - RNA, 19 nt, Artificial Sequence
  Description of Artificial Sequence: Synthetic oligonucleotide
  Antisense strand to SEQ ID NO: 1377960
uuucaccaccgguucggac

SEQ ID NO: 1377962 - RNA, 19 nt, Artificial Sequence
  Description of Artificial Sequence: Synthetic oligonucleotide
  Sense strand starting at position 2130 of SEQ ID NO: 1242859
gcaggcgucgcgaauccua

SEQ ID NO: 1377963 - RNA, 19 nt, Artificial Sequence
  Description of Artificial Sequence: Synthetic oligonucleotide
  Antisense strand to SEQ ID NO: 1377962
uaggauucgcgacgccugc

SEQ ID NO: 1377964 - RNA, 19 nt, Artificial Sequence
  Description of Artificial Sequence: Synthetic oligonucleotide
  Sense strand starting at position 2154 of SEQ ID NO: 1242859
cguuggugucgggauuuaa

SEQ ID NO: 1377965 - RNA, 19 nt, Artificial Sequence
  Description of Artificial Sequence: Synthetic oligonucleotide
  Antisense strand to SEQ ID NO: 1377964
uuaaaucccgacaccaacg

SEQ ID NO: 1377966 - RNA, 19 nt, Artificial Sequence
  Description of Artificial Sequence: Synthetic oligonucleotide
  Sense strand starting at position 2197 of SEQ ID NO: 1242859
uggcucacgcguguaauua

SEQ ID NO: 1377967 - RNA, 19 nt, Artificial Sequence
  Description of Artificial Sequence: Synthetic oligonucleotide
  Antisense strand to SEQ ID NO: 1377966
uaauuacacgcgugagcca

SEQ ID NO: 1377968 - RNA, 19 nt, Artificial Sequence
  Description of Artificial Sequence: Synthetic oligonucleotide
  Sense strand starting at position 2198 of SEQ ID NO: 1242859
ggcucacgcguguaauuac

SEQ ID NO: 1377969 - RNA, 19 nt, Artificial Sequence
  Description of Artificial Sequence: Synthetic oligonucleotide
  Antisense strand to SEQ ID NO: 1377968
guaauuacacgcgugagcc

SEQ ID NO: 1377970 - RNA, 19 nt, Artificial Sequence
  Description of Artificial Sequence: Synthetic oligonucleotide
  Sense strand starting at position 2207 of SEQ ID NO: 1242859
guguaauuacagcauuaau

SEQ ID NO: 1377971 - RNA, 19 nt, Artificial Sequence
  Description of Artificial Sequence: Synthetic oligonucleotide
  Antisense strand to SEQ ID NO: 1377970
auuaaugcuguaauuacac

SEQ ID NO: 1377972 - RNA, 19 nt, Artificial Sequence
  Description of Artificial Sequence: Synthetic oligonucleotide
  Sense strand starting at position 2226 of SEQ ID NO: 1242859
aggcauuaauaguauagaa

SEQ ID NO: 1377973 - RNA, 19 nt, Artificial Sequence
  Description of Artificial Sequence: Synthetic oligonucleotide
  Antisense strand to SEQ ID NO: 1377972
uucuauacuauuaaugccu

SEQ ID NO: 1377974 - RNA, 19 nt, Artificial Sequence
  Description of Artificial Sequence: Synthetic oligonucleotide
  Sense strand starting at position 2228 of SEQ ID NO: 1242859
gcauuaauaguauagaagu

SEQ ID NO: 1377975 - RNA, 19 nt, Artificial Sequence
  Description of Artificial Sequence: Synthetic oligonucleotide
  Antisense strand to SEQ ID NO: 1377974
acuucuauacuauuaaugc

SEQ ID NO: 1377976 - RNA, 19 nt, Artificial Sequence
  Description of Artificial Sequence: Synthetic oligonucleotide
  Sense strand starting at position 2898 of SEQ ID NO: 1242859
ucuuuauaggccugugguu

SEQ ID NO: 1377977 - RNA, 19 nt, Artificial Sequence
  Description of Artificial Sequence: Synthetic oligonucleotide
  Antisense strand to SEQ ID NO: 1377976
aaccacaggccuauaaaga

SEQ ID NO: 1377978 - RNA, 19 nt, Artificial Sequence
  Description of Artificial Sequence: Synthetic oligonucleotide
  Sense strand starting at position 2942 of SEQ ID NO: 1242859
agugcaagggacuguguua

SEQ ID NO: 1377979 - RNA, 19 nt, Artificial Sequence
  Description of Artificial Sequence: Synthetic oligonucleotide
  Antisense strand to SEQ ID NO: 1377978
uaacacagucccuugcacu

SEQ ID NO: 1377980 - RNA, 19 nt, Artificial Sequence
  Description of Artificial Sequence: Synthetic oligonucleotide
  Sense strand starting at position 2947 of SEQ ID NO: 1242859
aagggacuguguuacauuu

SEQ ID NO: 1377981 - RNA, 19 nt, Artificial Sequence
  Description of Artificial Sequence: Synthetic oligonucleotide
  Antisense strand to SEQ ID NO: 1377980
aaauguaacacagucccuu

SEQ ID NO: 1377982 - RNA, 19 nt, Artificial Sequence
  Description of Artificial Sequence: Synthetic oligonucleotide
  Sense strand starting at position 3016 of SEQ ID NO: 1242859
agagcaugcucuuccaaag

SEQ ID NO: 1377983 - RNA, 19 nt, Artificial Sequence
  Description of Artificial Sequence: Synthetic oligonucleotide
  Antisense strand to SEQ ID NO: 1377982
cuuuggaagagcaugcucu

SEQ ID NO: 1377984 - RNA, 19 nt, Artificial Sequence
  Description of Artificial Sequence: Synthetic oligonucleotide
  Sense strand starting at position 3490 of SEQ ID NO: 1242859
gguucauuguacgucugua

SEQ ID NO: 1377985 - RNA, 19 nt, Artificial Sequence
  Description of Artificial Sequence: Synthetic oligonucleotide
  Antisense strand to SEQ ID NO: 1377984
uacagacguacaaugaacc

SEQ ID NO: 1377986 - RNA, 19 nt, Artificial Sequence
  Description of Artificial Sequence: Synthetic oligonucleotide
  Sense strand starting at position 3494 of SEQ ID NO: 1242859
cauuguacgucuguaaauc

SEQ ID NO: 1377987 - RNA, 19 nt, Artificial Sequence
  Description of Artificial Sequence: Synthetic oligonucleotide
  Antisense strand to SEQ ID NO: 1377986
gauuuacagacguacaaug

SEQ ID NO: 1377988 - RNA, 19 nt, Artificial Sequence
  Description of Artificial Sequence: Synthetic oligonucleotide
  Sense strand starting at position 3966 of SEQ ID NO: 1242859
acacaauugucaguuuaua

SEQ ID NO: 1377989 - RNA, 19 nt, Artificial Sequence
  Description of Artificial Sequence: Synthetic oligonucleotide
  Antisense strand to SEQ ID NO: 1377988
uauaaacugacaauugugu

SEQ ID NO: 1377990 - RNA, 19 nt, Artificial Sequence
  Description of Artificial Sequence: Synthetic oligonucleotide
  Sense strand starting at position 3977 of SEQ ID NO: 1242859
aguuuauagcguuaucuuc

SEQ ID NO: 1377991 - RNA, 19 nt, Artificial Sequence
  Description of Artificial Sequence: Synthetic oligonucleotide
  Antisense strand to SEQ ID NO: 1377990
gaagauaacgcuauaaacu

SEQ ID NO: 1377992 - RNA, 19 nt, Artificial Sequence
  Description of Artificial Sequence: Synthetic oligonucleotide
  Sense strand starting at position 13 of SEQ ID NO: 1242860
agugcuaauuuacugugua

SEQ ID NO: 1377993 - RNA, 19 nt, Artificial Sequence
  Description of Artificial Sequence: Synthetic oligonucleotide
  Antisense strand to SEQ ID NO: 1377992
uacacaguaaauuagcacu

SEQ ID NO: 1377994 - RNA, 19 nt, Artificial Sequence
  Description of Artificial Sequence: Synthetic oligonucleotide
  Sense strand starting at position 16 of SEQ ID NO: 1242860
gcuaauuuacuguguaacu

SEQ ID NO: 1377995 - RNA, 19 nt, Artificial Sequence
  Description of Artificial Sequence: Synthetic oligonucleotide
  Antisense strand to SEQ ID NO: 1377994
aguuacacaguaaauuagc

SEQ ID NO: 1377996 - RNA, 19 nt, Artificial Sequence
  Description of Artificial Sequence: Synthetic oligonucleotide
  Sense strand starting at position 21 of SEQ ID NO: 1242860
uuuacuguguaacuaauga

SEQ ID NO: 1377997 - RNA, 19 nt, Artificial Sequence
  Description of Artificial Sequence: Synthetic oligonucleotide
  Antisense strand to SEQ ID NO: 1377996
ucauuaguuacacaguaaa

SEQ ID NO: 1377998 - RNA, 19 nt, Artificial Sequence
  Description of Artificial Sequence: Synthetic oligonucleotide
  Sense strand starting at position 191 of SEQ ID NO: 1242860
aggagaaagucucaauggu

SEQ ID NO: 1377999 - RNA, 19 nt, Artificial Sequence
  Description of Artificial Sequence: Synthetic oligonucleotide
  Antisense strand to SEQ ID NO: 1377998
accauugagacuuucuccu

SEQ ID NO: 1378000 - RNA, 19 nt, Artificial Sequence
  Description of Artificial Sequence: Synthetic oligonucleotide
  Sense strand starting at position 737 of SEQ ID NO: 1242860
ccuggauuauuugguauuu

SEQ ID NO: 1378001 - RNA, 19 nt, Artificial Sequence
  Description of Artificial Sequence: Synthetic oligonucleotide
  Antisense strand to SEQ ID NO: 1378000
aaauaccaaauaauccagg

SEQ ID NO: 1378002 - RNA, 19 nt, Artificial Sequence
  Description of Artificial Sequence: Synthetic oligonucleotide
  Sense strand starting at position 770 of SEQ ID NO: 1242860
cugguuuccaccuguggaa

SEQ ID NO: 1378003 - RNA, 19 nt, Artificial Sequence
  Description of Artificial Sequence: Synthetic oligonucleotide
  Antisense strand to SEQ ID NO: 1378002
uuccacagguggaaaccag

SEQ ID NO: 1378004 - RNA, 19 nt, Artificial Sequence
  Description of Artificial Sequence: Synthetic oligonucleotide
  Sense strand starting at position 794 of SEQ ID NO: 1242860
acgaaaccauaugcauauu

SEQ ID NO: 1378005 - RNA, 19 nt, Artificial Sequence
  Description of Artificial Sequence: Synthetic oligonucleotide
  Antisense strand to SEQ ID NO: 1378004
aauaugcauaugguuucgu

SEQ ID NO: 1378006 - RNA, 19 nt, Artificial Sequence
  Description of Artificial Sequence: Synthetic oligonucleotide
  Sense strand starting at position 802 of SEQ ID NO: 1242860
auaugcauauuggcauaua

SEQ ID NO: 1378007 - RNA, 19 nt, Artificial Sequence
  Description of Artificial Sequence: Synthetic oligonucleotide
  Antisense strand to SEQ ID NO: 1378006
uauaugccaauaugcauau

SEQ ID NO: 1378008 - RNA, 19 nt, Artificial Sequence
  Description of Artificial Sequence: Synthetic oligonucleotide
  Sense strand starting at position 805 of SEQ ID NO: 1242860
ugcauauuggcauauacau

SEQ ID NO: 1378009 - RNA, 19 nt, Artificial Sequence
  Description of Artificial Sequence: Synthetic oligonucleotide
  Antisense strand to SEQ ID NO: 1378008
auguauaugccaauaugca

SEQ ID NO: 1378010 - RNA, 19 nt, Artificial Sequence
  Description of Artificial Sequence: Synthetic oligonucleotide
  Sense strand starting at position 857 of SEQ ID NO: 1242860
cguggcagauguuuaagaa

SEQ ID NO: 1378011 - RNA, 19 nt, Artificial Sequence
  Description of Artificial Sequence: Synthetic oligonucleotide
  Antisense strand to SEQ ID NO: 1378010
uucuuaaacaucugccacg

SEQ ID NO: 1378012 - RNA, 19 nt, Artificial Sequence
  Description of Artificial Sequence: Synthetic oligonucleotide
  Sense strand starting at position 858 of SEQ ID NO: 1242860
guggcagauguuuaagaaa

SEQ ID NO: 1378013 - RNA, 19 nt, Artificial Sequence
  Description of Artificial Sequence: Synthetic oligonucleotide
  Antisense strand to SEQ ID NO: 1378012
uuucuuaaacaucugccac

SEQ ID NO: 1378014 - RNA, 19 nt, Artificial Sequence
  Description of Artificial Sequence: Synthetic oligonucleotide
  Sense strand starting at position 1082 of SEQ ID NO: 1242860
ucgcuugagaucugaaggu

SEQ ID NO: 1378015 - RNA, 19 nt, Artificial Sequence
  Description of Artificial Sequence: Synthetic oligonucleotide
  Antisense strand to SEQ ID NO: 1378014
accuucagaucucaagcga

SEQ ID NO: 1378016 - RNA, 19 nt, Artificial Sequence
  Description of Artificial Sequence: Synthetic oligonucleotide
  Sense strand starting at position 1210 of SEQ ID NO: 1242860
gcggauggguauuuacgua

SEQ ID NO: 1378017 - RNA, 19 nt, Artificial Sequence
  Description of Artificial Sequence: Synthetic oligonucleotide
  Antisense strand to SEQ ID NO: 1378016
uacguaaauacccauccgc

SEQ ID NO: 1378018 - RNA, 19 nt, Artificial Sequence
  Description of Artificial Sequence: Synthetic oligonucleotide
  Sense strand starting at position 1339 of SEQ ID NO: 1242860
uucugugagcagugagaag

SEQ ID NO: 1378019 - RNA, 19 nt, Artificial Sequence
  Description of Artificial Sequence: Synthetic oligonucleotide
  Antisense strand to SEQ ID NO: 1378018
cuucucacugcucacagaa

SEQ ID NO: 1378020 - RNA, 19 nt, Artificial Sequence
  Description of Artificial Sequence: Synthetic oligonucleotide
  Sense strand starting at position 1362 of SEQ ID NO: 1242860
uaaggacuucucggcggua

SEQ ID NO: 1378021 - RNA, 19 nt, Artificial Sequence
  Description of Artificial Sequence: Synthetic oligonucleotide
  Antisense strand to SEQ ID NO: 1378020
uaccgccgagaaguccuua

SEQ ID NO: 1378022 - RNA, 19 nt, Artificial Sequence
  Description of Artificial Sequence: Synthetic oligonucleotide
  Sense strand starting at position 1363 of SEQ ID NO: 1242860
aaggacuucucggcgguaa

SEQ ID NO: 1378023 - RNA, 19 nt, Artificial Sequence
  Description of Artificial Sequence: Synthetic oligonucleotide
  Antisense strand to SEQ ID NO: 1378022
uuaccgccgagaaguccuu

SEQ ID NO: 1378024 - RNA, 19 nt, Artificial Sequence
  Description of Artificial Sequence: Synthetic oligonucleotide
  Sense strand starting at position 1364 of SEQ ID NO: 1242860
aggacuucucggcgguaaa

SEQ ID NO: 1378025 - RNA, 19 nt, Artificial Sequence
  Description of Artificial Sequence: Synthetic oligonucleotide
  Antisense strand to SEQ ID NO: 1378024
uuuaccgccgagaaguccu

SEQ ID NO: 1378026 - RNA, 19 nt, Artificial Sequence
  Description of Artificial Sequence: Synthetic oligonucleotide
  Sense strand starting at position 1407 of SEQ ID NO: 1242860
uagacuuaaggccaguuaa

SEQ ID NO: 1378027 - RNA, 19 nt, Artificial Sequence
  Description of Artificial Sequence: Synthetic oligonucleotide
  Antisense strand to SEQ ID NO: 1378026
uuaacuggccuuaagucua

SEQ ID NO: 1378028 - RNA, 19 nt, Artificial Sequence
  Description of Artificial Sequence: Synthetic oligonucleotide
  Sense strand starting at position 1438 of SEQ ID NO: 1242860
acagaucuggcuugggaaa

SEQ ID NO: 1378029 - RNA, 19 nt, Artificial Sequence
  Description of Artificial Sequence: Synthetic oligonucleotide
  Antisense strand to SEQ ID NO: 1378028
uuucccaagccagaucugu

SEQ ID NO: 1378030 - RNA, 19 nt, Artificial Sequence
  Description of Artificial Sequence: Synthetic oligonucleotide
  Sense strand starting at position 1449 of SEQ ID NO: 1242860
uugggaaaccucugugauu

SEQ ID NO: 1378031 - RNA, 19 nt, Artificial Sequence
  Description of Artificial Sequence: Synthetic oligonucleotide
  Antisense strand to SEQ ID NO: 1378030
aaucacagagguuucccaa

SEQ ID NO: 1378032 - RNA, 19 nt, Artificial Sequence
  Description of Artificial Sequence: Synthetic oligonucleotide
  Sense strand starting at position 1450 of SEQ ID NO: 1242860
ugggaaaccucugugauuc

SEQ ID NO: 1378033 - RNA, 19 nt, Artificial Sequence
  Description of Artificial Sequence: Synthetic oligonucleotide
  Antisense strand to SEQ ID NO: 1378032
gaaucacagagguuuccca

SEQ ID NO: 1378034 - RNA, 19 nt, Artificial Sequence
  Description of Artificial Sequence: Synthetic oligonucleotide
  Sense strand starting at position 1451 of SEQ ID NO: 1242860
gggaaaccucugugauucu

SEQ ID NO: 1378035 - RNA, 19 nt, Artificial Sequence
  Description of Artificial Sequence: Synthetic oligonucleotide
  Antisense strand to SEQ ID NO: 1378034
agaaucacagagguuuccc

SEQ ID NO: 1378036 - RNA, 19 nt, Artificial Sequence
  Description of Artificial Sequence: Synthetic oligonucleotide
  Sense strand starting at position 1452 of SEQ ID NO: 1242860
ggaaaccucugugauucua

SEQ ID NO: 1378037 - RNA, 19 nt, Artificial Sequence
  Description of Artificial Sequence: Synthetic oligonucleotide
  Antisense strand to SEQ ID NO: 1378036
uagaaucacagagguuucc

SEQ ID NO: 1378038 - RNA, 19 nt, Artificial Sequence
  Description of Artificial Sequence: Synthetic oligonucleotide
  Sense strand starting at position 1460 of SEQ ID NO: 1242860
cugugauucuaucccuugu

SEQ ID NO: 1378039 - RNA, 19 nt, Artificial Sequence
  Description of Artificial Sequence: Synthetic oligonucleotide
  Antisense strand to SEQ ID NO: 1378038
acaagggauagaaucacag

SEQ ID NO: 1378040 - RNA, 19 nt, Artificial Sequence
  Description of Artificial Sequence: Synthetic oligonucleotide
  Sense strand starting at position 1546 of SEQ ID NO: 1242860
ugcaaacucuggucauugu

SEQ ID NO: 1378041 - RNA, 19 nt, Artificial Sequence
  Description of Artificial Sequence: Synthetic oligonucleotide
  Antisense strand to SEQ ID NO: 1378040
acaaugaccagaguuugca

SEQ ID NO: 1378042 - RNA, 19 nt, Artificial Sequence
  Description of Artificial Sequence: Synthetic oligonucleotide
  Sense strand starting at position 2131 of SEQ ID NO: 1242860
gcaggcgucgcgaauccua

SEQ ID NO: 1378043 - RNA, 19 nt, Artificial Sequence
  Description of Artificial Sequence: Synthetic oligonucleotide
  Antisense strand to SEQ ID NO: 1378042
uaggauucgcgacgccugc

SEQ ID NO: 1378044 - RNA, 19 nt, Artificial Sequence
  Description of Artificial Sequence: Synthetic oligonucleotide
  Sense strand starting at position 2155 of SEQ ID NO: 1242860
cguuggugucgggauuuaa

SEQ ID NO: 1378045 - RNA, 19 nt, Artificial Sequence
  Description of Artificial Sequence: Synthetic oligonucleotide
  Antisense strand to SEQ ID NO: 1378044
uuaaaucccgacaccaacg

SEQ ID NO: 1378046 - RNA, 19 nt, Artificial Sequence
  Description of Artificial Sequence: Synthetic oligonucleotide
  Sense strand starting at position 2198 of SEQ ID NO: 1242860
uggcucacgcguguaauua

SEQ ID NO: 1378047 - RNA, 19 nt, Artificial Sequence
  Description of Artificial Sequence: Synthetic oligonucleotide
  Antisense strand to SEQ ID NO: 1378046
uaauuacacgcgugagcca

SEQ ID NO: 1378048 - RNA, 19 nt, Artificial Sequence
  Description of Artificial Sequence: Synthetic oligonucleotide
  Sense strand starting at position 2208 of SEQ ID NO: 1242860
guguaauuacagcauuaau

SEQ ID NO: 1378049 - RNA, 19 nt, Artificial Sequence
  Description of Artificial Sequence: Synthetic oligonucleotide
  Antisense strand to SEQ ID NO: 1378048
auuaaugcuguaauuacac

SEQ ID NO: 1378050 - RNA, 19 nt, Artificial Sequence
  Description of Artificial Sequence: Synthetic oligonucleotide
  Sense strand starting at position 2227 of SEQ ID NO: 1242860
aggcauuaauaguauagaa

SEQ ID NO: 1378051 - RNA, 19 nt, Artificial Sequence
  Description of Artificial Sequence: Synthetic oligonucleotide
  Antisense strand to SEQ ID NO: 1378050
uucuauacuauuaaugccu

SEQ ID NO: 1378052 - RNA, 19 nt, Artificial Sequence
  Description of Artificial Sequence: Synthetic oligonucleotide
  Sense strand starting at position 2229 of SEQ ID NO: 1242860
gcauuaauaguauagaagu

SEQ ID NO: 1378053 - RNA, 19 nt, Artificial Sequence
  Description of Artificial Sequence: Synthetic oligonucleotide
  Antisense strand to SEQ ID NO: 1378052
acuucuauacuauuaaugc

SEQ ID NO: 1378054 - RNA, 19 nt, Artificial Sequence
  Description of Artificial Sequence: Synthetic oligonucleotide
  Sense strand starting at position 2408 of SEQ ID NO: 1242860
ggugcaugccuguaagcca

SEQ ID NO: 1378055 - RNA, 19 nt, Artificial Sequence
  Description of Artificial Sequence: Synthetic oligonucleotide
  Antisense strand to SEQ ID NO: 1378054
uggcuuacaggcaugcacc

SEQ ID NO: 1378056 - RNA, 19 nt, Artificial Sequence
  Description of Artificial Sequence: Synthetic oligonucleotide
  Sense strand starting at position 2713 of SEQ ID NO: 1242860
agugucaccugccuguaau

SEQ ID NO: 1378057 - RNA, 19 nt, Artificial Sequence
  Description of Artificial Sequence: Synthetic oligonucleotide
  Antisense strand to SEQ ID NO: 1378056
auuacaggcaggugacacu

SEQ ID NO: 1378058 - RNA, 19 nt, Artificial Sequence
  Description of Artificial Sequence: Synthetic oligonucleotide
  Sense strand starting at position 2899 of SEQ ID NO: 1242860
ucuuuauaggccugugguu

SEQ ID NO: 1378059 - RNA, 19 nt, Artificial Sequence
  Description of Artificial Sequence: Synthetic oligonucleotide
  Antisense strand to SEQ ID NO: 1378058
aaccacaggccuauaaaga

SEQ ID NO: 1378060 - RNA, 19 nt, Artificial Sequence
  Description of Artificial Sequence: Synthetic oligonucleotide
  Sense strand starting at position 2943 of SEQ ID NO: 1242860
agugcaagggacuguguua

SEQ ID NO: 1378061 - RNA, 19 nt, Artificial Sequence
  Description of Artificial Sequence: Synthetic oligonucleotide
  Antisense strand to SEQ ID NO: 1378060
uaacacagucccuugcacu

SEQ ID NO: 1378062 - RNA, 19 nt, Artificial Sequence
  Description of Artificial Sequence: Synthetic oligonucleotide
  Sense strand starting at position 2948 of SEQ ID NO: 1242860
aagggacuguguuacauuu

SEQ ID NO: 1378063 - RNA, 19 nt, Artificial Sequence
  Description of Artificial Sequence: Synthetic oligonucleotide
  Antisense strand to SEQ ID NO: 1378062
aaauguaacacagucccuu

SEQ ID NO: 1378064 - RNA, 19 nt, Artificial Sequence
  Description of Artificial Sequence: Synthetic oligonucleotide
  Sense strand starting at position 3017 of SEQ ID NO: 1242860
agagcaugcucuuccaaag

SEQ ID NO: 1378065 - RNA, 19 nt, Artificial Sequence
  Description of Artificial Sequence: Synthetic oligonucleotide
  Antisense strand to SEQ ID NO: 1378064
cuuuggaagagcaugcucu

SEQ ID NO: 1378066 - RNA, 19 nt, Artificial Sequence
  Description of Artificial Sequence: Synthetic oligonucleotide
  Sense strand starting at position 3495 of SEQ ID NO: 1242860
cauuguacgucuguaaauc

SEQ ID NO: 1378067 - RNA, 19 nt, Artificial Sequence
  Description of Artificial Sequence: Synthetic oligonucleotide
  Antisense strand to SEQ ID NO: 1378066
gauuuacagacguacaaug

SEQ ID NO: 1378068 - RNA, 19 nt, Artificial Sequence
  Description of Artificial Sequence: Synthetic oligonucleotide
  Sense strand starting at position 3967 of SEQ ID NO: 1242860
acacaauugucaguuuaua

SEQ ID NO: 1378069 - RNA, 19 nt, Artificial Sequence
  Description of Artificial Sequence: Synthetic oligonucleotide
  Antisense strand to SEQ ID NO: 1378068
uauaaacugacaauugugu

SEQ ID NO: 1378070 - RNA, 19 nt, Artificial Sequence
  Description of Artificial Sequence: Synthetic oligonucleotide
  Sense strand starting at position 3978 of SEQ ID NO: 1242860
aguuuauagcguuaucuuc

SEQ ID NO: 1378071 - RNA, 19 nt, Artificial Sequence
  Description of Artificial Sequence: Synthetic oligonucleotide
  Antisense strand to SEQ ID NO: 1378070
gaagauaacgcuauaaacu

SEQ ID NO: 1378072 - RNA, 19 nt, Artificial Sequence
  Description of Artificial Sequence: Synthetic oligonucleotide
  Sense strand starting at position 249 of SEQ ID NO: 1242861
gagggcucaguggaacauu

SEQ ID NO: 1378073 - RNA, 19 nt, Artificial Sequence
  Description of Artificial Sequence: Synthetic oligonucleotide
  Antisense strand to SEQ ID NO: 1378072
aauguuccacugagcccuc

SEQ ID NO: 1378074 - RNA, 19 nt, Artificial Sequence
  Description of Artificial Sequence: Synthetic oligonucleotide
  Sense strand starting at position 309 of SEQ ID NO: 1242861
gaggcuuacaccuguaggu

SEQ ID NO: 1378075 - RNA, 19 nt, Artificial Sequence
  Description of Artificial Sequence: Synthetic oligonucleotide
  Antisense strand to SEQ ID NO: 1378074
accuacagguguaagccuc

SEQ ID NO: 1378076 - RNA, 19 nt, Artificial Sequence
  Description of Artificial Sequence: Synthetic oligonucleotide
  Sense strand starting at position 1169 of SEQ ID NO: 1242861
cgcgguucuggagaagaca

SEQ ID NO: 1378077 - RNA, 19 nt, Artificial Sequence
  Description of Artificial Sequence: Synthetic oligonucleotide
  Antisense strand to SEQ ID NO: 1378076
ugucuucuccagaaccgcg

SEQ ID NO: 1378078 - RNA, 19 nt, Artificial Sequence
  Description of Artificial Sequence: Synthetic oligonucleotide
  Sense strand starting at position 1363 of SEQ ID NO: 1242861
gacucacauucucggugau

SEQ ID NO: 1378079 - RNA, 19 nt, Artificial Sequence
  Description of Artificial Sequence: Synthetic oligonucleotide
  Antisense strand to SEQ ID NO: 1378078
aucaccgagaaugugaguc

SEQ ID NO: 1378080 - RNA, 19 nt, Artificial Sequence
  Description of Artificial Sequence: Synthetic oligonucleotide
  Sense strand starting at position 1365 of SEQ ID NO: 1242861
cucacauucucggugaugu

SEQ ID NO: 1378081 - RNA, 19 nt, Artificial Sequence
  Description of Artificial Sequence: Synthetic oligonucleotide
  Antisense strand to SEQ ID NO: 1378080
acaucaccgagaaugugag

SEQ ID NO: 1378082 - RNA, 19 nt, Artificial Sequence
  Description of Artificial Sequence: Synthetic oligonucleotide
  Sense strand starting at position 1366 of SEQ ID NO: 1242861
ucacauucucggugaugua

SEQ ID NO: 1378083 - RNA, 19 nt, Artificial Sequence
  Description of Artificial Sequence: Synthetic oligonucleotide
  Antisense strand to SEQ ID NO: 1378082
uacaucaccgagaauguga

SEQ ID NO: 1378084 - RNA, 19 nt, Artificial Sequence
  Description of Artificial Sequence: Synthetic oligonucleotide
  Sense strand starting at position 1367 of SEQ ID NO: 1242861
cacauucucggugauguau

SEQ ID NO: 1378085 - RNA, 19 nt, Artificial Sequence
  Description of Artificial Sequence: Synthetic oligonucleotide
  Antisense strand to SEQ ID NO: 1378084
auacaucaccgagaaugug

SEQ ID NO: 1378086 - RNA, 19 nt, Artificial Sequence
  Description of Artificial Sequence: Synthetic oligonucleotide
  Sense strand starting at position 1985 of SEQ ID NO: 1242861
agguuaguuccggguugga

SEQ ID NO: 1378087 - RNA, 19 nt, Artificial Sequence
  Description of Artificial Sequence: Synthetic oligonucleotide
  Antisense strand to SEQ ID NO: 1378086
uccaacccggaacuaaccu

SEQ ID NO: 1378088 - RNA, 19 nt, Artificial Sequence
  Description of Artificial Sequence: Synthetic oligonucleotide
  Sense strand starting at position 2202 of SEQ ID NO: 1242861
cagagcuagccuuaggcau

SEQ ID NO: 1378089 - RNA, 19 nt, Artificial Sequence
  Description of Artificial Sequence: Synthetic oligonucleotide
  Antisense strand to SEQ ID NO: 1378088
augccuaaggcuagcucug

SEQ ID NO: 1378090 - RNA, 19 nt, Artificial Sequence
  Description of Artificial Sequence: Synthetic oligonucleotide
  Sense strand starting at position 3249 of SEQ ID NO: 1242861
gcucaugcacucugggaau

SEQ ID NO: 1378091 - RNA, 19 nt, Artificial Sequence
  Description of Artificial Sequence: Synthetic oligonucleotide
  Antisense strand to SEQ ID NO: 1378090
auucccagagugcaugagc

SEQ ID NO: 1378092 - RNA, 19 nt, Artificial Sequence
  Description of Artificial Sequence: Synthetic oligonucleotide
  Sense strand starting at position 3272 of SEQ ID NO: 1242861
ggagcucaguuacuaacau

SEQ ID NO: 1378093 - RNA, 19 nt, Artificial Sequence
  Description of Artificial Sequence: Synthetic oligonucleotide
  Antisense strand to SEQ ID NO: 1378092
auguuaguaacugagcucc

SEQ ID NO: 1378094 - RNA, 19 nt, Artificial Sequence
  Description of Artificial Sequence: Synthetic oligonucleotide
  Sense strand starting at position 3477 of SEQ ID NO: 1242861
uaccucgugugggaucaaa

SEQ ID NO: 1378095 - RNA, 19 nt, Artificial Sequence
  Description of Artificial Sequence: Synthetic oligonucleotide
  Antisense strand to SEQ ID NO: 1378094
uuugaucccacacgaggua

SEQ ID NO: 1378096 - RNA, 19 nt, Artificial Sequence
  Description of Artificial Sequence: Synthetic oligonucleotide
  Sense strand starting at position 3696 of SEQ ID NO: 1242861
accugaauuccucagugcu

SEQ ID NO: 1378097 - RNA, 19 nt, Artificial Sequence
  Description of Artificial Sequence: Synthetic oligonucleotide
  Antisense strand to SEQ ID NO: 1378096
agcacugaggaauucaggu

SEQ ID NO: 1378098 - RNA, 19 nt, Artificial Sequence
  Description of Artificial Sequence: Synthetic oligonucleotide
  Sense strand starting at position 3698 of SEQ ID NO: 1242861
cugaauuccucagugcuga

SEQ ID NO: 1378099 - RNA, 19 nt, Artificial Sequence
  Description of Artificial Sequence: Synthetic oligonucleotide
  Antisense strand to SEQ ID NO: 1378098
ucagcacugaggaauucag

SEQ ID NO: 1378100 - RNA, 19 nt, Artificial Sequence
  Description of Artificial Sequence: Synthetic oligonucleotide
  Sense strand starting at position 3737 of SEQ ID NO: 1242861
ccugcaagcgauugguaca

SEQ ID NO: 1378101 - RNA, 19 nt, Artificial Sequence
  Description of Artificial Sequence: Synthetic oligonucleotide
  Antisense strand to SEQ ID NO: 1378100
uguaccaaucgcuugcagg

SEQ ID NO: 1378102 - RNA, 19 nt, Artificial Sequence
  Description of Artificial Sequence: Synthetic oligonucleotide
  Sense strand starting at position 3742 of SEQ ID NO: 1242861
aagcgauugguacagcuuu

SEQ ID NO: 1378103 - RNA, 19 nt, Artificial Sequence
  Description of Artificial Sequence: Synthetic oligonucleotide
  Antisense strand to SEQ ID NO: 1378102
aaagcuguaccaaucgcuu

SEQ ID NO: 1378104 - RNA, 19 nt, Artificial Sequence
  Description of Artificial Sequence: Synthetic oligonucleotide
  Sense strand starting at position 3810 of SEQ ID NO: 1242861
cccugucugacagaaggua

SEQ ID NO: 1378105 - RNA, 19 nt, Artificial Sequence
  Description of Artificial Sequence: Synthetic oligonucleotide
  Antisense strand to SEQ ID NO: 1378104
uaccuucugucagacaggg

SEQ ID NO: 1378106 - RNA, 19 nt, Artificial Sequence
  Description of Artificial Sequence: Synthetic oligonucleotide
  Sense strand starting at position 6 of SEQ ID NO: 1242862
ucugaauccuacccggaaa

SEQ ID NO: 1378107 - RNA, 19 nt, Artificial Sequence
  Description of Artificial Sequence: Synthetic oligonucleotide
  Antisense strand to SEQ ID NO: 1378106
uuuccggguaggauucaga

SEQ ID NO: 1378108 - RNA, 19 nt, Artificial Sequence
  Description of Artificial Sequence: Synthetic oligonucleotide
  Sense strand starting at position 8 of SEQ ID NO: 1242862
ugaauccuacccggaaaug

SEQ ID NO: 1378109 - RNA, 19 nt, Artificial Sequence
  Description of Artificial Sequence: Synthetic oligonucleotide
  Antisense strand to SEQ ID NO: 1378108
cauuuccggguaggauuca

SEQ ID NO: 1378110 - RNA, 19 nt, Artificial Sequence
  Description of Artificial Sequence: Synthetic oligonucleotide
  Sense strand starting at position 18 of SEQ ID NO: 1242862
ccggaaaugauaugaaguu

SEQ ID NO: 1378111 - RNA, 19 nt, Artificial Sequence
  Description of Artificial Sequence: Synthetic oligonucleotide
  Antisense strand to SEQ ID NO: 1378110
aacuucauaucauuuccgg

SEQ ID NO: 1378112 - RNA, 19 nt, Artificial Sequence
  Description of Artificial Sequence: Synthetic oligonucleotide
  Sense strand starting at position 81 of SEQ ID NO: 1242862
aggacucuuugcccagaga

SEQ ID NO: 1378113 - RNA, 19 nt, Artificial Sequence
  Description of Artificial Sequence: Synthetic oligonucleotide
  Antisense strand to SEQ ID NO: 1378112
ucucugggcaaagaguccu

SEQ ID NO: 1378114 - RNA, 19 nt, Artificial Sequence
  Description of Artificial Sequence: Synthetic oligonucleotide
  Sense strand starting at position 82 of SEQ ID NO: 1242862
ggacucuuugcccagagau

SEQ ID NO: 1378115 - RNA, 19 nt, Artificial Sequence
  Description of Artificial Sequence: Synthetic oligonucleotide
  Antisense strand to SEQ ID NO: 1378114
aucucugggcaaagagucc

SEQ ID NO: 1378116 - RNA, 19 nt, Artificial Sequence
  Description of Artificial Sequence: Synthetic oligonucleotide
  Sense strand starting at position 84 of SEQ ID NO: 1242862
acucuuugcccagagauac

SEQ ID NO: 1378117 - RNA, 19 nt, Artificial Sequence
  Description of Artificial Sequence: Synthetic oligonucleotide
  Antisense strand to SEQ ID NO: 1378116
guaucucugggcaaagagu

SEQ ID NO: 1378118 - RNA, 19 nt, Artificial Sequence
  Description of Artificial Sequence: Synthetic oligonucleotide
  Sense strand starting at position 94 of SEQ ID NO: 1242862
cagagauacuucuugcuug

SEQ ID NO: 1378119 - RNA, 19 nt, Artificial Sequence
  Description of Artificial Sequence: Synthetic oligonucleotide
  Antisense strand to SEQ ID NO: 1378118
caagcaagaaguaucucug

SEQ ID NO: 1378120 - RNA, 19 nt, Artificial Sequence
  Description of Artificial Sequence: Synthetic oligonucleotide
  Sense strand starting at position 101 of SEQ ID NO: 1242862
acuucuugcuugcccagaa

SEQ ID NO: 1378121 - RNA, 19 nt, Artificial Sequence
  Description of Artificial Sequence: Synthetic oligonucleotide
  Antisense strand to SEQ ID NO: 1378120
uucugggcaagcaagaagu

SEQ ID NO: 1378122 - RNA, 19 nt, Artificial Sequence
  Description of Artificial Sequence: Synthetic oligonucleotide
  Sense strand starting at position 105 of SEQ ID NO: 1242862
cuugcuugcccagaacuga

SEQ ID NO: 1378123 - RNA, 19 nt, Artificial Sequence
  Description of Artificial Sequence: Synthetic oligonucleotide
  Antisense strand to SEQ ID NO: 1378122
ucaguucugggcaagcaag

SEQ ID NO: 1378124 - RNA, 19 nt, Artificial Sequence
  Description of Artificial Sequence: Synthetic oligonucleotide
  Sense strand starting at position 118 of SEQ ID NO: 1242862
aacugacuugggugucaua

SEQ ID NO: 1378125 - RNA, 19 nt, Artificial Sequence
  Description of Artificial Sequence: Synthetic oligonucleotide
  Antisense strand to SEQ ID NO: 1378124
uaugacacccaagucaguu

SEQ ID NO: 1378126 - RNA, 19 nt, Artificial Sequence
  Description of Artificial Sequence: Synthetic oligonucleotide
  Sense strand starting at position 127 of SEQ ID NO: 1242862
gggugucauaauuaguuaa

SEQ ID NO: 1378127 - RNA, 19 nt, Artificial Sequence
  Description of Artificial Sequence: Synthetic oligonucleotide
  Antisense strand to SEQ ID NO: 1378126
uuaacuaauuaugacaccc

SEQ ID NO: 1378128 - RNA, 19 nt, Artificial Sequence
  Description of Artificial Sequence: Synthetic oligonucleotide
  Sense strand starting at position 129 of SEQ ID NO: 1242862
gugucauaauuaguuaagu

SEQ ID NO: 1378129 - RNA, 19 nt, Artificial Sequence
  Description of Artificial Sequence: Synthetic oligonucleotide
  Antisense strand to SEQ ID NO: 1378128
acuuaacuaauuaugacac

SEQ ID NO: 1378130 - RNA, 19 nt, Artificial Sequence
  Description of Artificial Sequence: Synthetic oligonucleotide
  Sense strand starting at position 360 of SEQ ID NO: 1242862
uuaacaacucgauggaauu

SEQ ID NO: 1378131 - RNA, 19 nt, Artificial Sequence
  Description of Artificial Sequence: Synthetic oligonucleotide
  Antisense strand to SEQ ID NO: 1378130
aauuccaucgaguuguuaa

SEQ ID NO: 1378132 - RNA, 19 nt, Artificial Sequence
  Description of Artificial Sequence: Synthetic oligonucleotide
  Sense strand starting at position 909 of SEQ ID NO: 1242862
auggaaacauucuagauaa

SEQ ID NO: 1378133 - RNA, 19 nt, Artificial Sequence
  Description of Artificial Sequence: Synthetic oligonucleotide
  Antisense strand to SEQ ID NO: 1378132
uuaucuagaauguuuccau

SEQ ID NO: 1378134 - RNA, 19 nt, Artificial Sequence
  Description of Artificial Sequence: Synthetic oligonucleotide
  Sense strand starting at position 920 of SEQ ID NO: 1242862
cuagauaaguuguuaacca

SEQ ID NO: 1378135 - RNA, 19 nt, Artificial Sequence
  Description of Artificial Sequence: Synthetic oligonucleotide
  Antisense strand to SEQ ID NO: 1378134
ugguuaacaacuuaucuag

SEQ ID NO: 1378136 - RNA, 19 nt, Artificial Sequence
  Description of Artificial Sequence: Synthetic oligonucleotide
  Sense strand starting at position 1088 of SEQ ID NO: 1242862
gcauuuacacuuugccaga

SEQ ID NO: 1378137 - RNA, 19 nt, Artificial Sequence
  Description of Artificial Sequence: Synthetic oligonucleotide
  Antisense strand to SEQ ID NO: 1378136
ucuggcaaaguguaaaugc

SEQ ID NO: 1378138 - RNA, 19 nt, Artificial Sequence
  Description of Artificial Sequence: Synthetic oligonucleotide
  Sense strand starting at position 1147 of SEQ ID NO: 1242862
agcgauuaaugucccaaca

SEQ ID NO: 1378139 - RNA, 19 nt, Artificial Sequence
  Description of Artificial Sequence: Synthetic oligonucleotide
  Antisense strand to SEQ ID NO: 1378138
uguugggacauuaaucgcu

SEQ ID NO: 1378140 - RNA, 19 nt, Artificial Sequence
  Description of Artificial Sequence: Synthetic oligonucleotide
  Sense strand starting at position 1197 of SEQ ID NO: 1242862
aagggaaacucugucgaau

SEQ ID NO: 1378141 - RNA, 19 nt, Artificial Sequence
  Description of Artificial Sequence: Synthetic oligonucleotide
  Antisense strand to SEQ ID NO: 1378140
auucgacagaguuucccuu

SEQ ID NO: 1378142 - RNA, 19 nt, Artificial Sequence
  Description of Artificial Sequence: Synthetic oligonucleotide
  Sense strand starting at position 1275 of SEQ ID NO: 1242862
uauaacucgucgccuuaaa

SEQ ID NO: 1378143 - RNA, 19 nt, Artificial Sequence
  Description of Artificial Sequence: Synthetic oligonucleotide
  Antisense strand to SEQ ID NO: 1378142
uuuaaggcgacgaguuaua

SEQ ID NO: 1378144 - RNA, 19 nt, Artificial Sequence
  Description of Artificial Sequence: Synthetic oligonucleotide
  Sense strand starting at position 1318 of SEQ ID NO: 1242862
guuaaagucgcugcuacua

SEQ ID NO: 1378145 - RNA, 19 nt, Artificial Sequence
  Description of Artificial Sequence: Synthetic oligonucleotide
  Antisense strand to SEQ ID NO: 1378144
uaguagcagcgacuuuaac

SEQ ID NO: 1378146 - RNA, 19 nt, Artificial Sequence
  Description of Artificial Sequence: Synthetic oligonucleotide
  Sense strand starting at position 2785 of SEQ ID NO: 1242862
gguugaugggccugaauag

SEQ ID NO: 1378147 - RNA, 19 nt, Artificial Sequence
  Description of Artificial Sequence: Synthetic oligonucleotide
  Antisense strand to SEQ ID NO: 1378146
cuauucaggcccaucaacc

SEQ ID NO: 1378148 - RNA, 19 nt, Artificial Sequence
  Description of Artificial Sequence: Synthetic oligonucleotide
  Sense strand starting at position 2786 of SEQ ID NO: 1242862
guugaugggccugaauaga

SEQ ID NO: 1378149 - RNA, 19 nt, Artificial Sequence
  Description of Artificial Sequence: Synthetic oligonucleotide
  Antisense strand to SEQ ID NO: 1378148
ucuauucaggcccaucaac

SEQ ID NO: 1378150 - RNA, 19 nt, Artificial Sequence
  Description of Artificial Sequence: Synthetic oligonucleotide
  Sense strand starting at position 2878 of SEQ ID NO: 1242862
uuggcagccuucuccaauu

SEQ ID NO: 1378151 - RNA, 19 nt, Artificial Sequence
  Description of Artificial Sequence: Synthetic oligonucleotide
  Antisense strand to SEQ ID NO: 1378150
aauuggagaaggcugccaa

SEQ ID NO: 1378152 - RNA, 19 nt, Artificial Sequence
  Description of Artificial Sequence: Synthetic oligonucleotide
  Sense strand starting at position 2937 of SEQ ID NO: 1242862
cacucaguugaaugugaug

SEQ ID NO: 1378153 - RNA, 19 nt, Artificial Sequence
  Description of Artificial Sequence: Synthetic oligonucleotide
  Antisense strand to SEQ ID NO: 1378152
caucacauucaacugagug

SEQ ID NO: 1378154 - RNA, 19 nt, Artificial Sequence
  Description of Artificial Sequence: Synthetic oligonucleotide
  Sense strand starting at position 3021 of SEQ ID NO: 1242862
gcagcacagugcuuuaaug

SEQ ID NO: 1378155 - RNA, 19 nt, Artificial Sequence
  Description of Artificial Sequence: Synthetic oligonucleotide
  Antisense strand to SEQ ID NO: 1378154
cauuaaagcacugugcugc

SEQ ID NO: 1378156 - RNA, 19 nt, Artificial Sequence
  Description of Artificial Sequence: Synthetic oligonucleotide
  Sense strand starting at position 3023 of SEQ ID NO: 1242862
agcacagugcuuuaaugau

SEQ ID NO: 1378157 - RNA, 19 nt, Artificial Sequence
  Description of Artificial Sequence: Synthetic oligonucleotide
  Antisense strand to SEQ ID NO: 1378156
aucauuaaagcacugugcu

SEQ ID NO: 1378158 - RNA, 19 nt, Artificial Sequence
  Description of Artificial Sequence: Synthetic oligonucleotide
  Sense strand starting at position 3029 of SEQ ID NO: 1242862
gugcuuuaaugaucucuag

SEQ ID NO: 1378159 - RNA, 19 nt, Artificial Sequence
  Description of Artificial Sequence: Synthetic oligonucleotide
  Antisense strand to SEQ ID NO: 1378158
cuagagaucauuaaagcac

SEQ ID NO: 1378160 - RNA, 19 nt, Artificial Sequence
  Description of Artificial Sequence: Synthetic oligonucleotide
  Sense strand starting at position 3055 of SEQ ID NO: 1242862
agagucaccuuguuagcau

SEQ ID NO: 1378161 - RNA, 19 nt, Artificial Sequence
  Description of Artificial Sequence: Synthetic oligonucleotide
  Antisense strand to SEQ ID NO: 1378160
augcuaacaaggugacucu

SEQ ID NO: 1378162 - RNA, 19 nt, Artificial Sequence
  Description of Artificial Sequence: Synthetic oligonucleotide
  Sense strand starting at position 3421 of SEQ ID NO: 1242862
accugaagcgcguauauau

SEQ ID NO: 1378163 - RNA, 19 nt, Artificial Sequence
  Description of Artificial Sequence: Synthetic oligonucleotide
  Antisense strand to SEQ ID NO: 1378162
auauauacgcgcuucaggu

SEQ ID NO: 1378164 - RNA, 19 nt, Artificial Sequence
  Description of Artificial Sequence: Synthetic oligonucleotide
  Sense strand starting at position 3444 of SEQ ID NO: 1242862
gcaguugauuuauaaugaa

SEQ ID NO: 1378165 - RNA, 19 nt, Artificial Sequence
  Description of Artificial Sequence: Synthetic oligonucleotide
  Antisense strand to SEQ ID NO: 1378164
uucauuauaaaucaacugc

SEQ ID NO: 1378166 - RNA, 19 nt, Artificial Sequence
  Description of Artificial Sequence: Synthetic oligonucleotide
  Sense strand starting at position 3447 of SEQ ID NO: 1242862
guugauuuauaaugaagcu

SEQ ID NO: 1378167 - RNA, 19 nt, Artificial Sequence
  Description of Artificial Sequence: Synthetic oligonucleotide
  Antisense strand to SEQ ID NO: 1378166
agcuucauuauaaaucaac

SEQ ID NO: 1378168 - RNA, 19 nt, Artificial Sequence
  Description of Artificial Sequence: Synthetic oligonucleotide
  Sense strand starting at position 3522 of SEQ ID NO: 1242862
cagagacagugauaaagaa

SEQ ID NO: 1378169 - RNA, 19 nt, Artificial Sequence
  Description of Artificial Sequence: Synthetic oligonucleotide
  Antisense strand to SEQ ID NO: 1378168
uucuuuaucacugucucug

SEQ ID NO: 1378170 - RNA, 19 nt, Artificial Sequence
  Description of Artificial Sequence: Synthetic oligonucleotide
  Sense strand starting at position 3603 of SEQ ID NO: 1242862
agacuaauuccuugcuguu

SEQ ID NO: 1378171 - RNA, 19 nt, Artificial Sequence
  Description of Artificial Sequence: Synthetic oligonucleotide
  Antisense strand to SEQ ID NO: 1378170
aacagcaaggaauuagucu

SEQ ID NO: 1378172 - RNA, 19 nt, Artificial Sequence
  Description of Artificial Sequence: Synthetic oligonucleotide
  Sense strand starting at position 3721 of SEQ ID NO: 1242862
uguguacgagcucauggua

SEQ ID NO: 1378173 - RNA, 19 nt, Artificial Sequence
  Description of Artificial Sequence: Synthetic oligonucleotide
  Antisense strand to SEQ ID NO: 1378172
uaccaugagcucguacaca

SEQ ID NO: 1378174 - RNA, 19 nt, Artificial Sequence
  Description of Artificial Sequence: Synthetic oligonucleotide
  Sense strand starting at position 3724 of SEQ ID NO: 1242862
guacgagcucaugguaagu

SEQ ID NO: 1378175 - RNA, 19 nt, Artificial Sequence
  Description of Artificial Sequence: Synthetic oligonucleotide
  Antisense strand to SEQ ID NO: 1378174
acuuaccaugagcucguac

SEQ ID NO: 1378176 - RNA, 19 nt, Artificial Sequence
  Description of Artificial Sequence: Synthetic oligonucleotide
  Sense strand starting at position 3730 of SEQ ID NO: 1242862
gcucaugguaagugugacu

SEQ ID NO: 1378177 - RNA, 19 nt, Artificial Sequence
  Description of Artificial Sequence: Synthetic oligonucleotide
  Antisense strand to SEQ ID NO: 1378176
agucacacuuaccaugagc

SEQ ID NO: 1378178 - RNA, 19 nt, Artificial Sequence
  Description of Artificial Sequence: Synthetic oligonucleotide
  Sense strand starting at position 3855 of SEQ ID NO: 1242862
gggagauauaaauguucuc

SEQ ID NO: 1378179 - RNA, 19 nt, Artificial Sequence
  Description of Artificial Sequence: Synthetic oligonucleotide
  Antisense strand to SEQ ID NO: 1378178
gagaacauuuauaucuccc

SEQ ID NO: 1378180 - RNA, 19 nt, Artificial Sequence
  Description of Artificial Sequence: Synthetic oligonucleotide
  Sense strand starting at position 3922 of SEQ ID NO: 1242862
ucuucuggaucuuugguua

SEQ ID NO: 1378181 - RNA, 19 nt, Artificial Sequence
  Description of Artificial Sequence: Synthetic oligonucleotide
  Antisense strand to SEQ ID NO: 1378180
uaaccaaagauccagaaga

SEQ ID NO: 1378182 - RNA, 19 nt, Artificial Sequence
  Description of Artificial Sequence: Synthetic oligonucleotide
  Sense strand starting at position 3925 of SEQ ID NO: 1242862
ucuggaucuuugguuauac

SEQ ID NO: 1378183 - RNA, 19 nt, Artificial Sequence
  Description of Artificial Sequence: Synthetic oligonucleotide
  Antisense strand to SEQ ID NO: 1378182
guauaaccaaagauccaga

SEQ ID NO: 1378184 - RNA, 19 nt, Artificial Sequence
  Description of Artificial Sequence: Synthetic oligonucleotide
  Sense strand starting at position 3926 of SEQ ID NO: 1242862
cuggaucuuugguuauacu

SEQ ID NO: 1378185 - RNA, 19 nt, Artificial Sequence
  Description of Artificial Sequence: Synthetic oligonucleotide
  Antisense strand to SEQ ID NO: 1378184
aguauaaccaaagauccag

SEQ ID NO: 1378186 - RNA, 19 nt, Artificial Sequence
  Description of Artificial Sequence: Synthetic oligonucleotide
  Sense strand starting at position 82 of SEQ ID NO: 1242863
gagagugagcgguaccaca

SEQ ID NO: 1378187 - RNA, 19 nt, Artificial Sequence
  Description of Artificial Sequence: Synthetic oligonucleotide
  Antisense strand to SEQ ID NO: 1378186
ugugguaccgcucacucuc

SEQ ID NO: 1378188 - RNA, 19 nt, Artificial Sequence
  Description of Artificial Sequence: Synthetic oligonucleotide
  Sense strand starting at position 178 of SEQ ID NO: 1242863
gggccagagaucugaagau

SEQ ID NO: 1378189 - RNA, 19 nt, Artificial Sequence
  Description of Artificial Sequence: Synthetic oligonucleotide
  Antisense strand to SEQ ID NO: 1378188
aucuucagaucucuggccc

SEQ ID NO: 1378190 - RNA, 19 nt, Artificial Sequence
  Description of Artificial Sequence: Synthetic oligonucleotide
  Sense strand starting at position 400 of SEQ ID NO: 1242863
gggcacaugucaguuccau

SEQ ID NO: 1378191 - RNA, 19 nt, Artificial Sequence
  Description of Artificial Sequence: Synthetic oligonucleotide
  Antisense strand to SEQ ID NO: 1378190
auggaacugacaugugccc

SEQ ID NO: 1378192 - RNA, 19 nt, Artificial Sequence
  Description of Artificial Sequence: Synthetic oligonucleotide
  Sense strand starting at position 489 of SEQ ID NO: 1242863
agacacugauccugggaca

SEQ ID NO: 1378193 - RNA, 19 nt, Artificial Sequence
  Description of Artificial Sequence: Synthetic oligonucleotide
  Antisense strand to SEQ ID NO: 1378192
ugucccaggaucagugucu

SEQ ID NO: 1378194 - RNA, 19 nt, Artificial Sequence
  Description of Artificial Sequence: Synthetic oligonucleotide
  Sense strand starting at position 590 of SEQ ID NO: 1242863
caggcugucugcugucaga

SEQ ID NO: 1378195 - RNA, 19 nt, Artificial Sequence
  Description of Artificial Sequence: Synthetic oligonucleotide
  Antisense strand to SEQ ID NO: 1378194
ucugacagcagacagccug

SEQ ID NO: 1378196 - RNA, 19 nt, Artificial Sequence
  Description of Artificial Sequence: Synthetic oligonucleotide
  Sense strand starting at position 593 of SEQ ID NO: 1242863
gcugucugcugucagagga

SEQ ID NO: 1378197 - RNA, 19 nt, Artificial Sequence
  Description of Artificial Sequence: Synthetic oligonucleotide
  Antisense strand to SEQ ID NO: 1378196
uccucugacagcagacagc

SEQ ID NO: 1378198 - RNA, 19 nt, Artificial Sequence
  Description of Artificial Sequence: Synthetic oligonucleotide
  Sense strand starting at position 645 of SEQ ID NO: 1242863
uccugacacuucucaggau

SEQ ID NO: 1378199 - RNA, 19 nt, Artificial Sequence
  Description of Artificial Sequence: Synthetic oligonucleotide
  Antisense strand to SEQ ID NO: 1378198
auccugagaagugucagga

SEQ ID NO: 1378200 - RNA, 19 nt, Artificial Sequence
  Description of Artificial Sequence: Synthetic oligonucleotide
  Sense strand starting at position 698 of SEQ ID NO: 1242863
aggagcuuucuccaucuca

SEQ ID NO: 1378201 - RNA, 19 nt, Artificial Sequence
  Description of Artificial Sequence: Synthetic oligonucleotide
  Antisense strand to SEQ ID NO: 1378200
ugagauggagaaagcuccu

SEQ ID NO: 1378202 - RNA, 19 nt, Artificial Sequence
  Description of Artificial Sequence: Synthetic oligonucleotide
  Sense strand starting at position 733 of SEQ ID NO: 1242863
ggcuuuggaucagagagga

SEQ ID NO: 1378203 - RNA, 19 nt, Artificial Sequence
  Description of Artificial Sequence: Synthetic oligonucleotide
  Antisense strand to SEQ ID NO: 1378202
uccucucugauccaaagcc

SEQ ID NO: 1378204 - RNA, 19 nt, Artificial Sequence
  Description of Artificial Sequence: Synthetic oligonucleotide
  Sense strand starting at position 1251 of SEQ ID NO: 1242863
guucuccauccuugcuuua

SEQ ID NO: 1378205 - RNA, 19 nt, Artificial Sequence
  Description of Artificial Sequence: Synthetic oligonucleotide
  Antisense strand to SEQ ID NO: 1378204
uaaagcaaggauggagaac

SEQ ID NO: 1378206 - RNA, 19 nt, Artificial Sequence
  Description of Artificial Sequence: Synthetic oligonucleotide
  Sense strand starting at position 1264 of SEQ ID NO: 1242863
gcuuuacccauccgcgaga

SEQ ID NO: 1378207 - RNA, 19 nt, Artificial Sequence
  Description of Artificial Sequence: Synthetic oligonucleotide
  Antisense strand to SEQ ID NO: 1378206
ucucgcggauggguaaagc

SEQ ID NO: 1378208 - RNA, 19 nt, Artificial Sequence
  Description of Artificial Sequence: Synthetic oligonucleotide
  Sense strand starting at position 1323 of SEQ ID NO: 1242863
ggcugaaaucauggaagca

SEQ ID NO: 1378209 - RNA, 19 nt, Artificial Sequence
  Description of Artificial Sequence: Synthetic oligonucleotide
  Antisense strand to SEQ ID NO: 1378208
ugcuuccaugauuucagcc

SEQ ID NO: 1378210 - RNA, 19 nt, Artificial Sequence
  Description of Artificial Sequence: Synthetic oligonucleotide
  Sense strand starting at position 2863 of SEQ ID NO: 1242863
gggccaugauuaucgcaga

SEQ ID NO: 1378211 - RNA, 19 nt, Artificial Sequence
  Description of Artificial Sequence: Synthetic oligonucleotide
  Antisense strand to SEQ ID NO: 1378210
ucugcgauaaucauggccc

SEQ ID NO: 1378212 - RNA, 19 nt, Artificial Sequence
  Description of Artificial Sequence: Synthetic oligonucleotide
  Sense strand starting at position 2864 of SEQ ID NO: 1242863
ggccaugauuaucgcagaa

SEQ ID NO: 1378213 - RNA, 19 nt, Artificial Sequence
  Description of Artificial Sequence: Synthetic oligonucleotide
  Antisense strand to SEQ ID NO: 1378212
uucugcgauaaucauggcc

SEQ ID NO: 1378214 - RNA, 19 nt, Artificial Sequence
  Description of Artificial Sequence: Synthetic oligonucleotide
  Sense strand starting at position 2866 of SEQ ID NO: 1242863
ccaugauuaucgcagaacg

SEQ ID NO: 1378215 - RNA, 19 nt, Artificial Sequence
  Description of Artificial Sequence: Synthetic oligonucleotide
  Antisense strand to SEQ ID NO: 1378214
cguucugcgauaaucaugg

SEQ ID NO: 1378216 - RNA, 19 nt, Artificial Sequence
  Description of Artificial Sequence: Synthetic oligonucleotide
  Sense strand starting at position 2868 of SEQ ID NO: 1242863
augauuaucgcagaacgac

SEQ ID NO: 1378217 - RNA, 19 nt, Artificial Sequence
  Description of Artificial Sequence: Synthetic oligonucleotide
  Antisense strand to SEQ ID NO: 1378216
gucguucugcgauaaucau

SEQ ID NO: 1378218 - RNA, 19 nt, Artificial Sequence
  Description of Artificial Sequence: Synthetic oligonucleotide
  Sense strand starting at position 2921 of SEQ ID NO: 1242863
gcugaaugugcagaggaua

SEQ ID NO: 1378219 - RNA, 19 nt, Artificial Sequence
  Description of Artificial Sequence: Synthetic oligonucleotide
  Antisense strand to SEQ ID NO: 1378218
uauccucugcacauucagc

SEQ ID NO: 1378220 - RNA, 19 nt, Artificial Sequence
  Description of Artificial Sequence: Synthetic oligonucleotide
  Sense strand starting at position 3069 of SEQ ID NO: 1242863
agaaaccgucuuugcguua

SEQ ID NO: 1378221 - RNA, 19 nt, Artificial Sequence
  Description of Artificial Sequence: Synthetic oligonucleotide
  Antisense strand to SEQ ID NO: 1378220
uaacgcaaagacgguuucu

SEQ ID NO: 1378222 - RNA, 19 nt, Artificial Sequence
  Description of Artificial Sequence: Synthetic oligonucleotide
  Sense strand starting at position 3128 of SEQ ID NO: 1242863
cgacguguucugagggucu

SEQ ID NO: 1378223 - RNA, 19 nt, Artificial Sequence
  Description of Artificial Sequence: Synthetic oligonucleotide
  Antisense strand to SEQ ID NO: 1378222
agacccucagaacacgucg

SEQ ID NO: 1378224 - RNA, 19 nt, Artificial Sequence
  Description of Artificial Sequence: Synthetic oligonucleotide
  Sense strand starting at position 3294 of SEQ ID NO: 1242863
cccggcagaagcuaugaaa

SEQ ID NO: 1378225 - RNA, 19 nt, Artificial Sequence
  Description of Artificial Sequence: Synthetic oligonucleotide
  Antisense strand to SEQ ID NO: 1378224
uuucauagcuucugccggg

SEQ ID NO: 1378226 - RNA, 19 nt, Artificial Sequence
  Description of Artificial Sequence: Synthetic oligonucleotide
  Sense strand starting at position 3353 of SEQ ID NO: 1242863
uugcgcucugucuuuagga

SEQ ID NO: 1378227 - RNA, 19 nt, Artificial Sequence
  Description of Artificial Sequence: Synthetic oligonucleotide
  Antisense strand to SEQ ID NO: 1378226
uccuaaagacagagcgcaa

SEQ ID NO: 1378228 - RNA, 19 nt, Artificial Sequence
  Description of Artificial Sequence: Synthetic oligonucleotide
  Sense strand starting at position 175 of SEQ ID NO: 1242864
ggcuguagucuuggcauuu

SEQ ID NO: 1378229 - RNA, 19 nt, Artificial Sequence
  Description of Artificial Sequence: Synthetic oligonucleotide
  Antisense strand to SEQ ID NO: 1378228
aaaugccaagacuacagcc

SEQ ID NO: 1378230 - RNA, 19 nt, Artificial Sequence
  Description of Artificial Sequence: Synthetic oligonucleotide
  Sense strand starting at position 265 of SEQ ID NO: 1242864
agggcaucuccagguggaa

SEQ ID NO: 1378231 - RNA, 19 nt, Artificial Sequence
  Description of Artificial Sequence: Synthetic oligonucleotide
  Antisense strand to SEQ ID NO: 1378230
uuccaccuggagaugcccu

SEQ ID NO: 1378232 - RNA, 19 nt, Artificial Sequence
  Description of Artificial Sequence: Synthetic oligonucleotide
  Sense strand starting at position 319 of SEQ ID NO: 1242864
aggucuaguucuuugcauu

SEQ ID NO: 1378233 - RNA, 19 nt, Artificial Sequence
  Description of Artificial Sequence: Synthetic oligonucleotide
  Antisense strand to SEQ ID NO: 1378232
aaugcaaagaacuagaccu

SEQ ID NO: 1378234 - RNA, 19 nt, Artificial Sequence
  Description of Artificial Sequence: Synthetic oligonucleotide
  Sense strand starting at position 320 of SEQ ID NO: 1242864
ggucuaguucuuugcauuu

SEQ ID NO: 1378235 - RNA, 19 nt, Artificial Sequence
  Description of Artificial Sequence: Synthetic oligonucleotide
  Antisense strand to SEQ ID NO: 1378234
aaaugcaaagaacuagacc

SEQ ID NO: 1378236 - RNA, 19 nt, Artificial Sequence
  Description of Artificial Sequence: Synthetic oligonucleotide
  Sense strand starting at position 344 of SEQ ID NO: 1242864
cucaguggccuugagcaaa

SEQ ID NO: 1378237 - RNA, 19 nt, Artificial Sequence
  Description of Artificial Sequence: Synthetic oligonucleotide
  Antisense strand to SEQ ID NO: 1378236
uuugcucaaggccacugag

SEQ ID NO: 1378238 - RNA, 19 nt, Artificial Sequence
  Description of Artificial Sequence: Synthetic oligonucleotide
  Sense strand starting at position 364 of SEQ ID NO: 1242864
cgacuuagaucucuagccu

SEQ ID NO: 1378239 - RNA, 19 nt, Artificial Sequence
  Description of Artificial Sequence: Synthetic oligonucleotide
  Antisense strand to SEQ ID NO: 1378238
aggcuagagaucuaagucg

SEQ ID NO: 1378240 - RNA, 19 nt, Artificial Sequence
  Description of Artificial Sequence: Synthetic oligonucleotide
  Sense strand starting at position 368 of SEQ ID NO: 1242864
uuagaucucuagccuguuu

SEQ ID NO: 1378241 - RNA, 19 nt, Artificial Sequence
  Description of Artificial Sequence: Synthetic oligonucleotide
  Antisense strand to SEQ ID NO: 1378240
aaacaggcuagagaucuaa

SEQ ID NO: 1378242 - RNA, 19 nt, Artificial Sequence
  Description of Artificial Sequence: Synthetic oligonucleotide
  Sense strand starting at position 549 of SEQ ID NO: 1242864
ccucguccucuuuaagcuu

SEQ ID NO: 1378243 - RNA, 19 nt, Artificial Sequence
  Description of Artificial Sequence: Synthetic oligonucleotide
  Antisense strand to SEQ ID NO: 1378242
aagcuuaaagaggacgagg

SEQ ID NO: 1378244 - RNA, 19 nt, Artificial Sequence
  Description of Artificial Sequence: Synthetic oligonucleotide
  Sense strand starting at position 579 of SEQ ID NO: 1242864
ggccgaauuccaggaagag

SEQ ID NO: 1378245 - RNA, 19 nt, Artificial Sequence
  Description of Artificial Sequence: Synthetic oligonucleotide
  Antisense strand to SEQ ID NO: 1378244
cucuuccuggaauucggcc

SEQ ID NO: 1378246 - RNA, 19 nt, Artificial Sequence
  Description of Artificial Sequence: Synthetic oligonucleotide
  Sense strand starting at position 591 of SEQ ID NO: 1242864
ggaagaggugcccagcaau

SEQ ID NO: 1378247 - RNA, 19 nt, Artificial Sequence
  Description of Artificial Sequence: Synthetic oligonucleotide
  Antisense strand to SEQ ID NO: 1378246
auugcugggcaccucuucc

SEQ ID NO: 1378248 - RNA, 19 nt, Artificial Sequence
  Description of Artificial Sequence: Synthetic oligonucleotide
  Sense strand starting at position 594 of SEQ ID NO: 1242864
agaggugcccagcaauaau

SEQ ID NO: 1378249 - RNA, 19 nt, Artificial Sequence
  Description of Artificial Sequence: Synthetic oligonucleotide
  Antisense strand to SEQ ID NO: 1378248
auuauugcugggcaccucu

SEQ ID NO: 1378250 - RNA, 19 nt, Artificial Sequence
  Description of Artificial Sequence: Synthetic oligonucleotide
  Sense strand starting at position 606 of SEQ ID NO: 1242864
caauaaugugucgguucuu

SEQ ID NO: 1378251 - RNA, 19 nt, Artificial Sequence
  Description of Artificial Sequence: Synthetic oligonucleotide
  Antisense strand to SEQ ID NO: 1378250
aagaaccgacacauuauug

SEQ ID NO: 1378252 - RNA, 19 nt, Artificial Sequence
  Description of Artificial Sequence: Synthetic oligonucleotide
  Sense strand starting at position 607 of SEQ ID NO: 1242864
aauaaugugucgguucuua

SEQ ID NO: 1378253 - RNA, 19 nt, Artificial Sequence
  Description of Artificial Sequence: Synthetic oligonucleotide
  Antisense strand to SEQ ID NO: 1378252
uaagaaccgacacauuauu

SEQ ID NO: 1378254 - RNA, 19 nt, Artificial Sequence
  Description of Artificial Sequence: Synthetic oligonucleotide
  Sense strand starting at position 611 of SEQ ID NO: 1242864
augugucgguucuuagauu

SEQ ID NO: 1378255 - RNA, 19 nt, Artificial Sequence
  Description of Artificial Sequence: Synthetic oligonucleotide
  Antisense strand to SEQ ID NO: 1378254
aaucuaagaaccgacacau

SEQ ID NO: 1378256 - RNA, 19 nt, Artificial Sequence
  Description of Artificial Sequence: Synthetic oligonucleotide
  Sense strand starting at position 727 of SEQ ID NO: 1242864
cgaugauaagcauacaacu

SEQ ID NO: 1378257 - RNA, 19 nt, Artificial Sequence
  Description of Artificial Sequence: Synthetic oligonucleotide
  Antisense strand to SEQ ID NO: 1378256
aguuguaugcuuaucaucg

SEQ ID NO: 1378258 - RNA, 19 nt, Artificial Sequence
  Description of Artificial Sequence: Synthetic oligonucleotide
  Sense strand starting at position 764 of SEQ ID NO: 1242864
ucacgauacuguguaacca

SEQ ID NO: 1378259 - RNA, 19 nt, Artificial Sequence
  Description of Artificial Sequence: Synthetic oligonucleotide
  Antisense strand to SEQ ID NO: 1378258
ugguuacacaguaucguga

SEQ ID NO: 1378260 - RNA, 19 nt, Artificial Sequence
  Description of Artificial Sequence: Synthetic oligonucleotide
  Sense strand starting at position 765 of SEQ ID NO: 1242864
cacgauacuguguaaccau

SEQ ID NO: 1378261 - RNA, 19 nt, Artificial Sequence
  Description of Artificial Sequence: Synthetic oligonucleotide
  Antisense strand to SEQ ID NO: 1378260
augguuacacaguaucgug

SEQ ID NO: 1378262 - RNA, 19 nt, Artificial Sequence
  Description of Artificial Sequence: Synthetic oligonucleotide
  Sense strand starting at position 772 of SEQ ID NO: 1242864
cuguguaaccauugccacu

SEQ ID NO: 1378263 - RNA, 19 nt, Artificial Sequence
  Description of Artificial Sequence: Synthetic oligonucleotide
  Antisense strand to SEQ ID NO: 1378262
aguggcaaugguuacacag

SEQ ID NO: 1378264 - RNA, 19 nt, Artificial Sequence
  Description of Artificial Sequence: Synthetic oligonucleotide
  Sense strand starting at position 1005 of SEQ ID NO: 1242864
gcugaauuauaagaucaag

SEQ ID NO: 1378265 - RNA, 19 nt, Artificial Sequence
  Description of Artificial Sequence: Synthetic oligonucleotide
  Antisense strand to SEQ ID NO: 1378264
cuugaucuuauaauucagc

SEQ ID NO: 1378266 - RNA, 19 nt, Artificial Sequence
  Description of Artificial Sequence: Synthetic oligonucleotide
  Sense strand starting at position 1191 of SEQ ID NO: 1242864
gugcucagaucucuggauu

SEQ ID NO: 1378267 - RNA, 19 nt, Artificial Sequence
  Description of Artificial Sequence: Synthetic oligonucleotide
  Antisense strand to SEQ ID NO: 1378266
aauccagagaucugagcac

SEQ ID NO: 1378268 - RNA, 19 nt, Artificial Sequence
  Description of Artificial Sequence: Synthetic oligonucleotide
  Sense strand starting at position 1271 of SEQ ID NO: 1242864
ugcggucucgccucuuuaa

SEQ ID NO: 1378269 - RNA, 19 nt, Artificial Sequence
  Description of Artificial Sequence: Synthetic oligonucleotide
  Antisense strand to SEQ ID NO: 1378268
uuaaagaggcgagaccgca

SEQ ID NO: 1378270 - RNA, 19 nt, Artificial Sequence
  Description of Artificial Sequence: Synthetic oligonucleotide
  Sense strand starting at position 1272 of SEQ ID NO: 1242864
gcggucucgccucuuuaaa

SEQ ID NO: 1378271 - RNA, 19 nt, Artificial Sequence
  Description of Artificial Sequence: Synthetic oligonucleotide
  Antisense strand to SEQ ID NO: 1378270
uuuaaagaggcgagaccgc

SEQ ID NO: 1378272 - RNA, 19 nt, Artificial Sequence
  Description of Artificial Sequence: Synthetic oligonucleotide
  Sense strand starting at position 1307 of SEQ ID NO: 1242864
uagaguuggcagggagaga

SEQ ID NO: 1378273 - RNA, 19 nt, Artificial Sequence
  Description of Artificial Sequence: Synthetic oligonucleotide
  Antisense strand to SEQ ID NO: 1378272
ucucucccugccaacucua

SEQ ID NO: 1378274 - RNA, 19 nt, Artificial Sequence
  Description of Artificial Sequence: Synthetic oligonucleotide
  Sense strand starting at position 2328 of SEQ ID NO: 1242864
cgggcucccugcucuagaa

SEQ ID NO: 1378275 - RNA, 19 nt, Artificial Sequence
  Description of Artificial Sequence: Synthetic oligonucleotide
  Antisense strand to SEQ ID NO: 1378274
uucuagagcagggagcccg

SEQ ID NO: 1378276 - RNA, 19 nt, Artificial Sequence
  Description of Artificial Sequence: Synthetic oligonucleotide
  Sense strand starting at position 2424 of SEQ ID NO: 1242864
gagugauuauaggucggaa

SEQ ID NO: 1378277 - RNA, 19 nt, Artificial Sequence
  Description of Artificial Sequence: Synthetic oligonucleotide
  Antisense strand to SEQ ID NO: 1378276
uuccgaccuauaaucacuc

SEQ ID NO: 1378278 - RNA, 19 nt, Artificial Sequence
  Description of Artificial Sequence: Synthetic oligonucleotide
  Sense strand starting at position 2427 of SEQ ID NO: 1242864
ugauuauaggucggaaggu

SEQ ID NO: 1378279 - RNA, 19 nt, Artificial Sequence
  Description of Artificial Sequence: Synthetic oligonucleotide
  Antisense strand to SEQ ID NO: 1378278
accuuccgaccuauaauca

SEQ ID NO: 1378280 - RNA, 19 nt, Artificial Sequence
  Description of Artificial Sequence: Synthetic oligonucleotide
  Sense strand starting at position 2445 of SEQ ID NO: 1242864
ugguaauacguccacaaug

SEQ ID NO: 1378281 - RNA, 19 nt, Artificial Sequence
  Description of Artificial Sequence: Synthetic oligonucleotide
  Antisense strand to SEQ ID NO: 1378280
cauuguggacguauuacca

SEQ ID NO: 1378282 - RNA, 19 nt, Artificial Sequence
  Description of Artificial Sequence: Synthetic oligonucleotide
  Sense strand starting at position 2447 of SEQ ID NO: 1242864
guaauacguccacaauguu

SEQ ID NO: 1378283 - RNA, 19 nt, Artificial Sequence
  Description of Artificial Sequence: Synthetic oligonucleotide
  Antisense strand to SEQ ID NO: 1378282
aacauuguggacguauuac

SEQ ID NO: 1378284 - RNA, 19 nt, Artificial Sequence
  Description of Artificial Sequence: Synthetic oligonucleotide
  Sense strand starting at position 2489 of SEQ ID NO: 1242864
gacgucagccauuguuauu

SEQ ID NO: 1378285 - RNA, 19 nt, Artificial Sequence
  Description of Artificial Sequence: Synthetic oligonucleotide
  Antisense strand to SEQ ID NO: 1378284
aauaacaauggcugacguc

SEQ ID NO: 1378286 - RNA, 19 nt, Artificial Sequence
  Description of Artificial Sequence: Synthetic oligonucleotide
  Sense strand starting at position 2684 of SEQ ID NO: 1242864
gguauuuagugucccugga

SEQ ID NO: 1378287 - RNA, 19 nt, Artificial Sequence
  Description of Artificial Sequence: Synthetic oligonucleotide
  Antisense strand to SEQ ID NO: 1378286
uccagggacacuaaauacc

SEQ ID NO: 1378288 - RNA, 19 nt, Artificial Sequence
  Description of Artificial Sequence: Synthetic oligonucleotide
  Sense strand starting at position 2688 of SEQ ID NO: 1242864
uuuagugucccuggaaaug

SEQ ID NO: 1378289 - RNA, 19 nt, Artificial Sequence
  Description of Artificial Sequence: Synthetic oligonucleotide
  Antisense strand to SEQ ID NO: 1378288
cauuuccagggacacuaaa

SEQ ID NO: 1378290 - RNA, 19 nt, Artificial Sequence
  Description of Artificial Sequence: Synthetic oligonucleotide
  Sense strand starting at position 2971 of SEQ ID NO: 1242864
aggcaauugacuugugcua

SEQ ID NO: 1378291 - RNA, 19 nt, Artificial Sequence
  Description of Artificial Sequence: Synthetic oligonucleotide
  Antisense strand to SEQ ID NO: 1378290
uagcacaagucaauugccu

SEQ ID NO: 1378292 - RNA, 19 nt, Artificial Sequence
  Description of Artificial Sequence: Synthetic oligonucleotide
  Sense strand starting at position 3122 of SEQ ID NO: 1242864
gggccuuguuggcucuaaa

SEQ ID NO: 1378293 - RNA, 19 nt, Artificial Sequence
  Description of Artificial Sequence: Synthetic oligonucleotide
  Antisense strand to SEQ ID NO: 1378292
uuuagagccaacaaggccc

SEQ ID NO: 1378294 - RNA, 19 nt, Artificial Sequence
  Description of Artificial Sequence: Synthetic oligonucleotide
  Sense strand starting at position 3125 of SEQ ID NO: 1242864
ccuuguuggcucuaaauua

SEQ ID NO: 1378295 - RNA, 19 nt, Artificial Sequence
  Description of Artificial Sequence: Synthetic oligonucleotide
  Antisense strand to SEQ ID NO: 1378294
uaauuuagagccaacaagg

SEQ ID NO: 1378296 - RNA, 19 nt, Artificial Sequence
  Description of Artificial Sequence: Synthetic oligonucleotide
  Sense strand starting at position 3370 of SEQ ID NO: 1242864
ugaguccucuuccuccaua

SEQ ID NO: 1378297 - RNA, 19 nt, Artificial Sequence
  Description of Artificial Sequence: Synthetic oligonucleotide
  Antisense strand to SEQ ID NO: 1378296
uauggaggaagaggacuca

SEQ ID NO: 1378298 - RNA, 19 nt, Artificial Sequence
  Description of Artificial Sequence: Synthetic oligonucleotide
  Sense strand starting at position 3404 of SEQ ID NO: 1242864
gaggucugguugcuauaga

SEQ ID NO: 1378299 - RNA, 19 nt, Artificial Sequence
  Description of Artificial Sequence: Synthetic oligonucleotide
  Antisense strand to SEQ ID NO: 1378298
ucuauagcaaccagaccuc

SEQ ID NO: 1378300 - RNA, 19 nt, Artificial Sequence
  Description of Artificial Sequence: Synthetic oligonucleotide
  Sense strand starting at position 3551 of SEQ ID NO: 1242864
uagugugugccgguuacuu

SEQ ID NO: 1378301 - RNA, 19 nt, Artificial Sequence
  Description of Artificial Sequence: Synthetic oligonucleotide
  Antisense strand to SEQ ID NO: 1378300
aaguaaccggcacacacua

SEQ ID NO: 1378302 - RNA, 19 nt, Artificial Sequence
  Description of Artificial Sequence: Synthetic oligonucleotide
  Sense strand starting at position 3692 of SEQ ID NO: 1242864
ugauaaaguuuggauuuga

SEQ ID NO: 1378303 - RNA, 19 nt, Artificial Sequence
  Description of Artificial Sequence: Synthetic oligonucleotide
  Antisense strand to SEQ ID NO: 1378302
ucaaauccaaacuuuauca

SEQ ID NO: 1378304 - RNA, 19 nt, Artificial Sequence
  Description of Artificial Sequence: Synthetic oligonucleotide
  Sense strand starting at position 3846 of SEQ ID NO: 1242864
uuaaauuaacuccguugau

SEQ ID NO: 1378305 - RNA, 19 nt, Artificial Sequence
  Description of Artificial Sequence: Synthetic oligonucleotide
  Antisense strand to SEQ ID NO: 1378304
aucaacggaguuaauuuaa

SEQ ID NO: 1378306 - RNA, 19 nt, Artificial Sequence
  Description of Artificial Sequence: Synthetic oligonucleotide
  Sense strand starting at position 3893 of SEQ ID NO: 1242864
ccuauauugcuaugguaaa

SEQ ID NO: 1378307 - RNA, 19 nt, Artificial Sequence
  Description of Artificial Sequence: Synthetic oligonucleotide
  Antisense strand to SEQ ID NO: 1378306
uuuaccauagcaauauagg

SEQ ID NO: 1378308 - RNA, 19 nt, Artificial Sequence
  Description of Artificial Sequence: Synthetic oligonucleotide
  Sense strand starting at position 14 of SEQ ID NO: 1242865
cccuguggucugugagguu

SEQ ID NO: 1378309 - RNA, 19 nt, Artificial Sequence
  Description of Artificial Sequence: Synthetic oligonucleotide
  Antisense strand to SEQ ID NO: 1378308
aaccucacagaccacaggg

SEQ ID NO: 1378310 - RNA, 19 nt, Artificial Sequence
  Description of Artificial Sequence: Synthetic oligonucleotide
  Sense strand starting at position 57 of SEQ ID NO: 1242865
ugcugucccuuugacuaau

SEQ ID NO: 1378311 - RNA, 19 nt, Artificial Sequence
  Description of Artificial Sequence: Synthetic oligonucleotide
  Antisense strand to SEQ ID NO: 1378310
auuagucaaagggacagca

SEQ ID NO: 1378312 - RNA, 19 nt, Artificial Sequence
  Description of Artificial Sequence: Synthetic oligonucleotide
  Sense strand starting at position 154 of SEQ ID NO: 1242865
gucucuuaguccucuguua

SEQ ID NO: 1378313 - RNA, 19 nt, Artificial Sequence
  Description of Artificial Sequence: Synthetic oligonucleotide
  Antisense strand to SEQ ID NO: 1378312
uaacagaggacuaagagac

SEQ ID NO: 1378314 - RNA, 19 nt, Artificial Sequence
  Description of Artificial Sequence: Synthetic oligonucleotide
  Sense strand starting at position 165 of SEQ ID NO: 1242865
cucuguuaccucugugacu

SEQ ID NO: 1378315 - RNA, 19 nt, Artificial Sequence
  Description of Artificial Sequence: Synthetic oligonucleotide
  Antisense strand to SEQ ID NO: 1378314
agucacagagguaacagag

SEQ ID NO: 1378316 - RNA, 19 nt, Artificial Sequence
  Description of Artificial Sequence: Synthetic oligonucleotide
  Sense strand starting at position 166 of SEQ ID NO: 1242865
ucuguuaccucugugacuu

SEQ ID NO: 1378317 - RNA, 19 nt, Artificial Sequence
  Description of Artificial Sequence: Synthetic oligonucleotide
  Antisense strand to SEQ ID NO: 1378316
aagucacagagguaacaga

SEQ ID NO: 1378318 - RNA, 19 nt, Artificial Sequence
  Description of Artificial Sequence: Synthetic oligonucleotide
  Sense strand starting at position 218 of SEQ ID NO: 1242865
uugccuguuggccaacaaa

SEQ ID NO: 1378319 - RNA, 19 nt, Artificial Sequence
  Description of Artificial Sequence: Synthetic oligonucleotide
  Antisense strand to SEQ ID NO: 1378318
uuuguuggccaacaggcaa

SEQ ID NO: 1378320 - RNA, 19 nt, Artificial Sequence
  Description of Artificial Sequence: Synthetic oligonucleotide
  Sense strand starting at position 384 of SEQ ID NO: 1242865
gcuucugaaucucccugau

SEQ ID NO: 1378321 - RNA, 19 nt, Artificial Sequence
  Description of Artificial Sequence: Synthetic oligonucleotide
  Antisense strand to SEQ ID NO: 1378320
aucagggagauucagaagc

SEQ ID NO: 1378322 - RNA, 19 nt, Artificial Sequence
  Description of Artificial Sequence: Synthetic oligonucleotide
  Sense strand starting at position 599 of SEQ ID NO: 1242865
guguucccuuccucaugua

SEQ ID NO: 1378323 - RNA, 19 nt, Artificial Sequence
  Description of Artificial Sequence: Synthetic oligonucleotide
  Antisense strand to SEQ ID NO: 1378322
uacaugaggaagggaacac

SEQ ID NO: 1378324 - RNA, 19 nt, Artificial Sequence
  Description of Artificial Sequence: Synthetic oligonucleotide
  Sense strand starting at position 602 of SEQ ID NO: 1242865
uucccuuccucauguagua

SEQ ID NO: 1378325 - RNA, 19 nt, Artificial Sequence
  Description of Artificial Sequence: Synthetic oligonucleotide
  Antisense strand to SEQ ID NO: 1378324
uacuacaugaggaagggaa

SEQ ID NO: 1378326 - RNA, 19 nt, Artificial Sequence
  Description of Artificial Sequence: Synthetic oligonucleotide
  Sense strand starting at position 607 of SEQ ID NO: 1242865
uuccucauguaguaaguau

SEQ ID NO: 1378327 - RNA, 19 nt, Artificial Sequence
  Description of Artificial Sequence: Synthetic oligonucleotide
  Antisense strand to SEQ ID NO: 1378326
auacuuacuacaugaggaa

SEQ ID NO: 1378328 - RNA, 19 nt, Artificial Sequence
  Description of Artificial Sequence: Synthetic oligonucleotide
  Sense strand starting at position 614 of SEQ ID NO: 1242865
uguaguaaguaucacagga

SEQ ID NO: 1378329 - RNA, 19 nt, Artificial Sequence
  Description of Artificial Sequence: Synthetic oligonucleotide
  Antisense strand to SEQ ID NO: 1378328
uccugugauacuuacuaca

SEQ ID NO: 1378330 - RNA, 19 nt, Artificial Sequence
  Description of Artificial Sequence: Synthetic oligonucleotide
  Sense strand starting at position 616 of SEQ ID NO: 1242865
uaguaaguaucacaggaug

SEQ ID NO: 1378331 - RNA, 19 nt, Artificial Sequence
  Description of Artificial Sequence: Synthetic oligonucleotide
  Antisense strand to SEQ ID NO: 1378330
cauccugugauacuuacua

SEQ ID NO: 1378332 - RNA, 19 nt, Artificial Sequence
  Description of Artificial Sequence: Synthetic oligonucleotide
  Sense strand starting at position 618 of SEQ ID NO: 1242865
guaaguaucacaggaugau

SEQ ID NO: 1378333 - RNA, 19 nt, Artificial Sequence
  Description of Artificial Sequence: Synthetic oligonucleotide
  Antisense strand to SEQ ID NO: 1378332
aucauccugugauacuuac

SEQ ID NO: 1378334 - RNA, 19 nt, Artificial Sequence
  Description of Artificial Sequence: Synthetic oligonucleotide
  Sense strand starting at position 945 of SEQ ID NO: 1242865
ccauuauuauagugaagua

SEQ ID NO: 1378335 - RNA, 19 nt, Artificial Sequence
  Description of Artificial Sequence: Synthetic oligonucleotide
  Antisense strand to SEQ ID NO: 1378334
uacuucacuauaauaaugg

SEQ ID NO: 1378336 - RNA, 19 nt, Artificial Sequence
  Description of Artificial Sequence: Synthetic oligonucleotide
  Sense strand starting at position 958 of SEQ ID NO: 1242865
gaaguacaccauugaagua

SEQ ID NO: 1378337 - RNA, 19 nt, Artificial Sequence
  Description of Artificial Sequence: Synthetic oligonucleotide
  Antisense strand to SEQ ID NO: 1378336
uacuucaaugguguacuuc

SEQ ID NO: 1378338 - RNA, 19 nt, Artificial Sequence
  Description of Artificial Sequence: Synthetic oligonucleotide
  Sense strand starting at position 1009 of SEQ ID NO: 1242865
ucuugaucuuuguauccca

SEQ ID NO: 1378339 - RNA, 19 nt, Artificial Sequence
  Description of Artificial Sequence: Synthetic oligonucleotide
  Antisense strand to SEQ ID NO: 1378338
ugggauacaaagaucaaga

SEQ ID NO: 1378340 - RNA, 19 nt, Artificial Sequence
  Description of Artificial Sequence: Synthetic oligonucleotide
  Sense strand starting at position 1037 of SEQ ID NO: 1242865
agugauggcucaugcuuau

SEQ ID NO: 1378341 - RNA, 19 nt, Artificial Sequence
  Description of Artificial Sequence: Synthetic oligonucleotide
  Antisense strand to SEQ ID NO: 1378340
auaagcaugagccaucacu

SEQ ID NO: 1378342 - RNA, 19 nt, Artificial Sequence
  Description of Artificial Sequence: Synthetic oligonucleotide
  Sense strand starting at position 1125 of SEQ ID NO: 1242865
guaacaaaugcauaaagca

SEQ ID NO: 1378343 - RNA, 19 nt, Artificial Sequence
  Description of Artificial Sequence: Synthetic oligonucleotide
  Antisense strand to SEQ ID NO: 1378342
ugcuuuaugcauuuguuac

SEQ ID NO: 1378344 - RNA, 19 nt, Artificial Sequence
  Description of Artificial Sequence: Synthetic oligonucleotide
  Sense strand starting at position 1148 of SEQ ID NO: 1242865
uagggcuucgugggaacua

SEQ ID NO: 1378345 - RNA, 19 nt, Artificial Sequence
  Description of Artificial Sequence: Synthetic oligonucleotide
  Antisense strand to SEQ ID NO: 1378344
uaguucccacgaagcccua

SEQ ID NO: 1378346 - RNA, 19 nt, Artificial Sequence
  Description of Artificial Sequence: Synthetic oligonucleotide
  Sense strand starting at position 1179 of SEQ ID NO: 1242865
caccuccuucgagaaggua

SEQ ID NO: 1378347 - RNA, 19 nt, Artificial Sequence
  Description of Artificial Sequence: Synthetic oligonucleotide
  Antisense strand to SEQ ID NO: 1378346
uaccuucucgaaggaggug

SEQ ID NO: 1378348 - RNA, 19 nt, Artificial Sequence
  Description of Artificial Sequence: Synthetic oligonucleotide
  Sense strand starting at position 1187 of SEQ ID NO: 1242865
ucgagaagguagcauauuu

SEQ ID NO: 1378349 - RNA, 19 nt, Artificial Sequence
  Description of Artificial Sequence: Synthetic oligonucleotide
  Antisense strand to SEQ ID NO: 1378348
aaauaugcuaccuucucga

SEQ ID NO: 1378350 - RNA, 19 nt, Artificial Sequence
  Description of Artificial Sequence: Synthetic oligonucleotide
  Sense strand starting at position 1326 of SEQ ID NO: 1242865
cuuccauuccugggacuua

SEQ ID NO: 1378351 - RNA, 19 nt, Artificial Sequence
  Description of Artificial Sequence: Synthetic oligonucleotide
  Antisense strand to SEQ ID NO: 1378350
uaagucccaggaauggaag

SEQ ID NO: 1378352 - RNA, 19 nt, Artificial Sequence
  Description of Artificial Sequence: Synthetic oligonucleotide
  Sense strand starting at position 1337 of SEQ ID NO: 1242865
gggacuuacucuugagaga

SEQ ID NO: 1378353 - RNA, 19 nt, Artificial Sequence
  Description of Artificial Sequence: Synthetic oligonucleotide
  Antisense strand to SEQ ID NO: 1378352
ucucucaagaguaaguccc

SEQ ID NO: 1378354 - RNA, 19 nt, Artificial Sequence
  Description of Artificial Sequence: Synthetic oligonucleotide
  Sense strand starting at position 1645 of SEQ ID NO: 1242865
gccuguaguugucaggaca

SEQ ID NO: 1378355 - RNA, 19 nt, Artificial Sequence
  Description of Artificial Sequence: Synthetic oligonucleotide
  Antisense strand to SEQ ID NO: 1378354
uguccugacaacuacaggc

SEQ ID NO: 1378356 - RNA, 19 nt, Artificial Sequence
  Description of Artificial Sequence: Synthetic oligonucleotide
  Sense strand starting at position 1648 of SEQ ID NO: 1242865
uguaguugucaggacagag

SEQ ID NO: 1378357 - RNA, 19 nt, Artificial Sequence
  Description of Artificial Sequence: Synthetic oligonucleotide
  Antisense strand to SEQ ID NO: 1378356
cucuguccugacaacuaca

SEQ ID NO: 1378358 - RNA, 19 nt, Artificial Sequence
  Description of Artificial Sequence: Synthetic oligonucleotide
  Sense strand starting at position 1963 of SEQ ID NO: 1242865
gggcucacucgagagguuu

SEQ ID NO: 1378359 - RNA, 19 nt, Artificial Sequence
  Description of Artificial Sequence: Synthetic oligonucleotide
  Antisense strand to SEQ ID NO: 1378358
aaaccucucgagugagccc

SEQ ID NO: 1378360 - RNA, 19 nt, Artificial Sequence
  Description of Artificial Sequence: Synthetic oligonucleotide
  Sense strand starting at position 2488 of SEQ ID NO: 1242865
gugucuaacguuagguguu

SEQ ID NO: 1378361 - RNA, 19 nt, Artificial Sequence
  Description of Artificial Sequence: Synthetic oligonucleotide
  Antisense strand to SEQ ID NO: 1378360
aacaccuaacguuagacac

SEQ ID NO: 1378362 - RNA, 19 nt, Artificial Sequence
  Description of Artificial Sequence: Synthetic oligonucleotide
  Sense strand starting at position 2494 of SEQ ID NO: 1242865
aacguuagguguucaguga

SEQ ID NO: 1378363 - RNA, 19 nt, Artificial Sequence
  Description of Artificial Sequence: Synthetic oligonucleotide
  Antisense strand to SEQ ID NO: 1378362
ucacugaacaccuaacguu

SEQ ID NO: 1378364 - RNA, 19 nt, Artificial Sequence
  Description of Artificial Sequence: Synthetic oligonucleotide
  Sense strand starting at position 2498 of SEQ ID NO: 1242865
uuagguguucagugacgga

SEQ ID NO: 1378365 - RNA, 19 nt, Artificial Sequence
  Description of Artificial Sequence: Synthetic oligonucleotide
  Antisense strand to SEQ ID NO: 1378364
uccgucacugaacaccuaa

SEQ ID NO: 1378366 - RNA, 19 nt, Artificial Sequence
  Description of Artificial Sequence: Synthetic oligonucleotide
  Sense strand starting at position 2511 of SEQ ID NO: 1242865
gacggaucccuauguccuu

SEQ ID NO: 1378367 - RNA, 19 nt, Artificial Sequence
  Description of Artificial Sequence: Synthetic oligonucleotide
  Antisense strand to SEQ ID NO: 1378366
aaggacauagggauccguc

SEQ ID NO: 1378368 - RNA, 19 nt, Artificial Sequence
  Description of Artificial Sequence: Synthetic oligonucleotide
  Sense strand starting at position 2552 of SEQ ID NO: 1242865
gccugugugucaucucuag

SEQ ID NO: 1378369 - RNA, 19 nt, Artificial Sequence
  Description of Artificial Sequence: Synthetic oligonucleotide
  Antisense strand to SEQ ID NO: 1378368
cuagagaugacacacaggc

SEQ ID NO: 1378370 - RNA, 19 nt, Artificial Sequence
  Description of Artificial Sequence: Synthetic oligonucleotide
  Sense strand starting at position 2556 of SEQ ID NO: 1242865
gugugucaucucuaguguc

SEQ ID NO: 1378371 - RNA, 19 nt, Artificial Sequence
  Description of Artificial Sequence: Synthetic oligonucleotide
  Antisense strand to SEQ ID NO: 1378370
gacacuagagaugacacac

SEQ ID NO: 1378372 - RNA, 19 nt, Artificial Sequence
  Description of Artificial Sequence: Synthetic oligonucleotide
  Sense strand starting at position 2786 of SEQ ID NO: 1242865
gagaaagccugucaaguga

SEQ ID NO: 1378373 - RNA, 19 nt, Artificial Sequence
  Description of Artificial Sequence: Synthetic oligonucleotide
  Antisense strand to SEQ ID NO: 1378372
ucacuugacaggcuuucuc

SEQ ID NO: 1378374 - RNA, 19 nt, Artificial Sequence
  Description of Artificial Sequence: Synthetic oligonucleotide
  Sense strand starting at position 2855 of SEQ ID NO: 1242865
acaguaggauuccuaaauc

SEQ ID NO: 1378375 - RNA, 19 nt, Artificial Sequence
  Description of Artificial Sequence: Synthetic oligonucleotide
  Antisense strand to SEQ ID NO: 1378374
gauuuaggaauccuacugu

SEQ ID NO: 1378376 - RNA, 19 nt, Artificial Sequence
  Description of Artificial Sequence: Synthetic oligonucleotide
  Sense strand starting at position 3026 of SEQ ID NO: 1242865
gggucucauugaccaggaa

SEQ ID NO: 1378377 - RNA, 19 nt, Artificial Sequence
  Description of Artificial Sequence: Synthetic oligonucleotide
  Antisense strand to SEQ ID NO: 1378376
uuccuggucaaugagaccc

SEQ ID NO: 1378378 - RNA, 19 nt, Artificial Sequence
  Description of Artificial Sequence: Synthetic oligonucleotide
  Sense strand starting at position 142 of SEQ ID NO: 1242866
acuugauuaguaggcuauu

SEQ ID NO: 1378379 - RNA, 19 nt, Artificial Sequence
  Description of Artificial Sequence: Synthetic oligonucleotide
  Antisense strand to SEQ ID NO: 1378378
aauagccuacuaaucaagu

SEQ ID NO: 1378380 - RNA, 19 nt, Artificial Sequence
  Description of Artificial Sequence: Synthetic oligonucleotide
  Sense strand starting at position 539 of SEQ ID NO: 1242866
gugcuaaucuauccuagag

SEQ ID NO: 1378381 - RNA, 19 nt, Artificial Sequence
  Description of Artificial Sequence: Synthetic oligonucleotide
  Antisense strand to SEQ ID NO: 1378380
cucuaggauagauuagcac

SEQ ID NO: 1378382 - RNA, 19 nt, Artificial Sequence
  Description of Artificial Sequence: Synthetic oligonucleotide
  Sense strand starting at position 581 of SEQ ID NO: 1242866
uggcuugguuuauuuauau

SEQ ID NO: 1378383 - RNA, 19 nt, Artificial Sequence
  Description of Artificial Sequence: Synthetic oligonucleotide
  Antisense strand to SEQ ID NO: 1378382
auauaaauaaaccaagcca

SEQ ID NO: 1378384 - RNA, 19 nt, Artificial Sequence
  Description of Artificial Sequence: Synthetic oligonucleotide
  Sense strand starting at position 767 of SEQ ID NO: 1242866
aucagacuuguccgaccaa

SEQ ID NO: 1378385 - RNA, 19 nt, Artificial Sequence
  Description of Artificial Sequence: Synthetic oligonucleotide
  Antisense strand to SEQ ID NO: 1378384
uuggucggacaagucugau

SEQ ID NO: 1378386 - RNA, 19 nt, Artificial Sequence
  Description of Artificial Sequence: Synthetic oligonucleotide
  Sense strand starting at position 849 of SEQ ID NO: 1242866
cuccauuguccuuaacugu

SEQ ID NO: 1378387 - RNA, 19 nt, Artificial Sequence
  Description of Artificial Sequence: Synthetic oligonucleotide
  Antisense strand to SEQ ID NO: 1378386
acaguuaaggacaauggag

SEQ ID NO: 1378388 - RNA, 19 nt, Artificial Sequence
  Description of Artificial Sequence: Synthetic oligonucleotide
  Sense strand starting at position 855 of SEQ ID NO: 1242866
uguccuuaacuguaguuaa

SEQ ID NO: 1378389 - RNA, 19 nt, Artificial Sequence
  Description of Artificial Sequence: Synthetic oligonucleotide
  Antisense strand to SEQ ID NO: 1378388
uuaacuacaguuaaggaca

SEQ ID NO: 1378390 - RNA, 19 nt, Artificial Sequence
  Description of Artificial Sequence: Synthetic oligonucleotide
  Sense strand starting at position 931 of SEQ ID NO: 1242866
uaacacagccuuggugaau

SEQ ID NO: 1378391 - RNA, 19 nt, Artificial Sequence
  Description of Artificial Sequence: Synthetic oligonucleotide
  Antisense strand to SEQ ID NO: 1378390
auucaccaaggcuguguua

SEQ ID NO: 1378392 - RNA, 19 nt, Artificial Sequence
  Description of Artificial Sequence: Synthetic oligonucleotide
  Sense strand starting at position 1371 of SEQ ID NO: 1242866
ccauuucucuuaguguucu

SEQ ID NO: 1378393 - RNA, 19 nt, Artificial Sequence
  Description of Artificial Sequence: Synthetic oligonucleotide
  Antisense strand to SEQ ID NO: 1378392
agaacacuaagagaaaugg

SEQ ID NO: 1378394 - RNA, 19 nt, Artificial Sequence
  Description of Artificial Sequence: Synthetic oligonucleotide
  Sense strand starting at position 1379 of SEQ ID NO: 1242866
cuuaguguucuugaacucu

SEQ ID NO: 1378395 - RNA, 19 nt, Artificial Sequence
  Description of Artificial Sequence: Synthetic oligonucleotide
  Antisense strand to SEQ ID NO: 1378394
agaguucaagaacacuaag

SEQ ID NO: 1378396 - RNA, 19 nt, Artificial Sequence
  Description of Artificial Sequence: Synthetic oligonucleotide
  Sense strand starting at position 1385 of SEQ ID NO: 1242866
guucuugaacucuggucaa

SEQ ID NO: 1378397 - RNA, 19 nt, Artificial Sequence
  Description of Artificial Sequence: Synthetic oligonucleotide
  Antisense strand to SEQ ID NO: 1378396
uugaccagaguucaagaac

SEQ ID NO: 1378398 - RNA, 19 nt, Artificial Sequence
  Description of Artificial Sequence: Synthetic oligonucleotide
  Sense strand starting at position 1388 of SEQ ID NO: 1242866
cuugaacucuggucaaaga

SEQ ID NO: 1378399 - RNA, 19 nt, Artificial Sequence
  Description of Artificial Sequence: Synthetic oligonucleotide
  Antisense strand to SEQ ID NO: 1378398
ucuuugaccagaguucaag

SEQ ID NO: 1378400 - RNA, 19 nt, Artificial Sequence
  Description of Artificial Sequence: Synthetic oligonucleotide
  Sense strand starting at position 1594 of SEQ ID NO: 1242866
gucuguguucccgcagugu

SEQ ID NO: 1378401 - RNA, 19 nt, Artificial Sequence
  Description of Artificial Sequence: Synthetic oligonucleotide
  Antisense strand to SEQ ID NO: 1378400
acacugcgggaacacagac

SEQ ID NO: 1378402 - RNA, 19 nt, Artificial Sequence
  Description of Artificial Sequence: Synthetic oligonucleotide
  Sense strand starting at position 1651 of SEQ ID NO: 1242866
cucugugucaucgcguagu

SEQ ID NO: 1378403 - RNA, 19 nt, Artificial Sequence
  Description of Artificial Sequence: Synthetic oligonucleotide
  Antisense strand to SEQ ID NO: 1378402
acuacgcgaugacacagag

SEQ ID NO: 1378404 - RNA, 19 nt, Artificial Sequence
  Description of Artificial Sequence: Synthetic oligonucleotide
  Sense strand starting at position 2251 of SEQ ID NO: 1242866
ccgaguggagccgaagauu

SEQ ID NO: 1378405 - RNA, 19 nt, Artificial Sequence
  Description of Artificial Sequence: Synthetic oligonucleotide
  Antisense strand to SEQ ID NO: 1378404
aaucuucggcuccacucgg

SEQ ID NO: 1378406 - RNA, 19 nt, Artificial Sequence
  Description of Artificial Sequence: Synthetic oligonucleotide
  Sense strand starting at position 2254 of SEQ ID NO: 1242866
aguggagccgaagauucau

SEQ ID NO: 1378407 - RNA, 19 nt, Artificial Sequence
  Description of Artificial Sequence: Synthetic oligonucleotide
  Antisense strand to SEQ ID NO: 1378406
augaaucuucggcuccacu

SEQ ID NO: 1378408 - RNA, 19 nt, Artificial Sequence
  Description of Artificial Sequence: Synthetic oligonucleotide
  Sense strand starting at position 2449 of SEQ ID NO: 1242866
guuacuggucaauauucca

SEQ ID NO: 1378409 - RNA, 19 nt, Artificial Sequence
  Description of Artificial Sequence: Synthetic oligonucleotide
  Antisense strand to SEQ ID NO: 1378408
uggaauauugaccaguaac

SEQ ID NO: 1378410 - RNA, 19 nt, Artificial Sequence
  Description of Artificial Sequence: Synthetic oligonucleotide
  Sense strand starting at position 2558 of SEQ ID NO: 1242866
uuucuuucccgagacagga

SEQ ID NO: 1378411 - RNA, 19 nt, Artificial Sequence
  Description of Artificial Sequence: Synthetic oligonucleotide
  Antisense strand to SEQ ID NO: 1378410
uccugucucgggaaagaaa

SEQ ID NO: 1378412 - RNA, 19 nt, Artificial Sequence
  Description of Artificial Sequence: Synthetic oligonucleotide
  Sense strand starting at position 2726 of SEQ ID NO: 1242866
guguuuguucuauaccuag

SEQ ID NO: 1378413 - RNA, 19 nt, Artificial Sequence
  Description of Artificial Sequence: Synthetic oligonucleotide
  Antisense strand to SEQ ID NO: 1378412
cuagguauagaacaaacac

SEQ ID NO: 1378414 - RNA, 19 nt, Artificial Sequence
  Description of Artificial Sequence: Synthetic oligonucleotide
  Sense strand starting at position 2732 of SEQ ID NO: 1242866
guucuauaccuagaaaugc

SEQ ID NO: 1378415 - RNA, 19 nt, Artificial Sequence
  Description of Artificial Sequence: Synthetic oligonucleotide
  Antisense strand to SEQ ID NO: 1378414
gcauuucuagguauagaac

SEQ ID NO: 1378416 - RNA, 19 nt, Artificial Sequence
  Description of Artificial Sequence: Synthetic oligonucleotide
  Sense strand starting at position 2740 of SEQ ID NO: 1242866
ccuagaaaugccugauagu

SEQ ID NO: 1378417 - RNA, 19 nt, Artificial Sequence
  Description of Artificial Sequence: Synthetic oligonucleotide
  Antisense strand to SEQ ID NO: 1378416
acuaucaggcauuucuagg

SEQ ID NO: 1378418 - RNA, 19 nt, Artificial Sequence
  Description of Artificial Sequence: Synthetic oligonucleotide
  Sense strand starting at position 2741 of SEQ ID NO: 1242866
cuagaaaugccugauaguu

SEQ ID NO: 1378419 - RNA, 19 nt, Artificial Sequence
  Description of Artificial Sequence: Synthetic oligonucleotide
  Antisense strand to SEQ ID NO: 1378418
aacuaucaggcauuucuag

SEQ ID NO: 1378420 - RNA, 19 nt, Artificial Sequence
  Description of Artificial Sequence: Synthetic oligonucleotide
  Sense strand starting at position 2849 of SEQ ID NO: 1242866
uguuuccauuacuuggaaa

SEQ ID NO: 1378421 - RNA, 19 nt, Artificial Sequence
  Description of Artificial Sequence: Synthetic oligonucleotide
  Antisense strand to SEQ ID NO: 1378420
uuuccaaguaauggaaaca

SEQ ID NO: 1378422 - RNA, 19 nt, Artificial Sequence
  Description of Artificial Sequence: Synthetic oligonucleotide
  Sense strand starting at position 2875 of SEQ ID NO: 1242866
uguuaacaucacgaaaucu

SEQ ID NO: 1378423 - RNA, 19 nt, Artificial Sequence
  Description of Artificial Sequence: Synthetic oligonucleotide
  Antisense strand to SEQ ID NO: 1378422
agauuucgugauguuaaca

SEQ ID NO: 1378424 - RNA, 19 nt, Artificial Sequence
  Description of Artificial Sequence: Synthetic oligonucleotide
  Sense strand starting at position 3012 of SEQ ID NO: 1242866
uuggcaaaccucugaacau

SEQ ID NO: 1378425 - RNA, 19 nt, Artificial Sequence
  Description of Artificial Sequence: Synthetic oligonucleotide
  Antisense strand to SEQ ID NO: 1378424
auguucagagguuugccaa

SEQ ID NO: 1378426 - RNA, 19 nt, Artificial Sequence
  Description of Artificial Sequence: Synthetic oligonucleotide
  Sense strand starting at position 3069 of SEQ ID NO: 1242866
ugaugagauuuccauuaug

SEQ ID NO: 1378427 - RNA, 19 nt, Artificial Sequence
  Description of Artificial Sequence: Synthetic oligonucleotide
  Antisense strand to SEQ ID NO: 1378426
cauaauggaaaucucauca

SEQ ID NO: 1378428 - RNA, 19 nt, Artificial Sequence
  Description of Artificial Sequence: Synthetic oligonucleotide
  Sense strand starting at position 3089 of SEQ ID NO: 1242866
ggguguacuuaccuaauug

SEQ ID NO: 1378429 - RNA, 19 nt, Artificial Sequence
  Description of Artificial Sequence: Synthetic oligonucleotide
  Antisense strand to SEQ ID NO: 1378428
caauuagguaaguacaccc

SEQ ID NO: 1378430 - RNA, 19 nt, Artificial Sequence
  Description of Artificial Sequence: Synthetic oligonucleotide
  Sense strand starting at position 3170 of SEQ ID NO: 1242866
acuaaacaucuuuguaugu

SEQ ID NO: 1378431 - RNA, 19 nt, Artificial Sequence
  Description of Artificial Sequence: Synthetic oligonucleotide
  Antisense strand to SEQ ID NO: 1378430
acauacaaagauguuuagu

SEQ ID NO: 1378432 - RNA, 19 nt, Artificial Sequence
  Description of Artificial Sequence: Synthetic oligonucleotide
  Sense strand starting at position 3171 of SEQ ID NO: 1242866
cuaaacaucuuuguaugua

SEQ ID NO: 1378433 - RNA, 19 nt, Artificial Sequence
  Description of Artificial Sequence: Synthetic oligonucleotide
  Antisense strand to SEQ ID NO: 1378432
uacauacaaagauguuuag

SEQ ID NO: 1378434 - RNA, 19 nt, Artificial Sequence
  Description of Artificial Sequence: Synthetic oligonucleotide
  Sense strand starting at position 3329 of SEQ ID NO: 1242866
agccguuuccaagaggauc

SEQ ID NO: 1378435 - RNA, 19 nt, Artificial Sequence
  Description of Artificial Sequence: Synthetic oligonucleotide
  Antisense strand to SEQ ID NO: 1378434
gauccucuuggaaacggcu

SEQ ID NO: 1378436 - RNA, 19 nt, Artificial Sequence
  Description of Artificial Sequence: Synthetic oligonucleotide
  Sense strand starting at position 3410 of SEQ ID NO: 1242866
agcauauaauuccugaaug

SEQ ID NO: 1378437 - RNA, 19 nt, Artificial Sequence
  Description of Artificial Sequence: Synthetic oligonucleotide
  Antisense strand to SEQ ID NO: 1378436
cauucaggaauuauaugcu

SEQ ID NO: 1378438 - RNA, 19 nt, Artificial Sequence
  Description of Artificial Sequence: Synthetic oligonucleotide
  Sense strand starting at position 3425 of SEQ ID NO: 1242866
aaugcuguuuaaguggaaa

SEQ ID NO: 1378439 - RNA, 19 nt, Artificial Sequence
  Description of Artificial Sequence: Synthetic oligonucleotide
  Antisense strand to SEQ ID NO: 1378438
uuuccacuuaaacagcauu

SEQ ID NO: 1378440 - RNA, 19 nt, Artificial Sequence
  Description of Artificial Sequence: Synthetic oligonucleotide
  Sense strand starting at position 3476 of SEQ ID NO: 1242866
uccucugaggcagauauua

SEQ ID NO: 1378441 - RNA, 19 nt, Artificial Sequence
  Description of Artificial Sequence: Synthetic oligonucleotide
  Antisense strand to SEQ ID NO: 1378440
uaauaucugccucagagga

SEQ ID NO: 1378442 - RNA, 19 nt, Artificial Sequence
  Description of Artificial Sequence: Synthetic oligonucleotide
  Sense strand starting at position 3498 of SEQ ID NO: 1242866
ucgucaguucugccaguga

SEQ ID NO: 1378443 - RNA, 19 nt, Artificial Sequence
  Description of Artificial Sequence: Synthetic oligonucleotide
  Antisense strand to SEQ ID NO: 1378442
ucacuggcagaacugacga

SEQ ID NO: 1378444 - RNA, 19 nt, Artificial Sequence
  Description of Artificial Sequence: Synthetic oligonucleotide
  Sense strand starting at position 3502 of SEQ ID NO: 1242866
caguucugccagugagaaa

SEQ ID NO: 1378445 - RNA, 19 nt, Artificial Sequence
  Description of Artificial Sequence: Synthetic oligonucleotide
  Antisense strand to SEQ ID NO: 1378444
uuucucacuggcagaacug

SEQ ID NO: 1378446 - RNA, 19 nt, Artificial Sequence
  Description of Artificial Sequence: Synthetic oligonucleotide
  Sense strand starting at position 3537 of SEQ ID NO: 1242866
gguuauauaacuugggcaa

SEQ ID NO: 1378447 - RNA, 19 nt, Artificial Sequence
  Description of Artificial Sequence: Synthetic oligonucleotide
  Antisense strand to SEQ ID NO: 1378446
uugcccaaguuauauaacc

SEQ ID NO: 1378448 - RNA, 19 nt, Artificial Sequence
  Description of Artificial Sequence: Synthetic oligonucleotide
  Sense strand starting at position 3538 of SEQ ID NO: 1242866
guuauauaacuugggcaag

SEQ ID NO: 1378449 - RNA, 19 nt, Artificial Sequence
  Description of Artificial Sequence: Synthetic oligonucleotide
  Antisense strand to SEQ ID NO: 1378448
cuugcccaaguuauauaac

SEQ ID NO: 1378450 - RNA, 19 nt, Artificial Sequence
  Description of Artificial Sequence: Synthetic oligonucleotide
  Sense strand starting at position 3568 of SEQ ID NO: 1242866
uaguuaguguauuucuuag

SEQ ID NO: 1378451 - RNA, 19 nt, Artificial Sequence
  Description of Artificial Sequence: Synthetic oligonucleotide
  Antisense strand to SEQ ID NO: 1378450
cuaagaaauacacuaacua

SEQ ID NO: 1378452 - RNA, 19 nt, Artificial Sequence
  Description of Artificial Sequence: Synthetic oligonucleotide
  Sense strand starting at position 3570 of SEQ ID NO: 1242866
guuaguguauuucuuagau

SEQ ID NO: 1378453 - RNA, 19 nt, Artificial Sequence
  Description of Artificial Sequence: Synthetic oligonucleotide
  Antisense strand to SEQ ID NO: 1378452
aucuaagaaauacacuaac

SEQ ID NO: 1378454 - RNA, 19 nt, Artificial Sequence
  Description of Artificial Sequence: Synthetic oligonucleotide
  Sense strand starting at position 3781 of SEQ ID NO: 1242866
auguuaagguucuugagau

SEQ ID NO: 1378455 - RNA, 19 nt, Artificial Sequence
  Description of Artificial Sequence: Synthetic oligonucleotide
  Antisense strand to SEQ ID NO: 1378454
aucucaagaaccuuaacau

SEQ ID NO: 1378456 - RNA, 19 nt, Artificial Sequence
  Description of Artificial Sequence: Synthetic oligonucleotide
  Sense strand starting at position 3824 of SEQ ID NO: 1242866
gugggcucaauguaucaca

SEQ ID NO: 1378457 - RNA, 19 nt, Artificial Sequence
  Description of Artificial Sequence: Synthetic oligonucleotide
  Antisense strand to SEQ ID NO: 1378456
ugugauacauugagcccac

SEQ ID NO: 1378458 - RNA, 19 nt, Artificial Sequence
  Description of Artificial Sequence: Synthetic oligonucleotide
  Sense strand starting at position 233 of SEQ ID NO: 1242867
agagcuuacugaggucuua

SEQ ID NO: 1378459 - RNA, 19 nt, Artificial Sequence
  Description of Artificial Sequence: Synthetic oligonucleotide
  Antisense strand to SEQ ID NO: 1378458
uaagaccucaguaagcucu

SEQ ID NO: 1378460 - RNA, 19 nt, Artificial Sequence
  Description of Artificial Sequence: Synthetic oligonucleotide
  Sense strand starting at position 242 of SEQ ID NO: 1242867
ugaggucuuaagugcaagu

SEQ ID NO: 1378461 - RNA, 19 nt, Artificial Sequence
  Description of Artificial Sequence: Synthetic oligonucleotide
  Antisense strand to SEQ ID NO: 1378460
acuugcacuuaagaccuca

SEQ ID NO: 1378462 - RNA, 19 nt, Artificial Sequence
  Description of Artificial Sequence: Synthetic oligonucleotide
  Sense strand starting at position 244 of SEQ ID NO: 1242867
aggucuuaagugcaaguaa

SEQ ID NO: 1378463 - RNA, 19 nt, Artificial Sequence
  Description of Artificial Sequence: Synthetic oligonucleotide
  Antisense strand to SEQ ID NO: 1378462
uuacuugcacuuaagaccu

SEQ ID NO: 1378464 - RNA, 19 nt, Artificial Sequence
  Description of Artificial Sequence: Synthetic oligonucleotide
  Sense strand starting at position 275 of SEQ ID NO: 1242867
gguauuagcagguagaguu

SEQ ID NO: 1378465 - RNA, 19 nt, Artificial Sequence
  Description of Artificial Sequence: Synthetic oligonucleotide
  Antisense strand to SEQ ID NO: 1378464
aacucuaccugcuaauacc

SEQ ID NO: 1378466 - RNA, 19 nt, Artificial Sequence
  Description of Artificial Sequence: Synthetic oligonucleotide
  Sense strand starting at position 302 of SEQ ID NO: 1242867
gcagacaccuccuguaguu

SEQ ID NO: 1378467 - RNA, 19 nt, Artificial Sequence
  Description of Artificial Sequence: Synthetic oligonucleotide
  Antisense strand to SEQ ID NO: 1378466
aacuacaggaggugucugc

SEQ ID NO: 1378468 - RNA, 19 nt, Artificial Sequence
  Description of Artificial Sequence: Synthetic oligonucleotide
  Sense strand starting at position 321 of SEQ ID NO: 1242867
uucuguguuugcuaagagu

SEQ ID NO: 1378469 - RNA, 19 nt, Artificial Sequence
  Description of Artificial Sequence: Synthetic oligonucleotide
  Antisense strand to SEQ ID NO: 1378468
acucuuagcaaacacagaa

SEQ ID NO: 1378470 - RNA, 19 nt, Artificial Sequence
  Description of Artificial Sequence: Synthetic oligonucleotide
  Sense strand starting at position 345 of SEQ ID NO: 1242867
gugccaggauuugggaaua

SEQ ID NO: 1378471 - RNA, 19 nt, Artificial Sequence
  Description of Artificial Sequence: Synthetic oligonucleotide
  Antisense strand to SEQ ID NO: 1378470
uauucccaaauccuggcac

SEQ ID NO: 1378472 - RNA, 19 nt, Artificial Sequence
  Description of Artificial Sequence: Synthetic oligonucleotide
  Sense strand starting at position 513 of SEQ ID NO: 1242867
agaacauagcuuugguaug

SEQ ID NO: 1378473 - RNA, 19 nt, Artificial Sequence
  Description of Artificial Sequence: Synthetic oligonucleotide
  Antisense strand to SEQ ID NO: 1378472
cauaccaaagcuauguucu

SEQ ID NO: 1378474 - RNA, 19 nt, Artificial Sequence
  Description of Artificial Sequence: Synthetic oligonucleotide
  Sense strand starting at position 514 of SEQ ID NO: 1242867
gaacauagcuuugguaugu

SEQ ID NO: 1378475 - RNA, 19 nt, Artificial Sequence
  Description of Artificial Sequence: Synthetic oligonucleotide
  Antisense strand to SEQ ID NO: 1378474
acauaccaaagcuauguuc

SEQ ID NO: 1378476 - RNA, 19 nt, Artificial Sequence
  Description of Artificial Sequence: Synthetic oligonucleotide
  Sense strand starting at position 518 of SEQ ID NO: 1242867
auagcuuugguaugugaac

SEQ ID NO: 1378477 - RNA, 19 nt, Artificial Sequence
  Description of Artificial Sequence: Synthetic oligonucleotide
  Antisense strand to SEQ ID NO: 1378476
guucacauaccaaagcuau

SEQ ID NO: 1378478 - RNA, 19 nt, Artificial Sequence
  Description of Artificial Sequence: Synthetic oligonucleotide
  Sense strand starting at position 551 of SEQ ID NO: 1242867
uucugaagcucaugcuauu

SEQ ID NO: 1378479 - RNA, 19 nt, Artificial Sequence
  Description of Artificial Sequence: Synthetic oligonucleotide
  Antisense strand to SEQ ID NO: 1378478
aauagcaugagcuucagaa

SEQ ID NO: 1378480 - RNA, 19 nt, Artificial Sequence
  Description of Artificial Sequence: Synthetic oligonucleotide
  Sense strand starting at position 1039 of SEQ ID NO: 1242867
aguaacuucucuuagagca

SEQ ID NO: 1378481 - RNA, 19 nt, Artificial Sequence
  Description of Artificial Sequence: Synthetic oligonucleotide
  Antisense strand to SEQ ID NO: 1378480
ugcucuaagagaaguuacu

SEQ ID NO: 1378482 - RNA, 19 nt, Artificial Sequence
  Description of Artificial Sequence: Synthetic oligonucleotide
  Sense strand starting at position 1307 of SEQ ID NO: 1242867
aaaguucuauguugcuagu

SEQ ID NO: 1378483 - RNA, 19 nt, Artificial Sequence
  Description of Artificial Sequence: Synthetic oligonucleotide
  Antisense strand to SEQ ID NO: 1378482
acuagcaacauagaacuuu

SEQ ID NO: 1378484 - RNA, 19 nt, Artificial Sequence
  Description of Artificial Sequence: Synthetic oligonucleotide
  Sense strand starting at position 1309 of SEQ ID NO: 1242867
aguucuauguugcuaguca

SEQ ID NO: 1378485 - RNA, 19 nt, Artificial Sequence
  Description of Artificial Sequence: Synthetic oligonucleotide
  Antisense strand to SEQ ID NO: 1378484
ugacuagcaacauagaacu

SEQ ID NO: 1378486 - RNA, 19 nt, Artificial Sequence
  Description of Artificial Sequence: Synthetic oligonucleotide
  Sense strand starting at position 1310 of SEQ ID NO: 1242867
guucuauguugcuagucag

SEQ ID NO: 1378487 - RNA, 19 nt, Artificial Sequence
  Description of Artificial Sequence: Synthetic oligonucleotide
  Antisense strand to SEQ ID NO: 1378486
cugacuagcaacauagaac

SEQ ID NO: 1378488 - RNA, 19 nt, Artificial Sequence
  Description of Artificial Sequence: Synthetic oligonucleotide
  Sense strand starting at position 1320 of SEQ ID NO: 1242867
gcuagucagucgggacaaa

SEQ ID NO: 1378489 - RNA, 19 nt, Artificial Sequence
  Description of Artificial Sequence: Synthetic oligonucleotide
  Antisense strand to SEQ ID NO: 1378488
uuugucccgacugacuagc

SEQ ID NO: 1378490 - RNA, 19 nt, Artificial Sequence
  Description of Artificial Sequence: Synthetic oligonucleotide
  Sense strand starting at position 1321 of SEQ ID NO: 1242867
cuagucagucgggacaaau

SEQ ID NO: 1378491 - RNA, 19 nt, Artificial Sequence
  Description of Artificial Sequence: Synthetic oligonucleotide
  Antisense strand to SEQ ID NO: 1378490
auuugucccgacugacuag

SEQ ID NO: 1378492 - RNA, 19 nt, Artificial Sequence
  Description of Artificial Sequence: Synthetic oligonucleotide
  Sense strand starting at position 1393 of SEQ ID NO: 1242867
ggacgcgccacguuauaaa

SEQ ID NO: 1378493 - RNA, 19 nt, Artificial Sequence
  Description of Artificial Sequence: Synthetic oligonucleotide
  Antisense strand to SEQ ID NO: 1378492
uuuauaacguggcgcgucc

SEQ ID NO: 1378494 - RNA, 19 nt, Artificial Sequence
  Description of Artificial Sequence: Synthetic oligonucleotide
  Sense strand starting at position 1564 of SEQ ID NO: 1242867
gguugaacaccuugacaga

SEQ ID NO: 1378495 - RNA, 19 nt, Artificial Sequence
  Description of Artificial Sequence: Synthetic oligonucleotide
  Antisense strand to SEQ ID NO: 1378494
ucugucaagguguucaacc

SEQ ID NO: 1378496 - RNA, 19 nt, Artificial Sequence
  Description of Artificial Sequence: Synthetic oligonucleotide
  Sense strand starting at position 1587 of SEQ ID NO: 1242867
guguguggccugccugaga

SEQ ID NO: 1378497 - RNA, 19 nt, Artificial Sequence
  Description of Artificial Sequence: Synthetic oligonucleotide
  Antisense strand to SEQ ID NO: 1378496
ucucaggcaggccacacac

SEQ ID NO: 1378498 - RNA, 19 nt, Artificial Sequence
  Description of Artificial Sequence: Synthetic oligonucleotide
  Sense strand starting at position 2334 of SEQ ID NO: 1242867
gggauaguucgguaaacug

SEQ ID NO: 1378499 - RNA, 19 nt, Artificial Sequence
  Description of Artificial Sequence: Synthetic oligonucleotide
  Antisense strand to SEQ ID NO: 1378498
caguuuaccgaacuauccc

SEQ ID NO: 1378500 - RNA, 19 nt, Artificial Sequence
  Description of Artificial Sequence: Synthetic oligonucleotide
  Sense strand starting at position 2374 of SEQ ID NO: 1242867
gagguugaaagcugucaag

SEQ ID NO: 1378501 - RNA, 19 nt, Artificial Sequence
  Description of Artificial Sequence: Synthetic oligonucleotide
  Antisense strand to SEQ ID NO: 1378500
cuugacagcuuucaaccuc

SEQ ID NO: 1378502 - RNA, 19 nt, Artificial Sequence
  Description of Artificial Sequence: Synthetic oligonucleotide
  Sense strand starting at position 2782 of SEQ ID NO: 1242867
cugcaacaaggcugucauu

SEQ ID NO: 1378503 - RNA, 19 nt, Artificial Sequence
  Description of Artificial Sequence: Synthetic oligonucleotide
  Antisense strand to SEQ ID NO: 1378502
aaugacagccuuguugcag

SEQ ID NO: 1378504 - RNA, 19 nt, Artificial Sequence
  Description of Artificial Sequence: Synthetic oligonucleotide
  Sense strand starting at position 2798 of SEQ ID NO: 1242867
auuggcugucacugggaua

SEQ ID NO: 1378505 - RNA, 19 nt, Artificial Sequence
  Description of Artificial Sequence: Synthetic oligonucleotide
  Antisense strand to SEQ ID NO: 1378504
uaucccagugacagccaau

SEQ ID NO: 1378506 - RNA, 19 nt, Artificial Sequence
  Description of Artificial Sequence: Synthetic oligonucleotide
  Sense strand starting at position 2910 of SEQ ID NO: 1242867
ccuugucaacauggagaaa

SEQ ID NO: 1378507 - RNA, 19 nt, Artificial Sequence
  Description of Artificial Sequence: Synthetic oligonucleotide
  Antisense strand to SEQ ID NO: 1378506
uuucuccauguugacaagg

SEQ ID NO: 1378508 - RNA, 19 nt, Artificial Sequence
  Description of Artificial Sequence: Synthetic oligonucleotide
  Sense strand starting at position 3303 of SEQ ID NO: 1242867
gccuguacauaauaggaau

SEQ ID NO: 1378509 - RNA, 19 nt, Artificial Sequence
  Description of Artificial Sequence: Synthetic oligonucleotide
  Antisense strand to SEQ ID NO: 1378508
auuccuauuauguacaggc

SEQ ID NO: 1378510 - RNA, 19 nt, Artificial Sequence
  Description of Artificial Sequence: Synthetic oligonucleotide
  Sense strand starting at position 3360 of SEQ ID NO: 1242867
gcccucgugcaguuuacau

SEQ ID NO: 1378511 - RNA, 19 nt, Artificial Sequence
  Description of Artificial Sequence: Synthetic oligonucleotide
  Antisense strand to SEQ ID NO: 1378510
auguaaacugcacgagggc

SEQ ID NO: 1378512 - RNA, 19 nt, Artificial Sequence
  Description of Artificial Sequence: Synthetic oligonucleotide
  Sense strand starting at position 3555 of SEQ ID NO: 1242867
auaggaaugugccaaaccu

SEQ ID NO: 1378513 - RNA, 19 nt, Artificial Sequence
  Description of Artificial Sequence: Synthetic oligonucleotide
  Antisense strand to SEQ ID NO: 1378512
agguuuggcacauuccuau

SEQ ID NO: 1378514 - RNA, 19 nt, Artificial Sequence
  Description of Artificial Sequence: Synthetic oligonucleotide
  Sense strand starting at position 3578 of SEQ ID NO: 1242867
ugagcccuauugugaacuu

SEQ ID NO: 1378515 - RNA, 19 nt, Artificial Sequence
  Description of Artificial Sequence: Synthetic oligonucleotide
  Antisense strand to SEQ ID NO: 1378514
aaguucacaauagggcuca

SEQ ID NO: 1378516 - RNA, 19 nt, Artificial Sequence
  Description of Artificial Sequence: Synthetic oligonucleotide
  Sense strand starting at position 3579 of SEQ ID NO: 1242867
gagcccuauugugaacuuu

SEQ ID NO: 1378517 - RNA, 19 nt, Artificial Sequence
  Description of Artificial Sequence: Synthetic oligonucleotide
  Antisense strand to SEQ ID NO: 1378516
aaaguucacaauagggcuc

SEQ ID NO: 1378518 - RNA, 19 nt, Artificial Sequence
  Description of Artificial Sequence: Synthetic oligonucleotide
  Sense strand starting at position 3587 of SEQ ID NO: 1242867
uugugaacuuugcauacga

SEQ ID NO: 1378519 - RNA, 19 nt, Artificial Sequence
  Description of Artificial Sequence: Synthetic oligonucleotide
  Antisense strand to SEQ ID NO: 1378518
ucguaugcaaaguucacaa

SEQ ID NO: 1378520 - RNA, 19 nt, Artificial Sequence
  Description of Artificial Sequence: Synthetic oligonucleotide
  Sense strand starting at position 3616 of SEQ ID NO: 1242867
uggcaugcugcuuaugaga

SEQ ID NO: 1378521 - RNA, 19 nt, Artificial Sequence
  Description of Artificial Sequence: Synthetic oligonucleotide
  Antisense strand to SEQ ID NO: 1378520
ucucauaagcagcaugcca

SEQ ID NO: 1378522 - RNA, 19 nt, Artificial Sequence
  Description of Artificial Sequence: Synthetic oligonucleotide
  Sense strand starting at position 3618 of SEQ ID NO: 1242867
gcaugcugcuuaugagacu

SEQ ID NO: 1378523 - RNA, 19 nt, Artificial Sequence
  Description of Artificial Sequence: Synthetic oligonucleotide
  Antisense strand to SEQ ID NO: 1378522
agucucauaagcagcaugc

SEQ ID NO: 1378524 - RNA, 19 nt, Artificial Sequence
  Description of Artificial Sequence: Synthetic oligonucleotide
  Sense strand starting at position 3629 of SEQ ID NO: 1242867
augagacucuaaugauaaa

SEQ ID NO: 1378525 - RNA, 19 nt, Artificial Sequence
  Description of Artificial Sequence: Synthetic oligonucleotide
  Antisense strand to SEQ ID NO: 1378524
uuuaucauuagagucucau

SEQ ID NO: 1378526 - RNA, 19 nt, Artificial Sequence
  Description of Artificial Sequence: Synthetic oligonucleotide
  Sense strand starting at position 3632 of SEQ ID NO: 1242867
agacucuaaugauaaaugu

SEQ ID NO: 1378527 - RNA, 19 nt, Artificial Sequence
  Description of Artificial Sequence: Synthetic oligonucleotide
  Antisense strand to SEQ ID NO: 1378526
acauuuaucauuagagucu

SEQ ID NO: 1378528 - RNA, 19 nt, Artificial Sequence
  Description of Artificial Sequence: Synthetic oligonucleotide
  Sense strand starting at position 3775 of SEQ ID NO: 1242867
ggcugauuaucccuaucau

SEQ ID NO: 1378529 - RNA, 19 nt, Artificial Sequence
  Description of Artificial Sequence: Synthetic oligonucleotide
  Antisense strand to SEQ ID NO: 1378528
augauagggauaaucagcc

SEQ ID NO: 1378530 - RNA, 19 nt, Artificial Sequence
  Description of Artificial Sequence: Synthetic oligonucleotide
  Sense strand starting at position 3908 of SEQ ID NO: 1242867
ggacuacaguggugugaca

SEQ ID NO: 1378531 - RNA, 19 nt, Artificial Sequence
  Description of Artificial Sequence: Synthetic oligonucleotide
  Antisense strand to SEQ ID NO: 1378530
ugucacaccacuguagucc

SEQ ID NO: 1378532 - RNA, 19 nt, Artificial Sequence
  Description of Artificial Sequence: Synthetic oligonucleotide
  Sense strand starting at position 152 of SEQ ID NO: 1242868
ccauucuaagacugguauu

SEQ ID NO: 1378533 - RNA, 19 nt, Artificial Sequence
  Description of Artificial Sequence: Synthetic oligonucleotide
  Antisense strand to SEQ ID NO: 1378532
aauaccagucuuagaaugg

SEQ ID NO: 1378534 - RNA, 19 nt, Artificial Sequence
  Description of Artificial Sequence: Synthetic oligonucleotide
  Sense strand starting at position 155 of SEQ ID NO: 1242868
uucuaagacugguauuauu

SEQ ID NO: 1378535 - RNA, 19 nt, Artificial Sequence
  Description of Artificial Sequence: Synthetic oligonucleotide
  Antisense strand to SEQ ID NO: 1378534
aauaauaccagucuuagaa

SEQ ID NO: 1378536 - RNA, 19 nt, Artificial Sequence
  Description of Artificial Sequence: Synthetic oligonucleotide
  Sense strand starting at position 158 of SEQ ID NO: 1242868
uaagacugguauuauuagu

SEQ ID NO: 1378537 - RNA, 19 nt, Artificial Sequence
  Description of Artificial Sequence: Synthetic oligonucleotide
  Antisense strand to SEQ ID NO: 1378536
acuaauaauaccagucuua

SEQ ID NO: 1378538 - RNA, 19 nt, Artificial Sequence
  Description of Artificial Sequence: Synthetic oligonucleotide
  Sense strand starting at position 214 of SEQ ID NO: 1242868
aaaguuaggucauugguua

SEQ ID NO: 1378539 - RNA, 19 nt, Artificial Sequence
  Description of Artificial Sequence: Synthetic oligonucleotide
  Antisense strand to SEQ ID NO: 1378538
uaaccaaugaccuaacuuu

SEQ ID NO: 1378540 - RNA, 19 nt, Artificial Sequence
  Description of Artificial Sequence: Synthetic oligonucleotide
  Sense strand starting at position 215 of SEQ ID NO: 1242868
aaguuaggucauugguuag

SEQ ID NO: 1378541 - RNA, 19 nt, Artificial Sequence
  Description of Artificial Sequence: Synthetic oligonucleotide
  Antisense strand to SEQ ID NO: 1378540
cuaaccaaugaccuaacuu

SEQ ID NO: 1378542 - RNA, 19 nt, Artificial Sequence
  Description of Artificial Sequence: Synthetic oligonucleotide
  Sense strand starting at position 226 of SEQ ID NO: 1242868
uugguuaggucauuggcau

SEQ ID NO: 1378543 - RNA, 19 nt, Artificial Sequence
  Description of Artificial Sequence: Synthetic oligonucleotide
  Antisense strand to SEQ ID NO: 1378542
augccaaugaccuaaccaa

SEQ ID NO: 1378544 - RNA, 19 nt, Artificial Sequence
  Description of Artificial Sequence: Synthetic oligonucleotide
  Sense strand starting at position 227 of SEQ ID NO: 1242868
ugguuaggucauuggcaua

SEQ ID NO: 1378545 - RNA, 19 nt, Artificial Sequence
  Description of Artificial Sequence: Synthetic oligonucleotide
  Antisense strand to SEQ ID NO: 1378544
uaugccaaugaccuaacca

SEQ ID NO: 1378546 - RNA, 19 nt, Artificial Sequence
  Description of Artificial Sequence: Synthetic oligonucleotide
  Sense strand starting at position 462 of SEQ ID NO: 1242868
cguacuuacaucuggcgau

SEQ ID NO: 1378547 - RNA, 19 nt, Artificial Sequence
  Description of Artificial Sequence: Synthetic oligonucleotide
  Antisense strand to SEQ ID NO: 1378546
aucgccagauguaaguacg

SEQ ID NO: 1378548 - RNA, 19 nt, Artificial Sequence
  Description of Artificial Sequence: Synthetic oligonucleotide
  Sense strand starting at position 638 of SEQ ID NO: 1242868
aguggagggucaggaaauu

SEQ ID NO: 1378549 - RNA, 19 nt, Artificial Sequence
  Description of Artificial Sequence: Synthetic oligonucleotide
  Antisense strand to SEQ ID NO: 1378548
aauuuccugacccuccacu

SEQ ID NO: 1378550 - RNA, 19 nt, Artificial Sequence
  Description of Artificial Sequence: Synthetic oligonucleotide
  Sense strand starting at position 740 of SEQ ID NO: 1242868
gcagauugguugcccagaa

SEQ ID NO: 1378551 - RNA, 19 nt, Artificial Sequence
  Description of Artificial Sequence: Synthetic oligonucleotide
  Antisense strand to SEQ ID NO: 1378550
uucugggcaaccaaucugc

SEQ ID NO: 1378552 - RNA, 19 nt, Artificial Sequence
  Description of Artificial Sequence: Synthetic oligonucleotide
  Sense strand starting at position 741 of SEQ ID NO: 1242868
cagauugguugcccagaaa

SEQ ID NO: 1378553 - RNA, 19 nt, Artificial Sequence
  Description of Artificial Sequence: Synthetic oligonucleotide
  Antisense strand to SEQ ID NO: 1378552
uuucugggcaaccaaucug

SEQ ID NO: 1378554 - RNA, 19 nt, Artificial Sequence
  Description of Artificial Sequence: Synthetic oligonucleotide
  Sense strand starting at position 744 of SEQ ID NO: 1242868
auugguugcccagaaauga

SEQ ID NO: 1378555 - RNA, 19 nt, Artificial Sequence
  Description of Artificial Sequence: Synthetic oligonucleotide
  Antisense strand to SEQ ID NO: 1378554
ucauuucugggcaaccaau

SEQ ID NO: 1378556 - RNA, 19 nt, Artificial Sequence
  Description of Artificial Sequence: Synthetic oligonucleotide
  Sense strand starting at position 909 of SEQ ID NO: 1242868
uugcauucuuagcuggcaa

SEQ ID NO: 1378557 - RNA, 19 nt, Artificial Sequence
  Description of Artificial Sequence: Synthetic oligonucleotide
  Antisense strand to SEQ ID NO: 1378556
uugccagcuaagaaugcaa

SEQ ID NO: 1378558 - RNA, 19 nt, Artificial Sequence
  Description of Artificial Sequence: Synthetic oligonucleotide
  Sense strand starting at position 957 of SEQ ID NO: 1242868
gggaaugagaggugccuaa

SEQ ID NO: 1378559 - RNA, 19 nt, Artificial Sequence
  Description of Artificial Sequence: Synthetic oligonucleotide
  Antisense strand to SEQ ID NO: 1378558
uuaggcaccucucauuccc

SEQ ID NO: 1378560 - RNA, 19 nt, Artificial Sequence
  Description of Artificial Sequence: Synthetic oligonucleotide
  Sense strand starting at position 961 of SEQ ID NO: 1242868
augagaggugccuaacucu

SEQ ID NO: 1378561 - RNA, 19 nt, Artificial Sequence
  Description of Artificial Sequence: Synthetic oligonucleotide
  Antisense strand to SEQ ID NO: 1378560
agaguuaggcaccucucau

SEQ ID NO: 1378562 - RNA, 19 nt, Artificial Sequence
  Description of Artificial Sequence: Synthetic oligonucleotide
  Sense strand starting at position 1012 of SEQ ID NO: 1242868
gcgggacaccuggauucuu

SEQ ID NO: 1378563 - RNA, 19 nt, Artificial Sequence
  Description of Artificial Sequence: Synthetic oligonucleotide
  Antisense strand to SEQ ID NO: 1378562
aagaauccaggugucccgc

SEQ ID NO: 1378564 - RNA, 19 nt, Artificial Sequence
  Description of Artificial Sequence: Synthetic oligonucleotide
  Sense strand starting at position 1054 of SEQ ID NO: 1242868
ggcugcauuucuguaagac

SEQ ID NO: 1378565 - RNA, 19 nt, Artificial Sequence
  Description of Artificial Sequence: Synthetic oligonucleotide
  Antisense strand to SEQ ID NO: 1378564
gucuuacagaaaugcagcc

SEQ ID NO: 1378566 - RNA, 19 nt, Artificial Sequence
  Description of Artificial Sequence: Synthetic oligonucleotide
  Sense strand starting at position 1063 of SEQ ID NO: 1242868
ucuguaagacucugcuauu

SEQ ID NO: 1378567 - RNA, 19 nt, Artificial Sequence
  Description of Artificial Sequence: Synthetic oligonucleotide
  Antisense strand to SEQ ID NO: 1378566
aauagcagagucuuacaga

SEQ ID NO: 1378568 - RNA, 19 nt, Artificial Sequence
  Description of Artificial Sequence: Synthetic oligonucleotide
  Sense strand starting at position 1064 of SEQ ID NO: 1242868
cuguaagacucugcuauuc

SEQ ID NO: 1378569 - RNA, 19 nt, Artificial Sequence
  Description of Artificial Sequence: Synthetic oligonucleotide
  Antisense strand to SEQ ID NO: 1378568
gaauagcagagucuuacag

SEQ ID NO: 1378570 - RNA, 19 nt, Artificial Sequence
  Description of Artificial Sequence: Synthetic oligonucleotide
  Sense strand starting at position 1116 of SEQ ID NO: 1242868
gcucauuuaucccauaggu

SEQ ID NO: 1378571 - RNA, 19 nt, Artificial Sequence
  Description of Artificial Sequence: Synthetic oligonucleotide
  Antisense strand to SEQ ID NO: 1378570
accuaugggauaaaugagc

SEQ ID NO: 1378572 - RNA, 19 nt, Artificial Sequence
  Description of Artificial Sequence: Synthetic oligonucleotide
  Sense strand starting at position 1173 of SEQ ID NO: 1242868
uuguaaagccucugaaauu

SEQ ID NO: 1378573 - RNA, 19 nt, Artificial Sequence
  Description of Artificial Sequence: Synthetic oligonucleotide
  Antisense strand to SEQ ID NO: 1378572
aauuucagaggcuuuacaa

SEQ ID NO: 1378574 - RNA, 19 nt, Artificial Sequence
  Description of Artificial Sequence: Synthetic oligonucleotide
  Sense strand starting at position 1208 of SEQ ID NO: 1242868
aggcucauuucucagcaga

SEQ ID NO: 1378575 - RNA, 19 nt, Artificial Sequence
  Description of Artificial Sequence: Synthetic oligonucleotide
  Antisense strand to SEQ ID NO: 1378574
ucugcugagaaaugagccu

SEQ ID NO: 1378576 - RNA, 19 nt, Artificial Sequence
  Description of Artificial Sequence: Synthetic oligonucleotide
  Sense strand starting at position 2028 of SEQ ID NO: 1242868
agauccgccugaucucaaa

SEQ ID NO: 1378577 - RNA, 19 nt, Artificial Sequence
  Description of Artificial Sequence: Synthetic oligonucleotide
  Antisense strand to SEQ ID NO: 1378576
uuugagaucaggcggaucu

SEQ ID NO: 1378578 - RNA, 19 nt, Artificial Sequence
  Description of Artificial Sequence: Synthetic oligonucleotide
  Sense strand starting at position 2047 of SEQ ID NO: 1242868
gccugcgcucuuuaucauu

SEQ ID NO: 1378579 - RNA, 19 nt, Artificial Sequence
  Description of Artificial Sequence: Synthetic oligonucleotide
  Antisense strand to SEQ ID NO: 1378578
aaugauaaagagcgcaggc

SEQ ID NO: 1378580 - RNA, 19 nt, Artificial Sequence
  Description of Artificial Sequence: Synthetic oligonucleotide
  Sense strand starting at position 2099 of SEQ ID NO: 1242868
agcgauuaauuggugaauu

SEQ ID NO: 1378581 - RNA, 19 nt, Artificial Sequence
  Description of Artificial Sequence: Synthetic oligonucleotide
  Antisense strand to SEQ ID NO: 1378580
aauucaccaauuaaucgcu

SEQ ID NO: 1378582 - RNA, 19 nt, Artificial Sequence
  Description of Artificial Sequence: Synthetic oligonucleotide
  Sense strand starting at position 2110 of SEQ ID NO: 1242868
ggugaauucagucguucgu

SEQ ID NO: 1378583 - RNA, 19 nt, Artificial Sequence
  Description of Artificial Sequence: Synthetic oligonucleotide
  Antisense strand to SEQ ID NO: 1378582
acgaacgacugaauucacc

SEQ ID NO: 1378584 - RNA, 19 nt, Artificial Sequence
  Description of Artificial Sequence: Synthetic oligonucleotide
  Sense strand starting at position 2111 of SEQ ID NO: 1242868
gugaauucagucguucguu

SEQ ID NO: 1378585 - RNA, 19 nt, Artificial Sequence
  Description of Artificial Sequence: Synthetic oligonucleotide
  Antisense strand to SEQ ID NO: 1378584
aacgaacgacugaauucac

SEQ ID NO: 1378586 - RNA, 19 nt, Artificial Sequence
  Description of Artificial Sequence: Synthetic oligonucleotide
  Sense strand starting at position 2139 of SEQ ID NO: 1242868
uuuauuaugggucagguaa

SEQ ID NO: 1378587 - RNA, 19 nt, Artificial Sequence
  Description of Artificial Sequence: Synthetic oligonucleotide
  Antisense strand to SEQ ID NO: 1378586
uuaccugacccauaauaaa

SEQ ID NO: 1378588 - RNA, 19 nt, Artificial Sequence
  Description of Artificial Sequence: Synthetic oligonucleotide
  Sense strand starting at position 2360 of SEQ ID NO: 1242868
gagcuauaacugugccauu

SEQ ID NO: 1378589 - RNA, 19 nt, Artificial Sequence
  Description of Artificial Sequence: Synthetic oligonucleotide
  Antisense strand to SEQ ID NO: 1378588
aauggcacaguuauagcuc

SEQ ID NO: 1378590 - RNA, 19 nt, Artificial Sequence
  Description of Artificial Sequence: Synthetic oligonucleotide
  Sense strand starting at position 2756 of SEQ ID NO: 1242868
ugacaugccugccugauga

SEQ ID NO: 1378591 - RNA, 19 nt, Artificial Sequence
  Description of Artificial Sequence: Synthetic oligonucleotide
  Antisense strand to SEQ ID NO: 1378590
ucaucaggcaggcauguca

SEQ ID NO: 1378592 - RNA, 19 nt, Artificial Sequence
  Description of Artificial Sequence: Synthetic oligonucleotide
  Sense strand starting at position 2791 of SEQ ID NO: 1242868
ccugucuucguagagcuua

SEQ ID NO: 1378593 - RNA, 19 nt, Artificial Sequence
  Description of Artificial Sequence: Synthetic oligonucleotide
  Antisense strand to SEQ ID NO: 1378592
uaagcucuacgaagacagg

SEQ ID NO: 1378594 - RNA, 19 nt, Artificial Sequence
  Description of Artificial Sequence: Synthetic oligonucleotide
  Sense strand starting at position 2796 of SEQ ID NO: 1242868
cuucguagagcuuagagau

SEQ ID NO: 1378595 - RNA, 19 nt, Artificial Sequence
  Description of Artificial Sequence: Synthetic oligonucleotide
  Antisense strand to SEQ ID NO: 1378594
aucucuaagcucuacgaag

SEQ ID NO: 1378596 - RNA, 19 nt, Artificial Sequence
  Description of Artificial Sequence: Synthetic oligonucleotide
  Sense strand starting at position 2809 of SEQ ID NO: 1242868
agagauuccuaugccuuag

SEQ ID NO: 1378597 - RNA, 19 nt, Artificial Sequence
  Description of Artificial Sequence: Synthetic oligonucleotide
  Antisense strand to SEQ ID NO: 1378596
cuaaggcauaggaaucucu

SEQ ID NO: 1378598 - RNA, 19 nt, Artificial Sequence
  Description of Artificial Sequence: Synthetic oligonucleotide
  Sense strand starting at position 2811 of SEQ ID NO: 1242868
agauuccuaugccuuagau

SEQ ID NO: 1378599 - RNA, 19 nt, Artificial Sequence
  Description of Artificial Sequence: Synthetic oligonucleotide
  Antisense strand to SEQ ID NO: 1378598
aucuaaggcauaggaaucu

SEQ ID NO: 1378600 - RNA, 19 nt, Artificial Sequence
  Description of Artificial Sequence: Synthetic oligonucleotide
  Sense strand starting at position 2813 of SEQ ID NO: 1242868
auuccuaugccuuagaugu

SEQ ID NO: 1378601 - RNA, 19 nt, Artificial Sequence
  Description of Artificial Sequence: Synthetic oligonucleotide
  Antisense strand to SEQ ID NO: 1378600
acaucuaaggcauaggaau

SEQ ID NO: 1378602 - RNA, 19 nt, Artificial Sequence
  Description of Artificial Sequence: Synthetic oligonucleotide
  Sense strand starting at position 2875 of SEQ ID NO: 1242868
acccuugcuccugguagau

SEQ ID NO: 1378603 - RNA, 19 nt, Artificial Sequence
  Description of Artificial Sequence: Synthetic oligonucleotide
  Antisense strand to SEQ ID NO: 1378602
aucuaccaggagcaagggu

SEQ ID NO: 1378604 - RNA, 19 nt, Artificial Sequence
  Description of Artificial Sequence: Synthetic oligonucleotide
  Sense strand starting at position 3221 of SEQ ID NO: 1242868
ggguguaccucuuuggaga

SEQ ID NO: 1378605 - RNA, 19 nt, Artificial Sequence
  Description of Artificial Sequence: Synthetic oligonucleotide
  Antisense strand to SEQ ID NO: 1378604
ucuccaaagagguacaccc

SEQ ID NO: 1378606 - RNA, 19 nt, Artificial Sequence
  Description of Artificial Sequence: Synthetic oligonucleotide
  Sense strand starting at position 3499 of SEQ ID NO: 1242868
guugaaacagguugggauu

SEQ ID NO: 1378607 - RNA, 19 nt, Artificial Sequence
  Description of Artificial Sequence: Synthetic oligonucleotide
  Antisense strand to SEQ ID NO: 1378606
aaucccaaccuguuucaac

SEQ ID NO: 1378608 - RNA, 19 nt, Artificial Sequence
  Description of Artificial Sequence: Synthetic oligonucleotide
  Sense strand starting at position 3670 of SEQ ID NO: 1242868
guaggaggaucccuugauu

SEQ ID NO: 1378609 - RNA, 19 nt, Artificial Sequence
  Description of Artificial Sequence: Synthetic oligonucleotide
  Antisense strand to SEQ ID NO: 1378608
aaucaagggauccuccuac

SEQ ID NO: 1378610 - RNA, 19 nt, Artificial Sequence
  Description of Artificial Sequence: Synthetic oligonucleotide
  Sense strand starting at position 3678 of SEQ ID NO: 1242868
aucccuugauuccaggaga

SEQ ID NO: 1378611 - RNA, 19 nt, Artificial Sequence
  Description of Artificial Sequence: Synthetic oligonucleotide
  Antisense strand to SEQ ID NO: 1378610
ucuccuggaaucaagggau

SEQ ID NO: 1378612 - RNA, 19 nt, Artificial Sequence
  Description of Artificial Sequence: Synthetic oligonucleotide
  Sense strand starting at position 211 of SEQ ID NO: 1242869
gguuaaaccugucuuugac

SEQ ID NO: 1378613 - RNA, 19 nt, Artificial Sequence
  Description of Artificial Sequence: Synthetic oligonucleotide
  Antisense strand to SEQ ID NO: 1378612
gucaaagacagguuuaacc

SEQ ID NO: 1378614 - RNA, 19 nt, Artificial Sequence
  Description of Artificial Sequence: Synthetic oligonucleotide
  Sense strand starting at position 278 of SEQ ID NO: 1242869
ccagaaggcucauggucaa

SEQ ID NO: 1378615 - RNA, 19 nt, Artificial Sequence
  Description of Artificial Sequence: Synthetic oligonucleotide
  Antisense strand to SEQ ID NO: 1378614
uugaccaugagccuucugg

SEQ ID NO: 1378616 - RNA, 19 nt, Artificial Sequence
  Description of Artificial Sequence: Synthetic oligonucleotide
  Sense strand starting at position 415 of SEQ ID NO: 1242869
cacugagcuguuugcucau

SEQ ID NO: 1378617 - RNA, 19 nt, Artificial Sequence
  Description of Artificial Sequence: Synthetic oligonucleotide
  Antisense strand to SEQ ID NO: 1378616
augagcaaacagcucagug

SEQ ID NO: 1378618 - RNA, 19 nt, Artificial Sequence
  Description of Artificial Sequence: Synthetic oligonucleotide
  Sense strand starting at position 480 of SEQ ID NO: 1242869
auccuugcuggagaaguau

SEQ ID NO: 1378619 - RNA, 19 nt, Artificial Sequence
  Description of Artificial Sequence: Synthetic oligonucleotide
  Antisense strand to SEQ ID NO: 1378618
auacuucuccagcaaggau

SEQ ID NO: 1378620 - RNA, 19 nt, Artificial Sequence
  Description of Artificial Sequence: Synthetic oligonucleotide
  Sense strand starting at position 529 of SEQ ID NO: 1242869
cugccaauucugugacacu

SEQ ID NO: 1378621 - RNA, 19 nt, Artificial Sequence
  Description of Artificial Sequence: Synthetic oligonucleotide
  Antisense strand to SEQ ID NO: 1378620
agugucacagaauuggcag

SEQ ID NO: 1378622 - RNA, 19 nt, Artificial Sequence
  Description of Artificial Sequence: Synthetic oligonucleotide
  Sense strand starting at position 530 of SEQ ID NO: 1242869
ugccaauucugugacacuu

SEQ ID NO: 1378623 - RNA, 19 nt, Artificial Sequence
  Description of Artificial Sequence: Synthetic oligonucleotide
  Antisense strand to SEQ ID NO: 1378622
aagugucacagaauuggca

SEQ ID NO: 1378624 - RNA, 19 nt, Artificial Sequence
  Description of Artificial Sequence: Synthetic oligonucleotide
  Sense strand starting at position 672 of SEQ ID NO: 1242869
ccacaagaguuguuggaag

SEQ ID NO: 1378625 - RNA, 19 nt, Artificial Sequence
  Description of Artificial Sequence: Synthetic oligonucleotide
  Antisense strand to SEQ ID NO: 1378624
cuuccaacaacucuugugg

SEQ ID NO: 1378626 - RNA, 19 nt, Artificial Sequence
  Description of Artificial Sequence: Synthetic oligonucleotide
  Sense strand starting at position 674 of SEQ ID NO: 1242869
acaagaguuguuggaagau

SEQ ID NO: 1378627 - RNA, 19 nt, Artificial Sequence
  Description of Artificial Sequence: Synthetic oligonucleotide
  Antisense strand to SEQ ID NO: 1378626
aucuuccaacaacucuugu

SEQ ID NO: 1378628 - RNA, 19 nt, Artificial Sequence
  Description of Artificial Sequence: Synthetic oligonucleotide
  Sense strand starting at position 680 of SEQ ID NO: 1242869
guuguuggaagaugaaaga

SEQ ID NO: 1378629 - RNA, 19 nt, Artificial Sequence
  Description of Artificial Sequence: Synthetic oligonucleotide
  Antisense strand to SEQ ID NO: 1378628
ucuuucaucuuccaacaac

SEQ ID NO: 1378630 - RNA, 19 nt, Artificial Sequence
  Description of Artificial Sequence: Synthetic oligonucleotide
  Sense strand starting at position 693 of SEQ ID NO: 1242869
gaaagaacgugaguguaua

SEQ ID NO: 1378631 - RNA, 19 nt, Artificial Sequence
  Description of Artificial Sequence: Synthetic oligonucleotide
  Antisense strand to SEQ ID NO: 1378630
uauacacucacguucuuuc

SEQ ID NO: 1378632 - RNA, 19 nt, Artificial Sequence
  Description of Artificial Sequence: Synthetic oligonucleotide
  Sense strand starting at position 694 of SEQ ID NO: 1242869
aaagaacgugaguguauaa

SEQ ID NO: 1378633 - RNA, 19 nt, Artificial Sequence
  Description of Artificial Sequence: Synthetic oligonucleotide
  Antisense strand to SEQ ID NO: 1378632
uuauacacucacguucuuu

SEQ ID NO: 1378634 - RNA, 19 nt, Artificial Sequence
  Description of Artificial Sequence: Synthetic oligonucleotide
  Sense strand starting at position 751 of SEQ ID NO: 1242869
gaaugagcgccguagugaa

SEQ ID NO: 1378635 - RNA, 19 nt, Artificial Sequence
  Description of Artificial Sequence: Synthetic oligonucleotide
  Antisense strand to SEQ ID NO: 1378634
uucacuacggcgcucauuc

SEQ ID NO: 1378636 - RNA, 19 nt, Artificial Sequence
  Description of Artificial Sequence: Synthetic oligonucleotide
  Sense strand starting at position 912 of SEQ ID NO: 1242869
ggccuagacgagcaguuua

SEQ ID NO: 1378637 - RNA, 19 nt, Artificial Sequence
  Description of Artificial Sequence: Synthetic oligonucleotide
  Antisense strand to SEQ ID NO: 1378636
uaaacugcucgucuaggcc

SEQ ID NO: 1378638 - RNA, 19 nt, Artificial Sequence
  Description of Artificial Sequence: Synthetic oligonucleotide
  Sense strand starting at position 1172 of SEQ ID NO: 1242869
aggaguagguuccugcaau

SEQ ID NO: 1378639 - RNA, 19 nt, Artificial Sequence
  Description of Artificial Sequence: Synthetic oligonucleotide
  Antisense strand to SEQ ID NO: 1378638
auugcaggaaccuacuccu

SEQ ID NO: 1378640 - RNA, 19 nt, Artificial Sequence
  Description of Artificial Sequence: Synthetic oligonucleotide
  Sense strand starting at position 1173 of SEQ ID NO: 1242869
ggaguagguuccugcaaug

SEQ ID NO: 1378641 - RNA, 19 nt, Artificial Sequence
  Description of Artificial Sequence: Synthetic oligonucleotide
  Antisense strand to SEQ ID NO: 1378640
cauugcaggaaccuacucc

SEQ ID NO: 1378642 - RNA, 19 nt, Artificial Sequence
  Description of Artificial Sequence: Synthetic oligonucleotide
  Sense strand starting at position 1179 of SEQ ID NO: 1242869
gguuccugcaaugguugaa

SEQ ID NO: 1378643 - RNA, 19 nt, Artificial Sequence
  Description of Artificial Sequence: Synthetic oligonucleotide
  Antisense strand to SEQ ID NO: 1378642
uucaaccauugcaggaacc

SEQ ID NO: 1378644 - RNA, 19 nt, Artificial Sequence
  Description of Artificial Sequence: Synthetic oligonucleotide
  Sense strand starting at position 1252 of SEQ ID NO: 1242869
cgcgagagucgcucaaagu

SEQ ID NO: 1378645 - RNA, 19 nt, Artificial Sequence
  Description of Artificial Sequence: Synthetic oligonucleotide
  Antisense strand to SEQ ID NO: 1378644
acuuugagcgacucucgcg

SEQ ID NO: 1378646 - RNA, 19 nt, Artificial Sequence
  Description of Artificial Sequence: Synthetic oligonucleotide
  Sense strand starting at position 1253 of SEQ ID NO: 1242869
gcgagagucgcucaaaguu

SEQ ID NO: 1378647 - RNA, 19 nt, Artificial Sequence
  Description of Artificial Sequence: Synthetic oligonucleotide
  Antisense strand to SEQ ID NO: 1378646
aacuuugagcgacucucgc

SEQ ID NO: 1378648 - RNA, 19 nt, Artificial Sequence
  Description of Artificial Sequence: Synthetic oligonucleotide
  Sense strand starting at position 1339 of SEQ ID NO: 1242869
gccaaucccgcccagaaau

SEQ ID NO: 1378649 - RNA, 19 nt, Artificial Sequence
  Description of Artificial Sequence: Synthetic oligonucleotide
  Antisense strand to SEQ ID NO: 1378648
auuucugggcgggauuggc

SEQ ID NO: 1378650 - RNA, 19 nt, Artificial Sequence
  Description of Artificial Sequence: Synthetic oligonucleotide
  Sense strand starting at position 1350 of SEQ ID NO: 1242869
ccagaaauguccucacguc

SEQ ID NO: 1378651 - RNA, 19 nt, Artificial Sequence
  Description of Artificial Sequence: Synthetic oligonucleotide
  Antisense strand to SEQ ID NO: 1378650
gacgugaggacauuucugg

SEQ ID NO: 1378652 - RNA, 19 nt, Artificial Sequence
  Description of Artificial Sequence: Synthetic oligonucleotide
  Sense strand starting at position 1498 of SEQ ID NO: 1242869
gcacgaaccagcgauuugu

SEQ ID NO: 1378653 - RNA, 19 nt, Artificial Sequence
  Description of Artificial Sequence: Synthetic oligonucleotide
  Antisense strand to SEQ ID NO: 1378652
acaaaucgcugguucgugc

SEQ ID NO: 1378654 - RNA, 19 nt, Artificial Sequence
  Description of Artificial Sequence: Synthetic oligonucleotide
  Sense strand starting at position 1639 of SEQ ID NO: 1242869
uugccaaacuaggaggauu

SEQ ID NO: 1378655 - RNA, 19 nt, Artificial Sequence
  Description of Artificial Sequence: Synthetic oligonucleotide
  Antisense strand to SEQ ID NO: 1378654
aauccuccuaguuuggcaa

SEQ ID NO: 1378656 - RNA, 19 nt, Artificial Sequence
  Description of Artificial Sequence: Synthetic oligonucleotide
  Sense strand starting at position 1806 of SEQ ID NO: 1242869
gagucauggccgcagagga

SEQ ID NO: 1378657 - RNA, 19 nt, Artificial Sequence
  Description of Artificial Sequence: Synthetic oligonucleotide
  Antisense strand to SEQ ID NO: 1378656
uccucugcggccaugacuc

SEQ ID NO: 1378658 - RNA, 19 nt, Artificial Sequence
  Description of Artificial Sequence: Synthetic oligonucleotide
  Sense strand starting at position 2008 of SEQ ID NO: 1242869
gcccucuccaggcgaguua

SEQ ID NO: 1378659 - RNA, 19 nt, Artificial Sequence
  Description of Artificial Sequence: Synthetic oligonucleotide
  Antisense strand to SEQ ID NO: 1378658
uaacucgccuggagagggc

SEQ ID NO: 1378660 - RNA, 19 nt, Artificial Sequence
  Description of Artificial Sequence: Synthetic oligonucleotide
  Sense strand starting at position 2227 of SEQ ID NO: 1242869
ggucgucaggccucugcaa

SEQ ID NO: 1378661 - RNA, 19 nt, Artificial Sequence
  Description of Artificial Sequence: Synthetic oligonucleotide
  Antisense strand to SEQ ID NO: 1378660
uugcagaggccugacgacc

SEQ ID NO: 1378662 - RNA, 19 nt, Artificial Sequence
  Description of Artificial Sequence: Synthetic oligonucleotide
  Sense strand starting at position 2228 of SEQ ID NO: 1242869
gucgucaggccucugcaaa

SEQ ID NO: 1378663 - RNA, 19 nt, Artificial Sequence
  Description of Artificial Sequence: Synthetic oligonucleotide
  Antisense strand to SEQ ID NO: 1378662
uuugcagaggccugacgac

SEQ ID NO: 1378664 - RNA, 19 nt, Artificial Sequence
  Description of Artificial Sequence: Synthetic oligonucleotide
  Sense strand starting at position 2363 of SEQ ID NO: 1242869
ggugagaguugccggguau

SEQ ID NO: 1378665 - RNA, 19 nt, Artificial Sequence
  Description of Artificial Sequence: Synthetic oligonucleotide
  Antisense strand to SEQ ID NO: 1378664
auacccggcaacucucacc

SEQ ID NO: 1378666 - RNA, 19 nt, Artificial Sequence
  Description of Artificial Sequence: Synthetic oligonucleotide
  Sense strand starting at position 2364 of SEQ ID NO: 1242869
gugagaguugccggguauc

SEQ ID NO: 1378667 - RNA, 19 nt, Artificial Sequence
  Description of Artificial Sequence: Synthetic oligonucleotide
  Antisense strand to SEQ ID NO: 1378666
gauacccggcaacucucac

SEQ ID NO: 1378668 - RNA, 19 nt, Artificial Sequence
  Description of Artificial Sequence: Synthetic oligonucleotide
  Sense strand starting at position 2430 of SEQ ID NO: 1242869
cgggaacaucagcguuguu

SEQ ID NO: 1378669 - RNA, 19 nt, Artificial Sequence
  Description of Artificial Sequence: Synthetic oligonucleotide
  Antisense strand to SEQ ID NO: 1378668
aacaacgcugauguucccg

SEQ ID NO: 1378670 - RNA, 19 nt, Artificial Sequence
  Description of Artificial Sequence: Synthetic oligonucleotide
  Sense strand starting at position 2433 of SEQ ID NO: 1242869
gaacaucagcguuguuaga

SEQ ID NO: 1378671 - RNA, 19 nt, Artificial Sequence
  Description of Artificial Sequence: Synthetic oligonucleotide
  Antisense strand to SEQ ID NO: 1378670
ucuaacaacgcugauguuc

SEQ ID NO: 1378672 - RNA, 19 nt, Artificial Sequence
  Description of Artificial Sequence: Synthetic oligonucleotide
  Sense strand starting at position 2483 of SEQ ID NO: 1242869
agggcuuguccacgcagau

SEQ ID NO: 1378673 - RNA, 19 nt, Artificial Sequence
  Description of Artificial Sequence: Synthetic oligonucleotide
  Antisense strand to SEQ ID NO: 1378672
aucugcguggacaagcccu

SEQ ID NO: 1378674 - RNA, 19 nt, Artificial Sequence
  Description of Artificial Sequence: Synthetic oligonucleotide
  Sense strand starting at position 2712 of SEQ ID NO: 1242869
ggagaagcugccuggagau

SEQ ID NO: 1378675 - RNA, 19 nt, Artificial Sequence
  Description of Artificial Sequence: Synthetic oligonucleotide
  Antisense strand to SEQ ID NO: 1378674
aucuccaggcagcuucucc

SEQ ID NO: 1378676 - RNA, 19 nt, Artificial Sequence
  Description of Artificial Sequence: Synthetic oligonucleotide
  Sense strand starting at position 3147 of SEQ ID NO: 1242869
agagcucaugcccgggaaa

SEQ ID NO: 1378677 - RNA, 19 nt, Artificial Sequence
  Description of Artificial Sequence: Synthetic oligonucleotide
  Antisense strand to SEQ ID NO: 1378676
uuucccgggcaugagcucu

SEQ ID NO: 1378678 - RNA, 19 nt, Artificial Sequence
  Description of Artificial Sequence: Synthetic oligonucleotide
  Sense strand starting at position 3471 of SEQ ID NO: 1242869
cccgauaagccuggaaugu

SEQ ID NO: 1378679 - RNA, 19 nt, Artificial Sequence
  Description of Artificial Sequence: Synthetic oligonucleotide
  Antisense strand to SEQ ID NO: 1378678
acauuccaggcuuaucggg

SEQ ID NO: 1378680 - RNA, 19 nt, Artificial Sequence
  Description of Artificial Sequence: Synthetic oligonucleotide
  Sense strand starting at position 3891 of SEQ ID NO: 1242869
agcgcuuucccacggaaga

SEQ ID NO: 1378681 - RNA, 19 nt, Artificial Sequence
  Description of Artificial Sequence: Synthetic oligonucleotide
  Antisense strand to SEQ ID NO: 1378680
ucuuccgugggaaagcgcu

SEQ ID NO: 1378682 - RNA, 19 nt, Artificial Sequence
  Description of Artificial Sequence: Synthetic oligonucleotide
  Sense strand starting at position 3910 of SEQ ID NO: 1242869
cgcgcuuaugcguguccaa

SEQ ID NO: 1378683 - RNA, 19 nt, Artificial Sequence
  Description of Artificial Sequence: Synthetic oligonucleotide
  Antisense strand to SEQ ID NO: 1378682
uuggacacgcauaagcgcg

SEQ ID NO: 1378684 - RNA, 19 nt, Artificial Sequence
  Description of Artificial Sequence: Synthetic oligonucleotide
  Sense strand starting at position 3911 of SEQ ID NO: 1242869
gcgcuuaugcguguccaag

SEQ ID NO: 1378685 - RNA, 19 nt, Artificial Sequence
  Description of Artificial Sequence: Synthetic oligonucleotide
  Antisense strand to SEQ ID NO: 1378684
cuuggacacgcauaagcgc

SEQ ID NO: 1378686 - RNA, 19 nt, Artificial Sequence
  Description of Artificial Sequence: Synthetic oligonucleotide
  Sense strand starting at position 3912 of SEQ ID NO: 1242869
cgcuuaugcguguccaagu

SEQ ID NO: 1378687 - RNA, 19 nt, Artificial Sequence
  Description of Artificial Sequence: Synthetic oligonucleotide
  Antisense strand to SEQ ID NO: 1378686
acuuggacacgcauaagcg

SEQ ID NO: 1378688 - RNA, 19 nt, Artificial Sequence
  Description of Artificial Sequence: Synthetic oligonucleotide
  Sense strand starting at position 99 of SEQ ID NO: 1242870
uagaguacuggccaaucua

SEQ ID NO: 1378689 - RNA, 19 nt, Artificial Sequence
  Description of Artificial Sequence: Synthetic oligonucleotide
  Antisense strand to SEQ ID NO: 1378688
uagauuggccaguacucua

SEQ ID NO: 1378690 - RNA, 19 nt, Artificial Sequence
  Description of Artificial Sequence: Synthetic oligonucleotide
  Sense strand starting at position 121 of SEQ ID NO: 1242870
ggaucuuggcaauguccua

SEQ ID NO: 1378691 - RNA, 19 nt, Artificial Sequence
  Description of Artificial Sequence: Synthetic oligonucleotide
  Antisense strand to SEQ ID NO: 1378690
uaggacauugccaagaucc

SEQ ID NO: 1378692 - RNA, 19 nt, Artificial Sequence
  Description of Artificial Sequence: Synthetic oligonucleotide
  Sense strand starting at position 233 of SEQ ID NO: 1242870
gccaguacucgcucagcca

SEQ ID NO: 1378693 - RNA, 19 nt, Artificial Sequence
  Description of Artificial Sequence: Synthetic oligonucleotide
  Antisense strand to SEQ ID NO: 1378692
uggcugagcgaguacuggc

SEQ ID NO: 1378694 - RNA, 19 nt, Artificial Sequence
  Description of Artificial Sequence: Synthetic oligonucleotide
  Sense strand starting at position 250 of SEQ ID NO: 1242870
cacucuguuagggaagagu

SEQ ID NO: 1378695 - RNA, 19 nt, Artificial Sequence
  Description of Artificial Sequence: Synthetic oligonucleotide
  Antisense strand to SEQ ID NO: 1378694
acucuucccuaacagagug

SEQ ID NO: 1378696 - RNA, 19 nt, Artificial Sequence
  Description of Artificial Sequence: Synthetic oligonucleotide
  Sense strand starting at position 259 of SEQ ID NO: 1242870
agggaagaguuugaauaua

SEQ ID NO: 1378697 - RNA, 19 nt, Artificial Sequence
  Description of Artificial Sequence: Synthetic oligonucleotide
  Antisense strand to SEQ ID NO: 1378696
uauauucaaacucuucccu

SEQ ID NO: 1378698 - RNA, 19 nt, Artificial Sequence
  Description of Artificial Sequence: Synthetic oligonucleotide
  Sense strand starting at position 270 of SEQ ID NO: 1242870
ugaauauacugauaaccag

SEQ ID NO: 1378699 - RNA, 19 nt, Artificial Sequence
  Description of Artificial Sequence: Synthetic oligonucleotide
  Antisense strand to SEQ ID NO: 1378698
cugguuaucaguauauuca

SEQ ID NO: 1378700 - RNA, 19 nt, Artificial Sequence
  Description of Artificial Sequence: Synthetic oligonucleotide
  Sense strand starting at position 310 of SEQ ID NO: 1242870
ggugucuguccugacucaa

SEQ ID NO: 1378701 - RNA, 19 nt, Artificial Sequence
  Description of Artificial Sequence: Synthetic oligonucleotide
  Antisense strand to SEQ ID NO: 1378700
uugagucaggacagacacc

SEQ ID NO: 1378702 - RNA, 19 nt, Artificial Sequence
  Description of Artificial Sequence: Synthetic oligonucleotide
  Sense strand starting at position 406 of SEQ ID NO: 1242870
uggugugcugcucuaugca

SEQ ID NO: 1378703 - RNA, 19 nt, Artificial Sequence
  Description of Artificial Sequence: Synthetic oligonucleotide
  Antisense strand to SEQ ID NO: 1378702
ugcauagagcagcacacca

SEQ ID NO: 1378704 - RNA, 19 nt, Artificial Sequence
  Description of Artificial Sequence: Synthetic oligonucleotide
  Sense strand starting at position 451 of SEQ ID NO: 1242870
ugauuagggauggguguuu

SEQ ID NO: 1378705 - RNA, 19 nt, Artificial Sequence
  Description of Artificial Sequence: Synthetic oligonucleotide
  Antisense strand to SEQ ID NO: 1378704
aaacacccaucccuaauca

SEQ ID NO: 1378706 - RNA, 19 nt, Artificial Sequence
  Description of Artificial Sequence: Synthetic oligonucleotide
  Sense strand starting at position 597 of SEQ ID NO: 1242870
gucuguaaggccugggaca

SEQ ID NO: 1378707 - RNA, 19 nt, Artificial Sequence
  Description of Artificial Sequence: Synthetic oligonucleotide
  Antisense strand to SEQ ID NO: 1378706
ugucccaggccuuacagac

SEQ ID NO: 1378708 - RNA, 19 nt, Artificial Sequence
  Description of Artificial Sequence: Synthetic oligonucleotide
  Sense strand starting at position 598 of SEQ ID NO: 1242870
ucuguaaggccugggacau

SEQ ID NO: 1378709 - RNA, 19 nt, Artificial Sequence
  Description of Artificial Sequence: Synthetic oligonucleotide
  Antisense strand to SEQ ID NO: 1378708
augucccaggccuuacaga

SEQ ID NO: 1378710 - RNA, 19 nt, Artificial Sequence
  Description of Artificial Sequence: Synthetic oligonucleotide
  Sense strand starting at position 610 of SEQ ID NO: 1242870
gggacaugcccuggagcaa

SEQ ID NO: 1378711 - RNA, 19 nt, Artificial Sequence
  Description of Artificial Sequence: Synthetic oligonucleotide
  Antisense strand to SEQ ID NO: 1378710
uugcuccagggcauguccc

SEQ ID NO: 1378712 - RNA, 19 nt, Artificial Sequence
  Description of Artificial Sequence: Synthetic oligonucleotide
  Sense strand starting at position 708 of SEQ ID NO: 1242870
acgccuuccagguaugacu

SEQ ID NO: 1378713 - RNA, 19 nt, Artificial Sequence
  Description of Artificial Sequence: Synthetic oligonucleotide
  Antisense strand to SEQ ID NO: 1378712
agucauaccuggaaggcgu

SEQ ID NO: 1378714 - RNA, 19 nt, Artificial Sequence
  Description of Artificial Sequence: Synthetic oligonucleotide
  Sense strand starting at position 716 of SEQ ID NO: 1242870
cagguaugacugcaucacu

SEQ ID NO: 1378715 - RNA, 19 nt, Artificial Sequence
  Description of Artificial Sequence: Synthetic oligonucleotide
  Antisense strand to SEQ ID NO: 1378714
agugaugcagucauaccug

SEQ ID NO: 1378716 - RNA, 19 nt, Artificial Sequence
  Description of Artificial Sequence: Synthetic oligonucleotide
  Sense strand starting at position 1034 of SEQ ID NO: 1242870
gucccagcuuucuuauuua

SEQ ID NO: 1378717 - RNA, 19 nt, Artificial Sequence
  Description of Artificial Sequence: Synthetic oligonucleotide
  Antisense strand to SEQ ID NO: 1378716
uaaauaagaaagcugggac

SEQ ID NO: 1378718 - RNA, 19 nt, Artificial Sequence
  Description of Artificial Sequence: Synthetic oligonucleotide
  Sense strand starting at position 1558 of SEQ ID NO: 1242870
gcccuucugagaggaggaa

SEQ ID NO: 1378719 - RNA, 19 nt, Artificial Sequence
  Description of Artificial Sequence: Synthetic oligonucleotide
  Antisense strand to SEQ ID NO: 1378718
uuccuccucucagaagggc

SEQ ID NO: 1378720 - RNA, 19 nt, Artificial Sequence
  Description of Artificial Sequence: Synthetic oligonucleotide
  Sense strand starting at position 1676 of SEQ ID NO: 1242870
gcagaugucaagcgagaca

SEQ ID NO: 1378721 - RNA, 19 nt, Artificial Sequence
  Description of Artificial Sequence: Synthetic oligonucleotide
  Antisense strand to SEQ ID NO: 1378720
ugucucgcuugacaucugc

SEQ ID NO: 1378722 - RNA, 19 nt, Artificial Sequence
  Description of Artificial Sequence: Synthetic oligonucleotide
  Sense strand starting at position 1803 of SEQ ID NO: 1242870
ugaccuuggccuugagaac

SEQ ID NO: 1378723 - RNA, 19 nt, Artificial Sequence
  Description of Artificial Sequence: Synthetic oligonucleotide
  Antisense strand to SEQ ID NO: 1378722
guucucaaggccaagguca

SEQ ID NO: 1378724 - RNA, 19 nt, Artificial Sequence
  Description of Artificial Sequence: Synthetic oligonucleotide
  Sense strand starting at position 2038 of SEQ ID NO: 1242870
gaaagagugucugcacaga

SEQ ID NO: 1378725 - RNA, 19 nt, Artificial Sequence
  Description of Artificial Sequence: Synthetic oligonucleotide
  Antisense strand to SEQ ID NO: 1378724
ucugugcagacacucuuuc

SEQ ID NO: 1378726 - RNA, 19 nt, Artificial Sequence
  Description of Artificial Sequence: Synthetic oligonucleotide
  Sense strand starting at position 2104 of SEQ ID NO: 1242870
guguacuuguacucaacca

SEQ ID NO: 1378727 - RNA, 19 nt, Artificial Sequence
  Description of Artificial Sequence: Synthetic oligonucleotide
  Antisense strand to SEQ ID NO: 1378726
ugguugaguacaaguacac

SEQ ID NO: 1378728 - RNA, 19 nt, Artificial Sequence
  Description of Artificial Sequence: Synthetic oligonucleotide
  Sense strand starting at position 2145 of SEQ ID NO: 1242870
ccucuuagugcucaggaga

SEQ ID NO: 1378729 - RNA, 19 nt, Artificial Sequence
  Description of Artificial Sequence: Synthetic oligonucleotide
  Antisense strand to SEQ ID NO: 1378728
ucuccugagcacuaagagg

SEQ ID NO: 1378730 - RNA, 19 nt, Artificial Sequence
  Description of Artificial Sequence: Synthetic oligonucleotide
  Sense strand starting at position 2148 of SEQ ID NO: 1242870
cuuagugcucaggagagga

SEQ ID NO: 1378731 - RNA, 19 nt, Artificial Sequence
  Description of Artificial Sequence: Synthetic oligonucleotide
  Antisense strand to SEQ ID NO: 1378730
uccucuccugagcacuaag

SEQ ID NO: 1378732 - RNA, 19 nt, Artificial Sequence
  Description of Artificial Sequence: Synthetic oligonucleotide
  Sense strand starting at position 2361 of SEQ ID NO: 1242870
caugaaagcuguguuuauc

SEQ ID NO: 1378733 - RNA, 19 nt, Artificial Sequence
  Description of Artificial Sequence: Synthetic oligonucleotide
  Antisense strand to SEQ ID NO: 1378732
gauaaacacagcuuucaug

SEQ ID NO: 1378734 - RNA, 19 nt, Artificial Sequence
  Description of Artificial Sequence: Synthetic oligonucleotide
  Sense strand starting at position 2536 of SEQ ID NO: 1242870
uguguuuaucuugagaguu

SEQ ID NO: 1378735 - RNA, 19 nt, Artificial Sequence
  Description of Artificial Sequence: Synthetic oligonucleotide
  Antisense strand to SEQ ID NO: 1378734
aacucucaagauaaacaca

SEQ ID NO: 1378736 - RNA, 19 nt, Artificial Sequence
  Description of Artificial Sequence: Synthetic oligonucleotide
  Sense strand starting at position 2571 of SEQ ID NO: 1242870
gggacuauaaggugguaau

SEQ ID NO: 1378737 - RNA, 19 nt, Artificial Sequence
  Description of Artificial Sequence: Synthetic oligonucleotide
  Antisense strand to SEQ ID NO: 1378736
auuaccaccuuauaguccc

SEQ ID NO: 1378738 - RNA, 19 nt, Artificial Sequence
  Description of Artificial Sequence: Synthetic oligonucleotide
  Sense strand starting at position 2572 of SEQ ID NO: 1242870
ggacuauaaggugguaauu

SEQ ID NO: 1378739 - RNA, 19 nt, Artificial Sequence
  Description of Artificial Sequence: Synthetic oligonucleotide
  Antisense strand to SEQ ID NO: 1378738
aauuaccaccuuauagucc

SEQ ID NO: 1378740 - RNA, 19 nt, Artificial Sequence
  Description of Artificial Sequence: Synthetic oligonucleotide
  Sense strand starting at position 2633 of SEQ ID NO: 1242870
gacagaagugcucauucuc

SEQ ID NO: 1378741 - RNA, 19 nt, Artificial Sequence
  Description of Artificial Sequence: Synthetic oligonucleotide
  Antisense strand to SEQ ID NO: 1378740
gagaaugagcacuucuguc

SEQ ID NO: 1378742 - RNA, 19 nt, Artificial Sequence
  Description of Artificial Sequence: Synthetic oligonucleotide
  Sense strand starting at position 2688 of SEQ ID NO: 1242870
cugagucucucagucaaua

SEQ ID NO: 1378743 - RNA, 19 nt, Artificial Sequence
  Description of Artificial Sequence: Synthetic oligonucleotide
  Antisense strand to SEQ ID NO: 1378742
uauugacugagagacucag

SEQ ID NO: 1378744 - RNA, 19 nt, Artificial Sequence
  Description of Artificial Sequence: Synthetic oligonucleotide
  Sense strand starting at position 2788 of SEQ ID NO: 1242870
uaggcugaggccuauaaua

SEQ ID NO: 1378745 - RNA, 19 nt, Artificial Sequence
  Description of Artificial Sequence: Synthetic oligonucleotide
  Antisense strand to SEQ ID NO: 1378744
uauuauaggccucagccua

SEQ ID NO: 1378746 - RNA, 19 nt, Artificial Sequence
  Description of Artificial Sequence: Synthetic oligonucleotide
  Sense strand starting at position 2790 of SEQ ID NO: 1242870
ggcugaggccuauaauaua

SEQ ID NO: 1378747 - RNA, 19 nt, Artificial Sequence
  Description of Artificial Sequence: Synthetic oligonucleotide
  Antisense strand to SEQ ID NO: 1378746
uauauuauaggccucagcc

SEQ ID NO: 1378748 - RNA, 19 nt, Artificial Sequence
  Description of Artificial Sequence: Synthetic oligonucleotide
  Sense strand starting at position 2832 of SEQ ID NO: 1242870
gucuuaaucccuuaaaggu

SEQ ID NO: 1378749 - RNA, 19 nt, Artificial Sequence
  Description of Artificial Sequence: Synthetic oligonucleotide
  Antisense strand to SEQ ID NO: 1378748
accuuuaagggauuaagac

SEQ ID NO: 1378750 - RNA, 19 nt, Artificial Sequence
  Description of Artificial Sequence: Synthetic oligonucleotide
  Sense strand starting at position 3075 of SEQ ID NO: 1242870
cugagacggcauugaucuu

SEQ ID NO: 1378751 - RNA, 19 nt, Artificial Sequence
  Description of Artificial Sequence: Synthetic oligonucleotide
  Antisense strand to SEQ ID NO: 1378750
aagaucaaugccgucucag

SEQ ID NO: 1378752 - RNA, 19 nt, Artificial Sequence
  Description of Artificial Sequence: Synthetic oligonucleotide
  Sense strand starting at position 3286 of SEQ ID NO: 1242870
aggaaugacugagugcuuu

SEQ ID NO: 1378753 - RNA, 19 nt, Artificial Sequence
  Description of Artificial Sequence: Synthetic oligonucleotide
  Antisense strand to SEQ ID NO: 1378752
aaagcacucagucauuccu

SEQ ID NO: 1378754 - RNA, 19 nt, Artificial Sequence
  Description of Artificial Sequence: Synthetic oligonucleotide
  Sense strand starting at position 3294 of SEQ ID NO: 1242870
cugagugcuuuacugauau

SEQ ID NO: 1378755 - RNA, 19 nt, Artificial Sequence
  Description of Artificial Sequence: Synthetic oligonucleotide
  Antisense strand to SEQ ID NO: 1378754
auaucaguaaagcacucag

SEQ ID NO: 1378756 - RNA, 19 nt, Artificial Sequence
  Description of Artificial Sequence: Synthetic oligonucleotide
  Sense strand starting at position 3440 of SEQ ID NO: 1242870
gguagauauaguuagugcu

SEQ ID NO: 1378757 - RNA, 19 nt, Artificial Sequence
  Description of Artificial Sequence: Synthetic oligonucleotide
  Antisense strand to SEQ ID NO: 1378756
agcacuaacuauaucuacc

SEQ ID NO: 1378758 - RNA, 19 nt, Artificial Sequence
  Description of Artificial Sequence: Synthetic oligonucleotide
  Sense strand starting at position 3448 of SEQ ID NO: 1242870
uaguuagugcuugcuguuu

SEQ ID NO: 1378759 - RNA, 19 nt, Artificial Sequence
  Description of Artificial Sequence: Synthetic oligonucleotide
  Antisense strand to SEQ ID NO: 1378758
aaacagcaagcacuaacua

SEQ ID NO: 1378760 - RNA, 19 nt, Artificial Sequence
  Description of Artificial Sequence: Synthetic oligonucleotide
  Sense strand starting at position 3460 of SEQ ID NO: 1242870
gcuguuuggcaggaaguga

SEQ ID NO: 1378761 - RNA, 19 nt, Artificial Sequence
  Description of Artificial Sequence: Synthetic oligonucleotide
  Antisense strand to SEQ ID NO: 1378760
ucacuuccugccaaacagc

SEQ ID NO: 1378762 - RNA, 19 nt, Artificial Sequence
  Description of Artificial Sequence: Synthetic oligonucleotide
  Sense strand starting at position 3624 of SEQ ID NO: 1242870
ggauuagucagguagugug

SEQ ID NO: 1378763 - RNA, 19 nt, Artificial Sequence
  Description of Artificial Sequence: Synthetic oligonucleotide
  Antisense strand to SEQ ID NO: 1378762
cacacuaccugacuaaucc

SEQ ID NO: 1378764 - RNA, 19 nt, Artificial Sequence
  Description of Artificial Sequence: Synthetic oligonucleotide
  Sense strand starting at position 3668 of SEQ ID NO: 1242870
ggcagaguuagugauguug

SEQ ID NO: 1378765 - RNA, 19 nt, Artificial Sequence
  Description of Artificial Sequence: Synthetic oligonucleotide
  Antisense strand to SEQ ID NO: 1378764
caacaucacuaacucugcc

SEQ ID NO: 1378766 - RNA, 19 nt, Artificial Sequence
  Description of Artificial Sequence: Synthetic oligonucleotide
  Sense strand starting at position 3689 of SEQ ID NO: 1242870
gcagauuggcaaggaaagu

SEQ ID NO: 1378767 - RNA, 19 nt, Artificial Sequence
  Description of Artificial Sequence: Synthetic oligonucleotide
  Antisense strand to SEQ ID NO: 1378766
acuuuccuugccaaucugc

SEQ ID NO: 1378768 - RNA, 19 nt, Artificial Sequence
  Description of Artificial Sequence: Synthetic oligonucleotide
  Sense strand starting at position 116 of SEQ ID NO: 1242871
auacaacuugcuggaaguu

SEQ ID NO: 1378769 - RNA, 19 nt, Artificial Sequence
  Description of Artificial Sequence: Synthetic oligonucleotide
  Antisense strand to SEQ ID NO: 1378768
aacuuccagcaaguuguau

SEQ ID NO: 1378770 - RNA, 19 nt, Artificial Sequence
  Description of Artificial Sequence: Synthetic oligonucleotide
  Sense strand starting at position 125 of SEQ ID NO: 1242871
gcuggaaguucuuaggaaa

SEQ ID NO: 1378771 - RNA, 19 nt, Artificial Sequence
  Description of Artificial Sequence: Synthetic oligonucleotide
  Antisense strand to SEQ ID NO: 1378770
uuuccuaagaacuuccagc

SEQ ID NO: 1378772 - RNA, 19 nt, Artificial Sequence
  Description of Artificial Sequence: Synthetic oligonucleotide
  Sense strand starting at position 128 of SEQ ID NO: 1242871
ggaaguucuuaggaaacaa

SEQ ID NO: 1378773 - RNA, 19 nt, Artificial Sequence
  Description of Artificial Sequence: Synthetic oligonucleotide
  Antisense strand to SEQ ID NO: 1378772
uuguuuccuaagaacuucc

SEQ ID NO: 1378774 - RNA, 19 nt, Artificial Sequence
  Description of Artificial Sequence: Synthetic oligonucleotide
  Sense strand starting at position 403 of SEQ ID NO: 1242871
guccuuaaguccgccaaua

SEQ ID NO: 1378775 - RNA, 19 nt, Artificial Sequence
  Description of Artificial Sequence: Synthetic oligonucleotide
  Antisense strand to SEQ ID NO: 1378774
uauuggcggacuuaaggac

SEQ ID NO: 1378776 - RNA, 19 nt, Artificial Sequence
  Description of Artificial Sequence: Synthetic oligonucleotide
  Sense strand starting at position 405 of SEQ ID NO: 1242871
ccuuaaguccgccaauauc

SEQ ID NO: 1378777 - RNA, 19 nt, Artificial Sequence
  Description of Artificial Sequence: Synthetic oligonucleotide
  Antisense strand to SEQ ID NO: 1378776
gauauuggcggacuuaagg

SEQ ID NO: 1378778 - RNA, 19 nt, Artificial Sequence
  Description of Artificial Sequence: Synthetic oligonucleotide
  Sense strand starting at position 414 of SEQ ID NO: 1242871
cgccaauaucaccguacau

SEQ ID NO: 1378779 - RNA, 19 nt, Artificial Sequence
  Description of Artificial Sequence: Synthetic oligonucleotide
  Antisense strand to SEQ ID NO: 1378778
auguacggugauauuggcg

SEQ ID NO: 1378780 - RNA, 19 nt, Artificial Sequence
  Description of Artificial Sequence: Synthetic oligonucleotide
  Sense strand starting at position 424 of SEQ ID NO: 1242871
accguacauucugugcaau

SEQ ID NO: 1378781 - RNA, 19 nt, Artificial Sequence
  Description of Artificial Sequence: Synthetic oligonucleotide
  Antisense strand to SEQ ID NO: 1378780
auugcacagaauguacggu

SEQ ID NO: 1378782 - RNA, 19 nt, Artificial Sequence
  Description of Artificial Sequence: Synthetic oligonucleotide
  Sense strand starting at position 426 of SEQ ID NO: 1242871
cguacauucugugcaauca

SEQ ID NO: 1378783 - RNA, 19 nt, Artificial Sequence
  Description of Artificial Sequence: Synthetic oligonucleotide
  Antisense strand to SEQ ID NO: 1378782
ugauugcacagaauguacg

SEQ ID NO: 1378784 - RNA, 19 nt, Artificial Sequence
  Description of Artificial Sequence: Synthetic oligonucleotide
  Sense strand starting at position 427 of SEQ ID NO: 1242871
guacauucugugcaaucaa

SEQ ID NO: 1378785 - RNA, 19 nt, Artificial Sequence
  Description of Artificial Sequence: Synthetic oligonucleotide
  Antisense strand to SEQ ID NO: 1378784
uugauugcacagaauguac

SEQ ID NO: 1378786 - RNA, 19 nt, Artificial Sequence
  Description of Artificial Sequence: Synthetic oligonucleotide
  Sense strand starting at position 1049 of SEQ ID NO: 1242871
ccaggaauucucgacgcaa

SEQ ID NO: 1378787 - RNA, 19 nt, Artificial Sequence
  Description of Artificial Sequence: Synthetic oligonucleotide
  Antisense strand to SEQ ID NO: 1378786
uugcgucgagaauuccugg

SEQ ID NO: 1378788 - RNA, 19 nt, Artificial Sequence
  Description of Artificial Sequence: Synthetic oligonucleotide
  Sense strand starting at position 1051 of SEQ ID NO: 1242871
aggaauucucgacgcaaac

SEQ ID NO: 1378789 - RNA, 19 nt, Artificial Sequence
  Description of Artificial Sequence: Synthetic oligonucleotide
  Antisense strand to SEQ ID NO: 1378788
guuugcgucgagaauuccu

SEQ ID NO: 1378790 - RNA, 19 nt, Artificial Sequence
  Description of Artificial Sequence: Synthetic oligonucleotide
  Sense strand starting at position 1972 of SEQ ID NO: 1242871
gcgguucuuggcgugcgaa

SEQ ID NO: 1378791 - RNA, 19 nt, Artificial Sequence
  Description of Artificial Sequence: Synthetic oligonucleotide
  Antisense strand to SEQ ID NO: 1378790
uucgcacgccaagaaccgc

SEQ ID NO: 1378792 - RNA, 19 nt, Artificial Sequence
  Description of Artificial Sequence: Synthetic oligonucleotide
  Sense strand starting at position 2021 of SEQ ID NO: 1242871
cugguucuuccguuguuua

SEQ ID NO: 1378793 - RNA, 19 nt, Artificial Sequence
  Description of Artificial Sequence: Synthetic oligonucleotide
  Antisense strand to SEQ ID NO: 1378792
uaaacaacggaagaaccag

SEQ ID NO: 1378794 - RNA, 19 nt, Artificial Sequence
  Description of Artificial Sequence: Synthetic oligonucleotide
  Sense strand starting at position 2022 of SEQ ID NO: 1242871
ugguucuuccguuguuuaa

SEQ ID NO: 1378795 - RNA, 19 nt, Artificial Sequence
  Description of Artificial Sequence: Synthetic oligonucleotide
  Antisense strand to SEQ ID NO: 1378794
uuaaacaacggaagaacca

SEQ ID NO: 1378796 - RNA, 19 nt, Artificial Sequence
  Description of Artificial Sequence: Synthetic oligonucleotide
  Sense strand starting at position 2024 of SEQ ID NO: 1242871
guucuuccguuguuuaaag

SEQ ID NO: 1378797 - RNA, 19 nt, Artificial Sequence
  Description of Artificial Sequence: Synthetic oligonucleotide
  Antisense strand to SEQ ID NO: 1378796
cuuuaaacaacggaagaac

SEQ ID NO: 1378798 - RNA, 19 nt, Artificial Sequence
  Description of Artificial Sequence: Synthetic oligonucleotide
  Sense strand starting at position 2025 of SEQ ID NO: 1242871
uucuuccguuguuuaaaga

SEQ ID NO: 1378799 - RNA, 19 nt, Artificial Sequence
  Description of Artificial Sequence: Synthetic oligonucleotide
  Antisense strand to SEQ ID NO: 1378798
ucuuuaaacaacggaagaa

SEQ ID NO: 1378800 - RNA, 19 nt, Artificial Sequence
  Description of Artificial Sequence: Synthetic oligonucleotide
  Sense strand starting at position 2439 of SEQ ID NO: 1242871
uagagaucaugcggcauua

SEQ ID NO: 1378801 - RNA, 19 nt, Artificial Sequence
  Description of Artificial Sequence: Synthetic oligonucleotide
  Antisense strand to SEQ ID NO: 1378800
uaaugccgcaugaucucua

SEQ ID NO: 1378802 - RNA, 19 nt, Artificial Sequence
  Description of Artificial Sequence: Synthetic oligonucleotide
  Sense strand starting at position 2441 of SEQ ID NO: 1242871
gagaucaugcggcauuaag

SEQ ID NO: 1378803 - RNA, 19 nt, Artificial Sequence
  Description of Artificial Sequence: Synthetic oligonucleotide
  Antisense strand to SEQ ID NO: 1378802
cuuaaugccgcaugaucuc

SEQ ID NO: 1378804 - RNA, 19 nt, Artificial Sequence
  Description of Artificial Sequence: Synthetic oligonucleotide
  Sense strand starting at position 2532 of SEQ ID NO: 1242871
gagagccguuaucuauaga

SEQ ID NO: 1378805 - RNA, 19 nt, Artificial Sequence
  Description of Artificial Sequence: Synthetic oligonucleotide
  Antisense strand to SEQ ID NO: 1378804
ucuauagauaacggcucuc

SEQ ID NO: 1378806 - RNA, 19 nt, Artificial Sequence
  Description of Artificial Sequence: Synthetic oligonucleotide
  Sense strand starting at position 2533 of SEQ ID NO: 1242871
agagccguuaucuauagau

SEQ ID NO: 1378807 - RNA, 19 nt, Artificial Sequence
  Description of Artificial Sequence: Synthetic oligonucleotide
  Antisense strand to SEQ ID NO: 1378806
aucuauagauaacggcucu

SEQ ID NO: 1378808 - RNA, 19 nt, Artificial Sequence
  Description of Artificial Sequence: Synthetic oligonucleotide
  Sense strand starting at position 2537 of SEQ ID NO: 1242871
ccguuaucuauagaugcga

SEQ ID NO: 1378809 - RNA, 19 nt, Artificial Sequence
  Description of Artificial Sequence: Synthetic oligonucleotide
  Antisense strand to SEQ ID NO: 1378808
ucgcaucuauagauaacgg

SEQ ID NO: 1378810 - RNA, 19 nt, Artificial Sequence
  Description of Artificial Sequence: Synthetic oligonucleotide
  Sense strand starting at position 2659 of SEQ ID NO: 1242871
ucccaaguguguuccaguu

SEQ ID NO: 1378811 - RNA, 19 nt, Artificial Sequence
  Description of Artificial Sequence: Synthetic oligonucleotide
  Antisense strand to SEQ ID NO: 1378810
aacuggaacacacuuggga

SEQ ID NO: 1378812 - RNA, 19 nt, Artificial Sequence
  Description of Artificial Sequence: Synthetic oligonucleotide
  Sense strand starting at position 2661 of SEQ ID NO: 1242871
ccaaguguguuccaguuac

SEQ ID NO: 1378813 - RNA, 19 nt, Artificial Sequence
  Description of Artificial Sequence: Synthetic oligonucleotide
  Antisense strand to SEQ ID NO: 1378812
guaacuggaacacacuugg

SEQ ID NO: 1378814 - RNA, 19 nt, Artificial Sequence
  Description of Artificial Sequence: Synthetic oligonucleotide
  Sense strand starting at position 2723 of SEQ ID NO: 1242871
guucuuguagcagaugaag

SEQ ID NO: 1378815 - RNA, 19 nt, Artificial Sequence
  Description of Artificial Sequence: Synthetic oligonucleotide
  Antisense strand to SEQ ID NO: 1378814
cuucaucugcuacaagaac

SEQ ID NO: 1378816 - RNA, 19 nt, Artificial Sequence
  Description of Artificial Sequence: Synthetic oligonucleotide
  Sense strand starting at position 2966 of SEQ ID NO: 1242871
uuggcugcauucuagaaga

SEQ ID NO: 1378817 - RNA, 19 nt, Artificial Sequence
  Description of Artificial Sequence: Synthetic oligonucleotide
  Antisense strand to SEQ ID NO: 1378816
ucuucuagaaugcagccaa

SEQ ID NO: 1378818 - RNA, 19 nt, Artificial Sequence
  Description of Artificial Sequence: Synthetic oligonucleotide
  Sense strand starting at position 2968 of SEQ ID NO: 1242871
ggcugcauucuagaagaca

SEQ ID NO: 1378819 - RNA, 19 nt, Artificial Sequence
  Description of Artificial Sequence: Synthetic oligonucleotide
  Antisense strand to SEQ ID NO: 1378818
ugucuucuagaaugcagcc

SEQ ID NO: 1378820 - RNA, 19 nt, Artificial Sequence
  Description of Artificial Sequence: Synthetic oligonucleotide
  Sense strand starting at position 3068 of SEQ ID NO: 1242871
cuccuugcccugggugaua

SEQ ID NO: 1378821 - RNA, 19 nt, Artificial Sequence
  Description of Artificial Sequence: Synthetic oligonucleotide
  Antisense strand to SEQ ID NO: 1378820
uaucacccagggcaaggag

SEQ ID NO: 1378822 - RNA, 19 nt, Artificial Sequence
  Description of Artificial Sequence: Synthetic oligonucleotide
  Sense strand starting at position 3104 of SEQ ID NO: 1242871
agacuuuacggcugguaca

SEQ ID NO: 1378823 - RNA, 19 nt, Artificial Sequence
  Description of Artificial Sequence: Synthetic oligonucleotide
  Antisense strand to SEQ ID NO: 1378822
uguaccagccguaaagucu

SEQ ID NO: 1378824 - RNA, 19 nt, Artificial Sequence
  Description of Artificial Sequence: Synthetic oligonucleotide
  Sense strand starting at position 3158 of SEQ ID NO: 1242871
guggcaaagccagguauca

SEQ ID NO: 1378825 - RNA, 19 nt, Artificial Sequence
  Description of Artificial Sequence: Synthetic oligonucleotide
  Antisense strand to SEQ ID NO: 1378824
ugauaccuggcuuugccac

SEQ ID NO: 1378826 - RNA, 19 nt, Artificial Sequence
  Description of Artificial Sequence: Synthetic oligonucleotide
  Sense strand starting at position 3160 of SEQ ID NO: 1242871
ggcaaagccagguaucaac

SEQ ID NO: 1378827 - RNA, 19 nt, Artificial Sequence
  Description of Artificial Sequence: Synthetic oligonucleotide
  Antisense strand to SEQ ID NO: 1378826
guugauaccuggcuuugcc

SEQ ID NO: 1378828 - RNA, 19 nt, Artificial Sequence
  Description of Artificial Sequence: Synthetic oligonucleotide
  Sense strand starting at position 3169 of SEQ ID NO: 1242871
agguaucaaccagaugucu

SEQ ID NO: 1378829 - RNA, 19 nt, Artificial Sequence
  Description of Artificial Sequence: Synthetic oligonucleotide
  Antisense strand to SEQ ID NO: 1378828
agacaucugguugauaccu

SEQ ID NO: 1378830 - RNA, 19 nt, Artificial Sequence
  Description of Artificial Sequence: Synthetic oligonucleotide
  Sense strand starting at position 3243 of SEQ ID NO: 1242871
cagaaaggcuguuucgaau

SEQ ID NO: 1378831 - RNA, 19 nt, Artificial Sequence
  Description of Artificial Sequence: Synthetic oligonucleotide
  Antisense strand to SEQ ID NO: 1378830
auucgaaacagccuuucug

SEQ ID NO: 1378832 - RNA, 19 nt, Artificial Sequence
  Description of Artificial Sequence: Synthetic oligonucleotide
  Sense strand starting at position 3374 of SEQ ID NO: 1242871
cucauuguccaccgugaag

SEQ ID NO: 1378833 - RNA, 19 nt, Artificial Sequence
  Description of Artificial Sequence: Synthetic oligonucleotide
  Antisense strand to SEQ ID NO: 1378832
cuucacgguggacaaugag

SEQ ID NO: 1378834 - RNA, 19 nt, Artificial Sequence
  Description of Artificial Sequence: Synthetic oligonucleotide
  Sense strand starting at position 3412 of SEQ ID NO: 1242871
gggagugcaucuugaagag

SEQ ID NO: 1378835 - RNA, 19 nt, Artificial Sequence
  Description of Artificial Sequence: Synthetic oligonucleotide
  Antisense strand to SEQ ID NO: 1378834
cucuucaagaugcacuccc

SEQ ID NO: 1378836 - RNA, 19 nt, Artificial Sequence
  Description of Artificial Sequence: Synthetic oligonucleotide
  Sense strand starting at position 3495 of SEQ ID NO: 1242871
cccucacuagugugagcau

SEQ ID NO: 1378837 - RNA, 19 nt, Artificial Sequence
  Description of Artificial Sequence: Synthetic oligonucleotide
  Antisense strand to SEQ ID NO: 1378836
augcucacacuagugaggg

SEQ ID NO: 1378838 - RNA, 19 nt, Artificial Sequence
  Description of Artificial Sequence: Synthetic oligonucleotide
  Sense strand starting at position 3496 of SEQ ID NO: 1242871
ccucacuagugugagcauu

SEQ ID NO: 1378839 - RNA, 19 nt, Artificial Sequence
  Description of Artificial Sequence: Synthetic oligonucleotide
  Antisense strand to SEQ ID NO: 1378838
aaugcucacacuagugagg

SEQ ID NO: 1378840 - RNA, 19 nt, Artificial Sequence
  Description of Artificial Sequence: Synthetic oligonucleotide
  Sense strand starting at position 3849 of SEQ ID NO: 1242871
acugcuucgucuucucuaa

SEQ ID NO: 1378841 - RNA, 19 nt, Artificial Sequence
  Description of Artificial Sequence: Synthetic oligonucleotide
  Antisense strand to SEQ ID NO: 1378840
uuagagaagacgaagcagu

SEQ ID NO: 1378842 - RNA, 19 nt, Artificial Sequence
  Description of Artificial Sequence: Synthetic oligonucleotide
  Sense strand starting at position 3851 of SEQ ID NO: 1242871
ugcuucgucuucucuaaca

SEQ ID NO: 1378843 - RNA, 19 nt, Artificial Sequence
  Description of Artificial Sequence: Synthetic oligonucleotide
  Antisense strand to SEQ ID NO: 1378842
uguuagagaagacgaagca

SEQ ID NO: 1378844 - RNA, 19 nt, Artificial Sequence
  Description of Artificial Sequence: Synthetic oligonucleotide
  Sense strand starting at position 3939 of SEQ ID NO: 1242871
ccagccuuugccuaggaaa

SEQ ID NO: 1378845 - RNA, 19 nt, Artificial Sequence
  Description of Artificial Sequence: Synthetic oligonucleotide
  Antisense strand to SEQ ID NO: 1378844
uuuccuaggcaaaggcugg

SEQ ID NO: 1378846 - RNA, 19 nt, Artificial Sequence
  Description of Artificial Sequence: Synthetic oligonucleotide
  Sense strand starting at position 3941 of SEQ ID NO: 1242871
agccuuugccuaggaaaca

SEQ ID NO: 1378847 - RNA, 19 nt, Artificial Sequence
  Description of Artificial Sequence: Synthetic oligonucleotide
  Antisense strand to SEQ ID NO: 1378846
uguuuccuaggcaaaggcu

SEQ ID NO: 1378848 - RNA, 19 nt, Artificial Sequence
  Description of Artificial Sequence: Synthetic oligonucleotide
  Sense strand starting at position 41 of SEQ ID NO: 1242872
guaggcaucuuauuaucuu

SEQ ID NO: 1378849 - RNA, 19 nt, Artificial Sequence
  Description of Artificial Sequence: Synthetic oligonucleotide
  Antisense strand to SEQ ID NO: 1378848
aagauaauaagaugccuac

SEQ ID NO: 1378850 - RNA, 19 nt, Artificial Sequence
  Description of Artificial Sequence: Synthetic oligonucleotide
  Sense strand starting at position 176 of SEQ ID NO: 1242872
cuagaauuauagccacaug

SEQ ID NO: 1378851 - RNA, 19 nt, Artificial Sequence
  Description of Artificial Sequence: Synthetic oligonucleotide
  Antisense strand to SEQ ID NO: 1378850
cauguggcuauaauucuag

SEQ ID NO: 1378852 - RNA, 19 nt, Artificial Sequence
  Description of Artificial Sequence: Synthetic oligonucleotide
  Sense strand starting at position 341 of SEQ ID NO: 1242872
ggccucauguuaucaucuu

SEQ ID NO: 1378853 - RNA, 19 nt, Artificial Sequence
  Description of Artificial Sequence: Synthetic oligonucleotide
  Antisense strand to SEQ ID NO: 1378852
aagaugauaacaugaggcc

SEQ ID NO: 1378854 - RNA, 19 nt, Artificial Sequence
  Description of Artificial Sequence: Synthetic oligonucleotide
  Sense strand starting at position 342 of SEQ ID NO: 1242872
gccucauguuaucaucuua

SEQ ID NO: 1378855 - RNA, 19 nt, Artificial Sequence
  Description of Artificial Sequence: Synthetic oligonucleotide
  Antisense strand to SEQ ID NO: 1378854
uaagaugauaacaugaggc

SEQ ID NO: 1378856 - RNA, 19 nt, Artificial Sequence
  Description of Artificial Sequence: Synthetic oligonucleotide
  Sense strand starting at position 375 of SEQ ID NO: 1242872
gagugaguacaguacuaua

SEQ ID NO: 1378857 - RNA, 19 nt, Artificial Sequence
  Description of Artificial Sequence: Synthetic oligonucleotide
  Antisense strand to SEQ ID NO: 1378856
uauaguacuguacucacuc

SEQ ID NO: 1378858 - RNA, 19 nt, Artificial Sequence
  Description of Artificial Sequence: Synthetic oligonucleotide
  Sense strand starting at position 437 of SEQ ID NO: 1242872
acaguauauuguuguaacu

SEQ ID NO: 1378859 - RNA, 19 nt, Artificial Sequence
  Description of Artificial Sequence: Synthetic oligonucleotide
  Antisense strand to SEQ ID NO: 1378858
aguuacaacaauauacugu

SEQ ID NO: 1378860 - RNA, 19 nt, Artificial Sequence
  Description of Artificial Sequence: Synthetic oligonucleotide
  Sense strand starting at position 473 of SEQ ID NO: 1242872
guuaaucucuuccuauugu

SEQ ID NO: 1378861 - RNA, 19 nt, Artificial Sequence
  Description of Artificial Sequence: Synthetic oligonucleotide
  Antisense strand to SEQ ID NO: 1378860
acaauaggaagagauuaac

SEQ ID NO: 1378862 - RNA, 19 nt, Artificial Sequence
  Description of Artificial Sequence: Synthetic oligonucleotide
  Sense strand starting at position 631 of SEQ ID NO: 1242872
cuguauaucuaagcaugau

SEQ ID NO: 1378863 - RNA, 19 nt, Artificial Sequence
  Description of Artificial Sequence: Synthetic oligonucleotide
  Antisense strand to SEQ ID NO: 1378862
aucaugcuuagauauacag

SEQ ID NO: 1378864 - RNA, 19 nt, Artificial Sequence
  Description of Artificial Sequence: Synthetic oligonucleotide
  Sense strand starting at position 721 of SEQ ID NO: 1242872
ccuggaauccuguggacua

SEQ ID NO: 1378865 - RNA, 19 nt, Artificial Sequence
  Description of Artificial Sequence: Synthetic oligonucleotide
  Antisense strand to SEQ ID NO: 1378864
uaguccacaggauuccagg

SEQ ID NO: 1378866 - RNA, 19 nt, Artificial Sequence
  Description of Artificial Sequence: Synthetic oligonucleotide
  Sense strand starting at position 788 of SEQ ID NO: 1242872
uuuggagucagauacaugu

SEQ ID NO: 1378867 - RNA, 19 nt, Artificial Sequence
  Description of Artificial Sequence: Synthetic oligonucleotide
  Antisense strand to SEQ ID NO: 1378866
acauguaucugacuccaaa

SEQ ID NO: 1378868 - RNA, 19 nt, Artificial Sequence
  Description of Artificial Sequence: Synthetic oligonucleotide
  Sense strand starting at position 794 of SEQ ID NO: 1242872
gucagauacauguggcuuu

SEQ ID NO: 1378869 - RNA, 19 nt, Artificial Sequence
  Description of Artificial Sequence: Synthetic oligonucleotide
  Antisense strand to SEQ ID NO: 1378868
aaagccacauguaucugac

SEQ ID NO: 1378870 - RNA, 19 nt, Artificial Sequence
  Description of Artificial Sequence: Synthetic oligonucleotide
  Sense strand starting at position 830 of SEQ ID NO: 1242872
ugaccuuaggcgcauuaau

SEQ ID NO: 1378871 - RNA, 19 nt, Artificial Sequence
  Description of Artificial Sequence: Synthetic oligonucleotide
  Antisense strand to SEQ ID NO: 1378870
auuaaugcgccuaagguca

SEQ ID NO: 1378872 - RNA, 19 nt, Artificial Sequence
  Description of Artificial Sequence: Synthetic oligonucleotide
  Sense strand starting at position 1055 of SEQ ID NO: 1242872
cagcguguaggacaagaau

SEQ ID NO: 1378873 - RNA, 19 nt, Artificial Sequence
  Description of Artificial Sequence: Synthetic oligonucleotide
  Antisense strand to SEQ ID NO: 1378872
auucuuguccuacacgcug

SEQ ID NO: 1378874 - RNA, 19 nt, Artificial Sequence
  Description of Artificial Sequence: Synthetic oligonucleotide
  Sense strand starting at position 1154 of SEQ ID NO: 1242872
ccaagcuagugagaagagu

SEQ ID NO: 1378875 - RNA, 19 nt, Artificial Sequence
  Description of Artificial Sequence: Synthetic oligonucleotide
  Antisense strand to SEQ ID NO: 1378874
acucuucucacuagcuugg

SEQ ID NO: 1378876 - RNA, 19 nt, Artificial Sequence
  Description of Artificial Sequence: Synthetic oligonucleotide
  Sense strand starting at position 1163 of SEQ ID NO: 1242872
ugagaagaguuacugaucu

SEQ ID NO: 1378877 - RNA, 19 nt, Artificial Sequence
  Description of Artificial Sequence: Synthetic oligonucleotide
  Antisense strand to SEQ ID NO: 1378876
agaucaguaacucuucuca

SEQ ID NO: 1378878 - RNA, 19 nt, Artificial Sequence
  Description of Artificial Sequence: Synthetic oligonucleotide
  Sense strand starting at position 1184 of SEQ ID NO: 1242872
gccucuuugaagcagaagu

SEQ ID NO: 1378879 - RNA, 19 nt, Artificial Sequence
  Description of Artificial Sequence: Synthetic oligonucleotide
  Antisense strand to SEQ ID NO: 1378878
acuucugcuucaaagaggc

SEQ ID NO: 1378880 - RNA, 19 nt, Artificial Sequence
  Description of Artificial Sequence: Synthetic oligonucleotide
  Sense strand starting at position 1186 of SEQ ID NO: 1242872
cucuuugaagcagaaguga

SEQ ID NO: 1378881 - RNA, 19 nt, Artificial Sequence
  Description of Artificial Sequence: Synthetic oligonucleotide
  Antisense strand to SEQ ID NO: 1378880
ucacuucugcuucaaagag

SEQ ID NO: 1378882 - RNA, 19 nt, Artificial Sequence
  Description of Artificial Sequence: Synthetic oligonucleotide
  Sense strand starting at position 1228 of SEQ ID NO: 1242872
gguugagcccauuauccaa

SEQ ID NO: 1378883 - RNA, 19 nt, Artificial Sequence
  Description of Artificial Sequence: Synthetic oligonucleotide
  Antisense strand to SEQ ID NO: 1378882
uuggauaaugggcucaacc

SEQ ID NO: 1378884 - RNA, 19 nt, Artificial Sequence
  Description of Artificial Sequence: Synthetic oligonucleotide
  Sense strand starting at position 1252 of SEQ ID NO: 1242872
aacggagagugguugcaaa

SEQ ID NO: 1378885 - RNA, 19 nt, Artificial Sequence
  Description of Artificial Sequence: Synthetic oligonucleotide
  Antisense strand to SEQ ID NO: 1378884
uuugcaaccacucuccguu

SEQ ID NO: 1378886 - RNA, 19 nt, Artificial Sequence
  Description of Artificial Sequence: Synthetic oligonucleotide
  Sense strand starting at position 1452 of SEQ ID NO: 1242872
gagcaaguuccuggagaga

SEQ ID NO: 1378887 - RNA, 19 nt, Artificial Sequence
  Description of Artificial Sequence: Synthetic oligonucleotide
  Antisense strand to SEQ ID NO: 1378886
ucucuccaggaacuugcuc

SEQ ID NO: 1378888 - RNA, 19 nt, Artificial Sequence
  Description of Artificial Sequence: Synthetic oligonucleotide
  Sense strand starting at position 1497 of SEQ ID NO: 1242872
gugaccuguugccuggaga

SEQ ID NO: 1378889 - RNA, 19 nt, Artificial Sequence
  Description of Artificial Sequence: Synthetic oligonucleotide
  Antisense strand to SEQ ID NO: 1378888
ucuccaggcaacaggucac

SEQ ID NO: 1378890 - RNA, 19 nt, Artificial Sequence
  Description of Artificial Sequence: Synthetic oligonucleotide
  Sense strand starting at position 1500 of SEQ ID NO: 1242872
accuguugccuggagagaa

SEQ ID NO: 1378891 - RNA, 19 nt, Artificial Sequence
  Description of Artificial Sequence: Synthetic oligonucleotide
  Antisense strand to SEQ ID NO: 1378890
uucucuccaggcaacaggu

SEQ ID NO: 1378892 - RNA, 19 nt, Artificial Sequence
  Description of Artificial Sequence: Synthetic oligonucleotide
  Sense strand starting at position 1555 of SEQ ID NO: 1242872
caccuuggguccugcuaga

SEQ ID NO: 1378893 - RNA, 19 nt, Artificial Sequence
  Description of Artificial Sequence: Synthetic oligonucleotide
  Antisense strand to SEQ ID NO: 1378892
ucuagcaggacccaaggug

SEQ ID NO: 1378894 - RNA, 19 nt, Artificial Sequence
  Description of Artificial Sequence: Synthetic oligonucleotide
  Sense strand starting at position 1669 of SEQ ID NO: 1242872
ggagcucucccacguagua

SEQ ID NO: 1378895 - RNA, 19 nt, Artificial Sequence
  Description of Artificial Sequence: Synthetic oligonucleotide
  Antisense strand to SEQ ID NO: 1378894
uacuacgugggagagcucc

SEQ ID NO: 1378896 - RNA, 19 nt, Artificial Sequence
  Description of Artificial Sequence: Synthetic oligonucleotide
  Sense strand starting at position 2250 of SEQ ID NO: 1242872
ccugaucgcugcuggaaua

SEQ ID NO: 1378897 - RNA, 19 nt, Artificial Sequence
  Description of Artificial Sequence: Synthetic oligonucleotide
  Antisense strand to SEQ ID NO: 1378896
uauuccagcagcgaucagg

SEQ ID NO: 1378898 - RNA, 19 nt, Artificial Sequence
  Description of Artificial Sequence: Synthetic oligonucleotide
  Sense strand starting at position 2251 of SEQ ID NO: 1242872
cugaucgcugcuggaauaa

SEQ ID NO: 1378899 - RNA, 19 nt, Artificial Sequence
  Description of Artificial Sequence: Synthetic oligonucleotide
  Antisense strand to SEQ ID NO: 1378898
uuauuccagcagcgaucag

SEQ ID NO: 1378900 - RNA, 19 nt, Artificial Sequence
  Description of Artificial Sequence: Synthetic oligonucleotide
  Sense strand starting at position 2364 of SEQ ID NO: 1242872
ggugcaaauauuuguuugu

SEQ ID NO: 1378901 - RNA, 19 nt, Artificial Sequence
  Description of Artificial Sequence: Synthetic oligonucleotide
  Antisense strand to SEQ ID NO: 1378900
acaaacaaauauuugcacc

SEQ ID NO: 1378902 - RNA, 19 nt, Artificial Sequence
  Description of Artificial Sequence: Synthetic oligonucleotide
  Sense strand starting at position 2365 of SEQ ID NO: 1242872
gugcaaauauuuguuuguu

SEQ ID NO: 1378903 - RNA, 19 nt, Artificial Sequence
  Description of Artificial Sequence: Synthetic oligonucleotide
  Antisense strand to SEQ ID NO: 1378902
aacaaacaaauauuugcac

SEQ ID NO: 1378904 - RNA, 19 nt, Artificial Sequence
  Description of Artificial Sequence: Synthetic oligonucleotide
  Sense strand starting at position 2434 of SEQ ID NO: 1242872
ggaauuguauagugguaag

SEQ ID NO: 1378905 - RNA, 19 nt, Artificial Sequence
  Description of Artificial Sequence: Synthetic oligonucleotide
  Antisense strand to SEQ ID NO: 1378904
cuuaccacuauacaauucc

SEQ ID NO: 1378906 - RNA, 19 nt, Artificial Sequence
  Description of Artificial Sequence: Synthetic oligonucleotide
  Sense strand starting at position 2444 of SEQ ID NO: 1242872
agugguaaguccugagauu

SEQ ID NO: 1378907 - RNA, 19 nt, Artificial Sequence
  Description of Artificial Sequence: Synthetic oligonucleotide
  Antisense strand to SEQ ID NO: 1378906
aaucucaggacuuaccacu

SEQ ID NO: 1378908 - RNA, 19 nt, Artificial Sequence
  Description of Artificial Sequence: Synthetic oligonucleotide
  Sense strand starting at position 2772 of SEQ ID NO: 1242872
cucauugguugaugguuau

SEQ ID NO: 1378909 - RNA, 19 nt, Artificial Sequence
  Description of Artificial Sequence: Synthetic oligonucleotide
  Antisense strand to SEQ ID NO: 1378908
auaaccaucaaccaaugag

SEQ ID NO: 1378910 - RNA, 19 nt, Artificial Sequence
  Description of Artificial Sequence: Synthetic oligonucleotide
  Sense strand starting at position 2836 of SEQ ID NO: 1242872
aacaaacauucgugugcaa

SEQ ID NO: 1378911 - RNA, 19 nt, Artificial Sequence
  Description of Artificial Sequence: Synthetic oligonucleotide
  Antisense strand to SEQ ID NO: 1378910
uugcacacgaauguuuguu

SEQ ID NO: 1378912 - RNA, 19 nt, Artificial Sequence
  Description of Artificial Sequence: Synthetic oligonucleotide
  Sense strand starting at position 2838 of SEQ ID NO: 1242872
caaacauucgugugcaagu

SEQ ID NO: 1378913 - RNA, 19 nt, Artificial Sequence
  Description of Artificial Sequence: Synthetic oligonucleotide
  Antisense strand to SEQ ID NO: 1378912
acuugcacacgaauguuug

SEQ ID NO: 1378914 - RNA, 19 nt, Artificial Sequence
  Description of Artificial Sequence: Synthetic oligonucleotide
  Sense strand starting at position 3206 of SEQ ID NO: 1242872
aagcgauuugccugccaug

SEQ ID NO: 1378915 - RNA, 19 nt, Artificial Sequence
  Description of Artificial Sequence: Synthetic oligonucleotide
  Antisense strand to SEQ ID NO: 1378914
cauggcaggcaaaucgcuu

SEQ ID NO: 1378916 - RNA, 19 nt, Artificial Sequence
  Description of Artificial Sequence: Synthetic oligonucleotide
  Sense strand starting at position 3363 of SEQ ID NO: 1242872
cagaguagcuaugacuaua

SEQ ID NO: 1378917 - RNA, 19 nt, Artificial Sequence
  Description of Artificial Sequence: Synthetic oligonucleotide
  Antisense strand to SEQ ID NO: 1378916
uauagucauagcuacucug

SEQ ID NO: 1378918 - RNA, 19 nt, Artificial Sequence
  Description of Artificial Sequence: Synthetic oligonucleotide
  Sense strand starting at position 3562 of SEQ ID NO: 1242872
guuaaagaaucucuguacu

SEQ ID NO: 1378919 - RNA, 19 nt, Artificial Sequence
  Description of Artificial Sequence: Synthetic oligonucleotide
  Antisense strand to SEQ ID NO: 1378918
aguacagagauucuuuaac

SEQ ID NO: 1378920 - RNA, 19 nt, Artificial Sequence
  Description of Artificial Sequence: Synthetic oligonucleotide
  Sense strand starting at position 3659 of SEQ ID NO: 1242872
gcagacaucuacuguuucu

SEQ ID NO: 1378921 - RNA, 19 nt, Artificial Sequence
  Description of Artificial Sequence: Synthetic oligonucleotide
  Antisense strand to SEQ ID NO: 1378920
agaaacaguagaugucugc

SEQ ID NO: 1378922 - RNA, 19 nt, Artificial Sequence
  Description of Artificial Sequence: Synthetic oligonucleotide
  Sense strand starting at position 3685 of SEQ ID NO: 1242872
uuaauaauguucgagggca

SEQ ID NO: 1378923 - RNA, 19 nt, Artificial Sequence
  Description of Artificial Sequence: Synthetic oligonucleotide
  Antisense strand to SEQ ID NO: 1378922
ugcccucgaacauuauuaa

SEQ ID NO: 1378924 - RNA, 19 nt, Artificial Sequence
  Description of Artificial Sequence: Synthetic oligonucleotide
  Sense strand starting at position 3744 of SEQ ID NO: 1242872
cuaauaccugaacguaaua

SEQ ID NO: 1378925 - RNA, 19 nt, Artificial Sequence
  Description of Artificial Sequence: Synthetic oligonucleotide
  Antisense strand to SEQ ID NO: 1378924
uauuacguucagguauuag

SEQ ID NO: 1378926 - RNA, 19 nt, Artificial Sequence
  Description of Artificial Sequence: Synthetic oligonucleotide
  Sense strand starting at position 3749 of SEQ ID NO: 1242872
accugaacguaauauuuaa

SEQ ID NO: 1378927 - RNA, 19 nt, Artificial Sequence
  Description of Artificial Sequence: Synthetic oligonucleotide
  Antisense strand to SEQ ID NO: 1378926
uuaaauauuacguucaggu

SEQ ID NO: 1378928 - RNA, 19 nt, Artificial Sequence
  Description of Artificial Sequence: Synthetic oligonucleotide
  Sense strand starting at position 71 of SEQ ID NO: 1242873
gcaucuugccuggauguuu

SEQ ID NO: 1378929 - RNA, 19 nt, Artificial Sequence
  Description of Artificial Sequence: Synthetic oligonucleotide
  Antisense strand to SEQ ID NO: 1378928
aaacauccaggcaagaugc

SEQ ID NO: 1378930 - RNA, 19 nt, Artificial Sequence
  Description of Artificial Sequence: Synthetic oligonucleotide
  Sense strand starting at position 120 of SEQ ID NO: 1242873
gcagcagucccaggcuauu

SEQ ID NO: 1378931 - RNA, 19 nt, Artificial Sequence
  Description of Artificial Sequence: Synthetic oligonucleotide
  Antisense strand to SEQ ID NO: 1378930
aauagccugggacugcugc

SEQ ID NO: 1378932 - RNA, 19 nt, Artificial Sequence
  Description of Artificial Sequence: Synthetic oligonucleotide
  Sense strand starting at position 172 of SEQ ID NO: 1242873
gaaguacaguugcugauua

SEQ ID NO: 1378933 - RNA, 19 nt, Artificial Sequence
  Description of Artificial Sequence: Synthetic oligonucleotide
  Antisense strand to SEQ ID NO: 1378932
uaaucagcaacuguacuuc

SEQ ID NO: 1378934 - RNA, 19 nt, Artificial Sequence
  Description of Artificial Sequence: Synthetic oligonucleotide
  Sense strand starting at position 173 of SEQ ID NO: 1242873
aaguacaguugcugauuaa

SEQ ID NO: 1378935 - RNA, 19 nt, Artificial Sequence
  Description of Artificial Sequence: Synthetic oligonucleotide
  Antisense strand to SEQ ID NO: 1378934
uuaaucagcaacuguacuu

SEQ ID NO: 1378936 - RNA, 19 nt, Artificial Sequence
  Description of Artificial Sequence: Synthetic oligonucleotide
  Sense strand starting at position 183 of SEQ ID NO: 1242873
gcugauuaacuguguuaac

SEQ ID NO: 1378937 - RNA, 19 nt, Artificial Sequence
  Description of Artificial Sequence: Synthetic oligonucleotide
  Antisense strand to SEQ ID NO: 1378936
guuaacacaguuaaucagc

SEQ ID NO: 1378938 - RNA, 19 nt, Artificial Sequence
  Description of Artificial Sequence: Synthetic oligonucleotide
  Sense strand starting at position 184 of SEQ ID NO: 1242873
cugauuaacuguguuaaca

SEQ ID NO: 1378939 - RNA, 19 nt, Artificial Sequence
  Description of Artificial Sequence: Synthetic oligonucleotide
  Antisense strand to SEQ ID NO: 1378938
uguuaacacaguuaaucag

SEQ ID NO: 1378940 - RNA, 19 nt, Artificial Sequence
  Description of Artificial Sequence: Synthetic oligonucleotide
  Sense strand starting at position 2704 of SEQ ID NO: 1242873
ugcggaaagcgcuagguaa

SEQ ID NO: 1378941 - RNA, 19 nt, Artificial Sequence
  Description of Artificial Sequence: Synthetic oligonucleotide
  Antisense strand to SEQ ID NO: 1378940
uuaccuagcgcuuuccgca

SEQ ID NO: 1378942 - RNA, 19 nt, Artificial Sequence
  Description of Artificial Sequence: Synthetic oligonucleotide
  Sense strand starting at position 2985 of SEQ ID NO: 1242873
gugucauucgcccgaggug

SEQ ID NO: 1378943 - RNA, 19 nt, Artificial Sequence
  Description of Artificial Sequence: Synthetic oligonucleotide
  Antisense strand to SEQ ID NO: 1378942
caccucgggcgaaugacac

SEQ ID NO: 1378944 - RNA, 19 nt, Artificial Sequence
  Description of Artificial Sequence: Synthetic oligonucleotide
  Sense strand starting at position 3100 of SEQ ID NO: 1242873
ccagaucucgccgaaagcu

SEQ ID NO: 1378945 - RNA, 19 nt, Artificial Sequence
  Description of Artificial Sequence: Synthetic oligonucleotide
  Antisense strand to SEQ ID NO: 1378944
agcuuucggcgagaucugg

SEQ ID NO: 1378946 - RNA, 19 nt, Artificial Sequence
  Description of Artificial Sequence: Synthetic oligonucleotide
  Sense strand starting at position 3137 of SEQ ID NO: 1242873
guagaaugucgccauugcu

SEQ ID NO: 1378947 - RNA, 19 nt, Artificial Sequence
  Description of Artificial Sequence: Synthetic oligonucleotide
  Antisense strand to SEQ ID NO: 1378946
agcaauggcgacauucuac

SEQ ID NO: 1378948 - RNA, 19 nt, Artificial Sequence
  Description of Artificial Sequence: Synthetic oligonucleotide
  Sense strand starting at position 3140 of SEQ ID NO: 1242873
gaaugucgccauugcuaag

SEQ ID NO: 1378949 - RNA, 19 nt, Artificial Sequence
  Description of Artificial Sequence: Synthetic oligonucleotide
  Antisense strand to SEQ ID NO: 1378948
cuuagcaauggcgacauuc

SEQ ID NO: 1378950 - RNA, 19 nt, Artificial Sequence
  Description of Artificial Sequence: Synthetic oligonucleotide
  Sense strand starting at position 3319 of SEQ ID NO: 1242873
gaagcaagaugcugugaaa

SEQ ID NO: 1378951 - RNA, 19 nt, Artificial Sequence
  Description of Artificial Sequence: Synthetic oligonucleotide
  Antisense strand to SEQ ID NO: 1378950
uuucacagcaucuugcuuc

SEQ ID NO: 1378952 - RNA, 19 nt, Artificial Sequence
  Description of Artificial Sequence: Synthetic oligonucleotide
  Sense strand starting at position 3322 of SEQ ID NO: 1242873
gcaagaugcugugaaacuu

SEQ ID NO: 1378953 - RNA, 19 nt, Artificial Sequence
  Description of Artificial Sequence: Synthetic oligonucleotide
  Antisense strand to SEQ ID NO: 1378952
aaguuucacagcaucuugc

SEQ ID NO: 1378954 - RNA, 19 nt, Artificial Sequence
  Description of Artificial Sequence: Synthetic oligonucleotide
  Sense strand starting at position 3331 of SEQ ID NO: 1242873
ugugaaacuuccugauuua

SEQ ID NO: 1378955 - RNA, 19 nt, Artificial Sequence
  Description of Artificial Sequence: Synthetic oligonucleotide
  Antisense strand to SEQ ID NO: 1378954
uaaaucaggaaguuucaca

SEQ ID NO: 1378956 - RNA, 19 nt, Artificial Sequence
  Description of Artificial Sequence: Synthetic oligonucleotide
  Sense strand starting at position 3452 of SEQ ID NO: 1242873
uugagaccucaucgcuaca

SEQ ID NO: 1378957 - RNA, 19 nt, Artificial Sequence
  Description of Artificial Sequence: Synthetic oligonucleotide
  Antisense strand to SEQ ID NO: 1378956
uguagcgaugaggucucaa

SEQ ID NO: 1378958 - RNA, 19 nt, Artificial Sequence
  Description of Artificial Sequence: Synthetic oligonucleotide
  Sense strand starting at position 3508 of SEQ ID NO: 1242873
acuguagucucagucacuu

SEQ ID NO: 1378959 - RNA, 19 nt, Artificial Sequence
  Description of Artificial Sequence: Synthetic oligonucleotide
  Antisense strand to SEQ ID NO: 1378958
aagugacugagacuacagu

SEQ ID NO: 1378960 - RNA, 19 nt, Artificial Sequence
  Description of Artificial Sequence: Synthetic oligonucleotide
  Sense strand starting at position 3619 of SEQ ID NO: 1242873
gugagaccauaucucaauu

SEQ ID NO: 1378961 - RNA, 19 nt, Artificial Sequence
  Description of Artificial Sequence: Synthetic oligonucleotide
  Antisense strand to SEQ ID NO: 1378960
aauugagauauggucucac

SEQ ID NO: 1378962 - RNA, 19 nt, Artificial Sequence
  Description of Artificial Sequence: Synthetic oligonucleotide
  Sense strand starting at position 3661 of SEQ ID NO: 1242873
cgaacauguuucuggacuu

SEQ ID NO: 1378963 - RNA, 19 nt, Artificial Sequence
  Description of Artificial Sequence: Synthetic oligonucleotide
  Antisense strand to SEQ ID NO: 1378962
aaguccagaaacauguucg

SEQ ID NO: 1378964 - RNA, 19 nt, Artificial Sequence
  Description of Artificial Sequence: Synthetic oligonucleotide
  Sense strand starting at position 3662 of SEQ ID NO: 1242873
gaacauguuucuggacuug

SEQ ID NO: 1378965 - RNA, 19 nt, Artificial Sequence
  Description of Artificial Sequence: Synthetic oligonucleotide
  Antisense strand to SEQ ID NO: 1378964
caaguccagaaacauguuc

SEQ ID NO: 1378966 - RNA, 19 nt, Artificial Sequence
  Description of Artificial Sequence: Synthetic oligonucleotide
  Sense strand starting at position 3703 of SEQ ID NO: 1242873
ccuugaccuguuuguacaa

SEQ ID NO: 1378967 - RNA, 19 nt, Artificial Sequence
  Description of Artificial Sequence: Synthetic oligonucleotide
  Antisense strand to SEQ ID NO: 1378966
uuguacaaacaggucaagg

SEQ ID NO: 1378968 - RNA, 19 nt, Artificial Sequence
  Description of Artificial Sequence: Synthetic oligonucleotide
  Sense strand starting at position 3704 of SEQ ID NO: 1242873
cuugaccuguuuguacaaa

SEQ ID NO: 1378969 - RNA, 19 nt, Artificial Sequence
  Description of Artificial Sequence: Synthetic oligonucleotide
  Antisense strand to SEQ ID NO: 1378968
uuuguacaaacaggucaag

SEQ ID NO: 1378970 - RNA, 19 nt, Artificial Sequence
  Description of Artificial Sequence: Synthetic oligonucleotide
  Sense strand starting at position 3766 of SEQ ID NO: 1242873
agugcugggcugagugaua

SEQ ID NO: 1378971 - RNA, 19 nt, Artificial Sequence
  Description of Artificial Sequence: Synthetic oligonucleotide
  Antisense strand to SEQ ID NO: 1378970
uaucacucagcccagcacu

SEQ ID NO: 1378972 - RNA, 19 nt, Artificial Sequence
  Description of Artificial Sequence: Synthetic oligonucleotide
  Sense strand starting at position 3771 of SEQ ID NO: 1242873
ugggcugagugauauggaa

SEQ ID NO: 1378973 - RNA, 19 nt, Artificial Sequence
  Description of Artificial Sequence: Synthetic oligonucleotide
  Antisense strand to SEQ ID NO: 1378972
uuccauaucacucagccca

SEQ ID NO: 1378974 - RNA, 19 nt, Artificial Sequence
  Description of Artificial Sequence: Synthetic oligonucleotide
  Sense strand starting at position 3773 of SEQ ID NO: 1242873
ggcugagugauauggaaag

SEQ ID NO: 1378975 - RNA, 19 nt, Artificial Sequence
  Description of Artificial Sequence: Synthetic oligonucleotide
  Antisense strand to SEQ ID NO: 1378974
cuuuccauaucacucagcc

SEQ ID NO: 1378976 - RNA, 19 nt, Artificial Sequence
  Description of Artificial Sequence: Synthetic oligonucleotide
  Sense strand starting at position 3823 of SEQ ID NO: 1242873
cugcgucuuuccucagaaa

SEQ ID NO: 1378977 - RNA, 19 nt, Artificial Sequence
  Description of Artificial Sequence: Synthetic oligonucleotide
  Antisense strand to SEQ ID NO: 1378976
uuucugaggaaagacgcag

SEQ ID NO: 1378978 - RNA, 19 nt, Artificial Sequence
  Description of Artificial Sequence: Synthetic oligonucleotide
  Sense strand starting at position 3824 of SEQ ID NO: 1242873
ugcgucuuuccucagaaau

SEQ ID NO: 1378979 - RNA, 19 nt, Artificial Sequence
  Description of Artificial Sequence: Synthetic oligonucleotide
  Antisense strand to SEQ ID NO: 1378978
auuucugaggaaagacgca

SEQ ID NO: 1378980 - RNA, 19 nt, Artificial Sequence
  Description of Artificial Sequence: Synthetic oligonucleotide
  Sense strand starting at position 3826 of SEQ ID NO: 1242873
cgucuuuccucagaaauaa

SEQ ID NO: 1378981 - RNA, 19 nt, Artificial Sequence
  Description of Artificial Sequence: Synthetic oligonucleotide
  Antisense strand to SEQ ID NO: 1378980
uuauuucugaggaaagacg

SEQ ID NO: 1378982 - RNA, 19 nt, Artificial Sequence
  Description of Artificial Sequence: Synthetic oligonucleotide
  Sense strand starting at position 3904 of SEQ ID NO: 1242873
gagcaccaguuguaaauga

SEQ ID NO: 1378983 - RNA, 19 nt, Artificial Sequence
  Description of Artificial Sequence: Synthetic oligonucleotide
  Antisense strand to SEQ ID NO: 1378982
ucauuuacaacuggugcuc

SEQ ID NO: 1378984 - RNA, 19 nt, Artificial Sequence
  Description of Artificial Sequence: Synthetic oligonucleotide
  Sense strand starting at position 174 of SEQ ID NO: 1242874
agagcaacuuucugagcua

SEQ ID NO: 1378985 - RNA, 19 nt, Artificial Sequence
  Description of Artificial Sequence: Synthetic oligonucleotide
  Antisense strand to SEQ ID NO: 1378984
uagcucagaaaguugcucu

SEQ ID NO: 1378986 - RNA, 19 nt, Artificial Sequence
  Description of Artificial Sequence: Synthetic oligonucleotide
  Sense strand starting at position 177 of SEQ ID NO: 1242874
gcaacuuucugagcuacag

SEQ ID NO: 1378987 - RNA, 19 nt, Artificial Sequence
  Description of Artificial Sequence: Synthetic oligonucleotide
  Antisense strand to SEQ ID NO: 1378986
cuguagcucagaaaguugc

SEQ ID NO: 1378988 - RNA, 19 nt, Artificial Sequence
  Description of Artificial Sequence: Synthetic oligonucleotide
  Sense strand starting at position 320 of SEQ ID NO: 1242874
gggcaagucacuuaagcau

SEQ ID NO: 1378989 - RNA, 19 nt, Artificial Sequence
  Description of Artificial Sequence: Synthetic oligonucleotide
  Antisense strand to SEQ ID NO: 1378988
augcuuaagugacuugccc

SEQ ID NO: 1378990 - RNA, 19 nt, Artificial Sequence
  Description of Artificial Sequence: Synthetic oligonucleotide
  Sense strand starting at position 538 of SEQ ID NO: 1242874
aaacaugagucaggauaga

SEQ ID NO: 1378991 - RNA, 19 nt, Artificial Sequence
  Description of Artificial Sequence: Synthetic oligonucleotide
  Antisense strand to SEQ ID NO: 1378990
ucuauccugacucauguuu

SEQ ID NO: 1378992 - RNA, 19 nt, Artificial Sequence
  Description of Artificial Sequence: Synthetic oligonucleotide
  Sense strand starting at position 1194 of SEQ ID NO: 1242874
cagguuaccuuccagagau

SEQ ID NO: 1378993 - RNA, 19 nt, Artificial Sequence
  Description of Artificial Sequence: Synthetic oligonucleotide
  Antisense strand to SEQ ID NO: 1378992
aucucuggaagguaaccug

SEQ ID NO: 1378994 - RNA, 19 nt, Artificial Sequence
  Description of Artificial Sequence: Synthetic oligonucleotide
  Sense strand starting at position 2258 of SEQ ID NO: 1242874
ggcgaucucacgggcuaga

SEQ ID NO: 1378995 - RNA, 19 nt, Artificial Sequence
  Description of Artificial Sequence: Synthetic oligonucleotide
  Antisense strand to SEQ ID NO: 1378994
ucuagcccgugagaucgcc

SEQ ID NO: 1378996 - RNA, 19 nt, Artificial Sequence
  Description of Artificial Sequence: Synthetic oligonucleotide
  Sense strand starting at position 2296 of SEQ ID NO: 1242874
gcgcgucuuugucguggaa

SEQ ID NO: 1378997 - RNA, 19 nt, Artificial Sequence
  Description of Artificial Sequence: Synthetic oligonucleotide
  Antisense strand to SEQ ID NO: 1378996
uuccacgacaaagacgcgc

SEQ ID NO: 1378998 - RNA, 19 nt, Artificial Sequence
  Description of Artificial Sequence: Synthetic oligonucleotide
  Sense strand starting at position 2297 of SEQ ID NO: 1242874
cgcgucuuugucguggaau

SEQ ID NO: 1378999 - RNA, 19 nt, Artificial Sequence
  Description of Artificial Sequence: Synthetic oligonucleotide
  Antisense strand to SEQ ID NO: 1378998
auuccacgacaaagacgcg

SEQ ID NO: 1379000 - RNA, 19 nt, Artificial Sequence
  Description of Artificial Sequence: Synthetic oligonucleotide
  Sense strand starting at position 2298 of SEQ ID NO: 1242874
gcgucuuugucguggaaug

SEQ ID NO: 1379001 - RNA, 19 nt, Artificial Sequence
  Description of Artificial Sequence: Synthetic oligonucleotide
  Antisense strand to SEQ ID NO: 1379000
cauuccacgacaaagacgc

SEQ ID NO: 1379002 - RNA, 19 nt, Artificial Sequence
  Description of Artificial Sequence: Synthetic oligonucleotide
  Sense strand starting at position 2299 of SEQ ID NO: 1242874
cgucuuugucguggaauga

SEQ ID NO: 1379003 - RNA, 19 nt, Artificial Sequence
  Description of Artificial Sequence: Synthetic oligonucleotide
  Antisense strand to SEQ ID NO: 1379002
ucauuccacgacaaagacg

SEQ ID NO: 1379004 - RNA, 19 nt, Artificial Sequence
  Description of Artificial Sequence: Synthetic oligonucleotide
  Sense strand starting at position 2300 of SEQ ID NO: 1242874
gucuuugucguggaaugaa

SEQ ID NO: 1379005 - RNA, 19 nt, Artificial Sequence
  Description of Artificial Sequence: Synthetic oligonucleotide
  Antisense strand to SEQ ID NO: 1379004
uucauuccacgacaaagac

SEQ ID NO: 1379006 - RNA, 19 nt, Artificial Sequence
  Description of Artificial Sequence: Synthetic oligonucleotide
  Sense strand starting at position 2808 of SEQ ID NO: 1242874
gacugaguuccuggaggug

SEQ ID NO: 1379007 - RNA, 19 nt, Artificial Sequence
  Description of Artificial Sequence: Synthetic oligonucleotide
  Antisense strand to SEQ ID NO: 1379006
caccuccaggaacucaguc

SEQ ID NO: 1379008 - RNA, 19 nt, Artificial Sequence
  Description of Artificial Sequence: Synthetic oligonucleotide
  Sense strand starting at position 2916 of SEQ ID NO: 1242874
gcugaacacccgugaaugu

SEQ ID NO: 1379009 - RNA, 19 nt, Artificial Sequence
  Description of Artificial Sequence: Synthetic oligonucleotide
  Antisense strand to SEQ ID NO: 1379008
acauucacggguguucagc

SEQ ID NO: 1379010 - RNA, 19 nt, Artificial Sequence
  Description of Artificial Sequence: Synthetic oligonucleotide
  Sense strand starting at position 3689 of SEQ ID NO: 1242874
accuguaccugugugaacu

SEQ ID NO: 1379011 - RNA, 19 nt, Artificial Sequence
  Description of Artificial Sequence: Synthetic oligonucleotide
  Antisense strand to SEQ ID NO: 1379010
aguucacacagguacaggu

SEQ ID NO: 1379012 - RNA, 19 nt, Artificial Sequence
  Description of Artificial Sequence: Synthetic oligonucleotide
  Sense strand starting at position 3840 of SEQ ID NO: 1242874
cuggucuaaugcuccaaga

SEQ ID NO: 1379013 - RNA, 19 nt, Artificial Sequence
  Description of Artificial Sequence: Synthetic oligonucleotide
  Antisense strand to SEQ ID NO: 1379012
ucuuggagcauuagaccag

SEQ ID NO: 1379014 - RNA, 19 nt, Artificial Sequence
  Description of Artificial Sequence: Synthetic oligonucleotide
  Sense strand starting at position 3886 of SEQ ID NO: 1242874
ggcccugugucucaugaga

SEQ ID NO: 1379015 - RNA, 19 nt, Artificial Sequence
  Description of Artificial Sequence: Synthetic oligonucleotide
  Antisense strand to SEQ ID NO: 1379014
ucucaugagacacagggcc

SEQ ID NO: 1379016 - RNA, 19 nt, Artificial Sequence
  Description of Artificial Sequence: Synthetic oligonucleotide
  Sense strand starting at position 3891 of SEQ ID NO: 1242874
ugugucucaugagaagaca

SEQ ID NO: 1379017 - RNA, 19 nt, Artificial Sequence
  Description of Artificial Sequence: Synthetic oligonucleotide
  Antisense strand to SEQ ID NO: 1379016
ugucuucucaugagacaca

SEQ ID NO: 1379018 - RNA, 19 nt, Artificial Sequence
  Description of Artificial Sequence: Synthetic oligonucleotide
  Sense strand starting at position 3903 of SEQ ID NO: 1242874
gaagacagcugguugcaaa

SEQ ID NO: 1379019 - RNA, 19 nt, Artificial Sequence
  Description of Artificial Sequence: Synthetic oligonucleotide
  Antisense strand to SEQ ID NO: 1379018
uuugcaaccagcugucuuc

SEQ ID NO: 1379020 - RNA, 19 nt, Artificial Sequence
  Description of Artificial Sequence: Synthetic oligonucleotide
  Sense strand starting at position 3926 of SEQ ID NO: 1242874
gggcuuucucugggagggu

SEQ ID NO: 1379021 - RNA, 19 nt, Artificial Sequence
  Description of Artificial Sequence: Synthetic oligonucleotide
  Antisense strand to SEQ ID NO: 1379020
acccucccagagaaagccc

SEQ ID NO: 1379022 - RNA, 19 nt, Artificial Sequence
  Description of Artificial Sequence: Synthetic oligonucleotide
  Sense strand starting at position 3960 of SEQ ID NO: 1242874
ucaggcacuuccugagaca

SEQ ID NO: 1379023 - RNA, 19 nt, Artificial Sequence
  Description of Artificial Sequence: Synthetic oligonucleotide
  Antisense strand to SEQ ID NO: 1379022
ugucucaggaagugccuga

SEQ ID NO: 1379024 - RNA, 19 nt, Artificial Sequence
  Description of Artificial Sequence: Synthetic oligonucleotide
  Sense strand starting at position 111 of SEQ ID NO: 1242875
cagaauguacuacgaaaga

SEQ ID NO: 1379025 - RNA, 19 nt, Artificial Sequence
  Description of Artificial Sequence: Synthetic oligonucleotide
  Antisense strand to SEQ ID NO: 1379024
ucuuucguaguacauucug

SEQ ID NO: 1379026 - RNA, 19 nt, Artificial Sequence
  Description of Artificial Sequence: Synthetic oligonucleotide
  Sense strand starting at position 317 of SEQ ID NO: 1242875
cccauaguuccauagagca

SEQ ID NO: 1379027 - RNA, 19 nt, Artificial Sequence
  Description of Artificial Sequence: Synthetic oligonucleotide
  Antisense strand to SEQ ID NO: 1379026
ugcucuauggaacuauggg

SEQ ID NO: 1379028 - RNA, 19 nt, Artificial Sequence
  Description of Artificial Sequence: Synthetic oligonucleotide
  Sense strand starting at position 376 of SEQ ID NO: 1242875
uuuaaacuugucgauacuu

SEQ ID NO: 1379029 - RNA, 19 nt, Artificial Sequence
  Description of Artificial Sequence: Synthetic oligonucleotide
  Antisense strand to SEQ ID NO: 1379028
aaguaucgacaaguuuaaa

SEQ ID NO: 1379030 - RNA, 19 nt, Artificial Sequence
  Description of Artificial Sequence: Synthetic oligonucleotide
  Sense strand starting at position 378 of SEQ ID NO: 1242875
uaaacuugucgauacuuga

SEQ ID NO: 1379031 - RNA, 19 nt, Artificial Sequence
  Description of Artificial Sequence: Synthetic oligonucleotide
  Antisense strand to SEQ ID NO: 1379030
ucaaguaucgacaaguuua

SEQ ID NO: 1379032 - RNA, 19 nt, Artificial Sequence
  Description of Artificial Sequence: Synthetic oligonucleotide
  Sense strand starting at position 509 of SEQ ID NO: 1242875
ugcuuaauuuagcugccau

SEQ ID NO: 1379033 - RNA, 19 nt, Artificial Sequence
  Description of Artificial Sequence: Synthetic oligonucleotide
  Antisense strand to SEQ ID NO: 1379032
auggcagcuaaauuaagca

SEQ ID NO: 1379034 - RNA, 19 nt, Artificial Sequence
  Description of Artificial Sequence: Synthetic oligonucleotide
  Sense strand starting at position 523 of SEQ ID NO: 1242875
gccauaaaggcauaauuac

SEQ ID NO: 1379035 - RNA, 19 nt, Artificial Sequence
  Description of Artificial Sequence: Synthetic oligonucleotide
  Antisense strand to SEQ ID NO: 1379034
guaauuaugccuuuauggc

SEQ ID NO: 1379036 - RNA, 19 nt, Artificial Sequence
  Description of Artificial Sequence: Synthetic oligonucleotide
  Sense strand starting at position 567 of SEQ ID NO: 1242875
cgcacuuguuacuugauuu

SEQ ID NO: 1379037 - RNA, 19 nt, Artificial Sequence
  Description of Artificial Sequence: Synthetic oligonucleotide
  Antisense strand to SEQ ID NO: 1379036
aaaucaaguaacaagugcg

SEQ ID NO: 1379038 - RNA, 19 nt, Artificial Sequence
  Description of Artificial Sequence: Synthetic oligonucleotide
  Sense strand starting at position 620 of SEQ ID NO: 1242875
gcuugauucuaaccaagca

SEQ ID NO: 1379039 - RNA, 19 nt, Artificial Sequence
  Description of Artificial Sequence: Synthetic oligonucleotide
  Antisense strand to SEQ ID NO: 1379038
ugcuugguuagaaucaagc

SEQ ID NO: 1379040 - RNA, 19 nt, Artificial Sequence
  Description of Artificial Sequence: Synthetic oligonucleotide
  Sense strand starting at position 638 of SEQ ID NO: 1242875
aucaccauucuuggaagau

SEQ ID NO: 1379041 - RNA, 19 nt, Artificial Sequence
  Description of Artificial Sequence: Synthetic oligonucleotide
  Antisense strand to SEQ ID NO: 1379040
aucuuccaagaauggugau

SEQ ID NO: 1379042 - RNA, 19 nt, Artificial Sequence
  Description of Artificial Sequence: Synthetic oligonucleotide
  Sense strand starting at position 836 of SEQ ID NO: 1242875
agcugcugucggcucaaua

SEQ ID NO: 1379043 - RNA, 19 nt, Artificial Sequence
  Description of Artificial Sequence: Synthetic oligonucleotide
  Antisense strand to SEQ ID NO: 1379042
uauugagccgacagcagcu

SEQ ID NO: 1379044 - RNA, 19 nt, Artificial Sequence
  Description of Artificial Sequence: Synthetic oligonucleotide
  Sense strand starting at position 846 of SEQ ID NO: 1242875
ggcucaauacuuuguauca

SEQ ID NO: 1379045 - RNA, 19 nt, Artificial Sequence
  Description of Artificial Sequence: Synthetic oligonucleotide
  Antisense strand to SEQ ID NO: 1379044
ugauacaaaguauugagcc

SEQ ID NO: 1379046 - RNA, 19 nt, Artificial Sequence
  Description of Artificial Sequence: Synthetic oligonucleotide
  Sense strand starting at position 994 of SEQ ID NO: 1242875
gcaagaggucaucgggaau

SEQ ID NO: 1379047 - RNA, 19 nt, Artificial Sequence
  Description of Artificial Sequence: Synthetic oligonucleotide
  Antisense strand to SEQ ID NO: 1379046
auucccgaugaccucuugc

SEQ ID NO: 1379048 - RNA, 19 nt, Artificial Sequence
  Description of Artificial Sequence: Synthetic oligonucleotide
  Sense strand starting at position 1044 of SEQ ID NO: 1242875
ggucccacuccugaacuaa

SEQ ID NO: 1379049 - RNA, 19 nt, Artificial Sequence
  Description of Artificial Sequence: Synthetic oligonucleotide
  Antisense strand to SEQ ID NO: 1379048
uuaguucaggagugggacc

SEQ ID NO: 1379050 - RNA, 19 nt, Artificial Sequence
  Description of Artificial Sequence: Synthetic oligonucleotide
  Sense strand starting at position 1395 of SEQ ID NO: 1242875
gccgcacauccgagugagu

SEQ ID NO: 1379051 - RNA, 19 nt, Artificial Sequence
  Description of Artificial Sequence: Synthetic oligonucleotide
  Antisense strand to SEQ ID NO: 1379050
acucacucggaugugcggc

SEQ ID NO: 1379052 - RNA, 19 nt, Artificial Sequence
  Description of Artificial Sequence: Synthetic oligonucleotide
  Sense strand starting at position 1408 of SEQ ID NO: 1242875
gugaguaaccuggaccugu

SEQ ID NO: 1379053 - RNA, 19 nt, Artificial Sequence
  Description of Artificial Sequence: Synthetic oligonucleotide
  Antisense strand to SEQ ID NO: 1379052
acagguccagguuacucac

SEQ ID NO: 1379054 - RNA, 19 nt, Artificial Sequence
  Description of Artificial Sequence: Synthetic oligonucleotide
  Sense strand starting at position 1689 of SEQ ID NO: 1242875
cucaucucuuccguaagga

SEQ ID NO: 1379055 - RNA, 19 nt, Artificial Sequence
  Description of Artificial Sequence: Synthetic oligonucleotide
  Antisense strand to SEQ ID NO: 1379054
uccuuacggaagagaugag

SEQ ID NO: 1379056 - RNA, 19 nt, Artificial Sequence
  Description of Artificial Sequence: Synthetic oligonucleotide
  Sense strand starting at position 1690 of SEQ ID NO: 1242875
ucaucucuuccguaaggaa

SEQ ID NO: 1379057 - RNA, 19 nt, Artificial Sequence
  Description of Artificial Sequence: Synthetic oligonucleotide
  Antisense strand to SEQ ID NO: 1379056
uuccuuacggaagagauga

SEQ ID NO: 1379058 - RNA, 19 nt, Artificial Sequence
  Description of Artificial Sequence: Synthetic oligonucleotide
  Sense strand starting at position 2029 of SEQ ID NO: 1242875
ccgggagcccgauggaaau

SEQ ID NO: 1379059 - RNA, 19 nt, Artificial Sequence
  Description of Artificial Sequence: Synthetic oligonucleotide
  Antisense strand to SEQ ID NO: 1379058
auuuccaucgggcucccgg

SEQ ID NO: 1379060 - RNA, 19 nt, Artificial Sequence
  Description of Artificial Sequence: Synthetic oligonucleotide
  Sense strand starting at position 2168 of SEQ ID NO: 1242875
aaaggugauuggcugucaa

SEQ ID NO: 1379061 - RNA, 19 nt, Artificial Sequence
  Description of Artificial Sequence: Synthetic oligonucleotide
  Antisense strand to SEQ ID NO: 1379060
uugacagccaaucaccuuu

SEQ ID NO: 1379062 - RNA, 19 nt, Artificial Sequence
  Description of Artificial Sequence: Synthetic oligonucleotide
  Sense strand starting at position 2381 of SEQ ID NO: 1242875
agagaaagucagugccaca

SEQ ID NO: 1379063 - RNA, 19 nt, Artificial Sequence
  Description of Artificial Sequence: Synthetic oligonucleotide
  Antisense strand to SEQ ID NO: 1379062
uguggcacugacuuucucu

SEQ ID NO: 1379064 - RNA, 19 nt, Artificial Sequence
  Description of Artificial Sequence: Synthetic oligonucleotide
  Sense strand starting at position 2607 of SEQ ID NO: 1242875
gcuugagggaucugaagag

SEQ ID NO: 1379065 - RNA, 19 nt, Artificial Sequence
  Description of Artificial Sequence: Synthetic oligonucleotide
  Antisense strand to SEQ ID NO: 1379064
cucuucagaucccucaagc

SEQ ID NO: 1379066 - RNA, 19 nt, Artificial Sequence
  Description of Artificial Sequence: Synthetic oligonucleotide
  Sense strand starting at position 2722 of SEQ ID NO: 1242875
gugagaggcagcuaucuau

SEQ ID NO: 1379067 - RNA, 19 nt, Artificial Sequence
  Description of Artificial Sequence: Synthetic oligonucleotide
  Antisense strand to SEQ ID NO: 1379066
auagauagcugccucucac

SEQ ID NO: 1379068 - RNA, 19 nt, Artificial Sequence
  Description of Artificial Sequence: Synthetic oligonucleotide
  Sense strand starting at position 2892 of SEQ ID NO: 1242875
uuagaaacgccuugggaua

SEQ ID NO: 1379069 - RNA, 19 nt, Artificial Sequence
  Description of Artificial Sequence: Synthetic oligonucleotide
  Antisense strand to SEQ ID NO: 1379068
uaucccaaggcguuucuaa

SEQ ID NO: 1379070 - RNA, 19 nt, Artificial Sequence
  Description of Artificial Sequence: Synthetic oligonucleotide
  Sense strand starting at position 3006 of SEQ ID NO: 1242875
gggauuucugggcggugau

SEQ ID NO: 1379071 - RNA, 19 nt, Artificial Sequence
  Description of Artificial Sequence: Synthetic oligonucleotide
  Antisense strand to SEQ ID NO: 1379070
aucaccgcccagaaauccc

SEQ ID NO: 1379072 - RNA, 19 nt, Artificial Sequence
  Description of Artificial Sequence: Synthetic oligonucleotide
  Sense strand starting at position 3007 of SEQ ID NO: 1242875
ggauuucugggcggugaug

SEQ ID NO: 1379073 - RNA, 19 nt, Artificial Sequence
  Description of Artificial Sequence: Synthetic oligonucleotide
  Antisense strand to SEQ ID NO: 1379072
caucaccgcccagaaaucc

SEQ ID NO: 1379074 - RNA, 19 nt, Artificial Sequence
  Description of Artificial Sequence: Synthetic oligonucleotide
  Sense strand starting at position 3082 of SEQ ID NO: 1242875
cgggaauuauucccucucu

SEQ ID NO: 1379075 - RNA, 19 nt, Artificial Sequence
  Description of Artificial Sequence: Synthetic oligonucleotide
  Antisense strand to SEQ ID NO: 1379074
agagagggaauaauucccg

SEQ ID NO: 1379076 - RNA, 19 nt, Artificial Sequence
  Description of Artificial Sequence: Synthetic oligonucleotide
  Sense strand starting at position 3083 of SEQ ID NO: 1242875
gggaauuauucccucucuc

SEQ ID NO: 1379077 - RNA, 19 nt, Artificial Sequence
  Description of Artificial Sequence: Synthetic oligonucleotide
  Antisense strand to SEQ ID NO: 1379076
gagagagggaauaauuccc

SEQ ID NO: 1379078 - RNA, 19 nt, Artificial Sequence
  Description of Artificial Sequence: Synthetic oligonucleotide
  Sense strand starting at position 3306 of SEQ ID NO: 1242875
cuuguauaguucucugaga

SEQ ID NO: 1379079 - RNA, 19 nt, Artificial Sequence
  Description of Artificial Sequence: Synthetic oligonucleotide
  Antisense strand to SEQ ID NO: 1379078
ucucagagaacuauacaag

SEQ ID NO: 1379080 - RNA, 19 nt, Artificial Sequence
  Description of Artificial Sequence: Synthetic oligonucleotide
  Sense strand starting at position 3307 of SEQ ID NO: 1242875
uuguauaguucucugagag

SEQ ID NO: 1379081 - RNA, 19 nt, Artificial Sequence
  Description of Artificial Sequence: Synthetic oligonucleotide
  Antisense strand to SEQ ID NO: 1379080
cucucagagaacuauacaa

SEQ ID NO: 1379082 - RNA, 19 nt, Artificial Sequence
  Description of Artificial Sequence: Synthetic oligonucleotide
  Sense strand starting at position 3378 of SEQ ID NO: 1242875
cuguuaucgacugaguaga

SEQ ID NO: 1379083 - RNA, 19 nt, Artificial Sequence
  Description of Artificial Sequence: Synthetic oligonucleotide
  Antisense strand to SEQ ID NO: 1379082
ucuacucagucgauaacag

SEQ ID NO: 1379084 - RNA, 19 nt, Artificial Sequence
  Description of Artificial Sequence: Synthetic oligonucleotide
  Sense strand starting at position 3380 of SEQ ID NO: 1242875
guuaucgacugaguagaau

SEQ ID NO: 1379085 - RNA, 19 nt, Artificial Sequence
  Description of Artificial Sequence: Synthetic oligonucleotide
  Antisense strand to SEQ ID NO: 1379084
auucuacucagucgauaac

SEQ ID NO: 1379086 - RNA, 19 nt, Artificial Sequence
  Description of Artificial Sequence: Synthetic oligonucleotide
  Sense strand starting at position 3459 of SEQ ID NO: 1242875
uccuuaagucucuacugua

SEQ ID NO: 1379087 - RNA, 19 nt, Artificial Sequence
  Description of Artificial Sequence: Synthetic oligonucleotide
  Antisense strand to SEQ ID NO: 1379086
uacaguagagacuuaagga

SEQ ID NO: 1379088 - RNA, 19 nt, Artificial Sequence
  Description of Artificial Sequence: Synthetic oligonucleotide
  Sense strand starting at position 3553 of SEQ ID NO: 1242875
cggguugcuguugaggaau

SEQ ID NO: 1379089 - RNA, 19 nt, Artificial Sequence
  Description of Artificial Sequence: Synthetic oligonucleotide
  Antisense strand to SEQ ID NO: 1379088
auuccucaacagcaacccg

SEQ ID NO: 1379090 - RNA, 19 nt, Artificial Sequence
  Description of Artificial Sequence: Synthetic oligonucleotide
  Sense strand starting at position 3556 of SEQ ID NO: 1242875
guugcuguugaggaauaaa

SEQ ID NO: 1379091 - RNA, 19 nt, Artificial Sequence
  Description of Artificial Sequence: Synthetic oligonucleotide
  Antisense strand to SEQ ID NO: 1379090
uuuauuccucaacagcaac

SEQ ID NO: 1379092 - RNA, 19 nt, Artificial Sequence
  Description of Artificial Sequence: Synthetic oligonucleotide
  Sense strand starting at position 3653 of SEQ ID NO: 1242875
cggagugcugggagccaua

SEQ ID NO: 1379093 - RNA, 19 nt, Artificial Sequence
  Description of Artificial Sequence: Synthetic oligonucleotide
  Antisense strand to SEQ ID NO: 1379092
uauggcucccagcacuccg

SEQ ID NO: 1379094 - RNA, 19 nt, Artificial Sequence
  Description of Artificial Sequence: Synthetic oligonucleotide
  Sense strand starting at position 3695 of SEQ ID NO: 1242875
acagcuucuuaggucauau

SEQ ID NO: 1379095 - RNA, 19 nt, Artificial Sequence
  Description of Artificial Sequence: Synthetic oligonucleotide
  Antisense strand to SEQ ID NO: 1379094
auaugaccuaagaagcugu

SEQ ID NO: 1379096 - RNA, 19 nt, Artificial Sequence
  Description of Artificial Sequence: Synthetic oligonucleotide
  Sense strand starting at position 3697 of SEQ ID NO: 1242875
agcuucuuaggucauauua

SEQ ID NO: 1379097 - RNA, 19 nt, Artificial Sequence
  Description of Artificial Sequence: Synthetic oligonucleotide
  Antisense strand to SEQ ID NO: 1379096
uaauaugaccuaagaagcu

SEQ ID NO: 1379098 - RNA, 19 nt, Artificial Sequence
  Description of Artificial Sequence: Synthetic oligonucleotide
  Sense strand starting at position 3820 of SEQ ID NO: 1242875
aggaguuaccacuguaaua

SEQ ID NO: 1379099 - RNA, 19 nt, Artificial Sequence
  Description of Artificial Sequence: Synthetic oligonucleotide
  Antisense strand to SEQ ID NO: 1379098
uauuacagugguaacuccu

SEQ ID NO: 1379100 - RNA, 19 nt, Artificial Sequence
  Description of Artificial Sequence: Synthetic oligonucleotide
  Sense strand starting at position 3952 of SEQ ID NO: 1242875
gaugucuacaggcagugaa

SEQ ID NO: 1379101 - RNA, 19 nt, Artificial Sequence
  Description of Artificial Sequence: Synthetic oligonucleotide
  Antisense strand to SEQ ID NO: 1379100
uucacugccuguagacauc

SEQ ID NO: 1379102 - RNA, 19 nt, Artificial Sequence
  Description of Artificial Sequence: Synthetic oligonucleotide
  Sense strand starting at position 3955 of SEQ ID NO: 1242875
gucuacaggcagugaauau

SEQ ID NO: 1379103 - RNA, 19 nt, Artificial Sequence
  Description of Artificial Sequence: Synthetic oligonucleotide
  Antisense strand to SEQ ID NO: 1379102
auauucacugccuguagac

SEQ ID NO: 1379104 - RNA, 19 nt, Artificial Sequence
  Description of Artificial Sequence: Synthetic oligonucleotide
  Sense strand starting at position 362 of SEQ ID NO: 1242876
uggagaacucugggaagca

SEQ ID NO: 1379105 - RNA, 19 nt, Artificial Sequence
  Description of Artificial Sequence: Synthetic oligonucleotide
  Antisense strand to SEQ ID NO: 1379104
ugcuucccagaguucucca

SEQ ID NO: 1379106 - RNA, 19 nt, Artificial Sequence
  Description of Artificial Sequence: Synthetic oligonucleotide
  Sense strand starting at position 363 of SEQ ID NO: 1242876
ggagaacucugggaagcau

SEQ ID NO: 1379107 - RNA, 19 nt, Artificial Sequence
  Description of Artificial Sequence: Synthetic oligonucleotide
  Antisense strand to SEQ ID NO: 1379106
augcuucccagaguucucc

SEQ ID NO: 1379108 - RNA, 19 nt, Artificial Sequence
  Description of Artificial Sequence: Synthetic oligonucleotide
  Sense strand starting at position 698 of SEQ ID NO: 1242876
gcacuuaccucacuaggau

SEQ ID NO: 1379109 - RNA, 19 nt, Artificial Sequence
  Description of Artificial Sequence: Synthetic oligonucleotide
  Antisense strand to SEQ ID NO: 1379108
auccuagugagguaagugc

SEQ ID NO: 1379110 - RNA, 19 nt, Artificial Sequence
  Description of Artificial Sequence: Synthetic oligonucleotide
  Sense strand starting at position 753 of SEQ ID NO: 1242876
acaccuuucugagagguag

SEQ ID NO: 1379111 - RNA, 19 nt, Artificial Sequence
  Description of Artificial Sequence: Synthetic oligonucleotide
  Antisense strand to SEQ ID NO: 1379110
cuaccucucagaaaggugu

SEQ ID NO: 1379112 - RNA, 19 nt, Artificial Sequence
  Description of Artificial Sequence: Synthetic oligonucleotide
  Sense strand starting at position 1055 of SEQ ID NO: 1242876
uccuguggucucggaguuu

SEQ ID NO: 1379113 - RNA, 19 nt, Artificial Sequence
  Description of Artificial Sequence: Synthetic oligonucleotide
  Antisense strand to SEQ ID NO: 1379112
aaacuccgagaccacagga

SEQ ID NO: 1379114 - RNA, 19 nt, Artificial Sequence
  Description of Artificial Sequence: Synthetic oligonucleotide
  Sense strand starting at position 1067 of SEQ ID NO: 1242876
ggaguuuccuaacuggguu

SEQ ID NO: 1379115 - RNA, 19 nt, Artificial Sequence
  Description of Artificial Sequence: Synthetic oligonucleotide
  Antisense strand to SEQ ID NO: 1379114
aacccaguuaggaaacucc

SEQ ID NO: 1379116 - RNA, 19 nt, Artificial Sequence
  Description of Artificial Sequence: Synthetic oligonucleotide
  Sense strand starting at position 1498 of SEQ ID NO: 1242876
gccggaccucacuaacauu

SEQ ID NO: 1379117 - RNA, 19 nt, Artificial Sequence
  Description of Artificial Sequence: Synthetic oligonucleotide
  Antisense strand to SEQ ID NO: 1379116
aauguuagugagguccggc

SEQ ID NO: 1379118 - RNA, 19 nt, Artificial Sequence
  Description of Artificial Sequence: Synthetic oligonucleotide
  Sense strand starting at position 2032 of SEQ ID NO: 1242876
gcuugcgcccuuugggaaa

SEQ ID NO: 1379119 - RNA, 19 nt, Artificial Sequence
  Description of Artificial Sequence: Synthetic oligonucleotide
  Antisense strand to SEQ ID NO: 1379118
uuucccaaagggcgcaagc

SEQ ID NO: 1379120 - RNA, 19 nt, Artificial Sequence
  Description of Artificial Sequence: Synthetic oligonucleotide
  Sense strand starting at position 163 of SEQ ID NO: 1242877
gccggaugccuggauuaug

SEQ ID NO: 1379121 - RNA, 19 nt, Artificial Sequence
  Description of Artificial Sequence: Synthetic oligonucleotide
  Antisense strand to SEQ ID NO: 1379120
cauaauccaggcauccggc

SEQ ID NO: 1379122 - RNA, 19 nt, Artificial Sequence
  Description of Artificial Sequence: Synthetic oligonucleotide
  Sense strand starting at position 227 of SEQ ID NO: 1242877
cugggugcuggcuggaaau

SEQ ID NO: 1379123 - RNA, 19 nt, Artificial Sequence
  Description of Artificial Sequence: Synthetic oligonucleotide
  Antisense strand to SEQ ID NO: 1379122
auuuccagccagcacccag

SEQ ID NO: 1379124 - RNA, 19 nt, Artificial Sequence
  Description of Artificial Sequence: Synthetic oligonucleotide
  Sense strand starting at position 320 of SEQ ID NO: 1242877
uagaaagcgcuuugaggau

SEQ ID NO: 1379125 - RNA, 19 nt, Artificial Sequence
  Description of Artificial Sequence: Synthetic oligonucleotide
  Antisense strand to SEQ ID NO: 1379124
auccucaaagcgcuuucua

SEQ ID NO: 1379126 - RNA, 19 nt, Artificial Sequence
  Description of Artificial Sequence: Synthetic oligonucleotide
  Sense strand starting at position 329 of SEQ ID NO: 1242877
cuuugaggauccucucuga

SEQ ID NO: 1379127 - RNA, 19 nt, Artificial Sequence
  Description of Artificial Sequence: Synthetic oligonucleotide
  Antisense strand to SEQ ID NO: 1379126
ucagagaggauccucaaag

SEQ ID NO: 1379128 - RNA, 19 nt, Artificial Sequence
  Description of Artificial Sequence: Synthetic oligonucleotide
  Sense strand starting at position 409 of SEQ ID NO: 1242877
ggguguugaguugcgguua

SEQ ID NO: 1379129 - RNA, 19 nt, Artificial Sequence
  Description of Artificial Sequence: Synthetic oligonucleotide
  Antisense strand to SEQ ID NO: 1379128
uaaccgcaacucaacaccc

SEQ ID NO: 1379130 - RNA, 19 nt, Artificial Sequence
  Description of Artificial Sequence: Synthetic oligonucleotide
  Sense strand starting at position 414 of SEQ ID NO: 1242877
uugaguugcgguuauugca

SEQ ID NO: 1379131 - RNA, 19 nt, Artificial Sequence
  Description of Artificial Sequence: Synthetic oligonucleotide
  Antisense strand to SEQ ID NO: 1379130
ugcaauaaccgcaacucaa

SEQ ID NO: 1379132 - RNA, 19 nt, Artificial Sequence
  Description of Artificial Sequence: Synthetic oligonucleotide
  Sense strand starting at position 421 of SEQ ID NO: 1242877
gcgguuauugcaguuaacu

SEQ ID NO: 1379133 - RNA, 19 nt, Artificial Sequence
  Description of Artificial Sequence: Synthetic oligonucleotide
  Antisense strand to SEQ ID NO: 1379132
aguuaacugcaauaaccgc

SEQ ID NO: 1379134 - RNA, 19 nt, Artificial Sequence
  Description of Artificial Sequence: Synthetic oligonucleotide
  Sense strand starting at position 423 of SEQ ID NO: 1242877
gguuauugcaguuaacuug

SEQ ID NO: 1379135 - RNA, 19 nt, Artificial Sequence
  Description of Artificial Sequence: Synthetic oligonucleotide
  Antisense strand to SEQ ID NO: 1379134
caaguuaacugcaauaacc

SEQ ID NO: 1379136 - RNA, 19 nt, Artificial Sequence
  Description of Artificial Sequence: Synthetic oligonucleotide
  Sense strand starting at position 547 of SEQ ID NO: 1242877
gggugucucgcagcacuua

SEQ ID NO: 1379137 - RNA, 19 nt, Artificial Sequence
  Description of Artificial Sequence: Synthetic oligonucleotide
  Antisense strand to SEQ ID NO: 1379136
uaagugcugcgagacaccc

SEQ ID NO: 1379138 - RNA, 19 nt, Artificial Sequence
  Description of Artificial Sequence: Synthetic oligonucleotide
  Sense strand starting at position 558 of SEQ ID NO: 1242877
agcacuuacuggucaucaa

SEQ ID NO: 1379139 - RNA, 19 nt, Artificial Sequence
  Description of Artificial Sequence: Synthetic oligonucleotide
  Antisense strand to SEQ ID NO: 1379138
uugaugaccaguaagugcu

SEQ ID NO: 1379140 - RNA, 19 nt, Artificial Sequence
  Description of Artificial Sequence: Synthetic oligonucleotide
  Sense strand starting at position 559 of SEQ ID NO: 1242877
gcacuuacuggucaucaau

SEQ ID NO: 1379141 - RNA, 19 nt, Artificial Sequence
  Description of Artificial Sequence: Synthetic oligonucleotide
  Antisense strand to SEQ ID NO: 1379140
auugaugaccaguaagugc

SEQ ID NO: 1379142 - RNA, 19 nt, Artificial Sequence
  Description of Artificial Sequence: Synthetic oligonucleotide
  Sense strand starting at position 561 of SEQ ID NO: 1242877
acuuacuggucaucaauga

SEQ ID NO: 1379143 - RNA, 19 nt, Artificial Sequence
  Description of Artificial Sequence: Synthetic oligonucleotide
  Antisense strand to SEQ ID NO: 1379142
ucauugaugaccaguaagu

SEQ ID NO: 1379144 - RNA, 19 nt, Artificial Sequence
  Description of Artificial Sequence: Synthetic oligonucleotide
  Sense strand starting at position 562 of SEQ ID NO: 1242877
cuuacuggucaucaaugau

SEQ ID NO: 1379145 - RNA, 19 nt, Artificial Sequence
  Description of Artificial Sequence: Synthetic oligonucleotide
  Antisense strand to SEQ ID NO: 1379144
aucauugaugaccaguaag

SEQ ID NO: 1379146 - RNA, 19 nt, Artificial Sequence
  Description of Artificial Sequence: Synthetic oligonucleotide
  Sense strand starting at position 574 of SEQ ID NO: 1242877
caaugaugugcuugcagga

SEQ ID NO: 1379147 - RNA, 19 nt, Artificial Sequence
  Description of Artificial Sequence: Synthetic oligonucleotide
  Antisense strand to SEQ ID NO: 1379146
uccugcaagcacaucauug

SEQ ID NO: 1379148 - RNA, 19 nt, Artificial Sequence
  Description of Artificial Sequence: Synthetic oligonucleotide
  Sense strand starting at position 693 of SEQ ID NO: 1242877
aggcgugugccuugauuuc

SEQ ID NO: 1379149 - RNA, 19 nt, Artificial Sequence
  Description of Artificial Sequence: Synthetic oligonucleotide
  Antisense strand to SEQ ID NO: 1379148
gaaaucaaggcacacgccu

SEQ ID NO: 1379150 - RNA, 19 nt, Artificial Sequence
  Description of Artificial Sequence: Synthetic oligonucleotide
  Sense strand starting at position 934 of SEQ ID NO: 1242877
ggugucuguccugagguga

SEQ ID NO: 1379151 - RNA, 19 nt, Artificial Sequence
  Description of Artificial Sequence: Synthetic oligonucleotide
  Antisense strand to SEQ ID NO: 1379150
ucaccucaggacagacacc

SEQ ID NO: 1379152 - RNA, 19 nt, Artificial Sequence
  Description of Artificial Sequence: Synthetic oligonucleotide
  Sense strand starting at position 1239 of SEQ ID NO: 1242877
gucuuauaggaaugucuuc

SEQ ID NO: 1379153 - RNA, 19 nt, Artificial Sequence
  Description of Artificial Sequence: Synthetic oligonucleotide
  Antisense strand to SEQ ID NO: 1379152
gaagacauuccuauaagac

SEQ ID NO: 1379154 - RNA, 19 nt, Artificial Sequence
  Description of Artificial Sequence: Synthetic oligonucleotide
  Sense strand starting at position 1352 of SEQ ID NO: 1242877
ugaggucucccagaacagu

SEQ ID NO: 1379155 - RNA, 19 nt, Artificial Sequence
  Description of Artificial Sequence: Synthetic oligonucleotide
  Antisense strand to SEQ ID NO: 1379154
acuguucugggagaccuca

SEQ ID NO: 1379156 - RNA, 19 nt, Artificial Sequence
  Description of Artificial Sequence: Synthetic oligonucleotide
  Sense strand starting at position 1476 of SEQ ID NO: 1242877
ccuuccauucccugagaag

SEQ ID NO: 1379157 - RNA, 19 nt, Artificial Sequence
  Description of Artificial Sequence: Synthetic oligonucleotide
  Antisense strand to SEQ ID NO: 1379156
cuucucagggaauggaagg

SEQ ID NO: 1379158 - RNA, 19 nt, Artificial Sequence
  Description of Artificial Sequence: Synthetic oligonucleotide
  Sense strand starting at position 1521 of SEQ ID NO: 1242877
gaaagaaagugguuuaccu

SEQ ID NO: 1379159 - RNA, 19 nt, Artificial Sequence
  Description of Artificial Sequence: Synthetic oligonucleotide
  Antisense strand to SEQ ID NO: 1379158
agguaaaccacuuucuuuc

SEQ ID NO: 1379160 - RNA, 19 nt, Artificial Sequence
  Description of Artificial Sequence: Synthetic oligonucleotide
  Sense strand starting at position 1531 of SEQ ID NO: 1242877
gguuuaccuggcugagaca

SEQ ID NO: 1379161 - RNA, 19 nt, Artificial Sequence
  Description of Artificial Sequence: Synthetic oligonucleotide
  Antisense strand to SEQ ID NO: 1379160
ugucucagccagguaaacc

SEQ ID NO: 1379162 - RNA, 19 nt, Artificial Sequence
  Description of Artificial Sequence: Synthetic oligonucleotide
  Sense strand starting at position 1592 of SEQ ID NO: 1242877
uggagcguguucuuggaga

SEQ ID NO: 1379163 - RNA, 19 nt, Artificial Sequence
  Description of Artificial Sequence: Synthetic oligonucleotide
  Antisense strand to SEQ ID NO: 1379162
ucuccaagaacacgcucca

SEQ ID NO: 1379164 - RNA, 19 nt, Artificial Sequence
  Description of Artificial Sequence: Synthetic oligonucleotide
  Sense strand starting at position 1821 of SEQ ID NO: 1242877
cagggaguccgaugaaacu

SEQ ID NO: 1379165 - RNA, 19 nt, Artificial Sequence
  Description of Artificial Sequence: Synthetic oligonucleotide
  Antisense strand to SEQ ID NO: 1379164
aguuucaucggacucccug

SEQ ID NO: 1379166 - RNA, 19 nt, Artificial Sequence
  Description of Artificial Sequence: Synthetic oligonucleotide
  Sense strand starting at position 2233 of SEQ ID NO: 1242877
cgcacauggcaucaucaua

SEQ ID NO: 1379167 - RNA, 19 nt, Artificial Sequence
  Description of Artificial Sequence: Synthetic oligonucleotide
  Antisense strand to SEQ ID NO: 1379166
uaugaugaugccaugugcg

SEQ ID NO: 1379168 - RNA, 19 nt, Artificial Sequence
  Description of Artificial Sequence: Synthetic oligonucleotide
  Sense strand starting at position 2697 of SEQ ID NO: 1242877
uggccauuccagcggaaga

SEQ ID NO: 1379169 - RNA, 19 nt, Artificial Sequence
  Description of Artificial Sequence: Synthetic oligonucleotide
  Antisense strand to SEQ ID NO: 1379168
ucuuccgcuggaauggcca

SEQ ID NO: 1379170 - RNA, 19 nt, Artificial Sequence
  Description of Artificial Sequence: Synthetic oligonucleotide
  Sense strand starting at position 2714 of SEQ ID NO: 1242877
gagagcguucccugggaga

SEQ ID NO: 1379171 - RNA, 19 nt, Artificial Sequence
  Description of Artificial Sequence: Synthetic oligonucleotide
  Antisense strand to SEQ ID NO: 1379170
ucucccagggaacgcucuc

SEQ ID NO: 1379172 - RNA, 19 nt, Artificial Sequence
  Description of Artificial Sequence: Synthetic oligonucleotide
  Sense strand starting at position 2740 of SEQ ID NO: 1242877
aguggugcuuucucagaag

SEQ ID NO: 1379173 - RNA, 19 nt, Artificial Sequence
  Description of Artificial Sequence: Synthetic oligonucleotide
  Antisense strand to SEQ ID NO: 1379172
cuucugagaaagcaccacu

SEQ ID NO: 1379174 - RNA, 19 nt, Artificial Sequence
  Description of Artificial Sequence: Synthetic oligonucleotide
  Sense strand starting at position 3229 of SEQ ID NO: 1242877
cuaguuucagagugggaaa

SEQ ID NO: 1379175 - RNA, 19 nt, Artificial Sequence
  Description of Artificial Sequence: Synthetic oligonucleotide
  Antisense strand to SEQ ID NO: 1379174
uuucccacucugaaacuag

SEQ ID NO: 1379176 - RNA, 19 nt, Artificial Sequence
  Description of Artificial Sequence: Synthetic oligonucleotide
  Sense strand starting at position 3384 of SEQ ID NO: 1242877
ccaacuguccuguggacuu

SEQ ID NO: 1379177 - RNA, 19 nt, Artificial Sequence
  Description of Artificial Sequence: Synthetic oligonucleotide
  Antisense strand to SEQ ID NO: 1379176
aaguccacaggacaguugg

SEQ ID NO: 1379178 - RNA, 19 nt, Artificial Sequence
  Description of Artificial Sequence: Synthetic oligonucleotide
  Sense strand starting at position 3430 of SEQ ID NO: 1242877
cuccuuuggucuccaaguu

SEQ ID NO: 1379179 - RNA, 19 nt, Artificial Sequence
  Description of Artificial Sequence: Synthetic oligonucleotide
  Antisense strand to SEQ ID NO: 1379178
aacuuggagaccaaaggag

SEQ ID NO: 1379180 - RNA, 19 nt, Artificial Sequence
  Description of Artificial Sequence: Synthetic oligonucleotide
  Sense strand starting at position 3467 of SEQ ID NO: 1242877
uuugccuuucucugccaga

SEQ ID NO: 1379181 - RNA, 19 nt, Artificial Sequence
  Description of Artificial Sequence: Synthetic oligonucleotide
  Antisense strand to SEQ ID NO: 1379180
ucuggcagagaaaggcaaa

SEQ ID NO: 1379182 - RNA, 19 nt, Artificial Sequence
  Description of Artificial Sequence: Synthetic oligonucleotide
  Sense strand starting at position 3551 of SEQ ID NO: 1242877
agcggcaaucuguaggaaa

SEQ ID NO: 1379183 - RNA, 19 nt, Artificial Sequence
  Description of Artificial Sequence: Synthetic oligonucleotide
  Antisense strand to SEQ ID NO: 1379182
uuuccuacagauugccgcu

SEQ ID NO: 1379184 - RNA, 19 nt, Artificial Sequence
  Description of Artificial Sequence: Synthetic oligonucleotide
  Sense strand starting at position 3578 of SEQ ID NO: 1242877
gaagucucacgcugauuua

SEQ ID NO: 1379185 - RNA, 19 nt, Artificial Sequence
  Description of Artificial Sequence: Synthetic oligonucleotide
  Antisense strand to SEQ ID NO: 1379184
uaaaucagcgugagacuuc

SEQ ID NO: 1379186 - RNA, 19 nt, Artificial Sequence
  Description of Artificial Sequence: Synthetic oligonucleotide
  Sense strand starting at position 3599 of SEQ ID NO: 1242877
gacgguuguagagacaaua

SEQ ID NO: 1379187 - RNA, 19 nt, Artificial Sequence
  Description of Artificial Sequence: Synthetic oligonucleotide
  Antisense strand to SEQ ID NO: 1379186
uauugucucuacaaccguc

SEQ ID NO: 1379188 - RNA, 19 nt, Artificial Sequence
  Description of Artificial Sequence: Synthetic oligonucleotide
  Sense strand starting at position 3664 of SEQ ID NO: 1242877
gauccagcucccugaguuu

SEQ ID NO: 1379189 - RNA, 19 nt, Artificial Sequence
  Description of Artificial Sequence: Synthetic oligonucleotide
  Antisense strand to SEQ ID NO: 1379188
aaacucagggagcuggauc

SEQ ID NO: 1379190 - RNA, 19 nt, Artificial Sequence
  Description of Artificial Sequence: Synthetic oligonucleotide
  Sense strand starting at position 3696 of SEQ ID NO: 1242877
ggcacaguaccaggugauu

SEQ ID NO: 1379191 - RNA, 19 nt, Artificial Sequence
  Description of Artificial Sequence: Synthetic oligonucleotide
  Antisense strand to SEQ ID NO: 1379190
aaucaccugguacugugcc

SEQ ID NO: 1379192 - RNA, 19 nt, Artificial Sequence
  Description of Artificial Sequence: Synthetic oligonucleotide
  Sense strand starting at position 3705 of SEQ ID NO: 1242877
ccaggugauuucuacuggu

SEQ ID NO: 1379193 - RNA, 19 nt, Artificial Sequence
  Description of Artificial Sequence: Synthetic oligonucleotide
  Antisense strand to SEQ ID NO: 1379192
accaguagaaaucaccugg

SEQ ID NO: 1379194 - RNA, 19 nt, Artificial Sequence
  Description of Artificial Sequence: Synthetic oligonucleotide
  Sense strand starting at position 3718 of SEQ ID NO: 1242877
acugguucuuacuugguau

SEQ ID NO: 1379195 - RNA, 19 nt, Artificial Sequence
  Description of Artificial Sequence: Synthetic oligonucleotide
  Antisense strand to SEQ ID NO: 1379194
auaccaaguaagaaccagu

SEQ ID NO: 1379196 - RNA, 19 nt, Artificial Sequence
  Description of Artificial Sequence: Synthetic oligonucleotide
  Sense strand starting at position 3752 of SEQ ID NO: 1242877
gaaacagguuuagaaauuu

SEQ ID NO: 1379197 - RNA, 19 nt, Artificial Sequence
  Description of Artificial Sequence: Synthetic oligonucleotide
  Antisense strand to SEQ ID NO: 1379196
aaauuucuaaaccuguuuc

SEQ ID NO: 1379198 - RNA, 19 nt, Artificial Sequence
  Description of Artificial Sequence: Synthetic oligonucleotide
  Sense strand starting at position 3885 of SEQ ID NO: 1242877
ugauccuuauaccucagua

SEQ ID NO: 1379199 - RNA, 19 nt, Artificial Sequence
  Description of Artificial Sequence: Synthetic oligonucleotide
  Antisense strand to SEQ ID NO: 1379198
uacugagguauaaggauca

SEQ ID NO: 1379200 - RNA, 19 nt, Artificial Sequence
  Description of Artificial Sequence: Synthetic oligonucleotide
  Sense strand starting at position 3 of SEQ ID NO: 1242878
gucuguucccaggauggga

SEQ ID NO: 1379201 - RNA, 19 nt, Artificial Sequence
  Description of Artificial Sequence: Synthetic oligonucleotide
  Antisense strand to SEQ ID NO: 1379200
ucccauccugggaacagac

SEQ ID NO: 1379202 - RNA, 19 nt, Artificial Sequence
  Description of Artificial Sequence: Synthetic oligonucleotide
  Sense strand starting at position 517 of SEQ ID NO: 1242878
cuggucagcugguuacauu

SEQ ID NO: 1379203 - RNA, 19 nt, Artificial Sequence
  Description of Artificial Sequence: Synthetic oligonucleotide
  Antisense strand to SEQ ID NO: 1379202
aauguaaccagcugaccag

SEQ ID NO: 1379204 - RNA, 19 nt, Artificial Sequence
  Description of Artificial Sequence: Synthetic oligonucleotide
  Sense strand starting at position 806 of SEQ ID NO: 1242878
ccuugucccgcuggaguau

SEQ ID NO: 1379205 - RNA, 19 nt, Artificial Sequence
  Description of Artificial Sequence: Synthetic oligonucleotide
  Antisense strand to SEQ ID NO: 1379204
auacuccagcgggacaagg

SEQ ID NO: 1379206 - RNA, 19 nt, Artificial Sequence
  Description of Artificial Sequence: Synthetic oligonucleotide
  Sense strand starting at position 932 of SEQ ID NO: 1242878
cugugugaccuugagaaua

SEQ ID NO: 1379207 - RNA, 19 nt, Artificial Sequence
  Description of Artificial Sequence: Synthetic oligonucleotide
  Antisense strand to SEQ ID NO: 1379206
uauucucaaggucacacag

SEQ ID NO: 1379208 - RNA, 19 nt, Artificial Sequence
  Description of Artificial Sequence: Synthetic oligonucleotide
  Sense strand starting at position 934 of SEQ ID NO: 1242878
gugugaccuugagaauacu

SEQ ID NO: 1379209 - RNA, 19 nt, Artificial Sequence
  Description of Artificial Sequence: Synthetic oligonucleotide
  Antisense strand to SEQ ID NO: 1379208
aguauucucaaggucacac

SEQ ID NO: 1379210 - RNA, 19 nt, Artificial Sequence
  Description of Artificial Sequence: Synthetic oligonucleotide
  Sense strand starting at position 1254 of SEQ ID NO: 1242878
caaaccaguucugcagaga

SEQ ID NO: 1379211 - RNA, 19 nt, Artificial Sequence
  Description of Artificial Sequence: Synthetic oligonucleotide
  Antisense strand to SEQ ID NO: 1379210
ucucugcagaacugguuug

SEQ ID NO: 1379212 - RNA, 19 nt, Artificial Sequence
  Description of Artificial Sequence: Synthetic oligonucleotide
  Sense strand starting at position 1461 of SEQ ID NO: 1242878
aggauuagcucagcuccua

SEQ ID NO: 1379213 - RNA, 19 nt, Artificial Sequence
  Description of Artificial Sequence: Synthetic oligonucleotide
  Antisense strand to SEQ ID NO: 1379212
uaggagcugagcuaauccu

SEQ ID NO: 1379214 - RNA, 19 nt, Artificial Sequence
  Description of Artificial Sequence: Synthetic oligonucleotide
  Sense strand starting at position 2191 of SEQ ID NO: 1242878
gaggcuuucucacgcagac

SEQ ID NO: 1379215 - RNA, 19 nt, Artificial Sequence
  Description of Artificial Sequence: Synthetic oligonucleotide
  Antisense strand to SEQ ID NO: 1379214
gucugcgugagaaagccuc

SEQ ID NO: 1379216 - RNA, 19 nt, Artificial Sequence
  Description of Artificial Sequence: Synthetic oligonucleotide
  Sense strand starting at position 2341 of SEQ ID NO: 1242878
gcugguugguggaaaggau

SEQ ID NO: 1379217 - RNA, 19 nt, Artificial Sequence
  Description of Artificial Sequence: Synthetic oligonucleotide
  Antisense strand to SEQ ID NO: 1379216
auccuuuccaccaaccagc

SEQ ID NO: 1379218 - RNA, 19 nt, Artificial Sequence
  Description of Artificial Sequence: Synthetic oligonucleotide
  Sense strand starting at position 2487 of SEQ ID NO: 1242878
gccacugucuggcugguaa

SEQ ID NO: 1379219 - RNA, 19 nt, Artificial Sequence
  Description of Artificial Sequence: Synthetic oligonucleotide
  Antisense strand to SEQ ID NO: 1379218
uuaccagccagacaguggc

SEQ ID NO: 1379220 - RNA, 19 nt, Artificial Sequence
  Description of Artificial Sequence: Synthetic oligonucleotide
  Sense strand starting at position 2499 of SEQ ID NO: 1242878
cugguaaguccaggcucau

SEQ ID NO: 1379221 - RNA, 19 nt, Artificial Sequence
  Description of Artificial Sequence: Synthetic oligonucleotide
  Antisense strand to SEQ ID NO: 1379220
augagccuggacuuaccag

SEQ ID NO: 1379222 - RNA, 19 nt, Artificial Sequence
  Description of Artificial Sequence: Synthetic oligonucleotide
  Sense strand starting at position 2806 of SEQ ID NO: 1242878
agcccucauguaugucaga

SEQ ID NO: 1379223 - RNA, 19 nt, Artificial Sequence
  Description of Artificial Sequence: Synthetic oligonucleotide
  Antisense strand to SEQ ID NO: 1379222
ucugacauacaugagggcu

SEQ ID NO: 1379224 - RNA, 19 nt, Artificial Sequence
  Description of Artificial Sequence: Synthetic oligonucleotide
  Sense strand starting at position 2851 of SEQ ID NO: 1242878
guaagaggucccugaauau

SEQ ID NO: 1379225 - RNA, 19 nt, Artificial Sequence
  Description of Artificial Sequence: Synthetic oligonucleotide
  Antisense strand to SEQ ID NO: 1379224
auauucagggaccucuuac

SEQ ID NO: 1379226 - RNA, 19 nt, Artificial Sequence
  Description of Artificial Sequence: Synthetic oligonucleotide
  Sense strand starting at position 3526 of SEQ ID NO: 1242878
uagagaugucccggcuaau

SEQ ID NO: 1379227 - RNA, 19 nt, Artificial Sequence
  Description of Artificial Sequence: Synthetic oligonucleotide
  Antisense strand to SEQ ID NO: 1379226
auuagccgggacaucucua

SEQ ID NO: 1379228 - RNA, 19 nt, Artificial Sequence
  Description of Artificial Sequence: Synthetic oligonucleotide
  Sense strand starting at position 3724 of SEQ ID NO: 1242878
cugaguucuucucuuuauu

SEQ ID NO: 1379229 - RNA, 19 nt, Artificial Sequence
  Description of Artificial Sequence: Synthetic oligonucleotide
  Antisense strand to SEQ ID NO: 1379228
aauaaagagaagaacucag

SEQ ID NO: 1379230 - RNA, 19 nt, Artificial Sequence
  Description of Artificial Sequence: Synthetic oligonucleotide
  Sense strand starting at position 3851 of SEQ ID NO: 1242878
cugcuuucugguugacuca

SEQ ID NO: 1379231 - RNA, 19 nt, Artificial Sequence
  Description of Artificial Sequence: Synthetic oligonucleotide
  Antisense strand to SEQ ID NO: 1379230
ugagucaaccagaaagcag

SEQ ID NO: 1379232 - RNA, 19 nt, Artificial Sequence
  Description of Artificial Sequence: Synthetic oligonucleotide
  Sense strand starting at position 107 of SEQ ID NO: 1242879
augacuucuuccuccagga

SEQ ID NO: 1379233 - RNA, 19 nt, Artificial Sequence
  Description of Artificial Sequence: Synthetic oligonucleotide
  Antisense strand to SEQ ID NO: 1379232
uccuggaggaagaagucau

SEQ ID NO: 1379234 - RNA, 19 nt, Artificial Sequence
  Description of Artificial Sequence: Synthetic oligonucleotide
  Sense strand starting at position 191 of SEQ ID NO: 1242879
aguugucaguucuccuuua

SEQ ID NO: 1379235 - RNA, 19 nt, Artificial Sequence
  Description of Artificial Sequence: Synthetic oligonucleotide
  Antisense strand to SEQ ID NO: 1379234
uaaaggagaacugacaacu

SEQ ID NO: 1379236 - RNA, 19 nt, Artificial Sequence
  Description of Artificial Sequence: Synthetic oligonucleotide
  Sense strand starting at position 226 of SEQ ID NO: 1242879
cagacugaaccuugugaga

SEQ ID NO: 1379237 - RNA, 19 nt, Artificial Sequence
  Description of Artificial Sequence: Synthetic oligonucleotide
  Antisense strand to SEQ ID NO: 1379236
ucucacaagguucagucug

SEQ ID NO: 1379238 - RNA, 19 nt, Artificial Sequence
  Description of Artificial Sequence: Synthetic oligonucleotide
  Sense strand starting at position 250 of SEQ ID NO: 1242879
ggcauaucugcuuggcuca

SEQ ID NO: 1379239 - RNA, 19 nt, Artificial Sequence
  Description of Artificial Sequence: Synthetic oligonucleotide
  Antisense strand to SEQ ID NO: 1379238
ugagccaagcagauaugcc

SEQ ID NO: 1379240 - RNA, 19 nt, Artificial Sequence
  Description of Artificial Sequence: Synthetic oligonucleotide
  Sense strand starting at position 450 of SEQ ID NO: 1242879
ggcugaugguaucguauac

SEQ ID NO: 1379241 - RNA, 19 nt, Artificial Sequence
  Description of Artificial Sequence: Synthetic oligonucleotide
  Antisense strand to SEQ ID NO: 1379240
guauacgauaccaucagcc

SEQ ID NO: 1379242 - RNA, 19 nt, Artificial Sequence
  Description of Artificial Sequence: Synthetic oligonucleotide
  Sense strand starting at position 454 of SEQ ID NO: 1242879
gaugguaucguauaccauc

SEQ ID NO: 1379243 - RNA, 19 nt, Artificial Sequence
  Description of Artificial Sequence: Synthetic oligonucleotide
  Antisense strand to SEQ ID NO: 1379242
gaugguauacgauaccauc

SEQ ID NO: 1379244 - RNA, 19 nt, Artificial Sequence
  Description of Artificial Sequence: Synthetic oligonucleotide
  Sense strand starting at position 541 of SEQ ID NO: 1242879
cgcugacuguuccaucacu

SEQ ID NO: 1379245 - RNA, 19 nt, Artificial Sequence
  Description of Artificial Sequence: Synthetic oligonucleotide
  Antisense strand to SEQ ID NO: 1379244
agugauggaacagucagcg

SEQ ID NO: 1379246 - RNA, 19 nt, Artificial Sequence
  Description of Artificial Sequence: Synthetic oligonucleotide
  Sense strand starting at position 618 of SEQ ID NO: 1242879
augucuaacuguugguaca

SEQ ID NO: 1379247 - RNA, 19 nt, Artificial Sequence
  Description of Artificial Sequence: Synthetic oligonucleotide
  Antisense strand to SEQ ID NO: 1379246
uguaccaacaguuagacau

SEQ ID NO: 1379248 - RNA, 19 nt, Artificial Sequence
  Description of Artificial Sequence: Synthetic oligonucleotide
  Sense strand starting at position 619 of SEQ ID NO: 1242879
ugucuaacuguugguacaa

SEQ ID NO: 1379249 - RNA, 19 nt, Artificial Sequence
  Description of Artificial Sequence: Synthetic oligonucleotide
  Antisense strand to SEQ ID NO: 1379248
uuguaccaacaguuagaca

SEQ ID NO: 1379250 - RNA, 19 nt, Artificial Sequence
  Description of Artificial Sequence: Synthetic oligonucleotide
  Sense strand starting at position 620 of SEQ ID NO: 1242879
gucuaacuguugguacaaa

SEQ ID NO: 1379251 - RNA, 19 nt, Artificial Sequence
  Description of Artificial Sequence: Synthetic oligonucleotide
  Antisense strand to SEQ ID NO: 1379250
uuuguaccaacaguuagac

SEQ ID NO: 1379252 - RNA, 19 nt, Artificial Sequence
  Description of Artificial Sequence: Synthetic oligonucleotide
  Sense strand starting at position 621 of SEQ ID NO: 1242879
ucuaacuguugguacaaau

SEQ ID NO: 1379253 - RNA, 19 nt, Artificial Sequence
  Description of Artificial Sequence: Synthetic oligonucleotide
  Antisense strand to SEQ ID NO: 1379252
auuuguaccaacaguuaga

SEQ ID NO: 1379254 - RNA, 19 nt, Artificial Sequence
  Description of Artificial Sequence: Synthetic oligonucleotide
  Sense strand starting at position 807 of SEQ ID NO: 1242879
ucaugucagcccuauaguc

SEQ ID NO: 1379255 - RNA, 19 nt, Artificial Sequence
  Description of Artificial Sequence: Synthetic oligonucleotide
  Antisense strand to SEQ ID NO: 1379254
gacuauagggcugacauga

SEQ ID NO: 1379256 - RNA, 19 nt, Artificial Sequence
  Description of Artificial Sequence: Synthetic oligonucleotide
  Sense strand starting at position 815 of SEQ ID NO: 1242879
gcccuauagucuguuccca

SEQ ID NO: 1379257 - RNA, 19 nt, Artificial Sequence
  Description of Artificial Sequence: Synthetic oligonucleotide
  Antisense strand to SEQ ID NO: 1379256
ugggaacagacuauagggc

SEQ ID NO: 1379258 - RNA, 19 nt, Artificial Sequence
  Description of Artificial Sequence: Synthetic oligonucleotide
  Sense strand starting at position 819 of SEQ ID NO: 1242879
uauagucuguucccaggau

SEQ ID NO: 1379259 - RNA, 19 nt, Artificial Sequence
  Description of Artificial Sequence: Synthetic oligonucleotide
  Antisense strand to SEQ ID NO: 1379258
auccugggaacagacuaua

SEQ ID NO: 1379260 - RNA, 19 nt, Artificial Sequence
  Description of Artificial Sequence: Synthetic oligonucleotide
  Sense strand starting at position 823 of SEQ ID NO: 1242879
gucuguucccaggauggga

SEQ ID NO: 1379261 - RNA, 19 nt, Artificial Sequence
  Description of Artificial Sequence: Synthetic oligonucleotide
  Antisense strand to SEQ ID NO: 1379260
ucccauccugggaacagac

SEQ ID NO: 1379262 - RNA, 19 nt, Artificial Sequence
  Description of Artificial Sequence: Synthetic oligonucleotide
  Sense strand starting at position 1337 of SEQ ID NO: 1242879
cuggucagcugguuacauu

SEQ ID NO: 1379263 - RNA, 19 nt, Artificial Sequence
  Description of Artificial Sequence: Synthetic oligonucleotide
  Antisense strand to SEQ ID NO: 1379262
aauguaaccagcugaccag

SEQ ID NO: 1379264 - RNA, 19 nt, Artificial Sequence
  Description of Artificial Sequence: Synthetic oligonucleotide
  Sense strand starting at position 1626 of SEQ ID NO: 1242879
ccuugucccgcuggaguau

SEQ ID NO: 1379265 - RNA, 19 nt, Artificial Sequence
  Description of Artificial Sequence: Synthetic oligonucleotide
  Antisense strand to SEQ ID NO: 1379264
auacuccagcgggacaagg

SEQ ID NO: 1379266 - RNA, 19 nt, Artificial Sequence
  Description of Artificial Sequence: Synthetic oligonucleotide
  Sense strand starting at position 1752 of SEQ ID NO: 1242879
cugugugaccuugagaaua

SEQ ID NO: 1379267 - RNA, 19 nt, Artificial Sequence
  Description of Artificial Sequence: Synthetic oligonucleotide
  Antisense strand to SEQ ID NO: 1379266
uauucucaaggucacacag

SEQ ID NO: 1379268 - RNA, 19 nt, Artificial Sequence
  Description of Artificial Sequence: Synthetic oligonucleotide
  Sense strand starting at position 1754 of SEQ ID NO: 1242879
gugugaccuugagaauacu

SEQ ID NO: 1379269 - RNA, 19 nt, Artificial Sequence
  Description of Artificial Sequence: Synthetic oligonucleotide
  Antisense strand to SEQ ID NO: 1379268
aguauucucaaggucacac

SEQ ID NO: 1379270 - RNA, 19 nt, Artificial Sequence
  Description of Artificial Sequence: Synthetic oligonucleotide
  Sense strand starting at position 2074 of SEQ ID NO: 1242879
caaaccaguucugcagaga

SEQ ID NO: 1379271 - RNA, 19 nt, Artificial Sequence
  Description of Artificial Sequence: Synthetic oligonucleotide
  Antisense strand to SEQ ID NO: 1379270
ucucugcagaacugguuug

SEQ ID NO: 1379272 - RNA, 19 nt, Artificial Sequence
  Description of Artificial Sequence: Synthetic oligonucleotide
  Sense strand starting at position 2281 of SEQ ID NO: 1242879
aggauuagcucagcuccua

SEQ ID NO: 1379273 - RNA, 19 nt, Artificial Sequence
  Description of Artificial Sequence: Synthetic oligonucleotide
  Antisense strand to SEQ ID NO: 1379272
uaggagcugagcuaauccu

SEQ ID NO: 1379274 - RNA, 19 nt, Artificial Sequence
  Description of Artificial Sequence: Synthetic oligonucleotide
  Sense strand starting at position 3011 of SEQ ID NO: 1242879
gaggcuuucucacgcagac

SEQ ID NO: 1379275 - RNA, 19 nt, Artificial Sequence
  Description of Artificial Sequence: Synthetic oligonucleotide
  Antisense strand to SEQ ID NO: 1379274
gucugcgugagaaagccuc

SEQ ID NO: 1379276 - RNA, 19 nt, Artificial Sequence
  Description of Artificial Sequence: Synthetic oligonucleotide
  Sense strand starting at position 3161 of SEQ ID NO: 1242879
gcugguugguggaaaggau

SEQ ID NO: 1379277 - RNA, 19 nt, Artificial Sequence
  Description of Artificial Sequence: Synthetic oligonucleotide
  Antisense strand to SEQ ID NO: 1379276
auccuuuccaccaaccagc

SEQ ID NO: 1379278 - RNA, 19 nt, Artificial Sequence
  Description of Artificial Sequence: Synthetic oligonucleotide
  Sense strand starting at position 3307 of SEQ ID NO: 1242879
gccacugucuggcugguaa

SEQ ID NO: 1379279 - RNA, 19 nt, Artificial Sequence
  Description of Artificial Sequence: Synthetic oligonucleotide
  Antisense strand to SEQ ID NO: 1379278
uuaccagccagacaguggc

SEQ ID NO: 1379280 - RNA, 19 nt, Artificial Sequence
  Description of Artificial Sequence: Synthetic oligonucleotide
  Sense strand starting at position 3319 of SEQ ID NO: 1242879
cugguaaguccaggcucau

SEQ ID NO: 1379281 - RNA, 19 nt, Artificial Sequence
  Description of Artificial Sequence: Synthetic oligonucleotide
  Antisense strand to SEQ ID NO: 1379280
augagccuggacuuaccag

SEQ ID NO: 1379282 - RNA, 19 nt, Artificial Sequence
  Description of Artificial Sequence: Synthetic oligonucleotide
  Sense strand starting at position 3626 of SEQ ID NO: 1242879
agcccucauguaugucaga

SEQ ID NO: 1379283 - RNA, 19 nt, Artificial Sequence
  Description of Artificial Sequence: Synthetic oligonucleotide
  Antisense strand to SEQ ID NO: 1379282
ucugacauacaugagggcu

SEQ ID NO: 1379284 - RNA, 19 nt, Artificial Sequence
  Description of Artificial Sequence: Synthetic oligonucleotide
  Sense strand starting at position 3671 of SEQ ID NO: 1242879
guaagaggucccugaauau

SEQ ID NO: 1379285 - RNA, 19 nt, Artificial Sequence
  Description of Artificial Sequence: Synthetic oligonucleotide
  Antisense strand to SEQ ID NO: 1379284
auauucagggaccucuuac

SEQ ID NO: 1379286 - RNA, 19 nt, Artificial Sequence
  Description of Artificial Sequence: Synthetic oligonucleotide
  Sense strand starting at position 463 of SEQ ID NO: 1242880
ccaaguaggcccugaggaa

SEQ ID NO: 1379287 - RNA, 19 nt, Artificial Sequence
  Description of Artificial Sequence: Synthetic oligonucleotide
  Antisense strand to SEQ ID NO: 1379286
uuccucagggccuacuugg

SEQ ID NO: 1379288 - RNA, 19 nt, Artificial Sequence
  Description of Artificial Sequence: Synthetic oligonucleotide
  Sense strand starting at position 1744 of SEQ ID NO: 1242880
gggagagcuccucggcaga

SEQ ID NO: 1379289 - RNA, 19 nt, Artificial Sequence
  Description of Artificial Sequence: Synthetic oligonucleotide
  Antisense strand to SEQ ID NO: 1379288
ucugccgaggagcucuccc

SEQ ID NO: 1379290 - RNA, 19 nt, Artificial Sequence
  Description of Artificial Sequence: Synthetic oligonucleotide
  Sense strand starting at position 1824 of SEQ ID NO: 1242880
gggccagucccugagcuuu

SEQ ID NO: 1379291 - RNA, 19 nt, Artificial Sequence
  Description of Artificial Sequence: Synthetic oligonucleotide
  Antisense strand to SEQ ID NO: 1379290
aaagcucagggacuggccc

SEQ ID NO: 1379292 - RNA, 19 nt, Artificial Sequence
  Description of Artificial Sequence: Synthetic oligonucleotide
  Sense strand starting at position 2194 of SEQ ID NO: 1242880
cgcuaaguggaggaaguau

SEQ ID NO: 1379293 - RNA, 19 nt, Artificial Sequence
  Description of Artificial Sequence: Synthetic oligonucleotide
  Antisense strand to SEQ ID NO: 1379292
auacuuccuccacuuagcg

SEQ ID NO: 1379294 - RNA, 19 nt, Artificial Sequence
  Description of Artificial Sequence: Synthetic oligonucleotide
  Sense strand starting at position 2203 of SEQ ID NO: 1242880
gaggaaguaucagacauua

SEQ ID NO: 1379295 - RNA, 19 nt, Artificial Sequence
  Description of Artificial Sequence: Synthetic oligonucleotide
  Antisense strand to SEQ ID NO: 1379294
uaaugucugauacuuccuc

SEQ ID NO: 1379296 - RNA, 19 nt, Artificial Sequence
  Description of Artificial Sequence: Synthetic oligonucleotide
  Sense strand starting at position 2230 of SEQ ID NO: 1242880
ggcuuaaagagucgcuauu

SEQ ID NO: 1379297 - RNA, 19 nt, Artificial Sequence
  Description of Artificial Sequence: Synthetic oligonucleotide
  Antisense strand to SEQ ID NO: 1379296
aauagcgacucuuuaagcc

SEQ ID NO: 1379298 - RNA, 19 nt, Artificial Sequence
  Description of Artificial Sequence: Synthetic oligonucleotide
  Sense strand starting at position 2232 of SEQ ID NO: 1242880
cuuaaagagucgcuauuga

SEQ ID NO: 1379299 - RNA, 19 nt, Artificial Sequence
  Description of Artificial Sequence: Synthetic oligonucleotide
  Antisense strand to SEQ ID NO: 1379298
ucaauagcgacucuuuaag

SEQ ID NO: 1379300 - RNA, 19 nt, Artificial Sequence
  Description of Artificial Sequence: Synthetic oligonucleotide
  Sense strand starting at position 2570 of SEQ ID NO: 1242880
ggguucuaagugugagaag

SEQ ID NO: 1379301 - RNA, 19 nt, Artificial Sequence
  Description of Artificial Sequence: Synthetic oligonucleotide
  Antisense strand to SEQ ID NO: 1379300
cuucucacacuuagaaccc

SEQ ID NO: 1379302 - RNA, 19 nt, Artificial Sequence
  Description of Artificial Sequence: Synthetic oligonucleotide
  Sense strand starting at position 2666 of SEQ ID NO: 1242880
gaguuagggcacugaucac

SEQ ID NO: 1379303 - RNA, 19 nt, Artificial Sequence
  Description of Artificial Sequence: Synthetic oligonucleotide
  Antisense strand to SEQ ID NO: 1379302
gugaucagugcccuaacuc

SEQ ID NO: 1379304 - RNA, 19 nt, Artificial Sequence
  Description of Artificial Sequence: Synthetic oligonucleotide
  Sense strand starting at position 2709 of SEQ ID NO: 1242880
ggcugaaagugugaggcua

SEQ ID NO: 1379305 - RNA, 19 nt, Artificial Sequence
  Description of Artificial Sequence: Synthetic oligonucleotide
  Antisense strand to SEQ ID NO: 1379304
uagccucacacuuucagcc

SEQ ID NO: 1379306 - RNA, 19 nt, Artificial Sequence
  Description of Artificial Sequence: Synthetic oligonucleotide
  Sense strand starting at position 2903 of SEQ ID NO: 1242880
gggccuccucccuagucaa

SEQ ID NO: 1379307 - RNA, 19 nt, Artificial Sequence
  Description of Artificial Sequence: Synthetic oligonucleotide
  Antisense strand to SEQ ID NO: 1379306
uugacuagggaggaggccc

SEQ ID NO: 1379308 - RNA, 19 nt, Artificial Sequence
  Description of Artificial Sequence: Synthetic oligonucleotide
  Sense strand starting at position 2921 of SEQ ID NO: 1242880
agcugcauccuaggcuaau

SEQ ID NO: 1379309 - RNA, 19 nt, Artificial Sequence
  Description of Artificial Sequence: Synthetic oligonucleotide
  Antisense strand to SEQ ID NO: 1379308
auuagccuaggaugcagcu

SEQ ID NO: 1379310 - RNA, 19 nt, Artificial Sequence
  Description of Artificial Sequence: Synthetic oligonucleotide
  Sense strand starting at position 3324 of SEQ ID NO: 1242880
caccucuagccuggauaga

SEQ ID NO: 1379311 - RNA, 19 nt, Artificial Sequence
  Description of Artificial Sequence: Synthetic oligonucleotide
  Antisense strand to SEQ ID NO: 1379310
ucuauccaggcuagaggug

SEQ ID NO: 1379312 - RNA, 19 nt, Artificial Sequence
  Description of Artificial Sequence: Synthetic oligonucleotide
  Sense strand starting at position 3325 of SEQ ID NO: 1242880
accucuagccuggauagau

SEQ ID NO: 1379313 - RNA, 19 nt, Artificial Sequence
  Description of Artificial Sequence: Synthetic oligonucleotide
  Antisense strand to SEQ ID NO: 1379312
aucuauccaggcuagaggu

SEQ ID NO: 1379314 - RNA, 19 nt, Artificial Sequence
  Description of Artificial Sequence: Synthetic oligonucleotide
  Sense strand starting at position 3418 of SEQ ID NO: 1242880
gaggcucaguucucccaua

SEQ ID NO: 1379315 - RNA, 19 nt, Artificial Sequence
  Description of Artificial Sequence: Synthetic oligonucleotide
  Antisense strand to SEQ ID NO: 1379314
uaugggagaacugagccuc

SEQ ID NO: 1379316 - RNA, 19 nt, Artificial Sequence
  Description of Artificial Sequence: Synthetic oligonucleotide
  Sense strand starting at position 3535 of SEQ ID NO: 1242880
gggaccucaguuugagaua

SEQ ID NO: 1379317 - RNA, 19 nt, Artificial Sequence
  Description of Artificial Sequence: Synthetic oligonucleotide
  Antisense strand to SEQ ID NO: 1379316
uaucucaaacugagguccc

SEQ ID NO: 1379318 - RNA, 19 nt, Artificial Sequence
  Description of Artificial Sequence: Synthetic oligonucleotide
  Sense strand starting at position 3536 of SEQ ID NO: 1242880
ggaccucaguuugagauau

SEQ ID NO: 1379319 - RNA, 19 nt, Artificial Sequence
  Description of Artificial Sequence: Synthetic oligonucleotide
  Antisense strand to SEQ ID NO: 1379318
auaucucaaacugaggucc

SEQ ID NO: 1379320 - RNA, 19 nt, Artificial Sequence
  Description of Artificial Sequence: Synthetic oligonucleotide
  Sense strand starting at position 3538 of SEQ ID NO: 1242880
accucaguuugagauaugu

SEQ ID NO: 1379321 - RNA, 19 nt, Artificial Sequence
  Description of Artificial Sequence: Synthetic oligonucleotide
  Antisense strand to SEQ ID NO: 1379320
acauaucucaaacugaggu

SEQ ID NO: 1379322 - RNA, 19 nt, Artificial Sequence
  Description of Artificial Sequence: Synthetic oligonucleotide
  Sense strand starting at position 3616 of SEQ ID NO: 1242880
ugugcauucccauggauug

SEQ ID NO: 1379323 - RNA, 19 nt, Artificial Sequence
  Description of Artificial Sequence: Synthetic oligonucleotide
  Antisense strand to SEQ ID NO: 1379322
caauccaugggaaugcaca

SEQ ID NO: 1379324 - RNA, 19 nt, Artificial Sequence
  Description of Artificial Sequence: Synthetic oligonucleotide
  Sense strand starting at position 3830 of SEQ ID NO: 1242880
gcaaccuugugccaagcau

SEQ ID NO: 1379325 - RNA, 19 nt, Artificial Sequence
  Description of Artificial Sequence: Synthetic oligonucleotide
  Antisense strand to SEQ ID NO: 1379324
augcuuggcacaagguugc

SEQ ID NO: 1379326 - RNA, 19 nt, Artificial Sequence
  Description of Artificial Sequence: Synthetic oligonucleotide
  Sense strand starting at position 3849 of SEQ ID NO: 1242880
gugccagucacuggagaua

SEQ ID NO: 1379327 - RNA, 19 nt, Artificial Sequence
  Description of Artificial Sequence: Synthetic oligonucleotide
  Antisense strand to SEQ ID NO: 1379326
uaucuccagugacuggcac

SEQ ID NO: 1379328 - RNA, 19 nt, Artificial Sequence
  Description of Artificial Sequence: Synthetic oligonucleotide
  Sense strand starting at position 514 of SEQ ID NO: 1242881
cuggucagcugguuacauu

SEQ ID NO: 1379329 - RNA, 19 nt, Artificial Sequence
  Description of Artificial Sequence: Synthetic oligonucleotide
  Antisense strand to SEQ ID NO: 1379328
aauguaaccagcugaccag

SEQ ID NO: 1379330 - RNA, 19 nt, Artificial Sequence
  Description of Artificial Sequence: Synthetic oligonucleotide
  Sense strand starting at position 803 of SEQ ID NO: 1242881
ccuugucccgcuggaguau

SEQ ID NO: 1379331 - RNA, 19 nt, Artificial Sequence
  Description of Artificial Sequence: Synthetic oligonucleotide
  Antisense strand to SEQ ID NO: 1379330
auacuccagcgggacaagg

SEQ ID NO: 1379332 - RNA, 19 nt, Artificial Sequence
  Description of Artificial Sequence: Synthetic oligonucleotide
  Sense strand starting at position 929 of SEQ ID NO: 1242881
cugugugaccuugagaaua

SEQ ID NO: 1379333 - RNA, 19 nt, Artificial Sequence
  Description of Artificial Sequence: Synthetic oligonucleotide
  Antisense strand to SEQ ID NO: 1379332
uauucucaaggucacacag

SEQ ID NO: 1379334 - RNA, 19 nt, Artificial Sequence
  Description of Artificial Sequence: Synthetic oligonucleotide
  Sense strand starting at position 931 of SEQ ID NO: 1242881
gugugaccuugagaauacu

SEQ ID NO: 1379335 - RNA, 19 nt, Artificial Sequence
  Description of Artificial Sequence: Synthetic oligonucleotide
  Antisense strand to SEQ ID NO: 1379334
aguauucucaaggucacac

SEQ ID NO: 1379336 - RNA, 19 nt, Artificial Sequence
  Description of Artificial Sequence: Synthetic oligonucleotide
  Sense strand starting at position 1251 of SEQ ID NO: 1242881
caaaccaguucugcagaga

SEQ ID NO: 1379337 - RNA, 19 nt, Artificial Sequence
  Description of Artificial Sequence: Synthetic oligonucleotide
  Antisense strand to SEQ ID NO: 1379336
ucucugcagaacugguuug

SEQ ID NO: 1379338 - RNA, 19 nt, Artificial Sequence
  Description of Artificial Sequence: Synthetic oligonucleotide
  Sense strand starting at position 1458 of SEQ ID NO: 1242881
aggauuagcucagcuccua

SEQ ID NO: 1379339 - RNA, 19 nt, Artificial Sequence
  Description of Artificial Sequence: Synthetic oligonucleotide
  Antisense strand to SEQ ID NO: 1379338
uaggagcugagcuaauccu

SEQ ID NO: 1379340 - RNA, 19 nt, Artificial Sequence
  Description of Artificial Sequence: Synthetic oligonucleotide
  Sense strand starting at position 2188 of SEQ ID NO: 1242881
gaggcuuucucacgcagac

SEQ ID NO: 1379341 - RNA, 19 nt, Artificial Sequence
  Description of Artificial Sequence: Synthetic oligonucleotide
  Antisense strand to SEQ ID NO: 1379340
gucugcgugagaaagccuc

SEQ ID NO: 1379342 - RNA, 19 nt, Artificial Sequence
  Description of Artificial Sequence: Synthetic oligonucleotide
  Sense strand starting at position 2338 of SEQ ID NO: 1242881
gcugguugguggaaaggau

SEQ ID NO: 1379343 - RNA, 19 nt, Artificial Sequence
  Description of Artificial Sequence: Synthetic oligonucleotide
  Antisense strand to SEQ ID NO: 1379342
auccuuuccaccaaccagc

SEQ ID NO: 1379344 - RNA, 19 nt, Artificial Sequence
  Description of Artificial Sequence: Synthetic oligonucleotide
  Sense strand starting at position 2484 of SEQ ID NO: 1242881
gccacugucuggcugguaa

SEQ ID NO: 1379345 - RNA, 19 nt, Artificial Sequence
  Description of Artificial Sequence: Synthetic oligonucleotide
  Antisense strand to SEQ ID NO: 1379344
uuaccagccagacaguggc

SEQ ID NO: 1379346 - RNA, 19 nt, Artificial Sequence
  Description of Artificial Sequence: Synthetic oligonucleotide
  Sense strand starting at position 2496 of SEQ ID NO: 1242881
cugguaaguccaggcucau

SEQ ID NO: 1379347 - RNA, 19 nt, Artificial Sequence
  Description of Artificial Sequence: Synthetic oligonucleotide
  Antisense strand to SEQ ID NO: 1379346
augagccuggacuuaccag

SEQ ID NO: 1379348 - RNA, 19 nt, Artificial Sequence
  Description of Artificial Sequence: Synthetic oligonucleotide
  Sense strand starting at position 2803 of SEQ ID NO: 1242881
agcccucauguaugucaga

SEQ ID NO: 1379349 - RNA, 19 nt, Artificial Sequence
  Description of Artificial Sequence: Synthetic oligonucleotide
  Antisense strand to SEQ ID NO: 1379348
ucugacauacaugagggcu

SEQ ID NO: 1379350 - RNA, 19 nt, Artificial Sequence
  Description of Artificial Sequence: Synthetic oligonucleotide
  Sense strand starting at position 2848 of SEQ ID NO: 1242881
guaagaggucccugaauau

SEQ ID NO: 1379351 - RNA, 19 nt, Artificial Sequence
  Description of Artificial Sequence: Synthetic oligonucleotide
  Antisense strand to SEQ ID NO: 1379350
auauucagggaccucuuac

SEQ ID NO: 1379352 - RNA, 19 nt, Artificial Sequence
  Description of Artificial Sequence: Synthetic oligonucleotide
  Sense strand starting at position 3523 of SEQ ID NO: 1242881
uagagaugucccggcuaau

SEQ ID NO: 1379353 - RNA, 19 nt, Artificial Sequence
  Description of Artificial Sequence: Synthetic oligonucleotide
  Antisense strand to SEQ ID NO: 1379352
auuagccgggacaucucua

SEQ ID NO: 1379354 - RNA, 19 nt, Artificial Sequence
  Description of Artificial Sequence: Synthetic oligonucleotide
  Sense strand starting at position 3721 of SEQ ID NO: 1242881
cugaguucuucucuuuauu

SEQ ID NO: 1379355 - RNA, 19 nt, Artificial Sequence
  Description of Artificial Sequence: Synthetic oligonucleotide
  Antisense strand to SEQ ID NO: 1379354
aauaaagagaagaacucag

SEQ ID NO: 1379356 - RNA, 19 nt, Artificial Sequence
  Description of Artificial Sequence: Synthetic oligonucleotide
  Sense strand starting at position 3848 of SEQ ID NO: 1242881
cugcuuucugguugacuca

SEQ ID NO: 1379357 - RNA, 19 nt, Artificial Sequence
  Description of Artificial Sequence: Synthetic oligonucleotide
  Antisense strand to SEQ ID NO: 1379356
ugagucaaccagaaagcag

SEQ ID NO: 1379358 - RNA, 19 nt, Artificial Sequence
  Description of Artificial Sequence: Synthetic oligonucleotide
  Sense strand starting at position 148 of SEQ ID NO: 1242882
gucaguagugggcaggaau

SEQ ID NO: 1379359 - RNA, 19 nt, Artificial Sequence
  Description of Artificial Sequence: Synthetic oligonucleotide
  Antisense strand to SEQ ID NO: 1379358
auuccugcccacuacugac

SEQ ID NO: 1379360 - RNA, 19 nt, Artificial Sequence
  Description of Artificial Sequence: Synthetic oligonucleotide
  Sense strand starting at position 151 of SEQ ID NO: 1242882
aguagugggcaggaauaua

SEQ ID NO: 1379361 - RNA, 19 nt, Artificial Sequence
  Description of Artificial Sequence: Synthetic oligonucleotide
  Antisense strand to SEQ ID NO: 1379360
uauauuccugcccacuacu

SEQ ID NO: 1379362 - RNA, 19 nt, Artificial Sequence
  Description of Artificial Sequence: Synthetic oligonucleotide
  Sense strand starting at position 701 of SEQ ID NO: 1242882
ucaaaucccugacucgaga

SEQ ID NO: 1379363 - RNA, 19 nt, Artificial Sequence
  Description of Artificial Sequence: Synthetic oligonucleotide
  Antisense strand to SEQ ID NO: 1379362
ucucgagucagggauuuga

SEQ ID NO: 1379364 - RNA, 19 nt, Artificial Sequence
  Description of Artificial Sequence: Synthetic oligonucleotide
  Sense strand starting at position 820 of SEQ ID NO: 1242882
cugguaucaccaugugaaa

SEQ ID NO: 1379365 - RNA, 19 nt, Artificial Sequence
  Description of Artificial Sequence: Synthetic oligonucleotide
  Antisense strand to SEQ ID NO: 1379364
uuucacauggugauaccag

SEQ ID NO: 1379366 - RNA, 19 nt, Artificial Sequence
  Description of Artificial Sequence: Synthetic oligonucleotide
  Sense strand starting at position 901 of SEQ ID NO: 1242882
gccucuguucccgcaggua

SEQ ID NO: 1379367 - RNA, 19 nt, Artificial Sequence
  Description of Artificial Sequence: Synthetic oligonucleotide
  Antisense strand to SEQ ID NO: 1379366
uaccugcgggaacagaggc

SEQ ID NO: 1379368 - RNA, 19 nt, Artificial Sequence
  Description of Artificial Sequence: Synthetic oligonucleotide
  Sense strand starting at position 1186 of SEQ ID NO: 1242882
aaauuaaccgggcguaaua

SEQ ID NO: 1379369 - RNA, 19 nt, Artificial Sequence
  Description of Artificial Sequence: Synthetic oligonucleotide
  Antisense strand to SEQ ID NO: 1379368
uauuacgcccgguuaauuu

SEQ ID NO: 1379370 - RNA, 19 nt, Artificial Sequence
  Description of Artificial Sequence: Synthetic oligonucleotide
  Sense strand starting at position 1197 of SEQ ID NO: 1242882
gcguaauagcacgccugua

SEQ ID NO: 1379371 - RNA, 19 nt, Artificial Sequence
  Description of Artificial Sequence: Synthetic oligonucleotide
  Antisense strand to SEQ ID NO: 1379370
uacaggcgugcuauuacgc

SEQ ID NO: 1379372 - RNA, 19 nt, Artificial Sequence
  Description of Artificial Sequence: Synthetic oligonucleotide
  Sense strand starting at position 1361 of SEQ ID NO: 1242882
acacauugguugcuugaga

SEQ ID NO: 1379373 - RNA, 19 nt, Artificial Sequence
  Description of Artificial Sequence: Synthetic oligonucleotide
  Antisense strand to SEQ ID NO: 1379372
ucucaagcaaccaaugugu

SEQ ID NO: 1379374 - RNA, 19 nt, Artificial Sequence
  Description of Artificial Sequence: Synthetic oligonucleotide
  Sense strand starting at position 1374 of SEQ ID NO: 1242882
uugagagguugccuggaau

SEQ ID NO: 1379375 - RNA, 19 nt, Artificial Sequence
  Description of Artificial Sequence: Synthetic oligonucleotide
  Antisense strand to SEQ ID NO: 1379374
auuccaggcaaccucucaa

SEQ ID NO: 1379376 - RNA, 19 nt, Artificial Sequence
  Description of Artificial Sequence: Synthetic oligonucleotide
  Sense strand starting at position 1814 of SEQ ID NO: 1242882
ggcccacucaccuggagaa

SEQ ID NO: 1379377 - RNA, 19 nt, Artificial Sequence
  Description of Artificial Sequence: Synthetic oligonucleotide
  Antisense strand to SEQ ID NO: 1379376
uucuccaggugagugggcc

SEQ ID NO: 1379378 - RNA, 19 nt, Artificial Sequence
  Description of Artificial Sequence: Synthetic oligonucleotide
  Sense strand starting at position 1826 of SEQ ID NO: 1242882
uggagaagacgauguucau

SEQ ID NO: 1379379 - RNA, 19 nt, Artificial Sequence
  Description of Artificial Sequence: Synthetic oligonucleotide
  Antisense strand to SEQ ID NO: 1379378
augaacaucgucuucucca

SEQ ID NO: 1379380 - RNA, 19 nt, Artificial Sequence
  Description of Artificial Sequence: Synthetic oligonucleotide
  Sense strand starting at position 1832 of SEQ ID NO: 1242882
agacgauguucauugugac

SEQ ID NO: 1379381 - RNA, 19 nt, Artificial Sequence
  Description of Artificial Sequence: Synthetic oligonucleotide
  Antisense strand to SEQ ID NO: 1379380
gucacaaugaacaucgucu

SEQ ID NO: 1379382 - RNA, 19 nt, Artificial Sequence
  Description of Artificial Sequence: Synthetic oligonucleotide
  Sense strand starting at position 2129 of SEQ ID NO: 1242882
gauggaggcucuuguggaa

SEQ ID NO: 1379383 - RNA, 19 nt, Artificial Sequence
  Description of Artificial Sequence: Synthetic oligonucleotide
  Antisense strand to SEQ ID NO: 1379382
uuccacaagagccuccauc

SEQ ID NO: 1379384 - RNA, 19 nt, Artificial Sequence
  Description of Artificial Sequence: Synthetic oligonucleotide
  Sense strand starting at position 2457 of SEQ ID NO: 1242882
agcauuaucugcucacugu

SEQ ID NO: 1379385 - RNA, 19 nt, Artificial Sequence
  Description of Artificial Sequence: Synthetic oligonucleotide
  Antisense strand to SEQ ID NO: 1379384
acagugagcagauaaugcu

SEQ ID NO: 1379386 - RNA, 19 nt, Artificial Sequence
  Description of Artificial Sequence: Synthetic oligonucleotide
  Sense strand starting at position 2458 of SEQ ID NO: 1242882
gcauuaucugcucacuguu

SEQ ID NO: 1379387 - RNA, 19 nt, Artificial Sequence
  Description of Artificial Sequence: Synthetic oligonucleotide
  Antisense strand to SEQ ID NO: 1379386
aacagugagcagauaaugc

SEQ ID NO: 1379388 - RNA, 19 nt, Artificial Sequence
  Description of Artificial Sequence: Synthetic oligonucleotide
  Sense strand starting at position 2461 of SEQ ID NO: 1242882
uuaucugcucacuguuagu

SEQ ID NO: 1379389 - RNA, 19 nt, Artificial Sequence
  Description of Artificial Sequence: Synthetic oligonucleotide
  Antisense strand to SEQ ID NO: 1379388
acuaacagugagcagauaa

SEQ ID NO: 1379390 - RNA, 19 nt, Artificial Sequence
  Description of Artificial Sequence: Synthetic oligonucleotide
  Sense strand starting at position 2466 of SEQ ID NO: 1242882
ugcucacuguuaguaaagu

SEQ ID NO: 1379391 - RNA, 19 nt, Artificial Sequence
  Description of Artificial Sequence: Synthetic oligonucleotide
  Antisense strand to SEQ ID NO: 1379390
acuuuacuaacagugagca

SEQ ID NO: 1379392 - RNA, 19 nt, Artificial Sequence
  Description of Artificial Sequence: Synthetic oligonucleotide
  Sense strand starting at position 2529 of SEQ ID NO: 1242882
cagauugacuagcucaagu

SEQ ID NO: 1379393 - RNA, 19 nt, Artificial Sequence
  Description of Artificial Sequence: Synthetic oligonucleotide
  Antisense strand to SEQ ID NO: 1379392
acuugagcuagucaaucug

SEQ ID NO: 1379394 - RNA, 19 nt, Artificial Sequence
  Description of Artificial Sequence: Synthetic oligonucleotide
  Sense strand starting at position 2556 of SEQ ID NO: 1242882
uuccacuaaugguaugauu

SEQ ID NO: 1379395 - RNA, 19 nt, Artificial Sequence
  Description of Artificial Sequence: Synthetic oligonucleotide
  Antisense strand to SEQ ID NO: 1379394
aaucauaccauuaguggaa

SEQ ID NO: 1379396 - RNA, 19 nt, Artificial Sequence
  Description of Artificial Sequence: Synthetic oligonucleotide
  Sense strand starting at position 2565 of SEQ ID NO: 1242882
ugguaugauuucuaugucu

SEQ ID NO: 1379397 - RNA, 19 nt, Artificial Sequence
  Description of Artificial Sequence: Synthetic oligonucleotide
  Antisense strand to SEQ ID NO: 1379396
agacauagaaaucauacca

SEQ ID NO: 1379398 - RNA, 19 nt, Artificial Sequence
  Description of Artificial Sequence: Synthetic oligonucleotide
  Sense strand starting at position 2572 of SEQ ID NO: 1242882
auuucuaugucucaaugua

SEQ ID NO: 1379399 - RNA, 19 nt, Artificial Sequence
  Description of Artificial Sequence: Synthetic oligonucleotide
  Antisense strand to SEQ ID NO: 1379398
uacauugagacauagaaau

SEQ ID NO: 1379400 - RNA, 19 nt, Artificial Sequence
  Description of Artificial Sequence: Synthetic oligonucleotide
  Sense strand starting at position 2678 of SEQ ID NO: 1242882
uuacucugccguucuguua

SEQ ID NO: 1379401 - RNA, 19 nt, Artificial Sequence
  Description of Artificial Sequence: Synthetic oligonucleotide
  Antisense strand to SEQ ID NO: 1379400
uaacagaacggcagaguaa

SEQ ID NO: 1379402 - RNA, 19 nt, Artificial Sequence
  Description of Artificial Sequence: Synthetic oligonucleotide
  Sense strand starting at position 2685 of SEQ ID NO: 1242882
gccguucuguuacuuugua

SEQ ID NO: 1379403 - RNA, 19 nt, Artificial Sequence
  Description of Artificial Sequence: Synthetic oligonucleotide
  Antisense strand to SEQ ID NO: 1379402
uacaaaguaacagaacggc

SEQ ID NO: 1379404 - RNA, 19 nt, Artificial Sequence
  Description of Artificial Sequence: Synthetic oligonucleotide
  Sense strand starting at position 2693 of SEQ ID NO: 1242882
guuacuuuguauguuugga

SEQ ID NO: 1379405 - RNA, 19 nt, Artificial Sequence
  Description of Artificial Sequence: Synthetic oligonucleotide
  Antisense strand to SEQ ID NO: 1379404
uccaaacauacaaaguaac

SEQ ID NO: 1379406 - RNA, 19 nt, Artificial Sequence
  Description of Artificial Sequence: Synthetic oligonucleotide
  Sense strand starting at position 2882 of SEQ ID NO: 1242882
gcagaaugggcucaugaca

SEQ ID NO: 1379407 - RNA, 19 nt, Artificial Sequence
  Description of Artificial Sequence: Synthetic oligonucleotide
  Antisense strand to SEQ ID NO: 1379406
ugucaugagcccauucugc

SEQ ID NO: 1379408 - RNA, 19 nt, Artificial Sequence
  Description of Artificial Sequence: Synthetic oligonucleotide
  Sense strand starting at position 2893 of SEQ ID NO: 1242882
ucaugacaguacucaguua

SEQ ID NO: 1379409 - RNA, 19 nt, Artificial Sequence
  Description of Artificial Sequence: Synthetic oligonucleotide
  Antisense strand to SEQ ID NO: 1379408
uaacugaguacugucauga

SEQ ID NO: 1379410 - RNA, 19 nt, Artificial Sequence
  Description of Artificial Sequence: Synthetic oligonucleotide
  Sense strand starting at position 2901 of SEQ ID NO: 1242882
guacucaguuaggagaagu

SEQ ID NO: 1379411 - RNA, 19 nt, Artificial Sequence
  Description of Artificial Sequence: Synthetic oligonucleotide
  Antisense strand to SEQ ID NO: 1379410
acuucuccuaacugaguac

SEQ ID NO: 1379412 - RNA, 19 nt, Artificial Sequence
  Description of Artificial Sequence: Synthetic oligonucleotide
  Sense strand starting at position 2914 of SEQ ID NO: 1242882
agaaguaagucccuggcau

SEQ ID NO: 1379413 - RNA, 19 nt, Artificial Sequence
  Description of Artificial Sequence: Synthetic oligonucleotide
  Antisense strand to SEQ ID NO: 1379412
augccagggacuuacuucu

SEQ ID NO: 1379414 - RNA, 19 nt, Artificial Sequence
  Description of Artificial Sequence: Synthetic oligonucleotide
  Sense strand starting at position 2915 of SEQ ID NO: 1242882
gaaguaagucccuggcaug

SEQ ID NO: 1379415 - RNA, 19 nt, Artificial Sequence
  Description of Artificial Sequence: Synthetic oligonucleotide
  Antisense strand to SEQ ID NO: 1379414
caugccagggacuuacuuc

SEQ ID NO: 1379416 - RNA, 19 nt, Artificial Sequence
  Description of Artificial Sequence: Synthetic oligonucleotide
  Sense strand starting at position 3080 of SEQ ID NO: 1242882
acgcuucuccagugaucuc

SEQ ID NO: 1379417 - RNA, 19 nt, Artificial Sequence
  Description of Artificial Sequence: Synthetic oligonucleotide
  Antisense strand to SEQ ID NO: 1379416
gagaucacuggagaagcgu

SEQ ID NO: 1379418 - RNA, 19 nt, Artificial Sequence
  Description of Artificial Sequence: Synthetic oligonucleotide
  Sense strand starting at position 3089 of SEQ ID NO: 1242882
cagugaucucaucgucaca

SEQ ID NO: 1379419 - RNA, 19 nt, Artificial Sequence
  Description of Artificial Sequence: Synthetic oligonucleotide
  Antisense strand to SEQ ID NO: 1379418
ugugacgaugagaucacug

SEQ ID NO: 1379420 - RNA, 19 nt, Artificial Sequence
  Description of Artificial Sequence: Synthetic oligonucleotide
  Sense strand starting at position 3091 of SEQ ID NO: 1242882
gugaucucaucgucacacu

SEQ ID NO: 1379421 - RNA, 19 nt, Artificial Sequence
  Description of Artificial Sequence: Synthetic oligonucleotide
  Antisense strand to SEQ ID NO: 1379420
agugugacgaugagaucac

SEQ ID NO: 1379422 - RNA, 19 nt, Artificial Sequence
  Description of Artificial Sequence: Synthetic oligonucleotide
  Sense strand starting at position 3242 of SEQ ID NO: 1242882
acgggauggcucuaaguag

SEQ ID NO: 1379423 - RNA, 19 nt, Artificial Sequence
  Description of Artificial Sequence: Synthetic oligonucleotide
  Antisense strand to SEQ ID NO: 1379422
cuacuuagagccaucccgu

SEQ ID NO: 1379424 - RNA, 19 nt, Artificial Sequence
  Description of Artificial Sequence: Synthetic oligonucleotide
  Sense strand starting at position 3487 of SEQ ID NO: 1242882
gguggcugcagaugugauu

SEQ ID NO: 1379425 - RNA, 19 nt, Artificial Sequence
  Description of Artificial Sequence: Synthetic oligonucleotide
  Antisense strand to SEQ ID NO: 1379424
aaucacaucugcagccacc

SEQ ID NO: 1379426 - RNA, 19 nt, Artificial Sequence
  Description of Artificial Sequence: Synthetic oligonucleotide
  Sense strand starting at position 3493 of SEQ ID NO: 1242882
ugcagaugugauuggcuga

SEQ ID NO: 1379427 - RNA, 19 nt, Artificial Sequence
  Description of Artificial Sequence: Synthetic oligonucleotide
  Antisense strand to SEQ ID NO: 1379426
ucagccaaucacaucugca

SEQ ID NO: 1379428 - RNA, 19 nt, Artificial Sequence
  Description of Artificial Sequence: Synthetic oligonucleotide
  Sense strand starting at position 3704 of SEQ ID NO: 1242882
cuccguagauccuugauuu

SEQ ID NO: 1379429 - RNA, 19 nt, Artificial Sequence
  Description of Artificial Sequence: Synthetic oligonucleotide
  Antisense strand to SEQ ID NO: 1379428
aaaucaaggaucuacggag

SEQ ID NO: 1379430 - RNA, 19 nt, Artificial Sequence
  Description of Artificial Sequence: Synthetic oligonucleotide
  Sense strand starting at position 3705 of SEQ ID NO: 1242882
uccguagauccuugauuuc

SEQ ID NO: 1379431 - RNA, 19 nt, Artificial Sequence
  Description of Artificial Sequence: Synthetic oligonucleotide
  Antisense strand to SEQ ID NO: 1379430
gaaaucaaggaucuacgga

SEQ ID NO: 1379432 - RNA, 19 nt, Artificial Sequence
  Description of Artificial Sequence: Synthetic oligonucleotide
  Sense strand starting at position 3750 of SEQ ID NO: 1242882
agaagaaacuacugucauu

SEQ ID NO: 1379433 - RNA, 19 nt, Artificial Sequence
  Description of Artificial Sequence: Synthetic oligonucleotide
  Antisense strand to SEQ ID NO: 1379432
aaugacaguaguuucuucu

SEQ ID NO: 1379434 - RNA, 19 nt, Artificial Sequence
  Description of Artificial Sequence: Synthetic oligonucleotide
  Sense strand starting at position 3955 of SEQ ID NO: 1242882
cguaaaugcucugcucugu

SEQ ID NO: 1379435 - RNA, 19 nt, Artificial Sequence
  Description of Artificial Sequence: Synthetic oligonucleotide
  Antisense strand to SEQ ID NO: 1379434
acagagcagagcauuuacg

SEQ ID NO: 1379436 - RNA, 19 nt, Artificial Sequence
  Description of Artificial Sequence: Synthetic oligonucleotide
  Sense strand starting at position 3956 of SEQ ID NO: 1242882
guaaaugcucugcucuguu

SEQ ID NO: 1379437 - RNA, 19 nt, Artificial Sequence
  Description of Artificial Sequence: Synthetic oligonucleotide
  Antisense strand to SEQ ID NO: 1379436
aacagagcagagcauuuac

SEQ ID NO: 1379438 - RNA, 19 nt, Artificial Sequence
  Description of Artificial Sequence: Synthetic oligonucleotide
  Sense strand starting at position 19 of SEQ ID NO: 1242883
ccacauauugaucaggcua

SEQ ID NO: 1379439 - RNA, 19 nt, Artificial Sequence
  Description of Artificial Sequence: Synthetic oligonucleotide
  Antisense strand to SEQ ID NO: 1379438
uagccugaucaauaugugg

SEQ ID NO: 1379440 - RNA, 19 nt, Artificial Sequence
  Description of Artificial Sequence: Synthetic oligonucleotide
  Sense strand starting at position 21 of SEQ ID NO: 1242883
acauauugaucaggcuacu

SEQ ID NO: 1379441 - RNA, 19 nt, Artificial Sequence
  Description of Artificial Sequence: Synthetic oligonucleotide
  Antisense strand to SEQ ID NO: 1379440
aguagccugaucaauaugu

SEQ ID NO: 1379442 - RNA, 19 nt, Artificial Sequence
  Description of Artificial Sequence: Synthetic oligonucleotide
  Sense strand starting at position 117 of SEQ ID NO: 1242883
acacucugguccuguauau

SEQ ID NO: 1379443 - RNA, 19 nt, Artificial Sequence
  Description of Artificial Sequence: Synthetic oligonucleotide
  Antisense strand to SEQ ID NO: 1379442
auauacaggaccagagugu

SEQ ID NO: 1379444 - RNA, 19 nt, Artificial Sequence
  Description of Artificial Sequence: Synthetic oligonucleotide
  Sense strand starting at position 124 of SEQ ID NO: 1242883
gguccuguauauuugguga

SEQ ID NO: 1379445 - RNA, 19 nt, Artificial Sequence
  Description of Artificial Sequence: Synthetic oligonucleotide
  Antisense strand to SEQ ID NO: 1379444
ucaccaaauauacaggacc

SEQ ID NO: 1379446 - RNA, 19 nt, Artificial Sequence
  Description of Artificial Sequence: Synthetic oligonucleotide
  Sense strand starting at position 126 of SEQ ID NO: 1242883
uccuguauauuuggugaga

SEQ ID NO: 1379447 - RNA, 19 nt, Artificial Sequence
  Description of Artificial Sequence: Synthetic oligonucleotide
  Antisense strand to SEQ ID NO: 1379446
ucucaccaaauauacagga

SEQ ID NO: 1379448 - RNA, 19 nt, Artificial Sequence
  Description of Artificial Sequence: Synthetic oligonucleotide
  Sense strand starting at position 128 of SEQ ID NO: 1242883
cuguauauuuggugagagg

SEQ ID NO: 1379449 - RNA, 19 nt, Artificial Sequence
  Description of Artificial Sequence: Synthetic oligonucleotide
  Antisense strand to SEQ ID NO: 1379448
ccucucaccaaauauacag

SEQ ID NO: 1379450 - RNA, 19 nt, Artificial Sequence
  Description of Artificial Sequence: Synthetic oligonucleotide
  Sense strand starting at position 223 of SEQ ID NO: 1242883
ugaggagucucuggcaauu

SEQ ID NO: 1379451 - RNA, 19 nt, Artificial Sequence
  Description of Artificial Sequence: Synthetic oligonucleotide
  Antisense strand to SEQ ID NO: 1379450
aauugccagagacuccuca

SEQ ID NO: 1379452 - RNA, 19 nt, Artificial Sequence
  Description of Artificial Sequence: Synthetic oligonucleotide
  Sense strand starting at position 273 of SEQ ID NO: 1242883
cccauagacuccugugcaa

SEQ ID NO: 1379453 - RNA, 19 nt, Artificial Sequence
  Description of Artificial Sequence: Synthetic oligonucleotide
  Antisense strand to SEQ ID NO: 1379452
uugcacaggagucuauggg

SEQ ID NO: 1379454 - RNA, 19 nt, Artificial Sequence
  Description of Artificial Sequence: Synthetic oligonucleotide
  Sense strand starting at position 356 of SEQ ID NO: 1242883
ccugcaugcucugaggcau

SEQ ID NO: 1379455 - RNA, 19 nt, Artificial Sequence
  Description of Artificial Sequence: Synthetic oligonucleotide
  Antisense strand to SEQ ID NO: 1379454
augccucagagcaugcagg

SEQ ID NO: 1379456 - RNA, 19 nt, Artificial Sequence
  Description of Artificial Sequence: Synthetic oligonucleotide
  Sense strand starting at position 384 of SEQ ID NO: 1242883
gaguaaugugcacguccau

SEQ ID NO: 1379457 - RNA, 19 nt, Artificial Sequence
  Description of Artificial Sequence: Synthetic oligonucleotide
  Antisense strand to SEQ ID NO: 1379456
auggacgugcacauuacuc

SEQ ID NO: 1379458 - RNA, 19 nt, Artificial Sequence
  Description of Artificial Sequence: Synthetic oligonucleotide
  Sense strand starting at position 502 of SEQ ID NO: 1242883
uccuaaucaugccuuugga

SEQ ID NO: 1379459 - RNA, 19 nt, Artificial Sequence
  Description of Artificial Sequence: Synthetic oligonucleotide
  Antisense strand to SEQ ID NO: 1379458
uccaaaggcaugauuagga

SEQ ID NO: 1379460 - RNA, 19 nt, Artificial Sequence
  Description of Artificial Sequence: Synthetic oligonucleotide
  Sense strand starting at position 862 of SEQ ID NO: 1242883
ggcccuagcuauuccaauu

SEQ ID NO: 1379461 - RNA, 19 nt, Artificial Sequence
  Description of Artificial Sequence: Synthetic oligonucleotide
  Antisense strand to SEQ ID NO: 1379460
aauuggaauagcuagggcc

SEQ ID NO: 1379462 - RNA, 19 nt, Artificial Sequence
  Description of Artificial Sequence: Synthetic oligonucleotide
  Sense strand starting at position 896 of SEQ ID NO: 1242883
gcccacuacuguugauuua

SEQ ID NO: 1379463 - RNA, 19 nt, Artificial Sequence
  Description of Artificial Sequence: Synthetic oligonucleotide
  Antisense strand to SEQ ID NO: 1379462
uaaaucaacaguagugggc

SEQ ID NO: 1379464 - RNA, 19 nt, Artificial Sequence
  Description of Artificial Sequence: Synthetic oligonucleotide
  Sense strand starting at position 1010 of SEQ ID NO: 1242883
cucagaucuuuauucuugu

SEQ ID NO: 1379465 - RNA, 19 nt, Artificial Sequence
  Description of Artificial Sequence: Synthetic oligonucleotide
  Antisense strand to SEQ ID NO: 1379464
acaagaauaaagaucugag

SEQ ID NO: 1379466 - RNA, 19 nt, Artificial Sequence
  Description of Artificial Sequence: Synthetic oligonucleotide
  Sense strand starting at position 1027 of SEQ ID NO: 1242883
gucacaucgacuuggaaag

SEQ ID NO: 1379467 - RNA, 19 nt, Artificial Sequence
  Description of Artificial Sequence: Synthetic oligonucleotide
  Antisense strand to SEQ ID NO: 1379466
cuuuccaagucgaugugac

SEQ ID NO: 1379468 - RNA, 19 nt, Artificial Sequence
  Description of Artificial Sequence: Synthetic oligonucleotide
  Sense strand starting at position 1039 of SEQ ID NO: 1242883
uggaaagcuuccucccagu

SEQ ID NO: 1379469 - RNA, 19 nt, Artificial Sequence
  Description of Artificial Sequence: Synthetic oligonucleotide
  Antisense strand to SEQ ID NO: 1379468
acugggaggaagcuuucca

SEQ ID NO: 1379470 - RNA, 19 nt, Artificial Sequence
  Description of Artificial Sequence: Synthetic oligonucleotide
  Sense strand starting at position 1214 of SEQ ID NO: 1242883
gcagaagcuugaccuugau

SEQ ID NO: 1379471 - RNA, 19 nt, Artificial Sequence
  Description of Artificial Sequence: Synthetic oligonucleotide
  Antisense strand to SEQ ID NO: 1379470
aucaaggucaagcuucugc

SEQ ID NO: 1379472 - RNA, 19 nt, Artificial Sequence
  Description of Artificial Sequence: Synthetic oligonucleotide
  Sense strand starting at position 1217 of SEQ ID NO: 1242883
gaagcuugaccuugaugga

SEQ ID NO: 1379473 - RNA, 19 nt, Artificial Sequence
  Description of Artificial Sequence: Synthetic oligonucleotide
  Antisense strand to SEQ ID NO: 1379472
uccaucaaggucaagcuuc

SEQ ID NO: 1379474 - RNA, 19 nt, Artificial Sequence
  Description of Artificial Sequence: Synthetic oligonucleotide
  Sense strand starting at position 1265 of SEQ ID NO: 1242883
gcggaaugguuggugugaa

SEQ ID NO: 1379475 - RNA, 19 nt, Artificial Sequence
  Description of Artificial Sequence: Synthetic oligonucleotide
  Antisense strand to SEQ ID NO: 1379474
uucacaccaaccauuccgc

SEQ ID NO: 1379476 - RNA, 19 nt, Artificial Sequence
  Description of Artificial Sequence: Synthetic oligonucleotide
  Sense strand starting at position 1266 of SEQ ID NO: 1242883
cggaaugguuggugugaaa

SEQ ID NO: 1379477 - RNA, 19 nt, Artificial Sequence
  Description of Artificial Sequence: Synthetic oligonucleotide
  Antisense strand to SEQ ID NO: 1379476
uuucacaccaaccauuccg

SEQ ID NO: 1379478 - RNA, 19 nt, Artificial Sequence
  Description of Artificial Sequence: Synthetic oligonucleotide
  Sense strand starting at position 1316 of SEQ ID NO: 1242883
ccugguuguggaggagaga

SEQ ID NO: 1379479 - RNA, 19 nt, Artificial Sequence
  Description of Artificial Sequence: Synthetic oligonucleotide
  Antisense strand to SEQ ID NO: 1379478
ucucuccuccacaaccagg

SEQ ID NO: 1379480 - RNA, 19 nt, Artificial Sequence
  Description of Artificial Sequence: Synthetic oligonucleotide
  Sense strand starting at position 1460 of SEQ ID NO: 1242883
aaagauacccuucgguguu

SEQ ID NO: 1379481 - RNA, 19 nt, Artificial Sequence
  Description of Artificial Sequence: Synthetic oligonucleotide
  Antisense strand to SEQ ID NO: 1379480
aacaccgaaggguaucuuu

SEQ ID NO: 1379482 - RNA, 19 nt, Artificial Sequence
  Description of Artificial Sequence: Synthetic oligonucleotide
  Sense strand starting at position 1470 of SEQ ID NO: 1242883
uucgguguucgugagcaua

SEQ ID NO: 1379483 - RNA, 19 nt, Artificial Sequence
  Description of Artificial Sequence: Synthetic oligonucleotide
  Antisense strand to SEQ ID NO: 1379482
uaugcucacgaacaccgaa

SEQ ID NO: 1379484 - RNA, 19 nt, Artificial Sequence
  Description of Artificial Sequence: Synthetic oligonucleotide
  Sense strand starting at position 1472 of SEQ ID NO: 1242883
cgguguucgugagcauaga

SEQ ID NO: 1379485 - RNA, 19 nt, Artificial Sequence
  Description of Artificial Sequence: Synthetic oligonucleotide
  Antisense strand to SEQ ID NO: 1379484
ucuaugcucacgaacaccg

SEQ ID NO: 1379486 - RNA, 19 nt, Artificial Sequence
  Description of Artificial Sequence: Synthetic oligonucleotide
  Sense strand starting at position 1520 of SEQ ID NO: 1242883
uucugacucucuggaacaa

SEQ ID NO: 1379487 - RNA, 19 nt, Artificial Sequence
  Description of Artificial Sequence: Synthetic oligonucleotide
  Antisense strand to SEQ ID NO: 1379486
uuguuccagagagucagaa

SEQ ID NO: 1379488 - RNA, 19 nt, Artificial Sequence
  Description of Artificial Sequence: Synthetic oligonucleotide
  Sense strand starting at position 1551 of SEQ ID NO: 1242883
ggaagugacucaccugaac

SEQ ID NO: 1379489 - RNA, 19 nt, Artificial Sequence
  Description of Artificial Sequence: Synthetic oligonucleotide
  Antisense strand to SEQ ID NO: 1379488
guucaggugagucacuucc

SEQ ID NO: 1379490 - RNA, 19 nt, Artificial Sequence
  Description of Artificial Sequence: Synthetic oligonucleotide
  Sense strand starting at position 1607 of SEQ ID NO: 1242883
aguggaugcuccgggucau

SEQ ID NO: 1379491 - RNA, 19 nt, Artificial Sequence
  Description of Artificial Sequence: Synthetic oligonucleotide
  Antisense strand to SEQ ID NO: 1379490
augacccggagcauccacu

SEQ ID NO: 1379492 - RNA, 19 nt, Artificial Sequence
  Description of Artificial Sequence: Synthetic oligonucleotide
  Sense strand starting at position 1608 of SEQ ID NO: 1242883
guggaugcuccgggucauu

SEQ ID NO: 1379493 - RNA, 19 nt, Artificial Sequence
  Description of Artificial Sequence: Synthetic oligonucleotide
  Antisense strand to SEQ ID NO: 1379492
aaugacccggagcauccac

SEQ ID NO: 1379494 - RNA, 19 nt, Artificial Sequence
  Description of Artificial Sequence: Synthetic oligonucleotide
  Sense strand starting at position 1611 of SEQ ID NO: 1242883
gaugcuccgggucauugau

SEQ ID NO: 1379495 - RNA, 19 nt, Artificial Sequence
  Description of Artificial Sequence: Synthetic oligonucleotide
  Antisense strand to SEQ ID NO: 1379494
aucaaugacccggagcauc

SEQ ID NO: 1379496 - RNA, 19 nt, Artificial Sequence
  Description of Artificial Sequence: Synthetic oligonucleotide
  Sense strand starting at position 1619 of SEQ ID NO: 1242883
gggucauugauggagcgaa

SEQ ID NO: 1379497 - RNA, 19 nt, Artificial Sequence
  Description of Artificial Sequence: Synthetic oligonucleotide
  Antisense strand to SEQ ID NO: 1379496
uucgcuccaucaaugaccc

SEQ ID NO: 1379498 - RNA, 19 nt, Artificial Sequence
  Description of Artificial Sequence: Synthetic oligonucleotide
  Sense strand starting at position 1631 of SEQ ID NO: 1242883
gagcgaaucagauguggga

SEQ ID NO: 1379499 - RNA, 19 nt, Artificial Sequence
  Description of Artificial Sequence: Synthetic oligonucleotide
  Antisense strand to SEQ ID NO: 1379498
ucccacaucugauucgcuc

SEQ ID NO: 1379500 - RNA, 19 nt, Artificial Sequence
  Description of Artificial Sequence: Synthetic oligonucleotide
  Sense strand starting at position 1727 of SEQ ID NO: 1242883
ccagcugcucgauaucacu

SEQ ID NO: 1379501 - RNA, 19 nt, Artificial Sequence
  Description of Artificial Sequence: Synthetic oligonucleotide
  Antisense strand to SEQ ID NO: 1379500
agugauaucgagcagcugg

SEQ ID NO: 1379502 - RNA, 19 nt, Artificial Sequence
  Description of Artificial Sequence: Synthetic oligonucleotide
  Sense strand starting at position 1814 of SEQ ID NO: 1242883
gcgucgaugcugucgggaa

SEQ ID NO: 1379503 - RNA, 19 nt, Artificial Sequence
  Description of Artificial Sequence: Synthetic oligonucleotide
  Antisense strand to SEQ ID NO: 1379502
uucccgacagcaucgacgc

SEQ ID NO: 1379504 - RNA, 19 nt, Artificial Sequence
  Description of Artificial Sequence: Synthetic oligonucleotide
  Sense strand starting at position 3615 of SEQ ID NO: 1242883
ucuuaugauuguggcugua

SEQ ID NO: 1379505 - RNA, 19 nt, Artificial Sequence
  Description of Artificial Sequence: Synthetic oligonucleotide
  Antisense strand to SEQ ID NO: 1379504
uacagccacaaucauaaga

SEQ ID NO: 1379506 - RNA, 19 nt, Artificial Sequence
  Description of Artificial Sequence: Synthetic oligonucleotide
  Sense strand starting at position 3917 of SEQ ID NO: 1242883
uagugagacucggagugua

SEQ ID NO: 1379507 - RNA, 19 nt, Artificial Sequence
  Description of Artificial Sequence: Synthetic oligonucleotide
  Antisense strand to SEQ ID NO: 1379506
uacacuccgagucucacua

SEQ ID NO: 1379508 - RNA, 19 nt, Artificial Sequence
  Description of Artificial Sequence: Synthetic oligonucleotide
  Sense strand starting at position 325 of SEQ ID NO: 1242884
ucaagaucugugcauaaac

SEQ ID NO: 1379509 - RNA, 19 nt, Artificial Sequence
  Description of Artificial Sequence: Synthetic oligonucleotide
  Antisense strand to SEQ ID NO: 1379508
guuuaugcacagaucuuga

SEQ ID NO: 1379510 - RNA, 19 nt, Artificial Sequence
  Description of Artificial Sequence: Synthetic oligonucleotide
  Sense strand starting at position 344 of SEQ ID NO: 1242884
acaaccuguguguaaguaa

SEQ ID NO: 1379511 - RNA, 19 nt, Artificial Sequence
  Description of Artificial Sequence: Synthetic oligonucleotide
  Antisense strand to SEQ ID NO: 1379510
uuacuuacacacagguugu

SEQ ID NO: 1379512 - RNA, 19 nt, Artificial Sequence
  Description of Artificial Sequence: Synthetic oligonucleotide
  Sense strand starting at position 1180 of SEQ ID NO: 1242884
accuaaaucugcccgcaga

SEQ ID NO: 1379513 - RNA, 19 nt, Artificial Sequence
  Description of Artificial Sequence: Synthetic oligonucleotide
  Antisense strand to SEQ ID NO: 1379512
ucugcgggcagauuuaggu

SEQ ID NO: 1379514 - RNA, 19 nt, Artificial Sequence
  Description of Artificial Sequence: Synthetic oligonucleotide
  Sense strand starting at position 1334 of SEQ ID NO: 1242884
ggagagaagucgguucgaa

SEQ ID NO: 1379515 - RNA, 19 nt, Artificial Sequence
  Description of Artificial Sequence: Synthetic oligonucleotide
  Antisense strand to SEQ ID NO: 1379514
uucgaaccgacuucucucc

SEQ ID NO: 1379516 - RNA, 19 nt, Artificial Sequence
  Description of Artificial Sequence: Synthetic oligonucleotide
  Sense strand starting at position 2214 of SEQ ID NO: 1242884
gcgugguuccugccgggaa

SEQ ID NO: 1379517 - RNA, 19 nt, Artificial Sequence
  Description of Artificial Sequence: Synthetic oligonucleotide
  Antisense strand to SEQ ID NO: 1379516
uucccggcaggaaccacgc

SEQ ID NO: 1379518 - RNA, 19 nt, Artificial Sequence
  Description of Artificial Sequence: Synthetic oligonucleotide
  Sense strand starting at position 2215 of SEQ ID NO: 1242884
cgugguuccugccgggaau

SEQ ID NO: 1379519 - RNA, 19 nt, Artificial Sequence
  Description of Artificial Sequence: Synthetic oligonucleotide
  Antisense strand to SEQ ID NO: 1379518
auucccggcaggaaccacg

SEQ ID NO: 1379520 - RNA, 19 nt, Artificial Sequence
  Description of Artificial Sequence: Synthetic oligonucleotide
  Sense strand starting at position 2927 of SEQ ID NO: 1242884
gcuaaugugccucaaaguc

SEQ ID NO: 1379521 - RNA, 19 nt, Artificial Sequence
  Description of Artificial Sequence: Synthetic oligonucleotide
  Antisense strand to SEQ ID NO: 1379520
gacuuugaggcacauuagc

SEQ ID NO: 1379522 - RNA, 19 nt, Artificial Sequence
  Description of Artificial Sequence: Synthetic oligonucleotide
  Sense strand starting at position 2935 of SEQ ID NO: 1242884
gccucaaaguccuggguaa

SEQ ID NO: 1379523 - RNA, 19 nt, Artificial Sequence
  Description of Artificial Sequence: Synthetic oligonucleotide
  Antisense strand to SEQ ID NO: 1379522
uuacccaggacuuugaggc

SEQ ID NO: 1379524 - RNA, 19 nt, Artificial Sequence
  Description of Artificial Sequence: Synthetic oligonucleotide
  Sense strand starting at position 2937 of SEQ ID NO: 1242884
cucaaaguccuggguaagu

SEQ ID NO: 1379525 - RNA, 19 nt, Artificial Sequence
  Description of Artificial Sequence: Synthetic oligonucleotide
  Antisense strand to SEQ ID NO: 1379524
acuuacccaggacuuugag

SEQ ID NO: 1379526 - RNA, 19 nt, Artificial Sequence
  Description of Artificial Sequence: Synthetic oligonucleotide
  Sense strand starting at position 3042 of SEQ ID NO: 1242884
gcgucuuuauuguguugau

SEQ ID NO: 1379527 - RNA, 19 nt, Artificial Sequence
  Description of Artificial Sequence: Synthetic oligonucleotide
  Antisense strand to SEQ ID NO: 1379526
aucaacacaauaaagacgc

SEQ ID NO: 1379528 - RNA, 19 nt, Artificial Sequence
  Description of Artificial Sequence: Synthetic oligonucleotide
  Sense strand starting at position 3043 of SEQ ID NO: 1242884
cgucuuuauuguguugauu

SEQ ID NO: 1379529 - RNA, 19 nt, Artificial Sequence
  Description of Artificial Sequence: Synthetic oligonucleotide
  Antisense strand to SEQ ID NO: 1379528
aaucaacacaauaaagacg

SEQ ID NO: 1379530 - RNA, 19 nt, Artificial Sequence
  Description of Artificial Sequence: Synthetic oligonucleotide
  Sense strand starting at position 3045 of SEQ ID NO: 1242884
ucuuuauuguguugauuac

SEQ ID NO: 1379531 - RNA, 19 nt, Artificial Sequence
  Description of Artificial Sequence: Synthetic oligonucleotide
  Antisense strand to SEQ ID NO: 1379530
guaaucaacacaauaaaga

SEQ ID NO: 1379532 - RNA, 19 nt, Artificial Sequence
  Description of Artificial Sequence: Synthetic oligonucleotide
  Sense strand starting at position 3051 of SEQ ID NO: 1242884
uuguguugauuacguagau

SEQ ID NO: 1379533 - RNA, 19 nt, Artificial Sequence
  Description of Artificial Sequence: Synthetic oligonucleotide
  Antisense strand to SEQ ID NO: 1379532
aucuacguaaucaacacaa

SEQ ID NO: 1379534 - RNA, 19 nt, Artificial Sequence
  Description of Artificial Sequence: Synthetic oligonucleotide
  Sense strand starting at position 3223 of SEQ ID NO: 1242884
uuugcaaucugcugguuga

SEQ ID NO: 1379535 - RNA, 19 nt, Artificial Sequence
  Description of Artificial Sequence: Synthetic oligonucleotide
  Antisense strand to SEQ ID NO: 1379534
ucaaccagcagauugcaaa

SEQ ID NO: 1379536 - RNA, 19 nt, Artificial Sequence
  Description of Artificial Sequence: Synthetic oligonucleotide
  Sense strand starting at position 3354 of SEQ ID NO: 1242884
ggacuagacucagagguga

SEQ ID NO: 1379537 - RNA, 19 nt, Artificial Sequence
  Description of Artificial Sequence: Synthetic oligonucleotide
  Antisense strand to SEQ ID NO: 1379536
ucaccucugagucuagucc

SEQ ID NO: 1379538 - RNA, 19 nt, Artificial Sequence
  Description of Artificial Sequence: Synthetic oligonucleotide
  Sense strand starting at position 3356 of SEQ ID NO: 1242884
acuagacucagaggugauc

SEQ ID NO: 1379539 - RNA, 19 nt, Artificial Sequence
  Description of Artificial Sequence: Synthetic oligonucleotide
  Antisense strand to SEQ ID NO: 1379538
gaucaccucugagucuagu

SEQ ID NO: 1379540 - RNA, 19 nt, Artificial Sequence
  Description of Artificial Sequence: Synthetic oligonucleotide
  Sense strand starting at position 3362 of SEQ ID NO: 1242884
cucagaggugaucgagaaa

SEQ ID NO: 1379541 - RNA, 19 nt, Artificial Sequence
  Description of Artificial Sequence: Synthetic oligonucleotide
  Antisense strand to SEQ ID NO: 1379540
uuucucgaucaccucugag

SEQ ID NO: 1379542 - RNA, 19 nt, Artificial Sequence
  Description of Artificial Sequence: Synthetic oligonucleotide
  Sense strand starting at position 3381 of SEQ ID NO: 1242884
uugaaacaggcuggaaauu

SEQ ID NO: 1379543 - RNA, 19 nt, Artificial Sequence
  Description of Artificial Sequence: Synthetic oligonucleotide
  Antisense strand to SEQ ID NO: 1379542
aauuuccagccuguuucaa

SEQ ID NO: 1379544 - RNA, 19 nt, Artificial Sequence
  Description of Artificial Sequence: Synthetic oligonucleotide
  Sense strand starting at position 3408 of SEQ ID NO: 1242884
cugugauuaauauguggag

SEQ ID NO: 1379545 - RNA, 19 nt, Artificial Sequence
  Description of Artificial Sequence: Synthetic oligonucleotide
  Antisense strand to SEQ ID NO: 1379544
cuccacauauuaaucacag

SEQ ID NO: 1379546 - RNA, 19 nt, Artificial Sequence
  Description of Artificial Sequence: Synthetic oligonucleotide
  Sense strand starting at position 3410 of SEQ ID NO: 1242884
gugauuaauauguggaggu

SEQ ID NO: 1379547 - RNA, 19 nt, Artificial Sequence
  Description of Artificial Sequence: Synthetic oligonucleotide
  Antisense strand to SEQ ID NO: 1379546
accuccacauauuaaucac

SEQ ID NO: 1379548 - RNA, 19 nt, Artificial Sequence
  Description of Artificial Sequence: Synthetic oligonucleotide
  Sense strand starting at position 3412 of SEQ ID NO: 1242884
gauuaauauguggaggucu

SEQ ID NO: 1379549 - RNA, 19 nt, Artificial Sequence
  Description of Artificial Sequence: Synthetic oligonucleotide
  Antisense strand to SEQ ID NO: 1379548
agaccuccacauauuaauc

SEQ ID NO: 1379550 - RNA, 19 nt, Artificial Sequence
  Description of Artificial Sequence: Synthetic oligonucleotide
  Sense strand starting at position 3423 of SEQ ID NO: 1242884
ggaggucucuuguacgaaa

SEQ ID NO: 1379551 - RNA, 19 nt, Artificial Sequence
  Description of Artificial Sequence: Synthetic oligonucleotide
  Antisense strand to SEQ ID NO: 1379550
uuucguacaagagaccucc

SEQ ID NO: 1379552 - RNA, 19 nt, Artificial Sequence
  Description of Artificial Sequence: Synthetic oligonucleotide
  Sense strand starting at position 3426 of SEQ ID NO: 1242884
ggucucuuguacgaaaggu

SEQ ID NO: 1379553 - RNA, 19 nt, Artificial Sequence
  Description of Artificial Sequence: Synthetic oligonucleotide
  Antisense strand to SEQ ID NO: 1379552
accuuucguacaagagacc

SEQ ID NO: 1379554 - RNA, 19 nt, Artificial Sequence
  Description of Artificial Sequence: Synthetic oligonucleotide
  Sense strand starting at position 3555 of SEQ ID NO: 1242884
aggaauuacccacguugga

SEQ ID NO: 1379555 - RNA, 19 nt, Artificial Sequence
  Description of Artificial Sequence: Synthetic oligonucleotide
  Antisense strand to SEQ ID NO: 1379554
uccaacguggguaauuccu

SEQ ID NO: 1379556 - RNA, 19 nt, Artificial Sequence
  Description of Artificial Sequence: Synthetic oligonucleotide
  Sense strand starting at position 3788 of SEQ ID NO: 1242884
gccugacacaugcagugua

SEQ ID NO: 1379557 - RNA, 19 nt, Artificial Sequence
  Description of Artificial Sequence: Synthetic oligonucleotide
  Antisense strand to SEQ ID NO: 1379556
uacacugcaugugucaggc

SEQ ID NO: 1379558 - RNA, 19 nt, Artificial Sequence
  Description of Artificial Sequence: Synthetic oligonucleotide
  Sense strand starting at position 203 of SEQ ID NO: 1242885
agguuucucagagaagcuc

SEQ ID NO: 1379559 - RNA, 19 nt, Artificial Sequence
  Description of Artificial Sequence: Synthetic oligonucleotide
  Antisense strand to SEQ ID NO: 1379558
gagcuucucugagaaaccu

SEQ ID NO: 1379560 - RNA, 19 nt, Artificial Sequence
  Description of Artificial Sequence: Synthetic oligonucleotide
  Sense strand starting at position 306 of SEQ ID NO: 1242885
ccuagucuucccuguagga

SEQ ID NO: 1379561 - RNA, 19 nt, Artificial Sequence
  Description of Artificial Sequence: Synthetic oligonucleotide
  Antisense strand to SEQ ID NO: 1379560
uccuacagggaagacuagg

SEQ ID NO: 1379562 - RNA, 19 nt, Artificial Sequence
  Description of Artificial Sequence: Synthetic oligonucleotide
  Sense strand starting at position 308 of SEQ ID NO: 1242885
uagucuucccuguaggaaa

SEQ ID NO: 1379563 - RNA, 19 nt, Artificial Sequence
  Description of Artificial Sequence: Synthetic oligonucleotide
  Antisense strand to SEQ ID NO: 1379562
uuuccuacagggaagacua

SEQ ID NO: 1379564 - RNA, 19 nt, Artificial Sequence
  Description of Artificial Sequence: Synthetic oligonucleotide
  Sense strand starting at position 328 of SEQ ID NO: 1242885
ugguccugugcguuucaca

SEQ ID NO: 1379565 - RNA, 19 nt, Artificial Sequence
  Description of Artificial Sequence: Synthetic oligonucleotide
  Antisense strand to SEQ ID NO: 1379564
ugugaaacgcacaggacca

SEQ ID NO: 1379566 - RNA, 19 nt, Artificial Sequence
  Description of Artificial Sequence: Synthetic oligonucleotide
  Sense strand starting at position 329 of SEQ ID NO: 1242885
gguccugugcguuucacaa

SEQ ID NO: 1379567 - RNA, 19 nt, Artificial Sequence
  Description of Artificial Sequence: Synthetic oligonucleotide
  Antisense strand to SEQ ID NO: 1379566
uugugaaacgcacaggacc

SEQ ID NO: 1379568 - RNA, 19 nt, Artificial Sequence
  Description of Artificial Sequence: Synthetic oligonucleotide
  Sense strand starting at position 542 of SEQ ID NO: 1242885
ucauccuauuucugggaca

SEQ ID NO: 1379569 - RNA, 19 nt, Artificial Sequence
  Description of Artificial Sequence: Synthetic oligonucleotide
  Antisense strand to SEQ ID NO: 1379568
ugucccagaaauaggauga

SEQ ID NO: 1379570 - RNA, 19 nt, Artificial Sequence
  Description of Artificial Sequence: Synthetic oligonucleotide
  Sense strand starting at position 596 of SEQ ID NO: 1242885
gccagcuauuuacagaaau

SEQ ID NO: 1379571 - RNA, 19 nt, Artificial Sequence
  Description of Artificial Sequence: Synthetic oligonucleotide
  Antisense strand to SEQ ID NO: 1379570
auuucuguaaauagcuggc

SEQ ID NO: 1379572 - RNA, 19 nt, Artificial Sequence
  Description of Artificial Sequence: Synthetic oligonucleotide
  Sense strand starting at position 636 of SEQ ID NO: 1242885
ggaacacccgauugugaau

SEQ ID NO: 1379573 - RNA, 19 nt, Artificial Sequence
  Description of Artificial Sequence: Synthetic oligonucleotide
  Antisense strand to SEQ ID NO: 1379572
auucacaaucggguguucc

SEQ ID NO: 1379574 - RNA, 19 nt, Artificial Sequence
  Description of Artificial Sequence: Synthetic oligonucleotide
  Sense strand starting at position 906 of SEQ ID NO: 1242885
gagggaucauggcuuugga

SEQ ID NO: 1379575 - RNA, 19 nt, Artificial Sequence
  Description of Artificial Sequence: Synthetic oligonucleotide
  Antisense strand to SEQ ID NO: 1379574
uccaaagccaugaucccuc

SEQ ID NO: 1379576 - RNA, 19 nt, Artificial Sequence
  Description of Artificial Sequence: Synthetic oligonucleotide
  Sense strand starting at position 909 of SEQ ID NO: 1242885
ggaucauggcuuuggagaa

SEQ ID NO: 1379577 - RNA, 19 nt, Artificial Sequence
  Description of Artificial Sequence: Synthetic oligonucleotide
  Antisense strand to SEQ ID NO: 1379576
uucuccaaagccaugaucc

SEQ ID NO: 1379578 - RNA, 19 nt, Artificial Sequence
  Description of Artificial Sequence: Synthetic oligonucleotide
  Sense strand starting at position 952 of SEQ ID NO: 1242885
ggaggaugggcacgacuuu

SEQ ID NO: 1379579 - RNA, 19 nt, Artificial Sequence
  Description of Artificial Sequence: Synthetic oligonucleotide
  Antisense strand to SEQ ID NO: 1379578
aaagucgugcccauccucc

SEQ ID NO: 1379580 - RNA, 19 nt, Artificial Sequence
  Description of Artificial Sequence: Synthetic oligonucleotide
  Sense strand starting at position 999 of SEQ ID NO: 1242885
ggcgugucuggguuuguca

SEQ ID NO: 1379581 - RNA, 19 nt, Artificial Sequence
  Description of Artificial Sequence: Synthetic oligonucleotide
  Antisense strand to SEQ ID NO: 1379580
ugacaaacccagacacgcc

SEQ ID NO: 1379582 - RNA, 19 nt, Artificial Sequence
  Description of Artificial Sequence: Synthetic oligonucleotide
  Sense strand starting at position 1000 of SEQ ID NO: 1242885
gcgugucuggguuugucaa

SEQ ID NO: 1379583 - RNA, 19 nt, Artificial Sequence
  Description of Artificial Sequence: Synthetic oligonucleotide
  Antisense strand to SEQ ID NO: 1379582
uugacaaacccagacacgc

SEQ ID NO: 1379584 - RNA, 19 nt, Artificial Sequence
  Description of Artificial Sequence: Synthetic oligonucleotide
  Sense strand starting at position 1007 of SEQ ID NO: 1242885
uggguuugucaagauggua

SEQ ID NO: 1379585 - RNA, 19 nt, Artificial Sequence
  Description of Artificial Sequence: Synthetic oligonucleotide
  Antisense strand to SEQ ID NO: 1379584
uaccaucuugacaaaccca

SEQ ID NO: 1379586 - RNA, 19 nt, Artificial Sequence
  Description of Artificial Sequence: Synthetic oligonucleotide
  Sense strand starting at position 1251 of SEQ ID NO: 1242885
ggagcugucccaggcucaa

SEQ ID NO: 1379587 - RNA, 19 nt, Artificial Sequence
  Description of Artificial Sequence: Synthetic oligonucleotide
  Antisense strand to SEQ ID NO: 1379586
uugagccugggacagcucc

SEQ ID NO: 1379588 - RNA, 19 nt, Artificial Sequence
  Description of Artificial Sequence: Synthetic oligonucleotide
  Sense strand starting at position 1765 of SEQ ID NO: 1242885
ggcuuuaaugcugucgcca

SEQ ID NO: 1379589 - RNA, 19 nt, Artificial Sequence
  Description of Artificial Sequence: Synthetic oligonucleotide
  Antisense strand to SEQ ID NO: 1379588
uggcgacagcauuaaagcc

SEQ ID NO: 1379590 - RNA, 19 nt, Artificial Sequence
  Description of Artificial Sequence: Synthetic oligonucleotide
  Sense strand starting at position 2305 of SEQ ID NO: 1242885
gucagaagccugggugaua

SEQ ID NO: 1379591 - RNA, 19 nt, Artificial Sequence
  Description of Artificial Sequence: Synthetic oligonucleotide
  Antisense strand to SEQ ID NO: 1379590
uaucacccaggcuucugac

SEQ ID NO: 1379592 - RNA, 19 nt, Artificial Sequence
  Description of Artificial Sequence: Synthetic oligonucleotide
  Sense strand starting at position 2388 of SEQ ID NO: 1242885
gggaauccguucucagacu

SEQ ID NO: 1379593 - RNA, 19 nt, Artificial Sequence
  Description of Artificial Sequence: Synthetic oligonucleotide
  Antisense strand to SEQ ID NO: 1379592
agucugagaacggauuccc

SEQ ID NO: 1379594 - RNA, 19 nt, Artificial Sequence
  Description of Artificial Sequence: Synthetic oligonucleotide
  Sense strand starting at position 2477 of SEQ ID NO: 1242885
gccaucucuggccagauga

SEQ ID NO: 1379595 - RNA, 19 nt, Artificial Sequence
  Description of Artificial Sequence: Synthetic oligonucleotide
  Antisense strand to SEQ ID NO: 1379594
ucaucuggccagagauggc

SEQ ID NO: 1379596 - RNA, 19 nt, Artificial Sequence
  Description of Artificial Sequence: Synthetic oligonucleotide
  Sense strand starting at position 2537 of SEQ ID NO: 1242885
cauguugacgcuuaauuag

SEQ ID NO: 1379597 - RNA, 19 nt, Artificial Sequence
  Description of Artificial Sequence: Synthetic oligonucleotide
  Antisense strand to SEQ ID NO: 1379596
cuaauuaagcgucaacaug

SEQ ID NO: 1379598 - RNA, 19 nt, Artificial Sequence
  Description of Artificial Sequence: Synthetic oligonucleotide
  Sense strand starting at position 2628 of SEQ ID NO: 1242885
accugaauucuaggcccau

SEQ ID NO: 1379599 - RNA, 19 nt, Artificial Sequence
  Description of Artificial Sequence: Synthetic oligonucleotide
  Antisense strand to SEQ ID NO: 1379598
augggccuagaauucaggu

SEQ ID NO: 1379600 - RNA, 19 nt, Artificial Sequence
  Description of Artificial Sequence: Synthetic oligonucleotide
  Sense strand starting at position 2629 of SEQ ID NO: 1242885
ccugaauucuaggcccauc

SEQ ID NO: 1379601 - RNA, 19 nt, Artificial Sequence
  Description of Artificial Sequence: Synthetic oligonucleotide
  Antisense strand to SEQ ID NO: 1379600
gaugggccuagaauucagg

SEQ ID NO: 1379602 - RNA, 19 nt, Artificial Sequence
  Description of Artificial Sequence: Synthetic oligonucleotide
  Sense strand starting at position 2723 of SEQ ID NO: 1242885
ugacaaugacggugacaaa

SEQ ID NO: 1379603 - RNA, 19 nt, Artificial Sequence
  Description of Artificial Sequence: Synthetic oligonucleotide
  Antisense strand to SEQ ID NO: 1379602
uuugucaccgucauuguca

SEQ ID NO: 1379604 - RNA, 19 nt, Artificial Sequence
  Description of Artificial Sequence: Synthetic oligonucleotide
  Sense strand starting at position 2761 of SEQ ID NO: 1242885
ugucaauaguucuuacccu

SEQ ID NO: 1379605 - RNA, 19 nt, Artificial Sequence
  Description of Artificial Sequence: Synthetic oligonucleotide
  Antisense strand to SEQ ID NO: 1379604
aggguaagaacuauugaca

SEQ ID NO: 1379606 - RNA, 19 nt, Artificial Sequence
  Description of Artificial Sequence: Synthetic oligonucleotide
  Sense strand starting at position 2956 of SEQ ID NO: 1242885
cuaagcaaucgcgugugaa

SEQ ID NO: 1379607 - RNA, 19 nt, Artificial Sequence
  Description of Artificial Sequence: Synthetic oligonucleotide
  Antisense strand to SEQ ID NO: 1379606
uucacacgcgauugcuuag

SEQ ID NO: 1379608 - RNA, 19 nt, Artificial Sequence
  Description of Artificial Sequence: Synthetic oligonucleotide
  Sense strand starting at position 3039 of SEQ ID NO: 1242885
uuuaaaguuuacucacgua

SEQ ID NO: 1379609 - RNA, 19 nt, Artificial Sequence
  Description of Artificial Sequence: Synthetic oligonucleotide
  Antisense strand to SEQ ID NO: 1379608
uacgugaguaaacuuuaaa

SEQ ID NO: 1379610 - RNA, 19 nt, Artificial Sequence
  Description of Artificial Sequence: Synthetic oligonucleotide
  Sense strand starting at position 3072 of SEQ ID NO: 1242885
cccauauaucacugacgcu

SEQ ID NO: 1379611 - RNA, 19 nt, Artificial Sequence
  Description of Artificial Sequence: Synthetic oligonucleotide
  Antisense strand to SEQ ID NO: 1379610
agcgucagugauauauggg

SEQ ID NO: 1379612 - RNA, 19 nt, Artificial Sequence
  Description of Artificial Sequence: Synthetic oligonucleotide
  Sense strand starting at position 3093 of SEQ ID NO: 1242885
auguacacacuuugggaaa

SEQ ID NO: 1379613 - RNA, 19 nt, Artificial Sequence
  Description of Artificial Sequence: Synthetic oligonucleotide
  Antisense strand to SEQ ID NO: 1379612
uuucccaaaguguguacau

SEQ ID NO: 1379614 - RNA, 19 nt, Artificial Sequence
  Description of Artificial Sequence: Synthetic oligonucleotide
  Sense strand starting at position 3125 of SEQ ID NO: 1242885
cguaguuaauccucacaac

SEQ ID NO: 1379615 - RNA, 19 nt, Artificial Sequence
  Description of Artificial Sequence: Synthetic oligonucleotide
  Antisense strand to SEQ ID NO: 1379614
guugugaggauuaacuacg

SEQ ID NO: 1379616 - RNA, 19 nt, Artificial Sequence
  Description of Artificial Sequence: Synthetic oligonucleotide
  Sense strand starting at position 3126 of SEQ ID NO: 1242885
guaguuaauccucacaaca

SEQ ID NO: 1379617 - RNA, 19 nt, Artificial Sequence
  Description of Artificial Sequence: Synthetic oligonucleotide
  Antisense strand to SEQ ID NO: 1379616
uguugugaggauuaacuac

SEQ ID NO: 1379618 - RNA, 19 nt, Artificial Sequence
  Description of Artificial Sequence: Synthetic oligonucleotide
  Sense strand starting at position 3151 of SEQ ID NO: 1242885
agaugaaaguacuaugauc

SEQ ID NO: 1379619 - RNA, 19 nt, Artificial Sequence
  Description of Artificial Sequence: Synthetic oligonucleotide
  Antisense strand to SEQ ID NO: 1379618
gaucauaguacuuucaucu

SEQ ID NO: 1379620 - RNA, 19 nt, Artificial Sequence
  Description of Artificial Sequence: Synthetic oligonucleotide
  Sense strand starting at position 3159 of SEQ ID NO: 1242885
guacuaugaucauuccauu

SEQ ID NO: 1379621 - RNA, 19 nt, Artificial Sequence
  Description of Artificial Sequence: Synthetic oligonucleotide
  Antisense strand to SEQ ID NO: 1379620
aauggaaugaucauaguac

SEQ ID NO: 1379622 - RNA, 19 nt, Artificial Sequence
  Description of Artificial Sequence: Synthetic oligonucleotide
  Sense strand starting at position 3208 of SEQ ID NO: 1242885
gguuaagugacuugucaaa

SEQ ID NO: 1379623 - RNA, 19 nt, Artificial Sequence
  Description of Artificial Sequence: Synthetic oligonucleotide
  Antisense strand to SEQ ID NO: 1379622
uuugacaagucacuuaacc

SEQ ID NO: 1379624 - RNA, 19 nt, Artificial Sequence
  Description of Artificial Sequence: Synthetic oligonucleotide
  Sense strand starting at position 3314 of SEQ ID NO: 1242885
cccaaaguauguuccaaag

SEQ ID NO: 1379625 - RNA, 19 nt, Artificial Sequence
  Description of Artificial Sequence: Synthetic oligonucleotide
  Antisense strand to SEQ ID NO: 1379624
cuuuggaacauacuuuggg

SEQ ID NO: 1379626 - RNA, 19 nt, Artificial Sequence
  Description of Artificial Sequence: Synthetic oligonucleotide
  Sense strand starting at position 3335 of SEQ ID NO: 1242885
cacuauuccgagcagacuu

SEQ ID NO: 1379627 - RNA, 19 nt, Artificial Sequence
  Description of Artificial Sequence: Synthetic oligonucleotide
  Antisense strand to SEQ ID NO: 1379626
aagucugcucggaauagug

SEQ ID NO: 1379628 - RNA, 19 nt, Artificial Sequence
  Description of Artificial Sequence: Synthetic oligonucleotide
  Sense strand starting at position 3416 of SEQ ID NO: 1242885
ccugcaugggaauguguaa

SEQ ID NO: 1379629 - RNA, 19 nt, Artificial Sequence
  Description of Artificial Sequence: Synthetic oligonucleotide
  Antisense strand to SEQ ID NO: 1379628
uuacacauucccaugcagg

SEQ ID NO: 1379630 - RNA, 19 nt, Artificial Sequence
  Description of Artificial Sequence: Synthetic oligonucleotide
  Sense strand starting at position 3429 of SEQ ID NO: 1242885
guguaacggacucaaauaa

SEQ ID NO: 1379631 - RNA, 19 nt, Artificial Sequence
  Description of Artificial Sequence: Synthetic oligonucleotide
  Antisense strand to SEQ ID NO: 1379630
uuauuugaguccguuacac

SEQ ID NO: 1379632 - RNA, 19 nt, Artificial Sequence
  Description of Artificial Sequence: Synthetic oligonucleotide
  Sense strand starting at position 3453 of SEQ ID NO: 1242885
gcagucaucucuuuccauu

SEQ ID NO: 1379633 - RNA, 19 nt, Artificial Sequence
  Description of Artificial Sequence: Synthetic oligonucleotide
  Antisense strand to SEQ ID NO: 1379632
aauggaaagagaugacugc

SEQ ID NO: 1379634 - RNA, 19 nt, Artificial Sequence
  Description of Artificial Sequence: Synthetic oligonucleotide
  Sense strand starting at position 3619 of SEQ ID NO: 1242885
gcugcugccauauggagaa

SEQ ID NO: 1379635 - RNA, 19 nt, Artificial Sequence
  Description of Artificial Sequence: Synthetic oligonucleotide
  Antisense strand to SEQ ID NO: 1379634
uucuccauauggcagcagc

SEQ ID NO: 1379636 - RNA, 19 nt, Artificial Sequence
  Description of Artificial Sequence: Synthetic oligonucleotide
  Sense strand starting at position 3914 of SEQ ID NO: 1242885
ggcagacaugcucaguuga

SEQ ID NO: 1379637 - RNA, 19 nt, Artificial Sequence
  Description of Artificial Sequence: Synthetic oligonucleotide
  Antisense strand to SEQ ID NO: 1379636
ucaacugagcaugucugcc

SEQ ID NO: 1379638 - RNA, 19 nt, Artificial Sequence
  Description of Artificial Sequence: Synthetic oligonucleotide
  Sense strand starting at position 126 of SEQ ID NO: 1242886
cucuuuccugcccagugaa

SEQ ID NO: 1379639 - RNA, 19 nt, Artificial Sequence
  Description of Artificial Sequence: Synthetic oligonucleotide
  Antisense strand to SEQ ID NO: 1379638
uucacugggcaggaaagag

SEQ ID NO: 1379640 - RNA, 19 nt, Artificial Sequence
  Description of Artificial Sequence: Synthetic oligonucleotide
  Sense strand starting at position 173 of SEQ ID NO: 1242886
gccaguuuggccguugacu

SEQ ID NO: 1379641 - RNA, 19 nt, Artificial Sequence
  Description of Artificial Sequence: Synthetic oligonucleotide
  Antisense strand to SEQ ID NO: 1379640
agucaacggccaaacuggc

SEQ ID NO: 1379642 - RNA, 19 nt, Artificial Sequence
  Description of Artificial Sequence: Synthetic oligonucleotide
  Sense strand starting at position 419 of SEQ ID NO: 1242886
ggaagcuguuuguguccuu

SEQ ID NO: 1379643 - RNA, 19 nt, Artificial Sequence
  Description of Artificial Sequence: Synthetic oligonucleotide
  Antisense strand to SEQ ID NO: 1379642
aaggacacaaacagcuucc

SEQ ID NO: 1379644 - RNA, 19 nt, Artificial Sequence
  Description of Artificial Sequence: Synthetic oligonucleotide
  Sense strand starting at position 424 of SEQ ID NO: 1242886
cuguuuguguccuucucau

SEQ ID NO: 1379645 - RNA, 19 nt, Artificial Sequence
  Description of Artificial Sequence: Synthetic oligonucleotide
  Antisense strand to SEQ ID NO: 1379644
augagaaggacacaaacag

SEQ ID NO: 1379646 - RNA, 19 nt, Artificial Sequence
  Description of Artificial Sequence: Synthetic oligonucleotide
  Sense strand starting at position 428 of SEQ ID NO: 1242886
uuguguccuucucaucagu

SEQ ID NO: 1379647 - RNA, 19 nt, Artificial Sequence
  Description of Artificial Sequence: Synthetic oligonucleotide
  Antisense strand to SEQ ID NO: 1379646
acugaugagaaggacacaa

SEQ ID NO: 1379648 - RNA, 19 nt, Artificial Sequence
  Description of Artificial Sequence: Synthetic oligonucleotide
  Sense strand starting at position 436 of SEQ ID NO: 1242886
uucucaucagugggaggua

SEQ ID NO: 1379649 - RNA, 19 nt, Artificial Sequence
  Description of Artificial Sequence: Synthetic oligonucleotide
  Antisense strand to SEQ ID NO: 1379648
uaccucccacugaugagaa

SEQ ID NO: 1379650 - RNA, 19 nt, Artificial Sequence
  Description of Artificial Sequence: Synthetic oligonucleotide
  Sense strand starting at position 496 of SEQ ID NO: 1242886
cagugagucugucgaugga

SEQ ID NO: 1379651 - RNA, 19 nt, Artificial Sequence
  Description of Artificial Sequence: Synthetic oligonucleotide
  Antisense strand to SEQ ID NO: 1379650
uccaucgacagacucacug

SEQ ID NO: 1379652 - RNA, 19 nt, Artificial Sequence
  Description of Artificial Sequence: Synthetic oligonucleotide
  Sense strand starting at position 581 of SEQ ID NO: 1242886
gcaagugaguccuaggguu

SEQ ID NO: 1379653 - RNA, 19 nt, Artificial Sequence
  Description of Artificial Sequence: Synthetic oligonucleotide
  Antisense strand to SEQ ID NO: 1379652
aacccuaggacucacuugc

SEQ ID NO: 1379654 - RNA, 19 nt, Artificial Sequence
  Description of Artificial Sequence: Synthetic oligonucleotide
  Sense strand starting at position 1000 of SEQ ID NO: 1242886
gccgucaguuccugaagcu

SEQ ID NO: 1379655 - RNA, 19 nt, Artificial Sequence
  Description of Artificial Sequence: Synthetic oligonucleotide
  Antisense strand to SEQ ID NO: 1379654
agcuucaggaacugacggc

SEQ ID NO: 1379656 - RNA, 19 nt, Artificial Sequence
  Description of Artificial Sequence: Synthetic oligonucleotide
  Sense strand starting at position 1919 of SEQ ID NO: 1242886
ugaggcugugcccagauaa

SEQ ID NO: 1379657 - RNA, 19 nt, Artificial Sequence
  Description of Artificial Sequence: Synthetic oligonucleotide
  Antisense strand to SEQ ID NO: 1379656
uuaucugggcacagccuca

SEQ ID NO: 1379658 - RNA, 19 nt, Artificial Sequence
  Description of Artificial Sequence: Synthetic oligonucleotide
  Sense strand starting at position 2705 of SEQ ID NO: 1242886
ggagggauggcucgggaau

SEQ ID NO: 1379659 - RNA, 19 nt, Artificial Sequence
  Description of Artificial Sequence: Synthetic oligonucleotide
  Antisense strand to SEQ ID NO: 1379658
auucccgagccaucccucc

SEQ ID NO: 1379660 - RNA, 19 nt, Artificial Sequence
  Description of Artificial Sequence: Synthetic oligonucleotide
  Sense strand starting at position 2706 of SEQ ID NO: 1242886
gagggauggcucgggaaug

SEQ ID NO: 1379661 - RNA, 19 nt, Artificial Sequence
  Description of Artificial Sequence: Synthetic oligonucleotide
  Antisense strand to SEQ ID NO: 1379660
cauucccgagccaucccuc

SEQ ID NO: 1379662 - RNA, 19 nt, Artificial Sequence
  Description of Artificial Sequence: Synthetic oligonucleotide
  Sense strand starting at position 2750 of SEQ ID NO: 1242886
gcaaguucccucgggaaua

SEQ ID NO: 1379663 - RNA, 19 nt, Artificial Sequence
  Description of Artificial Sequence: Synthetic oligonucleotide
  Antisense strand to SEQ ID NO: 1379662
uauucccgagggaacuugc

SEQ ID NO: 1379664 - RNA, 19 nt, Artificial Sequence
  Description of Artificial Sequence: Synthetic oligonucleotide
  Sense strand starting at position 2751 of SEQ ID NO: 1242886
caaguucccucgggaauaa

SEQ ID NO: 1379665 - RNA, 19 nt, Artificial Sequence
  Description of Artificial Sequence: Synthetic oligonucleotide
  Antisense strand to SEQ ID NO: 1379664
uuauucccgagggaacuug

SEQ ID NO: 1379666 - RNA, 19 nt, Artificial Sequence
  Description of Artificial Sequence: Synthetic oligonucleotide
  Sense strand starting at position 2975 of SEQ ID NO: 1242886
gguucuuugcaccgggaaa

SEQ ID NO: 1379667 - RNA, 19 nt, Artificial Sequence
  Description of Artificial Sequence: Synthetic oligonucleotide
  Antisense strand to SEQ ID NO: 1379666
uuucccggugcaaagaacc

SEQ ID NO: 1379668 - RNA, 19 nt, Artificial Sequence
  Description of Artificial Sequence: Synthetic oligonucleotide
  Sense strand starting at position 2976 of SEQ ID NO: 1242886
guucuuugcaccgggaaag

SEQ ID NO: 1379669 - RNA, 19 nt, Artificial Sequence
  Description of Artificial Sequence: Synthetic oligonucleotide
  Antisense strand to SEQ ID NO: 1379668
cuuucccggugcaaagaac

SEQ ID NO: 1379670 - RNA, 19 nt, Artificial Sequence
  Description of Artificial Sequence: Synthetic oligonucleotide
  Sense strand starting at position 2977 of SEQ ID NO: 1242886
uucuuugcaccgggaaaga

SEQ ID NO: 1379671 - RNA, 19 nt, Artificial Sequence
  Description of Artificial Sequence: Synthetic oligonucleotide
  Antisense strand to SEQ ID NO: 1379670
ucuuucccggugcaaagaa

SEQ ID NO: 1379672 - RNA, 19 nt, Artificial Sequence
  Description of Artificial Sequence: Synthetic oligonucleotide
  Sense strand starting at position 3016 of SEQ ID NO: 1242886
uccugagaguaucucaaua

SEQ ID NO: 1379673 - RNA, 19 nt, Artificial Sequence
  Description of Artificial Sequence: Synthetic oligonucleotide
  Antisense strand to SEQ ID NO: 1379672
uauugagauacucucagga

SEQ ID NO: 1379674 - RNA, 19 nt, Artificial Sequence
  Description of Artificial Sequence: Synthetic oligonucleotide
  Sense strand starting at position 3024 of SEQ ID NO: 1242886
guaucucaauaggagugaa

SEQ ID NO: 1379675 - RNA, 19 nt, Artificial Sequence
  Description of Artificial Sequence: Synthetic oligonucleotide
  Antisense strand to SEQ ID NO: 1379674
uucacuccuauugagauac

SEQ ID NO: 1379676 - RNA, 19 nt, Artificial Sequence
  Description of Artificial Sequence: Synthetic oligonucleotide
  Sense strand starting at position 3214 of SEQ ID NO: 1242886
gcagcucuucugcguaagu

SEQ ID NO: 1379677 - RNA, 19 nt, Artificial Sequence
  Description of Artificial Sequence: Synthetic oligonucleotide
  Antisense strand to SEQ ID NO: 1379676
acuuacgcagaagagcugc

SEQ ID NO: 1379678 - RNA, 19 nt, Artificial Sequence
  Description of Artificial Sequence: Synthetic oligonucleotide
  Sense strand starting at position 3216 of SEQ ID NO: 1242886
agcucuucugcguaagucu

SEQ ID NO: 1379679 - RNA, 19 nt, Artificial Sequence
  Description of Artificial Sequence: Synthetic oligonucleotide
  Antisense strand to SEQ ID NO: 1379678
agacuuacgcagaagagcu

SEQ ID NO: 1379680 - RNA, 19 nt, Artificial Sequence
  Description of Artificial Sequence: Synthetic oligonucleotide
  Sense strand starting at position 3225 of SEQ ID NO: 1242886
gcguaagucuugcccggua

SEQ ID NO: 1379681 - RNA, 19 nt, Artificial Sequence
  Description of Artificial Sequence: Synthetic oligonucleotide
  Antisense strand to SEQ ID NO: 1379680
uaccgggcaagacuuacgc

SEQ ID NO: 1379682 - RNA, 19 nt, Artificial Sequence
  Description of Artificial Sequence: Synthetic oligonucleotide
  Sense strand starting at position 3403 of SEQ ID NO: 1242886
uggacugcucccgguagga

SEQ ID NO: 1379683 - RNA, 19 nt, Artificial Sequence
  Description of Artificial Sequence: Synthetic oligonucleotide
  Antisense strand to SEQ ID NO: 1379682
uccuaccgggagcagucca

SEQ ID NO: 1379684 - RNA, 19 nt, Artificial Sequence
  Description of Artificial Sequence: Synthetic oligonucleotide
  Sense strand starting at position 3684 of SEQ ID NO: 1242886
gggaagaguguguggaaga

SEQ ID NO: 1379685 - RNA, 19 nt, Artificial Sequence
  Description of Artificial Sequence: Synthetic oligonucleotide
  Antisense strand to SEQ ID NO: 1379684
ucuuccacacacucuuccc

SEQ ID NO: 1379686 - RNA, 19 nt, Artificial Sequence
  Description of Artificial Sequence: Synthetic oligonucleotide
  Sense strand starting at position 3685 of SEQ ID NO: 1242886
ggaagaguguguggaagau

SEQ ID NO: 1379687 - RNA, 19 nt, Artificial Sequence
  Description of Artificial Sequence: Synthetic oligonucleotide
  Antisense strand to SEQ ID NO: 1379686
aucuuccacacacucuucc

SEQ ID NO: 1379688 - RNA, 19 nt, Artificial Sequence
  Description of Artificial Sequence: Synthetic oligonucleotide
  Sense strand starting at position 3697 of SEQ ID NO: 1242886
ggaagaucaucacagaaag

SEQ ID NO: 1379689 - RNA, 19 nt, Artificial Sequence
  Description of Artificial Sequence: Synthetic oligonucleotide
  Antisense strand to SEQ ID NO: 1379688
cuuucugugaugaucuucc

SEQ ID NO: 1379690 - RNA, 19 nt, Artificial Sequence
  Description of Artificial Sequence: Synthetic oligonucleotide
  Sense strand starting at position 240 of SEQ ID NO: 1242887
gggugagcuuagccucaaa

SEQ ID NO: 1379691 - RNA, 19 nt, Artificial Sequence
  Description of Artificial Sequence: Synthetic oligonucleotide
  Antisense strand to SEQ ID NO: 1379690
uuugaggcuaagcucaccc

SEQ ID NO: 1379692 - RNA, 19 nt, Artificial Sequence
  Description of Artificial Sequence: Synthetic oligonucleotide
  Sense strand starting at position 394 of SEQ ID NO: 1242887
gggugugacucugagagcu

SEQ ID NO: 1379693 - RNA, 19 nt, Artificial Sequence
  Description of Artificial Sequence: Synthetic oligonucleotide
  Antisense strand to SEQ ID NO: 1379692
agcucucagagucacaccc

SEQ ID NO: 1379694 - RNA, 19 nt, Artificial Sequence
  Description of Artificial Sequence: Synthetic oligonucleotide
  Sense strand starting at position 411 of SEQ ID NO: 1242887
cugggaagagccugaaagu

SEQ ID NO: 1379695 - RNA, 19 nt, Artificial Sequence
  Description of Artificial Sequence: Synthetic oligonucleotide
  Antisense strand to SEQ ID NO: 1379694
acuuucaggcucuucccag

SEQ ID NO: 1379696 - RNA, 19 nt, Artificial Sequence
  Description of Artificial Sequence: Synthetic oligonucleotide
  Sense strand starting at position 439 of SEQ ID NO: 1242887
gucagauccuucugugcac

SEQ ID NO: 1379697 - RNA, 19 nt, Artificial Sequence
  Description of Artificial Sequence: Synthetic oligonucleotide
  Antisense strand to SEQ ID NO: 1379696
gugcacagaaggaucugac

SEQ ID NO: 1379698 - RNA, 19 nt, Artificial Sequence
  Description of Artificial Sequence: Synthetic oligonucleotide
  Sense strand starting at position 503 of SEQ ID NO: 1242887
gacacaaacuagugaauga

SEQ ID NO: 1379699 - RNA, 19 nt, Artificial Sequence
  Description of Artificial Sequence: Synthetic oligonucleotide
  Antisense strand to SEQ ID NO: 1379698
ucauucacuaguuuguguc

SEQ ID NO: 1379700 - RNA, 19 nt, Artificial Sequence
  Description of Artificial Sequence: Synthetic oligonucleotide
  Sense strand starting at position 583 of SEQ ID NO: 1242887
cagccauuccaagaaggua

SEQ ID NO: 1379701 - RNA, 19 nt, Artificial Sequence
  Description of Artificial Sequence: Synthetic oligonucleotide
  Antisense strand to SEQ ID NO: 1379700
uaccuucuuggaauggcug

SEQ ID NO: 1379702 - RNA, 19 nt, Artificial Sequence
  Description of Artificial Sequence: Synthetic oligonucleotide
  Sense strand starting at position 990 of SEQ ID NO: 1242887
gggccaauccucuacucaa

SEQ ID NO: 1379703 - RNA, 19 nt, Artificial Sequence
  Description of Artificial Sequence: Synthetic oligonucleotide
  Antisense strand to SEQ ID NO: 1379702
uugaguagaggauuggccc

SEQ ID NO: 1379704 - RNA, 19 nt, Artificial Sequence
  Description of Artificial Sequence: Synthetic oligonucleotide
  Sense strand starting at position 1185 of SEQ ID NO: 1242887
ugguguuagcuuggagaga

SEQ ID NO: 1379705 - RNA, 19 nt, Artificial Sequence
  Description of Artificial Sequence: Synthetic oligonucleotide
  Antisense strand to SEQ ID NO: 1379704
ucucuccaagcuaacacca

SEQ ID NO: 1379706 - RNA, 19 nt, Artificial Sequence
  Description of Artificial Sequence: Synthetic oligonucleotide
  Sense strand starting at position 1186 of SEQ ID NO: 1242887
gguguuagcuuggagagau

SEQ ID NO: 1379707 - RNA, 19 nt, Artificial Sequence
  Description of Artificial Sequence: Synthetic oligonucleotide
  Antisense strand to SEQ ID NO: 1379706
aucucuccaagcuaacacc

SEQ ID NO: 1379708 - RNA, 19 nt, Artificial Sequence
  Description of Artificial Sequence: Synthetic oligonucleotide
  Sense strand starting at position 1218 of SEQ ID NO: 1242887
cuguuauccgaguguagaa

SEQ ID NO: 1379709 - RNA, 19 nt, Artificial Sequence
  Description of Artificial Sequence: Synthetic oligonucleotide
  Antisense strand to SEQ ID NO: 1379708
uucuacacucggauaacag

SEQ ID NO: 1379710 - RNA, 19 nt, Artificial Sequence
  Description of Artificial Sequence: Synthetic oligonucleotide
  Sense strand starting at position 1220 of SEQ ID NO: 1242887
guuauccgaguguagaaua

SEQ ID NO: 1379711 - RNA, 19 nt, Artificial Sequence
  Description of Artificial Sequence: Synthetic oligonucleotide
  Antisense strand to SEQ ID NO: 1379710
uauucuacacucggauaac

SEQ ID NO: 1379712 - RNA, 19 nt, Artificial Sequence
  Description of Artificial Sequence: Synthetic oligonucleotide
  Sense strand starting at position 1311 of SEQ ID NO: 1242887
gacggaagcuccggacuuu

SEQ ID NO: 1379713 - RNA, 19 nt, Artificial Sequence
  Description of Artificial Sequence: Synthetic oligonucleotide
  Antisense strand to SEQ ID NO: 1379712
aaaguccggagcuuccguc

SEQ ID NO: 1379714 - RNA, 19 nt, Artificial Sequence
  Description of Artificial Sequence: Synthetic oligonucleotide
  Sense strand starting at position 1393 of SEQ ID NO: 1242887
cccaguuauccucaccaga

SEQ ID NO: 1379715 - RNA, 19 nt, Artificial Sequence
  Description of Artificial Sequence: Synthetic oligonucleotide
  Antisense strand to SEQ ID NO: 1379714
ucuggugaggauaacuggg

SEQ ID NO: 1379716 - RNA, 19 nt, Artificial Sequence
  Description of Artificial Sequence: Synthetic oligonucleotide
  Sense strand starting at position 1473 of SEQ ID NO: 1242887
cucugacagcccuggagau

SEQ ID NO: 1379717 - RNA, 19 nt, Artificial Sequence
  Description of Artificial Sequence: Synthetic oligonucleotide
  Antisense strand to SEQ ID NO: 1379716
aucuccagggcugucagag

SEQ ID NO: 1379718 - RNA, 19 nt, Artificial Sequence
  Description of Artificial Sequence: Synthetic oligonucleotide
  Sense strand starting at position 1594 of SEQ ID NO: 1242887
ugggcaaucucccaaauuc

SEQ ID NO: 1379719 - RNA, 19 nt, Artificial Sequence
  Description of Artificial Sequence: Synthetic oligonucleotide
  Antisense strand to SEQ ID NO: 1379718
gaauuugggagauugccca

SEQ ID NO: 1379720 - RNA, 19 nt, Artificial Sequence
  Description of Artificial Sequence: Synthetic oligonucleotide
  Sense strand starting at position 1602 of SEQ ID NO: 1242887
cucccaaauuccuugggau

SEQ ID NO: 1379721 - RNA, 19 nt, Artificial Sequence
  Description of Artificial Sequence: Synthetic oligonucleotide
  Antisense strand to SEQ ID NO: 1379720
aucccaaggaauuugggag

SEQ ID NO: 1379722 - RNA, 19 nt, Artificial Sequence
  Description of Artificial Sequence: Synthetic oligonucleotide
  Sense strand starting at position 1603 of SEQ ID NO: 1242887
ucccaaauuccuugggauu

SEQ ID NO: 1379723 - RNA, 19 nt, Artificial Sequence
  Description of Artificial Sequence: Synthetic oligonucleotide
  Antisense strand to SEQ ID NO: 1379722
aaucccaaggaauuuggga

SEQ ID NO: 1379724 - RNA, 19 nt, Artificial Sequence
  Description of Artificial Sequence: Synthetic oligonucleotide
  Sense strand starting at position 1604 of SEQ ID NO: 1242887
cccaaauuccuugggauuc

SEQ ID NO: 1379725 - RNA, 19 nt, Artificial Sequence
  Description of Artificial Sequence: Synthetic oligonucleotide
  Antisense strand to SEQ ID NO: 1379724
gaaucccaaggaauuuggg

SEQ ID NO: 1379726 - RNA, 19 nt, Artificial Sequence
  Description of Artificial Sequence: Synthetic oligonucleotide
  Sense strand starting at position 1605 of SEQ ID NO: 1242887
ccaaauuccuugggauucu

SEQ ID NO: 1379727 - RNA, 19 nt, Artificial Sequence
  Description of Artificial Sequence: Synthetic oligonucleotide
  Antisense strand to SEQ ID NO: 1379726
agaaucccaaggaauuugg

SEQ ID NO: 1379728 - RNA, 19 nt, Artificial Sequence
  Description of Artificial Sequence: Synthetic oligonucleotide
  Sense strand starting at position 1755 of SEQ ID NO: 1242887
aagaucccauguggaauua

SEQ ID NO: 1379729 - RNA, 19 nt, Artificial Sequence
  Description of Artificial Sequence: Synthetic oligonucleotide
  Antisense strand to SEQ ID NO: 1379728
uaauuccacaugggaucuu

SEQ ID NO: 1379730 - RNA, 19 nt, Artificial Sequence
  Description of Artificial Sequence: Synthetic oligonucleotide
  Sense strand starting at position 1782 of SEQ ID NO: 1242887
gagggucucuucccaguca

SEQ ID NO: 1379731 - RNA, 19 nt, Artificial Sequence
  Description of Artificial Sequence: Synthetic oligonucleotide
  Antisense strand to SEQ ID NO: 1379730
ugacugggaagagacccuc

SEQ ID NO: 1379732 - RNA, 19 nt, Artificial Sequence
  Description of Artificial Sequence: Synthetic oligonucleotide
  Sense strand starting at position 1989 of SEQ ID NO: 1242887
uggagaugaguuuggagua

SEQ ID NO: 1379733 - RNA, 19 nt, Artificial Sequence
  Description of Artificial Sequence: Synthetic oligonucleotide
  Antisense strand to SEQ ID NO: 1379732
uacuccaaacucaucucca

SEQ ID NO: 1379734 - RNA, 19 nt, Artificial Sequence
  Description of Artificial Sequence: Synthetic oligonucleotide
  Sense strand starting at position 2787 of SEQ ID NO: 1242887
gcgcgacccucgggagaua

SEQ ID NO: 1379735 - RNA, 19 nt, Artificial Sequence
  Description of Artificial Sequence: Synthetic oligonucleotide
  Antisense strand to SEQ ID NO: 1379734
uaucucccgagggucgcgc

SEQ ID NO: 1379736 - RNA, 19 nt, Artificial Sequence
  Description of Artificial Sequence: Synthetic oligonucleotide
  Sense strand starting at position 3256 of SEQ ID NO: 1242887
ccgaggaugccgggaguua

SEQ ID NO: 1379737 - RNA, 19 nt, Artificial Sequence
  Description of Artificial Sequence: Synthetic oligonucleotide
  Antisense strand to SEQ ID NO: 1379736
uaacucccggcauccucgg

SEQ ID NO: 1379738 - RNA, 19 nt, Artificial Sequence
  Description of Artificial Sequence: Synthetic oligonucleotide
  Sense strand starting at position 3542 of SEQ ID NO: 1242887
cugacuaguagucgaucuu

SEQ ID NO: 1379739 - RNA, 19 nt, Artificial Sequence
  Description of Artificial Sequence: Synthetic oligonucleotide
  Antisense strand to SEQ ID NO: 1379738
aagaucgacuacuagucag

SEQ ID NO: 1379740 - RNA, 19 nt, Artificial Sequence
  Description of Artificial Sequence: Synthetic oligonucleotide
  Sense strand starting at position 3543 of SEQ ID NO: 1242887
ugacuaguagucgaucuua

SEQ ID NO: 1379741 - RNA, 19 nt, Artificial Sequence
  Description of Artificial Sequence: Synthetic oligonucleotide
  Antisense strand to SEQ ID NO: 1379740
uaagaucgacuacuaguca

SEQ ID NO: 1379742 - RNA, 19 nt, Artificial Sequence
  Description of Artificial Sequence: Synthetic oligonucleotide
  Sense strand starting at position 3566 of SEQ ID NO: 1242887
gugcgaugggauuaguagu

SEQ ID NO: 1379743 - RNA, 19 nt, Artificial Sequence
  Description of Artificial Sequence: Synthetic oligonucleotide
  Antisense strand to SEQ ID NO: 1379742
acuacuaaucccaucgcac

SEQ ID NO: 1379744 - RNA, 19 nt, Artificial Sequence
  Description of Artificial Sequence: Synthetic oligonucleotide
  Sense strand starting at position 3591 of SEQ ID NO: 1242887
gccuuccaguguuccuuaa

SEQ ID NO: 1379745 - RNA, 19 nt, Artificial Sequence
  Description of Artificial Sequence: Synthetic oligonucleotide
  Antisense strand to SEQ ID NO: 1379744
uuaaggaacacuggaaggc

SEQ ID NO: 1379746 - RNA, 19 nt, Artificial Sequence
  Description of Artificial Sequence: Synthetic oligonucleotide
  Sense strand starting at position 3593 of SEQ ID NO: 1242887
cuuccaguguuccuuaaga

SEQ ID NO: 1379747 - RNA, 19 nt, Artificial Sequence
  Description of Artificial Sequence: Synthetic oligonucleotide
  Antisense strand to SEQ ID NO: 1379746
ucuuaaggaacacuggaag

SEQ ID NO: 1379748 - RNA, 19 nt, Artificial Sequence
  Description of Artificial Sequence: Synthetic oligonucleotide
  Sense strand starting at position 3595 of SEQ ID NO: 1242887
uccaguguuccuuaagaau

SEQ ID NO: 1379749 - RNA, 19 nt, Artificial Sequence
  Description of Artificial Sequence: Synthetic oligonucleotide
  Antisense strand to SEQ ID NO: 1379748
auucuuaaggaacacugga

SEQ ID NO: 1379750 - RNA, 19 nt, Artificial Sequence
  Description of Artificial Sequence: Synthetic oligonucleotide
  Sense strand starting at position 3706 of SEQ ID NO: 1242887
ccgccuguggucucgaaau

SEQ ID NO: 1379751 - RNA, 19 nt, Artificial Sequence
  Description of Artificial Sequence: Synthetic oligonucleotide
  Antisense strand to SEQ ID NO: 1379750
auuucgagaccacaggcgg

SEQ ID NO: 1379752 - RNA, 19 nt, Artificial Sequence
  Description of Artificial Sequence: Synthetic oligonucleotide
  Sense strand starting at position 3889 of SEQ ID NO: 1242887
gccucuucccugcggaaau

SEQ ID NO: 1379753 - RNA, 19 nt, Artificial Sequence
  Description of Artificial Sequence: Synthetic oligonucleotide
  Antisense strand to SEQ ID NO: 1379752
auuuccgcagggaagaggc

SEQ ID NO: 1379754 - RNA, 19 nt, Artificial Sequence
  Description of Artificial Sequence: Synthetic oligonucleotide
  Sense strand starting at position 3973 of SEQ ID NO: 1242887
aaauguaguuccuugccga

SEQ ID NO: 1379755 - RNA, 19 nt, Artificial Sequence
  Description of Artificial Sequence: Synthetic oligonucleotide
  Antisense strand to SEQ ID NO: 1379754
ucggcaaggaacuacauuu

SEQ ID NO: 1379756 - RNA, 19 nt, Artificial Sequence
  Description of Artificial Sequence: Synthetic oligonucleotide
  Sense strand starting at position 82 of SEQ ID NO: 1242888
cucccaaauuccuugggau

SEQ ID NO: 1379757 - RNA, 19 nt, Artificial Sequence
  Description of Artificial Sequence: Synthetic oligonucleotide
  Antisense strand to SEQ ID NO: 1379756
aucccaaggaauuugggag

SEQ ID NO: 1379758 - RNA, 19 nt, Artificial Sequence
  Description of Artificial Sequence: Synthetic oligonucleotide
  Sense strand starting at position 83 of SEQ ID NO: 1242888
ucccaaauuccuugggauu

SEQ ID NO: 1379759 - RNA, 19 nt, Artificial Sequence
  Description of Artificial Sequence: Synthetic oligonucleotide
  Antisense strand to SEQ ID NO: 1379758
aaucccaaggaauuuggga

SEQ ID NO: 1379760 - RNA, 19 nt, Artificial Sequence
  Description of Artificial Sequence: Synthetic oligonucleotide
  Sense strand starting at position 84 of SEQ ID NO: 1242888
cccaaauuccuugggauuc

SEQ ID NO: 1379761 - RNA, 19 nt, Artificial Sequence
  Description of Artificial Sequence: Synthetic oligonucleotide
  Antisense strand to SEQ ID NO: 1379760
gaaucccaaggaauuuggg

SEQ ID NO: 1379762 - RNA, 19 nt, Artificial Sequence
  Description of Artificial Sequence: Synthetic oligonucleotide
  Sense strand starting at position 262 of SEQ ID NO: 1242888
gagggucucuucccaguca

SEQ ID NO: 1379763 - RNA, 19 nt, Artificial Sequence
  Description of Artificial Sequence: Synthetic oligonucleotide
  Antisense strand to SEQ ID NO: 1379762
ugacugggaagagacccuc

SEQ ID NO: 1379764 - RNA, 19 nt, Artificial Sequence
  Description of Artificial Sequence: Synthetic oligonucleotide
  Sense strand starting at position 469 of SEQ ID NO: 1242888
uggagaugaguuuggagua

SEQ ID NO: 1379765 - RNA, 19 nt, Artificial Sequence
  Description of Artificial Sequence: Synthetic oligonucleotide
  Antisense strand to SEQ ID NO: 1379764
uacuccaaacucaucucca

SEQ ID NO: 1379766 - RNA, 19 nt, Artificial Sequence
  Description of Artificial Sequence: Synthetic oligonucleotide
  Sense strand starting at position 1736 of SEQ ID NO: 1242888
ccgaggaugccgggaguua

SEQ ID NO: 1379767 - RNA, 19 nt, Artificial Sequence
  Description of Artificial Sequence: Synthetic oligonucleotide
  Antisense strand to SEQ ID NO: 1379766
uaacucccggcauccucgg

SEQ ID NO: 1379768 - RNA, 19 nt, Artificial Sequence
  Description of Artificial Sequence: Synthetic oligonucleotide
  Sense strand starting at position 2022 of SEQ ID NO: 1242888
cugacuaguagucgaucuu

SEQ ID NO: 1379769 - RNA, 19 nt, Artificial Sequence
  Description of Artificial Sequence: Synthetic oligonucleotide
  Antisense strand to SEQ ID NO: 1379768
aagaucgacuacuagucag

SEQ ID NO: 1379770 - RNA, 19 nt, Artificial Sequence
  Description of Artificial Sequence: Synthetic oligonucleotide
  Sense strand starting at position 2023 of SEQ ID NO: 1242888
ugacuaguagucgaucuua

SEQ ID NO: 1379771 - RNA, 19 nt, Artificial Sequence
  Description of Artificial Sequence: Synthetic oligonucleotide
  Antisense strand to SEQ ID NO: 1379770
uaagaucgacuacuaguca

SEQ ID NO: 1379772 - RNA, 19 nt, Artificial Sequence
  Description of Artificial Sequence: Synthetic oligonucleotide
  Sense strand starting at position 2046 of SEQ ID NO: 1242888
gugcgaugggauuaguagu

SEQ ID NO: 1379773 - RNA, 19 nt, Artificial Sequence
  Description of Artificial Sequence: Synthetic oligonucleotide
  Antisense strand to SEQ ID NO: 1379772
acuacuaaucccaucgcac

SEQ ID NO: 1379774 - RNA, 19 nt, Artificial Sequence
  Description of Artificial Sequence: Synthetic oligonucleotide
  Sense strand starting at position 2071 of SEQ ID NO: 1242888
gccuuccaguguuccuuaa

SEQ ID NO: 1379775 - RNA, 19 nt, Artificial Sequence
  Description of Artificial Sequence: Synthetic oligonucleotide
  Antisense strand to SEQ ID NO: 1379774
uuaaggaacacuggaaggc

SEQ ID NO: 1379776 - RNA, 19 nt, Artificial Sequence
  Description of Artificial Sequence: Synthetic oligonucleotide
  Sense strand starting at position 2073 of SEQ ID NO: 1242888
cuuccaguguuccuuaaga

SEQ ID NO: 1379777 - RNA, 19 nt, Artificial Sequence
  Description of Artificial Sequence: Synthetic oligonucleotide
  Antisense strand to SEQ ID NO: 1379776
ucuuaaggaacacuggaag

SEQ ID NO: 1379778 - RNA, 19 nt, Artificial Sequence
  Description of Artificial Sequence: Synthetic oligonucleotide
  Sense strand starting at position 2075 of SEQ ID NO: 1242888
uccaguguuccuuaagaau

SEQ ID NO: 1379779 - RNA, 19 nt, Artificial Sequence
  Description of Artificial Sequence: Synthetic oligonucleotide
  Antisense strand to SEQ ID NO: 1379778
auucuuaaggaacacugga

SEQ ID NO: 1379780 - RNA, 19 nt, Artificial Sequence
  Description of Artificial Sequence: Synthetic oligonucleotide
  Sense strand starting at position 2186 of SEQ ID NO: 1242888
ccgccuguggucucgaaau

SEQ ID NO: 1379781 - RNA, 19 nt, Artificial Sequence
  Description of Artificial Sequence: Synthetic oligonucleotide
  Antisense strand to SEQ ID NO: 1379780
auuucgagaccacaggcgg

SEQ ID NO: 1379782 - RNA, 19 nt, Artificial Sequence
  Description of Artificial Sequence: Synthetic oligonucleotide
  Sense strand starting at position 2369 of SEQ ID NO: 1242888
gccucuucccugcggaaau

SEQ ID NO: 1379783 - RNA, 19 nt, Artificial Sequence
  Description of Artificial Sequence: Synthetic oligonucleotide
  Antisense strand to SEQ ID NO: 1379782
auuuccgcagggaagaggc

SEQ ID NO: 1379784 - RNA, 19 nt, Artificial Sequence
  Description of Artificial Sequence: Synthetic oligonucleotide
  Sense strand starting at position 2453 of SEQ ID NO: 1242888
aaauguaguuccuugccga

SEQ ID NO: 1379785 - RNA, 19 nt, Artificial Sequence
  Description of Artificial Sequence: Synthetic oligonucleotide
  Antisense strand to SEQ ID NO: 1379784
ucggcaaggaacuacauuu

SEQ ID NO: 1379786 - RNA, 19 nt, Artificial Sequence
  Description of Artificial Sequence: Synthetic oligonucleotide
  Sense strand starting at position 2466 of SEQ ID NO: 1242888
ugccgaguccaacagagaa

SEQ ID NO: 1379787 - RNA, 19 nt, Artificial Sequence
  Description of Artificial Sequence: Synthetic oligonucleotide
  Antisense strand to SEQ ID NO: 1379786
uucucuguuggacucggca

SEQ ID NO: 1379788 - RNA, 19 nt, Artificial Sequence
  Description of Artificial Sequence: Synthetic oligonucleotide
  Sense strand starting at position 2483 of SEQ ID NO: 1242888
aaaggacgucgcuguugaa

SEQ ID NO: 1379789 - RNA, 19 nt, Artificial Sequence
  Description of Artificial Sequence: Synthetic oligonucleotide
  Antisense strand to SEQ ID NO: 1379788
uucaacagcgacguccuuu

SEQ ID NO: 1379790 - RNA, 19 nt, Artificial Sequence
  Description of Artificial Sequence: Synthetic oligonucleotide
  Sense strand starting at position 2595 of SEQ ID NO: 1242888
cgggaaauguagucccaag

SEQ ID NO: 1379791 - RNA, 19 nt, Artificial Sequence
  Description of Artificial Sequence: Synthetic oligonucleotide
  Antisense strand to SEQ ID NO: 1379790
cuugggacuacauuucccg

SEQ ID NO: 1379792 - RNA, 19 nt, Artificial Sequence
  Description of Artificial Sequence: Synthetic oligonucleotide
  Sense strand starting at position 2636 of SEQ ID NO: 1242888
aaggauuuaugucaccagu

SEQ ID NO: 1379793 - RNA, 19 nt, Artificial Sequence
  Description of Artificial Sequence: Synthetic oligonucleotide
  Antisense strand to SEQ ID NO: 1379792
acuggugacauaaauccuu

SEQ ID NO: 1379794 - RNA, 19 nt, Artificial Sequence
  Description of Artificial Sequence: Synthetic oligonucleotide
  Sense strand starting at position 2686 of SEQ ID NO: 1242888
cgggcgauccgggaauaaa

SEQ ID NO: 1379795 - RNA, 19 nt, Artificial Sequence
  Description of Artificial Sequence: Synthetic oligonucleotide
  Antisense strand to SEQ ID NO: 1379794
uuuauucccggaucgcccg

SEQ ID NO: 1379796 - RNA, 19 nt, Artificial Sequence
  Description of Artificial Sequence: Synthetic oligonucleotide
  Sense strand starting at position 2773 of SEQ ID NO: 1242888
gaaucagucuugucgaaca

SEQ ID NO: 1379797 - RNA, 19 nt, Artificial Sequence
  Description of Artificial Sequence: Synthetic oligonucleotide
  Antisense strand to SEQ ID NO: 1379796
uguucgacaagacugauuc

SEQ ID NO: 1379798 - RNA, 19 nt, Artificial Sequence
  Description of Artificial Sequence: Synthetic oligonucleotide
  Sense strand starting at position 2796 of SEQ ID NO: 1242888
ggcgugguucucgucgaga

SEQ ID NO: 1379799 - RNA, 19 nt, Artificial Sequence
  Description of Artificial Sequence: Synthetic oligonucleotide
  Antisense strand to SEQ ID NO: 1379798
ucucgacgagaaccacgcc

SEQ ID NO: 1379800 - RNA, 19 nt, Artificial Sequence
  Description of Artificial Sequence: Synthetic oligonucleotide
  Sense strand starting at position 2802 of SEQ ID NO: 1242888
guucucgucgagagugcau

SEQ ID NO: 1379801 - RNA, 19 nt, Artificial Sequence
  Description of Artificial Sequence: Synthetic oligonucleotide
  Antisense strand to SEQ ID NO: 1379800
augcacucucgacgagaac

SEQ ID NO: 1379802 - RNA, 19 nt, Artificial Sequence
  Description of Artificial Sequence: Synthetic oligonucleotide
  Sense strand starting at position 2825 of SEQ ID NO: 1242888
acucuuguucccuagaaag

SEQ ID NO: 1379803 - RNA, 19 nt, Artificial Sequence
  Description of Artificial Sequence: Synthetic oligonucleotide
  Antisense strand to SEQ ID NO: 1379802
cuuucuagggaacaagagu

SEQ ID NO: 1379804 - RNA, 19 nt, Artificial Sequence
  Description of Artificial Sequence: Synthetic oligonucleotide
  Sense strand starting at position 2871 of SEQ ID NO: 1242888
uccucagaccuccgggaau

SEQ ID NO: 1379805 - RNA, 19 nt, Artificial Sequence
  Description of Artificial Sequence: Synthetic oligonucleotide
  Antisense strand to SEQ ID NO: 1379804
auucccggaggucugagga

SEQ ID NO: 1379806 - RNA, 19 nt, Artificial Sequence
  Description of Artificial Sequence: Synthetic oligonucleotide
  Sense strand starting at position 2873 of SEQ ID NO: 1242888
cucagaccuccgggaauca

SEQ ID NO: 1379807 - RNA, 19 nt, Artificial Sequence
  Description of Artificial Sequence: Synthetic oligonucleotide
  Antisense strand to SEQ ID NO: 1379806
ugauucccggaggucugag

SEQ ID NO: 1379808 - RNA, 19 nt, Artificial Sequence
  Description of Artificial Sequence: Synthetic oligonucleotide
  Sense strand starting at position 2884 of SEQ ID NO: 1242888
gggaaucagugucuuacaa

SEQ ID NO: 1379809 - RNA, 19 nt, Artificial Sequence
  Description of Artificial Sequence: Synthetic oligonucleotide
  Antisense strand to SEQ ID NO: 1379808
uuguaagacacugauuccc

SEQ ID NO: 1379810 - RNA, 19 nt, Artificial Sequence
  Description of Artificial Sequence: Synthetic oligonucleotide
  Sense strand starting at position 2886 of SEQ ID NO: 1242888
gaaucagugucuuacaaga

SEQ ID NO: 1379811 - RNA, 19 nt, Artificial Sequence
  Description of Artificial Sequence: Synthetic oligonucleotide
  Antisense strand to SEQ ID NO: 1379810
ucuuguaagacacugauuc

SEQ ID NO: 1379812 - RNA, 19 nt, Artificial Sequence
  Description of Artificial Sequence: Synthetic oligonucleotide
  Sense strand starting at position 3033 of SEQ ID NO: 1242888
cacaguugugaguguuaaa

SEQ ID NO: 1379813 - RNA, 19 nt, Artificial Sequence
  Description of Artificial Sequence: Synthetic oligonucleotide
  Antisense strand to SEQ ID NO: 1379812
uuuaacacucacaacugug

SEQ ID NO: 1379814 - RNA, 19 nt, Artificial Sequence
  Description of Artificial Sequence: Synthetic oligonucleotide
  Sense strand starting at position 3040 of SEQ ID NO: 1242888
gugaguguuaaacaagcca

SEQ ID NO: 1379815 - RNA, 19 nt, Artificial Sequence
  Description of Artificial Sequence: Synthetic oligonucleotide
  Antisense strand to SEQ ID NO: 1379814
uggcuuguuuaacacucac

SEQ ID NO: 1379816 - RNA, 19 nt, Artificial Sequence
  Description of Artificial Sequence: Synthetic oligonucleotide
  Sense strand starting at position 3059 of SEQ ID NO: 1242888
auguucuugucaccaaagu

SEQ ID NO: 1379817 - RNA, 19 nt, Artificial Sequence
  Description of Artificial Sequence: Synthetic oligonucleotide
  Antisense strand to SEQ ID NO: 1379816
acuuuggugacaagaacau

SEQ ID NO: 1379818 - RNA, 19 nt, Artificial Sequence
  Description of Artificial Sequence: Synthetic oligonucleotide
  Sense strand starting at position 3102 of SEQ ID NO: 1242888
ggugguagaucccuuucua

SEQ ID NO: 1379819 - RNA, 19 nt, Artificial Sequence
  Description of Artificial Sequence: Synthetic oligonucleotide
  Antisense strand to SEQ ID NO: 1379818
uagaaagggaucuaccacc

SEQ ID NO: 1379820 - RNA, 19 nt, Artificial Sequence
  Description of Artificial Sequence: Synthetic oligonucleotide
  Sense strand starting at position 3158 of SEQ ID NO: 1242888
auccaugaugccggacaga

SEQ ID NO: 1379821 - RNA, 19 nt, Artificial Sequence
  Description of Artificial Sequence: Synthetic oligonucleotide
  Antisense strand to SEQ ID NO: 1379820
ucuguccggcaucauggau

SEQ ID NO: 1379822 - RNA, 19 nt, Artificial Sequence
  Description of Artificial Sequence: Synthetic oligonucleotide
  Sense strand starting at position 3208 of SEQ ID NO: 1242888
aggcuccucccagauugaa

SEQ ID NO: 1379823 - RNA, 19 nt, Artificial Sequence
  Description of Artificial Sequence: Synthetic oligonucleotide
  Antisense strand to SEQ ID NO: 1379822
uucaaucugggaggagccu

SEQ ID NO: 1379824 - RNA, 19 nt, Artificial Sequence
  Description of Artificial Sequence: Synthetic oligonucleotide
  Sense strand starting at position 3298 of SEQ ID NO: 1242888
ucuccauucgacugaggua

SEQ ID NO: 1379825 - RNA, 19 nt, Artificial Sequence
  Description of Artificial Sequence: Synthetic oligonucleotide
  Antisense strand to SEQ ID NO: 1379824
uaccucagucgaauggaga

SEQ ID NO: 1379826 - RNA, 19 nt, Artificial Sequence
  Description of Artificial Sequence: Synthetic oligonucleotide
  Sense strand starting at position 3579 of SEQ ID NO: 1242888
cucccucagccuugugaau

SEQ ID NO: 1379827 - RNA, 19 nt, Artificial Sequence
  Description of Artificial Sequence: Synthetic oligonucleotide
  Antisense strand to SEQ ID NO: 1379826
auucacaaggcugagggag

SEQ ID NO: 1379828 - RNA, 19 nt, Artificial Sequence
  Description of Artificial Sequence: Synthetic oligonucleotide
  Sense strand starting at position 3590 of SEQ ID NO: 1242888
uugugaauaccugggacuu

SEQ ID NO: 1379829 - RNA, 19 nt, Artificial Sequence
  Description of Artificial Sequence: Synthetic oligonucleotide
  Antisense strand to SEQ ID NO: 1379828
aagucccagguauucacaa

SEQ ID NO: 1379830 - RNA, 19 nt, Artificial Sequence
  Description of Artificial Sequence: Synthetic oligonucleotide
  Sense strand starting at position 3591 of SEQ ID NO: 1242888
ugugaauaccugggacuuc

SEQ ID NO: 1379831 - RNA, 19 nt, Artificial Sequence
  Description of Artificial Sequence: Synthetic oligonucleotide
  Antisense strand to SEQ ID NO: 1379830
gaagucccagguauucaca

SEQ ID NO: 1379832 - RNA, 19 nt, Artificial Sequence
  Description of Artificial Sequence: Synthetic oligonucleotide
  Sense strand starting at position 3853 of SEQ ID NO: 1242888
gucuucuguguuuggcaga

SEQ ID NO: 1379833 - RNA, 19 nt, Artificial Sequence
  Description of Artificial Sequence: Synthetic oligonucleotide
  Antisense strand to SEQ ID NO: 1379832
ucugccaaacacagaagac

SEQ ID NO: 1379834 - RNA, 19 nt, Artificial Sequence
  Description of Artificial Sequence: Synthetic oligonucleotide
  Sense strand starting at position 3885 of SEQ ID NO: 1242888
ggacuuguugguugugguu

SEQ ID NO: 1379835 - RNA, 19 nt, Artificial Sequence
  Description of Artificial Sequence: Synthetic oligonucleotide
  Antisense strand to SEQ ID NO: 1379834
aaccacaaccaacaagucc

SEQ ID NO: 1379836 - RNA, 19 nt, Artificial Sequence
  Description of Artificial Sequence: Synthetic oligonucleotide
  Sense strand starting at position 39 of SEQ ID NO: 1242889
ggagcaggcucaccugauu

SEQ ID NO: 1379837 - RNA, 19 nt, Artificial Sequence
  Description of Artificial Sequence: Synthetic oligonucleotide
  Antisense strand to SEQ ID NO: 1379836
aaucaggugagccugcucc

SEQ ID NO: 1379838 - RNA, 19 nt, Artificial Sequence
  Description of Artificial Sequence: Synthetic oligonucleotide
  Sense strand starting at position 311 of SEQ ID NO: 1242889
cgagcuuagguguacaaau

SEQ ID NO: 1379839 - RNA, 19 nt, Artificial Sequence
  Description of Artificial Sequence: Synthetic oligonucleotide
  Antisense strand to SEQ ID NO: 1379838
auuuguacaccuaagcucg

SEQ ID NO: 1379840 - RNA, 19 nt, Artificial Sequence
  Description of Artificial Sequence: Synthetic oligonucleotide
  Sense strand starting at position 328 of SEQ ID NO: 1242889
augcuuguggccugaggaa

SEQ ID NO: 1379841 - RNA, 19 nt, Artificial Sequence
  Description of Artificial Sequence: Synthetic oligonucleotide
  Antisense strand to SEQ ID NO: 1379840
uuccucaggccacaagcau

SEQ ID NO: 1379842 - RNA, 19 nt, Artificial Sequence
  Description of Artificial Sequence: Synthetic oligonucleotide
  Sense strand starting at position 427 of SEQ ID NO: 1242889
aaaucaggcucuccggaaa

SEQ ID NO: 1379843 - RNA, 19 nt, Artificial Sequence
  Description of Artificial Sequence: Synthetic oligonucleotide
  Antisense strand to SEQ ID NO: 1379842
uuuccggagagccugauuu

SEQ ID NO: 1379844 - RNA, 19 nt, Artificial Sequence
  Description of Artificial Sequence: Synthetic oligonucleotide
  Sense strand starting at position 853 of SEQ ID NO: 1242889
gccgguuaguagaaaguga

SEQ ID NO: 1379845 - RNA, 19 nt, Artificial Sequence
  Description of Artificial Sequence: Synthetic oligonucleotide
  Antisense strand to SEQ ID NO: 1379844
ucacuuucuacuaaccggc

SEQ ID NO: 1379846 - RNA, 19 nt, Artificial Sequence
  Description of Artificial Sequence: Synthetic oligonucleotide
  Sense strand starting at position 866 of SEQ ID NO: 1242889
aagugacuacaggguuaau

SEQ ID NO: 1379847 - RNA, 19 nt, Artificial Sequence
  Description of Artificial Sequence: Synthetic oligonucleotide
  Antisense strand to SEQ ID NO: 1379846
auuaacccuguagucacuu

SEQ ID NO: 1379848 - RNA, 19 nt, Artificial Sequence
  Description of Artificial Sequence: Synthetic oligonucleotide
  Sense strand starting at position 886 of SEQ ID NO: 1242889
aggcgggagcguuaaugua

SEQ ID NO: 1379849 - RNA, 19 nt, Artificial Sequence
  Description of Artificial Sequence: Synthetic oligonucleotide
  Antisense strand to SEQ ID NO: 1379848
uacauuaacgcucccgccu

SEQ ID NO: 1379850 - RNA, 19 nt, Artificial Sequence
  Description of Artificial Sequence: Synthetic oligonucleotide
  Sense strand starting at position 909 of SEQ ID NO: 1242889
uuucuuugucagggaccau

SEQ ID NO: 1379851 - RNA, 19 nt, Artificial Sequence
  Description of Artificial Sequence: Synthetic oligonucleotide
  Antisense strand to SEQ ID NO: 1379850
auggucccugacaaagaaa

SEQ ID NO: 1379852 - RNA, 19 nt, Artificial Sequence
  Description of Artificial Sequence: Synthetic oligonucleotide
  Sense strand starting at position 1013 of SEQ ID NO: 1242889
gggagaugucccgggugcu

SEQ ID NO: 1379853 - RNA, 19 nt, Artificial Sequence
  Description of Artificial Sequence: Synthetic oligonucleotide
  Antisense strand to SEQ ID NO: 1379852
agcacccgggacaucuccc

SEQ ID NO: 1379854 - RNA, 19 nt, Artificial Sequence
  Description of Artificial Sequence: Synthetic oligonucleotide
  Sense strand starting at position 1014 of SEQ ID NO: 1242889
ggagaugucccgggugcuu

SEQ ID NO: 1379855 - RNA, 19 nt, Artificial Sequence
  Description of Artificial Sequence: Synthetic oligonucleotide
  Antisense strand to SEQ ID NO: 1379854
aagcacccgggacaucucc

SEQ ID NO: 1379856 - RNA, 19 nt, Artificial Sequence
  Description of Artificial Sequence: Synthetic oligonucleotide
  Sense strand starting at position 1220 of SEQ ID NO: 1242889
gaaagugugcguccucuuu

SEQ ID NO: 1379857 - RNA, 19 nt, Artificial Sequence
  Description of Artificial Sequence: Synthetic oligonucleotide
  Antisense strand to SEQ ID NO: 1379856
aaagaggacgcacacuuuc

SEQ ID NO: 1379858 - RNA, 19 nt, Artificial Sequence
  Description of Artificial Sequence: Synthetic oligonucleotide
  Sense strand starting at position 1224 of SEQ ID NO: 1242889
gugugcguccucuuugaag

SEQ ID NO: 1379859 - RNA, 19 nt, Artificial Sequence
  Description of Artificial Sequence: Synthetic oligonucleotide
  Antisense strand to SEQ ID NO: 1379858
cuucaaagaggacgcacac

SEQ ID NO: 1379860 - RNA, 19 nt, Artificial Sequence
  Description of Artificial Sequence: Synthetic oligonucleotide
  Sense strand starting at position 1579 of SEQ ID NO: 1242889
uucuuaaagguuuguguac

SEQ ID NO: 1379861 - RNA, 19 nt, Artificial Sequence
  Description of Artificial Sequence: Synthetic oligonucleotide
  Antisense strand to SEQ ID NO: 1379860
guacacaaaccuuuaagaa

SEQ ID NO: 1379862 - RNA, 19 nt, Artificial Sequence
  Description of Artificial Sequence: Synthetic oligonucleotide
  Sense strand starting at position 1580 of SEQ ID NO: 1242889
ucuuaaagguuuguguaca

SEQ ID NO: 1379863 - RNA, 19 nt, Artificial Sequence
  Description of Artificial Sequence: Synthetic oligonucleotide
  Antisense strand to SEQ ID NO: 1379862
uguacacaaaccuuuaaga

SEQ ID NO: 1379864 - RNA, 19 nt, Artificial Sequence
  Description of Artificial Sequence: Synthetic oligonucleotide
  Sense strand starting at position 1606 of SEQ ID NO: 1242889
ucacacuacucgccaguua

SEQ ID NO: 1379865 - RNA, 19 nt, Artificial Sequence
  Description of Artificial Sequence: Synthetic oligonucleotide
  Antisense strand to SEQ ID NO: 1379864
uaacuggcgaguaguguga

SEQ ID NO: 1379866 - RNA, 19 nt, Artificial Sequence
  Description of Artificial Sequence: Synthetic oligonucleotide
  Sense strand starting at position 1617 of SEQ ID NO: 1242889
gccaguuaauguucccaua

SEQ ID NO: 1379867 - RNA, 19 nt, Artificial Sequence
  Description of Artificial Sequence: Synthetic oligonucleotide
  Antisense strand to SEQ ID NO: 1379866
uaugggaacauuaacuggc

SEQ ID NO: 1379868 - RNA, 19 nt, Artificial Sequence
  Description of Artificial Sequence: Synthetic oligonucleotide
  Sense strand starting at position 1631 of SEQ ID NO: 1242889
ccauaucuuccgggcuaac

SEQ ID NO: 1379869 - RNA, 19 nt, Artificial Sequence
  Description of Artificial Sequence: Synthetic oligonucleotide
  Antisense strand to SEQ ID NO: 1379868
guuagcccggaagauaugg

SEQ ID NO: 1379870 - RNA, 19 nt, Artificial Sequence
  Description of Artificial Sequence: Synthetic oligonucleotide
  Sense strand starting at position 1645 of SEQ ID NO: 1242889
cuaacaguuucucccggaa

SEQ ID NO: 1379871 - RNA, 19 nt, Artificial Sequence
  Description of Artificial Sequence: Synthetic oligonucleotide
  Antisense strand to SEQ ID NO: 1379870
uuccgggagaaacuguuag

SEQ ID NO: 1379872 - RNA, 19 nt, Artificial Sequence
  Description of Artificial Sequence: Synthetic oligonucleotide
  Sense strand starting at position 1661 of SEQ ID NO: 1242889
gaauuugugccacguguuu

SEQ ID NO: 1379873 - RNA, 19 nt, Artificial Sequence
  Description of Artificial Sequence: Synthetic oligonucleotide
  Antisense strand to SEQ ID NO: 1379872
aaacacguggcacaaauuc

SEQ ID NO: 1379874 - RNA, 19 nt, Artificial Sequence
  Description of Artificial Sequence: Synthetic oligonucleotide
  Sense strand starting at position 2202 of SEQ ID NO: 1242889
gguggaucuuggcuccgaa

SEQ ID NO: 1379875 - RNA, 19 nt, Artificial Sequence
  Description of Artificial Sequence: Synthetic oligonucleotide
  Antisense strand to SEQ ID NO: 1379874
uucggagccaagauccacc

SEQ ID NO: 1379876 - RNA, 19 nt, Artificial Sequence
  Description of Artificial Sequence: Synthetic oligonucleotide
  Sense strand starting at position 2275 of SEQ ID NO: 1242889
ggucuacugagcuguucga

SEQ ID NO: 1379877 - RNA, 19 nt, Artificial Sequence
  Description of Artificial Sequence: Synthetic oligonucleotide
  Antisense strand to SEQ ID NO: 1379876
ucgaacagcucaguagacc

SEQ ID NO: 1379878 - RNA, 19 nt, Artificial Sequence
  Description of Artificial Sequence: Synthetic oligonucleotide
  Sense strand starting at position 2417 of SEQ ID NO: 1242889
aauacuuuccuugagcgga

SEQ ID NO: 1379879 - RNA, 19 nt, Artificial Sequence
  Description of Artificial Sequence: Synthetic oligonucleotide
  Antisense strand to SEQ ID NO: 1379878
uccgcucaaggaaaguauu

SEQ ID NO: 1379880 - RNA, 19 nt, Artificial Sequence
  Description of Artificial Sequence: Synthetic oligonucleotide
  Sense strand starting at position 2677 of SEQ ID NO: 1242889
cguggcucgucccuggaaa

SEQ ID NO: 1379881 - RNA, 19 nt, Artificial Sequence
  Description of Artificial Sequence: Synthetic oligonucleotide
  Antisense strand to SEQ ID NO: 1379880
uuuccagggacgagccacg

SEQ ID NO: 1379882 - RNA, 19 nt, Artificial Sequence
  Description of Artificial Sequence: Synthetic oligonucleotide
  Sense strand starting at position 2679 of SEQ ID NO: 1242889
uggcucgucccuggaaaca

SEQ ID NO: 1379883 - RNA, 19 nt, Artificial Sequence
  Description of Artificial Sequence: Synthetic oligonucleotide
  Antisense strand to SEQ ID NO: 1379882
uguuuccagggacgagcca

SEQ ID NO: 1379884 - RNA, 19 nt, Artificial Sequence
  Description of Artificial Sequence: Synthetic oligonucleotide
  Sense strand starting at position 2703 of SEQ ID NO: 1242889
agaaguuguuaggucggua

SEQ ID NO: 1379885 - RNA, 19 nt, Artificial Sequence
  Description of Artificial Sequence: Synthetic oligonucleotide
  Antisense strand to SEQ ID NO: 1379884
uaccgaccuaacaacuucu

SEQ ID NO: 1379886 - RNA, 19 nt, Artificial Sequence
  Description of Artificial Sequence: Synthetic oligonucleotide
  Sense strand starting at position 2707 of SEQ ID NO: 1242889
guuguuaggucgguaccua

SEQ ID NO: 1379887 - RNA, 19 nt, Artificial Sequence
  Description of Artificial Sequence: Synthetic oligonucleotide
  Antisense strand to SEQ ID NO: 1379886
uagguaccgaccuaacaac

SEQ ID NO: 1379888 - RNA, 19 nt, Artificial Sequence
  Description of Artificial Sequence: Synthetic oligonucleotide
  Sense strand starting at position 2708 of SEQ ID NO: 1242889
uuguuaggucgguaccuaa

SEQ ID NO: 1379889 - RNA, 19 nt, Artificial Sequence
  Description of Artificial Sequence: Synthetic oligonucleotide
  Antisense strand to SEQ ID NO: 1379888
uuagguaccgaccuaacaa

SEQ ID NO: 1379890 - RNA, 19 nt, Artificial Sequence
  Description of Artificial Sequence: Synthetic oligonucleotide
  Sense strand starting at position 2845 of SEQ ID NO: 1242889
cgugaaagaacacguaaga

SEQ ID NO: 1379891 - RNA, 19 nt, Artificial Sequence
  Description of Artificial Sequence: Synthetic oligonucleotide
  Antisense strand to SEQ ID NO: 1379890
ucuuacguguucuuucacg

SEQ ID NO: 1379892 - RNA, 19 nt, Artificial Sequence
  Description of Artificial Sequence: Synthetic oligonucleotide
  Sense strand starting at position 2955 of SEQ ID NO: 1242889
aguacuagugagugugaga

SEQ ID NO: 1379893 - RNA, 19 nt, Artificial Sequence
  Description of Artificial Sequence: Synthetic oligonucleotide
  Antisense strand to SEQ ID NO: 1379892
ucucacacucacuaguacu

SEQ ID NO: 1379894 - RNA, 19 nt, Artificial Sequence
  Description of Artificial Sequence: Synthetic oligonucleotide
  Sense strand starting at position 3220 of SEQ ID NO: 1242889
guggcuggcucccuauuau

SEQ ID NO: 1379895 - RNA, 19 nt, Artificial Sequence
  Description of Artificial Sequence: Synthetic oligonucleotide
  Antisense strand to SEQ ID NO: 1379894
auaauagggagccagccac

SEQ ID NO: 1379896 - RNA, 19 nt, Artificial Sequence
  Description of Artificial Sequence: Synthetic oligonucleotide
  Sense strand starting at position 3245 of SEQ ID NO: 1242889
acuugucaccugcagaguu

SEQ ID NO: 1379897 - RNA, 19 nt, Artificial Sequence
  Description of Artificial Sequence: Synthetic oligonucleotide
  Antisense strand to SEQ ID NO: 1379896
aacucugcaggugacaagu

SEQ ID NO: 1379898 - RNA, 19 nt, Artificial Sequence
  Description of Artificial Sequence: Synthetic oligonucleotide
  Sense strand starting at position 3421 of SEQ ID NO: 1242889
ucauccugcccagagauaa

SEQ ID NO: 1379899 - RNA, 19 nt, Artificial Sequence
  Description of Artificial Sequence: Synthetic oligonucleotide
  Antisense strand to SEQ ID NO: 1379898
uuaucucugggcaggauga

SEQ ID NO: 1379900 - RNA, 19 nt, Artificial Sequence
  Description of Artificial Sequence: Synthetic oligonucleotide
  Sense strand starting at position 3454 of SEQ ID NO: 1242889
uccuguuacuauccagacu

SEQ ID NO: 1379901 - RNA, 19 nt, Artificial Sequence
  Description of Artificial Sequence: Synthetic oligonucleotide
  Antisense strand to SEQ ID NO: 1379900
agucuggauaguaacagga

SEQ ID NO: 1379902 - RNA, 19 nt, Artificial Sequence
  Description of Artificial Sequence: Synthetic oligonucleotide
  Sense strand starting at position 3472 of SEQ ID NO: 1242889
ugugguuuggcguaaguac

SEQ ID NO: 1379903 - RNA, 19 nt, Artificial Sequence
  Description of Artificial Sequence: Synthetic oligonucleotide
  Antisense strand to SEQ ID NO: 1379902
guacuuacgccaaaccaca

SEQ ID NO: 1379904 - RNA, 19 nt, Artificial Sequence
  Description of Artificial Sequence: Synthetic oligonucleotide
  Sense strand starting at position 3473 of SEQ ID NO: 1242889
gugguuuggcguaaguaca

SEQ ID NO: 1379905 - RNA, 19 nt, Artificial Sequence
  Description of Artificial Sequence: Synthetic oligonucleotide
  Antisense strand to SEQ ID NO: 1379904
uguacuuacgccaaaccac

SEQ ID NO: 1379906 - RNA, 19 nt, Artificial Sequence
  Description of Artificial Sequence: Synthetic oligonucleotide
  Sense strand starting at position 3480 of SEQ ID NO: 1242889
ggcguaaguacacaaguau

SEQ ID NO: 1379907 - RNA, 19 nt, Artificial Sequence
  Description of Artificial Sequence: Synthetic oligonucleotide
  Antisense strand to SEQ ID NO: 1379906
auacuuguguacuuacgcc

SEQ ID NO: 1379908 - RNA, 19 nt, Artificial Sequence
  Description of Artificial Sequence: Synthetic oligonucleotide
  Sense strand starting at position 3826 of SEQ ID NO: 1242889
aacaaaggucgagaguagu

SEQ ID NO: 1379909 - RNA, 19 nt, Artificial Sequence
  Description of Artificial Sequence: Synthetic oligonucleotide
  Antisense strand to SEQ ID NO: 1379908
acuacucucgaccuuuguu

SEQ ID NO: 1379910 - RNA, 19 nt, Artificial Sequence
  Description of Artificial Sequence: Synthetic oligonucleotide
  Sense strand starting at position 3837 of SEQ ID NO: 1242889
agaguagugccuuacuccu

SEQ ID NO: 1379911 - RNA, 19 nt, Artificial Sequence
  Description of Artificial Sequence: Synthetic oligonucleotide
  Antisense strand to SEQ ID NO: 1379910
aggaguaaggcacuacucu

SEQ ID NO: 1379912 - RNA, 19 nt, Artificial Sequence
  Description of Artificial Sequence: Synthetic oligonucleotide
  Sense strand starting at position 3894 of SEQ ID NO: 1242889
gcuuccuguuccucaugua

SEQ ID NO: 1379913 - RNA, 19 nt, Artificial Sequence
  Description of Artificial Sequence: Synthetic oligonucleotide
  Antisense strand to SEQ ID NO: 1379912
uacaugaggaacaggaagc

SEQ ID NO: 1379914 - RNA, 19 nt, Artificial Sequence
  Description of Artificial Sequence: Synthetic oligonucleotide
  Sense strand starting at position 3895 of SEQ ID NO: 1242889
cuuccuguuccucauguaa

SEQ ID NO: 1379915 - RNA, 19 nt, Artificial Sequence
  Description of Artificial Sequence: Synthetic oligonucleotide
  Antisense strand to SEQ ID NO: 1379914
uuacaugaggaacaggaag

SEQ ID NO: 1379916 - RNA, 19 nt, Artificial Sequence
  Description of Artificial Sequence: Synthetic oligonucleotide
  Sense strand starting at position 222 of SEQ ID NO: 1242890
uaacgucauucuucugaug

SEQ ID NO: 1379917 - RNA, 19 nt, Artificial Sequence
  Description of Artificial Sequence: Synthetic oligonucleotide
  Antisense strand to SEQ ID NO: 1379916
caucagaagaaugacguua

SEQ ID NO: 1379918 - RNA, 19 nt, Artificial Sequence
  Description of Artificial Sequence: Synthetic oligonucleotide
  Sense strand starting at position 231 of SEQ ID NO: 1242890
ucuucugauggugggagua

SEQ ID NO: 1379919 - RNA, 19 nt, Artificial Sequence
  Description of Artificial Sequence: Synthetic oligonucleotide
  Antisense strand to SEQ ID NO: 1379918
uacucccaccaucagaaga

SEQ ID NO: 1379920 - RNA, 19 nt, Artificial Sequence
  Description of Artificial Sequence: Synthetic oligonucleotide
  Sense strand starting at position 262 of SEQ ID NO: 1242890
aaggaucuaugacaguagu

SEQ ID NO: 1379921 - RNA, 19 nt, Artificial Sequence
  Description of Artificial Sequence: Synthetic oligonucleotide
  Antisense strand to SEQ ID NO: 1379920
acuacugucauagauccuu

SEQ ID NO: 1379922 - RNA, 19 nt, Artificial Sequence
  Description of Artificial Sequence: Synthetic oligonucleotide
  Sense strand starting at position 276 of SEQ ID NO: 1242890
guaguuggcuucucuagaa

SEQ ID NO: 1379923 - RNA, 19 nt, Artificial Sequence
  Description of Artificial Sequence: Synthetic oligonucleotide
  Antisense strand to SEQ ID NO: 1379922
uucuagagaagccaacuac

SEQ ID NO: 1379924 - RNA, 19 nt, Artificial Sequence
  Description of Artificial Sequence: Synthetic oligonucleotide
  Sense strand starting at position 622 of SEQ ID NO: 1242890
cgcaccuggcgcgagaaau

SEQ ID NO: 1379925 - RNA, 19 nt, Artificial Sequence
  Description of Artificial Sequence: Synthetic oligonucleotide
  Antisense strand to SEQ ID NO: 1379924
auuucucgcgccaggugcg

SEQ ID NO: 1379926 - RNA, 19 nt, Artificial Sequence
  Description of Artificial Sequence: Synthetic oligonucleotide
  Sense strand starting at position 819 of SEQ ID NO: 1242890
uacaguguagaguguauua

SEQ ID NO: 1379927 - RNA, 19 nt, Artificial Sequence
  Description of Artificial Sequence: Synthetic oligonucleotide
  Antisense strand to SEQ ID NO: 1379926
uaauacacucuacacugua

SEQ ID NO: 1379928 - RNA, 19 nt, Artificial Sequence
  Description of Artificial Sequence: Synthetic oligonucleotide
  Sense strand starting at position 826 of SEQ ID NO: 1242890
uagaguguauuagccuaau

SEQ ID NO: 1379929 - RNA, 19 nt, Artificial Sequence
  Description of Artificial Sequence: Synthetic oligonucleotide
  Antisense strand to SEQ ID NO: 1379928
auuaggcuaauacacucua

SEQ ID NO: 1379930 - RNA, 19 nt, Artificial Sequence
  Description of Artificial Sequence: Synthetic oligonucleotide
  Sense strand starting at position 829 of SEQ ID NO: 1242890
aguguauuagccuaaucca

SEQ ID NO: 1379931 - RNA, 19 nt, Artificial Sequence
  Description of Artificial Sequence: Synthetic oligonucleotide
  Antisense strand to SEQ ID NO: 1379930
uggauuaggcuaauacacu

SEQ ID NO: 1379932 - RNA, 19 nt, Artificial Sequence
  Description of Artificial Sequence: Synthetic oligonucleotide
  Sense strand starting at position 854 of SEQ ID NO: 1242890
uuauccaauugggauagaa

SEQ ID NO: 1379933 - RNA, 19 nt, Artificial Sequence
  Description of Artificial Sequence: Synthetic oligonucleotide
  Antisense strand to SEQ ID NO: 1379932
uucuaucccaauuggauaa

SEQ ID NO: 1379934 - RNA, 19 nt, Artificial Sequence
  Description of Artificial Sequence: Synthetic oligonucleotide
  Sense strand starting at position 1273 of SEQ ID NO: 1242890
ccaaauaucgcaugguggu

SEQ ID NO: 1379935 - RNA, 19 nt, Artificial Sequence
  Description of Artificial Sequence: Synthetic oligonucleotide
  Antisense strand to SEQ ID NO: 1379934
accaccaugcgauauuugg

SEQ ID NO: 1379936 - RNA, 19 nt, Artificial Sequence
  Description of Artificial Sequence: Synthetic oligonucleotide
  Sense strand starting at position 1274 of SEQ ID NO: 1242890
caaauaucgcauggugguu

SEQ ID NO: 1379937 - RNA, 19 nt, Artificial Sequence
  Description of Artificial Sequence: Synthetic oligonucleotide
  Antisense strand to SEQ ID NO: 1379936
aaccaccaugcgauauuug

SEQ ID NO: 1379938 - RNA, 19 nt, Artificial Sequence
  Description of Artificial Sequence: Synthetic oligonucleotide
  Sense strand starting at position 1338 of SEQ ID NO: 1242890
cacagaugagucugagacu

SEQ ID NO: 1379939 - RNA, 19 nt, Artificial Sequence
  Description of Artificial Sequence: Synthetic oligonucleotide
  Antisense strand to SEQ ID NO: 1379938
agucucagacucaucugug

SEQ ID NO: 1379940 - RNA, 19 nt, Artificial Sequence
  Description of Artificial Sequence: Synthetic oligonucleotide
  Sense strand starting at position 1341 of SEQ ID NO: 1242890
agaugagucugagacucaa

SEQ ID NO: 1379941 - RNA, 19 nt, Artificial Sequence
  Description of Artificial Sequence: Synthetic oligonucleotide
  Antisense strand to SEQ ID NO: 1379940
uugagucucagacucaucu

SEQ ID NO: 1379942 - RNA, 19 nt, Artificial Sequence
  Description of Artificial Sequence: Synthetic oligonucleotide
  Sense strand starting at position 1363 of SEQ ID NO: 1242890
cugucacuagcguaagguu

SEQ ID NO: 1379943 - RNA, 19 nt, Artificial Sequence
  Description of Artificial Sequence: Synthetic oligonucleotide
  Antisense strand to SEQ ID NO: 1379942
aaccuuacgcuagugacag

SEQ ID NO: 1379944 - RNA, 19 nt, Artificial Sequence
  Description of Artificial Sequence: Synthetic oligonucleotide
  Sense strand starting at position 1376 of SEQ ID NO: 1242890
aagguuguccagcgaguuu

SEQ ID NO: 1379945 - RNA, 19 nt, Artificial Sequence
  Description of Artificial Sequence: Synthetic oligonucleotide
  Antisense strand to SEQ ID NO: 1379944
aaacucgcuggacaaccuu

SEQ ID NO: 1379946 - RNA, 19 nt, Artificial Sequence
  Description of Artificial Sequence: Synthetic oligonucleotide
  Sense strand starting at position 1548 of SEQ ID NO: 1242890
gaaugaaggcucgggacaa

SEQ ID NO: 1379947 - RNA, 19 nt, Artificial Sequence
  Description of Artificial Sequence: Synthetic oligonucleotide
  Antisense strand to SEQ ID NO: 1379946
uugucccgagccuucauuc

SEQ ID NO: 1379948 - RNA, 19 nt, Artificial Sequence
  Description of Artificial Sequence: Synthetic oligonucleotide
  Sense strand starting at position 1797 of SEQ ID NO: 1242890
gggaaaggauggucggauu

SEQ ID NO: 1379949 - RNA, 19 nt, Artificial Sequence
  Description of Artificial Sequence: Synthetic oligonucleotide
  Antisense strand to SEQ ID NO: 1379948
aauccgaccauccuuuccc

SEQ ID NO: 1379950 - RNA, 19 nt, Artificial Sequence
  Description of Artificial Sequence: Synthetic oligonucleotide
  Sense strand starting at position 2872 of SEQ ID NO: 1242890
gugcgagugccucuuacag

SEQ ID NO: 1379951 - RNA, 19 nt, Artificial Sequence
  Description of Artificial Sequence: Synthetic oligonucleotide
  Antisense strand to SEQ ID NO: 1379950
cuguaagaggcacucgcac

SEQ ID NO: 1379952 - RNA, 19 nt, Artificial Sequence
  Description of Artificial Sequence: Synthetic oligonucleotide
  Sense strand starting at position 2968 of SEQ ID NO: 1242890
uugccaguuccugucugua

SEQ ID NO: 1379953 - RNA, 19 nt, Artificial Sequence
  Description of Artificial Sequence: Synthetic oligonucleotide
  Antisense strand to SEQ ID NO: 1379952
uacagacaggaacuggcaa

SEQ ID NO: 1379954 - RNA, 19 nt, Artificial Sequence
  Description of Artificial Sequence: Synthetic oligonucleotide
  Sense strand starting at position 3011 of SEQ ID NO: 1242890
ucucuuggguuugcgauua

SEQ ID NO: 1379955 - RNA, 19 nt, Artificial Sequence
  Description of Artificial Sequence: Synthetic oligonucleotide
  Antisense strand to SEQ ID NO: 1379954
uaaucgcaaacccaagaga

SEQ ID NO: 1379956 - RNA, 19 nt, Artificial Sequence
  Description of Artificial Sequence: Synthetic oligonucleotide
  Sense strand starting at position 3015 of SEQ ID NO: 1242890
uuggguuugcgauuacguu

SEQ ID NO: 1379957 - RNA, 19 nt, Artificial Sequence
  Description of Artificial Sequence: Synthetic oligonucleotide
  Antisense strand to SEQ ID NO: 1379956
aacguaaucgcaaacccaa

SEQ ID NO: 1379958 - RNA, 19 nt, Artificial Sequence
  Description of Artificial Sequence: Synthetic oligonucleotide
  Sense strand starting at position 3103 of SEQ ID NO: 1242890
ugugcuggcauuugguuaa

SEQ ID NO: 1379959 - RNA, 19 nt, Artificial Sequence
  Description of Artificial Sequence: Synthetic oligonucleotide
  Antisense strand to SEQ ID NO: 1379958
uuaaccaaaugccagcaca

SEQ ID NO: 1379960 - RNA, 19 nt, Artificial Sequence
  Description of Artificial Sequence: Synthetic oligonucleotide
  Sense strand starting at position 3107 of SEQ ID NO: 1242890
cuggcauuugguuaaacgu

SEQ ID NO: 1379961 - RNA, 19 nt, Artificial Sequence
  Description of Artificial Sequence: Synthetic oligonucleotide
  Antisense strand to SEQ ID NO: 1379960
acguuuaaccaaaugccag

SEQ ID NO: 1379962 - RNA, 19 nt, Artificial Sequence
  Description of Artificial Sequence: Synthetic oligonucleotide
  Sense strand starting at position 3128 of SEQ ID NO: 1242890
aggugucaccaucacaaua

SEQ ID NO: 1379963 - RNA, 19 nt, Artificial Sequence
  Description of Artificial Sequence: Synthetic oligonucleotide
  Antisense strand to SEQ ID NO: 1379962
uauugugauggugacaccu

SEQ ID NO: 1379964 - RNA, 19 nt, Artificial Sequence
  Description of Artificial Sequence: Synthetic oligonucleotide
  Sense strand starting at position 3160 of SEQ ID NO: 1242890
gaugaugcgaagugauuau

SEQ ID NO: 1379965 - RNA, 19 nt, Artificial Sequence
  Description of Artificial Sequence: Synthetic oligonucleotide
  Antisense strand to SEQ ID NO: 1379964
auaaucacuucgcaucauc

SEQ ID NO: 1379966 - RNA, 19 nt, Artificial Sequence
  Description of Artificial Sequence: Synthetic oligonucleotide
  Sense strand starting at position 3169 of SEQ ID NO: 1242890
aagugauuauuucccgcuu

SEQ ID NO: 1379967 - RNA, 19 nt, Artificial Sequence
  Description of Artificial Sequence: Synthetic oligonucleotide
  Antisense strand to SEQ ID NO: 1379966
aagcgggaaauaaucacuu

SEQ ID NO: 1379968 - RNA, 19 nt, Artificial Sequence
  Description of Artificial Sequence: Synthetic oligonucleotide
  Sense strand starting at position 3175 of SEQ ID NO: 1242890
uuauuucccgcuugagcaa

SEQ ID NO: 1379969 - RNA, 19 nt, Artificial Sequence
  Description of Artificial Sequence: Synthetic oligonucleotide
  Antisense strand to SEQ ID NO: 1379968
uugcucaagcgggaaauaa

SEQ ID NO: 1379970 - RNA, 19 nt, Artificial Sequence
  Description of Artificial Sequence: Synthetic oligonucleotide
  Sense strand starting at position 3202 of SEQ ID NO: 1242890
cgcagauccagguaucugu

SEQ ID NO: 1379971 - RNA, 19 nt, Artificial Sequence
  Description of Artificial Sequence: Synthetic oligonucleotide
  Antisense strand to SEQ ID NO: 1379970
acagauaccuggaucugcg

SEQ ID NO: 1379972 - RNA, 19 nt, Artificial Sequence
  Description of Artificial Sequence: Synthetic oligonucleotide
  Sense strand starting at position 3251 of SEQ ID NO: 1242890
agggaagcaccguguucau

SEQ ID NO: 1379973 - RNA, 19 nt, Artificial Sequence
  Description of Artificial Sequence: Synthetic oligonucleotide
  Antisense strand to SEQ ID NO: 1379972
augaacacggugcuucccu

SEQ ID NO: 1379974 - RNA, 19 nt, Artificial Sequence
  Description of Artificial Sequence: Synthetic oligonucleotide
  Sense strand starting at position 3342 of SEQ ID NO: 1242890
ccuaguuucccggagucua

SEQ ID NO: 1379975 - RNA, 19 nt, Artificial Sequence
  Description of Artificial Sequence: Synthetic oligonucleotide
  Antisense strand to SEQ ID NO: 1379974
uagacuccgggaaacuagg

SEQ ID NO: 1379976 - RNA, 19 nt, Artificial Sequence
  Description of Artificial Sequence: Synthetic oligonucleotide
  Sense strand starting at position 3358 of SEQ ID NO: 1242890
cuagaaagaguuuagcauu

SEQ ID NO: 1379977 - RNA, 19 nt, Artificial Sequence
  Description of Artificial Sequence: Synthetic oligonucleotide
  Antisense strand to SEQ ID NO: 1379976
aaugcuaaacucuuucuag

SEQ ID NO: 1379978 - RNA, 19 nt, Artificial Sequence
  Description of Artificial Sequence: Synthetic oligonucleotide
  Sense strand starting at position 3376 of SEQ ID NO: 1242890
ucauuugaguuuggauaua

SEQ ID NO: 1379979 - RNA, 19 nt, Artificial Sequence
  Description of Artificial Sequence: Synthetic oligonucleotide
  Antisense strand to SEQ ID NO: 1379978
uauauccaaacucaaauga

SEQ ID NO: 1379980 - RNA, 19 nt, Artificial Sequence
  Description of Artificial Sequence: Synthetic oligonucleotide
  Sense strand starting at position 3402 of SEQ ID NO: 1242890
aggucucauugaccauuau

SEQ ID NO: 1379981 - RNA, 19 nt, Artificial Sequence
  Description of Artificial Sequence: Synthetic oligonucleotide
  Antisense strand to SEQ ID NO: 1379980
auaauggucaaugagaccu

SEQ ID NO: 1379982 - RNA, 19 nt, Artificial Sequence
  Description of Artificial Sequence: Synthetic oligonucleotide
  Sense strand starting at position 3403 of SEQ ID NO: 1242890
ggucucauugaccauuauu

SEQ ID NO: 1379983 - RNA, 19 nt, Artificial Sequence
  Description of Artificial Sequence: Synthetic oligonucleotide
  Antisense strand to SEQ ID NO: 1379982
aauaauggucaaugagacc

SEQ ID NO: 1379984 - RNA, 19 nt, Artificial Sequence
  Description of Artificial Sequence: Synthetic oligonucleotide
  Sense strand starting at position 3425 of SEQ ID NO: 1242890
uuucuuaugccugagaaac

SEQ ID NO: 1379985 - RNA, 19 nt, Artificial Sequence
  Description of Artificial Sequence: Synthetic oligonucleotide
  Antisense strand to SEQ ID NO: 1379984
guuucucaggcauaagaaa

SEQ ID NO: 1379986 - RNA, 19 nt, Artificial Sequence
  Description of Artificial Sequence: Synthetic oligonucleotide
  Sense strand starting at position 3554 of SEQ ID NO: 1242890
ucuuguuagucaccuuaau

SEQ ID NO: 1379987 - RNA, 19 nt, Artificial Sequence
  Description of Artificial Sequence: Synthetic oligonucleotide
  Antisense strand to SEQ ID NO: 1379986
auuaaggugacuaacaaga

SEQ ID NO: 1379988 - RNA, 19 nt, Artificial Sequence
  Description of Artificial Sequence: Synthetic oligonucleotide
  Sense strand starting at position 3606 of SEQ ID NO: 1242890
cccugagagcagcauuaaa

SEQ ID NO: 1379989 - RNA, 19 nt, Artificial Sequence
  Description of Artificial Sequence: Synthetic oligonucleotide
  Antisense strand to SEQ ID NO: 1379988
uuuaaugcugcucucaggg

SEQ ID NO: 1379990 - RNA, 19 nt, Artificial Sequence
  Description of Artificial Sequence: Synthetic oligonucleotide
  Sense strand starting at position 3791 of SEQ ID NO: 1242890
ugggaacauuuauguagga

SEQ ID NO: 1379991 - RNA, 19 nt, Artificial Sequence
  Description of Artificial Sequence: Synthetic oligonucleotide
  Antisense strand to SEQ ID NO: 1379990
uccuacauaaauguuccca

SEQ ID NO: 1379992 - RNA, 19 nt, Artificial Sequence
  Description of Artificial Sequence: Synthetic oligonucleotide
  Sense strand starting at position 3796 of SEQ ID NO: 1242890
acauuuauguaggagagau

SEQ ID NO: 1379993 - RNA, 19 nt, Artificial Sequence
  Description of Artificial Sequence: Synthetic oligonucleotide
  Antisense strand to SEQ ID NO: 1379992
aucucuccuacauaaaugu

SEQ ID NO: 1379994 - RNA, 19 nt, Artificial Sequence
  Description of Artificial Sequence: Synthetic oligonucleotide
  Sense strand starting at position 3913 of SEQ ID NO: 1242890
uaggaaaugugagacuaac

SEQ ID NO: 1379995 - RNA, 19 nt, Artificial Sequence
  Description of Artificial Sequence: Synthetic oligonucleotide
  Antisense strand to SEQ ID NO: 1379994
guuagucucacauuuccua

SEQ ID NO: 1379996 - RNA, 19 nt, Artificial Sequence
  Description of Artificial Sequence: Synthetic oligonucleotide
  Sense strand starting at position 261 of SEQ ID NO: 1242891
ccgagacaaucucagaagu

SEQ ID NO: 1379997 - RNA, 19 nt, Artificial Sequence
  Description of Artificial Sequence: Synthetic oligonucleotide
  Antisense strand to SEQ ID NO: 1379996
acuucugagauugucucgg

SEQ ID NO: 1379998 - RNA, 19 nt, Artificial Sequence
  Description of Artificial Sequence: Synthetic oligonucleotide
  Sense strand starting at position 263 of SEQ ID NO: 1242891
gagacaaucucagaaguuc

SEQ ID NO: 1379999 - RNA, 19 nt, Artificial Sequence
  Description of Artificial Sequence: Synthetic oligonucleotide
  Antisense strand to SEQ ID NO: 1379998
gaacuucugagauugucuc

SEQ ID NO: 1380000 - RNA, 19 nt, Artificial Sequence
  Description of Artificial Sequence: Synthetic oligonucleotide
  Sense strand starting at position 271 of SEQ ID NO: 1242891
cucagaaguucccaaggau

SEQ ID NO: 1380001 - RNA, 19 nt, Artificial Sequence
  Description of Artificial Sequence: Synthetic oligonucleotide
  Antisense strand to SEQ ID NO: 1380000
auccuugggaacuucugag

SEQ ID NO: 1380002 - RNA, 19 nt, Artificial Sequence
  Description of Artificial Sequence: Synthetic oligonucleotide
  Sense strand starting at position 372 of SEQ ID NO: 1242891
aaagcuuaucagugaggga

SEQ ID NO: 1380003 - RNA, 19 nt, Artificial Sequence
  Description of Artificial Sequence: Synthetic oligonucleotide
  Antisense strand to SEQ ID NO: 1380002
ucccucacugauaagcuuu

SEQ ID NO: 1380004 - RNA, 19 nt, Artificial Sequence
  Description of Artificial Sequence: Synthetic oligonucleotide
  Sense strand starting at position 385 of SEQ ID NO: 1242891
gagggacgagucugugcua

SEQ ID NO: 1380005 - RNA, 19 nt, Artificial Sequence
  Description of Artificial Sequence: Synthetic oligonucleotide
  Antisense strand to SEQ ID NO: 1380004
uagcacagacucgucccuc

SEQ ID NO: 1380006 - RNA, 19 nt, Artificial Sequence
  Description of Artificial Sequence: Synthetic oligonucleotide
  Sense strand starting at position 403 of SEQ ID NO: 1242891
acaugcagggagugaaaua

SEQ ID NO: 1380007 - RNA, 19 nt, Artificial Sequence
  Description of Artificial Sequence: Synthetic oligonucleotide
  Antisense strand to SEQ ID NO: 1380006
uauuucacucccugcaugu

SEQ ID NO: 1380008 - RNA, 19 nt, Artificial Sequence
  Description of Artificial Sequence: Synthetic oligonucleotide
  Sense strand starting at position 413 of SEQ ID NO: 1242891
agugaaauacuauguagca

SEQ ID NO: 1380009 - RNA, 19 nt, Artificial Sequence
  Description of Artificial Sequence: Synthetic oligonucleotide
  Antisense strand to SEQ ID NO: 1380008
ugcuacauaguauuucacu

SEQ ID NO: 1380010 - RNA, 19 nt, Artificial Sequence
  Description of Artificial Sequence: Synthetic oligonucleotide
  Sense strand starting at position 414 of SEQ ID NO: 1242891
gugaaauacuauguagcau

SEQ ID NO: 1380011 - RNA, 19 nt, Artificial Sequence
  Description of Artificial Sequence: Synthetic oligonucleotide
  Antisense strand to SEQ ID NO: 1380010
augcuacauaguauuucac

SEQ ID NO: 1380012 - RNA, 19 nt, Artificial Sequence
  Description of Artificial Sequence: Synthetic oligonucleotide
  Sense strand starting at position 425 of SEQ ID NO: 1242891
uguagcauuguuuacacua

SEQ ID NO: 1380013 - RNA, 19 nt, Artificial Sequence
  Description of Artificial Sequence: Synthetic oligonucleotide
  Antisense strand to SEQ ID NO: 1380012
uaguguaaacaaugcuaca

SEQ ID NO: 1380014 - RNA, 19 nt, Artificial Sequence
  Description of Artificial Sequence: Synthetic oligonucleotide
  Sense strand starting at position 472 of SEQ ID NO: 1242891
uuauauccuuuagggaaga

SEQ ID NO: 1380015 - RNA, 19 nt, Artificial Sequence
  Description of Artificial Sequence: Synthetic oligonucleotide
  Antisense strand to SEQ ID NO: 1380014
ucuucccuaaaggauauaa

SEQ ID NO: 1380016 - RNA, 19 nt, Artificial Sequence
  Description of Artificial Sequence: Synthetic oligonucleotide
  Sense strand starting at position 518 of SEQ ID NO: 1242891
aaauguuaagagugguuua

SEQ ID NO: 1380017 - RNA, 19 nt, Artificial Sequence
  Description of Artificial Sequence: Synthetic oligonucleotide
  Antisense strand to SEQ ID NO: 1380016
uaaaccacucuuaacauuu

SEQ ID NO: 1380018 - RNA, 19 nt, Artificial Sequence
  Description of Artificial Sequence: Synthetic oligonucleotide
  Sense strand starting at position 630 of SEQ ID NO: 1242891
auaugagcugcuugaacau

SEQ ID NO: 1380019 - RNA, 19 nt, Artificial Sequence
  Description of Artificial Sequence: Synthetic oligonucleotide
  Antisense strand to SEQ ID NO: 1380018
auguucaagcagcucauau

SEQ ID NO: 1380020 - RNA, 19 nt, Artificial Sequence
  Description of Artificial Sequence: Synthetic oligonucleotide
  Sense strand starting at position 678 of SEQ ID NO: 1242891
agccuugaacuccagauua

SEQ ID NO: 1380021 - RNA, 19 nt, Artificial Sequence
  Description of Artificial Sequence: Synthetic oligonucleotide
  Antisense strand to SEQ ID NO: 1380020
uaaucuggaguucaaggcu

SEQ ID NO: 1380022 - RNA, 19 nt, Artificial Sequence
  Description of Artificial Sequence: Synthetic oligonucleotide
  Sense strand starting at position 706 of SEQ ID NO: 1242891
cuccuccugugaucuguua

SEQ ID NO: 1380023 - RNA, 19 nt, Artificial Sequence
  Description of Artificial Sequence: Synthetic oligonucleotide
  Antisense strand to SEQ ID NO: 1380022
uaacagaucacaggaggag

SEQ ID NO: 1380024 - RNA, 19 nt, Artificial Sequence
  Description of Artificial Sequence: Synthetic oligonucleotide
  Sense strand starting at position 713 of SEQ ID NO: 1242891
ugugaucuguuacauccaa

SEQ ID NO: 1380025 - RNA, 19 nt, Artificial Sequence
  Description of Artificial Sequence: Synthetic oligonucleotide
  Antisense strand to SEQ ID NO: 1380024
uuggauguaacagaucaca

SEQ ID NO: 1380026 - RNA, 19 nt, Artificial Sequence
  Description of Artificial Sequence: Synthetic oligonucleotide
  Sense strand starting at position 727 of SEQ ID NO: 1242891
uccaauauugcugaaggca

SEQ ID NO: 1380027 - RNA, 19 nt, Artificial Sequence
  Description of Artificial Sequence: Synthetic oligonucleotide
  Antisense strand to SEQ ID NO: 1380026
ugccuucagcaauauugga

SEQ ID NO: 1380028 - RNA, 19 nt, Artificial Sequence
  Description of Artificial Sequence: Synthetic oligonucleotide
  Sense strand starting at position 1322 of SEQ ID NO: 1242891
gcgucagggccucuucgau

SEQ ID NO: 1380029 - RNA, 19 nt, Artificial Sequence
  Description of Artificial Sequence: Synthetic oligonucleotide
  Antisense strand to SEQ ID NO: 1380028
aucgaagaggcccugacgc

SEQ ID NO: 1380030 - RNA, 19 nt, Artificial Sequence
  Description of Artificial Sequence: Synthetic oligonucleotide
  Sense strand starting at position 1648 of SEQ ID NO: 1242891
ggaggaugcgccggaacuu

SEQ ID NO: 1380031 - RNA, 19 nt, Artificial Sequence
  Description of Artificial Sequence: Synthetic oligonucleotide
  Antisense strand to SEQ ID NO: 1380030
aaguuccggcgcauccucc

SEQ ID NO: 1380032 - RNA, 19 nt, Artificial Sequence
  Description of Artificial Sequence: Synthetic oligonucleotide
  Sense strand starting at position 2176 of SEQ ID NO: 1242891
ccgugacgggcaugagaaa

SEQ ID NO: 1380033 - RNA, 19 nt, Artificial Sequence
  Description of Artificial Sequence: Synthetic oligonucleotide
  Antisense strand to SEQ ID NO: 1380032
uuucucaugcccgucacgg

SEQ ID NO: 1380034 - RNA, 19 nt, Artificial Sequence
  Description of Artificial Sequence: Synthetic oligonucleotide
  Sense strand starting at position 2399 of SEQ ID NO: 1242891
ggccggugaguagaaagau

SEQ ID NO: 1380035 - RNA, 19 nt, Artificial Sequence
  Description of Artificial Sequence: Synthetic oligonucleotide
  Antisense strand to SEQ ID NO: 1380034
aucuuucuacucaccggcc

SEQ ID NO: 1380036 - RNA, 19 nt, Artificial Sequence
  Description of Artificial Sequence: Synthetic oligonucleotide
  Sense strand starting at position 2407 of SEQ ID NO: 1242891
aguagaaagaugcgccuua

SEQ ID NO: 1380037 - RNA, 19 nt, Artificial Sequence
  Description of Artificial Sequence: Synthetic oligonucleotide
  Antisense strand to SEQ ID NO: 1380036
uaaggcgcaucuuucuacu

SEQ ID NO: 1380038 - RNA, 19 nt, Artificial Sequence
  Description of Artificial Sequence: Synthetic oligonucleotide
  Sense strand starting at position 3005 of SEQ ID NO: 1242891
uguagugacccgugauggu

SEQ ID NO: 1380039 - RNA, 19 nt, Artificial Sequence
  Description of Artificial Sequence: Synthetic oligonucleotide
  Antisense strand to SEQ ID NO: 1380038
accaucacgggucacuaca

SEQ ID NO: 1380040 - RNA, 19 nt, Artificial Sequence
  Description of Artificial Sequence: Synthetic oligonucleotide
  Sense strand starting at position 3701 of SEQ ID NO: 1242891
ugcuaucuaccagggagau

SEQ ID NO: 1380041 - RNA, 19 nt, Artificial Sequence
  Description of Artificial Sequence: Synthetic oligonucleotide
  Antisense strand to SEQ ID NO: 1380040
aucucccugguagauagca

SEQ ID NO: 1380042 - RNA, 19 nt, Artificial Sequence
  Description of Artificial Sequence: Synthetic oligonucleotide
  Sense strand starting at position 3702 of SEQ ID NO: 1242891
gcuaucuaccagggagauc

SEQ ID NO: 1380043 - RNA, 19 nt, Artificial Sequence
  Description of Artificial Sequence: Synthetic oligonucleotide
  Antisense strand to SEQ ID NO: 1380042
gaucucccugguagauagc

SEQ ID NO: 1380044 - RNA, 19 nt, Artificial Sequence
  Description of Artificial Sequence: Synthetic oligonucleotide
  Sense strand starting at position 3812 of SEQ ID NO: 1242891
agaccagacuuuggaugau

SEQ ID NO: 1380045 - RNA, 19 nt, Artificial Sequence
  Description of Artificial Sequence: Synthetic oligonucleotide
  Antisense strand to SEQ ID NO: 1380044
aucauccaaagucuggucu

SEQ ID NO: 1380046 - RNA, 19 nt, Artificial Sequence
  Description of Artificial Sequence: Synthetic oligonucleotide
  Sense strand starting at position 3829 of SEQ ID NO: 1242891
aucaaagguucuuugagga

SEQ ID NO: 1380047 - RNA, 19 nt, Artificial Sequence
  Description of Artificial Sequence: Synthetic oligonucleotide
  Antisense strand to SEQ ID NO: 1380046
uccucaaagaaccuuugau

SEQ ID NO: 1380048 - RNA, 19 nt, Artificial Sequence
  Description of Artificial Sequence: Synthetic oligonucleotide
  Sense strand starting at position 3833 of SEQ ID NO: 1242891
aagguucuuugaggaaaug

SEQ ID NO: 1380049 - RNA, 19 nt, Artificial Sequence
  Description of Artificial Sequence: Synthetic oligonucleotide
  Antisense strand to SEQ ID NO: 1380048
cauuuccucaaagaaccuu

SEQ ID NO: 1380050 - RNA, 19 nt, Artificial Sequence
  Description of Artificial Sequence: Synthetic oligonucleotide
  Sense strand starting at position 3892 of SEQ ID NO: 1242891
gagaacacuugaugggaga

SEQ ID NO: 1380051 - RNA, 19 nt, Artificial Sequence
  Description of Artificial Sequence: Synthetic oligonucleotide
  Antisense strand to SEQ ID NO: 1380050
ucucccaucaaguguucuc

SEQ ID NO: 1380052 - RNA, 19 nt, Artificial Sequence
  Description of Artificial Sequence: Synthetic oligonucleotide
  Sense strand starting at position 257 of SEQ ID NO: 1242892
uagguccaauccuugaguu

SEQ ID NO: 1380053 - RNA, 19 nt, Artificial Sequence
  Description of Artificial Sequence: Synthetic oligonucleotide
  Antisense strand to SEQ ID NO: 1380052
aacucaaggauuggaccua

SEQ ID NO: 1380054 - RNA, 19 nt, Artificial Sequence
  Description of Artificial Sequence: Synthetic oligonucleotide
  Sense strand starting at position 656 of SEQ ID NO: 1242892
gggcacauuccagggaaga

SEQ ID NO: 1380055 - RNA, 19 nt, Artificial Sequence
  Description of Artificial Sequence: Synthetic oligonucleotide
  Antisense strand to SEQ ID NO: 1380054
ucuucccuggaaugugccc

SEQ ID NO: 1380056 - RNA, 19 nt, Artificial Sequence
  Description of Artificial Sequence: Synthetic oligonucleotide
  Sense strand starting at position 826 of SEQ ID NO: 1242892
gaguccuggcccggaaaca

SEQ ID NO: 1380057 - RNA, 19 nt, Artificial Sequence
  Description of Artificial Sequence: Synthetic oligonucleotide
  Antisense strand to SEQ ID NO: 1380056
uguuuccgggccaggacuc

SEQ ID NO: 1380058 - RNA, 19 nt, Artificial Sequence
  Description of Artificial Sequence: Synthetic oligonucleotide
  Sense strand starting at position 1446 of SEQ ID NO: 1242892
gccuaauucgaagggcagu

SEQ ID NO: 1380059 - RNA, 19 nt, Artificial Sequence
  Description of Artificial Sequence: Synthetic oligonucleotide
  Antisense strand to SEQ ID NO: 1380058
acugcccuucgaauuaggc

SEQ ID NO: 1380060 - RNA, 19 nt, Artificial Sequence
  Description of Artificial Sequence: Synthetic oligonucleotide
  Sense strand starting at position 2126 of SEQ ID NO: 1242892
ugggaaucccguuaguuca

SEQ ID NO: 1380061 - RNA, 19 nt, Artificial Sequence
  Description of Artificial Sequence: Synthetic oligonucleotide
  Antisense strand to SEQ ID NO: 1380060
ugaacuaacgggauuccca

SEQ ID NO: 1380062 - RNA, 19 nt, Artificial Sequence
  Description of Artificial Sequence: Synthetic oligonucleotide
  Sense strand starting at position 2234 of SEQ ID NO: 1242892
gaggcugcguucucuuuga

SEQ ID NO: 1380063 - RNA, 19 nt, Artificial Sequence
  Description of Artificial Sequence: Synthetic oligonucleotide
  Antisense strand to SEQ ID NO: 1380062
ucaaagagaacgcagccuc

SEQ ID NO: 1380064 - RNA, 19 nt, Artificial Sequence
  Description of Artificial Sequence: Synthetic oligonucleotide
  Sense strand starting at position 2272 of SEQ ID NO: 1242892
ggcagaaguuucuuuagau

SEQ ID NO: 1380065 - RNA, 19 nt, Artificial Sequence
  Description of Artificial Sequence: Synthetic oligonucleotide
  Antisense strand to SEQ ID NO: 1380064
aucuaaagaaacuucugcc

SEQ ID NO: 1380066 - RNA, 19 nt, Artificial Sequence
  Description of Artificial Sequence: Synthetic oligonucleotide
  Sense strand starting at position 2273 of SEQ ID NO: 1242892
gcagaaguuucuuuagaua

SEQ ID NO: 1380067 - RNA, 19 nt, Artificial Sequence
  Description of Artificial Sequence: Synthetic oligonucleotide
  Antisense strand to SEQ ID NO: 1380066
uaucuaaagaaacuucugc

SEQ ID NO: 1380068 - RNA, 19 nt, Artificial Sequence
  Description of Artificial Sequence: Synthetic oligonucleotide
  Sense strand starting at position 2458 of SEQ ID NO: 1242892
gggaucaguucccuuuagu

SEQ ID NO: 1380069 - RNA, 19 nt, Artificial Sequence
  Description of Artificial Sequence: Synthetic oligonucleotide
  Antisense strand to SEQ ID NO: 1380068
acuaaagggaacugauccc

SEQ ID NO: 1380070 - RNA, 19 nt, Artificial Sequence
  Description of Artificial Sequence: Synthetic oligonucleotide
  Sense strand starting at position 2465 of SEQ ID NO: 1242892
guucccuuuaguuguggga

SEQ ID NO: 1380071 - RNA, 19 nt, Artificial Sequence
  Description of Artificial Sequence: Synthetic oligonucleotide
  Antisense strand to SEQ ID NO: 1380070
ucccacaacuaaagggaac

SEQ ID NO: 1380072 - RNA, 19 nt, Artificial Sequence
  Description of Artificial Sequence: Synthetic oligonucleotide
  Sense strand starting at position 2468 of SEQ ID NO: 1242892
cccuuuaguugugggagga

SEQ ID NO: 1380073 - RNA, 19 nt, Artificial Sequence
  Description of Artificial Sequence: Synthetic oligonucleotide
  Antisense strand to SEQ ID NO: 1380072
uccucccacaacuaaaggg

SEQ ID NO: 1380074 - RNA, 19 nt, Artificial Sequence
  Description of Artificial Sequence: Synthetic oligonucleotide
  Sense strand starting at position 2469 of SEQ ID NO: 1242892
ccuuuaguugugggaggaa

SEQ ID NO: 1380075 - RNA, 19 nt, Artificial Sequence
  Description of Artificial Sequence: Synthetic oligonucleotide
  Antisense strand to SEQ ID NO: 1380074
uuccucccacaacuaaagg

SEQ ID NO: 1380076 - RNA, 19 nt, Artificial Sequence
  Description of Artificial Sequence: Synthetic oligonucleotide
  Sense strand starting at position 2680 of SEQ ID NO: 1242892
gggugcaucucgccuaguu

SEQ ID NO: 1380077 - RNA, 19 nt, Artificial Sequence
  Description of Artificial Sequence: Synthetic oligonucleotide
  Antisense strand to SEQ ID NO: 1380076
aacuaggcgagaugcaccc

SEQ ID NO: 1380078 - RNA, 19 nt, Artificial Sequence
  Description of Artificial Sequence: Synthetic oligonucleotide
  Sense strand starting at position 2681 of SEQ ID NO: 1242892
ggugcaucucgccuaguuu

SEQ ID NO: 1380079 - RNA, 19 nt, Artificial Sequence
  Description of Artificial Sequence: Synthetic oligonucleotide
  Antisense strand to SEQ ID NO: 1380078
aaacuaggcgagaugcacc

SEQ ID NO: 1380080 - RNA, 19 nt, Artificial Sequence
  Description of Artificial Sequence: Synthetic oligonucleotide
  Sense strand starting at position 2692 of SEQ ID NO: 1242892
ccuaguuugaagggaauca

SEQ ID NO: 1380081 - RNA, 19 nt, Artificial Sequence
  Description of Artificial Sequence: Synthetic oligonucleotide
  Antisense strand to SEQ ID NO: 1380080
ugauucccuucaaacuagg

SEQ ID NO: 1380082 - RNA, 19 nt, Artificial Sequence
  Description of Artificial Sequence: Synthetic oligonucleotide
  Sense strand starting at position 2755 of SEQ ID NO: 1242892
augagacaguucucuguag

SEQ ID NO: 1380083 - RNA, 19 nt, Artificial Sequence
  Description of Artificial Sequence: Synthetic oligonucleotide
  Antisense strand to SEQ ID NO: 1380082
cuacagagaacugucucau

SEQ ID NO: 1380084 - RNA, 19 nt, Artificial Sequence
  Description of Artificial Sequence: Synthetic oligonucleotide
  Sense strand starting at position 2756 of SEQ ID NO: 1242892
ugagacaguucucuguagu

SEQ ID NO: 1380085 - RNA, 19 nt, Artificial Sequence
  Description of Artificial Sequence: Synthetic oligonucleotide
  Antisense strand to SEQ ID NO: 1380084
acuacagagaacugucuca

SEQ ID NO: 1380086 - RNA, 19 nt, Artificial Sequence
  Description of Artificial Sequence: Synthetic oligonucleotide
  Sense strand starting at position 2757 of SEQ ID NO: 1242892
gagacaguucucuguagug

SEQ ID NO: 1380087 - RNA, 19 nt, Artificial Sequence
  Description of Artificial Sequence: Synthetic oligonucleotide
  Antisense strand to SEQ ID NO: 1380086
cacuacagagaacugucuc

SEQ ID NO: 1380088 - RNA, 19 nt, Artificial Sequence
  Description of Artificial Sequence: Synthetic oligonucleotide
  Sense strand starting at position 2759 of SEQ ID NO: 1242892
gacaguucucuguagugug

SEQ ID NO: 1380089 - RNA, 19 nt, Artificial Sequence
  Description of Artificial Sequence: Synthetic oligonucleotide
  Antisense strand to SEQ ID NO: 1380088
cacacuacagagaacuguc

SEQ ID NO: 1380090 - RNA, 19 nt, Artificial Sequence
  Description of Artificial Sequence: Synthetic oligonucleotide
  Sense strand starting at position 2767 of SEQ ID NO: 1242892
ucuguagugugacugaaag

SEQ ID NO: 1380091 - RNA, 19 nt, Artificial Sequence
  Description of Artificial Sequence: Synthetic oligonucleotide
  Antisense strand to SEQ ID NO: 1380090
cuuucagucacacuacaga

SEQ ID NO: 1380092 - RNA, 19 nt, Artificial Sequence
  Description of Artificial Sequence: Synthetic oligonucleotide
  Sense strand starting at position 3225 of SEQ ID NO: 1242892
gaaggaguagguuguggaa

SEQ ID NO: 1380093 - RNA, 19 nt, Artificial Sequence
  Description of Artificial Sequence: Synthetic oligonucleotide
  Antisense strand to SEQ ID NO: 1380092
uuccacaaccuacuccuuc

SEQ ID NO: 1380094 - RNA, 19 nt, Artificial Sequence
  Description of Artificial Sequence: Synthetic oligonucleotide
  Sense strand starting at position 3228 of SEQ ID NO: 1242892
ggaguagguuguggaacuu

SEQ ID NO: 1380095 - RNA, 19 nt, Artificial Sequence
  Description of Artificial Sequence: Synthetic oligonucleotide
  Antisense strand to SEQ ID NO: 1380094
aaguuccacaaccuacucc

SEQ ID NO: 1380096 - RNA, 19 nt, Artificial Sequence
  Description of Artificial Sequence: Synthetic oligonucleotide
  Sense strand starting at position 3280 of SEQ ID NO: 1242892
gggacugauuuagggagga

SEQ ID NO: 1380097 - RNA, 19 nt, Artificial Sequence
  Description of Artificial Sequence: Synthetic oligonucleotide
  Antisense strand to SEQ ID NO: 1380096
uccucccuaaaucaguccc

SEQ ID NO: 1380098 - RNA, 19 nt, Artificial Sequence
  Description of Artificial Sequence: Synthetic oligonucleotide
  Sense strand starting at position 3743 of SEQ ID NO: 1242892
ccuccucgguccucagauu

SEQ ID NO: 1380099 - RNA, 19 nt, Artificial Sequence
  Description of Artificial Sequence: Synthetic oligonucleotide
  Antisense strand to SEQ ID NO: 1380098
aaucugaggaccgaggagg

SEQ ID NO: 1380100 - RNA, 19 nt, Artificial Sequence
  Description of Artificial Sequence: Synthetic oligonucleotide
  Sense strand starting at position 3793 of SEQ ID NO: 1242892
agguuuggauuccacaaau

SEQ ID NO: 1380101 - RNA, 19 nt, Artificial Sequence
  Description of Artificial Sequence: Synthetic oligonucleotide
  Antisense strand to SEQ ID NO: 1380100
auuuguggaauccaaaccu

SEQ ID NO: 1380102 - RNA, 19 nt, Artificial Sequence
  Description of Artificial Sequence: Synthetic oligonucleotide
  Sense strand starting at position 131 of SEQ ID NO: 1242893
ggaugacuccagugucuac

SEQ ID NO: 1380103 - RNA, 19 nt, Artificial Sequence
  Description of Artificial Sequence: Synthetic oligonucleotide
  Antisense strand to SEQ ID NO: 1380102
guagacacuggagucaucc

SEQ ID NO: 1380104 - RNA, 19 nt, Artificial Sequence
  Description of Artificial Sequence: Synthetic oligonucleotide
  Sense strand starting at position 191 of SEQ ID NO: 1242893
gugcacuugccucagacau

SEQ ID NO: 1380105 - RNA, 19 nt, Artificial Sequence
  Description of Artificial Sequence: Synthetic oligonucleotide
  Antisense strand to SEQ ID NO: 1380104
augucugaggcaagugcac

SEQ ID NO: 1380106 - RNA, 19 nt, Artificial Sequence
  Description of Artificial Sequence: Synthetic oligonucleotide
  Sense strand starting at position 423 of SEQ ID NO: 1242893
gccagaucccacugucaug

SEQ ID NO: 1380107 - RNA, 19 nt, Artificial Sequence
  Description of Artificial Sequence: Synthetic oligonucleotide
  Antisense strand to SEQ ID NO: 1380106
caugacagugggaucuggc

SEQ ID NO: 1380108 - RNA, 19 nt, Artificial Sequence
  Description of Artificial Sequence: Synthetic oligonucleotide
  Sense strand starting at position 528 of SEQ ID NO: 1242893
gaaauuagagcgcacagaa

SEQ ID NO: 1380109 - RNA, 19 nt, Artificial Sequence
  Description of Artificial Sequence: Synthetic oligonucleotide
  Antisense strand to SEQ ID NO: 1380108
uucugugcgcucuaauuuc

SEQ ID NO: 1380110 - RNA, 19 nt, Artificial Sequence
  Description of Artificial Sequence: Synthetic oligonucleotide
  Sense strand starting at position 546 of SEQ ID NO: 1242893
aagggagagcuuggccaau

SEQ ID NO: 1380111 - RNA, 19 nt, Artificial Sequence
  Description of Artificial Sequence: Synthetic oligonucleotide
  Antisense strand to SEQ ID NO: 1380110
auuggccaagcucucccuu

SEQ ID NO: 1380112 - RNA, 19 nt, Artificial Sequence
  Description of Artificial Sequence: Synthetic oligonucleotide
  Sense strand starting at position 548 of SEQ ID NO: 1242893
gggagagcuuggccaauga

SEQ ID NO: 1380113 - RNA, 19 nt, Artificial Sequence
  Description of Artificial Sequence: Synthetic oligonucleotide
  Antisense strand to SEQ ID NO: 1380112
ucauuggccaagcucuccc

SEQ ID NO: 1380114 - RNA, 19 nt, Artificial Sequence
  Description of Artificial Sequence: Synthetic oligonucleotide
  Sense strand starting at position 965 of SEQ ID NO: 1242893
gccaguagcacuugggaaa

SEQ ID NO: 1380115 - RNA, 19 nt, Artificial Sequence
  Description of Artificial Sequence: Synthetic oligonucleotide
  Antisense strand to SEQ ID NO: 1380114
uuucccaagugcuacuggc

SEQ ID NO: 1380116 - RNA, 19 nt, Artificial Sequence
  Description of Artificial Sequence: Synthetic oligonucleotide
  Sense strand starting at position 990 of SEQ ID NO: 1242893
agagaaacaugauauaauc

SEQ ID NO: 1380117 - RNA, 19 nt, Artificial Sequence
  Description of Artificial Sequence: Synthetic oligonucleotide
  Antisense strand to SEQ ID NO: 1380116
gauuauaucauguuucucu

SEQ ID NO: 1380118 - RNA, 19 nt, Artificial Sequence
  Description of Artificial Sequence: Synthetic oligonucleotide
  Sense strand starting at position 1023 of SEQ ID NO: 1242893
agaucaagcccuggaaauc

SEQ ID NO: 1380119 - RNA, 19 nt, Artificial Sequence
  Description of Artificial Sequence: Synthetic oligonucleotide
  Antisense strand to SEQ ID NO: 1380118
gauuuccagggcuugaucu

SEQ ID NO: 1380120 - RNA, 19 nt, Artificial Sequence
  Description of Artificial Sequence: Synthetic oligonucleotide
  Sense strand starting at position 1041 of SEQ ID NO: 1242893
cauauuggcccuuggaaag

SEQ ID NO: 1380121 - RNA, 19 nt, Artificial Sequence
  Description of Artificial Sequence: Synthetic oligonucleotide
  Antisense strand to SEQ ID NO: 1380120
cuuuccaagggccaauaug

SEQ ID NO: 1380122 - RNA, 19 nt, Artificial Sequence
  Description of Artificial Sequence: Synthetic oligonucleotide
  Sense strand starting at position 1080 of SEQ ID NO: 1242893
uaagccauuucguuggaau

SEQ ID NO: 1380123 - RNA, 19 nt, Artificial Sequence
  Description of Artificial Sequence: Synthetic oligonucleotide
  Antisense strand to SEQ ID NO: 1380122
auuccaacgaaauggcuua

SEQ ID NO: 1380124 - RNA, 19 nt, Artificial Sequence
  Description of Artificial Sequence: Synthetic oligonucleotide
  Sense strand starting at position 1081 of SEQ ID NO: 1242893
aagccauuucguuggaauu

SEQ ID NO: 1380125 - RNA, 19 nt, Artificial Sequence
  Description of Artificial Sequence: Synthetic oligonucleotide
  Antisense strand to SEQ ID NO: 1380124
aauuccaacgaaauggcuu

SEQ ID NO: 1380126 - RNA, 19 nt, Artificial Sequence
  Description of Artificial Sequence: Synthetic oligonucleotide
  Sense strand starting at position 1082 of SEQ ID NO: 1242893
agccauuucguuggaauug

SEQ ID NO: 1380127 - RNA, 19 nt, Artificial Sequence
  Description of Artificial Sequence: Synthetic oligonucleotide
  Antisense strand to SEQ ID NO: 1380126
caauuccaacgaaauggcu

SEQ ID NO: 1380128 - RNA, 19 nt, Artificial Sequence
  Description of Artificial Sequence: Synthetic oligonucleotide
  Sense strand starting at position 1094 of SEQ ID NO: 1242893
ggaauuggaguuugcacau

SEQ ID NO: 1380129 - RNA, 19 nt, Artificial Sequence
  Description of Artificial Sequence: Synthetic oligonucleotide
  Antisense strand to SEQ ID NO: 1380128
augugcaaacuccaauucc

SEQ ID NO: 1380130 - RNA, 19 nt, Artificial Sequence
  Description of Artificial Sequence: Synthetic oligonucleotide
  Sense strand starting at position 1100 of SEQ ID NO: 1242893
ggaguuugcacaugauuau

SEQ ID NO: 1380131 - RNA, 19 nt, Artificial Sequence
  Description of Artificial Sequence: Synthetic oligonucleotide
  Antisense strand to SEQ ID NO: 1380130
auaaucaugugcaaacucc

SEQ ID NO: 1380132 - RNA, 19 nt, Artificial Sequence
  Description of Artificial Sequence: Synthetic oligonucleotide
  Sense strand starting at position 1101 of SEQ ID NO: 1242893
gaguuugcacaugauuauc

SEQ ID NO: 1380133 - RNA, 19 nt, Artificial Sequence
  Description of Artificial Sequence: Synthetic oligonucleotide
  Antisense strand to SEQ ID NO: 1380132
gauaaucaugugcaaacuc

SEQ ID NO: 1380134 - RNA, 19 nt, Artificial Sequence
  Description of Artificial Sequence: Synthetic oligonucleotide
  Sense strand starting at position 1106 of SEQ ID NO: 1242893
ugcacaugauuaucugacu

SEQ ID NO: 1380135 - RNA, 19 nt, Artificial Sequence
  Description of Artificial Sequence: Synthetic oligonucleotide
  Antisense strand to SEQ ID NO: 1380134
agucagauaaucaugugca

SEQ ID NO: 1380136 - RNA, 19 nt, Artificial Sequence
  Description of Artificial Sequence: Synthetic oligonucleotide
  Sense strand starting at position 1107 of SEQ ID NO: 1242893
gcacaugauuaucugacua

SEQ ID NO: 1380137 - RNA, 19 nt, Artificial Sequence
  Description of Artificial Sequence: Synthetic oligonucleotide
  Antisense strand to SEQ ID NO: 1380136
uagucagauaaucaugugc

SEQ ID NO: 1380138 - RNA, 19 nt, Artificial Sequence
  Description of Artificial Sequence: Synthetic oligonucleotide
  Sense strand starting at position 1183 of SEQ ID NO: 1242893
ggguuucaacuacgucaga

SEQ ID NO: 1380139 - RNA, 19 nt, Artificial Sequence
  Description of Artificial Sequence: Synthetic oligonucleotide
  Antisense strand to SEQ ID NO: 1380138
ucugacguaguugaaaccc

SEQ ID NO: 1380140 - RNA, 19 nt, Artificial Sequence
  Description of Artificial Sequence: Synthetic oligonucleotide
  Sense strand starting at position 1267 of SEQ ID NO: 1242893
ggaauuuaauccgaacaga

SEQ ID NO: 1380141 - RNA, 19 nt, Artificial Sequence
  Description of Artificial Sequence: Synthetic oligonucleotide
  Antisense strand to SEQ ID NO: 1380140
ucuguucggauuaaauucc

SEQ ID NO: 1380142 - RNA, 19 nt, Artificial Sequence
  Description of Artificial Sequence: Synthetic oligonucleotide
  Sense strand starting at position 1313 of SEQ ID NO: 1242893
agcgucucccuuuaaacuu

SEQ ID NO: 1380143 - RNA, 19 nt, Artificial Sequence
  Description of Artificial Sequence: Synthetic oligonucleotide
  Antisense strand to SEQ ID NO: 1380142
aaguuuaaagggagacgcu

SEQ ID NO: 1380144 - RNA, 19 nt, Artificial Sequence
  Description of Artificial Sequence: Synthetic oligonucleotide
  Sense strand starting at position 1419 of SEQ ID NO: 1242893
gccgucaccggagaucuau

SEQ ID NO: 1380145 - RNA, 19 nt, Artificial Sequence
  Description of Artificial Sequence: Synthetic oligonucleotide
  Antisense strand to SEQ ID NO: 1380144
auagaucuccggugacggc

SEQ ID NO: 1380146 - RNA, 19 nt, Artificial Sequence
  Description of Artificial Sequence: Synthetic oligonucleotide
  Sense strand starting at position 2183 of SEQ ID NO: 1242893
gggccaucccgagauugga

SEQ ID NO: 1380147 - RNA, 19 nt, Artificial Sequence
  Description of Artificial Sequence: Synthetic oligonucleotide
  Antisense strand to SEQ ID NO: 1380146
uccaaucucgggauggccc

SEQ ID NO: 1380148 - RNA, 19 nt, Artificial Sequence
  Description of Artificial Sequence: Synthetic oligonucleotide
  Sense strand starting at position 2437 of SEQ ID NO: 1242893
gcggaaccagugugagauu

SEQ ID NO: 1380149 - RNA, 19 nt, Artificial Sequence
  Description of Artificial Sequence: Synthetic oligonucleotide
  Antisense strand to SEQ ID NO: 1380148
aaucucacacugguuccgc

SEQ ID NO: 1380150 - RNA, 19 nt, Artificial Sequence
  Description of Artificial Sequence: Synthetic oligonucleotide
  Sense strand starting at position 2464 of SEQ ID NO: 1242893
cagcgauagcaacggauua

SEQ ID NO: 1380151 - RNA, 19 nt, Artificial Sequence
  Description of Artificial Sequence: Synthetic oligonucleotide
  Antisense strand to SEQ ID NO: 1380150
uaauccguugcuaucgcug

SEQ ID NO: 1380152 - RNA, 19 nt, Artificial Sequence
  Description of Artificial Sequence: Synthetic oligonucleotide
  Sense strand starting at position 2466 of SEQ ID NO: 1242893
gcgauagcaacggauuaua

SEQ ID NO: 1380153 - RNA, 19 nt, Artificial Sequence
  Description of Artificial Sequence: Synthetic oligonucleotide
  Antisense strand to SEQ ID NO: 1380152
uauaauccguugcuaucgc

SEQ ID NO: 1380154 - RNA, 19 nt, Artificial Sequence
  Description of Artificial Sequence: Synthetic oligonucleotide
  Sense strand starting at position 2477 of SEQ ID NO: 1242893
ggauuauaaccuugacuac

SEQ ID NO: 1380155 - RNA, 19 nt, Artificial Sequence
  Description of Artificial Sequence: Synthetic oligonucleotide
  Antisense strand to SEQ ID NO: 1380154
guagucaagguuauaaucc

SEQ ID NO: 1380156 - RNA, 19 nt, Artificial Sequence
  Description of Artificial Sequence: Synthetic oligonucleotide
  Sense strand starting at position 2486 of SEQ ID NO: 1242893
ccuugacuacgauaugagu

SEQ ID NO: 1380157 - RNA, 19 nt, Artificial Sequence
  Description of Artificial Sequence: Synthetic oligonucleotide
  Antisense strand to SEQ ID NO: 1380156
acucauaucguagucaagg

SEQ ID NO: 1380158 - RNA, 19 nt, Artificial Sequence
  Description of Artificial Sequence: Synthetic oligonucleotide
  Sense strand starting at position 2536 of SEQ ID NO: 1242893
aagggacaguuguuucuua

SEQ ID NO: 1380159 - RNA, 19 nt, Artificial Sequence
  Description of Artificial Sequence: Synthetic oligonucleotide
  Antisense strand to SEQ ID NO: 1380158
uaagaaacaacugucccuu

SEQ ID NO: 1380160 - RNA, 19 nt, Artificial Sequence
  Description of Artificial Sequence: Synthetic oligonucleotide
  Sense strand starting at position 2915 of SEQ ID NO: 1242893
ugacgugugauguaacaca

SEQ ID NO: 1380161 - RNA, 19 nt, Artificial Sequence
  Description of Artificial Sequence: Synthetic oligonucleotide
  Antisense strand to SEQ ID NO: 1380160
uguguuacaucacacguca

SEQ ID NO: 1380162 - RNA, 19 nt, Artificial Sequence
  Description of Artificial Sequence: Synthetic oligonucleotide
  Sense strand starting at position 2923 of SEQ ID NO: 1242893
gauguaacacauugaaugu

SEQ ID NO: 1380163 - RNA, 19 nt, Artificial Sequence
  Description of Artificial Sequence: Synthetic oligonucleotide
  Antisense strand to SEQ ID NO: 1380162
acauucaauguguuacauc

SEQ ID NO: 1380164 - RNA, 19 nt, Artificial Sequence
  Description of Artificial Sequence: Synthetic oligonucleotide
  Sense strand starting at position 2939 of SEQ ID NO: 1242893
uguagaagcagguaugaga

SEQ ID NO: 1380165 - RNA, 19 nt, Artificial Sequence
  Description of Artificial Sequence: Synthetic oligonucleotide
  Antisense strand to SEQ ID NO: 1380164
ucucauaccugcuucuaca

SEQ ID NO: 1380166 - RNA, 19 nt, Artificial Sequence
  Description of Artificial Sequence: Synthetic oligonucleotide
  Sense strand starting at position 2948 of SEQ ID NO: 1242893
agguaugagagccaguagu

SEQ ID NO: 1380167 - RNA, 19 nt, Artificial Sequence
  Description of Artificial Sequence: Synthetic oligonucleotide
  Antisense strand to SEQ ID NO: 1380166
acuacuggcucucauaccu

SEQ ID NO: 1380168 - RNA, 19 nt, Artificial Sequence
  Description of Artificial Sequence: Synthetic oligonucleotide
  Sense strand starting at position 3095 of SEQ ID NO: 1242893
uugguaagaucuuuauuga

SEQ ID NO: 1380169 - RNA, 19 nt, Artificial Sequence
  Description of Artificial Sequence: Synthetic oligonucleotide
  Antisense strand to SEQ ID NO: 1380168
ucaauaaagaucuuaccaa

SEQ ID NO: 1380170 - RNA, 19 nt, Artificial Sequence
  Description of Artificial Sequence: Synthetic oligonucleotide
  Sense strand starting at position 3167 of SEQ ID NO: 1242893
uauguaguauagucagaga

SEQ ID NO: 1380171 - RNA, 19 nt, Artificial Sequence
  Description of Artificial Sequence: Synthetic oligonucleotide
  Antisense strand to SEQ ID NO: 1380170
ucucugacuauacuacaua

SEQ ID NO: 1380172 - RNA, 19 nt, Artificial Sequence
  Description of Artificial Sequence: Synthetic oligonucleotide
  Sense strand starting at position 3172 of SEQ ID NO: 1242893
aguauagucagagaguugu

SEQ ID NO: 1380173 - RNA, 19 nt, Artificial Sequence
  Description of Artificial Sequence: Synthetic oligonucleotide
  Antisense strand to SEQ ID NO: 1380172
acaacucucugacuauacu

SEQ ID NO: 1380174 - RNA, 19 nt, Artificial Sequence
  Description of Artificial Sequence: Synthetic oligonucleotide
  Sense strand starting at position 3176 of SEQ ID NO: 1242893
uagucagagaguugugcaa

SEQ ID NO: 1380175 - RNA, 19 nt, Artificial Sequence
  Description of Artificial Sequence: Synthetic oligonucleotide
  Antisense strand to SEQ ID NO: 1380174
uugcacaacucucugacua

SEQ ID NO: 1380176 - RNA, 19 nt, Artificial Sequence
  Description of Artificial Sequence: Synthetic oligonucleotide
  Sense strand starting at position 3307 of SEQ ID NO: 1242893
cuuuauagauuugcguauu

SEQ ID NO: 1380177 - RNA, 19 nt, Artificial Sequence
  Description of Artificial Sequence: Synthetic oligonucleotide
  Antisense strand to SEQ ID NO: 1380176
aauacgcaaaucuauaaag

SEQ ID NO: 1380178 - RNA, 19 nt, Artificial Sequence
  Description of Artificial Sequence: Synthetic oligonucleotide
  Sense strand starting at position 3313 of SEQ ID NO: 1242893
agauuugcguauucugcau

SEQ ID NO: 1380179 - RNA, 19 nt, Artificial Sequence
  Description of Artificial Sequence: Synthetic oligonucleotide
  Antisense strand to SEQ ID NO: 1380178
augcagaauacgcaaaucu

SEQ ID NO: 1380180 - RNA, 19 nt, Artificial Sequence
  Description of Artificial Sequence: Synthetic oligonucleotide
  Sense strand starting at position 3317 of SEQ ID NO: 1242893
uugcguauucugcauauuu

SEQ ID NO: 1380181 - RNA, 19 nt, Artificial Sequence
  Description of Artificial Sequence: Synthetic oligonucleotide
  Antisense strand to SEQ ID NO: 1380180
aaauaugcagaauacgcaa

SEQ ID NO: 1380182 - RNA, 19 nt, Artificial Sequence
  Description of Artificial Sequence: Synthetic oligonucleotide
  Sense strand starting at position 152 of SEQ ID NO: 1242894
ggccgaaauguacacuuua

SEQ ID NO: 1380183 - RNA, 19 nt, Artificial Sequence
  Description of Artificial Sequence: Synthetic oligonucleotide
  Antisense strand to SEQ ID NO: 1380182
uaaaguguacauuucggcc

SEQ ID NO: 1380184 - RNA, 19 nt, Artificial Sequence
  Description of Artificial Sequence: Synthetic oligonucleotide
  Sense strand starting at position 174 of SEQ ID NO: 1242894
ggguaaauugcacgguaug

SEQ ID NO: 1380185 - RNA, 19 nt, Artificial Sequence
  Description of Artificial Sequence: Synthetic oligonucleotide
  Antisense strand to SEQ ID NO: 1380184
cauaccgugcaauuuaccc

SEQ ID NO: 1380186 - RNA, 19 nt, Artificial Sequence
  Description of Artificial Sequence: Synthetic oligonucleotide
  Sense strand starting at position 175 of SEQ ID NO: 1242894
gguaaauugcacgguaugu

SEQ ID NO: 1380187 - RNA, 19 nt, Artificial Sequence
  Description of Artificial Sequence: Synthetic oligonucleotide
  Antisense strand to SEQ ID NO: 1380186
acauaccgugcaauuuacc

SEQ ID NO: 1380188 - RNA, 19 nt, Artificial Sequence
  Description of Artificial Sequence: Synthetic oligonucleotide
  Sense strand starting at position 177 of SEQ ID NO: 1242894
uaaauugcacgguauguga

SEQ ID NO: 1380189 - RNA, 19 nt, Artificial Sequence
  Description of Artificial Sequence: Synthetic oligonucleotide
  Antisense strand to SEQ ID NO: 1380188
ucacauaccgugcaauuua

SEQ ID NO: 1380190 - RNA, 19 nt, Artificial Sequence
  Description of Artificial Sequence: Synthetic oligonucleotide
  Sense strand starting at position 181 of SEQ ID NO: 1242894
uugcacgguaugugaauua

SEQ ID NO: 1380191 - RNA, 19 nt, Artificial Sequence
  Description of Artificial Sequence: Synthetic oligonucleotide
  Antisense strand to SEQ ID NO: 1380190
uaauucacauaccgugcaa

SEQ ID NO: 1380192 - RNA, 19 nt, Artificial Sequence
  Description of Artificial Sequence: Synthetic oligonucleotide
  Sense strand starting at position 186 of SEQ ID NO: 1242894
cgguaugugaauuaucuca

SEQ ID NO: 1380193 - RNA, 19 nt, Artificial Sequence
  Description of Artificial Sequence: Synthetic oligonucleotide
  Antisense strand to SEQ ID NO: 1380192
ugagauaauucacauaccg

SEQ ID NO: 1380194 - RNA, 19 nt, Artificial Sequence
  Description of Artificial Sequence: Synthetic oligonucleotide
  Sense strand starting at position 283 of SEQ ID NO: 1242894
cuaagaaucacccggaguu

SEQ ID NO: 1380195 - RNA, 19 nt, Artificial Sequence
  Description of Artificial Sequence: Synthetic oligonucleotide
  Antisense strand to SEQ ID NO: 1380194
aacuccgggugauucuuag

SEQ ID NO: 1380196 - RNA, 19 nt, Artificial Sequence
  Description of Artificial Sequence: Synthetic oligonucleotide
  Sense strand starting at position 284 of SEQ ID NO: 1242894
uaagaaucacccggaguuu

SEQ ID NO: 1380197 - RNA, 19 nt, Artificial Sequence
  Description of Artificial Sequence: Synthetic oligonucleotide
  Antisense strand to SEQ ID NO: 1380196
aaacuccgggugauucuua

SEQ ID NO: 1380198 - RNA, 19 nt, Artificial Sequence
  Description of Artificial Sequence: Synthetic oligonucleotide
  Sense strand starting at position 826 of SEQ ID NO: 1242894
gacgauguucuggacgaca

SEQ ID NO: 1380199 - RNA, 19 nt, Artificial Sequence
  Description of Artificial Sequence: Synthetic oligonucleotide
  Antisense strand to SEQ ID NO: 1380198
ugucguccagaacaucguc

SEQ ID NO: 1380200 - RNA, 19 nt, Artificial Sequence
  Description of Artificial Sequence: Synthetic oligonucleotide
  Sense strand starting at position 974 of SEQ ID NO: 1242894
guuucaucugcguaacgga

SEQ ID NO: 1380201 - RNA, 19 nt, Artificial Sequence
  Description of Artificial Sequence: Synthetic oligonucleotide
  Antisense strand to SEQ ID NO: 1380200
uccguuacgcagaugaaac

SEQ ID NO: 1380202 - RNA, 19 nt, Artificial Sequence
  Description of Artificial Sequence: Synthetic oligonucleotide
  Sense strand starting at position 977 of SEQ ID NO: 1242894
ucaucugcguaacggaaau

SEQ ID NO: 1380203 - RNA, 19 nt, Artificial Sequence
  Description of Artificial Sequence: Synthetic oligonucleotide
  Antisense strand to SEQ ID NO: 1380202
auuuccguuacgcagauga

SEQ ID NO: 1380204 - RNA, 19 nt, Artificial Sequence
  Description of Artificial Sequence: Synthetic oligonucleotide
  Sense strand starting at position 987 of SEQ ID NO: 1242894
aacggaaauaguggugaau

SEQ ID NO: 1380205 - RNA, 19 nt, Artificial Sequence
  Description of Artificial Sequence: Synthetic oligonucleotide
  Antisense strand to SEQ ID NO: 1380204
auucaccacuauuuccguu

SEQ ID NO: 1380206 - RNA, 19 nt, Artificial Sequence
  Description of Artificial Sequence: Synthetic oligonucleotide
  Sense strand starting at position 989 of SEQ ID NO: 1242894
cggaaauaguggugaauuu

SEQ ID NO: 1380207 - RNA, 19 nt, Artificial Sequence
  Description of Artificial Sequence: Synthetic oligonucleotide
  Antisense strand to SEQ ID NO: 1380206
aaauucaccacuauuuccg

SEQ ID NO: 1380208 - RNA, 19 nt, Artificial Sequence
  Description of Artificial Sequence: Synthetic oligonucleotide
  Sense strand starting at position 1166 of SEQ ID NO: 1242894
acguccucacagggagauu

SEQ ID NO: 1380209 - RNA, 19 nt, Artificial Sequence
  Description of Artificial Sequence: Synthetic oligonucleotide
  Antisense strand to SEQ ID NO: 1380208
aaucucccugugaggacgu

SEQ ID NO: 1380210 - RNA, 19 nt, Artificial Sequence
  Description of Artificial Sequence: Synthetic oligonucleotide
  Sense strand starting at position 2155 of SEQ ID NO: 1242894
agguuaucccagcaccagu

SEQ ID NO: 1380211 - RNA, 19 nt, Artificial Sequence
  Description of Artificial Sequence: Synthetic oligonucleotide
  Antisense strand to SEQ ID NO: 1380210
acuggugcugggauaaccu

SEQ ID NO: 1380212 - RNA, 19 nt, Artificial Sequence
  Description of Artificial Sequence: Synthetic oligonucleotide
  Sense strand starting at position 2197 of SEQ ID NO: 1242894
cgggcuuccucacggauuu

SEQ ID NO: 1380213 - RNA, 19 nt, Artificial Sequence
  Description of Artificial Sequence: Synthetic oligonucleotide
  Antisense strand to SEQ ID NO: 1380212
aaauccgugaggaagcccg

SEQ ID NO: 1380214 - RNA, 19 nt, Artificial Sequence
  Description of Artificial Sequence: Synthetic oligonucleotide
  Sense strand starting at position 2301 of SEQ ID NO: 1242894
gguguuuaggcucauggaa

SEQ ID NO: 1380215 - RNA, 19 nt, Artificial Sequence
  Description of Artificial Sequence: Synthetic oligonucleotide
  Antisense strand to SEQ ID NO: 1380214
uuccaugagccuaaacacc

SEQ ID NO: 1380216 - RNA, 19 nt, Artificial Sequence
  Description of Artificial Sequence: Synthetic oligonucleotide
  Sense strand starting at position 2380 of SEQ ID NO: 1242894
gguccagcccucgucuauu

SEQ ID NO: 1380217 - RNA, 19 nt, Artificial Sequence
  Description of Artificial Sequence: Synthetic oligonucleotide
  Antisense strand to SEQ ID NO: 1380216
aauagacgagggcuggacc

SEQ ID NO: 1380218 - RNA, 19 nt, Artificial Sequence
  Description of Artificial Sequence: Synthetic oligonucleotide
  Sense strand starting at position 2386 of SEQ ID NO: 1242894
gcccucgucuauuaguuua

SEQ ID NO: 1380219 - RNA, 19 nt, Artificial Sequence
  Description of Artificial Sequence: Synthetic oligonucleotide
  Antisense strand to SEQ ID NO: 1380218
uaaacuaauagacgagggc

SEQ ID NO: 1380220 - RNA, 19 nt, Artificial Sequence
  Description of Artificial Sequence: Synthetic oligonucleotide
  Sense strand starting at position 2661 of SEQ ID NO: 1242894
gcugcuuuccugggacacu

SEQ ID NO: 1380221 - RNA, 19 nt, Artificial Sequence
  Description of Artificial Sequence: Synthetic oligonucleotide
  Antisense strand to SEQ ID NO: 1380220
agugucccaggaaagcagc

SEQ ID NO: 1380222 - RNA, 19 nt, Artificial Sequence
  Description of Artificial Sequence: Synthetic oligonucleotide
  Sense strand starting at position 2662 of SEQ ID NO: 1242894
cugcuuuccugggacacuu

SEQ ID NO: 1380223 - RNA, 19 nt, Artificial Sequence
  Description of Artificial Sequence: Synthetic oligonucleotide
  Antisense strand to SEQ ID NO: 1380222
aagugucccaggaaagcag

SEQ ID NO: 1380224 - RNA, 19 nt, Artificial Sequence
  Description of Artificial Sequence: Synthetic oligonucleotide
  Sense strand starting at position 2894 of SEQ ID NO: 1242894
cgccuucucacguccgaau

SEQ ID NO: 1380225 - RNA, 19 nt, Artificial Sequence
  Description of Artificial Sequence: Synthetic oligonucleotide
  Antisense strand to SEQ ID NO: 1380224
auucggacgugagaaggcg

SEQ ID NO: 1380226 - RNA, 19 nt, Artificial Sequence
  Description of Artificial Sequence: Synthetic oligonucleotide
  Sense strand starting at position 3039 of SEQ ID NO: 1242894
cgggcauugucugguguca

SEQ ID NO: 1380227 - RNA, 19 nt, Artificial Sequence
  Description of Artificial Sequence: Synthetic oligonucleotide
  Antisense strand to SEQ ID NO: 1380226
ugacaccagacaaugcccg

SEQ ID NO: 1380228 - RNA, 19 nt, Artificial Sequence
  Description of Artificial Sequence: Synthetic oligonucleotide
  Sense strand starting at position 3041 of SEQ ID NO: 1242894
ggcauugucuggugucauu

SEQ ID NO: 1380229 - RNA, 19 nt, Artificial Sequence
  Description of Artificial Sequence: Synthetic oligonucleotide
  Antisense strand to SEQ ID NO: 1380228
aaugacaccagacaaugcc

SEQ ID NO: 1380230 - RNA, 19 nt, Artificial Sequence
  Description of Artificial Sequence: Synthetic oligonucleotide
  Sense strand starting at position 3093 of SEQ ID NO: 1242894
acgagaauugcgcucuguc

SEQ ID NO: 1380231 - RNA, 19 nt, Artificial Sequence
  Description of Artificial Sequence: Synthetic oligonucleotide
  Antisense strand to SEQ ID NO: 1380230
gacagagcgcaauucucgu

SEQ ID NO: 1380232 - RNA, 19 nt, Artificial Sequence
  Description of Artificial Sequence: Synthetic oligonucleotide
  Sense strand starting at position 3369 of SEQ ID NO: 1242894
gcuaccuuugugcauuuau

SEQ ID NO: 1380233 - RNA, 19 nt, Artificial Sequence
  Description of Artificial Sequence: Synthetic oligonucleotide
  Antisense strand to SEQ ID NO: 1380232
auaaaugcacaaagguagc

SEQ ID NO: 1380234 - RNA, 19 nt, Artificial Sequence
  Description of Artificial Sequence: Synthetic oligonucleotide
  Sense strand starting at position 3380 of SEQ ID NO: 1242894
gcauuuauuugcuguuauc

SEQ ID NO: 1380235 - RNA, 19 nt, Artificial Sequence
  Description of Artificial Sequence: Synthetic oligonucleotide
  Antisense strand to SEQ ID NO: 1380234
gauaacagcaaauaaaugc

SEQ ID NO: 1380236 - RNA, 19 nt, Artificial Sequence
  Description of Artificial Sequence: Synthetic oligonucleotide
  Sense strand starting at position 3457 of SEQ ID NO: 1242894
guauaugaaucucugaugu

SEQ ID NO: 1380237 - RNA, 19 nt, Artificial Sequence
  Description of Artificial Sequence: Synthetic oligonucleotide
  Antisense strand to SEQ ID NO: 1380236
acaucagagauucauauac

SEQ ID NO: 1380238 - RNA, 19 nt, Artificial Sequence
  Description of Artificial Sequence: Synthetic oligonucleotide
  Sense strand starting at position 3459 of SEQ ID NO: 1242894
auaugaaucucugauguca

SEQ ID NO: 1380239 - RNA, 19 nt, Artificial Sequence
  Description of Artificial Sequence: Synthetic oligonucleotide
  Antisense strand to SEQ ID NO: 1380238
ugacaucagagauucauau

SEQ ID NO: 1380240 - RNA, 19 nt, Artificial Sequence
  Description of Artificial Sequence: Synthetic oligonucleotide
  Sense strand starting at position 3461 of SEQ ID NO: 1242894
augaaucucugaugucaaa

SEQ ID NO: 1380241 - RNA, 19 nt, Artificial Sequence
  Description of Artificial Sequence: Synthetic oligonucleotide
  Antisense strand to SEQ ID NO: 1380240
uuugacaucagagauucau

SEQ ID NO: 1380242 - RNA, 19 nt, Artificial Sequence
  Description of Artificial Sequence: Synthetic oligonucleotide
  Sense strand starting at position 3539 of SEQ ID NO: 1242894
uggcgugaucucugcuuau

SEQ ID NO: 1380243 - RNA, 19 nt, Artificial Sequence
  Description of Artificial Sequence: Synthetic oligonucleotide
  Antisense strand to SEQ ID NO: 1380242
auaagcagagaucacgcca

SEQ ID NO: 1380244 - RNA, 19 nt, Artificial Sequence
  Description of Artificial Sequence: Synthetic oligonucleotide
  Sense strand starting at position 3541 of SEQ ID NO: 1242894
gcgugaucucugcuuauug

SEQ ID NO: 1380245 - RNA, 19 nt, Artificial Sequence
  Description of Artificial Sequence: Synthetic oligonucleotide
  Antisense strand to SEQ ID NO: 1380244
caauaagcagagaucacgc

SEQ ID NO: 1380246 - RNA, 19 nt, Artificial Sequence
  Description of Artificial Sequence: Synthetic oligonucleotide
  Sense strand starting at position 3629 of SEQ ID NO: 1242894
cgguaaucaugcuuaauuu

SEQ ID NO: 1380247 - RNA, 19 nt, Artificial Sequence
  Description of Artificial Sequence: Synthetic oligonucleotide
  Antisense strand to SEQ ID NO: 1380246
aaauuaagcaugauuaccg

SEQ ID NO: 1380248 - RNA, 19 nt, Artificial Sequence
  Description of Artificial Sequence: Synthetic oligonucleotide
  Sense strand starting at position 3690 of SEQ ID NO: 1242894
ugguaucaaaccggaguua

SEQ ID NO: 1380249 - RNA, 19 nt, Artificial Sequence
  Description of Artificial Sequence: Synthetic oligonucleotide
  Antisense strand to SEQ ID NO: 1380248
uaacuccgguuugauacca

SEQ ID NO: 1380250 - RNA, 19 nt, Artificial Sequence
  Description of Artificial Sequence: Synthetic oligonucleotide
  Sense strand starting at position 3701 of SEQ ID NO: 1242894
cggaguuaccuccggugau

SEQ ID NO: 1380251 - RNA, 19 nt, Artificial Sequence
  Description of Artificial Sequence: Synthetic oligonucleotide
  Antisense strand to SEQ ID NO: 1380250
aucaccggagguaacuccg

SEQ ID NO: 1380252 - RNA, 19 nt, Artificial Sequence
  Description of Artificial Sequence: Synthetic oligonucleotide
  Sense strand starting at position 3702 of SEQ ID NO: 1242894
ggaguuaccuccggugauc

SEQ ID NO: 1380253 - RNA, 19 nt, Artificial Sequence
  Description of Artificial Sequence: Synthetic oligonucleotide
  Antisense strand to SEQ ID NO: 1380252
gaucaccggagguaacucc

SEQ ID NO: 1380254 - RNA, 19 nt, Artificial Sequence
  Description of Artificial Sequence: Synthetic oligonucleotide
  Sense strand starting at position 3765 of SEQ ID NO: 1242894
caccuugccugucgagaua

SEQ ID NO: 1380255 - RNA, 19 nt, Artificial Sequence
  Description of Artificial Sequence: Synthetic oligonucleotide
  Antisense strand to SEQ ID NO: 1380254
uaucucgacaggcaaggug

SEQ ID NO: 1380256 - RNA, 19 nt, Artificial Sequence
  Description of Artificial Sequence: Synthetic oligonucleotide
  Sense strand starting at position 3768 of SEQ ID NO: 1242894
cuugccugucgagauauua

SEQ ID NO: 1380257 - RNA, 19 nt, Artificial Sequence
  Description of Artificial Sequence: Synthetic oligonucleotide
  Antisense strand to SEQ ID NO: 1380256
uaauaucucgacaggcaag

SEQ ID NO: 1380258 - RNA, 19 nt, Artificial Sequence
  Description of Artificial Sequence: Synthetic oligonucleotide
  Sense strand starting at position 186 of SEQ ID NO: 1242895
uuuggagguccauagcauu

SEQ ID NO: 1380259 - RNA, 19 nt, Artificial Sequence
  Description of Artificial Sequence: Synthetic oligonucleotide
  Antisense strand to SEQ ID NO: 1380258
aaugcuauggaccuccaaa

SEQ ID NO: 1380260 - RNA, 19 nt, Artificial Sequence
  Description of Artificial Sequence: Synthetic oligonucleotide
  Sense strand starting at position 228 of SEQ ID NO: 1242895
agaacacugcgccaucaaa

SEQ ID NO: 1380261 - RNA, 19 nt, Artificial Sequence
  Description of Artificial Sequence: Synthetic oligonucleotide
  Antisense strand to SEQ ID NO: 1380260
uuugauggcgcaguguucu

SEQ ID NO: 1380262 - RNA, 19 nt, Artificial Sequence
  Description of Artificial Sequence: Synthetic oligonucleotide
  Sense strand starting at position 248 of SEQ ID NO: 1242895
cuucuucggaaaggucuua

SEQ ID NO: 1380263 - RNA, 19 nt, Artificial Sequence
  Description of Artificial Sequence: Synthetic oligonucleotide
  Antisense strand to SEQ ID NO: 1380262
uaagaccuuuccgaagaag

SEQ ID NO: 1380264 - RNA, 19 nt, Artificial Sequence
  Description of Artificial Sequence: Synthetic oligonucleotide
  Sense strand starting at position 604 of SEQ ID NO: 1242895
uuccaaguguaccuuuaaa

SEQ ID NO: 1380265 - RNA, 19 nt, Artificial Sequence
  Description of Artificial Sequence: Synthetic oligonucleotide
  Antisense strand to SEQ ID NO: 1380264
uuuaaagguacacuuggaa

SEQ ID NO: 1380266 - RNA, 19 nt, Artificial Sequence
  Description of Artificial Sequence: Synthetic oligonucleotide
  Sense strand starting at position 645 of SEQ ID NO: 1242895
uuacaugugauguguauuu

SEQ ID NO: 1380267 - RNA, 19 nt, Artificial Sequence
  Description of Artificial Sequence: Synthetic oligonucleotide
  Antisense strand to SEQ ID NO: 1380266
aaauacacaucacauguaa

SEQ ID NO: 1380268 - RNA, 19 nt, Artificial Sequence
  Description of Artificial Sequence: Synthetic oligonucleotide
  Sense strand starting at position 687 of SEQ ID NO: 1242895
ucgugaagucuguucuugu

SEQ ID NO: 1380269 - RNA, 19 nt, Artificial Sequence
  Description of Artificial Sequence: Synthetic oligonucleotide
  Antisense strand to SEQ ID NO: 1380268
acaagaacagacuucacga

SEQ ID NO: 1380270 - RNA, 19 nt, Artificial Sequence
  Description of Artificial Sequence: Synthetic oligonucleotide
  Sense strand starting at position 695 of SEQ ID NO: 1242895
ucuguucuuguggacagau

SEQ ID NO: 1380271 - RNA, 19 nt, Artificial Sequence
  Description of Artificial Sequence: Synthetic oligonucleotide
  Antisense strand to SEQ ID NO: 1380270
aucuguccacaagaacaga

SEQ ID NO: 1380272 - RNA, 19 nt, Artificial Sequence
  Description of Artificial Sequence: Synthetic oligonucleotide
  Sense strand starting at position 711 of SEQ ID NO: 1242895
gaugcaugccuguucuguu

SEQ ID NO: 1380273 - RNA, 19 nt, Artificial Sequence
  Description of Artificial Sequence: Synthetic oligonucleotide
  Antisense strand to SEQ ID NO: 1380272
aacagaacaggcaugcauc

SEQ ID NO: 1380274 - RNA, 19 nt, Artificial Sequence
  Description of Artificial Sequence: Synthetic oligonucleotide
  Sense strand starting at position 858 of SEQ ID NO: 1242895
agcaaucuugcucagugau

SEQ ID NO: 1380275 - RNA, 19 nt, Artificial Sequence
  Description of Artificial Sequence: Synthetic oligonucleotide
  Antisense strand to SEQ ID NO: 1380274
aucacugagcaagauugcu

SEQ ID NO: 1380276 - RNA, 19 nt, Artificial Sequence
  Description of Artificial Sequence: Synthetic oligonucleotide
  Sense strand starting at position 864 of SEQ ID NO: 1242895
cuugcucagugauuaagac

SEQ ID NO: 1380277 - RNA, 19 nt, Artificial Sequence
  Description of Artificial Sequence: Synthetic oligonucleotide
  Antisense strand to SEQ ID NO: 1380276
gucuuaaucacugagcaag

SEQ ID NO: 1380278 - RNA, 19 nt, Artificial Sequence
  Description of Artificial Sequence: Synthetic oligonucleotide
  Sense strand starting at position 922 of SEQ ID NO: 1242895
gucucuuuccagugaaauc

SEQ ID NO: 1380279 - RNA, 19 nt, Artificial Sequence
  Description of Artificial Sequence: Synthetic oligonucleotide
  Antisense strand to SEQ ID NO: 1380278
gauuucacuggaaagagac

SEQ ID NO: 1380280 - RNA, 19 nt, Artificial Sequence
  Description of Artificial Sequence: Synthetic oligonucleotide
  Sense strand starting at position 933 of SEQ ID NO: 1242895
gugaaaucacuuugagcua

SEQ ID NO: 1380281 - RNA, 19 nt, Artificial Sequence
  Description of Artificial Sequence: Synthetic oligonucleotide
  Antisense strand to SEQ ID NO: 1380280
uagcucaaagugauuucac

SEQ ID NO: 1380282 - RNA, 19 nt, Artificial Sequence
  Description of Artificial Sequence: Synthetic oligonucleotide
  Sense strand starting at position 970 of SEQ ID NO: 1242895
cguuucccagucuaugaaa

SEQ ID NO: 1380283 - RNA, 19 nt, Artificial Sequence
  Description of Artificial Sequence: Synthetic oligonucleotide
  Antisense strand to SEQ ID NO: 1380282
uuucauagacugggaaacg

SEQ ID NO: 1380284 - RNA, 19 nt, Artificial Sequence
  Description of Artificial Sequence: Synthetic oligonucleotide
  Sense strand starting at position 978 of SEQ ID NO: 1242895
agucuaugaaaugggcaua

SEQ ID NO: 1380285 - RNA, 19 nt, Artificial Sequence
  Description of Artificial Sequence: Synthetic oligonucleotide
  Antisense strand to SEQ ID NO: 1380284
uaugcccauuucauagacu

SEQ ID NO: 1380286 - RNA, 19 nt, Artificial Sequence
  Description of Artificial Sequence: Synthetic oligonucleotide
  Sense strand starting at position 989 of SEQ ID NO: 1242895
ugggcauaggguuguuaca

SEQ ID NO: 1380287 - RNA, 19 nt, Artificial Sequence
  Description of Artificial Sequence: Synthetic oligonucleotide
  Antisense strand to SEQ ID NO: 1380286
uguaacaacccuaugccca

SEQ ID NO: 1380288 - RNA, 19 nt, Artificial Sequence
  Description of Artificial Sequence: Synthetic oligonucleotide
  Sense strand starting at position 991 of SEQ ID NO: 1242895
ggcauaggguuguuacaau

SEQ ID NO: 1380289 - RNA, 19 nt, Artificial Sequence
  Description of Artificial Sequence: Synthetic oligonucleotide
  Antisense strand to SEQ ID NO: 1380288
auuguaacaacccuaugcc

SEQ ID NO: 1380290 - RNA, 19 nt, Artificial Sequence
  Description of Artificial Sequence: Synthetic oligonucleotide
  Sense strand starting at position 998 of SEQ ID NO: 1242895
gguuguuacaaucagguaa

SEQ ID NO: 1380291 - RNA, 19 nt, Artificial Sequence
  Description of Artificial Sequence: Synthetic oligonucleotide
  Antisense strand to SEQ ID NO: 1380290
uuaccugauuguaacaacc

SEQ ID NO: 1380292 - RNA, 19 nt, Artificial Sequence
  Description of Artificial Sequence: Synthetic oligonucleotide
  Sense strand starting at position 1031 of SEQ ID NO: 1242895
ugaguagugccugacacau

SEQ ID NO: 1380293 - RNA, 19 nt, Artificial Sequence
  Description of Artificial Sequence: Synthetic oligonucleotide
  Antisense strand to SEQ ID NO: 1380292
augugucaggcacuacuca

SEQ ID NO: 1380294 - RNA, 19 nt, Artificial Sequence
  Description of Artificial Sequence: Synthetic oligonucleotide
  Sense strand starting at position 1073 of SEQ ID NO: 1242895
acuauuacuugucuggaca

SEQ ID NO: 1380295 - RNA, 19 nt, Artificial Sequence
  Description of Artificial Sequence: Synthetic oligonucleotide
  Antisense strand to SEQ ID NO: 1380294
uguccagacaaguaauagu

SEQ ID NO: 1380296 - RNA, 19 nt, Artificial Sequence
  Description of Artificial Sequence: Synthetic oligonucleotide
  Sense strand starting at position 1074 of SEQ ID NO: 1242895
cuauuacuugucuggacau

SEQ ID NO: 1380297 - RNA, 19 nt, Artificial Sequence
  Description of Artificial Sequence: Synthetic oligonucleotide
  Antisense strand to SEQ ID NO: 1380296
auguccagacaaguaauag

SEQ ID NO: 1380298 - RNA, 19 nt, Artificial Sequence
  Description of Artificial Sequence: Synthetic oligonucleotide
  Sense strand starting at position 1101 of SEQ ID NO: 1242895
aaguaaacagcguacaaau

SEQ ID NO: 1380299 - RNA, 19 nt, Artificial Sequence
  Description of Artificial Sequence: Synthetic oligonucleotide
  Antisense strand to SEQ ID NO: 1380298
auuuguacgcuguuuacuu

SEQ ID NO: 1380300 - RNA, 19 nt, Artificial Sequence
  Description of Artificial Sequence: Synthetic oligonucleotide
  Sense strand starting at position 1112 of SEQ ID NO: 1242895
guacaaaugucauuaauga

SEQ ID NO: 1380301 - RNA, 19 nt, Artificial Sequence
  Description of Artificial Sequence: Synthetic oligonucleotide
  Antisense strand to SEQ ID NO: 1380300
ucauuaaugacauuuguac

SEQ ID NO: 1380302 - RNA, 19 nt, Artificial Sequence
  Description of Artificial Sequence: Synthetic oligonucleotide
  Sense strand starting at position 1136 of SEQ ID NO: 1242895
acauaacuagcuuagagua

SEQ ID NO: 1380303 - RNA, 19 nt, Artificial Sequence
  Description of Artificial Sequence: Synthetic oligonucleotide
  Antisense strand to SEQ ID NO: 1380302
uacucuaagcuaguuaugu

SEQ ID NO: 1380304 - RNA, 19 nt, Artificial Sequence
  Description of Artificial Sequence: Synthetic oligonucleotide
  Sense strand starting at position 1202 of SEQ ID NO: 1242895
ccucuaguuucuucugaug

SEQ ID NO: 1380305 - RNA, 19 nt, Artificial Sequence
  Description of Artificial Sequence: Synthetic oligonucleotide
  Antisense strand to SEQ ID NO: 1380304
caucagaagaaacuagagg

SEQ ID NO: 1380306 - RNA, 19 nt, Artificial Sequence
  Description of Artificial Sequence: Synthetic oligonucleotide
  Sense strand starting at position 1293 of SEQ ID NO: 1242895
ccaggaguucgacaguaag

SEQ ID NO: 1380307 - RNA, 19 nt, Artificial Sequence
  Description of Artificial Sequence: Synthetic oligonucleotide
  Antisense strand to SEQ ID NO: 1380306
cuuacugucgaacuccugg

SEQ ID NO: 1380308 - RNA, 19 nt, Artificial Sequence
  Description of Artificial Sequence: Synthetic oligonucleotide
  Sense strand starting at position 1599 of SEQ ID NO: 1242895
ugggaauuguagucaucag

SEQ ID NO: 1380309 - RNA, 19 nt, Artificial Sequence
  Description of Artificial Sequence: Synthetic oligonucleotide
  Antisense strand to SEQ ID NO: 1380308
cugaugacuacaauuccca

SEQ ID NO: 1380310 - RNA, 19 nt, Artificial Sequence
  Description of Artificial Sequence: Synthetic oligonucleotide
  Sense strand starting at position 1705 of SEQ ID NO: 1242895
ccucuuagaugccugaaga

SEQ ID NO: 1380311 - RNA, 19 nt, Artificial Sequence
  Description of Artificial Sequence: Synthetic oligonucleotide
  Antisense strand to SEQ ID NO: 1380310
ucuucaggcaucuaagagg

SEQ ID NO: 1380312 - RNA, 19 nt, Artificial Sequence
  Description of Artificial Sequence: Synthetic oligonucleotide
  Sense strand starting at position 1706 of SEQ ID NO: 1242895
cucuuagaugccugaagau

SEQ ID NO: 1380313 - RNA, 19 nt, Artificial Sequence
  Description of Artificial Sequence: Synthetic oligonucleotide
  Antisense strand to SEQ ID NO: 1380312
aucuucaggcaucuaagag

SEQ ID NO: 1380314 - RNA, 19 nt, Artificial Sequence
  Description of Artificial Sequence: Synthetic oligonucleotide
  Sense strand starting at position 2135 of SEQ ID NO: 1242895
cgguugaguggguagugaa

SEQ ID NO: 1380315 - RNA, 19 nt, Artificial Sequence
  Description of Artificial Sequence: Synthetic oligonucleotide
  Antisense strand to SEQ ID NO: 1380314
uucacuacccacucaaccg

SEQ ID NO: 1380316 - RNA, 19 nt, Artificial Sequence
  Description of Artificial Sequence: Synthetic oligonucleotide
  Sense strand starting at position 2397 of SEQ ID NO: 1242895
cuuguuuaaacggauuguu

SEQ ID NO: 1380317 - RNA, 19 nt, Artificial Sequence
  Description of Artificial Sequence: Synthetic oligonucleotide
  Antisense strand to SEQ ID NO: 1380316
aacaauccguuuaaacaag

SEQ ID NO: 1380318 - RNA, 19 nt, Artificial Sequence
  Description of Artificial Sequence: Synthetic oligonucleotide
  Sense strand starting at position 2427 of SEQ ID NO: 1242895
cccauagaguuucugauuc

SEQ ID NO: 1380319 - RNA, 19 nt, Artificial Sequence
  Description of Artificial Sequence: Synthetic oligonucleotide
  Antisense strand to SEQ ID NO: 1380318
gaaucagaaacucuauggg

SEQ ID NO: 1380320 - RNA, 19 nt, Artificial Sequence
  Description of Artificial Sequence: Synthetic oligonucleotide
  Sense strand starting at position 2435 of SEQ ID NO: 1242895
guuucugauucuguaaauc

SEQ ID NO: 1380321 - RNA, 19 nt, Artificial Sequence
  Description of Artificial Sequence: Synthetic oligonucleotide
  Antisense strand to SEQ ID NO: 1380320
gauuuacagaaucagaaac

SEQ ID NO: 1380322 - RNA, 19 nt, Artificial Sequence
  Description of Artificial Sequence: Synthetic oligonucleotide
  Sense strand starting at position 2573 of SEQ ID NO: 1242895
gcgcauuauuuccuuauga

SEQ ID NO: 1380323 - RNA, 19 nt, Artificial Sequence
  Description of Artificial Sequence: Synthetic oligonucleotide
  Antisense strand to SEQ ID NO: 1380322
ucauaaggaaauaaugcgc

SEQ ID NO: 1380324 - RNA, 19 nt, Artificial Sequence
  Description of Artificial Sequence: Synthetic oligonucleotide
  Sense strand starting at position 2574 of SEQ ID NO: 1242895
cgcauuauuuccuuaugau

SEQ ID NO: 1380325 - RNA, 19 nt, Artificial Sequence
  Description of Artificial Sequence: Synthetic oligonucleotide
  Antisense strand to SEQ ID NO: 1380324
aucauaaggaaauaaugcg

SEQ ID NO: 1380326 - RNA, 19 nt, Artificial Sequence
  Description of Artificial Sequence: Synthetic oligonucleotide
  Sense strand starting at position 2623 of SEQ ID NO: 1242895
uccuccaucgcugaagaga

SEQ ID NO: 1380327 - RNA, 19 nt, Artificial Sequence
  Description of Artificial Sequence: Synthetic oligonucleotide
  Antisense strand to SEQ ID NO: 1380326
ucucuucagcgauggagga

SEQ ID NO: 1380328 - RNA, 19 nt, Artificial Sequence
  Description of Artificial Sequence: Synthetic oligonucleotide
  Sense strand starting at position 2695 of SEQ ID NO: 1242895
uaaggaguccaggagcuuu

SEQ ID NO: 1380329 - RNA, 19 nt, Artificial Sequence
  Description of Artificial Sequence: Synthetic oligonucleotide
  Antisense strand to SEQ ID NO: 1380328
aaagcuccuggacuccuua

SEQ ID NO: 1380330 - RNA, 19 nt, Artificial Sequence
  Description of Artificial Sequence: Synthetic oligonucleotide
  Sense strand starting at position 2744 of SEQ ID NO: 1242895
ccaacaucccauggaagua

SEQ ID NO: 1380331 - RNA, 19 nt, Artificial Sequence
  Description of Artificial Sequence: Synthetic oligonucleotide
  Antisense strand to SEQ ID NO: 1380330
uacuuccaugggauguugg

SEQ ID NO: 1380332 - RNA, 19 nt, Artificial Sequence
  Description of Artificial Sequence: Synthetic oligonucleotide
  Sense strand starting at position 2868 of SEQ ID NO: 1242895
cgauuagacguacaccuaa

SEQ ID NO: 1380333 - RNA, 19 nt, Artificial Sequence
  Description of Artificial Sequence: Synthetic oligonucleotide
  Antisense strand to SEQ ID NO: 1380332
uuagguguacgucuaaucg

SEQ ID NO: 1380334 - RNA, 19 nt, Artificial Sequence
  Description of Artificial Sequence: Synthetic oligonucleotide
  Sense strand starting at position 3513 of SEQ ID NO: 1242895
accucuuuccgaggaacuu

SEQ ID NO: 1380335 - RNA, 19 nt, Artificial Sequence
  Description of Artificial Sequence: Synthetic oligonucleotide
  Antisense strand to SEQ ID NO: 1380334
aaguuccucggaaagaggu

SEQ ID NO: 1380336 - RNA, 19 nt, Artificial Sequence
  Description of Artificial Sequence: Synthetic oligonucleotide
  Sense strand starting at position 3524 of SEQ ID NO: 1242895
aggaacuuccagcauacuu

SEQ ID NO: 1380337 - RNA, 19 nt, Artificial Sequence
  Description of Artificial Sequence: Synthetic oligonucleotide
  Antisense strand to SEQ ID NO: 1380336
aaguaugcuggaaguuccu

SEQ ID NO: 1380338 - RNA, 19 nt, Artificial Sequence
  Description of Artificial Sequence: Synthetic oligonucleotide
  Sense strand starting at position 2425 of SEQ ID NO: 1242896
aaagucuucuugcugaaag

SEQ ID NO: 1380339 - RNA, 19 nt, Artificial Sequence
  Description of Artificial Sequence: Synthetic oligonucleotide
  Antisense strand to SEQ ID NO: 1380338
cuuucagcaagaagacuuu

SEQ ID NO: 1380340 - RNA, 19 nt, Artificial Sequence
  Description of Artificial Sequence: Synthetic oligonucleotide
  Sense strand starting at position 2426 of SEQ ID NO: 1242896
aagucuucuugcugaaagc

SEQ ID NO: 1380341 - RNA, 19 nt, Artificial Sequence
  Description of Artificial Sequence: Synthetic oligonucleotide
  Antisense strand to SEQ ID NO: 1380340
gcuuucagcaagaagacuu

SEQ ID NO: 1380342 - RNA, 19 nt, Artificial Sequence
  Description of Artificial Sequence: Synthetic oligonucleotide
  Sense strand starting at position 2540 of SEQ ID NO: 1242896
caggaauccgucggcucua

SEQ ID NO: 1380343 - RNA, 19 nt, Artificial Sequence
  Description of Artificial Sequence: Synthetic oligonucleotide
  Antisense strand to SEQ ID NO: 1380342
uagagccgacggauuccug

SEQ ID NO: 1380344 - RNA, 19 nt, Artificial Sequence
  Description of Artificial Sequence: Synthetic oligonucleotide
  Sense strand starting at position 2541 of SEQ ID NO: 1242896
aggaauccgucggcucuaa

SEQ ID NO: 1380345 - RNA, 19 nt, Artificial Sequence
  Description of Artificial Sequence: Synthetic oligonucleotide
  Antisense strand to SEQ ID NO: 1380344
uuagagccgacggauuccu

SEQ ID NO: 1380346 - RNA, 19 nt, Artificial Sequence
  Description of Artificial Sequence: Synthetic oligonucleotide
  Sense strand starting at position 2762 of SEQ ID NO: 1242896
ucccaaagaccuuguaagu

SEQ ID NO: 1380347 - RNA, 19 nt, Artificial Sequence
  Description of Artificial Sequence: Synthetic oligonucleotide
  Antisense strand to SEQ ID NO: 1380346
acuuacaaggucuuuggga

SEQ ID NO: 1380348 - RNA, 19 nt, Artificial Sequence
  Description of Artificial Sequence: Synthetic oligonucleotide
  Sense strand starting at position 2771 of SEQ ID NO: 1242896
ccuuguaaguagcaaugau

SEQ ID NO: 1380349 - RNA, 19 nt, Artificial Sequence
  Description of Artificial Sequence: Synthetic oligonucleotide
  Antisense strand to SEQ ID NO: 1380348
aucauugcuacuuacaagg

SEQ ID NO: 1380350 - RNA, 19 nt, Artificial Sequence
  Description of Artificial Sequence: Synthetic oligonucleotide
  Sense strand starting at position 2780 of SEQ ID NO: 1242896
uagcaaugauccugggaca

SEQ ID NO: 1380351 - RNA, 19 nt, Artificial Sequence
  Description of Artificial Sequence: Synthetic oligonucleotide
  Antisense strand to SEQ ID NO: 1380350
ugucccaggaucauugcua

SEQ ID NO: 1380352 - RNA, 19 nt, Artificial Sequence
  Description of Artificial Sequence: Synthetic oligonucleotide
  Sense strand starting at position 2781 of SEQ ID NO: 1242896
agcaaugauccugggacau

SEQ ID NO: 1380353 - RNA, 19 nt, Artificial Sequence
  Description of Artificial Sequence: Synthetic oligonucleotide
  Antisense strand to SEQ ID NO: 1380352
augucccaggaucauugcu

SEQ ID NO: 1380354 - RNA, 19 nt, Artificial Sequence
  Description of Artificial Sequence: Synthetic oligonucleotide
  Sense strand starting at position 2803 of SEQ ID NO: 1242896
ucuuauuaaugagugauga

SEQ ID NO: 1380355 - RNA, 19 nt, Artificial Sequence
  Description of Artificial Sequence: Synthetic oligonucleotide
  Antisense strand to SEQ ID NO: 1380354
ucaucacucauuaauaaga

SEQ ID NO: 1380356 - RNA, 19 nt, Artificial Sequence
  Description of Artificial Sequence: Synthetic oligonucleotide
  Sense strand starting at position 2804 of SEQ ID NO: 1242896
cuuauuaaugagugaugaa

SEQ ID NO: 1380357 - RNA, 19 nt, Artificial Sequence
  Description of Artificial Sequence: Synthetic oligonucleotide
  Antisense strand to SEQ ID NO: 1380356
uucaucacucauuaauaag

SEQ ID NO: 1380358 - RNA, 19 nt, Artificial Sequence
  Description of Artificial Sequence: Synthetic oligonucleotide
  Sense strand starting at position 2819 of SEQ ID NO: 1242896
ugaagcgaauaauuagauu

SEQ ID NO: 1380359 - RNA, 19 nt, Artificial Sequence
  Description of Artificial Sequence: Synthetic oligonucleotide
  Antisense strand to SEQ ID NO: 1380358
aaucuaauuauucgcuuca

SEQ ID NO: 1380360 - RNA, 19 nt, Artificial Sequence
  Description of Artificial Sequence: Synthetic oligonucleotide
  Sense strand starting at position 2899 of SEQ ID NO: 1242896
gggccucuccuggauguua

SEQ ID NO: 1380361 - RNA, 19 nt, Artificial Sequence
  Description of Artificial Sequence: Synthetic oligonucleotide
  Antisense strand to SEQ ID NO: 1380360
uaacauccaggagaggccc

SEQ ID NO: 1380362 - RNA, 19 nt, Artificial Sequence
  Description of Artificial Sequence: Synthetic oligonucleotide
  Sense strand starting at position 2901 of SEQ ID NO: 1242896
gccucuccuggauguuaua

SEQ ID NO: 1380363 - RNA, 19 nt, Artificial Sequence
  Description of Artificial Sequence: Synthetic oligonucleotide
  Antisense strand to SEQ ID NO: 1380362
uauaacauccaggagaggc

SEQ ID NO: 1380364 - RNA, 19 nt, Artificial Sequence
  Description of Artificial Sequence: Synthetic oligonucleotide
  Sense strand starting at position 2968 of SEQ ID NO: 1242896
ggucgucaaggauaaccua

SEQ ID NO: 1380365 - RNA, 19 nt, Artificial Sequence
  Description of Artificial Sequence: Synthetic oligonucleotide
  Antisense strand to SEQ ID NO: 1380364
uagguuauccuugacgacc

SEQ ID NO: 1380366 - RNA, 19 nt, Artificial Sequence
  Description of Artificial Sequence: Synthetic oligonucleotide
  Sense strand starting at position 2976 of SEQ ID NO: 1242896
aggauaaccuaucgagguu

SEQ ID NO: 1380367 - RNA, 19 nt, Artificial Sequence
  Description of Artificial Sequence: Synthetic oligonucleotide
  Antisense strand to SEQ ID NO: 1380366
aaccucgauagguuauccu

SEQ ID NO: 1380368 - RNA, 19 nt, Artificial Sequence
  Description of Artificial Sequence: Synthetic oligonucleotide
  Sense strand starting at position 2977 of SEQ ID NO: 1242896
ggauaaccuaucgagguuu

SEQ ID NO: 1380369 - RNA, 19 nt, Artificial Sequence
  Description of Artificial Sequence: Synthetic oligonucleotide
  Antisense strand to SEQ ID NO: 1380368
aaaccucgauagguuaucc

SEQ ID NO: 1380370 - RNA, 19 nt, Artificial Sequence
  Description of Artificial Sequence: Synthetic oligonucleotide
  Sense strand starting at position 3079 of SEQ ID NO: 1242896
cgugcugacugacaacuua

SEQ ID NO: 1380371 - RNA, 19 nt, Artificial Sequence
  Description of Artificial Sequence: Synthetic oligonucleotide
  Antisense strand to SEQ ID NO: 1380370
uaaguugucagucagcacg

SEQ ID NO: 1380372 - RNA, 19 nt, Artificial Sequence
  Description of Artificial Sequence: Synthetic oligonucleotide
  Sense strand starting at position 3114 of SEQ ID NO: 1242896
gggaauucgguagaucauc

SEQ ID NO: 1380373 - RNA, 19 nt, Artificial Sequence
  Description of Artificial Sequence: Synthetic oligonucleotide
  Antisense strand to SEQ ID NO: 1380372
gaugaucuaccgaauuccc

SEQ ID NO: 1380374 - RNA, 19 nt, Artificial Sequence
  Description of Artificial Sequence: Synthetic oligonucleotide
  Sense strand starting at position 3265 of SEQ ID NO: 1242896
gguagaaauucccucuaac

SEQ ID NO: 1380375 - RNA, 19 nt, Artificial Sequence
  Description of Artificial Sequence: Synthetic oligonucleotide
  Antisense strand to SEQ ID NO: 1380374
guuagagggaauuucuacc

SEQ ID NO: 1380376 - RNA, 19 nt, Artificial Sequence
  Description of Artificial Sequence: Synthetic oligonucleotide
  Sense strand starting at position 3633 of SEQ ID NO: 1242896
gugagcgguugauugcaaa

SEQ ID NO: 1380377 - RNA, 19 nt, Artificial Sequence
  Description of Artificial Sequence: Synthetic oligonucleotide
  Antisense strand to SEQ ID NO: 1380376
uuugcaaucaaccgcucac

SEQ ID NO: 1380378 - RNA, 19 nt, Artificial Sequence
  Description of Artificial Sequence: Synthetic oligonucleotide
  Sense strand starting at position 3656 of SEQ ID NO: 1242896
ucaagaucccuucgggaug

SEQ ID NO: 1380379 - RNA, 19 nt, Artificial Sequence
  Description of Artificial Sequence: Synthetic oligonucleotide
  Antisense strand to SEQ ID NO: 1380378
caucccgaagggaucuuga

SEQ ID NO: 1380380 - RNA, 19 nt, Artificial Sequence
  Description of Artificial Sequence: Synthetic oligonucleotide
  Sense strand starting at position 3658 of SEQ ID NO: 1242896
aagaucccuucgggaugau

SEQ ID NO: 1380381 - RNA, 19 nt, Artificial Sequence
  Description of Artificial Sequence: Synthetic oligonucleotide
  Antisense strand to SEQ ID NO: 1380380
aucaucccgaagggaucuu

SEQ ID NO: 1380382 - RNA, 19 nt, Artificial Sequence
  Description of Artificial Sequence: Synthetic oligonucleotide
  Sense strand starting at position 3661 of SEQ ID NO: 1242896
aucccuucgggaugauauu

SEQ ID NO: 1380383 - RNA, 19 nt, Artificial Sequence
  Description of Artificial Sequence: Synthetic oligonucleotide
  Antisense strand to SEQ ID NO: 1380382
aauaucaucccgaagggau

SEQ ID NO: 1380384 - RNA, 19 nt, Artificial Sequence
  Description of Artificial Sequence: Synthetic oligonucleotide
  Sense strand starting at position 3662 of SEQ ID NO: 1242896
ucccuucgggaugauauua

SEQ ID NO: 1380385 - RNA, 19 nt, Artificial Sequence
  Description of Artificial Sequence: Synthetic oligonucleotide
  Antisense strand to SEQ ID NO: 1380384
uaauaucaucccgaaggga

SEQ ID NO: 1380386 - RNA, 19 nt, Artificial Sequence
  Description of Artificial Sequence: Synthetic oligonucleotide
  Sense strand starting at position 3670 of SEQ ID NO: 1242896
ggaugauauuauucggcag

SEQ ID NO: 1380387 - RNA, 19 nt, Artificial Sequence
  Description of Artificial Sequence: Synthetic oligonucleotide
  Antisense strand to SEQ ID NO: 1380386
cugccgaauaauaucaucc

SEQ ID NO: 1380388 - RNA, 19 nt, Artificial Sequence
  Description of Artificial Sequence: Synthetic oligonucleotide
  Sense strand starting at position 3673 of SEQ ID NO: 1242896
ugauauuauucggcaggca

SEQ ID NO: 1380389 - RNA, 19 nt, Artificial Sequence
  Description of Artificial Sequence: Synthetic oligonucleotide
  Antisense strand to SEQ ID NO: 1380388
ugccugccgaauaauauca

SEQ ID NO: 1380390 - RNA, 19 nt, Artificial Sequence
  Description of Artificial Sequence: Synthetic oligonucleotide
  Sense strand starting at position 3674 of SEQ ID NO: 1242896
gauauuauucggcaggcag

SEQ ID NO: 1380391 - RNA, 19 nt, Artificial Sequence
  Description of Artificial Sequence: Synthetic oligonucleotide
  Antisense strand to SEQ ID NO: 1380390
cugccugccgaauaauauc

SEQ ID NO: 1380392 - RNA, 19 nt, Artificial Sequence
  Description of Artificial Sequence: Synthetic oligonucleotide
  Sense strand starting at position 3736 of SEQ ID NO: 1242896
cuaggaaucccggacaguu

SEQ ID NO: 1380393 - RNA, 19 nt, Artificial Sequence
  Description of Artificial Sequence: Synthetic oligonucleotide
  Antisense strand to SEQ ID NO: 1380392
aacuguccgggauuccuag

SEQ ID NO: 1380394 - RNA, 19 nt, Artificial Sequence
  Description of Artificial Sequence: Synthetic oligonucleotide
  Sense strand starting at position 3744 of SEQ ID NO: 1242896
cccggacaguuuguuuauu

SEQ ID NO: 1380395 - RNA, 19 nt, Artificial Sequence
  Description of Artificial Sequence: Synthetic oligonucleotide
  Antisense strand to SEQ ID NO: 1380394
aauaaacaaacuguccggg

SEQ ID NO: 1380396 - RNA, 19 nt, Artificial Sequence
  Description of Artificial Sequence: Synthetic oligonucleotide
  Sense strand starting at position 3752 of SEQ ID NO: 1242896
guuuguuuauuuguggacu

SEQ ID NO: 1380397 - RNA, 19 nt, Artificial Sequence
  Description of Artificial Sequence: Synthetic oligonucleotide
  Antisense strand to SEQ ID NO: 1380396
aguccacaaauaaacaaac

SEQ ID NO: 1380398 - RNA, 19 nt, Artificial Sequence
  Description of Artificial Sequence: Synthetic oligonucleotide
  Sense strand starting at position 3754 of SEQ ID NO: 1242896
uuguuuauuuguggacuga

SEQ ID NO: 1380399 - RNA, 19 nt, Artificial Sequence
  Description of Artificial Sequence: Synthetic oligonucleotide
  Antisense strand to SEQ ID NO: 1380398
ucaguccacaaauaaacaa

SEQ ID NO: 1380400 - RNA, 19 nt, Artificial Sequence
  Description of Artificial Sequence: Synthetic oligonucleotide
  Sense strand starting at position 3813 of SEQ ID NO: 1242896
ucccacuuucccugaagga

SEQ ID NO: 1380401 - RNA, 19 nt, Artificial Sequence
  Description of Artificial Sequence: Synthetic oligonucleotide
  Antisense strand to SEQ ID NO: 1380400
uccuucagggaaaguggga

SEQ ID NO: 1380402 - RNA, 19 nt, Artificial Sequence
  Description of Artificial Sequence: Synthetic oligonucleotide
  Sense strand starting at position 3853 of SEQ ID NO: 1242896
gcuaaacacgggcagaauu

SEQ ID NO: 1380403 - RNA, 19 nt, Artificial Sequence
  Description of Artificial Sequence: Synthetic oligonucleotide
  Antisense strand to SEQ ID NO: 1380402
aauucugcccguguuuagc

SEQ ID NO: 1380404 - RNA, 19 nt, Artificial Sequence
  Description of Artificial Sequence: Synthetic oligonucleotide
  Sense strand starting at position 3874 of SEQ ID NO: 1242896
ggaaguugcuggucugguu

SEQ ID NO: 1380405 - RNA, 19 nt, Artificial Sequence
  Description of Artificial Sequence: Synthetic oligonucleotide
  Antisense strand to SEQ ID NO: 1380404
aaccagaccagcaacuucc

SEQ ID NO: 1380406 - RNA, 19 nt, Artificial Sequence
  Description of Artificial Sequence: Synthetic oligonucleotide
  Sense strand starting at position 3968 of SEQ ID NO: 1242896
gcguauucgauucucagca

SEQ ID NO: 1380407 - RNA, 19 nt, Artificial Sequence
  Description of Artificial Sequence: Synthetic oligonucleotide
  Antisense strand to SEQ ID NO: 1380406
ugcugagaaucgaauacgc

SEQ ID NO: 1380408 - RNA, 19 nt, Artificial Sequence
  Description of Artificial Sequence: Synthetic oligonucleotide
  Sense strand starting at position 3969 of SEQ ID NO: 1242896
cguauucgauucucagcaa

SEQ ID NO: 1380409 - RNA, 19 nt, Artificial Sequence
  Description of Artificial Sequence: Synthetic oligonucleotide
  Antisense strand to SEQ ID NO: 1380408
uugcugagaaucgaauacg

SEQ ID NO: 1380410 - RNA, 19 nt, Artificial Sequence
  Description of Artificial Sequence: Synthetic oligonucleotide
  Sense strand starting at position 3970 of SEQ ID NO: 1242896
guauucgauucucagcaaa

SEQ ID NO: 1380411 - RNA, 19 nt, Artificial Sequence
  Description of Artificial Sequence: Synthetic oligonucleotide
  Antisense strand to SEQ ID NO: 1380410
uuugcugagaaucgaauac

SEQ ID NO: 1380412 - RNA, 19 nt, Artificial Sequence
  Description of Artificial Sequence: Synthetic oligonucleotide
  Sense strand starting at position 53 of SEQ ID NO: 1242897
gaagaagcuucuccagaga

SEQ ID NO: 1380413 - RNA, 19 nt, Artificial Sequence
  Description of Artificial Sequence: Synthetic oligonucleotide
  Antisense strand to SEQ ID NO: 1380412
ucucuggagaagcuucuuc

SEQ ID NO: 1380414 - RNA, 19 nt, Artificial Sequence
  Description of Artificial Sequence: Synthetic oligonucleotide
  Sense strand starting at position 268 of SEQ ID NO: 1242897
ggcagaugcuucugcaugu

SEQ ID NO: 1380415 - RNA, 19 nt, Artificial Sequence
  Description of Artificial Sequence: Synthetic oligonucleotide
  Antisense strand to SEQ ID NO: 1380414
acaugcagaagcaucugcc

SEQ ID NO: 1380416 - RNA, 19 nt, Artificial Sequence
  Description of Artificial Sequence: Synthetic oligonucleotide
  Sense strand starting at position 269 of SEQ ID NO: 1242897
gcagaugcuucugcauguu

SEQ ID NO: 1380417 - RNA, 19 nt, Artificial Sequence
  Description of Artificial Sequence: Synthetic oligonucleotide
  Antisense strand to SEQ ID NO: 1380416
aacaugcagaagcaucugc

SEQ ID NO: 1380418 - RNA, 19 nt, Artificial Sequence
  Description of Artificial Sequence: Synthetic oligonucleotide
  Sense strand starting at position 627 of SEQ ID NO: 1242897
gguccaucccaggaucuuu

SEQ ID NO: 1380419 - RNA, 19 nt, Artificial Sequence
  Description of Artificial Sequence: Synthetic oligonucleotide
  Antisense strand to SEQ ID NO: 1380418
aaagauccugggauggacc

SEQ ID NO: 1380420 - RNA, 19 nt, Artificial Sequence
  Description of Artificial Sequence: Synthetic oligonucleotide
  Sense strand starting at position 2430 of SEQ ID NO: 1242897
ggcgcucggcuccgagauu

SEQ ID NO: 1380421 - RNA, 19 nt, Artificial Sequence
  Description of Artificial Sequence: Synthetic oligonucleotide
  Antisense strand to SEQ ID NO: 1380420
aaucucggagccgagcgcc

SEQ ID NO: 1380422 - RNA, 19 nt, Artificial Sequence
  Description of Artificial Sequence: Synthetic oligonucleotide
  Sense strand starting at position 3136 of SEQ ID NO: 1242897
cgcucuuguccacacauua

SEQ ID NO: 1380423 - RNA, 19 nt, Artificial Sequence
  Description of Artificial Sequence: Synthetic oligonucleotide
  Antisense strand to SEQ ID NO: 1380422
uaauguguggacaagagcg

SEQ ID NO: 1380424 - RNA, 19 nt, Artificial Sequence
  Description of Artificial Sequence: Synthetic oligonucleotide
  Sense strand starting at position 3161 of SEQ ID NO: 1242897
acauacaugucuugaugca

SEQ ID NO: 1380425 - RNA, 19 nt, Artificial Sequence
  Description of Artificial Sequence: Synthetic oligonucleotide
  Antisense strand to SEQ ID NO: 1380424
ugcaucaagacauguaugu

SEQ ID NO: 1380426 - RNA, 19 nt, Artificial Sequence
  Description of Artificial Sequence: Synthetic oligonucleotide
  Sense strand starting at position 3168 of SEQ ID NO: 1242897
ugucuugaugcacaugcaa

SEQ ID NO: 1380427 - RNA, 19 nt, Artificial Sequence
  Description of Artificial Sequence: Synthetic oligonucleotide
  Antisense strand to SEQ ID NO: 1380426
uugcaugugcaucaagaca

SEQ ID NO: 1380428 - RNA, 19 nt, Artificial Sequence
  Description of Artificial Sequence: Synthetic oligonucleotide
  Sense strand starting at position 3181 of SEQ ID NO: 1242897
augcaaacccgguaaauua

SEQ ID NO: 1380429 - RNA, 19 nt, Artificial Sequence
  Description of Artificial Sequence: Synthetic oligonucleotide
  Antisense strand to SEQ ID NO: 1380428
uaauuuaccggguuugcau

SEQ ID NO: 1380430 - RNA, 19 nt, Artificial Sequence
  Description of Artificial Sequence: Synthetic oligonucleotide
  Sense strand starting at position 3189 of SEQ ID NO: 1242897
ccgguaaauuacgcaaaca

SEQ ID NO: 1380431 - RNA, 19 nt, Artificial Sequence
  Description of Artificial Sequence: Synthetic oligonucleotide
  Antisense strand to SEQ ID NO: 1380430
uguuugcguaauuuaccgg

SEQ ID NO: 1380432 - RNA, 19 nt, Artificial Sequence
  Description of Artificial Sequence: Synthetic oligonucleotide
  Sense strand starting at position 3200 of SEQ ID NO: 1242897
cgcaaacagacguguaaac

SEQ ID NO: 1380433 - RNA, 19 nt, Artificial Sequence
  Description of Artificial Sequence: Synthetic oligonucleotide
  Antisense strand to SEQ ID NO: 1380432
guuuacacgucuguuugcg

SEQ ID NO: 1380434 - RNA, 19 nt, Artificial Sequence
  Description of Artificial Sequence: Synthetic oligonucleotide
  Sense strand starting at position 3315 of SEQ ID NO: 1242897
gagcuuaaguucgcacuca

SEQ ID NO: 1380435 - RNA, 19 nt, Artificial Sequence
  Description of Artificial Sequence: Synthetic oligonucleotide
  Antisense strand to SEQ ID NO: 1380434
ugagugcgaacuuaagcuc

SEQ ID NO: 1380436 - RNA, 19 nt, Artificial Sequence
  Description of Artificial Sequence: Synthetic oligonucleotide
  Sense strand starting at position 3498 of SEQ ID NO: 1242897
ggaaguuuacaggguuuaa

SEQ ID NO: 1380437 - RNA, 19 nt, Artificial Sequence
  Description of Artificial Sequence: Synthetic oligonucleotide
  Antisense strand to SEQ ID NO: 1380436
uuaaacccuguaaacuucc

SEQ ID NO: 1380438 - RNA, 19 nt, Artificial Sequence
  Description of Artificial Sequence: Synthetic oligonucleotide
  Sense strand starting at position 3555 of SEQ ID NO: 1242897
agagaauuccgcgugcgca

SEQ ID NO: 1380439 - RNA, 19 nt, Artificial Sequence
  Description of Artificial Sequence: Synthetic oligonucleotide
  Antisense strand to SEQ ID NO: 1380438
ugcgcacgcggaauucucu

SEQ ID NO: 1380440 - RNA, 19 nt, Artificial Sequence
  Description of Artificial Sequence: Synthetic oligonucleotide
  Sense strand starting at position 3655 of SEQ ID NO: 1242897
ccagguuccugagagcaga

SEQ ID NO: 1380441 - RNA, 19 nt, Artificial Sequence
  Description of Artificial Sequence: Synthetic oligonucleotide
  Antisense strand to SEQ ID NO: 1380440
ucugcucucaggaaccugg

SEQ ID NO: 1380442 - RNA, 19 nt, Artificial Sequence
  Description of Artificial Sequence: Synthetic oligonucleotide
  Sense strand starting at position 2023 of SEQ ID NO: 1242898
gauaaacaguccuuguguu

SEQ ID NO: 1380443 - RNA, 19 nt, Artificial Sequence
  Description of Artificial Sequence: Synthetic oligonucleotide
  Antisense strand to SEQ ID NO: 1380442
aacacaaggacuguuuauc

SEQ ID NO: 1380444 - RNA, 19 nt, Artificial Sequence
  Description of Artificial Sequence: Synthetic oligonucleotide
  Sense strand starting at position 2155 of SEQ ID NO: 1242898
auagaauuagucuguugau

SEQ ID NO: 1380445 - RNA, 19 nt, Artificial Sequence
  Description of Artificial Sequence: Synthetic oligonucleotide
  Antisense strand to SEQ ID NO: 1380444
aucaacagacuaauucuau

SEQ ID NO: 1380446 - RNA, 19 nt, Artificial Sequence
  Description of Artificial Sequence: Synthetic oligonucleotide
  Sense strand starting at position 2156 of SEQ ID NO: 1242898
uagaauuagucuguugaua

SEQ ID NO: 1380447 - RNA, 19 nt, Artificial Sequence
  Description of Artificial Sequence: Synthetic oligonucleotide
  Antisense strand to SEQ ID NO: 1380446
uaucaacagacuaauucua

SEQ ID NO: 1380448 - RNA, 19 nt, Artificial Sequence
  Description of Artificial Sequence: Synthetic oligonucleotide
  Sense strand starting at position 2158 of SEQ ID NO: 1242898
gaauuagucuguugauaag

SEQ ID NO: 1380449 - RNA, 19 nt, Artificial Sequence
  Description of Artificial Sequence: Synthetic oligonucleotide
  Antisense strand to SEQ ID NO: 1380448
cuuaucaacagacuaauuc

SEQ ID NO: 1380450 - RNA, 19 nt, Artificial Sequence
  Description of Artificial Sequence: Synthetic oligonucleotide
  Sense strand starting at position 2190 of SEQ ID NO: 1242898
guugaaucaagcuguguuu

SEQ ID NO: 1380451 - RNA, 19 nt, Artificial Sequence
  Description of Artificial Sequence: Synthetic oligonucleotide
  Antisense strand to SEQ ID NO: 1380450
aaacacagcuugauucaac

SEQ ID NO: 1380452 - RNA, 19 nt, Artificial Sequence
  Description of Artificial Sequence: Synthetic oligonucleotide
  Sense strand starting at position 2192 of SEQ ID NO: 1242898
ugaaucaagcuguguuuau

SEQ ID NO: 1380453 - RNA, 19 nt, Artificial Sequence
  Description of Artificial Sequence: Synthetic oligonucleotide
  Antisense strand to SEQ ID NO: 1380452
auaaacacagcuugauuca

SEQ ID NO: 1380454 - RNA, 19 nt, Artificial Sequence
  Description of Artificial Sequence: Synthetic oligonucleotide
  Sense strand starting at position 2193 of SEQ ID NO: 1242898
gaaucaagcuguguuuauu

SEQ ID NO: 1380455 - RNA, 19 nt, Artificial Sequence
  Description of Artificial Sequence: Synthetic oligonucleotide
  Antisense strand to SEQ ID NO: 1380454
aauaaacacagcuugauuc

SEQ ID NO: 1380456 - RNA, 19 nt, Artificial Sequence
  Description of Artificial Sequence: Synthetic oligonucleotide
  Sense strand starting at position 2223 of SEQ ID NO: 1242898
ccgggcacccaauauauaa

SEQ ID NO: 1380457 - RNA, 19 nt, Artificial Sequence
  Description of Artificial Sequence: Synthetic oligonucleotide
  Antisense strand to SEQ ID NO: 1380456
uuauauauugggugcccgg

SEQ ID NO: 1380458 - RNA, 19 nt, Artificial Sequence
  Description of Artificial Sequence: Synthetic oligonucleotide
  Sense strand starting at position 2242 of SEQ ID NO: 1242898
acgcacugaucugauguuu

SEQ ID NO: 1380459 - RNA, 19 nt, Artificial Sequence
  Description of Artificial Sequence: Synthetic oligonucleotide
  Antisense strand to SEQ ID NO: 1380458
aaacaucagaucagugcgu

SEQ ID NO: 1380460 - RNA, 19 nt, Artificial Sequence
  Description of Artificial Sequence: Synthetic oligonucleotide
  Sense strand starting at position 2247 of SEQ ID NO: 1242898
cugaucugauguuugaaau

SEQ ID NO: 1380461 - RNA, 19 nt, Artificial Sequence
  Description of Artificial Sequence: Synthetic oligonucleotide
  Antisense strand to SEQ ID NO: 1380460
auuucaaacaucagaucag

SEQ ID NO: 1380462 - RNA, 19 nt, Artificial Sequence
  Description of Artificial Sequence: Synthetic oligonucleotide
  Sense strand starting at position 2248 of SEQ ID NO: 1242898
ugaucugauguuugaaaua

SEQ ID NO: 1380463 - RNA, 19 nt, Artificial Sequence
  Description of Artificial Sequence: Synthetic oligonucleotide
  Antisense strand to SEQ ID NO: 1380462
uauuucaaacaucagauca

SEQ ID NO: 1380464 - RNA, 19 nt, Artificial Sequence
  Description of Artificial Sequence: Synthetic oligonucleotide
  Sense strand starting at position 2258 of SEQ ID NO: 1242898
uuugaaauaucacguccac

SEQ ID NO: 1380465 - RNA, 19 nt, Artificial Sequence
  Description of Artificial Sequence: Synthetic oligonucleotide
  Antisense strand to SEQ ID NO: 1380464
guggacgugauauuucaaa

SEQ ID NO: 1380466 - RNA, 19 nt, Artificial Sequence
  Description of Artificial Sequence: Synthetic oligonucleotide
  Sense strand starting at position 2380 of SEQ ID NO: 1242898
ggugugcagggaugaguuu

SEQ ID NO: 1380467 - RNA, 19 nt, Artificial Sequence
  Description of Artificial Sequence: Synthetic oligonucleotide
  Antisense strand to SEQ ID NO: 1380466
aaacucaucccugcacacc

SEQ ID NO: 1380468 - RNA, 19 nt, Artificial Sequence
  Description of Artificial Sequence: Synthetic oligonucleotide
  Sense strand starting at position 2459 of SEQ ID NO: 1242898
ccaggcuuaaccggagaua

SEQ ID NO: 1380469 - RNA, 19 nt, Artificial Sequence
  Description of Artificial Sequence: Synthetic oligonucleotide
  Antisense strand to SEQ ID NO: 1380468
uaucuccgguuaagccugg

SEQ ID NO: 1380470 - RNA, 19 nt, Artificial Sequence
  Description of Artificial Sequence: Synthetic oligonucleotide
  Sense strand starting at position 2460 of SEQ ID NO: 1242898
caggcuuaaccggagauau

SEQ ID NO: 1380471 - RNA, 19 nt, Artificial Sequence
  Description of Artificial Sequence: Synthetic oligonucleotide
  Antisense strand to SEQ ID NO: 1380470
auaucuccgguuaagccug

SEQ ID NO: 1380472 - RNA, 19 nt, Artificial Sequence
  Description of Artificial Sequence: Synthetic oligonucleotide
  Sense strand starting at position 2470 of SEQ ID NO: 1242898
cggagauaucgagaugcca

SEQ ID NO: 1380473 - RNA, 19 nt, Artificial Sequence
  Description of Artificial Sequence: Synthetic oligonucleotide
  Antisense strand to SEQ ID NO: 1380472
uggcaucucgauaucuccg

SEQ ID NO: 1380474 - RNA, 19 nt, Artificial Sequence
  Description of Artificial Sequence: Synthetic oligonucleotide
  Sense strand starting at position 2482 of SEQ ID NO: 1242898
gaugccacagucuaguaaa

SEQ ID NO: 1380475 - RNA, 19 nt, Artificial Sequence
  Description of Artificial Sequence: Synthetic oligonucleotide
  Antisense strand to SEQ ID NO: 1380474
uuuacuagacuguggcauc

SEQ ID NO: 1380476 - RNA, 19 nt, Artificial Sequence
  Description of Artificial Sequence: Synthetic oligonucleotide
  Sense strand starting at position 2542 of SEQ ID NO: 1242898
gagaguaucuaagaagccu

SEQ ID NO: 1380477 - RNA, 19 nt, Artificial Sequence
  Description of Artificial Sequence: Synthetic oligonucleotide
  Antisense strand to SEQ ID NO: 1380476
aggcuucuuagauacucuc

SEQ ID NO: 1380478 - RNA, 19 nt, Artificial Sequence
  Description of Artificial Sequence: Synthetic oligonucleotide
  Sense strand starting at position 2557 of SEQ ID NO: 1242898
gccugagugucugcugaga

SEQ ID NO: 1380479 - RNA, 19 nt, Artificial Sequence
  Description of Artificial Sequence: Synthetic oligonucleotide
  Antisense strand to SEQ ID NO: 1380478
ucucagcagacacucaggc

SEQ ID NO: 1380480 - RNA, 19 nt, Artificial Sequence
  Description of Artificial Sequence: Synthetic oligonucleotide
  Sense strand starting at position 2559 of SEQ ID NO: 1242898
cugagugucugcugagaag

SEQ ID NO: 1380481 - RNA, 19 nt, Artificial Sequence
  Description of Artificial Sequence: Synthetic oligonucleotide
  Antisense strand to SEQ ID NO: 1380480
cuucucagcagacacucag

SEQ ID NO: 1380482 - RNA, 19 nt, Artificial Sequence
  Description of Artificial Sequence: Synthetic oligonucleotide
  Sense strand starting at position 2675 of SEQ ID NO: 1242898
cggaaaucggagggaaagu

SEQ ID NO: 1380483 - RNA, 19 nt, Artificial Sequence
  Description of Artificial Sequence: Synthetic oligonucleotide
  Antisense strand to SEQ ID NO: 1380482
acuuucccuccgauuuccg

SEQ ID NO: 1380484 - RNA, 19 nt, Artificial Sequence
  Description of Artificial Sequence: Synthetic oligonucleotide
  Sense strand starting at position 2820 of SEQ ID NO: 1242898
aaaguaagguccuccugau

SEQ ID NO: 1380485 - RNA, 19 nt, Artificial Sequence
  Description of Artificial Sequence: Synthetic oligonucleotide
  Antisense strand to SEQ ID NO: 1380484
aucaggaggaccuuacuuu

SEQ ID NO: 1380486 - RNA, 19 nt, Artificial Sequence
  Description of Artificial Sequence: Synthetic oligonucleotide
  Sense strand starting at position 2891 of SEQ ID NO: 1242898
cgcgggaggccugguauuu

SEQ ID NO: 1380487 - RNA, 19 nt, Artificial Sequence
  Description of Artificial Sequence: Synthetic oligonucleotide
  Antisense strand to SEQ ID NO: 1380486
aaauaccaggccucccgcg

SEQ ID NO: 1380488 - RNA, 19 nt, Artificial Sequence
  Description of Artificial Sequence: Synthetic oligonucleotide
  Sense strand starting at position 2897 of SEQ ID NO: 1242898
aggccugguauuugugaau

SEQ ID NO: 1380489 - RNA, 19 nt, Artificial Sequence
  Description of Artificial Sequence: Synthetic oligonucleotide
  Antisense strand to SEQ ID NO: 1380488
auucacaaauaccaggccu

SEQ ID NO: 1380490 - RNA, 19 nt, Artificial Sequence
  Description of Artificial Sequence: Synthetic oligonucleotide
  Sense strand starting at position 2903 of SEQ ID NO: 1242898
gguauuugugaaugugggu

SEQ ID NO: 1380491 - RNA, 19 nt, Artificial Sequence
  Description of Artificial Sequence: Synthetic oligonucleotide
  Antisense strand to SEQ ID NO: 1380490
acccacauucacaaauacc

SEQ ID NO: 1380492 - RNA, 19 nt, Artificial Sequence
  Description of Artificial Sequence: Synthetic oligonucleotide
  Sense strand starting at position 2939 of SEQ ID NO: 1242898
gggcuuuccuguuuauaac

SEQ ID NO: 1380493 - RNA, 19 nt, Artificial Sequence
  Description of Artificial Sequence: Synthetic oligonucleotide
  Antisense strand to SEQ ID NO: 1380492
guuauaaacaggaaagccc

SEQ ID NO: 1380494 - RNA, 19 nt, Artificial Sequence
  Description of Artificial Sequence: Synthetic oligonucleotide
  Sense strand starting at position 2940 of SEQ ID NO: 1242898
ggcuuuccuguuuauaaca

SEQ ID NO: 1380495 - RNA, 19 nt, Artificial Sequence
  Description of Artificial Sequence: Synthetic oligonucleotide
  Antisense strand to SEQ ID NO: 1380494
uguuauaaacaggaaagcc

SEQ ID NO: 1380496 - RNA, 19 nt, Artificial Sequence
  Description of Artificial Sequence: Synthetic oligonucleotide
  Sense strand starting at position 2994 of SEQ ID NO: 1242898
gcuggcccgugauuacauu

SEQ ID NO: 1380497 - RNA, 19 nt, Artificial Sequence
  Description of Artificial Sequence: Synthetic oligonucleotide
  Antisense strand to SEQ ID NO: 1380496
aauguaaucacgggccagc

SEQ ID NO: 1380498 - RNA, 19 nt, Artificial Sequence
  Description of Artificial Sequence: Synthetic oligonucleotide
  Sense strand starting at position 3000 of SEQ ID NO: 1242898
ccgugauuacauuaggcau

SEQ ID NO: 1380499 - RNA, 19 nt, Artificial Sequence
  Description of Artificial Sequence: Synthetic oligonucleotide
  Antisense strand to SEQ ID NO: 1380498
augccuaauguaaucacgg

SEQ ID NO: 1380500 - RNA, 19 nt, Artificial Sequence
  Description of Artificial Sequence: Synthetic oligonucleotide
  Sense strand starting at position 3002 of SEQ ID NO: 1242898
gugauuacauuaggcauuu

SEQ ID NO: 1380501 - RNA, 19 nt, Artificial Sequence
  Description of Artificial Sequence: Synthetic oligonucleotide
  Antisense strand to SEQ ID NO: 1380500
aaaugccuaauguaaucac

SEQ ID NO: 1380502 - RNA, 19 nt, Artificial Sequence
  Description of Artificial Sequence: Synthetic oligonucleotide
  Sense strand starting at position 3200 of SEQ ID NO: 1242898
ugugacuacuuccuguuua

SEQ ID NO: 1380503 - RNA, 19 nt, Artificial Sequence
  Description of Artificial Sequence: Synthetic oligonucleotide
  Antisense strand to SEQ ID NO: 1380502
uaaacaggaaguagucaca

SEQ ID NO: 1380504 - RNA, 19 nt, Artificial Sequence
  Description of Artificial Sequence: Synthetic oligonucleotide
  Sense strand starting at position 3296 of SEQ ID NO: 1242898
uggcgucucauugagcaaa

SEQ ID NO: 1380505 - RNA, 19 nt, Artificial Sequence
  Description of Artificial Sequence: Synthetic oligonucleotide
  Antisense strand to SEQ ID NO: 1380504
uuugcucaaugagacgcca

SEQ ID NO: 1380506 - RNA, 19 nt, Artificial Sequence
  Description of Artificial Sequence: Synthetic oligonucleotide
  Sense strand starting at position 3298 of SEQ ID NO: 1242898
gcgucucauugagcaaauc

SEQ ID NO: 1380507 - RNA, 19 nt, Artificial Sequence
  Description of Artificial Sequence: Synthetic oligonucleotide
  Antisense strand to SEQ ID NO: 1380506
gauuugcucaaugagacgc

SEQ ID NO: 1380508 - RNA, 19 nt, Artificial Sequence
  Description of Artificial Sequence: Synthetic oligonucleotide
  Sense strand starting at position 3308 of SEQ ID NO: 1242898
gagcaaaucgugugagcau

SEQ ID NO: 1380509 - RNA, 19 nt, Artificial Sequence
  Description of Artificial Sequence: Synthetic oligonucleotide
  Antisense strand to SEQ ID NO: 1380508
augcucacacgauuugcuc

SEQ ID NO: 1380510 - RNA, 19 nt, Artificial Sequence
  Description of Artificial Sequence: Synthetic oligonucleotide
  Sense strand starting at position 3355 of SEQ ID NO: 1242898
ggcagguggguguagaaau

SEQ ID NO: 1380511 - RNA, 19 nt, Artificial Sequence
  Description of Artificial Sequence: Synthetic oligonucleotide
  Antisense strand to SEQ ID NO: 1380510
auuucuacacccaccugcc

SEQ ID NO: 1380512 - RNA, 19 nt, Artificial Sequence
  Description of Artificial Sequence: Synthetic oligonucleotide
  Sense strand starting at position 3356 of SEQ ID NO: 1242898
gcagguggguguagaaaug

SEQ ID NO: 1380513 - RNA, 19 nt, Artificial Sequence
  Description of Artificial Sequence: Synthetic oligonucleotide
  Antisense strand to SEQ ID NO: 1380512
cauuucuacacccaccugc

SEQ ID NO: 1380514 - RNA, 19 nt, Artificial Sequence
  Description of Artificial Sequence: Synthetic oligonucleotide
  Sense strand starting at position 3465 of SEQ ID NO: 1242898
ggaugugagugcccaggua

SEQ ID NO: 1380515 - RNA, 19 nt, Artificial Sequence
  Description of Artificial Sequence: Synthetic oligonucleotide
  Antisense strand to SEQ ID NO: 1380514
uaccugggcacucacaucc

SEQ ID NO: 1380516 - RNA, 19 nt, Artificial Sequence
  Description of Artificial Sequence: Synthetic oligonucleotide
  Sense strand starting at position 3533 of SEQ ID NO: 1242898
ucagaaauaacccgugugu

SEQ ID NO: 1380517 - RNA, 19 nt, Artificial Sequence
  Description of Artificial Sequence: Synthetic oligonucleotide
  Antisense strand to SEQ ID NO: 1380516
acacacggguuauuucuga

SEQ ID NO: 1380518 - RNA, 19 nt, Artificial Sequence
  Description of Artificial Sequence: Synthetic oligonucleotide
  Sense strand starting at position 3535 of SEQ ID NO: 1242898
agaaauaacccguguguuu

SEQ ID NO: 1380519 - RNA, 19 nt, Artificial Sequence
  Description of Artificial Sequence: Synthetic oligonucleotide
  Antisense strand to SEQ ID NO: 1380518
aaacacacggguuauuucu

SEQ ID NO: 1380520 - RNA, 19 nt, Artificial Sequence
  Description of Artificial Sequence: Synthetic oligonucleotide
  Sense strand starting at position 3565 of SEQ ID NO: 1242898
guauccagcccauggaaua

SEQ ID NO: 1380521 - RNA, 19 nt, Artificial Sequence
  Description of Artificial Sequence: Synthetic oligonucleotide
  Antisense strand to SEQ ID NO: 1380520
uauuccaugggcuggauac

SEQ ID NO: 1380522 - RNA, 19 nt, Artificial Sequence
  Description of Artificial Sequence: Synthetic oligonucleotide
  Sense strand starting at position 206 of SEQ ID NO: 1242899
ugacauuuguuucuuugca

SEQ ID NO: 1380523 - RNA, 19 nt, Artificial Sequence
  Description of Artificial Sequence: Synthetic oligonucleotide
  Antisense strand to SEQ ID NO: 1380522
ugcaaagaaacaaauguca

SEQ ID NO: 1380524 - RNA, 19 nt, Artificial Sequence
  Description of Artificial Sequence: Synthetic oligonucleotide
  Sense strand starting at position 208 of SEQ ID NO: 1242899
acauuuguuucuuugcacu

SEQ ID NO: 1380525 - RNA, 19 nt, Artificial Sequence
  Description of Artificial Sequence: Synthetic oligonucleotide
  Antisense strand to SEQ ID NO: 1380524
agugcaaagaaacaaaugu

SEQ ID NO: 1380526 - RNA, 19 nt, Artificial Sequence
  Description of Artificial Sequence: Synthetic oligonucleotide
  Sense strand starting at position 213 of SEQ ID NO: 1242899
uguuucuuugcacugugua

SEQ ID NO: 1380527 - RNA, 19 nt, Artificial Sequence
  Description of Artificial Sequence: Synthetic oligonucleotide
  Antisense strand to SEQ ID NO: 1380526
uacacagugcaaagaaaca

SEQ ID NO: 1380528 - RNA, 19 nt, Artificial Sequence
  Description of Artificial Sequence: Synthetic oligonucleotide
  Sense strand starting at position 382 of SEQ ID NO: 1242899
gguguauugcccuaaacag

SEQ ID NO: 1380529 - RNA, 19 nt, Artificial Sequence
  Description of Artificial Sequence: Synthetic oligonucleotide
  Antisense strand to SEQ ID NO: 1380528
cuguuuagggcaauacacc

SEQ ID NO: 1380530 - RNA, 19 nt, Artificial Sequence
  Description of Artificial Sequence: Synthetic oligonucleotide
  Sense strand starting at position 398 of SEQ ID NO: 1242899
cagacucacguguaagaug

SEQ ID NO: 1380531 - RNA, 19 nt, Artificial Sequence
  Description of Artificial Sequence: Synthetic oligonucleotide
  Antisense strand to SEQ ID NO: 1380530
caucuuacacgugagucug

SEQ ID NO: 1380532 - RNA, 19 nt, Artificial Sequence
  Description of Artificial Sequence: Synthetic oligonucleotide
  Sense strand starting at position 403 of SEQ ID NO: 1242899
ucacguguaagaugaaauu

SEQ ID NO: 1380533 - RNA, 19 nt, Artificial Sequence
  Description of Artificial Sequence: Synthetic oligonucleotide
  Antisense strand to SEQ ID NO: 1380532
aauuucaucuuacacguga

SEQ ID NO: 1380534 - RNA, 19 nt, Artificial Sequence
  Description of Artificial Sequence: Synthetic oligonucleotide
  Sense strand starting at position 435 of SEQ ID NO: 1242899
aacugugucuacguuauuu

SEQ ID NO: 1380535 - RNA, 19 nt, Artificial Sequence
  Description of Artificial Sequence: Synthetic oligonucleotide
  Antisense strand to SEQ ID NO: 1380534
aaauaacguagacacaguu

SEQ ID NO: 1380536 - RNA, 19 nt, Artificial Sequence
  Description of Artificial Sequence: Synthetic oligonucleotide
  Sense strand starting at position 437 of SEQ ID NO: 1242899
cugugucuacguuauuuaa

SEQ ID NO: 1380537 - RNA, 19 nt, Artificial Sequence
  Description of Artificial Sequence: Synthetic oligonucleotide
  Antisense strand to SEQ ID NO: 1380536
uuaaauaacguagacacag

SEQ ID NO: 1380538 - RNA, 19 nt, Artificial Sequence
  Description of Artificial Sequence: Synthetic oligonucleotide
  Sense strand starting at position 439 of SEQ ID NO: 1242899
gugucuacguuauuuaaca

SEQ ID NO: 1380539 - RNA, 19 nt, Artificial Sequence
  Description of Artificial Sequence: Synthetic oligonucleotide
  Antisense strand to SEQ ID NO: 1380538
uguuaaauaacguagacac

SEQ ID NO: 1380540 - RNA, 19 nt, Artificial Sequence
  Description of Artificial Sequence: Synthetic oligonucleotide
  Sense strand starting at position 499 of SEQ ID NO: 1242899
gcaaaugacaugugcaaag

SEQ ID NO: 1380541 - RNA, 19 nt, Artificial Sequence
  Description of Artificial Sequence: Synthetic oligonucleotide
  Antisense strand to SEQ ID NO: 1380540
cuuugcacaugucauuugc

SEQ ID NO: 1380542 - RNA, 19 nt, Artificial Sequence
  Description of Artificial Sequence: Synthetic oligonucleotide
  Sense strand starting at position 520 of SEQ ID NO: 1242899
ccugaagcccgauaaagua

SEQ ID NO: 1380543 - RNA, 19 nt, Artificial Sequence
  Description of Artificial Sequence: Synthetic oligonucleotide
  Antisense strand to SEQ ID NO: 1380542
uacuuuaucgggcuucagg

SEQ ID NO: 1380544 - RNA, 19 nt, Artificial Sequence
  Description of Artificial Sequence: Synthetic oligonucleotide
  Sense strand starting at position 527 of SEQ ID NO: 1242899
cccgauaaaguauagugaa

SEQ ID NO: 1380545 - RNA, 19 nt, Artificial Sequence
  Description of Artificial Sequence: Synthetic oligonucleotide
  Antisense strand to SEQ ID NO: 1380544
uucacuauacuuuaucggg

SEQ ID NO: 1380546 - RNA, 19 nt, Artificial Sequence
  Description of Artificial Sequence: Synthetic oligonucleotide
  Sense strand starting at position 537 of SEQ ID NO: 1242899
uauagugaagagugacuuu

SEQ ID NO: 1380547 - RNA, 19 nt, Artificial Sequence
  Description of Artificial Sequence: Synthetic oligonucleotide
  Antisense strand to SEQ ID NO: 1380546
aaagucacucuucacuaua

SEQ ID NO: 1380548 - RNA, 19 nt, Artificial Sequence
  Description of Artificial Sequence: Synthetic oligonucleotide
  Sense strand starting at position 581 of SEQ ID NO: 1242899
cagagagcagagugucaua

SEQ ID NO: 1380549 - RNA, 19 nt, Artificial Sequence
  Description of Artificial Sequence: Synthetic oligonucleotide
  Antisense strand to SEQ ID NO: 1380548
uaugacacucugcucucug

SEQ ID NO: 1380550 - RNA, 19 nt, Artificial Sequence
  Description of Artificial Sequence: Synthetic oligonucleotide
  Sense strand starting at position 778 of SEQ ID NO: 1242899
cucuauggugugcagaaga

SEQ ID NO: 1380551 - RNA, 19 nt, Artificial Sequence
  Description of Artificial Sequence: Synthetic oligonucleotide
  Antisense strand to SEQ ID NO: 1380550
ucuucugcacaccauagag

SEQ ID NO: 1380552 - RNA, 19 nt, Artificial Sequence
  Description of Artificial Sequence: Synthetic oligonucleotide
  Sense strand starting at position 789 of SEQ ID NO: 1242899
gcagaagagaaugguaguu

SEQ ID NO: 1380553 - RNA, 19 nt, Artificial Sequence
  Description of Artificial Sequence: Synthetic oligonucleotide
  Antisense strand to SEQ ID NO: 1380552
aacuaccauucucuucugc

SEQ ID NO: 1380554 - RNA, 19 nt, Artificial Sequence
  Description of Artificial Sequence: Synthetic oligonucleotide
  Sense strand starting at position 854 of SEQ ID NO: 1242899
gugaguguaggccaaucaa

SEQ ID NO: 1380555 - RNA, 19 nt, Artificial Sequence
  Description of Artificial Sequence: Synthetic oligonucleotide
  Antisense strand to SEQ ID NO: 1380554
uugauuggccuacacucac

SEQ ID NO: 1380556 - RNA, 19 nt, Artificial Sequence
  Description of Artificial Sequence: Synthetic oligonucleotide
  Sense strand starting at position 874 of SEQ ID NO: 1242899
aggcuauuccaacagucua

SEQ ID NO: 1380557 - RNA, 19 nt, Artificial Sequence
  Description of Artificial Sequence: Synthetic oligonucleotide
  Antisense strand to SEQ ID NO: 1380556
uagacuguuggaauagccu

SEQ ID NO: 1380558 - RNA, 19 nt, Artificial Sequence
  Description of Artificial Sequence: Synthetic oligonucleotide
  Sense strand starting at position 982 of SEQ ID NO: 1242899
aggaucugaguuugggaau

SEQ ID NO: 1380559 - RNA, 19 nt, Artificial Sequence
  Description of Artificial Sequence: Synthetic oligonucleotide
  Antisense strand to SEQ ID NO: 1380558
auucccaaacucagauccu

SEQ ID NO: 1380560 - RNA, 19 nt, Artificial Sequence
  Description of Artificial Sequence: Synthetic oligonucleotide
  Sense strand starting at position 1101 of SEQ ID NO: 1242899
ugcugugacaaugauauga

SEQ ID NO: 1380561 - RNA, 19 nt, Artificial Sequence
  Description of Artificial Sequence: Synthetic oligonucleotide
  Antisense strand to SEQ ID NO: 1380560
ucauaucauugucacagca

SEQ ID NO: 1380562 - RNA, 19 nt, Artificial Sequence
  Description of Artificial Sequence: Synthetic oligonucleotide
  Sense strand starting at position 1192 of SEQ ID NO: 1242899
uuauuauggucaucccaug

SEQ ID NO: 1380563 - RNA, 19 nt, Artificial Sequence
  Description of Artificial Sequence: Synthetic oligonucleotide
  Antisense strand to SEQ ID NO: 1380562
caugggaugaccauaauaa

SEQ ID NO: 1380564 - RNA, 19 nt, Artificial Sequence
  Description of Artificial Sequence: Synthetic oligonucleotide
  Sense strand starting at position 1197 of SEQ ID NO: 1242899
auggucaucccauggaaug

SEQ ID NO: 1380565 - RNA, 19 nt, Artificial Sequence
  Description of Artificial Sequence: Synthetic oligonucleotide
  Antisense strand to SEQ ID NO: 1380564
cauuccaugggaugaccau

SEQ ID NO: 1380566 - RNA, 19 nt, Artificial Sequence
  Description of Artificial Sequence: Synthetic oligonucleotide
  Sense strand starting at position 1250 of SEQ ID NO: 1242899
ggagcaauguaguuaaaga

SEQ ID NO: 1380567 - RNA, 19 nt, Artificial Sequence
  Description of Artificial Sequence: Synthetic oligonucleotide
  Antisense strand to SEQ ID NO: 1380566
ucuuuaacuacauugcucc

SEQ ID NO: 1380568 - RNA, 19 nt, Artificial Sequence
  Description of Artificial Sequence: Synthetic oligonucleotide
  Sense strand starting at position 1315 of SEQ ID NO: 1242899
cggagacaauuguuccaaa

SEQ ID NO: 1380569 - RNA, 19 nt, Artificial Sequence
  Description of Artificial Sequence: Synthetic oligonucleotide
  Antisense strand to SEQ ID NO: 1380568
uuuggaacaauugucuccg

SEQ ID NO: 1380570 - RNA, 19 nt, Artificial Sequence
  Description of Artificial Sequence: Synthetic oligonucleotide
  Sense strand starting at position 1370 of SEQ ID NO: 1242899
cgaucucaguccucagaga

SEQ ID NO: 1380571 - RNA, 19 nt, Artificial Sequence
  Description of Artificial Sequence: Synthetic oligonucleotide
  Antisense strand to SEQ ID NO: 1380570
ucucugaggacugagaucg

SEQ ID NO: 1380572 - RNA, 19 nt, Artificial Sequence
  Description of Artificial Sequence: Synthetic oligonucleotide
  Sense strand starting at position 1414 of SEQ ID NO: 1242899
ugaucacagucaucugaga

SEQ ID NO: 1380573 - RNA, 19 nt, Artificial Sequence
  Description of Artificial Sequence: Synthetic oligonucleotide
  Antisense strand to SEQ ID NO: 1380572
ucucagaugacugugauca

SEQ ID NO: 1380574 - RNA, 19 nt, Artificial Sequence
  Description of Artificial Sequence: Synthetic oligonucleotide
  Sense strand starting at position 2025 of SEQ ID NO: 1242899
gcuagaguccaaggagaac

SEQ ID NO: 1380575 - RNA, 19 nt, Artificial Sequence
  Description of Artificial Sequence: Synthetic oligonucleotide
  Antisense strand to SEQ ID NO: 1380574
guucuccuuggacucuagc

SEQ ID NO: 1380576 - RNA, 19 nt, Artificial Sequence
  Description of Artificial Sequence: Synthetic oligonucleotide
  Sense strand starting at position 2161 of SEQ ID NO: 1242899
ggugaguacccgggaggau

SEQ ID NO: 1380577 - RNA, 19 nt, Artificial Sequence
  Description of Artificial Sequence: Synthetic oligonucleotide
  Antisense strand to SEQ ID NO: 1380576
auccucccggguacucacc

SEQ ID NO: 1380578 - RNA, 19 nt, Artificial Sequence
  Description of Artificial Sequence: Synthetic oligonucleotide
  Sense strand starting at position 2261 of SEQ ID NO: 1242899
uggagaaggcccuggaguu

SEQ ID NO: 1380579 - RNA, 19 nt, Artificial Sequence
  Description of Artificial Sequence: Synthetic oligonucleotide
  Antisense strand to SEQ ID NO: 1380578
aacuccagggccuucucca

SEQ ID NO: 1380580 - RNA, 19 nt, Artificial Sequence
  Description of Artificial Sequence: Synthetic oligonucleotide
  Sense strand starting at position 2456 of SEQ ID NO: 1242899
guuguaggucccuaacaca

SEQ ID NO: 1380581 - RNA, 19 nt, Artificial Sequence
  Description of Artificial Sequence: Synthetic oligonucleotide
  Antisense strand to SEQ ID NO: 1380580
uguguuagggaccuacaac

SEQ ID NO: 1380582 - RNA, 19 nt, Artificial Sequence
  Description of Artificial Sequence: Synthetic oligonucleotide
  Sense strand starting at position 2479 of SEQ ID NO: 1242899
gcucauuugcccuggauua

SEQ ID NO: 1380583 - RNA, 19 nt, Artificial Sequence
  Description of Artificial Sequence: Synthetic oligonucleotide
  Antisense strand to SEQ ID NO: 1380582
uaauccagggcaaaugagc

SEQ ID NO: 1380584 - RNA, 19 nt, Artificial Sequence
  Description of Artificial Sequence: Synthetic oligonucleotide
  Sense strand starting at position 2567 of SEQ ID NO: 1242899
ucaugugauuaccuccaua

SEQ ID NO: 1380585 - RNA, 19 nt, Artificial Sequence
  Description of Artificial Sequence: Synthetic oligonucleotide
  Antisense strand to SEQ ID NO: 1380584
uauggagguaaucacauga

SEQ ID NO: 1380586 - RNA, 19 nt, Artificial Sequence
  Description of Artificial Sequence: Synthetic oligonucleotide
  Sense strand starting at position 2734 of SEQ ID NO: 1242899
gugguaagaccucagcuua

SEQ ID NO: 1380587 - RNA, 19 nt, Artificial Sequence
  Description of Artificial Sequence: Synthetic oligonucleotide
  Antisense strand to SEQ ID NO: 1380586
uaagcugaggucuuaccac

SEQ ID NO: 1380588 - RNA, 19 nt, Artificial Sequence
  Description of Artificial Sequence: Synthetic oligonucleotide
  Sense strand starting at position 3393 of SEQ ID NO: 1242899
auacaaaggccuugagcaa

SEQ ID NO: 1380589 - RNA, 19 nt, Artificial Sequence
  Description of Artificial Sequence: Synthetic oligonucleotide
  Antisense strand to SEQ ID NO: 1380588
uugcucaaggccuuuguau

SEQ ID NO: 1380590 - RNA, 19 nt, Artificial Sequence
  Description of Artificial Sequence: Synthetic oligonucleotide
  Sense strand starting at position 3457 of SEQ ID NO: 1242899
gaagcauagugagcaaaga

SEQ ID NO: 1380591 - RNA, 19 nt, Artificial Sequence
  Description of Artificial Sequence: Synthetic oligonucleotide
  Antisense strand to SEQ ID NO: 1380590
ucuuugcucacuaugcuuc

SEQ ID NO: 1380592 - RNA, 19 nt, Artificial Sequence
  Description of Artificial Sequence: Synthetic oligonucleotide
  Sense strand starting at position 3488 of SEQ ID NO: 1242899
gaugguguuggagaggcau

SEQ ID NO: 1380593 - RNA, 19 nt, Artificial Sequence
  Description of Artificial Sequence: Synthetic oligonucleotide
  Antisense strand to SEQ ID NO: 1380592
augccucuccaacaccauc

SEQ ID NO: 1380594 - RNA, 19 nt, Artificial Sequence
  Description of Artificial Sequence: Synthetic oligonucleotide
  Sense strand starting at position 3581 of SEQ ID NO: 1242899
uccuaagcacuguaagaua

SEQ ID NO: 1380595 - RNA, 19 nt, Artificial Sequence
  Description of Artificial Sequence: Synthetic oligonucleotide
  Antisense strand to SEQ ID NO: 1380594
uaucuuacagugcuuagga

SEQ ID NO: 1380596 - RNA, 19 nt, Artificial Sequence
  Description of Artificial Sequence: Synthetic oligonucleotide
  Sense strand starting at position 3748 of SEQ ID NO: 1242899
uuuguaaagcaggaaucau

SEQ ID NO: 1380597 - RNA, 19 nt, Artificial Sequence
  Description of Artificial Sequence: Synthetic oligonucleotide
  Antisense strand to SEQ ID NO: 1380596
augauuccugcuuuacaaa

SEQ ID NO: 1380598 - RNA, 19 nt, Artificial Sequence
  Description of Artificial Sequence: Synthetic oligonucleotide
  Sense strand starting at position 3757 of SEQ ID NO: 1242899
caggaaucauuugaguaac

SEQ ID NO: 1380599 - RNA, 19 nt, Artificial Sequence
  Description of Artificial Sequence: Synthetic oligonucleotide
  Antisense strand to SEQ ID NO: 1380598
guuacucaaaugauuccug

SEQ ID NO: 1380600 - RNA, 19 nt, Artificial Sequence
  Description of Artificial Sequence: Synthetic oligonucleotide
  Sense strand starting at position 3905 of SEQ ID NO: 1242899
ugaccuuaacucugucaug

SEQ ID NO: 1380601 - RNA, 19 nt, Artificial Sequence
  Description of Artificial Sequence: Synthetic oligonucleotide
  Antisense strand to SEQ ID NO: 1380600
caugacagaguuaagguca

SEQ ID NO: 1380602 - RNA, 19 nt, Artificial Sequence
  Description of Artificial Sequence: Synthetic oligonucleotide
  Sense strand starting at position 20 of SEQ ID NO: 1242900
aguuuaaccugucccugaa

SEQ ID NO: 1380603 - RNA, 19 nt, Artificial Sequence
  Description of Artificial Sequence: Synthetic oligonucleotide
  Antisense strand to SEQ ID NO: 1380602
uucagggacagguuaaacu

SEQ ID NO: 1380604 - RNA, 19 nt, Artificial Sequence
  Description of Artificial Sequence: Synthetic oligonucleotide
  Sense strand starting at position 23 of SEQ ID NO: 1242900
uuaaccugucccugaagga

SEQ ID NO: 1380605 - RNA, 19 nt, Artificial Sequence
  Description of Artificial Sequence: Synthetic oligonucleotide
  Antisense strand to SEQ ID NO: 1380604
uccuucagggacagguuaa

SEQ ID NO: 1380606 - RNA, 19 nt, Artificial Sequence
  Description of Artificial Sequence: Synthetic oligonucleotide
  Sense strand starting at position 74 of SEQ ID NO: 1242900
guuaaagacuguccugaag

SEQ ID NO: 1380607 - RNA, 19 nt, Artificial Sequence
  Description of Artificial Sequence: Synthetic oligonucleotide
  Antisense strand to SEQ ID NO: 1380606
cuucaggacagucuuuaac

SEQ ID NO: 1380608 - RNA, 19 nt, Artificial Sequence
  Description of Artificial Sequence: Synthetic oligonucleotide
  Sense strand starting at position 104 of SEQ ID NO: 1242900
cagggaaggccucgggaau

SEQ ID NO: 1380609 - RNA, 19 nt, Artificial Sequence
  Description of Artificial Sequence: Synthetic oligonucleotide
  Antisense strand to SEQ ID NO: 1380608
auucccgaggccuucccug

SEQ ID NO: 1380610 - RNA, 19 nt, Artificial Sequence
  Description of Artificial Sequence: Synthetic oligonucleotide
  Sense strand starting at position 260 of SEQ ID NO: 1242900
uccuaagaauugguucuua

SEQ ID NO: 1380611 - RNA, 19 nt, Artificial Sequence
  Description of Artificial Sequence: Synthetic oligonucleotide
  Antisense strand to SEQ ID NO: 1380610
uaagaaccaauucuuagga

SEQ ID NO: 1380612 - RNA, 19 nt, Artificial Sequence
  Description of Artificial Sequence: Synthetic oligonucleotide
  Sense strand starting at position 915 of SEQ ID NO: 1242900
gaccauaggugaucuaccu

SEQ ID NO: 1380613 - RNA, 19 nt, Artificial Sequence
  Description of Artificial Sequence: Synthetic oligonucleotide
  Antisense strand to SEQ ID NO: 1380612
agguagaucaccuaugguc

SEQ ID NO: 1380614 - RNA, 19 nt, Artificial Sequence
  Description of Artificial Sequence: Synthetic oligonucleotide
  Sense strand starting at position 1000 of SEQ ID NO: 1242900
uaauuaauaguuugcugga

SEQ ID NO: 1380615 - RNA, 19 nt, Artificial Sequence
  Description of Artificial Sequence: Synthetic oligonucleotide
  Antisense strand to SEQ ID NO: 1380614
uccagcaaacuauuaauua

SEQ ID NO: 1380616 - RNA, 19 nt, Artificial Sequence
  Description of Artificial Sequence: Synthetic oligonucleotide
  Sense strand starting at position 1002 of SEQ ID NO: 1242900
auuaauaguuugcuggagu

SEQ ID NO: 1380617 - RNA, 19 nt, Artificial Sequence
  Description of Artificial Sequence: Synthetic oligonucleotide
  Antisense strand to SEQ ID NO: 1380616
acuccagcaaacuauuaau

SEQ ID NO: 1380618 - RNA, 19 nt, Artificial Sequence
  Description of Artificial Sequence: Synthetic oligonucleotide
  Sense strand starting at position 1009 of SEQ ID NO: 1242900
guuugcuggaguuacacaa

SEQ ID NO: 1380619 - RNA, 19 nt, Artificial Sequence
  Description of Artificial Sequence: Synthetic oligonucleotide
  Antisense strand to SEQ ID NO: 1380618
uuguguaacuccagcaaac

SEQ ID NO: 1380620 - RNA, 19 nt, Artificial Sequence
  Description of Artificial Sequence: Synthetic oligonucleotide
  Sense strand starting at position 1040 of SEQ ID NO: 1242900
cugagaaagugugcccuaa

SEQ ID NO: 1380621 - RNA, 19 nt, Artificial Sequence
  Description of Artificial Sequence: Synthetic oligonucleotide
  Antisense strand to SEQ ID NO: 1380620
uuagggcacacuuucucag

SEQ ID NO: 1380622 - RNA, 19 nt, Artificial Sequence
  Description of Artificial Sequence: Synthetic oligonucleotide
  Sense strand starting at position 1278 of SEQ ID NO: 1242900
gccucaucugcugagauca

SEQ ID NO: 1380623 - RNA, 19 nt, Artificial Sequence
  Description of Artificial Sequence: Synthetic oligonucleotide
  Antisense strand to SEQ ID NO: 1380622
ugaucucagcagaugaggc

SEQ ID NO: 1380624 - RNA, 19 nt, Artificial Sequence
  Description of Artificial Sequence: Synthetic oligonucleotide
  Sense strand starting at position 1368 of SEQ ID NO: 1242900
agaauaaaguacuaagaac

SEQ ID NO: 1380625 - RNA, 19 nt, Artificial Sequence
  Description of Artificial Sequence: Synthetic oligonucleotide
  Antisense strand to SEQ ID NO: 1380624
guucuuaguacuuuauucu

SEQ ID NO: 1380626 - RNA, 19 nt, Artificial Sequence
  Description of Artificial Sequence: Synthetic oligonucleotide
  Sense strand starting at position 1473 of SEQ ID NO: 1242900
cugacuugcugccuucuaa

SEQ ID NO: 1380627 - RNA, 19 nt, Artificial Sequence
  Description of Artificial Sequence: Synthetic oligonucleotide
  Antisense strand to SEQ ID NO: 1380626
uuagaaggcagcaagucag

SEQ ID NO: 1380628 - RNA, 19 nt, Artificial Sequence
  Description of Artificial Sequence: Synthetic oligonucleotide
  Sense strand starting at position 1545 of SEQ ID NO: 1242900
agagcacaucauugagauu

SEQ ID NO: 1380629 - RNA, 19 nt, Artificial Sequence
  Description of Artificial Sequence: Synthetic oligonucleotide
  Antisense strand to SEQ ID NO: 1380628
aaucucaaugaugugcucu

SEQ ID NO: 1380630 - RNA, 19 nt, Artificial Sequence
  Description of Artificial Sequence: Synthetic oligonucleotide
  Sense strand starting at position 1548 of SEQ ID NO: 1242900
gcacaucauugagauuugu

SEQ ID NO: 1380631 - RNA, 19 nt, Artificial Sequence
  Description of Artificial Sequence: Synthetic oligonucleotide
  Antisense strand to SEQ ID NO: 1380630
acaaaucucaaugaugugc

SEQ ID NO: 1380632 - RNA, 19 nt, Artificial Sequence
  Description of Artificial Sequence: Synthetic oligonucleotide
  Sense strand starting at position 1985 of SEQ ID NO: 1242900
ggcggagcgggcucuuuaa

SEQ ID NO: 1380633 - RNA, 19 nt, Artificial Sequence
  Description of Artificial Sequence: Synthetic oligonucleotide
  Antisense strand to SEQ ID NO: 1380632
uuaaagagcccgcuccgcc

SEQ ID NO: 1380634 - RNA, 19 nt, Artificial Sequence
  Description of Artificial Sequence: Synthetic oligonucleotide
  Sense strand starting at position 2373 of SEQ ID NO: 1242900
uccgcuuuccucuggagaa

SEQ ID NO: 1380635 - RNA, 19 nt, Artificial Sequence
  Description of Artificial Sequence: Synthetic oligonucleotide
  Antisense strand to SEQ ID NO: 1380634
uucuccagaggaaagcgga

SEQ ID NO: 1380636 - RNA, 19 nt, Artificial Sequence
  Description of Artificial Sequence: Synthetic oligonucleotide
  Sense strand starting at position 2469 of SEQ ID NO: 1242900
agguuugcgcugguuucau

SEQ ID NO: 1380637 - RNA, 19 nt, Artificial Sequence
  Description of Artificial Sequence: Synthetic oligonucleotide
  Antisense strand to SEQ ID NO: 1380636
augaaaccagcgcaaaccu

SEQ ID NO: 1380638 - RNA, 19 nt, Artificial Sequence
  Description of Artificial Sequence: Synthetic oligonucleotide
  Sense strand starting at position 2492 of SEQ ID NO: 1242900
uggauccuuugggaagaaa

SEQ ID NO: 1380639 - RNA, 19 nt, Artificial Sequence
  Description of Artificial Sequence: Synthetic oligonucleotide
  Antisense strand to SEQ ID NO: 1380638
uuucuucccaaaggaucca

SEQ ID NO: 1380640 - RNA, 19 nt, Artificial Sequence
  Description of Artificial Sequence: Synthetic oligonucleotide
  Sense strand starting at position 2560 of SEQ ID NO: 1242900
ugugaauggcagcauugau

SEQ ID NO: 1380641 - RNA, 19 nt, Artificial Sequence
  Description of Artificial Sequence: Synthetic oligonucleotide
  Antisense strand to SEQ ID NO: 1380640
aucaaugcugccauucaca

SEQ ID NO: 1380642 - RNA, 19 nt, Artificial Sequence
  Description of Artificial Sequence: Synthetic oligonucleotide
  Sense strand starting at position 2567 of SEQ ID NO: 1242900
ggcagcauugauugucaua

SEQ ID NO: 1380643 - RNA, 19 nt, Artificial Sequence
  Description of Artificial Sequence: Synthetic oligonucleotide
  Antisense strand to SEQ ID NO: 1380642
uaugacaaucaaugcugcc

SEQ ID NO: 1380644 - RNA, 19 nt, Artificial Sequence
  Description of Artificial Sequence: Synthetic oligonucleotide
  Sense strand starting at position 2569 of SEQ ID NO: 1242900
cagcauugauugucauaga

SEQ ID NO: 1380645 - RNA, 19 nt, Artificial Sequence
  Description of Artificial Sequence: Synthetic oligonucleotide
  Antisense strand to SEQ ID NO: 1380644
ucuaugacaaucaaugcug

SEQ ID NO: 1380646 - RNA, 19 nt, Artificial Sequence
  Description of Artificial Sequence: Synthetic oligonucleotide
  Sense strand starting at position 2594 of SEQ ID NO: 1242900
uuggaaauacucugagugu

SEQ ID NO: 1380647 - RNA, 19 nt, Artificial Sequence
  Description of Artificial Sequence: Synthetic oligonucleotide
  Antisense strand to SEQ ID NO: 1380646
acacucagaguauuuccaa

SEQ ID NO: 1380648 - RNA, 19 nt, Artificial Sequence
  Description of Artificial Sequence: Synthetic oligonucleotide
  Sense strand starting at position 2597 of SEQ ID NO: 1242900
gaaauacucugagugucuc

SEQ ID NO: 1380649 - RNA, 19 nt, Artificial Sequence
  Description of Artificial Sequence: Synthetic oligonucleotide
  Antisense strand to SEQ ID NO: 1380648
gagacacucagaguauuuc

SEQ ID NO: 1380650 - RNA, 19 nt, Artificial Sequence
  Description of Artificial Sequence: Synthetic oligonucleotide
  Sense strand starting at position 2619 of SEQ ID NO: 1242900
cuagguuacuaugugaaag

SEQ ID NO: 1380651 - RNA, 19 nt, Artificial Sequence
  Description of Artificial Sequence: Synthetic oligonucleotide
  Antisense strand to SEQ ID NO: 1380650
cuuucacauaguaaccuag

SEQ ID NO: 1380652 - RNA, 19 nt, Artificial Sequence
  Description of Artificial Sequence: Synthetic oligonucleotide
  Sense strand starting at position 2791 of SEQ ID NO: 1242900
cuaggaaauuccuugugug

SEQ ID NO: 1380653 - RNA, 19 nt, Artificial Sequence
  Description of Artificial Sequence: Synthetic oligonucleotide
  Antisense strand to SEQ ID NO: 1380652
cacacaaggaauuuccuag

SEQ ID NO: 1380654 - RNA, 19 nt, Artificial Sequence
  Description of Artificial Sequence: Synthetic oligonucleotide
  Sense strand starting at position 2888 of SEQ ID NO: 1242900
gggcuuugacagcacugaa

SEQ ID NO: 1380655 - RNA, 19 nt, Artificial Sequence
  Description of Artificial Sequence: Synthetic oligonucleotide
  Antisense strand to SEQ ID NO: 1380654
uucagugcugucaaagccc

SEQ ID NO: 1380656 - RNA, 19 nt, Artificial Sequence
  Description of Artificial Sequence: Synthetic oligonucleotide
  Sense strand starting at position 2891 of SEQ ID NO: 1242900
cuuugacagcacugaaagu

SEQ ID NO: 1380657 - RNA, 19 nt, Artificial Sequence
  Description of Artificial Sequence: Synthetic oligonucleotide
  Antisense strand to SEQ ID NO: 1380656
acuuucagugcugucaaag

SEQ ID NO: 1380658 - RNA, 19 nt, Artificial Sequence
  Description of Artificial Sequence: Synthetic oligonucleotide
  Sense strand starting at position 3014 of SEQ ID NO: 1242900
auaagugacuaguccucua

SEQ ID NO: 1380659 - RNA, 19 nt, Artificial Sequence
  Description of Artificial Sequence: Synthetic oligonucleotide
  Antisense strand to SEQ ID NO: 1380658
uagaggacuagucacuuau

SEQ ID NO: 1380660 - RNA, 19 nt, Artificial Sequence
  Description of Artificial Sequence: Synthetic oligonucleotide
  Sense strand starting at position 3629 of SEQ ID NO: 1242900
cuauauguucaguagggag

SEQ ID NO: 1380661 - RNA, 19 nt, Artificial Sequence
  Description of Artificial Sequence: Synthetic oligonucleotide
  Antisense strand to SEQ ID NO: 1380660
cucccuacugaacauauag

SEQ ID NO: 1380662 - RNA, 19 nt, Artificial Sequence
  Description of Artificial Sequence: Synthetic oligonucleotide
  Sense strand starting at position 3636 of SEQ ID NO: 1242900
uucaguagggagugauguu

SEQ ID NO: 1380663 - RNA, 19 nt, Artificial Sequence
  Description of Artificial Sequence: Synthetic oligonucleotide
  Antisense strand to SEQ ID NO: 1380662
aacaucacucccuacugaa

SEQ ID NO: 1380664 - RNA, 19 nt, Artificial Sequence
  Description of Artificial Sequence: Synthetic oligonucleotide
  Sense strand starting at position 3679 of SEQ ID NO: 1242900
cagcaaguuguagagcaau

SEQ ID NO: 1380665 - RNA, 19 nt, Artificial Sequence
  Description of Artificial Sequence: Synthetic oligonucleotide
  Antisense strand to SEQ ID NO: 1380664
auugcucuacaacuugcug

SEQ ID NO: 1380666 - RNA, 19 nt, Artificial Sequence
  Description of Artificial Sequence: Synthetic oligonucleotide
  Sense strand starting at position 3685 of SEQ ID NO: 1242900
guuguagagcaauauguau

SEQ ID NO: 1380667 - RNA, 19 nt, Artificial Sequence
  Description of Artificial Sequence: Synthetic oligonucleotide
  Antisense strand to SEQ ID NO: 1380666
auacauauugcucuacaac

SEQ ID NO: 1380668 - RNA, 19 nt, Artificial Sequence
  Description of Artificial Sequence: Synthetic oligonucleotide
  Sense strand starting at position 3691 of SEQ ID NO: 1242900
gagcaauauguaugggaag

SEQ ID NO: 1380669 - RNA, 19 nt, Artificial Sequence
  Description of Artificial Sequence: Synthetic oligonucleotide
  Antisense strand to SEQ ID NO: 1380668
cuucccauacauauugcuc

SEQ ID NO: 1380670 - RNA, 19 nt, Artificial Sequence
  Description of Artificial Sequence: Synthetic oligonucleotide
  Sense strand starting at position 3737 of SEQ ID NO: 1242900
gacagauaguguguggaua

SEQ ID NO: 1380671 - RNA, 19 nt, Artificial Sequence
  Description of Artificial Sequence: Synthetic oligonucleotide
  Antisense strand to SEQ ID NO: 1380670
uauccacacacuaucuguc

SEQ ID NO: 1380672 - RNA, 19 nt, Artificial Sequence
  Description of Artificial Sequence: Synthetic oligonucleotide
  Sense strand starting at position 3819 of SEQ ID NO: 1242900
gggagaacuugagcuuuau

SEQ ID NO: 1380673 - RNA, 19 nt, Artificial Sequence
  Description of Artificial Sequence: Synthetic oligonucleotide
  Antisense strand to SEQ ID NO: 1380672
auaaagcucaaguucuccc

SEQ ID NO: 1380674 - RNA, 19 nt, Artificial Sequence
  Description of Artificial Sequence: Synthetic oligonucleotide
  Sense strand starting at position 3823 of SEQ ID NO: 1242900
gaacuugagcuuuaucugu

SEQ ID NO: 1380675 - RNA, 19 nt, Artificial Sequence
  Description of Artificial Sequence: Synthetic oligonucleotide
  Antisense strand to SEQ ID NO: 1380674
acagauaaagcucaaguuc

SEQ ID NO: 1380676 - RNA, 19 nt, Artificial Sequence
  Description of Artificial Sequence: Synthetic oligonucleotide
  Sense strand starting at position 3825 of SEQ ID NO: 1242900
acuugagcuuuaucuguau

SEQ ID NO: 1380677 - RNA, 19 nt, Artificial Sequence
  Description of Artificial Sequence: Synthetic oligonucleotide
  Antisense strand to SEQ ID NO: 1380676
auacagauaaagcucaagu

SEQ ID NO: 1380678 - RNA, 19 nt, Artificial Sequence
  Description of Artificial Sequence: Synthetic oligonucleotide
  Sense strand starting at position 3828 of SEQ ID NO: 1242900
ugagcuuuaucuguauugu

SEQ ID NO: 1380679 - RNA, 19 nt, Artificial Sequence
  Description of Artificial Sequence: Synthetic oligonucleotide
  Antisense strand to SEQ ID NO: 1380678
acaauacagauaaagcuca

SEQ ID NO: 1380680 - RNA, 19 nt, Artificial Sequence
  Description of Artificial Sequence: Synthetic oligonucleotide
  Sense strand starting at position 3829 of SEQ ID NO: 1242900
gagcuuuaucuguauuguu

SEQ ID NO: 1380681 - RNA, 19 nt, Artificial Sequence
  Description of Artificial Sequence: Synthetic oligonucleotide
  Antisense strand to SEQ ID NO: 1380680
aacaauacagauaaagcuc

SEQ ID NO: 1380682 - RNA, 19 nt, Artificial Sequence
  Description of Artificial Sequence: Synthetic oligonucleotide
  Sense strand starting at position 176 of SEQ ID NO: 1242901
ggcguuaucagccaagugu

SEQ ID NO: 1380683 - RNA, 19 nt, Artificial Sequence
  Description of Artificial Sequence: Synthetic oligonucleotide
  Antisense strand to SEQ ID NO: 1380682
acacuuggcugauaacgcc

SEQ ID NO: 1380684 - RNA, 19 nt, Artificial Sequence
  Description of Artificial Sequence: Synthetic oligonucleotide
  Sense strand starting at position 183 of SEQ ID NO: 1242901
ucagccaaguguucuuaca

SEQ ID NO: 1380685 - RNA, 19 nt, Artificial Sequence
  Description of Artificial Sequence: Synthetic oligonucleotide
  Antisense strand to SEQ ID NO: 1380684
uguaagaacacuuggcuga

SEQ ID NO: 1380686 - RNA, 19 nt, Artificial Sequence
  Description of Artificial Sequence: Synthetic oligonucleotide
  Sense strand starting at position 185 of SEQ ID NO: 1242901
agccaaguguucuuacaau

SEQ ID NO: 1380687 - RNA, 19 nt, Artificial Sequence
  Description of Artificial Sequence: Synthetic oligonucleotide
  Antisense strand to SEQ ID NO: 1380686
auuguaagaacacuuggcu

SEQ ID NO: 1380688 - RNA, 19 nt, Artificial Sequence
  Description of Artificial Sequence: Synthetic oligonucleotide
  Sense strand starting at position 310 of SEQ ID NO: 1242901
caugucagugauugcucua

SEQ ID NO: 1380689 - RNA, 19 nt, Artificial Sequence
  Description of Artificial Sequence: Synthetic oligonucleotide
  Antisense strand to SEQ ID NO: 1380688
uagagcaaucacugacaug

SEQ ID NO: 1380690 - RNA, 19 nt, Artificial Sequence
  Description of Artificial Sequence: Synthetic oligonucleotide
  Sense strand starting at position 335 of SEQ ID NO: 1242901
cgcgcauucguuucaucca

SEQ ID NO: 1380691 - RNA, 19 nt, Artificial Sequence
  Description of Artificial Sequence: Synthetic oligonucleotide
  Antisense strand to SEQ ID NO: 1380690
uggaugaaacgaaugcgcg

SEQ ID NO: 1380692 - RNA, 19 nt, Artificial Sequence
  Description of Artificial Sequence: Synthetic oligonucleotide
  Sense strand starting at position 365 of SEQ ID NO: 1242901
agccauuaucgccaggagu

SEQ ID NO: 1380693 - RNA, 19 nt, Artificial Sequence
  Description of Artificial Sequence: Synthetic oligonucleotide
  Antisense strand to SEQ ID NO: 1380692
acuccuggcgauaauggcu

SEQ ID NO: 1380694 - RNA, 19 nt, Artificial Sequence
  Description of Artificial Sequence: Synthetic oligonucleotide
  Sense strand starting at position 367 of SEQ ID NO: 1242901
ccauuaucgccaggaguca

SEQ ID NO: 1380695 - RNA, 19 nt, Artificial Sequence
  Description of Artificial Sequence: Synthetic oligonucleotide
  Antisense strand to SEQ ID NO: 1380694
ugacuccuggcgauaaugg

SEQ ID NO: 1380696 - RNA, 19 nt, Artificial Sequence
  Description of Artificial Sequence: Synthetic oligonucleotide
  Sense strand starting at position 368 of SEQ ID NO: 1242901
cauuaucgccaggagucaa

SEQ ID NO: 1380697 - RNA, 19 nt, Artificial Sequence
  Description of Artificial Sequence: Synthetic oligonucleotide
  Antisense strand to SEQ ID NO: 1380696
uugacuccuggcgauaaug

SEQ ID NO: 1380698 - RNA, 19 nt, Artificial Sequence
  Description of Artificial Sequence: Synthetic oligonucleotide
  Sense strand starting at position 432 of SEQ ID NO: 1242901
uuugaauucgaacaguguu

SEQ ID NO: 1380699 - RNA, 19 nt, Artificial Sequence
  Description of Artificial Sequence: Synthetic oligonucleotide
  Antisense strand to SEQ ID NO: 1380698
aacacuguucgaauucaaa

SEQ ID NO: 1380700 - RNA, 19 nt, Artificial Sequence
  Description of Artificial Sequence: Synthetic oligonucleotide
  Sense strand starting at position 1166 of SEQ ID NO: 1242901
ggaagaccgugucuccaaa

SEQ ID NO: 1380701 - RNA, 19 nt, Artificial Sequence
  Description of Artificial Sequence: Synthetic oligonucleotide
  Antisense strand to SEQ ID NO: 1380700
uuuggagacacggucuucc

SEQ ID NO: 1380702 - RNA, 19 nt, Artificial Sequence
  Description of Artificial Sequence: Synthetic oligonucleotide
  Sense strand starting at position 1260 of SEQ ID NO: 1242901
ccgccaaaccguuaagcua

SEQ ID NO: 1380703 - RNA, 19 nt, Artificial Sequence
  Description of Artificial Sequence: Synthetic oligonucleotide
  Antisense strand to SEQ ID NO: 1380702
uagcuuaacgguuuggcgg

SEQ ID NO: 1380704 - RNA, 19 nt, Artificial Sequence
  Description of Artificial Sequence: Synthetic oligonucleotide
  Sense strand starting at position 1401 of SEQ ID NO: 1242901
cgagucuuccgcgaagggu

SEQ ID NO: 1380705 - RNA, 19 nt, Artificial Sequence
  Description of Artificial Sequence: Synthetic oligonucleotide
  Antisense strand to SEQ ID NO: 1380704
acccuucgcggaagacucg

SEQ ID NO: 1380706 - RNA, 19 nt, Artificial Sequence
  Description of Artificial Sequence: Synthetic oligonucleotide
  Sense strand starting at position 1984 of SEQ ID NO: 1242901
cugcgucgaagcuuaagua

SEQ ID NO: 1380707 - RNA, 19 nt, Artificial Sequence
  Description of Artificial Sequence: Synthetic oligonucleotide
  Antisense strand to SEQ ID NO: 1380706
uacuuaagcuucgacgcag

SEQ ID NO: 1380708 - RNA, 19 nt, Artificial Sequence
  Description of Artificial Sequence: Synthetic oligonucleotide
  Sense strand starting at position 2194 of SEQ ID NO: 1242901
ggacuagcccacgaucuau

SEQ ID NO: 1380709 - RNA, 19 nt, Artificial Sequence
  Description of Artificial Sequence: Synthetic oligonucleotide
  Antisense strand to SEQ ID NO: 1380708
auagaucgugggcuagucc

SEQ ID NO: 1380710 - RNA, 19 nt, Artificial Sequence
  Description of Artificial Sequence: Synthetic oligonucleotide
  Sense strand starting at position 2551 of SEQ ID NO: 1242901
uaugacguuugaccugaaa

SEQ ID NO: 1380711 - RNA, 19 nt, Artificial Sequence
  Description of Artificial Sequence: Synthetic oligonucleotide
  Antisense strand to SEQ ID NO: 1380710
uuucaggucaaacgucaua

SEQ ID NO: 1380712 - RNA, 19 nt, Artificial Sequence
  Description of Artificial Sequence: Synthetic oligonucleotide
  Sense strand starting at position 2553 of SEQ ID NO: 1242901
ugacguuugaccugaaaga

SEQ ID NO: 1380713 - RNA, 19 nt, Artificial Sequence
  Description of Artificial Sequence: Synthetic oligonucleotide
  Antisense strand to SEQ ID NO: 1380712
ucuuucaggucaaacguca

SEQ ID NO: 1380714 - RNA, 19 nt, Artificial Sequence
  Description of Artificial Sequence: Synthetic oligonucleotide
  Sense strand starting at position 2700 of SEQ ID NO: 1242901
gaggguugaccucagaugu

SEQ ID NO: 1380715 - RNA, 19 nt, Artificial Sequence
  Description of Artificial Sequence: Synthetic oligonucleotide
  Antisense strand to SEQ ID NO: 1380714
acaucugaggucaacccuc

SEQ ID NO: 1380716 - RNA, 19 nt, Artificial Sequence
  Description of Artificial Sequence: Synthetic oligonucleotide
  Sense strand starting at position 2845 of SEQ ID NO: 1242901
cagucuuacgaaggaagua

SEQ ID NO: 1380717 - RNA, 19 nt, Artificial Sequence
  Description of Artificial Sequence: Synthetic oligonucleotide
  Antisense strand to SEQ ID NO: 1380716
uacuuccuucguaagacug

SEQ ID NO: 1380718 - RNA, 19 nt, Artificial Sequence
  Description of Artificial Sequence: Synthetic oligonucleotide
  Sense strand starting at position 2908 of SEQ ID NO: 1242901
ccaaguaauugugccugau

SEQ ID NO: 1380719 - RNA, 19 nt, Artificial Sequence
  Description of Artificial Sequence: Synthetic oligonucleotide
  Antisense strand to SEQ ID NO: 1380718
aucaggcacaauuacuugg

SEQ ID NO: 1380720 - RNA, 19 nt, Artificial Sequence
  Description of Artificial Sequence: Synthetic oligonucleotide
  Sense strand starting at position 2910 of SEQ ID NO: 1242901
aaguaauugugccugauua

SEQ ID NO: 1380721 - RNA, 19 nt, Artificial Sequence
  Description of Artificial Sequence: Synthetic oligonucleotide
  Antisense strand to SEQ ID NO: 1380720
uaaucaggcacaauuacuu

SEQ ID NO: 1380722 - RNA, 19 nt, Artificial Sequence
  Description of Artificial Sequence: Synthetic oligonucleotide
  Sense strand starting at position 2911 of SEQ ID NO: 1242901
aguaauugugccugauuac

SEQ ID NO: 1380723 - RNA, 19 nt, Artificial Sequence
  Description of Artificial Sequence: Synthetic oligonucleotide
  Antisense strand to SEQ ID NO: 1380722
guaaucaggcacaauuacu

SEQ ID NO: 1380724 - RNA, 19 nt, Artificial Sequence
  Description of Artificial Sequence: Synthetic oligonucleotide
  Sense strand starting at position 2912 of SEQ ID NO: 1242901
guaauugugccugauuaca

SEQ ID NO: 1380725 - RNA, 19 nt, Artificial Sequence
  Description of Artificial Sequence: Synthetic oligonucleotide
  Antisense strand to SEQ ID NO: 1380724
uguaaucaggcacaauuac

SEQ ID NO: 1380726 - RNA, 19 nt, Artificial Sequence
  Description of Artificial Sequence: Synthetic oligonucleotide
  Sense strand starting at position 2961 of SEQ ID NO: 1242901
caggucuuguaacugcaaa

SEQ ID NO: 1380727 - RNA, 19 nt, Artificial Sequence
  Description of Artificial Sequence: Synthetic oligonucleotide
  Antisense strand to SEQ ID NO: 1380726
uuugcaguuacaagaccug

SEQ ID NO: 1380728 - RNA, 19 nt, Artificial Sequence
  Description of Artificial Sequence: Synthetic oligonucleotide
  Sense strand starting at position 2998 of SEQ ID NO: 1242901
gcaugaaugcuagaguguu

SEQ ID NO: 1380729 - RNA, 19 nt, Artificial Sequence
  Description of Artificial Sequence: Synthetic oligonucleotide
  Antisense strand to SEQ ID NO: 1380728
aacacucuagcauucaugc

SEQ ID NO: 1380730 - RNA, 19 nt, Artificial Sequence
  Description of Artificial Sequence: Synthetic oligonucleotide
  Sense strand starting at position 3143 of SEQ ID NO: 1242901
agacguuaauuccugauac

SEQ ID NO: 1380731 - RNA, 19 nt, Artificial Sequence
  Description of Artificial Sequence: Synthetic oligonucleotide
  Antisense strand to SEQ ID NO: 1380730
guaucaggaauuaacgucu

SEQ ID NO: 1380732 - RNA, 19 nt, Artificial Sequence
  Description of Artificial Sequence: Synthetic oligonucleotide
  Sense strand starting at position 3145 of SEQ ID NO: 1242901
acguuaauuccugauacau

SEQ ID NO: 1380733 - RNA, 19 nt, Artificial Sequence
  Description of Artificial Sequence: Synthetic oligonucleotide
  Antisense strand to SEQ ID NO: 1380732
auguaucaggaauuaacgu

SEQ ID NO: 1380734 - RNA, 19 nt, Artificial Sequence
  Description of Artificial Sequence: Synthetic oligonucleotide
  Sense strand starting at position 3147 of SEQ ID NO: 1242901
guuaauuccugauacauag

SEQ ID NO: 1380735 - RNA, 19 nt, Artificial Sequence
  Description of Artificial Sequence: Synthetic oligonucleotide
  Antisense strand to SEQ ID NO: 1380734
cuauguaucaggaauuaac

SEQ ID NO: 1380736 - RNA, 19 nt, Artificial Sequence
  Description of Artificial Sequence: Synthetic oligonucleotide
  Sense strand starting at position 3222 of SEQ ID NO: 1242901
gaggguuggacacgucuuu

SEQ ID NO: 1380737 - RNA, 19 nt, Artificial Sequence
  Description of Artificial Sequence: Synthetic oligonucleotide
  Antisense strand to SEQ ID NO: 1380736
aaagacguguccaacccuc

SEQ ID NO: 1380738 - RNA, 19 nt, Artificial Sequence
  Description of Artificial Sequence: Synthetic oligonucleotide
  Sense strand starting at position 3227 of SEQ ID NO: 1242901
uuggacacgucuuucuaga

SEQ ID NO: 1380739 - RNA, 19 nt, Artificial Sequence
  Description of Artificial Sequence: Synthetic oligonucleotide
  Antisense strand to SEQ ID NO: 1380738
ucuagaaagacguguccaa

SEQ ID NO: 1380740 - RNA, 19 nt, Artificial Sequence
  Description of Artificial Sequence: Synthetic oligonucleotide
  Sense strand starting at position 3229 of SEQ ID NO: 1242901
ggacacgucuuucuagaga

SEQ ID NO: 1380741 - RNA, 19 nt, Artificial Sequence
  Description of Artificial Sequence: Synthetic oligonucleotide
  Antisense strand to SEQ ID NO: 1380740
ucucuagaaagacgugucc

SEQ ID NO: 1380742 - RNA, 19 nt, Artificial Sequence
  Description of Artificial Sequence: Synthetic oligonucleotide
  Sense strand starting at position 3232 of SEQ ID NO: 1242901
cacgucuuucuagagaaac

SEQ ID NO: 1380743 - RNA, 19 nt, Artificial Sequence
  Description of Artificial Sequence: Synthetic oligonucleotide
  Antisense strand to SEQ ID NO: 1380742
guuucucuagaaagacgug

SEQ ID NO: 1380744 - RNA, 19 nt, Artificial Sequence
  Description of Artificial Sequence: Synthetic oligonucleotide
  Sense strand starting at position 3311 of SEQ ID NO: 1242901
cccuaaaggcccugaauau

SEQ ID NO: 1380745 - RNA, 19 nt, Artificial Sequence
  Description of Artificial Sequence: Synthetic oligonucleotide
  Antisense strand to SEQ ID NO: 1380744
auauucagggccuuuaggg

SEQ ID NO: 1380746 - RNA, 19 nt, Artificial Sequence
  Description of Artificial Sequence: Synthetic oligonucleotide
  Sense strand starting at position 3318 of SEQ ID NO: 1242901
ggcccugaauaugccaaua

SEQ ID NO: 1380747 - RNA, 19 nt, Artificial Sequence
  Description of Artificial Sequence: Synthetic oligonucleotide
  Antisense strand to SEQ ID NO: 1380746
uauuggcauauucagggcc

SEQ ID NO: 1380748 - RNA, 19 nt, Artificial Sequence
  Description of Artificial Sequence: Synthetic oligonucleotide
  Sense strand starting at position 3472 of SEQ ID NO: 1242901
ggguaugcauucguguaca

SEQ ID NO: 1380749 - RNA, 19 nt, Artificial Sequence
  Description of Artificial Sequence: Synthetic oligonucleotide
  Antisense strand to SEQ ID NO: 1380748
uguacacgaaugcauaccc

SEQ ID NO: 1380750 - RNA, 19 nt, Artificial Sequence
  Description of Artificial Sequence: Synthetic oligonucleotide
  Sense strand starting at position 3475 of SEQ ID NO: 1242901
uaugcauucguguacaaag

SEQ ID NO: 1380751 - RNA, 19 nt, Artificial Sequence
  Description of Artificial Sequence: Synthetic oligonucleotide
  Antisense strand to SEQ ID NO: 1380750
cuuuguacacgaaugcaua

SEQ ID NO: 1380752 - RNA, 19 nt, Artificial Sequence
  Description of Artificial Sequence: Synthetic oligonucleotide
  Sense strand starting at position 3821 of SEQ ID NO: 1242901
gcugacauuuaauaaugau

SEQ ID NO: 1380753 - RNA, 19 nt, Artificial Sequence
  Description of Artificial Sequence: Synthetic oligonucleotide
  Antisense strand to SEQ ID NO: 1380752
aucauuauuaaaugucagc

SEQ ID NO: 1380754 - RNA, 19 nt, Artificial Sequence
  Description of Artificial Sequence: Synthetic oligonucleotide
  Sense strand starting at position 3840 of SEQ ID NO: 1242901
auacauugugcucaucuau

SEQ ID NO: 1380755 - RNA, 19 nt, Artificial Sequence
  Description of Artificial Sequence: Synthetic oligonucleotide
  Antisense strand to SEQ ID NO: 1380754
auagaugagcacaauguau

SEQ ID NO: 1380756 - RNA, 19 nt, Artificial Sequence
  Description of Artificial Sequence: Synthetic oligonucleotide
  Sense strand starting at position 3846 of SEQ ID NO: 1242901
ugugcucaucuauaauaug

SEQ ID NO: 1380757 - RNA, 19 nt, Artificial Sequence
  Description of Artificial Sequence: Synthetic oligonucleotide
  Antisense strand to SEQ ID NO: 1380756
cauauuauagaugagcaca

SEQ ID NO: 1380758 - RNA, 19 nt, Artificial Sequence
  Description of Artificial Sequence: Synthetic oligonucleotide
  Sense strand starting at position 3900 of SEQ ID NO: 1242901
cccuguucugacugaguaa

SEQ ID NO: 1380759 - RNA, 19 nt, Artificial Sequence
  Description of Artificial Sequence: Synthetic oligonucleotide
  Antisense strand to SEQ ID NO: 1380758
uuacucagucagaacaggg

SEQ ID NO: 1380760 - RNA, 19 nt, Artificial Sequence
  Description of Artificial Sequence: Synthetic oligonucleotide
  Sense strand starting at position 3903 of SEQ ID NO: 1242901
uguucugacugaguaaacu

SEQ ID NO: 1380761 - RNA, 19 nt, Artificial Sequence
  Description of Artificial Sequence: Synthetic oligonucleotide
  Antisense strand to SEQ ID NO: 1380760
aguuuacucagucagaaca

SEQ ID NO: 1380762 - RNA, 19 nt, Artificial Sequence
  Description of Artificial Sequence: Synthetic oligonucleotide
  Sense strand starting at position 5 of SEQ ID NO: 1242902
cccugaugucagggagcau

SEQ ID NO: 1380763 - RNA, 19 nt, Artificial Sequence
  Description of Artificial Sequence: Synthetic oligonucleotide
  Antisense strand to SEQ ID NO: 1380762
augcucccugacaucaggg

SEQ ID NO: 1380764 - RNA, 19 nt, Artificial Sequence
  Description of Artificial Sequence: Synthetic oligonucleotide
  Sense strand starting at position 6 of SEQ ID NO: 1242902
ccugaugucagggagcaua

SEQ ID NO: 1380765 - RNA, 19 nt, Artificial Sequence
  Description of Artificial Sequence: Synthetic oligonucleotide
  Antisense strand to SEQ ID NO: 1380764
uaugcucccugacaucagg

SEQ ID NO: 1380766 - RNA, 19 nt, Artificial Sequence
  Description of Artificial Sequence: Synthetic oligonucleotide
  Sense strand starting at position 307 of SEQ ID NO: 1242902
cacaaucaccugggaaagu

SEQ ID NO: 1380767 - RNA, 19 nt, Artificial Sequence
  Description of Artificial Sequence: Synthetic oligonucleotide
  Antisense strand to SEQ ID NO: 1380766
acuuucccaggugauugug

SEQ ID NO: 1380768 - RNA, 19 nt, Artificial Sequence
  Description of Artificial Sequence: Synthetic oligonucleotide
  Sense strand starting at position 335 of SEQ ID NO: 1242902
ucaggacuguguuuccuaa

SEQ ID NO: 1380769 - RNA, 19 nt, Artificial Sequence
  Description of Artificial Sequence: Synthetic oligonucleotide
  Antisense strand to SEQ ID NO: 1380768
uuaggaaacacaguccuga

SEQ ID NO: 1380770 - RNA, 19 nt, Artificial Sequence
  Description of Artificial Sequence: Synthetic oligonucleotide
  Sense strand starting at position 337 of SEQ ID NO: 1242902
aggacuguguuuccuaaag

SEQ ID NO: 1380771 - RNA, 19 nt, Artificial Sequence
  Description of Artificial Sequence: Synthetic oligonucleotide
  Antisense strand to SEQ ID NO: 1380770
cuuuaggaaacacaguccu

SEQ ID NO: 1380772 - RNA, 19 nt, Artificial Sequence
  Description of Artificial Sequence: Synthetic oligonucleotide
  Sense strand starting at position 442 of SEQ ID NO: 1242902
augucuuuggcuuaauaaa

SEQ ID NO: 1380773 - RNA, 19 nt, Artificial Sequence
  Description of Artificial Sequence: Synthetic oligonucleotide
  Antisense strand to SEQ ID NO: 1380772
uuuauuaagccaaagacau

SEQ ID NO: 1380774 - RNA, 19 nt, Artificial Sequence
  Description of Artificial Sequence: Synthetic oligonucleotide
  Sense strand starting at position 466 of SEQ ID NO: 1242902
cgcucuggagguuaagaau

SEQ ID NO: 1380775 - RNA, 19 nt, Artificial Sequence
  Description of Artificial Sequence: Synthetic oligonucleotide
  Antisense strand to SEQ ID NO: 1380774
auucuuaaccuccagagcg

SEQ ID NO: 1380776 - RNA, 19 nt, Artificial Sequence
  Description of Artificial Sequence: Synthetic oligonucleotide
  Sense strand starting at position 674 of SEQ ID NO: 1242902
acuacuguguucccaagga

SEQ ID NO: 1380777 - RNA, 19 nt, Artificial Sequence
  Description of Artificial Sequence: Synthetic oligonucleotide
  Antisense strand to SEQ ID NO: 1380776
uccuugggaacacaguagu

SEQ ID NO: 1380778 - RNA, 19 nt, Artificial Sequence
  Description of Artificial Sequence: Synthetic oligonucleotide
  Sense strand starting at position 859 of SEQ ID NO: 1242902
aggccuuaauguccauuaa

SEQ ID NO: 1380779 - RNA, 19 nt, Artificial Sequence
  Description of Artificial Sequence: Synthetic oligonucleotide
  Antisense strand to SEQ ID NO: 1380778
uuaauggacauuaaggccu

SEQ ID NO: 1380780 - RNA, 19 nt, Artificial Sequence
  Description of Artificial Sequence: Synthetic oligonucleotide
  Sense strand starting at position 860 of SEQ ID NO: 1242902
ggccuuaauguccauuaaa

SEQ ID NO: 1380781 - RNA, 19 nt, Artificial Sequence
  Description of Artificial Sequence: Synthetic oligonucleotide
  Antisense strand to SEQ ID NO: 1380780
uuuaauggacauuaaggcc

SEQ ID NO: 1380782 - RNA, 19 nt, Artificial Sequence
  Description of Artificial Sequence: Synthetic oligonucleotide
  Sense strand starting at position 1034 of SEQ ID NO: 1242902
ggagcuagaaguuagguaa

SEQ ID NO: 1380783 - RNA, 19 nt, Artificial Sequence
  Description of Artificial Sequence: Synthetic oligonucleotide
  Antisense strand to SEQ ID NO: 1380782
uuaccuaacuucuagcucc

SEQ ID NO: 1380784 - RNA, 19 nt, Artificial Sequence
  Description of Artificial Sequence: Synthetic oligonucleotide
  Sense strand starting at position 1037 of SEQ ID NO: 1242902
gcuagaaguuagguaaaga

SEQ ID NO: 1380785 - RNA, 19 nt, Artificial Sequence
  Description of Artificial Sequence: Synthetic oligonucleotide
  Antisense strand to SEQ ID NO: 1380784
ucuuuaccuaacuucuagc

SEQ ID NO: 1380786 - RNA, 19 nt, Artificial Sequence
  Description of Artificial Sequence: Synthetic oligonucleotide
  Sense strand starting at position 1171 of SEQ ID NO: 1242902
agaacaucguuccuuacau

SEQ ID NO: 1380787 - RNA, 19 nt, Artificial Sequence
  Description of Artificial Sequence: Synthetic oligonucleotide
  Antisense strand to SEQ ID NO: 1380786
auguaaggaacgauguucu

SEQ ID NO: 1380788 - RNA, 19 nt, Artificial Sequence
  Description of Artificial Sequence: Synthetic oligonucleotide
  Sense strand starting at position 1228 of SEQ ID NO: 1242902
ggccuagaucgggagauuc

SEQ ID NO: 1380789 - RNA, 19 nt, Artificial Sequence
  Description of Artificial Sequence: Synthetic oligonucleotide
  Antisense strand to SEQ ID NO: 1380788
gaaucucccgaucuaggcc

SEQ ID NO: 1380790 - RNA, 19 nt, Artificial Sequence
  Description of Artificial Sequence: Synthetic oligonucleotide
  Sense strand starting at position 1236 of SEQ ID NO: 1242902
ucgggagauucagcacuga

SEQ ID NO: 1380791 - RNA, 19 nt, Artificial Sequence
  Description of Artificial Sequence: Synthetic oligonucleotide
  Antisense strand to SEQ ID NO: 1380790
ucagugcugaaucucccga

SEQ ID NO: 1380792 - RNA, 19 nt, Artificial Sequence
  Description of Artificial Sequence: Synthetic oligonucleotide
  Sense strand starting at position 2392 of SEQ ID NO: 1242902
agagcuuggcgauaacaag

SEQ ID NO: 1380793 - RNA, 19 nt, Artificial Sequence
  Description of Artificial Sequence: Synthetic oligonucleotide
  Antisense strand to SEQ ID NO: 1380792
cuuguuaucgccaagcucu

SEQ ID NO: 1380794 - RNA, 19 nt, Artificial Sequence
  Description of Artificial Sequence: Synthetic oligonucleotide
  Sense strand starting at position 2607 of SEQ ID NO: 1242902
uccuuuauucgugaauaaa

SEQ ID NO: 1380795 - RNA, 19 nt, Artificial Sequence
  Description of Artificial Sequence: Synthetic oligonucleotide
  Antisense strand to SEQ ID NO: 1380794
uuuauucacgaauaaagga

SEQ ID NO: 1380796 - RNA, 19 nt, Artificial Sequence
  Description of Artificial Sequence: Synthetic oligonucleotide
  Sense strand starting at position 2976 of SEQ ID NO: 1242902
aguguaacaucacugauca

SEQ ID NO: 1380797 - RNA, 19 nt, Artificial Sequence
  Description of Artificial Sequence: Synthetic oligonucleotide
  Antisense strand to SEQ ID NO: 1380796
ugaucagugauguuacacu

SEQ ID NO: 1380798 - RNA, 19 nt, Artificial Sequence
  Description of Artificial Sequence: Synthetic oligonucleotide
  Sense strand starting at position 2977 of SEQ ID NO: 1242902
guguaacaucacugaucac

SEQ ID NO: 1380799 - RNA, 19 nt, Artificial Sequence
  Description of Artificial Sequence: Synthetic oligonucleotide
  Antisense strand to SEQ ID NO: 1380798
gugaucagugauguuacac

SEQ ID NO: 1380800 - RNA, 19 nt, Artificial Sequence
  Description of Artificial Sequence: Synthetic oligonucleotide
  Sense strand starting at position 3018 of SEQ ID NO: 1242902
agaggaguuagaggugacu

SEQ ID NO: 1380801 - RNA, 19 nt, Artificial Sequence
  Description of Artificial Sequence: Synthetic oligonucleotide
  Antisense strand to SEQ ID NO: 1380800
agucaccucuaacuccucu

SEQ ID NO: 1380802 - RNA, 19 nt, Artificial Sequence
  Description of Artificial Sequence: Synthetic oligonucleotide
  Sense strand starting at position 3020 of SEQ ID NO: 1242902
aggaguuagaggugacugu

SEQ ID NO: 1380803 - RNA, 19 nt, Artificial Sequence
  Description of Artificial Sequence: Synthetic oligonucleotide
  Antisense strand to SEQ ID NO: 1380802
acagucaccucuaacuccu

SEQ ID NO: 1380804 - RNA, 19 nt, Artificial Sequence
  Description of Artificial Sequence: Synthetic oligonucleotide
  Sense strand starting at position 3024 of SEQ ID NO: 1242902
guuagaggugacugucaga

SEQ ID NO: 1380805 - RNA, 19 nt, Artificial Sequence
  Description of Artificial Sequence: Synthetic oligonucleotide
  Antisense strand to SEQ ID NO: 1380804
ucugacagucaccucuaac

SEQ ID NO: 1380806 - RNA, 19 nt, Artificial Sequence
  Description of Artificial Sequence: Synthetic oligonucleotide
  Sense strand starting at position 3033 of SEQ ID NO: 1242902
gacugucagacucggagaa

SEQ ID NO: 1380807 - RNA, 19 nt, Artificial Sequence
  Description of Artificial Sequence: Synthetic oligonucleotide
  Antisense strand to SEQ ID NO: 1380806
uucuccgagucugacaguc

SEQ ID NO: 1380808 - RNA, 19 nt, Artificial Sequence
  Description of Artificial Sequence: Synthetic oligonucleotide
  Sense strand starting at position 3034 of SEQ ID NO: 1242902
acugucagacucggagaau

SEQ ID NO: 1380809 - RNA, 19 nt, Artificial Sequence
  Description of Artificial Sequence: Synthetic oligonucleotide
  Antisense strand to SEQ ID NO: 1380808
auucuccgagucugacagu

SEQ ID NO: 1380810 - RNA, 19 nt, Artificial Sequence
  Description of Artificial Sequence: Synthetic oligonucleotide
  Sense strand starting at position 3064 of SEQ ID NO: 1242902
cuggucaugagauggguuu

SEQ ID NO: 1380811 - RNA, 19 nt, Artificial Sequence
  Description of Artificial Sequence: Synthetic oligonucleotide
  Antisense strand to SEQ ID NO: 1380810
aaacccaucucaugaccag

SEQ ID NO: 1380812 - RNA, 19 nt, Artificial Sequence
  Description of Artificial Sequence: Synthetic oligonucleotide
  Sense strand starting at position 3071 of SEQ ID NO: 1242902
ugagauggguuuccuuauu

SEQ ID NO: 1380813 - RNA, 19 nt, Artificial Sequence
  Description of Artificial Sequence: Synthetic oligonucleotide
  Antisense strand to SEQ ID NO: 1380812
aauaaggaaacccaucuca

SEQ ID NO: 1380814 - RNA, 19 nt, Artificial Sequence
  Description of Artificial Sequence: Synthetic oligonucleotide
  Sense strand starting at position 3082 of SEQ ID NO: 1242902
uccuuauuuggcuguggga

SEQ ID NO: 1380815 - RNA, 19 nt, Artificial Sequence
  Description of Artificial Sequence: Synthetic oligonucleotide
  Antisense strand to SEQ ID NO: 1380814
ucccacagccaaauaagga

SEQ ID NO: 1380816 - RNA, 19 nt, Artificial Sequence
  Description of Artificial Sequence: Synthetic oligonucleotide
  Sense strand starting at position 3084 of SEQ ID NO: 1242902
cuuauuuggcugugggagu

SEQ ID NO: 1380817 - RNA, 19 nt, Artificial Sequence
  Description of Artificial Sequence: Synthetic oligonucleotide
  Antisense strand to SEQ ID NO: 1380816
acucccacagccaaauaag

SEQ ID NO: 1380818 - RNA, 19 nt, Artificial Sequence
  Description of Artificial Sequence: Synthetic oligonucleotide
  Sense strand starting at position 3095 of SEQ ID NO: 1242902
gugggagugguuuagcaau

SEQ ID NO: 1380819 - RNA, 19 nt, Artificial Sequence
  Description of Artificial Sequence: Synthetic oligonucleotide
  Antisense strand to SEQ ID NO: 1380818
auugcuaaaccacucccac

SEQ ID NO: 1380820 - RNA, 19 nt, Artificial Sequence
  Description of Artificial Sequence: Synthetic oligonucleotide
  Sense strand starting at position 3097 of SEQ ID NO: 1242902
gggagugguuuagcaauca

SEQ ID NO: 1380821 - RNA, 19 nt, Artificial Sequence
  Description of Artificial Sequence: Synthetic oligonucleotide
  Antisense strand to SEQ ID NO: 1380820
ugauugcuaaaccacuccc

SEQ ID NO: 1380822 - RNA, 19 nt, Artificial Sequence
  Description of Artificial Sequence: Synthetic oligonucleotide
  Sense strand starting at position 3146 of SEQ ID NO: 1242902
ggacauaugcuuugagguu

SEQ ID NO: 1380823 - RNA, 19 nt, Artificial Sequence
  Description of Artificial Sequence: Synthetic oligonucleotide
  Antisense strand to SEQ ID NO: 1380822
aaccucaaagcauaugucc

SEQ ID NO: 1380824 - RNA, 19 nt, Artificial Sequence
  Description of Artificial Sequence: Synthetic oligonucleotide
  Sense strand starting at position 3155 of SEQ ID NO: 1242902
cuuugagguucuccaauca

SEQ ID NO: 1380825 - RNA, 19 nt, Artificial Sequence
  Description of Artificial Sequence: Synthetic oligonucleotide
  Antisense strand to SEQ ID NO: 1380824
ugauuggagaaccucaaag

SEQ ID NO: 1380826 - RNA, 19 nt, Artificial Sequence
  Description of Artificial Sequence: Synthetic oligonucleotide
  Sense strand starting at position 3163 of SEQ ID NO: 1242902
uucuccaaucagugaugua

SEQ ID NO: 1380827 - RNA, 19 nt, Artificial Sequence
  Description of Artificial Sequence: Synthetic oligonucleotide
  Antisense strand to SEQ ID NO: 1380826
uacaucacugauuggagaa

SEQ ID NO: 1380828 - RNA, 19 nt, Artificial Sequence
  Description of Artificial Sequence: Synthetic oligonucleotide
  Sense strand starting at position 3225 of SEQ ID NO: 1242902
gucaccaucuguuuauaag

SEQ ID NO: 1380829 - RNA, 19 nt, Artificial Sequence
  Description of Artificial Sequence: Synthetic oligonucleotide
  Antisense strand to SEQ ID NO: 1380828
cuuauaaacagauggugac

SEQ ID NO: 1380830 - RNA, 19 nt, Artificial Sequence
  Description of Artificial Sequence: Synthetic oligonucleotide
  Sense strand starting at position 3367 of SEQ ID NO: 1242902
ggaaauuccugaucgaugc

SEQ ID NO: 1380831 - RNA, 19 nt, Artificial Sequence
  Description of Artificial Sequence: Synthetic oligonucleotide
  Antisense strand to SEQ ID NO: 1380830
gcaucgaucaggaauuucc

SEQ ID NO: 1380832 - RNA, 19 nt, Artificial Sequence
  Description of Artificial Sequence: Synthetic oligonucleotide
  Sense strand starting at position 3435 of SEQ ID NO: 1242902
gugucugaguaacuagaau

SEQ ID NO: 1380833 - RNA, 19 nt, Artificial Sequence
  Description of Artificial Sequence: Synthetic oligonucleotide
  Antisense strand to SEQ ID NO: 1380832
auucuaguuacucagacac

SEQ ID NO: 1380834 - RNA, 19 nt, Artificial Sequence
  Description of Artificial Sequence: Synthetic oligonucleotide
  Sense strand starting at position 3908 of SEQ ID NO: 1242902
ggcagcaugagauauucuu

SEQ ID NO: 1380835 - RNA, 19 nt, Artificial Sequence
  Description of Artificial Sequence: Synthetic oligonucleotide
  Antisense strand to SEQ ID NO: 1380834
aagaauaucucaugcugcc

SEQ ID NO: 1380836 - RNA, 19 nt, Artificial Sequence
  Description of Artificial Sequence: Synthetic oligonucleotide
  Sense strand starting at position 3937 of SEQ ID NO: 1242902
cauauucuagugggauaag

SEQ ID NO: 1380837 - RNA, 19 nt, Artificial Sequence
  Description of Artificial Sequence: Synthetic oligonucleotide
  Antisense strand to SEQ ID NO: 1380836
cuuaucccacuagaauaug

SEQ ID NO: 1380838 - RNA, 19 nt, Artificial Sequence
  Description of Artificial Sequence: Synthetic oligonucleotide
  Sense strand starting at position 3973 of SEQ ID NO: 1242902
uagguaaugauaggugcua

SEQ ID NO: 1380839 - RNA, 19 nt, Artificial Sequence
  Description of Artificial Sequence: Synthetic oligonucleotide
  Antisense strand to SEQ ID NO: 1380838
uagcaccuaucauuaccua

SEQ ID NO: 1380840 - RNA, 19 nt, Artificial Sequence
  Description of Artificial Sequence: Synthetic oligonucleotide
  Sense strand starting at position 3974 of SEQ ID NO: 1242902
agguaaugauaggugcuau

SEQ ID NO: 1380841 - RNA, 19 nt, Artificial Sequence
  Description of Artificial Sequence: Synthetic oligonucleotide
  Antisense strand to SEQ ID NO: 1380840
auagcaccuaucauuaccu

SEQ ID NO: 1380842 - RNA, 19 nt, Artificial Sequence
  Description of Artificial Sequence: Synthetic oligonucleotide
  Sense strand starting at position 75 of SEQ ID NO: 1242903
cuugcuguccuauggaaac

SEQ ID NO: 1380843 - RNA, 19 nt, Artificial Sequence
  Description of Artificial Sequence: Synthetic oligonucleotide
  Antisense strand to SEQ ID NO: 1380842
guuuccauaggacagcaag

SEQ ID NO: 1380844 - RNA, 19 nt, Artificial Sequence
  Description of Artificial Sequence: Synthetic oligonucleotide
  Sense strand starting at position 145 of SEQ ID NO: 1242903
agcagaaguaggugaaaua

SEQ ID NO: 1380845 - RNA, 19 nt, Artificial Sequence
  Description of Artificial Sequence: Synthetic oligonucleotide
  Antisense strand to SEQ ID NO: 1380844
uauuucaccuacuucugcu

SEQ ID NO: 1380846 - RNA, 19 nt, Artificial Sequence
  Description of Artificial Sequence: Synthetic oligonucleotide
  Sense strand starting at position 261 of SEQ ID NO: 1242903
cccucuguccucugagaaa

SEQ ID NO: 1380847 - RNA, 19 nt, Artificial Sequence
  Description of Artificial Sequence: Synthetic oligonucleotide
  Antisense strand to SEQ ID NO: 1380846
uuucucagaggacagaggg

SEQ ID NO: 1380848 - RNA, 19 nt, Artificial Sequence
  Description of Artificial Sequence: Synthetic oligonucleotide
  Sense strand starting at position 340 of SEQ ID NO: 1242903
aagcuaugcuggcccagaa

SEQ ID NO: 1380849 - RNA, 19 nt, Artificial Sequence
  Description of Artificial Sequence: Synthetic oligonucleotide
  Antisense strand to SEQ ID NO: 1380848
uucugggccagcauagcuu

SEQ ID NO: 1380850 - RNA, 19 nt, Artificial Sequence
  Description of Artificial Sequence: Synthetic oligonucleotide
  Sense strand starting at position 376 of SEQ ID NO: 1242903
agaagaaauucugaaacaa

SEQ ID NO: 1380851 - RNA, 19 nt, Artificial Sequence
  Description of Artificial Sequence: Synthetic oligonucleotide
  Antisense strand to SEQ ID NO: 1380850
uuguuucagaauuucuucu

SEQ ID NO: 1380852 - RNA, 19 nt, Artificial Sequence
  Description of Artificial Sequence: Synthetic oligonucleotide
  Sense strand starting at position 447 of SEQ ID NO: 1242903
agcaaaguaucuuuaggag

SEQ ID NO: 1380853 - RNA, 19 nt, Artificial Sequence
  Description of Artificial Sequence: Synthetic oligonucleotide
  Antisense strand to SEQ ID NO: 1380852
cuccuaaagauacuuugcu

SEQ ID NO: 1380854 - RNA, 19 nt, Artificial Sequence
  Description of Artificial Sequence: Synthetic oligonucleotide
  Sense strand starting at position 453 of SEQ ID NO: 1242903
guaucuuuaggagggagau

SEQ ID NO: 1380855 - RNA, 19 nt, Artificial Sequence
  Description of Artificial Sequence: Synthetic oligonucleotide
  Antisense strand to SEQ ID NO: 1380854
aucucccuccuaaagauac

SEQ ID NO: 1380856 - RNA, 19 nt, Artificial Sequence
  Description of Artificial Sequence: Synthetic oligonucleotide
  Sense strand starting at position 534 of SEQ ID NO: 1242903
gagcgugcucuggaaagca

SEQ ID NO: 1380857 - RNA, 19 nt, Artificial Sequence
  Description of Artificial Sequence: Synthetic oligonucleotide
  Antisense strand to SEQ ID NO: 1380856
ugcuuuccagagcacgcuc

SEQ ID NO: 1380858 - RNA, 19 nt, Artificial Sequence
  Description of Artificial Sequence: Synthetic oligonucleotide
  Sense strand starting at position 536 of SEQ ID NO: 1242903
gcgugcucuggaaagcagu

SEQ ID NO: 1380859 - RNA, 19 nt, Artificial Sequence
  Description of Artificial Sequence: Synthetic oligonucleotide
  Antisense strand to SEQ ID NO: 1380858
acugcuuuccagagcacgc

SEQ ID NO: 1380860 - RNA, 19 nt, Artificial Sequence
  Description of Artificial Sequence: Synthetic oligonucleotide
  Sense strand starting at position 550 of SEQ ID NO: 1242903
gcagucacugcacacaaau

SEQ ID NO: 1380861 - RNA, 19 nt, Artificial Sequence
  Description of Artificial Sequence: Synthetic oligonucleotide
  Antisense strand to SEQ ID NO: 1380860
auuugugugcagugacugc

SEQ ID NO: 1380862 - RNA, 19 nt, Artificial Sequence
  Description of Artificial Sequence: Synthetic oligonucleotide
  Sense strand starting at position 568 of SEQ ID NO: 1242903
uaagacauaugagauggaa

SEQ ID NO: 1380863 - RNA, 19 nt, Artificial Sequence
  Description of Artificial Sequence: Synthetic oligonucleotide
  Antisense strand to SEQ ID NO: 1380862
uuccaucucauaugucuua

SEQ ID NO: 1380864 - RNA, 19 nt, Artificial Sequence
  Description of Artificial Sequence: Synthetic oligonucleotide
  Sense strand starting at position 626 of SEQ ID NO: 1242903
gggaaauuauggguggugu

SEQ ID NO: 1380865 - RNA, 19 nt, Artificial Sequence
  Description of Artificial Sequence: Synthetic oligonucleotide
  Antisense strand to SEQ ID NO: 1380864
acaccacccauaauuuccc

SEQ ID NO: 1380866 - RNA, 19 nt, Artificial Sequence
  Description of Artificial Sequence: Synthetic oligonucleotide
  Sense strand starting at position 628 of SEQ ID NO: 1242903
gaaauuauggguggugucu

SEQ ID NO: 1380867 - RNA, 19 nt, Artificial Sequence
  Description of Artificial Sequence: Synthetic oligonucleotide
  Antisense strand to SEQ ID NO: 1380866
agacaccacccauaauuuc

SEQ ID NO: 1380868 - RNA, 19 nt, Artificial Sequence
  Description of Artificial Sequence: Synthetic oligonucleotide
  Sense strand starting at position 1101 of SEQ ID NO: 1242903
gcucauuccugagucucca

SEQ ID NO: 1380869 - RNA, 19 nt, Artificial Sequence
  Description of Artificial Sequence: Synthetic oligonucleotide
  Antisense strand to SEQ ID NO: 1380868
uggagacucaggaaugagc

SEQ ID NO: 1380870 - RNA, 19 nt, Artificial Sequence
  Description of Artificial Sequence: Synthetic oligonucleotide
  Sense strand starting at position 1246 of SEQ ID NO: 1242903
cucagcauucuccagagga

SEQ ID NO: 1380871 - RNA, 19 nt, Artificial Sequence
  Description of Artificial Sequence: Synthetic oligonucleotide
  Antisense strand to SEQ ID NO: 1380870
uccucuggagaaugcugag

SEQ ID NO: 1380872 - RNA, 19 nt, Artificial Sequence
  Description of Artificial Sequence: Synthetic oligonucleotide
  Sense strand starting at position 1250 of SEQ ID NO: 1242903
gcauucuccagaggacaga

SEQ ID NO: 1380873 - RNA, 19 nt, Artificial Sequence
  Description of Artificial Sequence: Synthetic oligonucleotide
  Antisense strand to SEQ ID NO: 1380872
ucuguccucuggagaaugc

SEQ ID NO: 1380874 - RNA, 19 nt, Artificial Sequence
  Description of Artificial Sequence: Synthetic oligonucleotide
  Sense strand starting at position 1316 of SEQ ID NO: 1242903
cgagguggcgggagugauu

SEQ ID NO: 1380875 - RNA, 19 nt, Artificial Sequence
  Description of Artificial Sequence: Synthetic oligonucleotide
  Antisense strand to SEQ ID NO: 1380874
aaucacucccgccaccucg

SEQ ID NO: 1380876 - RNA, 19 nt, Artificial Sequence
  Description of Artificial Sequence: Synthetic oligonucleotide
  Sense strand starting at position 1327 of SEQ ID NO: 1242903
gagugauuccuagggcgac

SEQ ID NO: 1380877 - RNA, 19 nt, Artificial Sequence
  Description of Artificial Sequence: Synthetic oligonucleotide
  Antisense strand to SEQ ID NO: 1380876
gucgcccuaggaaucacuc

SEQ ID NO: 1380878 - RNA, 19 nt, Artificial Sequence
  Description of Artificial Sequence: Synthetic oligonucleotide
  Sense strand starting at position 2668 of SEQ ID NO: 1242903
uuaggaugcugucugaaua

SEQ ID NO: 1380879 - RNA, 19 nt, Artificial Sequence
  Description of Artificial Sequence: Synthetic oligonucleotide
  Antisense strand to SEQ ID NO: 1380878
uauucagacagcauccuaa

SEQ ID NO: 1380880 - RNA, 19 nt, Artificial Sequence
  Description of Artificial Sequence: Synthetic oligonucleotide
  Sense strand starting at position 2669 of SEQ ID NO: 1242903
uaggaugcugucugaauaa

SEQ ID NO: 1380881 - RNA, 19 nt, Artificial Sequence
  Description of Artificial Sequence: Synthetic oligonucleotide
  Antisense strand to SEQ ID NO: 1380880
uuauucagacagcauccua

SEQ ID NO: 1380882 - RNA, 19 nt, Artificial Sequence
  Description of Artificial Sequence: Synthetic oligonucleotide
  Sense strand starting at position 2681 of SEQ ID NO: 1242903
ugaauaaccugcucuggga

SEQ ID NO: 1380883 - RNA, 19 nt, Artificial Sequence
  Description of Artificial Sequence: Synthetic oligonucleotide
  Antisense strand to SEQ ID NO: 1380882
ucccagagcagguuauuca

SEQ ID NO: 1380884 - RNA, 19 nt, Artificial Sequence
  Description of Artificial Sequence: Synthetic oligonucleotide
  Sense strand starting at position 3021 of SEQ ID NO: 1242903
ugaucauuugcuuguuugu

SEQ ID NO: 1380885 - RNA, 19 nt, Artificial Sequence
  Description of Artificial Sequence: Synthetic oligonucleotide
  Antisense strand to SEQ ID NO: 1380884
acaaacaagcaaaugauca

SEQ ID NO: 1380886 - RNA, 19 nt, Artificial Sequence
  Description of Artificial Sequence: Synthetic oligonucleotide
  Sense strand starting at position 3039 of SEQ ID NO: 1242903
uggguuuauugacuaggua

SEQ ID NO: 1380887 - RNA, 19 nt, Artificial Sequence
  Description of Artificial Sequence: Synthetic oligonucleotide
  Antisense strand to SEQ ID NO: 1380886
uaccuagucaauaaaccca

SEQ ID NO: 1380888 - RNA, 19 nt, Artificial Sequence
  Description of Artificial Sequence: Synthetic oligonucleotide
  Sense strand starting at position 3040 of SEQ ID NO: 1242903
ggguuuauugacuagguau

SEQ ID NO: 1380889 - RNA, 19 nt, Artificial Sequence
  Description of Artificial Sequence: Synthetic oligonucleotide
  Antisense strand to SEQ ID NO: 1380888
auaccuagucaauaaaccc

SEQ ID NO: 1380890 - RNA, 19 nt, Artificial Sequence
  Description of Artificial Sequence: Synthetic oligonucleotide
  Sense strand starting at position 3042 of SEQ ID NO: 1242903
guuuauugacuagguauca

SEQ ID NO: 1380891 - RNA, 19 nt, Artificial Sequence
  Description of Artificial Sequence: Synthetic oligonucleotide
  Antisense strand to SEQ ID NO: 1380890
ugauaccuagucaauaaac

SEQ ID NO: 1380892 - RNA, 19 nt, Artificial Sequence
  Description of Artificial Sequence: Synthetic oligonucleotide
  Sense strand starting at position 3077 of SEQ ID NO: 1242903
cgaggacucuuguucacug

SEQ ID NO: 1380893 - RNA, 19 nt, Artificial Sequence
  Description of Artificial Sequence: Synthetic oligonucleotide
  Antisense strand to SEQ ID NO: 1380892
cagugaacaagaguccucg

SEQ ID NO: 1380894 - RNA, 19 nt, Artificial Sequence
  Description of Artificial Sequence: Synthetic oligonucleotide
  Sense strand starting at position 3134 of SEQ ID NO: 1242903
aaugguggugugugaaaga

SEQ ID NO: 1380895 - RNA, 19 nt, Artificial Sequence
  Description of Artificial Sequence: Synthetic oligonucleotide
  Antisense strand to SEQ ID NO: 1380894
ucuuucacacaccaccauu

SEQ ID NO: 1380896 - RNA, 19 nt, Artificial Sequence
  Description of Artificial Sequence: Synthetic oligonucleotide
  Sense strand starting at position 3166 of SEQ ID NO: 1242903
uguuaauucugggcuucca

SEQ ID NO: 1380897 - RNA, 19 nt, Artificial Sequence
  Description of Artificial Sequence: Synthetic oligonucleotide
  Antisense strand to SEQ ID NO: 1380896
uggaagcccagaauuaaca

SEQ ID NO: 1380898 - RNA, 19 nt, Artificial Sequence
  Description of Artificial Sequence: Synthetic oligonucleotide
  Sense strand starting at position 3175 of SEQ ID NO: 1242903
ugggcuuccaauggucaga

SEQ ID NO: 1380899 - RNA, 19 nt, Artificial Sequence
  Description of Artificial Sequence: Synthetic oligonucleotide
  Antisense strand to SEQ ID NO: 1380898
ucugaccauuggaagccca

SEQ ID NO: 1380900 - RNA, 19 nt, Artificial Sequence
  Description of Artificial Sequence: Synthetic oligonucleotide
  Sense strand starting at position 3177 of SEQ ID NO: 1242903
ggcuuccaauggucagaaa

SEQ ID NO: 1380901 - RNA, 19 nt, Artificial Sequence
  Description of Artificial Sequence: Synthetic oligonucleotide
  Antisense strand to SEQ ID NO: 1380900
uuucugaccauuggaagcc

SEQ ID NO: 1380902 - RNA, 19 nt, Artificial Sequence
  Description of Artificial Sequence: Synthetic oligonucleotide
  Sense strand starting at position 3178 of SEQ ID NO: 1242903
gcuuccaauggucagaaau

SEQ ID NO: 1380903 - RNA, 19 nt, Artificial Sequence
  Description of Artificial Sequence: Synthetic oligonucleotide
  Antisense strand to SEQ ID NO: 1380902
auuucugaccauuggaagc

SEQ ID NO: 1380904 - RNA, 19 nt, Artificial Sequence
  Description of Artificial Sequence: Synthetic oligonucleotide
  Sense strand starting at position 3219 of SEQ ID NO: 1242903
cugagucuugaaggguuua

SEQ ID NO: 1380905 - RNA, 19 nt, Artificial Sequence
  Description of Artificial Sequence: Synthetic oligonucleotide
  Antisense strand to SEQ ID NO: 1380904
uaaacccuucaagacucag

SEQ ID NO: 1380906 - RNA, 19 nt, Artificial Sequence
  Description of Artificial Sequence: Synthetic oligonucleotide
  Sense strand starting at position 3279 of SEQ ID NO: 1242903
gggugcuguauuuggguga

SEQ ID NO: 1380907 - RNA, 19 nt, Artificial Sequence
  Description of Artificial Sequence: Synthetic oligonucleotide
  Antisense strand to SEQ ID NO: 1380906
ucacccaaauacagcaccc

SEQ ID NO: 1380908 - RNA, 19 nt, Artificial Sequence
  Description of Artificial Sequence: Synthetic oligonucleotide
  Sense strand starting at position 3283 of SEQ ID NO: 1242903
gcuguauuugggugagcca

SEQ ID NO: 1380909 - RNA, 19 nt, Artificial Sequence
  Description of Artificial Sequence: Synthetic oligonucleotide
  Antisense strand to SEQ ID NO: 1380908
uggcucacccaaauacagc

SEQ ID NO: 1380910 - RNA, 19 nt, Artificial Sequence
  Description of Artificial Sequence: Synthetic oligonucleotide
  Sense strand starting at position 3292 of SEQ ID NO: 1242903
gggugagccaugcagaguu

SEQ ID NO: 1380911 - RNA, 19 nt, Artificial Sequence
  Description of Artificial Sequence: Synthetic oligonucleotide
  Antisense strand to SEQ ID NO: 1380910
aacucugcauggcucaccc

SEQ ID NO: 1380912 - RNA, 19 nt, Artificial Sequence
  Description of Artificial Sequence: Synthetic oligonucleotide
  Sense strand starting at position 3530 of SEQ ID NO: 1242903
ggccuuagagcaugggaau

SEQ ID NO: 1380913 - RNA, 19 nt, Artificial Sequence
  Description of Artificial Sequence: Synthetic oligonucleotide
  Antisense strand to SEQ ID NO: 1380912
auucccaugcucuaaggcc

SEQ ID NO: 1380914 - RNA, 19 nt, Artificial Sequence
  Description of Artificial Sequence: Synthetic oligonucleotide
  Sense strand starting at position 3633 of SEQ ID NO: 1242903
gccgucauccuuucuugca

SEQ ID NO: 1380915 - RNA, 19 nt, Artificial Sequence
  Description of Artificial Sequence: Synthetic oligonucleotide
  Antisense strand to SEQ ID NO: 1380914
ugcaagaaaggaugacggc

SEQ ID NO: 1380916 - RNA, 19 nt, Artificial Sequence
  Description of Artificial Sequence: Synthetic oligonucleotide
  Sense strand starting at position 3811 of SEQ ID NO: 1242903
ggaggacuacaagguguau

SEQ ID NO: 1380917 - RNA, 19 nt, Artificial Sequence
  Description of Artificial Sequence: Synthetic oligonucleotide
  Antisense strand to SEQ ID NO: 1380916
auacaccuuguaguccucc

SEQ ID NO: 1380918 - RNA, 19 nt, Artificial Sequence
  Description of Artificial Sequence: Synthetic oligonucleotide
  Sense strand starting at position 3951 of SEQ ID NO: 1242903
gguagcuugaggugaauga

SEQ ID NO: 1380919 - RNA, 19 nt, Artificial Sequence
  Description of Artificial Sequence: Synthetic oligonucleotide
  Antisense strand to SEQ ID NO: 1380918
ucauucaccucaagcuacc

SEQ ID NO: 1380920 - RNA, 19 nt, Artificial Sequence
  Description of Artificial Sequence: Synthetic oligonucleotide
  Sense strand starting at position 3952 of SEQ ID NO: 1242903
guagcuugaggugaaugaa

SEQ ID NO: 1380921 - RNA, 19 nt, Artificial Sequence
  Description of Artificial Sequence: Synthetic oligonucleotide
  Antisense strand to SEQ ID NO: 1380920
uucauucaccucaagcuac

SEQ ID NO: 1380922 - RNA, 19 nt, Artificial Sequence
  Description of Artificial Sequence: Synthetic oligonucleotide
  Sense strand starting at position 126 of SEQ ID NO: 1242904
ucacacugugguugggaaa

SEQ ID NO: 1380923 - RNA, 19 nt, Artificial Sequence
  Description of Artificial Sequence: Synthetic oligonucleotide
  Antisense strand to SEQ ID NO: 1380922
uuucccaaccacaguguga

SEQ ID NO: 1380924 - RNA, 19 nt, Artificial Sequence
  Description of Artificial Sequence: Synthetic oligonucleotide
  Sense strand starting at position 335 of SEQ ID NO: 1242904
ggaagacuuuggucugcug

SEQ ID NO: 1380925 - RNA, 19 nt, Artificial Sequence
  Description of Artificial Sequence: Synthetic oligonucleotide
  Antisense strand to SEQ ID NO: 1380924
cagcagaccaaagucuucc

SEQ ID NO: 1380926 - RNA, 19 nt, Artificial Sequence
  Description of Artificial Sequence: Synthetic oligonucleotide
  Sense strand starting at position 567 of SEQ ID NO: 1242904
cuucuaaguuuagcacaga

SEQ ID NO: 1380927 - RNA, 19 nt, Artificial Sequence
  Description of Artificial Sequence: Synthetic oligonucleotide
  Antisense strand to SEQ ID NO: 1380926
ucugugcuaaacuuagaag

SEQ ID NO: 1380928 - RNA, 19 nt, Artificial Sequence
  Description of Artificial Sequence: Synthetic oligonucleotide
  Sense strand starting at position 570 of SEQ ID NO: 1242904
cuaaguuuagcacagauau

SEQ ID NO: 1380929 - RNA, 19 nt, Artificial Sequence
  Description of Artificial Sequence: Synthetic oligonucleotide
  Antisense strand to SEQ ID NO: 1380928
auaucugugcuaaacuuag

SEQ ID NO: 1380930 - RNA, 19 nt, Artificial Sequence
  Description of Artificial Sequence: Synthetic oligonucleotide
  Sense strand starting at position 636 of SEQ ID NO: 1242904
gggacaaagcgcuaagaau

SEQ ID NO: 1380931 - RNA, 19 nt, Artificial Sequence
  Description of Artificial Sequence: Synthetic oligonucleotide
  Antisense strand to SEQ ID NO: 1380930
auucuuagcgcuuuguccc

SEQ ID NO: 1380932 - RNA, 19 nt, Artificial Sequence
  Description of Artificial Sequence: Synthetic oligonucleotide
  Sense strand starting at position 681 of SEQ ID NO: 1242904
gucaauuguagugauauuc

SEQ ID NO: 1380933 - RNA, 19 nt, Artificial Sequence
  Description of Artificial Sequence: Synthetic oligonucleotide
  Antisense strand to SEQ ID NO: 1380932
gaauaucacuacaauugac

SEQ ID NO: 1380934 - RNA, 19 nt, Artificial Sequence
  Description of Artificial Sequence: Synthetic oligonucleotide
  Sense strand starting at position 690 of SEQ ID NO: 1242904
agugauauucucuaccacu

SEQ ID NO: 1380935 - RNA, 19 nt, Artificial Sequence
  Description of Artificial Sequence: Synthetic oligonucleotide
  Antisense strand to SEQ ID NO: 1380934
agugguagagaauaucacu

SEQ ID NO: 1380936 - RNA, 19 nt, Artificial Sequence
  Description of Artificial Sequence: Synthetic oligonucleotide
  Sense strand starting at position 786 of SEQ ID NO: 1242904
ccuaguuugcaagaagguu

SEQ ID NO: 1380937 - RNA, 19 nt, Artificial Sequence
  Description of Artificial Sequence: Synthetic oligonucleotide
  Antisense strand to SEQ ID NO: 1380936
aaccuucuugcaaacuagg

SEQ ID NO: 1380938 - RNA, 19 nt, Artificial Sequence
  Description of Artificial Sequence: Synthetic oligonucleotide
  Sense strand starting at position 817 of SEQ ID NO: 1242904
gauagucuccugcaagauc

SEQ ID NO: 1380939 - RNA, 19 nt, Artificial Sequence
  Description of Artificial Sequence: Synthetic oligonucleotide
  Antisense strand to SEQ ID NO: 1380938
gaucuugcaggagacuauc

SEQ ID NO: 1380940 - RNA, 19 nt, Artificial Sequence
  Description of Artificial Sequence: Synthetic oligonucleotide
  Sense strand starting at position 872 of SEQ ID NO: 1242904
uaauuaaccugguuaguug

SEQ ID NO: 1380941 - RNA, 19 nt, Artificial Sequence
  Description of Artificial Sequence: Synthetic oligonucleotide
  Antisense strand to SEQ ID NO: 1380940
caacuaaccagguuaauua

SEQ ID NO: 1380942 - RNA, 19 nt, Artificial Sequence
  Description of Artificial Sequence: Synthetic oligonucleotide
  Sense strand starting at position 982 of SEQ ID NO: 1242904
cugagaauucgcuacaguu

SEQ ID NO: 1380943 - RNA, 19 nt, Artificial Sequence
  Description of Artificial Sequence: Synthetic oligonucleotide
  Antisense strand to SEQ ID NO: 1380942
aacuguagcgaauucucag

SEQ ID NO: 1380944 - RNA, 19 nt, Artificial Sequence
  Description of Artificial Sequence: Synthetic oligonucleotide
  Sense strand starting at position 984 of SEQ ID NO: 1242904
gagaauucgcuacaguuua

SEQ ID NO: 1380945 - RNA, 19 nt, Artificial Sequence
  Description of Artificial Sequence: Synthetic oligonucleotide
  Antisense strand to SEQ ID NO: 1380944
uaaacuguagcgaauucuc

SEQ ID NO: 1380946 - RNA, 19 nt, Artificial Sequence
  Description of Artificial Sequence: Synthetic oligonucleotide
  Sense strand starting at position 1055 of SEQ ID NO: 1242904
cacguuuggcaaggagaau

SEQ ID NO: 1380947 - RNA, 19 nt, Artificial Sequence
  Description of Artificial Sequence: Synthetic oligonucleotide
  Antisense strand to SEQ ID NO: 1380946
auucuccuugccaaacgug

SEQ ID NO: 1380948 - RNA, 19 nt, Artificial Sequence
  Description of Artificial Sequence: Synthetic oligonucleotide
  Sense strand starting at position 1056 of SEQ ID NO: 1242904
acguuuggcaaggagaauu

SEQ ID NO: 1380949 - RNA, 19 nt, Artificial Sequence
  Description of Artificial Sequence: Synthetic oligonucleotide
  Antisense strand to SEQ ID NO: 1380948
aauucuccuugccaaacgu

SEQ ID NO: 1380950 - RNA, 19 nt, Artificial Sequence
  Description of Artificial Sequence: Synthetic oligonucleotide
  Sense strand starting at position 1068 of SEQ ID NO: 1242904
gagaauuucgcccggaggu

SEQ ID NO: 1380951 - RNA, 19 nt, Artificial Sequence
  Description of Artificial Sequence: Synthetic oligonucleotide
  Antisense strand to SEQ ID NO: 1380950
accuccgggcgaaauucuc

SEQ ID NO: 1380952 - RNA, 19 nt, Artificial Sequence
  Description of Artificial Sequence: Synthetic oligonucleotide
  Sense strand starting at position 1069 of SEQ ID NO: 1242904
agaauuucgcccggagguu

SEQ ID NO: 1380953 - RNA, 19 nt, Artificial Sequence
  Description of Artificial Sequence: Synthetic oligonucleotide
  Antisense strand to SEQ ID NO: 1380952
aaccuccgggcgaaauucu

SEQ ID NO: 1380954 - RNA, 19 nt, Artificial Sequence
  Description of Artificial Sequence: Synthetic oligonucleotide
  Sense strand starting at position 2038 of SEQ ID NO: 1242904
gcgucaugaagucauuucu

SEQ ID NO: 1380955 - RNA, 19 nt, Artificial Sequence
  Description of Artificial Sequence: Synthetic oligonucleotide
  Antisense strand to SEQ ID NO: 1380954
agaaaugacuucaugacgc

SEQ ID NO: 1380956 - RNA, 19 nt, Artificial Sequence
  Description of Artificial Sequence: Synthetic oligonucleotide
  Sense strand starting at position 2044 of SEQ ID NO: 1242904
ugaagucauuucuccgcga

SEQ ID NO: 1380957 - RNA, 19 nt, Artificial Sequence
  Description of Artificial Sequence: Synthetic oligonucleotide
  Antisense strand to SEQ ID NO: 1380956
ucgcggagaaaugacuuca

SEQ ID NO: 1380958 - RNA, 19 nt, Artificial Sequence
  Description of Artificial Sequence: Synthetic oligonucleotide
  Sense strand starting at position 2167 of SEQ ID NO: 1242904
ggaaggugucuacggauga

SEQ ID NO: 1380959 - RNA, 19 nt, Artificial Sequence
  Description of Artificial Sequence: Synthetic oligonucleotide
  Antisense strand to SEQ ID NO: 1380958
ucauccguagacaccuucc

SEQ ID NO: 1380960 - RNA, 19 nt, Artificial Sequence
  Description of Artificial Sequence: Synthetic oligonucleotide
  Sense strand starting at position 2171 of SEQ ID NO: 1242904
ggugucuacggaugagaua

SEQ ID NO: 1380961 - RNA, 19 nt, Artificial Sequence
  Description of Artificial Sequence: Synthetic oligonucleotide
  Antisense strand to SEQ ID NO: 1380960
uaucucauccguagacacc

SEQ ID NO: 1380962 - RNA, 19 nt, Artificial Sequence
  Description of Artificial Sequence: Synthetic oligonucleotide
  Sense strand starting at position 2376 of SEQ ID NO: 1242904
ggacucaugagaugaugca

SEQ ID NO: 1380963 - RNA, 19 nt, Artificial Sequence
  Description of Artificial Sequence: Synthetic oligonucleotide
  Antisense strand to SEQ ID NO: 1380962
ugcaucaucucaugagucc

SEQ ID NO: 1380964 - RNA, 19 nt, Artificial Sequence
  Description of Artificial Sequence: Synthetic oligonucleotide
  Sense strand starting at position 2405 of SEQ ID NO: 1242904
ggcgaagucgcuguagcuu

SEQ ID NO: 1380965 - RNA, 19 nt, Artificial Sequence
  Description of Artificial Sequence: Synthetic oligonucleotide
  Antisense strand to SEQ ID NO: 1380964
aagcuacagcgacuucgcc

SEQ ID NO: 1380966 - RNA, 19 nt, Artificial Sequence
  Description of Artificial Sequence: Synthetic oligonucleotide
  Sense strand starting at position 2411 of SEQ ID NO: 1242904
gucgcuguagcuuucuuua

SEQ ID NO: 1380967 - RNA, 19 nt, Artificial Sequence
  Description of Artificial Sequence: Synthetic oligonucleotide
  Antisense strand to SEQ ID NO: 1380966
uaaagaaagcuacagcgac

SEQ ID NO: 1380968 - RNA, 19 nt, Artificial Sequence
  Description of Artificial Sequence: Synthetic oligonucleotide
  Sense strand starting at position 2414 of SEQ ID NO: 1242904
gcuguagcuuucuuuauuu

SEQ ID NO: 1380969 - RNA, 19 nt, Artificial Sequence
  Description of Artificial Sequence: Synthetic oligonucleotide
  Antisense strand to SEQ ID NO: 1380968
aaauaaagaaagcuacagc

SEQ ID NO: 1380970 - RNA, 19 nt, Artificial Sequence
  Description of Artificial Sequence: Synthetic oligonucleotide
  Sense strand starting at position 2611 of SEQ ID NO: 1242904
ggugaagaaccauggaagu

SEQ ID NO: 1380971 - RNA, 19 nt, Artificial Sequence
  Description of Artificial Sequence: Synthetic oligonucleotide
  Antisense strand to SEQ ID NO: 1380970
acuuccaugguucuucacc

SEQ ID NO: 1380972 - RNA, 19 nt, Artificial Sequence
  Description of Artificial Sequence: Synthetic oligonucleotide
  Sense strand starting at position 2698 of SEQ ID NO: 1242904
gugcuaaaggcagaucgau

SEQ ID NO: 1380973 - RNA, 19 nt, Artificial Sequence
  Description of Artificial Sequence: Synthetic oligonucleotide
  Antisense strand to SEQ ID NO: 1380972
aucgaucugccuuuagcac

SEQ ID NO: 1380974 - RNA, 19 nt, Artificial Sequence
  Description of Artificial Sequence: Synthetic oligonucleotide
  Sense strand starting at position 2708 of SEQ ID NO: 1242904
cagaucgaugcuuagguau

SEQ ID NO: 1380975 - RNA, 19 nt, Artificial Sequence
  Description of Artificial Sequence: Synthetic oligonucleotide
  Antisense strand to SEQ ID NO: 1380974
auaccuaagcaucgaucug

SEQ ID NO: 1380976 - RNA, 19 nt, Artificial Sequence
  Description of Artificial Sequence: Synthetic oligonucleotide
  Sense strand starting at position 2837 of SEQ ID NO: 1242904
gauaaauauucuguuugag

SEQ ID NO: 1380977 - RNA, 19 nt, Artificial Sequence
  Description of Artificial Sequence: Synthetic oligonucleotide
  Antisense strand to SEQ ID NO: 1380976
cucaaacagaauauuuauc

SEQ ID NO: 1380978 - RNA, 19 nt, Artificial Sequence
  Description of Artificial Sequence: Synthetic oligonucleotide
  Sense strand starting at position 2914 of SEQ ID NO: 1242904
aguagagaggcagauguuu

SEQ ID NO: 1380979 - RNA, 19 nt, Artificial Sequence
  Description of Artificial Sequence: Synthetic oligonucleotide
  Antisense strand to SEQ ID NO: 1380978
aaacaucugccucucuacu

SEQ ID NO: 1380980 - RNA, 19 nt, Artificial Sequence
  Description of Artificial Sequence: Synthetic oligonucleotide
  Sense strand starting at position 2919 of SEQ ID NO: 1242904
agaggcagauguuuagauu

SEQ ID NO: 1380981 - RNA, 19 nt, Artificial Sequence
  Description of Artificial Sequence: Synthetic oligonucleotide
  Antisense strand to SEQ ID NO: 1380980
aaucuaaacaucugccucu

SEQ ID NO: 1380982 - RNA, 19 nt, Artificial Sequence
  Description of Artificial Sequence: Synthetic oligonucleotide
  Sense strand starting at position 2920 of SEQ ID NO: 1242904
gaggcagauguuuagauuc

SEQ ID NO: 1380983 - RNA, 19 nt, Artificial Sequence
  Description of Artificial Sequence: Synthetic oligonucleotide
  Antisense strand to SEQ ID NO: 1380982
gaaucuaaacaucugccuc

SEQ ID NO: 1380984 - RNA, 19 nt, Artificial Sequence
  Description of Artificial Sequence: Synthetic oligonucleotide
  Sense strand starting at position 2946 of SEQ ID NO: 1242904
cucccaacccagugaagau

SEQ ID NO: 1380985 - RNA, 19 nt, Artificial Sequence
  Description of Artificial Sequence: Synthetic oligonucleotide
  Antisense strand to SEQ ID NO: 1380984
aucuucacuggguugggag

SEQ ID NO: 1380986 - RNA, 19 nt, Artificial Sequence
  Description of Artificial Sequence: Synthetic oligonucleotide
  Sense strand starting at position 2961 of SEQ ID NO: 1242904
agaucaaagcugugauaga

SEQ ID NO: 1380987 - RNA, 19 nt, Artificial Sequence
  Description of Artificial Sequence: Synthetic oligonucleotide
  Antisense strand to SEQ ID NO: 1380986
ucuaucacagcuuugaucu

SEQ ID NO: 1380988 - RNA, 19 nt, Artificial Sequence
  Description of Artificial Sequence: Synthetic oligonucleotide
  Sense strand starting at position 3149 of SEQ ID NO: 1242904
agaagaauguggcuagcau

SEQ ID NO: 1380989 - RNA, 19 nt, Artificial Sequence
  Description of Artificial Sequence: Synthetic oligonucleotide
  Antisense strand to SEQ ID NO: 1380988
augcuagccacauucuucu

SEQ ID NO: 1380990 - RNA, 19 nt, Artificial Sequence
  Description of Artificial Sequence: Synthetic oligonucleotide
  Sense strand starting at position 3150 of SEQ ID NO: 1242904
gaagaauguggcuagcauu

SEQ ID NO: 1380991 - RNA, 19 nt, Artificial Sequence
  Description of Artificial Sequence: Synthetic oligonucleotide
  Antisense strand to SEQ ID NO: 1380990
aaugcuagccacauucuuc

SEQ ID NO: 1380992 - RNA, 19 nt, Artificial Sequence
  Description of Artificial Sequence: Synthetic oligonucleotide
  Sense strand starting at position 3221 of SEQ ID NO: 1242904
caauaaagucuuggguauu

SEQ ID NO: 1380993 - RNA, 19 nt, Artificial Sequence
  Description of Artificial Sequence: Synthetic oligonucleotide
  Antisense strand to SEQ ID NO: 1380992
aauacccaagacuuuauug

SEQ ID NO: 1380994 - RNA, 19 nt, Artificial Sequence
  Description of Artificial Sequence: Synthetic oligonucleotide
  Sense strand starting at position 3440 of SEQ ID NO: 1242904
agcagaugggaguguagau

SEQ ID NO: 1380995 - RNA, 19 nt, Artificial Sequence
  Description of Artificial Sequence: Synthetic oligonucleotide
  Antisense strand to SEQ ID NO: 1380994
aucuacacucccaucugcu

SEQ ID NO: 1380996 - RNA, 19 nt, Artificial Sequence
  Description of Artificial Sequence: Synthetic oligonucleotide
  Sense strand starting at position 3517 of SEQ ID NO: 1242904
uucguuguacugucucuau

SEQ ID NO: 1380997 - RNA, 19 nt, Artificial Sequence
  Description of Artificial Sequence: Synthetic oligonucleotide
  Antisense strand to SEQ ID NO: 1380996
auagagacaguacaacgaa

SEQ ID NO: 1380998 - RNA, 19 nt, Artificial Sequence
  Description of Artificial Sequence: Synthetic oligonucleotide
  Sense strand starting at position 3669 of SEQ ID NO: 1242904
gcaguugugcaaucucugu

SEQ ID NO: 1380999 - RNA, 19 nt, Artificial Sequence
  Description of Artificial Sequence: Synthetic oligonucleotide
  Antisense strand to SEQ ID NO: 1380998
acagagauugcacaacugc

SEQ ID NO: 1381000 - RNA, 19 nt, Artificial Sequence
  Description of Artificial Sequence: Synthetic oligonucleotide
  Sense strand starting at position 3960 of SEQ ID NO: 1242904
ggacuuaucuucuccauga

SEQ ID NO: 1381001 - RNA, 19 nt, Artificial Sequence
  Description of Artificial Sequence: Synthetic oligonucleotide
  Antisense strand to SEQ ID NO: 1381000
ucauggagaagauaagucc

SEQ ID NO: 1381002 - RNA, 19 nt, Artificial Sequence
  Description of Artificial Sequence: Synthetic oligonucleotide
  Sense strand starting at position 243 of SEQ ID NO: 1242905
ggcucaguccuuuggauuu

SEQ ID NO: 1381003 - RNA, 19 nt, Artificial Sequence
  Description of Artificial Sequence: Synthetic oligonucleotide
  Antisense strand to SEQ ID NO: 1381002
aaauccaaaggacugagcc

SEQ ID NO: 1381004 - RNA, 19 nt, Artificial Sequence
  Description of Artificial Sequence: Synthetic oligonucleotide
  Sense strand starting at position 318 of SEQ ID NO: 1242905
cggucucucuaauuccuua

SEQ ID NO: 1381005 - RNA, 19 nt, Artificial Sequence
  Description of Artificial Sequence: Synthetic oligonucleotide
  Antisense strand to SEQ ID NO: 1381004
uaaggaauuagagagaccg

SEQ ID NO: 1381006 - RNA, 19 nt, Artificial Sequence
  Description of Artificial Sequence: Synthetic oligonucleotide
  Sense strand starting at position 933 of SEQ ID NO: 1242905
agacccuuccugggucaga

SEQ ID NO: 1381007 - RNA, 19 nt, Artificial Sequence
  Description of Artificial Sequence: Synthetic oligonucleotide
  Antisense strand to SEQ ID NO: 1381006
ucugacccaggaagggucu

SEQ ID NO: 1381008 - RNA, 19 nt, Artificial Sequence
  Description of Artificial Sequence: Synthetic oligonucleotide
  Sense strand starting at position 934 of SEQ ID NO: 1242905
gacccuuccugggucagaa

SEQ ID NO: 1381009 - RNA, 19 nt, Artificial Sequence
  Description of Artificial Sequence: Synthetic oligonucleotide
  Antisense strand to SEQ ID NO: 1381008
uucugacccaggaaggguc

SEQ ID NO: 1381010 - RNA, 19 nt, Artificial Sequence
  Description of Artificial Sequence: Synthetic oligonucleotide
  Sense strand starting at position 1154 of SEQ ID NO: 1242905
gccacaccugcccagaaau

SEQ ID NO: 1381011 - RNA, 19 nt, Artificial Sequence
  Description of Artificial Sequence: Synthetic oligonucleotide
  Antisense strand to SEQ ID NO: 1381010
auuucugggcagguguggc

SEQ ID NO: 1381012 - RNA, 19 nt, Artificial Sequence
  Description of Artificial Sequence: Synthetic oligonucleotide
  Sense strand starting at position 1292 of SEQ ID NO: 1242905
caggcuuuccaagggaaca

SEQ ID NO: 1381013 - RNA, 19 nt, Artificial Sequence
  Description of Artificial Sequence: Synthetic oligonucleotide
  Antisense strand to SEQ ID NO: 1381012
uguucccuuggaaagccug

SEQ ID NO: 1381014 - RNA, 19 nt, Artificial Sequence
  Description of Artificial Sequence: Synthetic oligonucleotide
  Sense strand starting at position 1431 of SEQ ID NO: 1242905
gaccaaaggucuuagggua

SEQ ID NO: 1381015 - RNA, 19 nt, Artificial Sequence
  Description of Artificial Sequence: Synthetic oligonucleotide
  Antisense strand to SEQ ID NO: 1381014
uacccuaagaccuuugguc

SEQ ID NO: 1381016 - RNA, 19 nt, Artificial Sequence
  Description of Artificial Sequence: Synthetic oligonucleotide
  Sense strand starting at position 1494 of SEQ ID NO: 1242905
aaagccucgugagcugaaa

SEQ ID NO: 1381017 - RNA, 19 nt, Artificial Sequence
  Description of Artificial Sequence: Synthetic oligonucleotide
  Antisense strand to SEQ ID NO: 1381016
uuucagcucacgaggcuuu

SEQ ID NO: 1381018 - RNA, 19 nt, Artificial Sequence
  Description of Artificial Sequence: Synthetic oligonucleotide
  Sense strand starting at position 1546 of SEQ ID NO: 1242905
gccauuccaggaugagagu

SEQ ID NO: 1381019 - RNA, 19 nt, Artificial Sequence
  Description of Artificial Sequence: Synthetic oligonucleotide
  Antisense strand to SEQ ID NO: 1381018
acucucauccuggaauggc

SEQ ID NO: 1381020 - RNA, 19 nt, Artificial Sequence
  Description of Artificial Sequence: Synthetic oligonucleotide
  Sense strand starting at position 2027 of SEQ ID NO: 1242905
gggagugcgucccuagaga

SEQ ID NO: 1381021 - RNA, 19 nt, Artificial Sequence
  Description of Artificial Sequence: Synthetic oligonucleotide
  Antisense strand to SEQ ID NO: 1381020
ucucuagggacgcacuccc

SEQ ID NO: 1381022 - RNA, 19 nt, Artificial Sequence
  Description of Artificial Sequence: Synthetic oligonucleotide
  Sense strand starting at position 2066 of SEQ ID NO: 1242905
gguugugaacguugggaaa

SEQ ID NO: 1381023 - RNA, 19 nt, Artificial Sequence
  Description of Artificial Sequence: Synthetic oligonucleotide
  Antisense strand to SEQ ID NO: 1381022
uuucccaacguucacaacc

SEQ ID NO: 1381024 - RNA, 19 nt, Artificial Sequence
  Description of Artificial Sequence: Synthetic oligonucleotide
  Sense strand starting at position 2128 of SEQ ID NO: 1242905
ugcuuauugcuggaaccua

SEQ ID NO: 1381025 - RNA, 19 nt, Artificial Sequence
  Description of Artificial Sequence: Synthetic oligonucleotide
  Antisense strand to SEQ ID NO: 1381024
uagguuccagcaauaagca

SEQ ID NO: 1381026 - RNA, 19 nt, Artificial Sequence
  Description of Artificial Sequence: Synthetic oligonucleotide
  Sense strand starting at position 2204 of SEQ ID NO: 1242905
gcacgugcucaguaaagac

SEQ ID NO: 1381027 - RNA, 19 nt, Artificial Sequence
  Description of Artificial Sequence: Synthetic oligonucleotide
  Antisense strand to SEQ ID NO: 1381026
gucuuuacugagcacgugc

SEQ ID NO: 1381028 - RNA, 19 nt, Artificial Sequence
  Description of Artificial Sequence: Synthetic oligonucleotide
  Sense strand starting at position 2212 of SEQ ID NO: 1242905
ucaguaaagacgugcugau

SEQ ID NO: 1381029 - RNA, 19 nt, Artificial Sequence
  Description of Artificial Sequence: Synthetic oligonucleotide
  Antisense strand to SEQ ID NO: 1381028
aucagcacgucuuuacuga

SEQ ID NO: 1381030 - RNA, 19 nt, Artificial Sequence
  Description of Artificial Sequence: Synthetic oligonucleotide
  Sense strand starting at position 2427 of SEQ ID NO: 1242905
guuccaguuuaguuccaaa

SEQ ID NO: 1381031 - RNA, 19 nt, Artificial Sequence
  Description of Artificial Sequence: Synthetic oligonucleotide
  Antisense strand to SEQ ID NO: 1381030
uuuggaacuaaacuggaac

SEQ ID NO: 1381032 - RNA, 19 nt, Artificial Sequence
  Description of Artificial Sequence: Synthetic oligonucleotide
  Sense strand starting at position 2438 of SEQ ID NO: 1242905
guuccaaauguuugaaauc

SEQ ID NO: 1381033 - RNA, 19 nt, Artificial Sequence
  Description of Artificial Sequence: Synthetic oligonucleotide
  Antisense strand to SEQ ID NO: 1381032
gauuucaaacauuuggaac

SEQ ID NO: 1381034 - RNA, 19 nt, Artificial Sequence
  Description of Artificial Sequence: Synthetic oligonucleotide
  Sense strand starting at position 2447 of SEQ ID NO: 1242905
guuugaaaucaguaaguau

SEQ ID NO: 1381035 - RNA, 19 nt, Artificial Sequence
  Description of Artificial Sequence: Synthetic oligonucleotide
  Antisense strand to SEQ ID NO: 1381034
auacuuacugauuucaaac

SEQ ID NO: 1381036 - RNA, 19 nt, Artificial Sequence
  Description of Artificial Sequence: Synthetic oligonucleotide
  Sense strand starting at position 2685 of SEQ ID NO: 1242905
cuaugucacccagaaagcu

SEQ ID NO: 1381037 - RNA, 19 nt, Artificial Sequence
  Description of Artificial Sequence: Synthetic oligonucleotide
  Antisense strand to SEQ ID NO: 1381036
agcuuucugggugacauag

SEQ ID NO: 1381038 - RNA, 19 nt, Artificial Sequence
  Description of Artificial Sequence: Synthetic oligonucleotide
  Sense strand starting at position 2698 of SEQ ID NO: 1242905
aaagcugaguuugucauaa

SEQ ID NO: 1381039 - RNA, 19 nt, Artificial Sequence
  Description of Artificial Sequence: Synthetic oligonucleotide
  Antisense strand to SEQ ID NO: 1381038
uuaugacaaacucagcuuu

SEQ ID NO: 1381040 - RNA, 19 nt, Artificial Sequence
  Description of Artificial Sequence: Synthetic oligonucleotide
  Sense strand starting at position 2702 of SEQ ID NO: 1242905
cugaguuugucauaaacag

SEQ ID NO: 1381041 - RNA, 19 nt, Artificial Sequence
  Description of Artificial Sequence: Synthetic oligonucleotide
  Antisense strand to SEQ ID NO: 1381040
cuguuuaugacaaacucag

SEQ ID NO: 1381042 - RNA, 19 nt, Artificial Sequence
  Description of Artificial Sequence: Synthetic oligonucleotide
  Sense strand starting at position 2912 of SEQ ID NO: 1242905
uugcuuuauugcccagagu

SEQ ID NO: 1381043 - RNA, 19 nt, Artificial Sequence
  Description of Artificial Sequence: Synthetic oligonucleotide
  Antisense strand to SEQ ID NO: 1381042
acucugggcaauaaagcaa

SEQ ID NO: 1381044 - RNA, 19 nt, Artificial Sequence
  Description of Artificial Sequence: Synthetic oligonucleotide
  Sense strand starting at position 2915 of SEQ ID NO: 1242905
cuuuauugcccagaguggu

SEQ ID NO: 1381045 - RNA, 19 nt, Artificial Sequence
  Description of Artificial Sequence: Synthetic oligonucleotide
  Antisense strand to SEQ ID NO: 1381044
accacucugggcaauaaag

SEQ ID NO: 1381046 - RNA, 19 nt, Artificial Sequence
  Description of Artificial Sequence: Synthetic oligonucleotide
  Sense strand starting at position 3196 of SEQ ID NO: 1242905
agcagaucuuguucuccca

SEQ ID NO: 1381047 - RNA, 19 nt, Artificial Sequence
  Description of Artificial Sequence: Synthetic oligonucleotide
  Antisense strand to SEQ ID NO: 1381046
ugggagaacaagaucugcu

SEQ ID NO: 1381048 - RNA, 19 nt, Artificial Sequence
  Description of Artificial Sequence: Synthetic oligonucleotide
  Sense strand starting at position 3237 of SEQ ID NO: 1242905
agaauccaugcucguagaa

SEQ ID NO: 1381049 - RNA, 19 nt, Artificial Sequence
  Description of Artificial Sequence: Synthetic oligonucleotide
  Antisense strand to SEQ ID NO: 1381048
uucuacgagcauggauucu

SEQ ID NO: 1381050 - RNA, 19 nt, Artificial Sequence
  Description of Artificial Sequence: Synthetic oligonucleotide
  Sense strand starting at position 3239 of SEQ ID NO: 1242905
aauccaugcucguagaaag

SEQ ID NO: 1381051 - RNA, 19 nt, Artificial Sequence
  Description of Artificial Sequence: Synthetic oligonucleotide
  Antisense strand to SEQ ID NO: 1381050
cuuucuacgagcauggauu

SEQ ID NO: 1381052 - RNA, 19 nt, Artificial Sequence
  Description of Artificial Sequence: Synthetic oligonucleotide
  Sense strand starting at position 3268 of SEQ ID NO: 1242905
ggcaaagugugagaaauga

SEQ ID NO: 1381053 - RNA, 19 nt, Artificial Sequence
  Description of Artificial Sequence: Synthetic oligonucleotide
  Antisense strand to SEQ ID NO: 1381052
ucauuucucacacuuugcc

SEQ ID NO: 1381054 - RNA, 19 nt, Artificial Sequence
  Description of Artificial Sequence: Synthetic oligonucleotide
  Sense strand starting at position 3327 of SEQ ID NO: 1242905
ggaggaaguugccacauga

SEQ ID NO: 1381055 - RNA, 19 nt, Artificial Sequence
  Description of Artificial Sequence: Synthetic oligonucleotide
  Antisense strand to SEQ ID NO: 1381054
ucauguggcaacuuccucc

SEQ ID NO: 1381056 - RNA, 19 nt, Artificial Sequence
  Description of Artificial Sequence: Synthetic oligonucleotide
  Sense strand starting at position 3394 of SEQ ID NO: 1242905
gaaccacugugaugagaga

SEQ ID NO: 1381057 - RNA, 19 nt, Artificial Sequence
  Description of Artificial Sequence: Synthetic oligonucleotide
  Antisense strand to SEQ ID NO: 1381056
ucucucaucacagugguuc

SEQ ID NO: 1381058 - RNA, 19 nt, Artificial Sequence
  Description of Artificial Sequence: Synthetic oligonucleotide
  Sense strand starting at position 3409 of SEQ ID NO: 1242905
gagacuuccuguuugccca

SEQ ID NO: 1381059 - RNA, 19 nt, Artificial Sequence
  Description of Artificial Sequence: Synthetic oligonucleotide
  Antisense strand to SEQ ID NO: 1381058
ugggcaaacaggaagucuc

SEQ ID NO: 1381060 - RNA, 19 nt, Artificial Sequence
  Description of Artificial Sequence: Synthetic oligonucleotide
  Sense strand starting at position 3432 of SEQ ID NO: 1242905
aguccugauuguucuugga

SEQ ID NO: 1381061 - RNA, 19 nt, Artificial Sequence
  Description of Artificial Sequence: Synthetic oligonucleotide
  Antisense strand to SEQ ID NO: 1381060
uccaagaacaaucaggacu

SEQ ID NO: 1381062 - RNA, 19 nt, Artificial Sequence
  Description of Artificial Sequence: Synthetic oligonucleotide
  Sense strand starting at position 3434 of SEQ ID NO: 1242905
uccugauuguucuuggaga

SEQ ID NO: 1381063 - RNA, 19 nt, Artificial Sequence
  Description of Artificial Sequence: Synthetic oligonucleotide
  Antisense strand to SEQ ID NO: 1381062
ucuccaagaacaaucagga

SEQ ID NO: 1381064 - RNA, 19 nt, Artificial Sequence
  Description of Artificial Sequence: Synthetic oligonucleotide
  Sense strand starting at position 3435 of SEQ ID NO: 1242905
ccugauuguucuuggagag

SEQ ID NO: 1381065 - RNA, 19 nt, Artificial Sequence
  Description of Artificial Sequence: Synthetic oligonucleotide
  Antisense strand to SEQ ID NO: 1381064
cucuccaagaacaaucagg

SEQ ID NO: 1381066 - RNA, 19 nt, Artificial Sequence
  Description of Artificial Sequence: Synthetic oligonucleotide
  Sense strand starting at position 3519 of SEQ ID NO: 1242905
cccugaggccucugugaag

SEQ ID NO: 1381067 - RNA, 19 nt, Artificial Sequence
  Description of Artificial Sequence: Synthetic oligonucleotide
  Antisense strand to SEQ ID NO: 1381066
cuucacagaggccucaggg

SEQ ID NO: 1381068 - RNA, 19 nt, Artificial Sequence
  Description of Artificial Sequence: Synthetic oligonucleotide
  Sense strand starting at position 3531 of SEQ ID NO: 1242905
ugugaagucuggcugguca

SEQ ID NO: 1381069 - RNA, 19 nt, Artificial Sequence
  Description of Artificial Sequence: Synthetic oligonucleotide
  Antisense strand to SEQ ID NO: 1381068
ugaccagccagacuucaca

SEQ ID NO: 1381070 - RNA, 19 nt, Artificial Sequence
  Description of Artificial Sequence: Synthetic oligonucleotide
  Sense strand starting at position 3735 of SEQ ID NO: 1242905
gcuucagaagucuggauga

SEQ ID NO: 1381071 - RNA, 19 nt, Artificial Sequence
  Description of Artificial Sequence: Synthetic oligonucleotide
  Antisense strand to SEQ ID NO: 1381070
ucauccagacuucugaagc

SEQ ID NO: 1381072 - RNA, 19 nt, Artificial Sequence
  Description of Artificial Sequence: Synthetic oligonucleotide
  Sense strand starting at position 3737 of SEQ ID NO: 1242905
uucagaagucuggaugagu

SEQ ID NO: 1381073 - RNA, 19 nt, Artificial Sequence
  Description of Artificial Sequence: Synthetic oligonucleotide
  Antisense strand to SEQ ID NO: 1381072
acucauccagacuucugaa

SEQ ID NO: 1381074 - RNA, 19 nt, Artificial Sequence
  Description of Artificial Sequence: Synthetic oligonucleotide
  Sense strand starting at position 3746 of SEQ ID NO: 1242905
cuggaugaguguccugaau

SEQ ID NO: 1381075 - RNA, 19 nt, Artificial Sequence
  Description of Artificial Sequence: Synthetic oligonucleotide
  Antisense strand to SEQ ID NO: 1381074
auucaggacacucauccag

SEQ ID NO: 1381076 - RNA, 19 nt, Artificial Sequence
  Description of Artificial Sequence: Synthetic oligonucleotide
  Sense strand starting at position 3748 of SEQ ID NO: 1242905
ggaugaguguccugaauua

SEQ ID NO: 1381077 - RNA, 19 nt, Artificial Sequence
  Description of Artificial Sequence: Synthetic oligonucleotide
  Antisense strand to SEQ ID NO: 1381076
uaauucaggacacucaucc

SEQ ID NO: 1381078 - RNA, 19 nt, Artificial Sequence
  Description of Artificial Sequence: Synthetic oligonucleotide
  Sense strand starting at position 3864 of SEQ ID NO: 1242905
aagagcaauccuggucugu

SEQ ID NO: 1381079 - RNA, 19 nt, Artificial Sequence
  Description of Artificial Sequence: Synthetic oligonucleotide
  Antisense strand to SEQ ID NO: 1381078
acagaccaggauugcucuu

SEQ ID NO: 1381080 - RNA, 19 nt, Artificial Sequence
  Description of Artificial Sequence: Synthetic oligonucleotide
  Sense strand starting at position 3887 of SEQ ID NO: 1242905
gugggcugcagagaugaau

SEQ ID NO: 1381081 - RNA, 19 nt, Artificial Sequence
  Description of Artificial Sequence: Synthetic oligonucleotide
  Antisense strand to SEQ ID NO: 1381080
auucaucucugcagcccac

SEQ ID NO: 1381082 - RNA, 19 nt, Artificial Sequence
  Description of Artificial Sequence: Synthetic oligonucleotide
  Sense strand starting at position 225 of SEQ ID NO: 1242906
agcagaucuuguucuccca

SEQ ID NO: 1381083 - RNA, 19 nt, Artificial Sequence
  Description of Artificial Sequence: Synthetic oligonucleotide
  Antisense strand to SEQ ID NO: 1381082
ugggagaacaagaucugcu

SEQ ID NO: 1381084 - RNA, 19 nt, Artificial Sequence
  Description of Artificial Sequence: Synthetic oligonucleotide
  Sense strand starting at position 266 of SEQ ID NO: 1242906
agaauccaugcucguagaa

SEQ ID NO: 1381085 - RNA, 19 nt, Artificial Sequence
  Description of Artificial Sequence: Synthetic oligonucleotide
  Antisense strand to SEQ ID NO: 1381084
uucuacgagcauggauucu

SEQ ID NO: 1381086 - RNA, 19 nt, Artificial Sequence
  Description of Artificial Sequence: Synthetic oligonucleotide
  Sense strand starting at position 297 of SEQ ID NO: 1242906
ggcaaagugugagaaauga

SEQ ID NO: 1381087 - RNA, 19 nt, Artificial Sequence
  Description of Artificial Sequence: Synthetic oligonucleotide
  Antisense strand to SEQ ID NO: 1381086
ucauuucucacacuuugcc

SEQ ID NO: 1381088 - RNA, 19 nt, Artificial Sequence
  Description of Artificial Sequence: Synthetic oligonucleotide
  Sense strand starting at position 356 of SEQ ID NO: 1242906
ggaggaaguugccacauga

SEQ ID NO: 1381089 - RNA, 19 nt, Artificial Sequence
  Description of Artificial Sequence: Synthetic oligonucleotide
  Antisense strand to SEQ ID NO: 1381088
ucauguggcaacuuccucc

SEQ ID NO: 1381090 - RNA, 19 nt, Artificial Sequence
  Description of Artificial Sequence: Synthetic oligonucleotide
  Sense strand starting at position 423 of SEQ ID NO: 1242906
gaaccacugugaugagaga

SEQ ID NO: 1381091 - RNA, 19 nt, Artificial Sequence
  Description of Artificial Sequence: Synthetic oligonucleotide
  Antisense strand to SEQ ID NO: 1381090
ucucucaucacagugguuc

SEQ ID NO: 1381092 - RNA, 19 nt, Artificial Sequence
  Description of Artificial Sequence: Synthetic oligonucleotide
  Sense strand starting at position 438 of SEQ ID NO: 1242906
gagacuuccuguuugccca

SEQ ID NO: 1381093 - RNA, 19 nt, Artificial Sequence
  Description of Artificial Sequence: Synthetic oligonucleotide
  Antisense strand to SEQ ID NO: 1381092
ugggcaaacaggaagucuc

SEQ ID NO: 1381094 - RNA, 19 nt, Artificial Sequence
  Description of Artificial Sequence: Synthetic oligonucleotide
  Sense strand starting at position 461 of SEQ ID NO: 1242906
aguccugauuguucuugga

SEQ ID NO: 1381095 - RNA, 19 nt, Artificial Sequence
  Description of Artificial Sequence: Synthetic oligonucleotide
  Antisense strand to SEQ ID NO: 1381094
uccaagaacaaucaggacu

SEQ ID NO: 1381096 - RNA, 19 nt, Artificial Sequence
  Description of Artificial Sequence: Synthetic oligonucleotide
  Sense strand starting at position 463 of SEQ ID NO: 1242906
uccugauuguucuuggaga

SEQ ID NO: 1381097 - RNA, 19 nt, Artificial Sequence
  Description of Artificial Sequence: Synthetic oligonucleotide
  Antisense strand to SEQ ID NO: 1381096
ucuccaagaacaaucagga

SEQ ID NO: 1381098 - RNA, 19 nt, Artificial Sequence
  Description of Artificial Sequence: Synthetic oligonucleotide
  Sense strand starting at position 548 of SEQ ID NO: 1242906
cccugaggccucugugaag

SEQ ID NO: 1381099 - RNA, 19 nt, Artificial Sequence
  Description of Artificial Sequence: Synthetic oligonucleotide
  Antisense strand to SEQ ID NO: 1381098
cuucacagaggccucaggg

SEQ ID NO: 1381100 - RNA, 19 nt, Artificial Sequence
  Description of Artificial Sequence: Synthetic oligonucleotide
  Sense strand starting at position 560 of SEQ ID NO: 1242906
ugugaagucuggcugguca

SEQ ID NO: 1381101 - RNA, 19 nt, Artificial Sequence
  Description of Artificial Sequence: Synthetic oligonucleotide
  Antisense strand to SEQ ID NO: 1381100
ugaccagccagacuucaca

SEQ ID NO: 1381102 - RNA, 19 nt, Artificial Sequence
  Description of Artificial Sequence: Synthetic oligonucleotide
  Sense strand starting at position 764 of SEQ ID NO: 1242906
gcuucagaagucuggauga

SEQ ID NO: 1381103 - RNA, 19 nt, Artificial Sequence
  Description of Artificial Sequence: Synthetic oligonucleotide
  Antisense strand to SEQ ID NO: 1381102
ucauccagacuucugaagc

SEQ ID NO: 1381104 - RNA, 19 nt, Artificial Sequence
  Description of Artificial Sequence: Synthetic oligonucleotide
  Sense strand starting at position 766 of SEQ ID NO: 1242906
uucagaagucuggaugagu

SEQ ID NO: 1381105 - RNA, 19 nt, Artificial Sequence
  Description of Artificial Sequence: Synthetic oligonucleotide
  Antisense strand to SEQ ID NO: 1381104
acucauccagacuucugaa

SEQ ID NO: 1381106 - RNA, 19 nt, Artificial Sequence
  Description of Artificial Sequence: Synthetic oligonucleotide
  Sense strand starting at position 775 of SEQ ID NO: 1242906
cuggaugaguguccugaau

SEQ ID NO: 1381107 - RNA, 19 nt, Artificial Sequence
  Description of Artificial Sequence: Synthetic oligonucleotide
  Antisense strand to SEQ ID NO: 1381106
auucaggacacucauccag

SEQ ID NO: 1381108 - RNA, 19 nt, Artificial Sequence
  Description of Artificial Sequence: Synthetic oligonucleotide
  Sense strand starting at position 893 of SEQ ID NO: 1242906
aagagcaauccuggucugu

SEQ ID NO: 1381109 - RNA, 19 nt, Artificial Sequence
  Description of Artificial Sequence: Synthetic oligonucleotide
  Antisense strand to SEQ ID NO: 1381108
acagaccaggauugcucuu

SEQ ID NO: 1381110 - RNA, 19 nt, Artificial Sequence
  Description of Artificial Sequence: Synthetic oligonucleotide
  Sense strand starting at position 916 of SEQ ID NO: 1242906
gugggcugcagagaugaau

SEQ ID NO: 1381111 - RNA, 19 nt, Artificial Sequence
  Description of Artificial Sequence: Synthetic oligonucleotide
  Antisense strand to SEQ ID NO: 1381110
auucaucucugcagcccac

SEQ ID NO: 1381112 - RNA, 19 nt, Artificial Sequence
  Description of Artificial Sequence: Synthetic oligonucleotide
  Sense strand starting at position 1044 of SEQ ID NO: 1242906
ucacauauguggcuuaaga

SEQ ID NO: 1381113 - RNA, 19 nt, Artificial Sequence
  Description of Artificial Sequence: Synthetic oligonucleotide
  Antisense strand to SEQ ID NO: 1381112
ucuuaagccacauauguga

SEQ ID NO: 1381114 - RNA, 19 nt, Artificial Sequence
  Description of Artificial Sequence: Synthetic oligonucleotide
  Sense strand starting at position 1046 of SEQ ID NO: 1242906
acauauguggcuuaagaua

SEQ ID NO: 1381115 - RNA, 19 nt, Artificial Sequence
  Description of Artificial Sequence: Synthetic oligonucleotide
  Antisense strand to SEQ ID NO: 1381114
uaucuuaagccacauaugu

SEQ ID NO: 1381116 - RNA, 19 nt, Artificial Sequence
  Description of Artificial Sequence: Synthetic oligonucleotide
  Sense strand starting at position 1100 of SEQ ID NO: 1242906
ccagauaaauggcaucuga

SEQ ID NO: 1381117 - RNA, 19 nt, Artificial Sequence
  Description of Artificial Sequence: Synthetic oligonucleotide
  Antisense strand to SEQ ID NO: 1381116
ucagaugccauuuaucugg

SEQ ID NO: 1381118 - RNA, 19 nt, Artificial Sequence
  Description of Artificial Sequence: Synthetic oligonucleotide
  Sense strand starting at position 1111 of SEQ ID NO: 1242906
gcaucugaguuuccugcaa

SEQ ID NO: 1381119 - RNA, 19 nt, Artificial Sequence
  Description of Artificial Sequence: Synthetic oligonucleotide
  Antisense strand to SEQ ID NO: 1381118
uugcaggaaacucagaugc

SEQ ID NO: 1381120 - RNA, 19 nt, Artificial Sequence
  Description of Artificial Sequence: Synthetic oligonucleotide
  Sense strand starting at position 1230 of SEQ ID NO: 1242906
acggcaucaacucagugaa

SEQ ID NO: 1381121 - RNA, 19 nt, Artificial Sequence
  Description of Artificial Sequence: Synthetic oligonucleotide
  Antisense strand to SEQ ID NO: 1381120
uucacugaguugaugccgu

SEQ ID NO: 1381122 - RNA, 19 nt, Artificial Sequence
  Description of Artificial Sequence: Synthetic oligonucleotide
  Sense strand starting at position 1251 of SEQ ID NO: 1242906
ccuggaugcuggguuaaca

SEQ ID NO: 1381123 - RNA, 19 nt, Artificial Sequence
  Description of Artificial Sequence: Synthetic oligonucleotide
  Antisense strand to SEQ ID NO: 1381122
uguuaacccagcauccagg

SEQ ID NO: 1381124 - RNA, 19 nt, Artificial Sequence
  Description of Artificial Sequence: Synthetic oligonucleotide
  Sense strand starting at position 1259 of SEQ ID NO: 1242906
cuggguuaacaagaguguu

SEQ ID NO: 1381125 - RNA, 19 nt, Artificial Sequence
  Description of Artificial Sequence: Synthetic oligonucleotide
  Antisense strand to SEQ ID NO: 1381124
aacacucuuguuaacccag

SEQ ID NO: 1381126 - RNA, 19 nt, Artificial Sequence
  Description of Artificial Sequence: Synthetic oligonucleotide
  Sense strand starting at position 1262 of SEQ ID NO: 1242906
gguuaacaagaguguuuau

SEQ ID NO: 1381127 - RNA, 19 nt, Artificial Sequence
  Description of Artificial Sequence: Synthetic oligonucleotide
  Antisense strand to SEQ ID NO: 1381126
auaaacacucuuguuaacc

SEQ ID NO: 1381128 - RNA, 19 nt, Artificial Sequence
  Description of Artificial Sequence: Synthetic oligonucleotide
  Sense strand starting at position 1265 of SEQ ID NO: 1242906
uaacaagaguguuuaugaa

SEQ ID NO: 1381129 - RNA, 19 nt, Artificial Sequence
  Description of Artificial Sequence: Synthetic oligonucleotide
  Antisense strand to SEQ ID NO: 1381128
uucauaaacacucuuguua

SEQ ID NO: 1381130 - RNA, 19 nt, Artificial Sequence
  Description of Artificial Sequence: Synthetic oligonucleotide
  Sense strand starting at position 1269 of SEQ ID NO: 1242906
aagaguguuuaugaagacu

SEQ ID NO: 1381131 - RNA, 19 nt, Artificial Sequence
  Description of Artificial Sequence: Synthetic oligonucleotide
  Antisense strand to SEQ ID NO: 1381130
agucuucauaaacacucuu

SEQ ID NO: 1381132 - RNA, 19 nt, Artificial Sequence
  Description of Artificial Sequence: Synthetic oligonucleotide
  Sense strand starting at position 1435 of SEQ ID NO: 1242906
aacggacuuucuuugagag

SEQ ID NO: 1381133 - RNA, 19 nt, Artificial Sequence
  Description of Artificial Sequence: Synthetic oligonucleotide
  Antisense strand to SEQ ID NO: 1381132
cucucaaagaaaguccguu

SEQ ID NO: 1381134 - RNA, 19 nt, Artificial Sequence
  Description of Artificial Sequence: Synthetic oligonucleotide
  Sense strand starting at position 1436 of SEQ ID NO: 1242906
acggacuuucuuugagaga

SEQ ID NO: 1381135 - RNA, 19 nt, Artificial Sequence
  Description of Artificial Sequence: Synthetic oligonucleotide
  Antisense strand to SEQ ID NO: 1381134
ucucucaaagaaaguccgu

SEQ ID NO: 1381136 - RNA, 19 nt, Artificial Sequence
  Description of Artificial Sequence: Synthetic oligonucleotide
  Sense strand starting at position 1570 of SEQ ID NO: 1242906
gcuggcaaucgcugaaucu

SEQ ID NO: 1381137 - RNA, 19 nt, Artificial Sequence
  Description of Artificial Sequence: Synthetic oligonucleotide
  Antisense strand to SEQ ID NO: 1381136
agauucagcgauugccagc

SEQ ID NO: 1381138 - RNA, 19 nt, Artificial Sequence
  Description of Artificial Sequence: Synthetic oligonucleotide
  Sense strand starting at position 1579 of SEQ ID NO: 1242906
cgcugaaucugggcgauag

SEQ ID NO: 1381139 - RNA, 19 nt, Artificial Sequence
  Description of Artificial Sequence: Synthetic oligonucleotide
  Antisense strand to SEQ ID NO: 1381138
cuaucgcccagauucagcg

SEQ ID NO: 1381140 - RNA, 19 nt, Artificial Sequence
  Description of Artificial Sequence: Synthetic oligonucleotide
  Sense strand starting at position 1606 of SEQ ID NO: 1242906
gggucaguuucaucgaaac

SEQ ID NO: 1381141 - RNA, 19 nt, Artificial Sequence
  Description of Artificial Sequence: Synthetic oligonucleotide
  Antisense strand to SEQ ID NO: 1381140
guuucgaugaaacugaccc

SEQ ID NO: 1381142 - RNA, 19 nt, Artificial Sequence
  Description of Artificial Sequence: Synthetic oligonucleotide
  Sense strand starting at position 1736 of SEQ ID NO: 1242906
cguuaauucgcgccaucca

SEQ ID NO: 1381143 - RNA, 19 nt, Artificial Sequence
  Description of Artificial Sequence: Synthetic oligonucleotide
  Antisense strand to SEQ ID NO: 1381142
uggauggcgcgaauuaacg

SEQ ID NO: 1381144 - RNA, 19 nt, Artificial Sequence
  Description of Artificial Sequence: Synthetic oligonucleotide
  Sense strand starting at position 1764 of SEQ ID NO: 1242906
gugagucugucauuaccca

SEQ ID NO: 1381145 - RNA, 19 nt, Artificial Sequence
  Description of Artificial Sequence: Synthetic oligonucleotide
  Antisense strand to SEQ ID NO: 1381144
uggguaaugacagacucac

SEQ ID NO: 1381146 - RNA, 19 nt, Artificial Sequence
  Description of Artificial Sequence: Synthetic oligonucleotide
  Sense strand starting at position 3043 of SEQ ID NO: 1242906
gguuccauuugccuaggua

SEQ ID NO: 1381147 - RNA, 19 nt, Artificial Sequence
  Description of Artificial Sequence: Synthetic oligonucleotide
  Antisense strand to SEQ ID NO: 1381146
uaccuaggcaaauggaacc

SEQ ID NO: 1381148 - RNA, 19 nt, Artificial Sequence
  Description of Artificial Sequence: Synthetic oligonucleotide
  Sense strand starting at position 3422 of SEQ ID NO: 1242906
cagcuuuguggacauagga

SEQ ID NO: 1381149 - RNA, 19 nt, Artificial Sequence
  Description of Artificial Sequence: Synthetic oligonucleotide
  Antisense strand to SEQ ID NO: 1381148
uccuauguccacaaagcug

SEQ ID NO: 1381150 - RNA, 19 nt, Artificial Sequence
  Description of Artificial Sequence: Synthetic oligonucleotide
  Sense strand starting at position 3529 of SEQ ID NO: 1242906
uuccauuucugucagugga

SEQ ID NO: 1381151 - RNA, 19 nt, Artificial Sequence
  Description of Artificial Sequence: Synthetic oligonucleotide
  Antisense strand to SEQ ID NO: 1381150
uccacugacagaaauggaa

SEQ ID NO: 1381152 - RNA, 19 nt, Artificial Sequence
  Description of Artificial Sequence: Synthetic oligonucleotide
  Sense strand starting at position 3615 of SEQ ID NO: 1242906
ucccuccuccuuugggaaa

SEQ ID NO: 1381153 - RNA, 19 nt, Artificial Sequence
  Description of Artificial Sequence: Synthetic oligonucleotide
  Antisense strand to SEQ ID NO: 1381152
uuucccaaaggaggaggga

SEQ ID NO: 1381154 - RNA, 19 nt, Artificial Sequence
  Description of Artificial Sequence: Synthetic oligonucleotide
  Sense strand starting at position 3788 of SEQ ID NO: 1242906
gggaguuagugggaagaca

SEQ ID NO: 1381155 - RNA, 19 nt, Artificial Sequence
  Description of Artificial Sequence: Synthetic oligonucleotide
  Antisense strand to SEQ ID NO: 1381154
ugucuucccacuaacuccc

SEQ ID NO: 1381156 - RNA, 19 nt, Artificial Sequence
  Description of Artificial Sequence: Synthetic oligonucleotide
  Sense strand starting at position 3910 of SEQ ID NO: 1242906
auuggugacucugucauua

SEQ ID NO: 1381157 - RNA, 19 nt, Artificial Sequence
  Description of Artificial Sequence: Synthetic oligonucleotide
  Antisense strand to SEQ ID NO: 1381156
uaaugacagagucaccaau

SEQ ID NO: 1381158 - RNA, 19 nt, Artificial Sequence
  Description of Artificial Sequence: Synthetic oligonucleotide
  Sense strand starting at position 3914 of SEQ ID NO: 1242906
gugacucugucauuacuua

SEQ ID NO: 1381159 - RNA, 19 nt, Artificial Sequence
  Description of Artificial Sequence: Synthetic oligonucleotide
  Antisense strand to SEQ ID NO: 1381158
uaaguaaugacagagucac

SEQ ID NO: 1381160 - RNA, 19 nt, Artificial Sequence
  Description of Artificial Sequence: Synthetic oligonucleotide
  Sense strand starting at position 3915 of SEQ ID NO: 1242906
ugacucugucauuacuuau

SEQ ID NO: 1381161 - RNA, 19 nt, Artificial Sequence
  Description of Artificial Sequence: Synthetic oligonucleotide
  Antisense strand to SEQ ID NO: 1381160
auaaguaaugacagaguca

SEQ ID NO: 1381162 - RNA, 19 nt, Artificial Sequence
  Description of Artificial Sequence: Synthetic oligonucleotide
  Sense strand starting at position 1 of SEQ ID NO: 1242907
ugcucuugucguccagcua

SEQ ID NO: 1381163 - RNA, 19 nt, Artificial Sequence
  Description of Artificial Sequence: Synthetic oligonucleotide
  Antisense strand to SEQ ID NO: 1381162
uagcuggacgacaagagca

SEQ ID NO: 1381164 - RNA, 19 nt, Artificial Sequence
  Description of Artificial Sequence: Synthetic oligonucleotide
  Sense strand starting at position 187 of SEQ ID NO: 1242907
ugagaaaugcuuuaccuuu

SEQ ID NO: 1381165 - RNA, 19 nt, Artificial Sequence
  Description of Artificial Sequence: Synthetic oligonucleotide
  Antisense strand to SEQ ID NO: 1381164
aaagguaaagcauuucuca

SEQ ID NO: 1381166 - RNA, 19 nt, Artificial Sequence
  Description of Artificial Sequence: Synthetic oligonucleotide
  Sense strand starting at position 225 of SEQ ID NO: 1242907
agggaucccuaucagaaac

SEQ ID NO: 1381167 - RNA, 19 nt, Artificial Sequence
  Description of Artificial Sequence: Synthetic oligonucleotide
  Antisense strand to SEQ ID NO: 1381166
guuucugauagggaucccu

SEQ ID NO: 1381168 - RNA, 19 nt, Artificial Sequence
  Description of Artificial Sequence: Synthetic oligonucleotide
  Sense strand starting at position 395 of SEQ ID NO: 1242907
aggagcagucaguguauca

SEQ ID NO: 1381169 - RNA, 19 nt, Artificial Sequence
  Description of Artificial Sequence: Synthetic oligonucleotide
  Antisense strand to SEQ ID NO: 1381168
ugauacacugacugcuccu

SEQ ID NO: 1381170 - RNA, 19 nt, Artificial Sequence
  Description of Artificial Sequence: Synthetic oligonucleotide
  Sense strand starting at position 780 of SEQ ID NO: 1242907
gcacaaauggccgaaacau

SEQ ID NO: 1381171 - RNA, 19 nt, Artificial Sequence
  Description of Artificial Sequence: Synthetic oligonucleotide
  Antisense strand to SEQ ID NO: 1381170
auguuucggccauuugugc

SEQ ID NO: 1381172 - RNA, 19 nt, Artificial Sequence
  Description of Artificial Sequence: Synthetic oligonucleotide
  Sense strand starting at position 802 of SEQ ID NO: 1242907
ugggcagguuucccaguua

SEQ ID NO: 1381173 - RNA, 19 nt, Artificial Sequence
  Description of Artificial Sequence: Synthetic oligonucleotide
  Antisense strand to SEQ ID NO: 1381172
uaacugggaaaccugccca

SEQ ID NO: 1381174 - RNA, 19 nt, Artificial Sequence
  Description of Artificial Sequence: Synthetic oligonucleotide
  Sense strand starting at position 888 of SEQ ID NO: 1242907
agcagaacuucuguugagu

SEQ ID NO: 1381175 - RNA, 19 nt, Artificial Sequence
  Description of Artificial Sequence: Synthetic oligonucleotide
  Antisense strand to SEQ ID NO: 1381174
acucaacagaaguucugcu

SEQ ID NO: 1381176 - RNA, 19 nt, Artificial Sequence
  Description of Artificial Sequence: Synthetic oligonucleotide
  Sense strand starting at position 896 of SEQ ID NO: 1242907
uucuguugaguccagaaga

SEQ ID NO: 1381177 - RNA, 19 nt, Artificial Sequence
  Description of Artificial Sequence: Synthetic oligonucleotide
  Antisense strand to SEQ ID NO: 1381176
ucuucuggacucaacagaa

SEQ ID NO: 1381178 - RNA, 19 nt, Artificial Sequence
  Description of Artificial Sequence: Synthetic oligonucleotide
  Sense strand starting at position 1323 of SEQ ID NO: 1242907
cggaguucucaguaacggu

SEQ ID NO: 1381179 - RNA, 19 nt, Artificial Sequence
  Description of Artificial Sequence: Synthetic oligonucleotide
  Antisense strand to SEQ ID NO: 1381178
accguuacugagaacuccg

SEQ ID NO: 1381180 - RNA, 19 nt, Artificial Sequence
  Description of Artificial Sequence: Synthetic oligonucleotide
  Sense strand starting at position 1529 of SEQ ID NO: 1242907
augcaaucccuagggcaaa

SEQ ID NO: 1381181 - RNA, 19 nt, Artificial Sequence
  Description of Artificial Sequence: Synthetic oligonucleotide
  Antisense strand to SEQ ID NO: 1381180
uuugcccuagggauugcau

SEQ ID NO: 1381182 - RNA, 19 nt, Artificial Sequence
  Description of Artificial Sequence: Synthetic oligonucleotide
  Sense strand starting at position 1558 of SEQ ID NO: 1242907
ggguccucccgcuacuuaa

SEQ ID NO: 1381183 - RNA, 19 nt, Artificial Sequence
  Description of Artificial Sequence: Synthetic oligonucleotide
  Antisense strand to SEQ ID NO: 1381182
uuaaguagcgggaggaccc

SEQ ID NO: 1381184 - RNA, 19 nt, Artificial Sequence
  Description of Artificial Sequence: Synthetic oligonucleotide
  Sense strand starting at position 2295 of SEQ ID NO: 1242907
gguuccuuuccacaugugu

SEQ ID NO: 1381185 - RNA, 19 nt, Artificial Sequence
  Description of Artificial Sequence: Synthetic oligonucleotide
  Antisense strand to SEQ ID NO: 1381184
acacauguggaaaggaacc

SEQ ID NO: 1381186 - RNA, 19 nt, Artificial Sequence
  Description of Artificial Sequence: Synthetic oligonucleotide
  Sense strand starting at position 2386 of SEQ ID NO: 1242907
ucggaaagucgugaaagua

SEQ ID NO: 1381187 - RNA, 19 nt, Artificial Sequence
  Description of Artificial Sequence: Synthetic oligonucleotide
  Antisense strand to SEQ ID NO: 1381186
uacuuucacgacuuuccga

SEQ ID NO: 1381188 - RNA, 19 nt, Artificial Sequence
  Description of Artificial Sequence: Synthetic oligonucleotide
  Sense strand starting at position 2395 of SEQ ID NO: 1242907
cgugaaaguacagagguuu

SEQ ID NO: 1381189 - RNA, 19 nt, Artificial Sequence
  Description of Artificial Sequence: Synthetic oligonucleotide
  Antisense strand to SEQ ID NO: 1381188
aaaccucuguacuuucacg

SEQ ID NO: 1381190 - RNA, 19 nt, Artificial Sequence
  Description of Artificial Sequence: Synthetic oligonucleotide
  Sense strand starting at position 2403 of SEQ ID NO: 1242907
uacagagguuuacugcaaa

SEQ ID NO: 1381191 - RNA, 19 nt, Artificial Sequence
  Description of Artificial Sequence: Synthetic oligonucleotide
  Antisense strand to SEQ ID NO: 1381190
uuugcaguaaaccucugua

SEQ ID NO: 1381192 - RNA, 19 nt, Artificial Sequence
  Description of Artificial Sequence: Synthetic oligonucleotide
  Sense strand starting at position 2406 of SEQ ID NO: 1242907
agagguuuacugcaaagua

SEQ ID NO: 1381193 - RNA, 19 nt, Artificial Sequence
  Description of Artificial Sequence: Synthetic oligonucleotide
  Antisense strand to SEQ ID NO: 1381192
uacuuugcaguaaaccucu

SEQ ID NO: 1381194 - RNA, 19 nt, Artificial Sequence
  Description of Artificial Sequence: Synthetic oligonucleotide
  Sense strand starting at position 2514 of SEQ ID NO: 1242907
acacaaagguuucuggaau

SEQ ID NO: 1381195 - RNA, 19 nt, Artificial Sequence
  Description of Artificial Sequence: Synthetic oligonucleotide
  Antisense strand to SEQ ID NO: 1381194
auuccagaaaccuuugugu

SEQ ID NO: 1381196 - RNA, 19 nt, Artificial Sequence
  Description of Artificial Sequence: Synthetic oligonucleotide
  Sense strand starting at position 2535 of SEQ ID NO: 1242907
gguggagacuugucagaac

SEQ ID NO: 1381197 - RNA, 19 nt, Artificial Sequence
  Description of Artificial Sequence: Synthetic oligonucleotide
  Antisense strand to SEQ ID NO: 1381196
guucugacaagucuccacc

SEQ ID NO: 1381198 - RNA, 19 nt, Artificial Sequence
  Description of Artificial Sequence: Synthetic oligonucleotide
  Sense strand starting at position 2582 of SEQ ID NO: 1242907
auggguguucccggaauug

SEQ ID NO: 1381199 - RNA, 19 nt, Artificial Sequence
  Description of Artificial Sequence: Synthetic oligonucleotide
  Antisense strand to SEQ ID NO: 1381198
caauuccgggaacacccau

SEQ ID NO: 1381200 - RNA, 19 nt, Artificial Sequence
  Description of Artificial Sequence: Synthetic oligonucleotide
  Sense strand starting at position 2614 of SEQ ID NO: 1242907
gggugugugacuuaguaug

SEQ ID NO: 1381201 - RNA, 19 nt, Artificial Sequence
  Description of Artificial Sequence: Synthetic oligonucleotide
  Antisense strand to SEQ ID NO: 1381200
cauacuaagucacacaccc

SEQ ID NO: 1381202 - RNA, 19 nt, Artificial Sequence
  Description of Artificial Sequence: Synthetic oligonucleotide
  Sense strand starting at position 2619 of SEQ ID NO: 1242907
ugugacuuaguauguuaau

SEQ ID NO: 1381203 - RNA, 19 nt, Artificial Sequence
  Description of Artificial Sequence: Synthetic oligonucleotide
  Antisense strand to SEQ ID NO: 1381202
auuaacauacuaagucaca

SEQ ID NO: 1381204 - RNA, 19 nt, Artificial Sequence
  Description of Artificial Sequence: Synthetic oligonucleotide
  Sense strand starting at position 2620 of SEQ ID NO: 1242907
gugacuuaguauguuaaug

SEQ ID NO: 1381205 - RNA, 19 nt, Artificial Sequence
  Description of Artificial Sequence: Synthetic oligonucleotide
  Antisense strand to SEQ ID NO: 1381204
cauuaacauacuaagucac

SEQ ID NO: 1381206 - RNA, 19 nt, Artificial Sequence
  Description of Artificial Sequence: Synthetic oligonucleotide
  Sense strand starting at position 2634 of SEQ ID NO: 1242907
uaaugaguccuaggugaag

SEQ ID NO: 1381207 - RNA, 19 nt, Artificial Sequence
  Description of Artificial Sequence: Synthetic oligonucleotide
  Antisense strand to SEQ ID NO: 1381206
cuucaccuaggacucauua

SEQ ID NO: 1381208 - RNA, 19 nt, Artificial Sequence
  Description of Artificial Sequence: Synthetic oligonucleotide
  Sense strand starting at position 2645 of SEQ ID NO: 1242907
aggugaagccuaggucaaa

SEQ ID NO: 1381209 - RNA, 19 nt, Artificial Sequence
  Description of Artificial Sequence: Synthetic oligonucleotide
  Antisense strand to SEQ ID NO: 1381208
uuugaccuaggcuucaccu

SEQ ID NO: 1381210 - RNA, 19 nt, Artificial Sequence
  Description of Artificial Sequence: Synthetic oligonucleotide
  Sense strand starting at position 2789 of SEQ ID NO: 1242907
ggaaguuucuauucuccuu

SEQ ID NO: 1381211 - RNA, 19 nt, Artificial Sequence
  Description of Artificial Sequence: Synthetic oligonucleotide
  Antisense strand to SEQ ID NO: 1381210
aaggagaauagaaacuucc

SEQ ID NO: 1381212 - RNA, 19 nt, Artificial Sequence
  Description of Artificial Sequence: Synthetic oligonucleotide
  Sense strand starting at position 2819 of SEQ ID NO: 1242907
uaacguuccugucucaaag

SEQ ID NO: 1381213 - RNA, 19 nt, Artificial Sequence
  Description of Artificial Sequence: Synthetic oligonucleotide
  Antisense strand to SEQ ID NO: 1381212
cuuugagacaggaacguua

SEQ ID NO: 1381214 - RNA, 19 nt, Artificial Sequence
  Description of Artificial Sequence: Synthetic oligonucleotide
  Sense strand starting at position 2897 of SEQ ID NO: 1242907
agacuuguccaagggucau

SEQ ID NO: 1381215 - RNA, 19 nt, Artificial Sequence
  Description of Artificial Sequence: Synthetic oligonucleotide
  Antisense strand to SEQ ID NO: 1381214
augacccuuggacaagucu

SEQ ID NO: 1381216 - RNA, 19 nt, Artificial Sequence
  Description of Artificial Sequence: Synthetic oligonucleotide
  Sense strand starting at position 2917 of SEQ ID NO: 1242907
aguggcuucuugguggaga

SEQ ID NO: 1381217 - RNA, 19 nt, Artificial Sequence
  Description of Artificial Sequence: Synthetic oligonucleotide
  Antisense strand to SEQ ID NO: 1381216
ucuccaccaagaagccacu

SEQ ID NO: 1381218 - RNA, 19 nt, Artificial Sequence
  Description of Artificial Sequence: Synthetic oligonucleotide
  Sense strand starting at position 2950 of SEQ ID NO: 1242907
gucacuaaugcagaaauau

SEQ ID NO: 1381219 - RNA, 19 nt, Artificial Sequence
  Description of Artificial Sequence: Synthetic oligonucleotide
  Antisense strand to SEQ ID NO: 1381218
auauuucugcauuagugac

SEQ ID NO: 1381220 - RNA, 19 nt, Artificial Sequence
  Description of Artificial Sequence: Synthetic oligonucleotide
  Sense strand starting at position 3134 of SEQ ID NO: 1242907
guggccaugagucagcaaa

SEQ ID NO: 1381221 - RNA, 19 nt, Artificial Sequence
  Description of Artificial Sequence: Synthetic oligonucleotide
  Antisense strand to SEQ ID NO: 1381220
uuugcugacucauggccac

SEQ ID NO: 1381222 - RNA, 19 nt, Artificial Sequence
  Description of Artificial Sequence: Synthetic oligonucleotide
  Sense strand starting at position 3136 of SEQ ID NO: 1242907
ggccaugagucagcaaaga

SEQ ID NO: 1381223 - RNA, 19 nt, Artificial Sequence
  Description of Artificial Sequence: Synthetic oligonucleotide
  Antisense strand to SEQ ID NO: 1381222
ucuuugcugacucauggcc

SEQ ID NO: 1381224 - RNA, 19 nt, Artificial Sequence
  Description of Artificial Sequence: Synthetic oligonucleotide
  Sense strand starting at position 3292 of SEQ ID NO: 1242907
gcacguuuaauagagaagu

SEQ ID NO: 1381225 - RNA, 19 nt, Artificial Sequence
  Description of Artificial Sequence: Synthetic oligonucleotide
  Antisense strand to SEQ ID NO: 1381224
acuucucuauuaaacgugc

SEQ ID NO: 1381226 - RNA, 19 nt, Artificial Sequence
  Description of Artificial Sequence: Synthetic oligonucleotide
  Sense strand starting at position 3324 of SEQ ID NO: 1242907
aauggcuucuucguagaca

SEQ ID NO: 1381227 - RNA, 19 nt, Artificial Sequence
  Description of Artificial Sequence: Synthetic oligonucleotide
  Antisense strand to SEQ ID NO: 1381226
ugucuacgaagaagccauu

SEQ ID NO: 1381228 - RNA, 19 nt, Artificial Sequence
  Description of Artificial Sequence: Synthetic oligonucleotide
  Sense strand starting at position 3354 of SEQ ID NO: 1242907
uggcuucucgacuaagugu

SEQ ID NO: 1381229 - RNA, 19 nt, Artificial Sequence
  Description of Artificial Sequence: Synthetic oligonucleotide
  Antisense strand to SEQ ID NO: 1381228
acacuuagucgagaagcca

SEQ ID NO: 1381230 - RNA, 19 nt, Artificial Sequence
  Description of Artificial Sequence: Synthetic oligonucleotide
  Sense strand starting at position 3360 of SEQ ID NO: 1242907
cucgacuaaguguacuuau

SEQ ID NO: 1381231 - RNA, 19 nt, Artificial Sequence
  Description of Artificial Sequence: Synthetic oligonucleotide
  Antisense strand to SEQ ID NO: 1381230
auaaguacacuuagucgag

SEQ ID NO: 1381232 - RNA, 19 nt, Artificial Sequence
  Description of Artificial Sequence: Synthetic oligonucleotide
  Sense strand starting at position 3363 of SEQ ID NO: 1242907
gacuaaguguacuuauagu

SEQ ID NO: 1381233 - RNA, 19 nt, Artificial Sequence
  Description of Artificial Sequence: Synthetic oligonucleotide
  Antisense strand to SEQ ID NO: 1381232
acuauaaguacacuuaguc

SEQ ID NO: 1381234 - RNA, 19 nt, Artificial Sequence
  Description of Artificial Sequence: Synthetic oligonucleotide
  Sense strand starting at position 3487 of SEQ ID NO: 1242907
ggguaacuucucuggacgu

SEQ ID NO: 1381235 - RNA, 19 nt, Artificial Sequence
  Description of Artificial Sequence: Synthetic oligonucleotide
  Antisense strand to SEQ ID NO: 1381234
acguccagagaaguuaccc

SEQ ID NO: 1381236 - RNA, 19 nt, Artificial Sequence
  Description of Artificial Sequence: Synthetic oligonucleotide
  Sense strand starting at position 3500 of SEQ ID NO: 1242907
ggacguugccauugcauuu

SEQ ID NO: 1381237 - RNA, 19 nt, Artificial Sequence
  Description of Artificial Sequence: Synthetic oligonucleotide
  Antisense strand to SEQ ID NO: 1381236
aaaugcaauggcaacgucc

SEQ ID NO: 1381238 - RNA, 19 nt, Artificial Sequence
  Description of Artificial Sequence: Synthetic oligonucleotide
  Sense strand starting at position 3507 of SEQ ID NO: 1242907
gccauugcauuugugaacu

SEQ ID NO: 1381239 - RNA, 19 nt, Artificial Sequence
  Description of Artificial Sequence: Synthetic oligonucleotide
  Antisense strand to SEQ ID NO: 1381238
aguucacaaaugcaauggc

SEQ ID NO: 1381240 - RNA, 19 nt, Artificial Sequence
  Description of Artificial Sequence: Synthetic oligonucleotide
  Sense strand starting at position 3709 of SEQ ID NO: 1242907
ucauccugugacuaaguga

SEQ ID NO: 1381241 - RNA, 19 nt, Artificial Sequence
  Description of Artificial Sequence: Synthetic oligonucleotide
  Antisense strand to SEQ ID NO: 1381240
ucacuuagucacaggauga

SEQ ID NO: 1381242 - RNA, 19 nt, Artificial Sequence
  Description of Artificial Sequence: Synthetic oligonucleotide
  Sense strand starting at position 2 of SEQ ID NO: 1242908
auaaaugugaguugagugu

SEQ ID NO: 1381243 - RNA, 19 nt, Artificial Sequence
  Description of Artificial Sequence: Synthetic oligonucleotide
  Antisense strand to SEQ ID NO: 1381242
acacucaacucacauuuau

SEQ ID NO: 1381244 - RNA, 19 nt, Artificial Sequence
  Description of Artificial Sequence: Synthetic oligonucleotide
  Sense strand starting at position 6 of SEQ ID NO: 1242908
augugaguugaguguauuc

SEQ ID NO: 1381245 - RNA, 19 nt, Artificial Sequence
  Description of Artificial Sequence: Synthetic oligonucleotide
  Antisense strand to SEQ ID NO: 1381244
gaauacacucaacucacau

SEQ ID NO: 1381246 - RNA, 19 nt, Artificial Sequence
  Description of Artificial Sequence: Synthetic oligonucleotide
  Sense strand starting at position 8 of SEQ ID NO: 1242908
gugaguugaguguauucca

SEQ ID NO: 1381247 - RNA, 19 nt, Artificial Sequence
  Description of Artificial Sequence: Synthetic oligonucleotide
  Antisense strand to SEQ ID NO: 1381246
uggaauacacucaacucac

SEQ ID NO: 1381248 - RNA, 19 nt, Artificial Sequence
  Description of Artificial Sequence: Synthetic oligonucleotide
  Sense strand starting at position 51 of SEQ ID NO: 1242908
guggcaaaggaaugaaauu

SEQ ID NO: 1381249 - RNA, 19 nt, Artificial Sequence
  Description of Artificial Sequence: Synthetic oligonucleotide
  Antisense strand to SEQ ID NO: 1381248
aauuucauuccuuugccac

SEQ ID NO: 1381250 - RNA, 19 nt, Artificial Sequence
  Description of Artificial Sequence: Synthetic oligonucleotide
  Sense strand starting at position 580 of SEQ ID NO: 1242908
gagugagacucuguaaagu

SEQ ID NO: 1381251 - RNA, 19 nt, Artificial Sequence
  Description of Artificial Sequence: Synthetic oligonucleotide
  Antisense strand to SEQ ID NO: 1381250
acuuuacagagucucacuc

SEQ ID NO: 1381252 - RNA, 19 nt, Artificial Sequence
  Description of Artificial Sequence: Synthetic oligonucleotide
  Sense strand starting at position 651 of SEQ ID NO: 1242908
agaagagaaucagauauau

SEQ ID NO: 1381253 - RNA, 19 nt, Artificial Sequence
  Description of Artificial Sequence: Synthetic oligonucleotide
  Antisense strand to SEQ ID NO: 1381252
auauaucugauucucuucu

SEQ ID NO: 1381254 - RNA, 19 nt, Artificial Sequence
  Description of Artificial Sequence: Synthetic oligonucleotide
  Sense strand starting at position 714 of SEQ ID NO: 1242908
guaagcugucauuauuaug

SEQ ID NO: 1381255 - RNA, 19 nt, Artificial Sequence
  Description of Artificial Sequence: Synthetic oligonucleotide
  Antisense strand to SEQ ID NO: 1381254
cauaauaaugacagcuuac

SEQ ID NO: 1381256 - RNA, 19 nt, Artificial Sequence
  Description of Artificial Sequence: Synthetic oligonucleotide
  Sense strand starting at position 773 of SEQ ID NO: 1242908
ucaggagugccuugugaaa

SEQ ID NO: 1381257 - RNA, 19 nt, Artificial Sequence
  Description of Artificial Sequence: Synthetic oligonucleotide
  Antisense strand to SEQ ID NO: 1381256
uuucacaaggcacuccuga

SEQ ID NO: 1381258 - RNA, 19 nt, Artificial Sequence
  Description of Artificial Sequence: Synthetic oligonucleotide
  Sense strand starting at position 827 of SEQ ID NO: 1242908
aggguugugcgagugcgaa

SEQ ID NO: 1381259 - RNA, 19 nt, Artificial Sequence
  Description of Artificial Sequence: Synthetic oligonucleotide
  Antisense strand to SEQ ID NO: 1381258
uucgcacucgcacaacccu

SEQ ID NO: 1381260 - RNA, 19 nt, Artificial Sequence
  Description of Artificial Sequence: Synthetic oligonucleotide
  Sense strand starting at position 882 of SEQ ID NO: 1242908
ucaagugauuuacaagaca

SEQ ID NO: 1381261 - RNA, 19 nt, Artificial Sequence
  Description of Artificial Sequence: Synthetic oligonucleotide
  Antisense strand to SEQ ID NO: 1381260
ugucuuguaaaucacuuga

SEQ ID NO: 1381262 - RNA, 19 nt, Artificial Sequence
  Description of Artificial Sequence: Synthetic oligonucleotide
  Sense strand starting at position 910 of SEQ ID NO: 1242908
augucuugugaagggugau

SEQ ID NO: 1381263 - RNA, 19 nt, Artificial Sequence
  Description of Artificial Sequence: Synthetic oligonucleotide
  Antisense strand to SEQ ID NO: 1381262
aucacccuucacaagacau

SEQ ID NO: 1381264 - RNA, 19 nt, Artificial Sequence
  Description of Artificial Sequence: Synthetic oligonucleotide
  Sense strand starting at position 913 of SEQ ID NO: 1242908
ucuugugaagggugaucua

SEQ ID NO: 1381265 - RNA, 19 nt, Artificial Sequence
  Description of Artificial Sequence: Synthetic oligonucleotide
  Antisense strand to SEQ ID NO: 1381264
uagaucacccuucacaaga

SEQ ID NO: 1381266 - RNA, 19 nt, Artificial Sequence
  Description of Artificial Sequence: Synthetic oligonucleotide
  Sense strand starting at position 924 of SEQ ID NO: 1242908
gugaucuauuuagacuaac

SEQ ID NO: 1381267 - RNA, 19 nt, Artificial Sequence
  Description of Artificial Sequence: Synthetic oligonucleotide
  Antisense strand to SEQ ID NO: 1381266
guuagucuaaauagaucac

SEQ ID NO: 1381268 - RNA, 19 nt, Artificial Sequence
  Description of Artificial Sequence: Synthetic oligonucleotide
  Sense strand starting at position 1009 of SEQ ID NO: 1242908
guucucuuccuugaaguca

SEQ ID NO: 1381269 - RNA, 19 nt, Artificial Sequence
  Description of Artificial Sequence: Synthetic oligonucleotide
  Antisense strand to SEQ ID NO: 1381268
ugacuucaaggaagagaac

SEQ ID NO: 1381270 - RNA, 19 nt, Artificial Sequence
  Description of Artificial Sequence: Synthetic oligonucleotide
  Sense strand starting at position 1095 of SEQ ID NO: 1242908
cugccuggcuccuuauaau

SEQ ID NO: 1381271 - RNA, 19 nt, Artificial Sequence
  Description of Artificial Sequence: Synthetic oligonucleotide
  Antisense strand to SEQ ID NO: 1381270
auuauaaggagccaggcag

SEQ ID NO: 1381272 - RNA, 19 nt, Artificial Sequence
  Description of Artificial Sequence: Synthetic oligonucleotide
  Sense strand starting at position 1129 of SEQ ID NO: 1242908
aauguugcuucuucggaga

SEQ ID NO: 1381273 - RNA, 19 nt, Artificial Sequence
  Description of Artificial Sequence: Synthetic oligonucleotide
  Antisense strand to SEQ ID NO: 1381272
ucuccgaagaagcaacauu

SEQ ID NO: 1381274 - RNA, 19 nt, Artificial Sequence
  Description of Artificial Sequence: Synthetic oligonucleotide
  Sense strand starting at position 1134 of SEQ ID NO: 1242908
ugcuucuucggagacgauu

SEQ ID NO: 1381275 - RNA, 19 nt, Artificial Sequence
  Description of Artificial Sequence: Synthetic oligonucleotide
  Antisense strand to SEQ ID NO: 1381274
aaucgucuccgaagaagca

SEQ ID NO: 1381276 - RNA, 19 nt, Artificial Sequence
  Description of Artificial Sequence: Synthetic oligonucleotide
  Sense strand starting at position 1146 of SEQ ID NO: 1242908
gacgauuucucuugacuau

SEQ ID NO: 1381277 - RNA, 19 nt, Artificial Sequence
  Description of Artificial Sequence: Synthetic oligonucleotide
  Antisense strand to SEQ ID NO: 1381276
auagucaagagaaaucguc

SEQ ID NO: 1381278 - RNA, 19 nt, Artificial Sequence
  Description of Artificial Sequence: Synthetic oligonucleotide
  Sense strand starting at position 1184 of SEQ ID NO: 1242908
guaacucuuuccuucgagu

SEQ ID NO: 1381279 - RNA, 19 nt, Artificial Sequence
  Description of Artificial Sequence: Synthetic oligonucleotide
  Antisense strand to SEQ ID NO: 1381278
acucgaaggaaagaguuac

SEQ ID NO: 1381280 - RNA, 19 nt, Artificial Sequence
  Description of Artificial Sequence: Synthetic oligonucleotide
  Sense strand starting at position 1245 of SEQ ID NO: 1242908
ucucauuuauguguuuacu

SEQ ID NO: 1381281 - RNA, 19 nt, Artificial Sequence
  Description of Artificial Sequence: Synthetic oligonucleotide
  Antisense strand to SEQ ID NO: 1381280
aguaaacacauaaaugaga

SEQ ID NO: 1381282 - RNA, 19 nt, Artificial Sequence
  Description of Artificial Sequence: Synthetic oligonucleotide
  Sense strand starting at position 1254 of SEQ ID NO: 1242908
uguguuuacuuguuuaagg

SEQ ID NO: 1381283 - RNA, 19 nt, Artificial Sequence
  Description of Artificial Sequence: Synthetic oligonucleotide
  Antisense strand to SEQ ID NO: 1381282
ccuuaaacaaguaaacaca

SEQ ID NO: 1381284 - RNA, 19 nt, Artificial Sequence
  Description of Artificial Sequence: Synthetic oligonucleotide
  Sense strand starting at position 1289 of SEQ ID NO: 1242908
cgauguacacucuguaaac

SEQ ID NO: 1381285 - RNA, 19 nt, Artificial Sequence
  Description of Artificial Sequence: Synthetic oligonucleotide
  Antisense strand to SEQ ID NO: 1381284
guuuacagaguguacaucg

SEQ ID NO: 1381286 - RNA, 19 nt, Artificial Sequence
  Description of Artificial Sequence: Synthetic oligonucleotide
  Sense strand starting at position 1326 of SEQ ID NO: 1242908
uguuccuggcuguauguaa

SEQ ID NO: 1381287 - RNA, 19 nt, Artificial Sequence
  Description of Artificial Sequence: Synthetic oligonucleotide
  Antisense strand to SEQ ID NO: 1381286
uuacauacagccaggaaca

SEQ ID NO: 1381288 - RNA, 19 nt, Artificial Sequence
  Description of Artificial Sequence: Synthetic oligonucleotide
  Sense strand starting at position 1381 of SEQ ID NO: 1242908
ugcugucuucuguaaauau

SEQ ID NO: 1381289 - RNA, 19 nt, Artificial Sequence
  Description of Artificial Sequence: Synthetic oligonucleotide
  Antisense strand to SEQ ID NO: 1381288
auauuuacagaagacagca

SEQ ID NO: 1381290 - RNA, 19 nt, Artificial Sequence
  Description of Artificial Sequence: Synthetic oligonucleotide
  Sense strand starting at position 1448 of SEQ ID NO: 1242908
gggagugugccuuguggac

SEQ ID NO: 1381291 - RNA, 19 nt, Artificial Sequence
  Description of Artificial Sequence: Synthetic oligonucleotide
  Antisense strand to SEQ ID NO: 1381290
guccacaaggcacacuccc

SEQ ID NO: 1381292 - RNA, 19 nt, Artificial Sequence
  Description of Artificial Sequence: Synthetic oligonucleotide
  Sense strand starting at position 1452 of SEQ ID NO: 1242908
gugugccuuguggacgaau

SEQ ID NO: 1381293 - RNA, 19 nt, Artificial Sequence
  Description of Artificial Sequence: Synthetic oligonucleotide
  Antisense strand to SEQ ID NO: 1381292
auucguccacaaggcacac

SEQ ID NO: 1381294 - RNA, 19 nt, Artificial Sequence
  Description of Artificial Sequence: Synthetic oligonucleotide
  Sense strand starting at position 1454 of SEQ ID NO: 1242908
gugccuuguggacgaauga

SEQ ID NO: 1381295 - RNA, 19 nt, Artificial Sequence
  Description of Artificial Sequence: Synthetic oligonucleotide
  Antisense strand to SEQ ID NO: 1381294
ucauucguccacaaggcac

SEQ ID NO: 1381296 - RNA, 19 nt, Artificial Sequence
  Description of Artificial Sequence: Synthetic oligonucleotide
  Sense strand starting at position 2103 of SEQ ID NO: 1242908
ccaaaucuaagguggguua

SEQ ID NO: 1381297 - RNA, 19 nt, Artificial Sequence
  Description of Artificial Sequence: Synthetic oligonucleotide
  Antisense strand to SEQ ID NO: 1381296
uaacccaccuuagauuugg

SEQ ID NO: 1381298 - RNA, 19 nt, Artificial Sequence
  Description of Artificial Sequence: Synthetic oligonucleotide
  Sense strand starting at position 2220 of SEQ ID NO: 1242908
uuuagugacuccuuuaucu

SEQ ID NO: 1381299 - RNA, 19 nt, Artificial Sequence
  Description of Artificial Sequence: Synthetic oligonucleotide
  Antisense strand to SEQ ID NO: 1381298
agauaaaggagucacuaaa

SEQ ID NO: 1381300 - RNA, 19 nt, Artificial Sequence
  Description of Artificial Sequence: Synthetic oligonucleotide
  Sense strand starting at position 2232 of SEQ ID NO: 1242908
uuuaucugcccuugaggaa

SEQ ID NO: 1381301 - RNA, 19 nt, Artificial Sequence
  Description of Artificial Sequence: Synthetic oligonucleotide
  Antisense strand to SEQ ID NO: 1381300
uuccucaagggcagauaaa

SEQ ID NO: 1381302 - RNA, 19 nt, Artificial Sequence
  Description of Artificial Sequence: Synthetic oligonucleotide
  Sense strand starting at position 2233 of SEQ ID NO: 1242908
uuaucugcccuugaggaaa

SEQ ID NO: 1381303 - RNA, 19 nt, Artificial Sequence
  Description of Artificial Sequence: Synthetic oligonucleotide
  Antisense strand to SEQ ID NO: 1381302
uuuccucaagggcagauaa

SEQ ID NO: 1381304 - RNA, 19 nt, Artificial Sequence
  Description of Artificial Sequence: Synthetic oligonucleotide
  Sense strand starting at position 2248 of SEQ ID NO: 1242908
gaaacugaauuccagggaa

SEQ ID NO: 1381305 - RNA, 19 nt, Artificial Sequence
  Description of Artificial Sequence: Synthetic oligonucleotide
  Antisense strand to SEQ ID NO: 1381304
uucccuggaauucaguuuc

SEQ ID NO: 1381306 - RNA, 19 nt, Artificial Sequence
  Description of Artificial Sequence: Synthetic oligonucleotide
  Sense strand starting at position 2413 of SEQ ID NO: 1242908
acauucuugugggaggaaa

SEQ ID NO: 1381307 - RNA, 19 nt, Artificial Sequence
  Description of Artificial Sequence: Synthetic oligonucleotide
  Antisense strand to SEQ ID NO: 1381306
uuuccucccacaagaaugu

SEQ ID NO: 1381308 - RNA, 19 nt, Artificial Sequence
  Description of Artificial Sequence: Synthetic oligonucleotide
  Sense strand starting at position 2534 of SEQ ID NO: 1242908
aacaguuacuaucaggaga

SEQ ID NO: 1381309 - RNA, 19 nt, Artificial Sequence
  Description of Artificial Sequence: Synthetic oligonucleotide
  Antisense strand to SEQ ID NO: 1381308
ucuccugauaguaacuguu

SEQ ID NO: 1381310 - RNA, 19 nt, Artificial Sequence
  Description of Artificial Sequence: Synthetic oligonucleotide
  Sense strand starting at position 2684 of SEQ ID NO: 1242908
aggugaauuaagcaguuaa

SEQ ID NO: 1381311 - RNA, 19 nt, Artificial Sequence
  Description of Artificial Sequence: Synthetic oligonucleotide
  Antisense strand to SEQ ID NO: 1381310
uuaacugcuuaauucaccu

SEQ ID NO: 1381312 - RNA, 19 nt, Artificial Sequence
  Description of Artificial Sequence: Synthetic oligonucleotide
  Sense strand starting at position 2800 of SEQ ID NO: 1242908
aggcacuguacaggaguua

SEQ ID NO: 1381313 - RNA, 19 nt, Artificial Sequence
  Description of Artificial Sequence: Synthetic oligonucleotide
  Antisense strand to SEQ ID NO: 1381312
uaacuccuguacagugccu

SEQ ID NO: 1381314 - RNA, 19 nt, Artificial Sequence
  Description of Artificial Sequence: Synthetic oligonucleotide
  Sense strand starting at position 3091 of SEQ ID NO: 1242908
ccaguuggcaucuaggauu

SEQ ID NO: 1381315 - RNA, 19 nt, Artificial Sequence
  Description of Artificial Sequence: Synthetic oligonucleotide
  Antisense strand to SEQ ID NO: 1381314
aauccuagaugccaacugg

SEQ ID NO: 1381316 - RNA, 19 nt, Artificial Sequence
  Description of Artificial Sequence: Synthetic oligonucleotide
  Sense strand starting at position 3555 of SEQ ID NO: 1242908
ggguguuccuauucuacua

SEQ ID NO: 1381317 - RNA, 19 nt, Artificial Sequence
  Description of Artificial Sequence: Synthetic oligonucleotide
  Antisense strand to SEQ ID NO: 1381316
uaguagaauaggaacaccc

SEQ ID NO: 1381318 - RNA, 19 nt, Artificial Sequence
  Description of Artificial Sequence: Synthetic oligonucleotide
  Sense strand starting at position 3597 of SEQ ID NO: 1242908
ucuagucucuagcuugcaa

SEQ ID NO: 1381319 - RNA, 19 nt, Artificial Sequence
  Description of Artificial Sequence: Synthetic oligonucleotide
  Antisense strand to SEQ ID NO: 1381318
uugcaagcuagagacuaga

SEQ ID NO: 1381320 - RNA, 19 nt, Artificial Sequence
  Description of Artificial Sequence: Synthetic oligonucleotide
  Sense strand starting at position 3642 of SEQ ID NO: 1242908
cgugcuggccguaagcauu

SEQ ID NO: 1381321 - RNA, 19 nt, Artificial Sequence
  Description of Artificial Sequence: Synthetic oligonucleotide
  Antisense strand to SEQ ID NO: 1381320
aaugcuuacggccagcacg

SEQ ID NO: 1381322 - RNA, 19 nt, Artificial Sequence
  Description of Artificial Sequence: Synthetic oligonucleotide
  Sense strand starting at position 408 of SEQ ID NO: 1242909
cucuguguucgaggccuga

SEQ ID NO: 1381323 - RNA, 19 nt, Artificial Sequence
  Description of Artificial Sequence: Synthetic oligonucleotide
  Antisense strand to SEQ ID NO: 1381322
ucaggccucgaacacagag

SEQ ID NO: 1381324 - RNA, 19 nt, Artificial Sequence
  Description of Artificial Sequence: Synthetic oligonucleotide
  Sense strand starting at position 754 of SEQ ID NO: 1242909
ggaugagcucuucguucuu

SEQ ID NO: 1381325 - RNA, 19 nt, Artificial Sequence
  Description of Artificial Sequence: Synthetic oligonucleotide
  Antisense strand to SEQ ID NO: 1381324
aagaacgaagagcucaucc

SEQ ID NO: 1381326 - RNA, 19 nt, Artificial Sequence
  Description of Artificial Sequence: Synthetic oligonucleotide
  Sense strand starting at position 763 of SEQ ID NO: 1242909
cuucguucuucccuuugau

SEQ ID NO: 1381327 - RNA, 19 nt, Artificial Sequence
  Description of Artificial Sequence: Synthetic oligonucleotide
  Antisense strand to SEQ ID NO: 1381326
aucaaagggaagaacgaag

SEQ ID NO: 1381328 - RNA, 19 nt, Artificial Sequence
  Description of Artificial Sequence: Synthetic oligonucleotide
  Sense strand starting at position 775 of SEQ ID NO: 1242909
cuuugaucucuacgcucau

SEQ ID NO: 1381329 - RNA, 19 nt, Artificial Sequence
  Description of Artificial Sequence: Synthetic oligonucleotide
  Antisense strand to SEQ ID NO: 1381328
augagcguagagaucaaag

SEQ ID NO: 1381330 - RNA, 19 nt, Artificial Sequence
  Description of Artificial Sequence: Synthetic oligonucleotide
  Sense strand starting at position 843 of SEQ ID NO: 1242909
cggucugacccgugagcaa

SEQ ID NO: 1381331 - RNA, 19 nt, Artificial Sequence
  Description of Artificial Sequence: Synthetic oligonucleotide
  Antisense strand to SEQ ID NO: 1381330
uugcucacgggucagaccg

SEQ ID NO: 1381332 - RNA, 19 nt, Artificial Sequence
  Description of Artificial Sequence: Synthetic oligonucleotide
  Sense strand starting at position 983 of SEQ ID NO: 1242909
uccagcuucuccuuguaga

SEQ ID NO: 1381333 - RNA, 19 nt, Artificial Sequence
  Description of Artificial Sequence: Synthetic oligonucleotide
  Antisense strand to SEQ ID NO: 1381332
ucuacaaggagaagcugga

SEQ ID NO: 1381334 - RNA, 19 nt, Artificial Sequence
  Description of Artificial Sequence: Synthetic oligonucleotide
  Sense strand starting at position 984 of SEQ ID NO: 1242909
ccagcuucuccuuguagag

SEQ ID NO: 1381335 - RNA, 19 nt, Artificial Sequence
  Description of Artificial Sequence: Synthetic oligonucleotide
  Antisense strand to SEQ ID NO: 1381334
cucuacaaggagaagcugg

SEQ ID NO: 1381336 - RNA, 19 nt, Artificial Sequence
  Description of Artificial Sequence: Synthetic oligonucleotide
  Sense strand starting at position 1022 of SEQ ID NO: 1242909
caggaaggaugucacuaga

SEQ ID NO: 1381337 - RNA, 19 nt, Artificial Sequence
  Description of Artificial Sequence: Synthetic oligonucleotide
  Antisense strand to SEQ ID NO: 1381336
ucuagugacauccuuccug

SEQ ID NO: 1381338 - RNA, 19 nt, Artificial Sequence
  Description of Artificial Sequence: Synthetic oligonucleotide
  Sense strand starting at position 1148 of SEQ ID NO: 1242909
acagguucucaucauguga

SEQ ID NO: 1381339 - RNA, 19 nt, Artificial Sequence
  Description of Artificial Sequence: Synthetic oligonucleotide
  Antisense strand to SEQ ID NO: 1381338
ucacaugaugagaaccugu

SEQ ID NO: 1381340 - RNA, 19 nt, Artificial Sequence
  Description of Artificial Sequence: Synthetic oligonucleotide
  Sense strand starting at position 1150 of SEQ ID NO: 1242909
agguucucaucaugugaca

SEQ ID NO: 1381341 - RNA, 19 nt, Artificial Sequence
  Description of Artificial Sequence: Synthetic oligonucleotide
  Antisense strand to SEQ ID NO: 1381340
ugucacaugaugagaaccu

SEQ ID NO: 1381342 - RNA, 19 nt, Artificial Sequence
  Description of Artificial Sequence: Synthetic oligonucleotide
  Sense strand starting at position 2096 of SEQ ID NO: 1242909
ggguagugucaggagguga

SEQ ID NO: 1381343 - RNA, 19 nt, Artificial Sequence
  Description of Artificial Sequence: Synthetic oligonucleotide
  Antisense strand to SEQ ID NO: 1381342
ucaccuccugacacuaccc

SEQ ID NO: 1381344 - RNA, 19 nt, Artificial Sequence
  Description of Artificial Sequence: Synthetic oligonucleotide
  Sense strand starting at position 2345 of SEQ ID NO: 1242909
agccauuagcgagaggaca

SEQ ID NO: 1381345 - RNA, 19 nt, Artificial Sequence
  Description of Artificial Sequence: Synthetic oligonucleotide
  Antisense strand to SEQ ID NO: 1381344
uguccucucgcuaauggcu

SEQ ID NO: 1381346 - RNA, 19 nt, Artificial Sequence
  Description of Artificial Sequence: Synthetic oligonucleotide
  Sense strand starting at position 2481 of SEQ ID NO: 1242909
agucaagucuguccucaga

SEQ ID NO: 1381347 - RNA, 19 nt, Artificial Sequence
  Description of Artificial Sequence: Synthetic oligonucleotide
  Antisense strand to SEQ ID NO: 1381346
ucugaggacagacuugacu

SEQ ID NO: 1381348 - RNA, 19 nt, Artificial Sequence
  Description of Artificial Sequence: Synthetic oligonucleotide
  Sense strand starting at position 2572 of SEQ ID NO: 1242909
uuauauauuagacggguca

SEQ ID NO: 1381349 - RNA, 19 nt, Artificial Sequence
  Description of Artificial Sequence: Synthetic oligonucleotide
  Antisense strand to SEQ ID NO: 1381348
ugacccgucuaauauauaa

SEQ ID NO: 1381350 - RNA, 19 nt, Artificial Sequence
  Description of Artificial Sequence: Synthetic oligonucleotide
  Sense strand starting at position 2723 of SEQ ID NO: 1242909
gaugcuagcccuugagacu

SEQ ID NO: 1381351 - RNA, 19 nt, Artificial Sequence
  Description of Artificial Sequence: Synthetic oligonucleotide
  Antisense strand to SEQ ID NO: 1381350
agucucaagggcuagcauc

SEQ ID NO: 1381352 - RNA, 19 nt, Artificial Sequence
  Description of Artificial Sequence: Synthetic oligonucleotide
  Sense strand starting at position 2724 of SEQ ID NO: 1242909
augcuagcccuugagacua

SEQ ID NO: 1381353 - RNA, 19 nt, Artificial Sequence
  Description of Artificial Sequence: Synthetic oligonucleotide
  Antisense strand to SEQ ID NO: 1381352
uagucucaagggcuagcau

SEQ ID NO: 1381354 - RNA, 19 nt, Artificial Sequence
  Description of Artificial Sequence: Synthetic oligonucleotide
  Sense strand starting at position 2732 of SEQ ID NO: 1242909
ccuugagacuaaggaaugu

SEQ ID NO: 1381355 - RNA, 19 nt, Artificial Sequence
  Description of Artificial Sequence: Synthetic oligonucleotide
  Antisense strand to SEQ ID NO: 1381354
acauuccuuagucucaagg

SEQ ID NO: 1381356 - RNA, 19 nt, Artificial Sequence
  Description of Artificial Sequence: Synthetic oligonucleotide
  Sense strand starting at position 3308 of SEQ ID NO: 1242909
gagguacugcuguaagauu

SEQ ID NO: 1381357 - RNA, 19 nt, Artificial Sequence
  Description of Artificial Sequence: Synthetic oligonucleotide
  Antisense strand to SEQ ID NO: 1381356
aaucuuacagcaguaccuc

SEQ ID NO: 1381358 - RNA, 19 nt, Artificial Sequence
  Description of Artificial Sequence: Synthetic oligonucleotide
  Sense strand starting at position 3355 of SEQ ID NO: 1242909
gaacaaugcuuagggcuuu

SEQ ID NO: 1381359 - RNA, 19 nt, Artificial Sequence
  Description of Artificial Sequence: Synthetic oligonucleotide
  Antisense strand to SEQ ID NO: 1381358
aaagcccuaagcauuguuc

SEQ ID NO: 1381360 - RNA, 19 nt, Artificial Sequence
  Description of Artificial Sequence: Synthetic oligonucleotide
  Sense strand starting at position 3690 of SEQ ID NO: 1242909
auagauugacuccggaaac

SEQ ID NO: 1381361 - RNA, 19 nt, Artificial Sequence
  Description of Artificial Sequence: Synthetic oligonucleotide
  Antisense strand to SEQ ID NO: 1381360
guuuccggagucaaucuau

SEQ ID NO: 1381362 - RNA, 19 nt, Artificial Sequence
  Description of Artificial Sequence: Synthetic oligonucleotide
  Sense strand starting at position 3691 of SEQ ID NO: 1242909
uagauugacuccggaaacu

SEQ ID NO: 1381363 - RNA, 19 nt, Artificial Sequence
  Description of Artificial Sequence: Synthetic oligonucleotide
  Antisense strand to SEQ ID NO: 1381362
aguuuccggagucaaucua

SEQ ID NO: 1381364 - RNA, 19 nt, Artificial Sequence
  Description of Artificial Sequence: Synthetic oligonucleotide
  Sense strand starting at position 3724 of SEQ ID NO: 1242909
ugaggugccuugcccaaua

SEQ ID NO: 1381365 - RNA, 19 nt, Artificial Sequence
  Description of Artificial Sequence: Synthetic oligonucleotide
  Antisense strand to SEQ ID NO: 1381364
uauugggcaaggcaccuca

SEQ ID NO: 1381366 - RNA, 19 nt, Artificial Sequence
  Description of Artificial Sequence: Synthetic oligonucleotide
  Sense strand starting at position 3789 of SEQ ID NO: 1242909
gcgcaugccuucuuucuau

SEQ ID NO: 1381367 - RNA, 19 nt, Artificial Sequence
  Description of Artificial Sequence: Synthetic oligonucleotide
  Antisense strand to SEQ ID NO: 1381366
auagaaagaaggcaugcgc

SEQ ID NO: 1381368 - RNA, 19 nt, Artificial Sequence
  Description of Artificial Sequence: Synthetic oligonucleotide
  Sense strand starting at position 3892 of SEQ ID NO: 1242909
agcuaugugaacugcugau

SEQ ID NO: 1381369 - RNA, 19 nt, Artificial Sequence
  Description of Artificial Sequence: Synthetic oligonucleotide
  Antisense strand to SEQ ID NO: 1381368
aucagcaguucacauagcu

SEQ ID NO: 1381370 - RNA, 19 nt, Artificial Sequence
  Description of Artificial Sequence: Synthetic oligonucleotide
  Sense strand starting at position 347 of SEQ ID NO: 1242910
ccugucugcugucaaggaa

SEQ ID NO: 1381371 - RNA, 19 nt, Artificial Sequence
  Description of Artificial Sequence: Synthetic oligonucleotide
  Antisense strand to SEQ ID NO: 1381370
uuccuugacagcagacagg

SEQ ID NO: 1381372 - RNA, 19 nt, Artificial Sequence
  Description of Artificial Sequence: Synthetic oligonucleotide
  Sense strand starting at position 404 of SEQ ID NO: 1242910
gcccuuaugcuccaaggua

SEQ ID NO: 1381373 - RNA, 19 nt, Artificial Sequence
  Description of Artificial Sequence: Synthetic oligonucleotide
  Antisense strand to SEQ ID NO: 1381372
uaccuuggagcauaagggc

SEQ ID NO: 1381374 - RNA, 19 nt, Artificial Sequence
  Description of Artificial Sequence: Synthetic oligonucleotide
  Sense strand starting at position 638 of SEQ ID NO: 1242910
ggcacagccuuguaacuga

SEQ ID NO: 1381375 - RNA, 19 nt, Artificial Sequence
  Description of Artificial Sequence: Synthetic oligonucleotide
  Antisense strand to SEQ ID NO: 1381374
ucaguuacaaggcugugcc

SEQ ID NO: 1381376 - RNA, 19 nt, Artificial Sequence
  Description of Artificial Sequence: Synthetic oligonucleotide
  Sense strand starting at position 661 of SEQ ID NO: 1242910
uggacuuguuucuuagcau

SEQ ID NO: 1381377 - RNA, 19 nt, Artificial Sequence
  Description of Artificial Sequence: Synthetic oligonucleotide
  Antisense strand to SEQ ID NO: 1381376
augcuaagaaacaagucca

SEQ ID NO: 1381378 - RNA, 19 nt, Artificial Sequence
  Description of Artificial Sequence: Synthetic oligonucleotide
  Sense strand starting at position 662 of SEQ ID NO: 1242910
ggacuuguuucuuagcauc

SEQ ID NO: 1381379 - RNA, 19 nt, Artificial Sequence
  Description of Artificial Sequence: Synthetic oligonucleotide
  Antisense strand to SEQ ID NO: 1381378
gaugcuaagaaacaagucc

SEQ ID NO: 1381380 - RNA, 19 nt, Artificial Sequence
  Description of Artificial Sequence: Synthetic oligonucleotide
  Sense strand starting at position 698 of SEQ ID NO: 1242910
gcgucaguucagcaagaga

SEQ ID NO: 1381381 - RNA, 19 nt, Artificial Sequence
  Description of Artificial Sequence: Synthetic oligonucleotide
  Antisense strand to SEQ ID NO: 1381380
ucucuugcugaacugacgc

SEQ ID NO: 1381382 - RNA, 19 nt, Artificial Sequence
  Description of Artificial Sequence: Synthetic oligonucleotide
  Sense strand starting at position 752 of SEQ ID NO: 1242910
gcggcucuacccuauacau

SEQ ID NO: 1381383 - RNA, 19 nt, Artificial Sequence
  Description of Artificial Sequence: Synthetic oligonucleotide
  Antisense strand to SEQ ID NO: 1381382
auguauaggguagagccgc

SEQ ID NO: 1381384 - RNA, 19 nt, Artificial Sequence
  Description of Artificial Sequence: Synthetic oligonucleotide
  Sense strand starting at position 763 of SEQ ID NO: 1242910
cuauacaucuggccuagaa

SEQ ID NO: 1381385 - RNA, 19 nt, Artificial Sequence
  Description of Artificial Sequence: Synthetic oligonucleotide
  Antisense strand to SEQ ID NO: 1381384
uucuaggccagauguauag

SEQ ID NO: 1381386 - RNA, 19 nt, Artificial Sequence
  Description of Artificial Sequence: Synthetic oligonucleotide
  Sense strand starting at position 809 of SEQ ID NO: 1242910
uggaucccucagugaggaa

SEQ ID NO: 1381387 - RNA, 19 nt, Artificial Sequence
  Description of Artificial Sequence: Synthetic oligonucleotide
  Antisense strand to SEQ ID NO: 1381386
uuccucacugagggaucca

SEQ ID NO: 1381388 - RNA, 19 nt, Artificial Sequence
  Description of Artificial Sequence: Synthetic oligonucleotide
  Sense strand starting at position 830 of SEQ ID NO: 1242910
gauggcucuugggagcaaa

SEQ ID NO: 1381389 - RNA, 19 nt, Artificial Sequence
  Description of Artificial Sequence: Synthetic oligonucleotide
  Antisense strand to SEQ ID NO: 1381388
uuugcucccaagagccauc

SEQ ID NO: 1381390 - RNA, 19 nt, Artificial Sequence
  Description of Artificial Sequence: Synthetic oligonucleotide
  Sense strand starting at position 878 of SEQ ID NO: 1242910
gaaguccuacucuagaagu

SEQ ID NO: 1381391 - RNA, 19 nt, Artificial Sequence
  Description of Artificial Sequence: Synthetic oligonucleotide
  Antisense strand to SEQ ID NO: 1381390
acuucuagaguaggacuuc

SEQ ID NO: 1381392 - RNA, 19 nt, Artificial Sequence
  Description of Artificial Sequence: Synthetic oligonucleotide
  Sense strand starting at position 880 of SEQ ID NO: 1242910
aguccuacucuagaaguca

SEQ ID NO: 1381393 - RNA, 19 nt, Artificial Sequence
  Description of Artificial Sequence: Synthetic oligonucleotide
  Antisense strand to SEQ ID NO: 1381392
ugacuucuagaguaggacu

SEQ ID NO: 1381394 - RNA, 19 nt, Artificial Sequence
  Description of Artificial Sequence: Synthetic oligonucleotide
  Sense strand starting at position 904 of SEQ ID NO: 1242910
aguggagucuucccuaacu

SEQ ID NO: 1381395 - RNA, 19 nt, Artificial Sequence
  Description of Artificial Sequence: Synthetic oligonucleotide
  Antisense strand to SEQ ID NO: 1381394
aguuagggaagacuccacu

SEQ ID NO: 1381396 - RNA, 19 nt, Artificial Sequence
  Description of Artificial Sequence: Synthetic oligonucleotide
  Sense strand starting at position 906 of SEQ ID NO: 1242910
uggagucuucccuaacuug

SEQ ID NO: 1381397 - RNA, 19 nt, Artificial Sequence
  Description of Artificial Sequence: Synthetic oligonucleotide
  Antisense strand to SEQ ID NO: 1381396
caaguuagggaagacucca

SEQ ID NO: 1381398 - RNA, 19 nt, Artificial Sequence
  Description of Artificial Sequence: Synthetic oligonucleotide
  Sense strand starting at position 913 of SEQ ID NO: 1242910
uucccuaacuugcgggaaa

SEQ ID NO: 1381399 - RNA, 19 nt, Artificial Sequence
  Description of Artificial Sequence: Synthetic oligonucleotide
  Antisense strand to SEQ ID NO: 1381398
uuucccgcaaguuagggaa

SEQ ID NO: 1381400 - RNA, 19 nt, Artificial Sequence
  Description of Artificial Sequence: Synthetic oligonucleotide
  Sense strand starting at position 1021 of SEQ ID NO: 1242910
cuuggcuucugagacgaga

SEQ ID NO: 1381401 - RNA, 19 nt, Artificial Sequence
  Description of Artificial Sequence: Synthetic oligonucleotide
  Antisense strand to SEQ ID NO: 1381400
ucucgucucagaagccaag

SEQ ID NO: 1381402 - RNA, 19 nt, Artificial Sequence
  Description of Artificial Sequence: Synthetic oligonucleotide
  Sense strand starting at position 1178 of SEQ ID NO: 1242910
aagcucugcugcgugcaaa

SEQ ID NO: 1381403 - RNA, 19 nt, Artificial Sequence
  Description of Artificial Sequence: Synthetic oligonucleotide
  Antisense strand to SEQ ID NO: 1381402
uuugcacgcagcagagcuu

SEQ ID NO: 1381404 - RNA, 19 nt, Artificial Sequence
  Description of Artificial Sequence: Synthetic oligonucleotide
  Sense strand starting at position 1419 of SEQ ID NO: 1242910
gaccgagagugaguucauu

SEQ ID NO: 1381405 - RNA, 19 nt, Artificial Sequence
  Description of Artificial Sequence: Synthetic oligonucleotide
  Antisense strand to SEQ ID NO: 1381404
aaugaacucacucucgguc

SEQ ID NO: 1381406 - RNA, 19 nt, Artificial Sequence
  Description of Artificial Sequence: Synthetic oligonucleotide
  Sense strand starting at position 2242 of SEQ ID NO: 1242910
ucccgcuuucuccaguaaa

SEQ ID NO: 1381407 - RNA, 19 nt, Artificial Sequence
  Description of Artificial Sequence: Synthetic oligonucleotide
  Antisense strand to SEQ ID NO: 1381406
uuuacuggagaaagcggga

SEQ ID NO: 1381408 - RNA, 19 nt, Artificial Sequence
  Description of Artificial Sequence: Synthetic oligonucleotide
  Sense strand starting at position 2703 of SEQ ID NO: 1242910
gcuauuauuugcgcaguga

SEQ ID NO: 1381409 - RNA, 19 nt, Artificial Sequence
  Description of Artificial Sequence: Synthetic oligonucleotide
  Antisense strand to SEQ ID NO: 1381408
ucacugcgcaaauaauagc

SEQ ID NO: 1381410 - RNA, 19 nt, Artificial Sequence
  Description of Artificial Sequence: Synthetic oligonucleotide
  Sense strand starting at position 2704 of SEQ ID NO: 1242910
cuauuauuugcgcagugac

SEQ ID NO: 1381411 - RNA, 19 nt, Artificial Sequence
  Description of Artificial Sequence: Synthetic oligonucleotide
  Antisense strand to SEQ ID NO: 1381410
gucacugcgcaaauaauag

SEQ ID NO: 1381412 - RNA, 19 nt, Artificial Sequence
  Description of Artificial Sequence: Synthetic oligonucleotide
  Sense strand starting at position 2873 of SEQ ID NO: 1242910
caugcaaggguguaguaaa

SEQ ID NO: 1381413 - RNA, 19 nt, Artificial Sequence
  Description of Artificial Sequence: Synthetic oligonucleotide
  Antisense strand to SEQ ID NO: 1381412
uuuacuacacccuugcaug

SEQ ID NO: 1381414 - RNA, 19 nt, Artificial Sequence
  Description of Artificial Sequence: Synthetic oligonucleotide
  Sense strand starting at position 2913 of SEQ ID NO: 1242910
ggugacccuuucugaagga

SEQ ID NO: 1381415 - RNA, 19 nt, Artificial Sequence
  Description of Artificial Sequence: Synthetic oligonucleotide
  Antisense strand to SEQ ID NO: 1381414
uccuucagaaagggucacc

SEQ ID NO: 1381416 - RNA, 19 nt, Artificial Sequence
  Description of Artificial Sequence: Synthetic oligonucleotide
  Sense strand starting at position 2914 of SEQ ID NO: 1242910
gugacccuuucugaaggau

SEQ ID NO: 1381417 - RNA, 19 nt, Artificial Sequence
  Description of Artificial Sequence: Synthetic oligonucleotide
  Antisense strand to SEQ ID NO: 1381416
auccuucagaaagggucac

SEQ ID NO: 1381418 - RNA, 19 nt, Artificial Sequence
  Description of Artificial Sequence: Synthetic oligonucleotide
  Sense strand starting at position 3102 of SEQ ID NO: 1242910
gggaauuuauuauaacggu

SEQ ID NO: 1381419 - RNA, 19 nt, Artificial Sequence
  Description of Artificial Sequence: Synthetic oligonucleotide
  Antisense strand to SEQ ID NO: 1381418
accguuauaauaaauuccc

SEQ ID NO: 1381420 - RNA, 19 nt, Artificial Sequence
  Description of Artificial Sequence: Synthetic oligonucleotide
  Sense strand starting at position 3183 of SEQ ID NO: 1242910
ugcagauuccgcuggcuau

SEQ ID NO: 1381421 - RNA, 19 nt, Artificial Sequence
  Description of Artificial Sequence: Synthetic oligonucleotide
  Antisense strand to SEQ ID NO: 1381420
auagccagcggaaucugca

SEQ ID NO: 1381422 - RNA, 19 nt, Artificial Sequence
  Description of Artificial Sequence: Synthetic oligonucleotide
  Sense strand starting at position 3187 of SEQ ID NO: 1242910
gauuccgcuggcuaucaua

SEQ ID NO: 1381423 - RNA, 19 nt, Artificial Sequence
  Description of Artificial Sequence: Synthetic oligonucleotide
  Antisense strand to SEQ ID NO: 1381422
uaugauagccagcggaauc

SEQ ID NO: 1381424 - RNA, 19 nt, Artificial Sequence
  Description of Artificial Sequence: Synthetic oligonucleotide
  Sense strand starting at position 3300 of SEQ ID NO: 1242910
acugcuuaggcucaaguga

SEQ ID NO: 1381425 - RNA, 19 nt, Artificial Sequence
  Description of Artificial Sequence: Synthetic oligonucleotide
  Antisense strand to SEQ ID NO: 1381424
ucacuugagccuaagcagu

SEQ ID NO: 1381426 - RNA, 19 nt, Artificial Sequence
  Description of Artificial Sequence: Synthetic oligonucleotide
  Sense strand starting at position 3480 of SEQ ID NO: 1242910
uuggauuacaggugaggca

SEQ ID NO: 1381427 - RNA, 19 nt, Artificial Sequence
  Description of Artificial Sequence: Synthetic oligonucleotide
  Antisense strand to SEQ ID NO: 1381426
ugccucaccuguaauccaa

SEQ ID NO: 1381428 - RNA, 19 nt, Artificial Sequence
  Description of Artificial Sequence: Synthetic oligonucleotide
  Sense strand starting at position 3499 of SEQ ID NO: 1242910
cugugucuguccuuggagu

SEQ ID NO: 1381429 - RNA, 19 nt, Artificial Sequence
  Description of Artificial Sequence: Synthetic oligonucleotide
  Antisense strand to SEQ ID NO: 1381428
acuccaaggacagacacag

SEQ ID NO: 1381430 - RNA, 19 nt, Artificial Sequence
  Description of Artificial Sequence: Synthetic oligonucleotide
  Sense strand starting at position 3679 of SEQ ID NO: 1242910
cuaggccucugcuugugaa

SEQ ID NO: 1381431 - RNA, 19 nt, Artificial Sequence
  Description of Artificial Sequence: Synthetic oligonucleotide
  Antisense strand to SEQ ID NO: 1381430
uucacaagcagaggccuag

SEQ ID NO: 1381432 - RNA, 19 nt, Artificial Sequence
  Description of Artificial Sequence: Synthetic oligonucleotide
  Sense strand starting at position 3680 of SEQ ID NO: 1242910
uaggccucugcuugugaau

SEQ ID NO: 1381433 - RNA, 19 nt, Artificial Sequence
  Description of Artificial Sequence: Synthetic oligonucleotide
  Antisense strand to SEQ ID NO: 1381432
auucacaagcagaggccua

SEQ ID NO: 1381434 - RNA, 19 nt, Artificial Sequence
  Description of Artificial Sequence: Synthetic oligonucleotide
  Sense strand starting at position 3682 of SEQ ID NO: 1242910
ggccucugcuugugaauaa

SEQ ID NO: 1381435 - RNA, 19 nt, Artificial Sequence
  Description of Artificial Sequence: Synthetic oligonucleotide
  Antisense strand to SEQ ID NO: 1381434
uuauucacaagcagaggcc

SEQ ID NO: 1381436 - RNA, 19 nt, Artificial Sequence
  Description of Artificial Sequence: Synthetic oligonucleotide
  Sense strand starting at position 3683 of SEQ ID NO: 1242910
gccucugcuugugaauaaa

SEQ ID NO: 1381437 - RNA, 19 nt, Artificial Sequence
  Description of Artificial Sequence: Synthetic oligonucleotide
  Antisense strand to SEQ ID NO: 1381436
uuuauucacaagcagaggc

SEQ ID NO: 1381438 - RNA, 19 nt, Artificial Sequence
  Description of Artificial Sequence: Synthetic oligonucleotide
  Sense strand starting at position 3829 of SEQ ID NO: 1242910
gcaaaucagcccuauguga

SEQ ID NO: 1381439 - RNA, 19 nt, Artificial Sequence
  Description of Artificial Sequence: Synthetic oligonucleotide
  Antisense strand to SEQ ID NO: 1381438
ucacauagggcugauuugc

SEQ ID NO: 1381440 - RNA, 19 nt, Artificial Sequence
  Description of Artificial Sequence: Synthetic oligonucleotide
  Sense strand starting at position 3946 of SEQ ID NO: 1242910
ggcagcuuccuggagggau

SEQ ID NO: 1381441 - RNA, 19 nt, Artificial Sequence
  Description of Artificial Sequence: Synthetic oligonucleotide
  Antisense strand to SEQ ID NO: 1381440
aucccuccaggaagcugcc

SEQ ID NO: 1381442 - RNA, 19 nt, Artificial Sequence
  Description of Artificial Sequence: Synthetic oligonucleotide
  Sense strand starting at position 78 of SEQ ID NO: 1242911
guucuaguauuacuauaga

SEQ ID NO: 1381443 - RNA, 19 nt, Artificial Sequence
  Description of Artificial Sequence: Synthetic oligonucleotide
  Antisense strand to SEQ ID NO: 1381442
ucuauaguaauacuagaac

SEQ ID NO: 1381444 - RNA, 19 nt, Artificial Sequence
  Description of Artificial Sequence: Synthetic oligonucleotide
  Sense strand starting at position 409 of SEQ ID NO: 1242911
agacuccgucucgauagau

SEQ ID NO: 1381445 - RNA, 19 nt, Artificial Sequence
  Description of Artificial Sequence: Synthetic oligonucleotide
  Antisense strand to SEQ ID NO: 1381444
aucuaucgagacggagucu

SEQ ID NO: 1381446 - RNA, 19 nt, Artificial Sequence
  Description of Artificial Sequence: Synthetic oligonucleotide
  Sense strand starting at position 413 of SEQ ID NO: 1242911
uccgucucgauagauagau

SEQ ID NO: 1381447 - RNA, 19 nt, Artificial Sequence
  Description of Artificial Sequence: Synthetic oligonucleotide
  Antisense strand to SEQ ID NO: 1381446
aucuaucuaucgagacgga

SEQ ID NO: 1381448 - RNA, 19 nt, Artificial Sequence
  Description of Artificial Sequence: Synthetic oligonucleotide
  Sense strand starting at position 464 of SEQ ID NO: 1242911
augauuauuccauggcaaa

SEQ ID NO: 1381449 - RNA, 19 nt, Artificial Sequence
  Description of Artificial Sequence: Synthetic oligonucleotide
  Antisense strand to SEQ ID NO: 1381448
uuugccauggaauaaucau

SEQ ID NO: 1381450 - RNA, 19 nt, Artificial Sequence
  Description of Artificial Sequence: Synthetic oligonucleotide
  Sense strand starting at position 465 of SEQ ID NO: 1242911
ugauuauuccauggcaaag

SEQ ID NO: 1381451 - RNA, 19 nt, Artificial Sequence
  Description of Artificial Sequence: Synthetic oligonucleotide
  Antisense strand to SEQ ID NO: 1381450
cuuugccauggaauaauca

SEQ ID NO: 1381452 - RNA, 19 nt, Artificial Sequence
  Description of Artificial Sequence: Synthetic oligonucleotide
  Sense strand starting at position 553 of SEQ ID NO: 1242911
aacagaaccgucuguugaa

SEQ ID NO: 1381453 - RNA, 19 nt, Artificial Sequence
  Description of Artificial Sequence: Synthetic oligonucleotide
  Antisense strand to SEQ ID NO: 1381452
uucaacagacgguucuguu

SEQ ID NO: 1381454 - RNA, 19 nt, Artificial Sequence
  Description of Artificial Sequence: Synthetic oligonucleotide
  Sense strand starting at position 554 of SEQ ID NO: 1242911
acagaaccgucuguugaaa

SEQ ID NO: 1381455 - RNA, 19 nt, Artificial Sequence
  Description of Artificial Sequence: Synthetic oligonucleotide
  Antisense strand to SEQ ID NO: 1381454
uuucaacagacgguucugu

SEQ ID NO: 1381456 - RNA, 19 nt, Artificial Sequence
  Description of Artificial Sequence: Synthetic oligonucleotide
  Sense strand starting at position 589 of SEQ ID NO: 1242911
caggcagguucucuaaacu

SEQ ID NO: 1381457 - RNA, 19 nt, Artificial Sequence
  Description of Artificial Sequence: Synthetic oligonucleotide
  Antisense strand to SEQ ID NO: 1381456
aguuuagagaaccugccug

SEQ ID NO: 1381458 - RNA, 19 nt, Artificial Sequence
  Description of Artificial Sequence: Synthetic oligonucleotide
  Sense strand starting at position 678 of SEQ ID NO: 1242911
uaguguagcuuuccagaag

SEQ ID NO: 1381459 - RNA, 19 nt, Artificial Sequence
  Description of Artificial Sequence: Synthetic oligonucleotide
  Antisense strand to SEQ ID NO: 1381458
cuucuggaaagcuacacua

SEQ ID NO: 1381460 - RNA, 19 nt, Artificial Sequence
  Description of Artificial Sequence: Synthetic oligonucleotide
  Sense strand starting at position 696 of SEQ ID NO: 1242911
ggaaauaaguuuccuuauc

SEQ ID NO: 1381461 - RNA, 19 nt, Artificial Sequence
  Description of Artificial Sequence: Synthetic oligonucleotide
  Antisense strand to SEQ ID NO: 1381460
gauaaggaaacuuauuucc

SEQ ID NO: 1381462 - RNA, 19 nt, Artificial Sequence
  Description of Artificial Sequence: Synthetic oligonucleotide
  Sense strand starting at position 843 of SEQ ID NO: 1242911
aagggcuauuccuuuagag

SEQ ID NO: 1381463 - RNA, 19 nt, Artificial Sequence
  Description of Artificial Sequence: Synthetic oligonucleotide
  Antisense strand to SEQ ID NO: 1381462
cucuaaaggaauagcccuu

SEQ ID NO: 1381464 - RNA, 19 nt, Artificial Sequence
  Description of Artificial Sequence: Synthetic oligonucleotide
  Sense strand starting at position 934 of SEQ ID NO: 1242911
cuuucuugcccucaggaua

SEQ ID NO: 1381465 - RNA, 19 nt, Artificial Sequence
  Description of Artificial Sequence: Synthetic oligonucleotide
  Antisense strand to SEQ ID NO: 1381464
uauccugagggcaagaaag

SEQ ID NO: 1381466 - RNA, 19 nt, Artificial Sequence
  Description of Artificial Sequence: Synthetic oligonucleotide
  Sense strand starting at position 950 of SEQ ID NO: 1242911
auaacauuaugggaacaau

SEQ ID NO: 1381467 - RNA, 19 nt, Artificial Sequence
  Description of Artificial Sequence: Synthetic oligonucleotide
  Antisense strand to SEQ ID NO: 1381466
auuguucccauaauguuau

SEQ ID NO: 1381468 - RNA, 19 nt, Artificial Sequence
  Description of Artificial Sequence: Synthetic oligonucleotide
  Sense strand starting at position 1057 of SEQ ID NO: 1242911
ugcuguagucuggagggua

SEQ ID NO: 1381469 - RNA, 19 nt, Artificial Sequence
  Description of Artificial Sequence: Synthetic oligonucleotide
  Antisense strand to SEQ ID NO: 1381468
uacccuccagacuacagca

SEQ ID NO: 1381470 - RNA, 19 nt, Artificial Sequence
  Description of Artificial Sequence: Synthetic oligonucleotide
  Sense strand starting at position 1580 of SEQ ID NO: 1242911
guccuauuucugcggugga

SEQ ID NO: 1381471 - RNA, 19 nt, Artificial Sequence
  Description of Artificial Sequence: Synthetic oligonucleotide
  Antisense strand to SEQ ID NO: 1381470
uccaccgcagaaauaggac

SEQ ID NO: 1381472 - RNA, 19 nt, Artificial Sequence
  Description of Artificial Sequence: Synthetic oligonucleotide
  Sense strand starting at position 1583 of SEQ ID NO: 1242911
cuauuucugcgguggaaag

SEQ ID NO: 1381473 - RNA, 19 nt, Artificial Sequence
  Description of Artificial Sequence: Synthetic oligonucleotide
  Antisense strand to SEQ ID NO: 1381472
cuuuccaccgcagaaauag

SEQ ID NO: 1381474 - RNA, 19 nt, Artificial Sequence
  Description of Artificial Sequence: Synthetic oligonucleotide
  Sense strand starting at position 2095 of SEQ ID NO: 1242911
ggaggcucagguuauucau

SEQ ID NO: 1381475 - RNA, 19 nt, Artificial Sequence
  Description of Artificial Sequence: Synthetic oligonucleotide
  Antisense strand to SEQ ID NO: 1381474
augaauaaccugagccucc

SEQ ID NO: 1381476 - RNA, 19 nt, Artificial Sequence
  Description of Artificial Sequence: Synthetic oligonucleotide
  Sense strand starting at position 2206 of SEQ ID NO: 1242911
cucaguuguccuggaauga

SEQ ID NO: 1381477 - RNA, 19 nt, Artificial Sequence
  Description of Artificial Sequence: Synthetic oligonucleotide
  Antisense strand to SEQ ID NO: 1381476
ucauuccaggacaacugag

SEQ ID NO: 1381478 - RNA, 19 nt, Artificial Sequence
  Description of Artificial Sequence: Synthetic oligonucleotide
  Sense strand starting at position 2207 of SEQ ID NO: 1242911
ucaguuguccuggaaugaa

SEQ ID NO: 1381479 - RNA, 19 nt, Artificial Sequence
  Description of Artificial Sequence: Synthetic oligonucleotide
  Antisense strand to SEQ ID NO: 1381478
uucauuccaggacaacuga

SEQ ID NO: 1381480 - RNA, 19 nt, Artificial Sequence
  Description of Artificial Sequence: Synthetic oligonucleotide
  Sense strand starting at position 2210 of SEQ ID NO: 1242911
guuguccuggaaugaaaga

SEQ ID NO: 1381481 - RNA, 19 nt, Artificial Sequence
  Description of Artificial Sequence: Synthetic oligonucleotide
  Antisense strand to SEQ ID NO: 1381480
ucuuucauuccaggacaac

SEQ ID NO: 1381482 - RNA, 19 nt, Artificial Sequence
  Description of Artificial Sequence: Synthetic oligonucleotide
  Sense strand starting at position 2235 of SEQ ID NO: 1242911
cguguuggacaaggacaua

SEQ ID NO: 1381483 - RNA, 19 nt, Artificial Sequence
  Description of Artificial Sequence: Synthetic oligonucleotide
  Antisense strand to SEQ ID NO: 1381482
uauguccuuguccaacacg

SEQ ID NO: 1381484 - RNA, 19 nt, Artificial Sequence
  Description of Artificial Sequence: Synthetic oligonucleotide
  Sense strand starting at position 2260 of SEQ ID NO: 1242911
gaaggccaguucucucgaa

SEQ ID NO: 1381485 - RNA, 19 nt, Artificial Sequence
  Description of Artificial Sequence: Synthetic oligonucleotide
  Antisense strand to SEQ ID NO: 1381484
uucgagagaacuggccuuc

SEQ ID NO: 1381486 - RNA, 19 nt, Artificial Sequence
  Description of Artificial Sequence: Synthetic oligonucleotide
  Sense strand starting at position 2458 of SEQ ID NO: 1242911
caaacuauccgcuagagua

SEQ ID NO: 1381487 - RNA, 19 nt, Artificial Sequence
  Description of Artificial Sequence: Synthetic oligonucleotide
  Antisense strand to SEQ ID NO: 1381486
uacucuagcggauaguuug

SEQ ID NO: 1381488 - RNA, 19 nt, Artificial Sequence
  Description of Artificial Sequence: Synthetic oligonucleotide
  Sense strand starting at position 2482 of SEQ ID NO: 1242911
gccguuagaccuuagaaua

SEQ ID NO: 1381489 - RNA, 19 nt, Artificial Sequence
  Description of Artificial Sequence: Synthetic oligonucleotide
  Antisense strand to SEQ ID NO: 1381488
uauucuaaggucuaacggc

SEQ ID NO: 1381490 - RNA, 19 nt, Artificial Sequence
  Description of Artificial Sequence: Synthetic oligonucleotide
  Sense strand starting at position 2508 of SEQ ID NO: 1242911
cuguguaggaaaugugauu

SEQ ID NO: 1381491 - RNA, 19 nt, Artificial Sequence
  Description of Artificial Sequence: Synthetic oligonucleotide
  Antisense strand to SEQ ID NO: 1381490
aaucacauuuccuacacag

SEQ ID NO: 1381492 - RNA, 19 nt, Artificial Sequence
  Description of Artificial Sequence: Synthetic oligonucleotide
  Sense strand starting at position 2694 of SEQ ID NO: 1242911
gagauaugcuaacuagcag

SEQ ID NO: 1381493 - RNA, 19 nt, Artificial Sequence
  Description of Artificial Sequence: Synthetic oligonucleotide
  Antisense strand to SEQ ID NO: 1381492
cugcuaguuagcauaucuc

SEQ ID NO: 1381494 - RNA, 19 nt, Artificial Sequence
  Description of Artificial Sequence: Synthetic oligonucleotide
  Sense strand starting at position 2928 of SEQ ID NO: 1242911
cacucuucuugaguaggau

SEQ ID NO: 1381495 - RNA, 19 nt, Artificial Sequence
  Description of Artificial Sequence: Synthetic oligonucleotide
  Antisense strand to SEQ ID NO: 1381494
auccuacucaagaagagug

SEQ ID NO: 1381496 - RNA, 19 nt, Artificial Sequence
  Description of Artificial Sequence: Synthetic oligonucleotide
  Sense strand starting at position 2929 of SEQ ID NO: 1242911
acucuucuugaguaggauu

SEQ ID NO: 1381497 - RNA, 19 nt, Artificial Sequence
  Description of Artificial Sequence: Synthetic oligonucleotide
  Antisense strand to SEQ ID NO: 1381496
aauccuacucaagaagagu

SEQ ID NO: 1381498 - RNA, 19 nt, Artificial Sequence
  Description of Artificial Sequence: Synthetic oligonucleotide
  Sense strand starting at position 2981 of SEQ ID NO: 1242911
gauaauucuuuguugggca

SEQ ID NO: 1381499 - RNA, 19 nt, Artificial Sequence
  Description of Artificial Sequence: Synthetic oligonucleotide
  Antisense strand to SEQ ID NO: 1381498
ugcccaacaaagaauuauc

SEQ ID NO: 1381500 - RNA, 19 nt, Artificial Sequence
  Description of Artificial Sequence: Synthetic oligonucleotide
  Sense strand starting at position 3207 of SEQ ID NO: 1242911
ccaggacuuuaugcuuaau

SEQ ID NO: 1381501 - RNA, 19 nt, Artificial Sequence
  Description of Artificial Sequence: Synthetic oligonucleotide
  Antisense strand to SEQ ID NO: 1381500
auuaagcauaaaguccugg

SEQ ID NO: 1381502 - RNA, 19 nt, Artificial Sequence
  Description of Artificial Sequence: Synthetic oligonucleotide
  Sense strand starting at position 3209 of SEQ ID NO: 1242911
aggacuuuaugcuuaaucu

SEQ ID NO: 1381503 - RNA, 19 nt, Artificial Sequence
  Description of Artificial Sequence: Synthetic oligonucleotide
  Antisense strand to SEQ ID NO: 1381502
agauuaagcauaaaguccu

SEQ ID NO: 1381504 - RNA, 19 nt, Artificial Sequence
  Description of Artificial Sequence: Synthetic oligonucleotide
  Sense strand starting at position 3210 of SEQ ID NO: 1242911
ggacuuuaugcuuaaucua

SEQ ID NO: 1381505 - RNA, 19 nt, Artificial Sequence
  Description of Artificial Sequence: Synthetic oligonucleotide
  Antisense strand to SEQ ID NO: 1381504
uagauuaagcauaaagucc

SEQ ID NO: 1381506 - RNA, 19 nt, Artificial Sequence
  Description of Artificial Sequence: Synthetic oligonucleotide
  Sense strand starting at position 3281 of SEQ ID NO: 1242911
guaauaguccuguaagauu

SEQ ID NO: 1381507 - RNA, 19 nt, Artificial Sequence
  Description of Artificial Sequence: Synthetic oligonucleotide
  Antisense strand to SEQ ID NO: 1381506
aaucuuacaggacuauuac

SEQ ID NO: 1381508 - RNA, 19 nt, Artificial Sequence
  Description of Artificial Sequence: Synthetic oligonucleotide
  Sense strand starting at position 3296 of SEQ ID NO: 1242911
gauucugcugagugacaca

SEQ ID NO: 1381509 - RNA, 19 nt, Artificial Sequence
  Description of Artificial Sequence: Synthetic oligonucleotide
  Antisense strand to SEQ ID NO: 1381508
ugugucacucagcagaauc

SEQ ID NO: 1381510 - RNA, 19 nt, Artificial Sequence
  Description of Artificial Sequence: Synthetic oligonucleotide
  Sense strand starting at position 3307 of SEQ ID NO: 1242911
gugacacagucuguaguaa

SEQ ID NO: 1381511 - RNA, 19 nt, Artificial Sequence
  Description of Artificial Sequence: Synthetic oligonucleotide
  Antisense strand to SEQ ID NO: 1381510
uuacuacagacugugucac

SEQ ID NO: 1381512 - RNA, 19 nt, Artificial Sequence
  Description of Artificial Sequence: Synthetic oligonucleotide
  Sense strand starting at position 3319 of SEQ ID NO: 1242911
guaguaacuuaaguuugga

SEQ ID NO: 1381513 - RNA, 19 nt, Artificial Sequence
  Description of Artificial Sequence: Synthetic oligonucleotide
  Antisense strand to SEQ ID NO: 1381512
uccaaacuuaaguuacuac

SEQ ID NO: 1381514 - RNA, 19 nt, Artificial Sequence
  Description of Artificial Sequence: Synthetic oligonucleotide
  Sense strand starting at position 3322 of SEQ ID NO: 1242911
guaacuuaaguuuggaaag

SEQ ID NO: 1381515 - RNA, 19 nt, Artificial Sequence
  Description of Artificial Sequence: Synthetic oligonucleotide
  Antisense strand to SEQ ID NO: 1381514
cuuuccaaacuuaaguuac

SEQ ID NO: 1381516 - RNA, 19 nt, Artificial Sequence
  Description of Artificial Sequence: Synthetic oligonucleotide
  Sense strand starting at position 3393 of SEQ ID NO: 1242911
uggcgaucacugugaacau

SEQ ID NO: 1381517 - RNA, 19 nt, Artificial Sequence
  Description of Artificial Sequence: Synthetic oligonucleotide
  Antisense strand to SEQ ID NO: 1381516
auguucacagugaucgcca

SEQ ID NO: 1381518 - RNA, 19 nt, Artificial Sequence
  Description of Artificial Sequence: Synthetic oligonucleotide
  Sense strand starting at position 3721 of SEQ ID NO: 1242911
gcuccaauuugucuccagu

SEQ ID NO: 1381519 - RNA, 19 nt, Artificial Sequence
  Description of Artificial Sequence: Synthetic oligonucleotide
  Antisense strand to SEQ ID NO: 1381518
acuggagacaaauuggagc

SEQ ID NO: 1381520 - RNA, 19 nt, Artificial Sequence
  Description of Artificial Sequence: Synthetic oligonucleotide
  Sense strand starting at position 3844 of SEQ ID NO: 1242911
gggcauccucauggaggaa

SEQ ID NO: 1381521 - RNA, 19 nt, Artificial Sequence
  Description of Artificial Sequence: Synthetic oligonucleotide
  Antisense strand to SEQ ID NO: 1381520
uuccuccaugaggaugccc

SEQ ID NO: 1381522 - RNA, 19 nt, Artificial Sequence
  Description of Artificial Sequence: Synthetic oligonucleotide
  Sense strand starting at position 403 of SEQ ID NO: 1242912
gccugaaacccgcgaucua

SEQ ID NO: 1381523 - RNA, 19 nt, Artificial Sequence
  Description of Artificial Sequence: Synthetic oligonucleotide
  Antisense strand to SEQ ID NO: 1381522
uagaucgcggguuucaggc

SEQ ID NO: 1381524 - RNA, 19 nt, Artificial Sequence
  Description of Artificial Sequence: Synthetic oligonucleotide
  Sense strand starting at position 413 of SEQ ID NO: 1242912
cgcgaucuagccuagauuu

SEQ ID NO: 1381525 - RNA, 19 nt, Artificial Sequence
  Description of Artificial Sequence: Synthetic oligonucleotide
  Antisense strand to SEQ ID NO: 1381524
aaaucuaggcuagaucgcg

SEQ ID NO: 1381526 - RNA, 19 nt, Artificial Sequence
  Description of Artificial Sequence: Synthetic oligonucleotide
  Sense strand starting at position 599 of SEQ ID NO: 1242912
gcaccauauggcugcaagu

SEQ ID NO: 1381527 - RNA, 19 nt, Artificial Sequence
  Description of Artificial Sequence: Synthetic oligonucleotide
  Antisense strand to SEQ ID NO: 1381526
acuugcagccauauggugc

SEQ ID NO: 1381528 - RNA, 19 nt, Artificial Sequence
  Description of Artificial Sequence: Synthetic oligonucleotide
  Sense strand starting at position 601 of SEQ ID NO: 1242912
accauauggcugcaaguga

SEQ ID NO: 1381529 - RNA, 19 nt, Artificial Sequence
  Description of Artificial Sequence: Synthetic oligonucleotide
  Antisense strand to SEQ ID NO: 1381528
ucacuugcagccauauggu

SEQ ID NO: 1381530 - RNA, 19 nt, Artificial Sequence
  Description of Artificial Sequence: Synthetic oligonucleotide
  Sense strand starting at position 628 of SEQ ID NO: 1242912
acaggcuuccuugaucaga

SEQ ID NO: 1381531 - RNA, 19 nt, Artificial Sequence
  Description of Artificial Sequence: Synthetic oligonucleotide
  Antisense strand to SEQ ID NO: 1381530
ucugaucaaggaagccugu

SEQ ID NO: 1381532 - RNA, 19 nt, Artificial Sequence
  Description of Artificial Sequence: Synthetic oligonucleotide
  Sense strand starting at position 630 of SEQ ID NO: 1242912
aggcuuccuugaucagauu

SEQ ID NO: 1381533 - RNA, 19 nt, Artificial Sequence
  Description of Artificial Sequence: Synthetic oligonucleotide
  Antisense strand to SEQ ID NO: 1381532
aaucugaucaaggaagccu

SEQ ID NO: 1381534 - RNA, 19 nt, Artificial Sequence
  Description of Artificial Sequence: Synthetic oligonucleotide
  Sense strand starting at position 763 of SEQ ID NO: 1242912
ccggauuccugagcuuuag

SEQ ID NO: 1381535 - RNA, 19 nt, Artificial Sequence
  Description of Artificial Sequence: Synthetic oligonucleotide
  Antisense strand to SEQ ID NO: 1381534
cuaaagcucaggaauccgg

SEQ ID NO: 1381536 - RNA, 19 nt, Artificial Sequence
  Description of Artificial Sequence: Synthetic oligonucleotide
  Sense strand starting at position 949 of SEQ ID NO: 1242912
cgccaaucccguuaguaag

SEQ ID NO: 1381537 - RNA, 19 nt, Artificial Sequence
  Description of Artificial Sequence: Synthetic oligonucleotide
  Antisense strand to SEQ ID NO: 1381536
cuuacuaacgggauuggcg

SEQ ID NO: 1381538 - RNA, 19 nt, Artificial Sequence
  Description of Artificial Sequence: Synthetic oligonucleotide
  Sense strand starting at position 1011 of SEQ ID NO: 1242912
gagcaaggacccuguguua

SEQ ID NO: 1381539 - RNA, 19 nt, Artificial Sequence
  Description of Artificial Sequence: Synthetic oligonucleotide
  Antisense strand to SEQ ID NO: 1381538
uaacacaggguccuugcuc

SEQ ID NO: 1381540 - RNA, 19 nt, Artificial Sequence
  Description of Artificial Sequence: Synthetic oligonucleotide
  Sense strand starting at position 1024 of SEQ ID NO: 1242912
guguuaugcaucucagugu

SEQ ID NO: 1381541 - RNA, 19 nt, Artificial Sequence
  Description of Artificial Sequence: Synthetic oligonucleotide
  Antisense strand to SEQ ID NO: 1381540
acacugagaugcauaacac

SEQ ID NO: 1381542 - RNA, 19 nt, Artificial Sequence
  Description of Artificial Sequence: Synthetic oligonucleotide
  Sense strand starting at position 1137 of SEQ ID NO: 1242912
cuaagaugacugugaagcu

SEQ ID NO: 1381543 - RNA, 19 nt, Artificial Sequence
  Description of Artificial Sequence: Synthetic oligonucleotide
  Antisense strand to SEQ ID NO: 1381542
agcuucacagucaucuuag

SEQ ID NO: 1381544 - RNA, 19 nt, Artificial Sequence
  Description of Artificial Sequence: Synthetic oligonucleotide
  Sense strand starting at position 1350 of SEQ ID NO: 1242912
gcgguagccagauagagau

SEQ ID NO: 1381545 - RNA, 19 nt, Artificial Sequence
  Description of Artificial Sequence: Synthetic oligonucleotide
  Antisense strand to SEQ ID NO: 1381544
aucucuaucuggcuaccgc

SEQ ID NO: 1381546 - RNA, 19 nt, Artificial Sequence
  Description of Artificial Sequence: Synthetic oligonucleotide
  Sense strand starting at position 1400 of SEQ ID NO: 1242912
gcacgacugcgucuccuua

SEQ ID NO: 1381547 - RNA, 19 nt, Artificial Sequence
  Description of Artificial Sequence: Synthetic oligonucleotide
  Antisense strand to SEQ ID NO: 1381546
uaaggagacgcagucgugc

SEQ ID NO: 1381548 - RNA, 19 nt, Artificial Sequence
  Description of Artificial Sequence: Synthetic oligonucleotide
  Sense strand starting at position 2083 of SEQ ID NO: 1242912
cggaacauuucuuagucca

SEQ ID NO: 1381549 - RNA, 19 nt, Artificial Sequence
  Description of Artificial Sequence: Synthetic oligonucleotide
  Antisense strand to SEQ ID NO: 1381548
uggacuaagaaauguuccg

SEQ ID NO: 1381550 - RNA, 19 nt, Artificial Sequence
  Description of Artificial Sequence: Synthetic oligonucleotide
  Sense strand starting at position 2114 of SEQ ID NO: 1242912
cagcgcuggucuucuaaga

SEQ ID NO: 1381551 - RNA, 19 nt, Artificial Sequence
  Description of Artificial Sequence: Synthetic oligonucleotide
  Antisense strand to SEQ ID NO: 1381550
ucuuagaagaccagcgcug

SEQ ID NO: 1381552 - RNA, 19 nt, Artificial Sequence
  Description of Artificial Sequence: Synthetic oligonucleotide
  Sense strand starting at position 2139 of SEQ ID NO: 1242912
accguacgguugccagaua

SEQ ID NO: 1381553 - RNA, 19 nt, Artificial Sequence
  Description of Artificial Sequence: Synthetic oligonucleotide
  Antisense strand to SEQ ID NO: 1381552
uaucuggcaaccguacggu

SEQ ID NO: 1381554 - RNA, 19 nt, Artificial Sequence
  Description of Artificial Sequence: Synthetic oligonucleotide
  Sense strand starting at position 2500 of SEQ ID NO: 1242912
gguguuagagacuggguuu

SEQ ID NO: 1381555 - RNA, 19 nt, Artificial Sequence
  Description of Artificial Sequence: Synthetic oligonucleotide
  Antisense strand to SEQ ID NO: 1381554
aaacccagucucuaacacc

SEQ ID NO: 1381556 - RNA, 19 nt, Artificial Sequence
  Description of Artificial Sequence: Synthetic oligonucleotide
  Sense strand starting at position 2629 of SEQ ID NO: 1242912
ucccaaagugcuugcauuu

SEQ ID NO: 1381557 - RNA, 19 nt, Artificial Sequence
  Description of Artificial Sequence: Synthetic oligonucleotide
  Antisense strand to SEQ ID NO: 1381556
aaaugcaagcacuuuggga

SEQ ID NO: 1381558 - RNA, 19 nt, Artificial Sequence
  Description of Artificial Sequence: Synthetic oligonucleotide
  Sense strand starting at position 2961 of SEQ ID NO: 1242912
ggccuaugugcuugcauuu

SEQ ID NO: 1381559 - RNA, 19 nt, Artificial Sequence
  Description of Artificial Sequence: Synthetic oligonucleotide
  Antisense strand to SEQ ID NO: 1381558
aaaugcaagcacauaggcc

SEQ ID NO: 1381560 - RNA, 19 nt, Artificial Sequence
  Description of Artificial Sequence: Synthetic oligonucleotide
  Sense strand starting at position 3095 of SEQ ID NO: 1242912
ccugguuuccuggaacacu

SEQ ID NO: 1381561 - RNA, 19 nt, Artificial Sequence
  Description of Artificial Sequence: Synthetic oligonucleotide
  Antisense strand to SEQ ID NO: 1381560
aguguuccaggaaaccagg

SEQ ID NO: 1381562 - RNA, 19 nt, Artificial Sequence
  Description of Artificial Sequence: Synthetic oligonucleotide
  Sense strand starting at position 3168 of SEQ ID NO: 1242912
acaguacaccaucgaugua

SEQ ID NO: 1381563 - RNA, 19 nt, Artificial Sequence
  Description of Artificial Sequence: Synthetic oligonucleotide
  Antisense strand to SEQ ID NO: 1381562
uacaucgaugguguacugu

SEQ ID NO: 1381564 - RNA, 19 nt, Artificial Sequence
  Description of Artificial Sequence: Synthetic oligonucleotide
  Sense strand starting at position 3171 of SEQ ID NO: 1242912
guacaccaucgauguauua

SEQ ID NO: 1381565 - RNA, 19 nt, Artificial Sequence
  Description of Artificial Sequence: Synthetic oligonucleotide
  Antisense strand to SEQ ID NO: 1381564
uaauacaucgaugguguac

SEQ ID NO: 1381566 - RNA, 19 nt, Artificial Sequence
  Description of Artificial Sequence: Synthetic oligonucleotide
  Sense strand starting at position 3191 of SEQ ID NO: 1242912
uuacuugcuuauucuguua

SEQ ID NO: 1381567 - RNA, 19 nt, Artificial Sequence
  Description of Artificial Sequence: Synthetic oligonucleotide
  Antisense strand to SEQ ID NO: 1381566
uaacagaauaagcaaguaa

SEQ ID NO: 1381568 - RNA, 19 nt, Artificial Sequence
  Description of Artificial Sequence: Synthetic oligonucleotide
  Sense strand starting at position 3231 of SEQ ID NO: 1242912
guaugucaugauuaucaua

SEQ ID NO: 1381569 - RNA, 19 nt, Artificial Sequence
  Description of Artificial Sequence: Synthetic oligonucleotide
  Antisense strand to SEQ ID NO: 1381568
uaugauaaucaugacauac

SEQ ID NO: 1381570 - RNA, 19 nt, Artificial Sequence
  Description of Artificial Sequence: Synthetic oligonucleotide
  Sense strand starting at position 3251 of SEQ ID NO: 1242912
uuaugaaaugaauacgugu

SEQ ID NO: 1381571 - RNA, 19 nt, Artificial Sequence
  Description of Artificial Sequence: Synthetic oligonucleotide
  Antisense strand to SEQ ID NO: 1381570
acacguauucauuucauaa

SEQ ID NO: 1381572 - RNA, 19 nt, Artificial Sequence
  Description of Artificial Sequence: Synthetic oligonucleotide
  Sense strand starting at position 3253 of SEQ ID NO: 1242912
augaaaugaauacguguua

SEQ ID NO: 1381573 - RNA, 19 nt, Artificial Sequence
  Description of Artificial Sequence: Synthetic oligonucleotide
  Antisense strand to SEQ ID NO: 1381572
uaacacguauucauuucau

SEQ ID NO: 1381574 - RNA, 19 nt, Artificial Sequence
  Description of Artificial Sequence: Synthetic oligonucleotide
  Sense strand starting at position 3254 of SEQ ID NO: 1242912
ugaaaugaauacguguuaa

SEQ ID NO: 1381575 - RNA, 19 nt, Artificial Sequence
  Description of Artificial Sequence: Synthetic oligonucleotide
  Antisense strand to SEQ ID NO: 1381574
uuaacacguauucauuuca

SEQ ID NO: 1381576 - RNA, 19 nt, Artificial Sequence
  Description of Artificial Sequence: Synthetic oligonucleotide
  Sense strand starting at position 3367 of SEQ ID NO: 1242912
agauaagacgaaugugcaa

SEQ ID NO: 1381577 - RNA, 19 nt, Artificial Sequence
  Description of Artificial Sequence: Synthetic oligonucleotide
  Antisense strand to SEQ ID NO: 1381576
uugcacauucgucuuaucu

SEQ ID NO: 1381578 - RNA, 19 nt, Artificial Sequence
  Description of Artificial Sequence: Synthetic oligonucleotide
  Sense strand starting at position 3369 of SEQ ID NO: 1242912
auaagacgaaugugcaaau

SEQ ID NO: 1381579 - RNA, 19 nt, Artificial Sequence
  Description of Artificial Sequence: Synthetic oligonucleotide
  Antisense strand to SEQ ID NO: 1381578
auuugcacauucgucuuau

SEQ ID NO: 1381580 - RNA, 19 nt, Artificial Sequence
  Description of Artificial Sequence: Synthetic oligonucleotide
  Sense strand starting at position 3427 of SEQ ID NO: 1242912
ccuccagugagcggaauuu

SEQ ID NO: 1381581 - RNA, 19 nt, Artificial Sequence
  Description of Artificial Sequence: Synthetic oligonucleotide
  Antisense strand to SEQ ID NO: 1381580
aaauuccgcucacuggagg

SEQ ID NO: 1381582 - RNA, 19 nt, Artificial Sequence
  Description of Artificial Sequence: Synthetic oligonucleotide
  Sense strand starting at position 3537 of SEQ ID NO: 1242912
gguugugcugucuagacaa

SEQ ID NO: 1381583 - RNA, 19 nt, Artificial Sequence
  Description of Artificial Sequence: Synthetic oligonucleotide
  Antisense strand to SEQ ID NO: 1381582
uugucuagacagcacaacc

SEQ ID NO: 1381584 - RNA, 19 nt, Artificial Sequence
  Description of Artificial Sequence: Synthetic oligonucleotide
  Sense strand starting at position 3539 of SEQ ID NO: 1242912
uugugcugucuagacaaca

SEQ ID NO: 1381585 - RNA, 19 nt, Artificial Sequence
  Description of Artificial Sequence: Synthetic oligonucleotide
  Antisense strand to SEQ ID NO: 1381584
uguugucuagacagcacaa

SEQ ID NO: 1381586 - RNA, 19 nt, Artificial Sequence
  Description of Artificial Sequence: Synthetic oligonucleotide
  Sense strand starting at position 3616 of SEQ ID NO: 1242912
ccauguuugaaaggcggaa

SEQ ID NO: 1381587 - RNA, 19 nt, Artificial Sequence
  Description of Artificial Sequence: Synthetic oligonucleotide
  Antisense strand to SEQ ID NO: 1381586
uuccgccuuucaaacaugg

SEQ ID NO: 1381588 - RNA, 19 nt, Artificial Sequence
  Description of Artificial Sequence: Synthetic oligonucleotide
  Sense strand starting at position 3730 of SEQ ID NO: 1242912
uguaaagagcaucaguuua

SEQ ID NO: 1381589 - RNA, 19 nt, Artificial Sequence
  Description of Artificial Sequence: Synthetic oligonucleotide
  Antisense strand to SEQ ID NO: 1381588
uaaacugaugcucuuuaca

SEQ ID NO: 1381590 - RNA, 19 nt, Artificial Sequence
  Description of Artificial Sequence: Synthetic oligonucleotide
  Sense strand starting at position 3735 of SEQ ID NO: 1242912
agagcaucaguuuauauag

SEQ ID NO: 1381591 - RNA, 19 nt, Artificial Sequence
  Description of Artificial Sequence: Synthetic oligonucleotide
  Antisense strand to SEQ ID NO: 1381590
cuauauaaacugaugcucu

SEQ ID NO: 1381592 - RNA, 19 nt, Artificial Sequence
  Description of Artificial Sequence: Synthetic oligonucleotide
  Sense strand starting at position 3906 of SEQ ID NO: 1242912
gccacucugugauucugua

SEQ ID NO: 1381593 - RNA, 19 nt, Artificial Sequence
  Description of Artificial Sequence: Synthetic oligonucleotide
  Antisense strand to SEQ ID NO: 1381592
uacagaaucacagaguggc

SEQ ID NO: 1381594 - RNA, 19 nt, Artificial Sequence
  Description of Artificial Sequence: Synthetic oligonucleotide
  Sense strand starting at position 3910 of SEQ ID NO: 1242912
cucugugauucuguagcuu

SEQ ID NO: 1381595 - RNA, 19 nt, Artificial Sequence
  Description of Artificial Sequence: Synthetic oligonucleotide
  Antisense strand to SEQ ID NO: 1381594
aagcuacagaaucacagag

SEQ ID NO: 1381596 - RNA, 19 nt, Artificial Sequence
  Description of Artificial Sequence: Synthetic oligonucleotide
  Sense strand starting at position 3914 of SEQ ID NO: 1242912
gugauucuguagcuuggaa

SEQ ID NO: 1381597 - RNA, 19 nt, Artificial Sequence
  Description of Artificial Sequence: Synthetic oligonucleotide
  Antisense strand to SEQ ID NO: 1381596
uuccaagcuacagaaucac

SEQ ID NO: 1381598 - RNA, 19 nt, Artificial Sequence
  Description of Artificial Sequence: Synthetic oligonucleotide
  Sense strand starting at position 3916 of SEQ ID NO: 1242912
gauucuguagcuuggaacu

SEQ ID NO: 1381599 - RNA, 19 nt, Artificial Sequence
  Description of Artificial Sequence: Synthetic oligonucleotide
  Antisense strand to SEQ ID NO: 1381598
aguuccaagcuacagaauc

SEQ ID NO: 1381600 - RNA, 19 nt, Artificial Sequence
  Description of Artificial Sequence: Synthetic oligonucleotide
  Sense strand starting at position 3963 of SEQ ID NO: 1242912
guacguaugccauacagaa

SEQ ID NO: 1381601 - RNA, 19 nt, Artificial Sequence
  Description of Artificial Sequence: Synthetic oligonucleotide
  Antisense strand to SEQ ID NO: 1381600
uucuguauggcauacguac

SEQ ID NO: 1381602 - RNA, 19 nt, Artificial Sequence
  Description of Artificial Sequence: Synthetic oligonucleotide
  Sense strand starting at position 313 of SEQ ID NO: 1242913
agaggugaaucuggaagua

SEQ ID NO: 1381603 - RNA, 19 nt, Artificial Sequence
  Description of Artificial Sequence: Synthetic oligonucleotide
  Antisense strand to SEQ ID NO: 1381602
uacuuccagauucaccucu

SEQ ID NO: 1381604 - RNA, 19 nt, Artificial Sequence
  Description of Artificial Sequence: Synthetic oligonucleotide
  Sense strand starting at position 338 of SEQ ID NO: 1242913
ucagcugaucaguagauaa

SEQ ID NO: 1381605 - RNA, 19 nt, Artificial Sequence
  Description of Artificial Sequence: Synthetic oligonucleotide
  Antisense strand to SEQ ID NO: 1381604
uuaucuacugaucagcuga

SEQ ID NO: 1381606 - RNA, 19 nt, Artificial Sequence
  Description of Artificial Sequence: Synthetic oligonucleotide
  Sense strand starting at position 504 of SEQ ID NO: 1242913
aggcgacauuucugucuuu

SEQ ID NO: 1381607 - RNA, 19 nt, Artificial Sequence
  Description of Artificial Sequence: Synthetic oligonucleotide
  Antisense strand to SEQ ID NO: 1381606
aaagacagaaaugucgccu

SEQ ID NO: 1381608 - RNA, 19 nt, Artificial Sequence
  Description of Artificial Sequence: Synthetic oligonucleotide
  Sense strand starting at position 507 of SEQ ID NO: 1242913
cgacauuucugucuuuguu

SEQ ID NO: 1381609 - RNA, 19 nt, Artificial Sequence
  Description of Artificial Sequence: Synthetic oligonucleotide
  Antisense strand to SEQ ID NO: 1381608
aacaaagacagaaaugucg

SEQ ID NO: 1381610 - RNA, 19 nt, Artificial Sequence
  Description of Artificial Sequence: Synthetic oligonucleotide
  Sense strand starting at position 548 of SEQ ID NO: 1242913
gggcacuuccacggguaaa

SEQ ID NO: 1381611 - RNA, 19 nt, Artificial Sequence
  Description of Artificial Sequence: Synthetic oligonucleotide
  Antisense strand to SEQ ID NO: 1381610
uuuacccguggaagugccc

SEQ ID NO: 1381612 - RNA, 19 nt, Artificial Sequence
  Description of Artificial Sequence: Synthetic oligonucleotide
  Sense strand starting at position 549 of SEQ ID NO: 1242913
ggcacuuccacggguaaac

SEQ ID NO: 1381613 - RNA, 19 nt, Artificial Sequence
  Description of Artificial Sequence: Synthetic oligonucleotide
  Antisense strand to SEQ ID NO: 1381612
guuuacccguggaagugcc

SEQ ID NO: 1381614 - RNA, 19 nt, Artificial Sequence
  Description of Artificial Sequence: Synthetic oligonucleotide
  Sense strand starting at position 558 of SEQ ID NO: 1242913
acggguaaaccaggguuaa

SEQ ID NO: 1381615 - RNA, 19 nt, Artificial Sequence
  Description of Artificial Sequence: Synthetic oligonucleotide
  Antisense strand to SEQ ID NO: 1381614
uuaacccugguuuacccgu

SEQ ID NO: 1381616 - RNA, 19 nt, Artificial Sequence
  Description of Artificial Sequence: Synthetic oligonucleotide
  Sense strand starting at position 559 of SEQ ID NO: 1242913
cggguaaaccaggguuaaa

SEQ ID NO: 1381617 - RNA, 19 nt, Artificial Sequence
  Description of Artificial Sequence: Synthetic oligonucleotide
  Antisense strand to SEQ ID NO: 1381616
uuuaacccugguuuacccg

SEQ ID NO: 1381618 - RNA, 19 nt, Artificial Sequence
  Description of Artificial Sequence: Synthetic oligonucleotide
  Sense strand starting at position 639 of SEQ ID NO: 1242913
aaagcauuacugugcguua

SEQ ID NO: 1381619 - RNA, 19 nt, Artificial Sequence
  Description of Artificial Sequence: Synthetic oligonucleotide
  Antisense strand to SEQ ID NO: 1381618
uaacgcacaguaaugcuuu

SEQ ID NO: 1381620 - RNA, 19 nt, Artificial Sequence
  Description of Artificial Sequence: Synthetic oligonucleotide
  Sense strand starting at position 641 of SEQ ID NO: 1242913
agcauuacugugcguuacu

SEQ ID NO: 1381621 - RNA, 19 nt, Artificial Sequence
  Description of Artificial Sequence: Synthetic oligonucleotide
  Antisense strand to SEQ ID NO: 1381620
aguaacgcacaguaaugcu

SEQ ID NO: 1381622 - RNA, 19 nt, Artificial Sequence
  Description of Artificial Sequence: Synthetic oligonucleotide
  Sense strand starting at position 650 of SEQ ID NO: 1242913
gugcguuacugcuaucaaa

SEQ ID NO: 1381623 - RNA, 19 nt, Artificial Sequence
  Description of Artificial Sequence: Synthetic oligonucleotide
  Antisense strand to SEQ ID NO: 1381622
uuugauagcaguaacgcac

SEQ ID NO: 1381624 - RNA, 19 nt, Artificial Sequence
  Description of Artificial Sequence: Synthetic oligonucleotide
  Sense strand starting at position 653 of SEQ ID NO: 1242913
cguuacugcuaucaaauaa

SEQ ID NO: 1381625 - RNA, 19 nt, Artificial Sequence
  Description of Artificial Sequence: Synthetic oligonucleotide
  Antisense strand to SEQ ID NO: 1381624
uuauuugauagcaguaacg

SEQ ID NO: 1381626 - RNA, 19 nt, Artificial Sequence
  Description of Artificial Sequence: Synthetic oligonucleotide
  Sense strand starting at position 1655 of SEQ ID NO: 1242913
ucgcuuuccucauccgaga

SEQ ID NO: 1381627 - RNA, 19 nt, Artificial Sequence
  Description of Artificial Sequence: Synthetic oligonucleotide
  Antisense strand to SEQ ID NO: 1381626
ucucggaugaggaaagcga

SEQ ID NO: 1381628 - RNA, 19 nt, Artificial Sequence
  Description of Artificial Sequence: Synthetic oligonucleotide
  Sense strand starting at position 1657 of SEQ ID NO: 1242913
gcuuuccucauccgagaag

SEQ ID NO: 1381629 - RNA, 19 nt, Artificial Sequence
  Description of Artificial Sequence: Synthetic oligonucleotide
  Antisense strand to SEQ ID NO: 1381628
cuucucggaugaggaaagc

SEQ ID NO: 1381630 - RNA, 19 nt, Artificial Sequence
  Description of Artificial Sequence: Synthetic oligonucleotide
  Sense strand starting at position 1835 of SEQ ID NO: 1242913
gguagaucuuguccagacu

SEQ ID NO: 1381631 - RNA, 19 nt, Artificial Sequence
  Description of Artificial Sequence: Synthetic oligonucleotide
  Antisense strand to SEQ ID NO: 1381630
agucuggacaagaucuacc

SEQ ID NO: 1381632 - RNA, 19 nt, Artificial Sequence
  Description of Artificial Sequence: Synthetic oligonucleotide
  Sense strand starting at position 1877 of SEQ ID NO: 1242913
gcuccuucucggcgaggaa

SEQ ID NO: 1381633 - RNA, 19 nt, Artificial Sequence
  Description of Artificial Sequence: Synthetic oligonucleotide
  Antisense strand to SEQ ID NO: 1381632
uuccucgccgagaaggagc

SEQ ID NO: 1381634 - RNA, 19 nt, Artificial Sequence
  Description of Artificial Sequence: Synthetic oligonucleotide
  Sense strand starting at position 1878 of SEQ ID NO: 1242913
cuccuucucggcgaggaau

SEQ ID NO: 1381635 - RNA, 19 nt, Artificial Sequence
  Description of Artificial Sequence: Synthetic oligonucleotide
  Antisense strand to SEQ ID NO: 1381634
auuccucgccgagaaggag

SEQ ID NO: 1381636 - RNA, 19 nt, Artificial Sequence
  Description of Artificial Sequence: Synthetic oligonucleotide
  Sense strand starting at position 2609 of SEQ ID NO: 1242913
ggaagaccuuguuuccauu

SEQ ID NO: 1381637 - RNA, 19 nt, Artificial Sequence
  Description of Artificial Sequence: Synthetic oligonucleotide
  Antisense strand to SEQ ID NO: 1381636
aauggaaacaaggucuucc

SEQ ID NO: 1381638 - RNA, 19 nt, Artificial Sequence
  Description of Artificial Sequence: Synthetic oligonucleotide
  Sense strand starting at position 2873 of SEQ ID NO: 1242913
ggagcucaccugugucaga

SEQ ID NO: 1381639 - RNA, 19 nt, Artificial Sequence
  Description of Artificial Sequence: Synthetic oligonucleotide
  Antisense strand to SEQ ID NO: 1381638
ucugacacaggugagcucc

SEQ ID NO: 1381640 - RNA, 19 nt, Artificial Sequence
  Description of Artificial Sequence: Synthetic oligonucleotide
  Sense strand starting at position 2874 of SEQ ID NO: 1242913
gagcucaccugugucagaa

SEQ ID NO: 1381641 - RNA, 19 nt, Artificial Sequence
  Description of Artificial Sequence: Synthetic oligonucleotide
  Antisense strand to SEQ ID NO: 1381640
uucugacacaggugagcuc

SEQ ID NO: 1381642 - RNA, 19 nt, Artificial Sequence
  Description of Artificial Sequence: Synthetic oligonucleotide
  Sense strand starting at position 2936 of SEQ ID NO: 1242913
uugggauuccggagucgug

SEQ ID NO: 1381643 - RNA, 19 nt, Artificial Sequence
  Description of Artificial Sequence: Synthetic oligonucleotide
  Antisense strand to SEQ ID NO: 1381642
cacgacuccggaaucccaa

SEQ ID NO: 1381644 - RNA, 19 nt, Artificial Sequence
  Description of Artificial Sequence: Synthetic oligonucleotide
  Sense strand starting at position 3002 of SEQ ID NO: 1242913
ggguggucauggccggaaa

SEQ ID NO: 1381645 - RNA, 19 nt, Artificial Sequence
  Description of Artificial Sequence: Synthetic oligonucleotide
  Antisense strand to SEQ ID NO: 1381644
uuuccggccaugaccaccc

SEQ ID NO: 1381646 - RNA, 19 nt, Artificial Sequence
  Description of Artificial Sequence: Synthetic oligonucleotide
  Sense strand starting at position 3038 of SEQ ID NO: 1242913
gcgcuauucuaggacugca

SEQ ID NO: 1381647 - RNA, 19 nt, Artificial Sequence
  Description of Artificial Sequence: Synthetic oligonucleotide
  Antisense strand to SEQ ID NO: 1381646
ugcaguccuagaauagcgc

SEQ ID NO: 1381648 - RNA, 19 nt, Artificial Sequence
  Description of Artificial Sequence: Synthetic oligonucleotide
  Sense strand starting at position 3064 of SEQ ID NO: 1242913
uugaaaccuugauaauuag

SEQ ID NO: 1381649 - RNA, 19 nt, Artificial Sequence
  Description of Artificial Sequence: Synthetic oligonucleotide
  Antisense strand to SEQ ID NO: 1381648
cuaauuaucaagguuucaa

SEQ ID NO: 1381650 - RNA, 19 nt, Artificial Sequence
  Description of Artificial Sequence: Synthetic oligonucleotide
  Sense strand starting at position 3074 of SEQ ID NO: 1242913
gauaauuaggcccgcgaga

SEQ ID NO: 1381651 - RNA, 19 nt, Artificial Sequence
  Description of Artificial Sequence: Synthetic oligonucleotide
  Antisense strand to SEQ ID NO: 1381650
ucucgcgggccuaauuauc

SEQ ID NO: 1381652 - RNA, 19 nt, Artificial Sequence
  Description of Artificial Sequence: Synthetic oligonucleotide
  Sense strand starting at position 3076 of SEQ ID NO: 1242913
uaauuaggcccgcgagaaa

SEQ ID NO: 1381653 - RNA, 19 nt, Artificial Sequence
  Description of Artificial Sequence: Synthetic oligonucleotide
  Antisense strand to SEQ ID NO: 1381652
uuucucgcgggccuaauua

SEQ ID NO: 1381654 - RNA, 19 nt, Artificial Sequence
  Description of Artificial Sequence: Synthetic oligonucleotide
  Sense strand starting at position 3271 of SEQ ID NO: 1242913
uuguguaucugccuuagaa

SEQ ID NO: 1381655 - RNA, 19 nt, Artificial Sequence
  Description of Artificial Sequence: Synthetic oligonucleotide
  Antisense strand to SEQ ID NO: 1381654
uucuaaggcagauacacaa

SEQ ID NO: 1381656 - RNA, 19 nt, Artificial Sequence
  Description of Artificial Sequence: Synthetic oligonucleotide
  Sense strand starting at position 3273 of SEQ ID NO: 1242913
guguaucugccuuagaagu

SEQ ID NO: 1381657 - RNA, 19 nt, Artificial Sequence
  Description of Artificial Sequence: Synthetic oligonucleotide
  Antisense strand to SEQ ID NO: 1381656
acuucuaaggcagauacac

SEQ ID NO: 1381658 - RNA, 19 nt, Artificial Sequence
  Description of Artificial Sequence: Synthetic oligonucleotide
  Sense strand starting at position 3275 of SEQ ID NO: 1242913
guaucugccuuagaaguug

SEQ ID NO: 1381659 - RNA, 19 nt, Artificial Sequence
  Description of Artificial Sequence: Synthetic oligonucleotide
  Antisense strand to SEQ ID NO: 1381658
caacuucuaaggcagauac

SEQ ID NO: 1381660 - RNA, 19 nt, Artificial Sequence
  Description of Artificial Sequence: Synthetic oligonucleotide
  Sense strand starting at position 3283 of SEQ ID NO: 1242913
cuuagaaguuguuauuuac

SEQ ID NO: 1381661 - RNA, 19 nt, Artificial Sequence
  Description of Artificial Sequence: Synthetic oligonucleotide
  Antisense strand to SEQ ID NO: 1381660
guaaauaacaacuucuaag

SEQ ID NO: 1381662 - RNA, 19 nt, Artificial Sequence
  Description of Artificial Sequence: Synthetic oligonucleotide
  Sense strand starting at position 3296 of SEQ ID NO: 1242913
auuuacagaucuggaguuu

SEQ ID NO: 1381663 - RNA, 19 nt, Artificial Sequence
  Description of Artificial Sequence: Synthetic oligonucleotide
  Antisense strand to SEQ ID NO: 1381662
aaacuccagaucuguaaau

SEQ ID NO: 1381664 - RNA, 19 nt, Artificial Sequence
  Description of Artificial Sequence: Synthetic oligonucleotide
  Sense strand starting at position 3490 of SEQ ID NO: 1242913
gacagauaugcucgaagag

SEQ ID NO: 1381665 - RNA, 19 nt, Artificial Sequence
  Description of Artificial Sequence: Synthetic oligonucleotide
  Antisense strand to SEQ ID NO: 1381664
cucuucgagcauaucuguc

SEQ ID NO: 1381666 - RNA, 19 nt, Artificial Sequence
  Description of Artificial Sequence: Synthetic oligonucleotide
  Sense strand starting at position 3527 of SEQ ID NO: 1242913
cuggaugcuaugugaccaa

SEQ ID NO: 1381667 - RNA, 19 nt, Artificial Sequence
  Description of Artificial Sequence: Synthetic oligonucleotide
  Antisense strand to SEQ ID NO: 1381666
uuggucacauagcauccag

SEQ ID NO: 1381668 - RNA, 19 nt, Artificial Sequence
  Description of Artificial Sequence: Synthetic oligonucleotide
  Sense strand starting at position 3742 of SEQ ID NO: 1242913
ggcaaauauuuguguucca

SEQ ID NO: 1381669 - RNA, 19 nt, Artificial Sequence
  Description of Artificial Sequence: Synthetic oligonucleotide
  Antisense strand to SEQ ID NO: 1381668
uggaacacaaauauuugcc

SEQ ID NO: 1381670 - RNA, 19 nt, Artificial Sequence
  Description of Artificial Sequence: Synthetic oligonucleotide
  Sense strand starting at position 3747 of SEQ ID NO: 1242913
auauuuguguuccaaagcu

SEQ ID NO: 1381671 - RNA, 19 nt, Artificial Sequence
  Description of Artificial Sequence: Synthetic oligonucleotide
  Antisense strand to SEQ ID NO: 1381670
agcuuuggaacacaaauau

SEQ ID NO: 1381672 - RNA, 19 nt, Artificial Sequence
  Description of Artificial Sequence: Synthetic oligonucleotide
  Sense strand starting at position 3768 of SEQ ID NO: 1242913
cgaggguuugcguccugau

SEQ ID NO: 1381673 - RNA, 19 nt, Artificial Sequence
  Description of Artificial Sequence: Synthetic oligonucleotide
  Antisense strand to SEQ ID NO: 1381672
aucaggacgcaaacccucg

SEQ ID NO: 1381674 - RNA, 19 nt, Artificial Sequence
  Description of Artificial Sequence: Synthetic oligonucleotide
  Sense strand starting at position 3771 of SEQ ID NO: 1242913
ggguuugcguccugauuug

SEQ ID NO: 1381675 - RNA, 19 nt, Artificial Sequence
  Description of Artificial Sequence: Synthetic oligonucleotide
  Antisense strand to SEQ ID NO: 1381674
caaaucaggacgcaaaccc

SEQ ID NO: 1381676 - RNA, 19 nt, Artificial Sequence
  Description of Artificial Sequence: Synthetic oligonucleotide
  Sense strand starting at position 3899 of SEQ ID NO: 1242913
ucggcauccuuaucuguaa

SEQ ID NO: 1381677 - RNA, 19 nt, Artificial Sequence
  Description of Artificial Sequence: Synthetic oligonucleotide
  Antisense strand to SEQ ID NO: 1381676
uuacagauaaggaugccga

SEQ ID NO: 1381678 - RNA, 19 nt, Artificial Sequence
  Description of Artificial Sequence: Synthetic oligonucleotide
  Sense strand starting at position 3900 of SEQ ID NO: 1242913
cggcauccuuaucuguaaa

SEQ ID NO: 1381679 - RNA, 19 nt, Artificial Sequence
  Description of Artificial Sequence: Synthetic oligonucleotide
  Antisense strand to SEQ ID NO: 1381678
uuuacagauaaggaugccg

SEQ ID NO: 1381680 - RNA, 19 nt, Artificial Sequence
  Description of Artificial Sequence: Synthetic oligonucleotide
  Sense strand starting at position 3981 of SEQ ID NO: 1242913
agcuuuacagauugcagaa

SEQ ID NO: 1381681 - RNA, 19 nt, Artificial Sequence
  Description of Artificial Sequence: Synthetic oligonucleotide
  Antisense strand to SEQ ID NO: 1381680
uucugcaaucuguaaagcu

SEQ ID NO: 1381682 - RNA, 19 nt, Artificial Sequence
  Description of Artificial Sequence: Synthetic oligonucleotide
  Sense strand starting at position 134 of SEQ ID NO: 1242914
cgucgaggucauuagaaca

SEQ ID NO: 1381683 - RNA, 19 nt, Artificial Sequence
  Description of Artificial Sequence: Synthetic oligonucleotide
  Antisense strand to SEQ ID NO: 1381682
uguucuaaugaccucgacg

SEQ ID NO: 1381684 - RNA, 19 nt, Artificial Sequence
  Description of Artificial Sequence: Synthetic oligonucleotide
  Sense strand starting at position 315 of SEQ ID NO: 1242914
uguguaugggaacgaaauc

SEQ ID NO: 1381685 - RNA, 19 nt, Artificial Sequence
  Description of Artificial Sequence: Synthetic oligonucleotide
  Antisense strand to SEQ ID NO: 1381684
gauuucguucccauacaca

SEQ ID NO: 1381686 - RNA, 19 nt, Artificial Sequence
  Description of Artificial Sequence: Synthetic oligonucleotide
  Sense strand starting at position 326 of SEQ ID NO: 1242914
acgaaauccucaucugcua

SEQ ID NO: 1381687 - RNA, 19 nt, Artificial Sequence
  Description of Artificial Sequence: Synthetic oligonucleotide
  Antisense strand to SEQ ID NO: 1381686
uagcagaugaggauuucgu

SEQ ID NO: 1381688 - RNA, 19 nt, Artificial Sequence
  Description of Artificial Sequence: Synthetic oligonucleotide
  Sense strand starting at position 333 of SEQ ID NO: 1242914
ccucaucugcuaggaugaa

SEQ ID NO: 1381689 - RNA, 19 nt, Artificial Sequence
  Description of Artificial Sequence: Synthetic oligonucleotide
  Antisense strand to SEQ ID NO: 1381688
uucauccuagcagaugagg

SEQ ID NO: 1381690 - RNA, 19 nt, Artificial Sequence
  Description of Artificial Sequence: Synthetic oligonucleotide
  Sense strand starting at position 457 of SEQ ID NO: 1242914
acaugagcccuguggacuu

SEQ ID NO: 1381691 - RNA, 19 nt, Artificial Sequence
  Description of Artificial Sequence: Synthetic oligonucleotide
  Antisense strand to SEQ ID NO: 1381690
aaguccacagggcucaugu

SEQ ID NO: 1381692 - RNA, 19 nt, Artificial Sequence
  Description of Artificial Sequence: Synthetic oligonucleotide
  Sense strand starting at position 855 of SEQ ID NO: 1242914
gguuauguauuacuuugau

SEQ ID NO: 1381693 - RNA, 19 nt, Artificial Sequence
  Description of Artificial Sequence: Synthetic oligonucleotide
  Antisense strand to SEQ ID NO: 1381692
aucaaaguaauacauaacc

SEQ ID NO: 1381694 - RNA, 19 nt, Artificial Sequence
  Description of Artificial Sequence: Synthetic oligonucleotide
  Sense strand starting at position 963 of SEQ ID NO: 1242914
agccauguuccugggacaa

SEQ ID NO: 1381695 - RNA, 19 nt, Artificial Sequence
  Description of Artificial Sequence: Synthetic oligonucleotide
  Antisense strand to SEQ ID NO: 1381694
uugucccaggaacauggcu

SEQ ID NO: 1381696 - RNA, 19 nt, Artificial Sequence
  Description of Artificial Sequence: Synthetic oligonucleotide
  Sense strand starting at position 1065 of SEQ ID NO: 1242914
cugguugcugaaggauuaa

SEQ ID NO: 1381697 - RNA, 19 nt, Artificial Sequence
  Description of Artificial Sequence: Synthetic oligonucleotide
  Antisense strand to SEQ ID NO: 1381696
uuaauccuucagcaaccag

SEQ ID NO: 1381698 - RNA, 19 nt, Artificial Sequence
  Description of Artificial Sequence: Synthetic oligonucleotide
  Sense strand starting at position 1111 of SEQ ID NO: 1242914
ccaugcugccacuaaguaa

SEQ ID NO: 1381699 - RNA, 19 nt, Artificial Sequence
  Description of Artificial Sequence: Synthetic oligonucleotide
  Antisense strand to SEQ ID NO: 1381698
uuacuuaguggcagcaugg

SEQ ID NO: 1381700 - RNA, 19 nt, Artificial Sequence
  Description of Artificial Sequence: Synthetic oligonucleotide
  Sense strand starting at position 1146 of SEQ ID NO: 1242914
cugauccugucaucauuau

SEQ ID NO: 1381701 - RNA, 19 nt, Artificial Sequence
  Description of Artificial Sequence: Synthetic oligonucleotide
  Antisense strand to SEQ ID NO: 1381700
auaaugaugacaggaucag

SEQ ID NO: 1381702 - RNA, 19 nt, Artificial Sequence
  Description of Artificial Sequence: Synthetic oligonucleotide
  Sense strand starting at position 1275 of SEQ ID NO: 1242914
ggagccaaucuuuaagcau

SEQ ID NO: 1381703 - RNA, 19 nt, Artificial Sequence
  Description of Artificial Sequence: Synthetic oligonucleotide
  Antisense strand to SEQ ID NO: 1381702
augcuuaaagauuggcucc

SEQ ID NO: 1381704 - RNA, 19 nt, Artificial Sequence
  Description of Artificial Sequence: Synthetic oligonucleotide
  Sense strand starting at position 1323 of SEQ ID NO: 1242914
gacacuaauuuggacaguu

SEQ ID NO: 1381705 - RNA, 19 nt, Artificial Sequence
  Description of Artificial Sequence: Synthetic oligonucleotide
  Antisense strand to SEQ ID NO: 1381704
aacuguccaaauuaguguc

SEQ ID NO: 1381706 - RNA, 19 nt, Artificial Sequence
  Description of Artificial Sequence: Synthetic oligonucleotide
  Sense strand starting at position 2140 of SEQ ID NO: 1242914
cuggauuguguucauguga

SEQ ID NO: 1381707 - RNA, 19 nt, Artificial Sequence
  Description of Artificial Sequence: Synthetic oligonucleotide
  Antisense strand to SEQ ID NO: 1381706
ucacaugaacacaauccag

SEQ ID NO: 1381708 - RNA, 19 nt, Artificial Sequence
  Description of Artificial Sequence: Synthetic oligonucleotide
  Sense strand starting at position 2288 of SEQ ID NO: 1242914
ccguuaaucuuaguauuug

SEQ ID NO: 1381709 - RNA, 19 nt, Artificial Sequence
  Description of Artificial Sequence: Synthetic oligonucleotide
  Antisense strand to SEQ ID NO: 1381708
caaauacuaagauuaacgg

SEQ ID NO: 1381710 - RNA, 19 nt, Artificial Sequence
  Description of Artificial Sequence: Synthetic oligonucleotide
  Sense strand starting at position 2351 of SEQ ID NO: 1242914
gaguuauuauggucuagau

SEQ ID NO: 1381711 - RNA, 19 nt, Artificial Sequence
  Description of Artificial Sequence: Synthetic oligonucleotide
  Antisense strand to SEQ ID NO: 1381710
aucuagaccauaauaacuc

SEQ ID NO: 1381712 - RNA, 19 nt, Artificial Sequence
  Description of Artificial Sequence: Synthetic oligonucleotide
  Sense strand starting at position 2353 of SEQ ID NO: 1242914
guuauuauggucuagauga

SEQ ID NO: 1381713 - RNA, 19 nt, Artificial Sequence
  Description of Artificial Sequence: Synthetic oligonucleotide
  Antisense strand to SEQ ID NO: 1381712
ucaucuagaccauaauaac

SEQ ID NO: 1381714 - RNA, 19 nt, Artificial Sequence
  Description of Artificial Sequence: Synthetic oligonucleotide
  Sense strand starting at position 2461 of SEQ ID NO: 1242914
uaagguugugaguauacuu

SEQ ID NO: 1381715 - RNA, 19 nt, Artificial Sequence
  Description of Artificial Sequence: Synthetic oligonucleotide
  Antisense strand to SEQ ID NO: 1381714
aaguauacucacaaccuua

SEQ ID NO: 1381716 - RNA, 19 nt, Artificial Sequence
  Description of Artificial Sequence: Synthetic oligonucleotide
  Sense strand starting at position 2552 of SEQ ID NO: 1242914
auccaauugguccaguuua

SEQ ID NO: 1381717 - RNA, 19 nt, Artificial Sequence
  Description of Artificial Sequence: Synthetic oligonucleotide
  Antisense strand to SEQ ID NO: 1381716
uaaacuggaccaauuggau

SEQ ID NO: 1381718 - RNA, 19 nt, Artificial Sequence
  Description of Artificial Sequence: Synthetic oligonucleotide
  Sense strand starting at position 2564 of SEQ ID NO: 1242914
caguuuauugauuggucca

SEQ ID NO: 1381719 - RNA, 19 nt, Artificial Sequence
  Description of Artificial Sequence: Synthetic oligonucleotide
  Antisense strand to SEQ ID NO: 1381718
uggaccaaucaauaaacug

SEQ ID NO: 1381720 - RNA, 19 nt, Artificial Sequence
  Description of Artificial Sequence: Synthetic oligonucleotide
  Sense strand starting at position 2567 of SEQ ID NO: 1242914
uuuauugauugguccaggu

SEQ ID NO: 1381721 - RNA, 19 nt, Artificial Sequence
  Description of Artificial Sequence: Synthetic oligonucleotide
  Antisense strand to SEQ ID NO: 1381720
accuggaccaaucaauaaa

SEQ ID NO: 1381722 - RNA, 19 nt, Artificial Sequence
  Description of Artificial Sequence: Synthetic oligonucleotide
  Sense strand starting at position 2569 of SEQ ID NO: 1242914
uauugauugguccagguac

SEQ ID NO: 1381723 - RNA, 19 nt, Artificial Sequence
  Description of Artificial Sequence: Synthetic oligonucleotide
  Antisense strand to SEQ ID NO: 1381722
guaccuggaccaaucaaua

SEQ ID NO: 1381724 - RNA, 19 nt, Artificial Sequence
  Description of Artificial Sequence: Synthetic oligonucleotide
  Sense strand starting at position 2586 of SEQ ID NO: 1242914
acgccacaauggucauaga

SEQ ID NO: 1381725 - RNA, 19 nt, Artificial Sequence
  Description of Artificial Sequence: Synthetic oligonucleotide
  Antisense strand to SEQ ID NO: 1381724
ucuaugaccauuguggcgu

SEQ ID NO: 1381726 - RNA, 19 nt, Artificial Sequence
  Description of Artificial Sequence: Synthetic oligonucleotide
  Sense strand starting at position 2587 of SEQ ID NO: 1242914
cgccacaauggucauagau

SEQ ID NO: 1381727 - RNA, 19 nt, Artificial Sequence
  Description of Artificial Sequence: Synthetic oligonucleotide
  Antisense strand to SEQ ID NO: 1381726
aucuaugaccauuguggcg

SEQ ID NO: 1381728 - RNA, 19 nt, Artificial Sequence
  Description of Artificial Sequence: Synthetic oligonucleotide
  Sense strand starting at position 2596 of SEQ ID NO: 1242914
ggucauagaucuccagcca

SEQ ID NO: 1381729 - RNA, 19 nt, Artificial Sequence
  Description of Artificial Sequence: Synthetic oligonucleotide
  Antisense strand to SEQ ID NO: 1381728
uggcuggagaucuaugacc

SEQ ID NO: 1381730 - RNA, 19 nt, Artificial Sequence
  Description of Artificial Sequence: Synthetic oligonucleotide
  Sense strand starting at position 2729 of SEQ ID NO: 1242914
cggcauauuguugagagau

SEQ ID NO: 1381731 - RNA, 19 nt, Artificial Sequence
  Description of Artificial Sequence: Synthetic oligonucleotide
  Antisense strand to SEQ ID NO: 1381730
aucucucaacaauaugccg

SEQ ID NO: 1381732 - RNA, 19 nt, Artificial Sequence
  Description of Artificial Sequence: Synthetic oligonucleotide
  Sense strand starting at position 2735 of SEQ ID NO: 1242914
auuguugagagaugcacua

SEQ ID NO: 1381733 - RNA, 19 nt, Artificial Sequence
  Description of Artificial Sequence: Synthetic oligonucleotide
  Antisense strand to SEQ ID NO: 1381732
uagugcaucucucaacaau

SEQ ID NO: 1381734 - RNA, 19 nt, Artificial Sequence
  Description of Artificial Sequence: Synthetic oligonucleotide
  Sense strand starting at position 2755 of SEQ ID NO: 1242914
agaacuuacuucgucuaga

SEQ ID NO: 1381735 - RNA, 19 nt, Artificial Sequence
  Description of Artificial Sequence: Synthetic oligonucleotide
  Antisense strand to SEQ ID NO: 1381734
ucuagacgaaguaaguucu

SEQ ID NO: 1381736 - RNA, 19 nt, Artificial Sequence
  Description of Artificial Sequence: Synthetic oligonucleotide
  Sense strand starting at position 2756 of SEQ ID NO: 1242914
gaacuuacuucgucuagag

SEQ ID NO: 1381737 - RNA, 19 nt, Artificial Sequence
  Description of Artificial Sequence: Synthetic oligonucleotide
  Antisense strand to SEQ ID NO: 1381736
cucuagacgaaguaaguuc

SEQ ID NO: 1381738 - RNA, 19 nt, Artificial Sequence
  Description of Artificial Sequence: Synthetic oligonucleotide
  Sense strand starting at position 2758 of SEQ ID NO: 1242914
acuuacuucgucuagagca

SEQ ID NO: 1381739 - RNA, 19 nt, Artificial Sequence
  Description of Artificial Sequence: Synthetic oligonucleotide
  Antisense strand to SEQ ID NO: 1381738
ugcucuagacgaaguaagu

SEQ ID NO: 1381740 - RNA, 19 nt, Artificial Sequence
  Description of Artificial Sequence: Synthetic oligonucleotide
  Sense strand starting at position 2817 of SEQ ID NO: 1242914
aagggagguguguauuaac

SEQ ID NO: 1381741 - RNA, 19 nt, Artificial Sequence
  Description of Artificial Sequence: Synthetic oligonucleotide
  Antisense strand to SEQ ID NO: 1381740
guuaauacacaccucccuu

SEQ ID NO: 1381742 - RNA, 19 nt, Artificial Sequence
  Description of Artificial Sequence: Synthetic oligonucleotide
  Sense strand starting at position 2824 of SEQ ID NO: 1242914
guguguauuaaccauggau

SEQ ID NO: 1381743 - RNA, 19 nt, Artificial Sequence
  Description of Artificial Sequence: Synthetic oligonucleotide
  Antisense strand to SEQ ID NO: 1381742
auccaugguuaauacacac

SEQ ID NO: 1381744 - RNA, 19 nt, Artificial Sequence
  Description of Artificial Sequence: Synthetic oligonucleotide
  Sense strand starting at position 3117 of SEQ ID NO: 1242914
agagcuugccaacauuauu

SEQ ID NO: 1381745 - RNA, 19 nt, Artificial Sequence
  Description of Artificial Sequence: Synthetic oligonucleotide
  Antisense strand to SEQ ID NO: 1381744
aauaauguuggcaagcucu

SEQ ID NO: 1381746 - RNA, 19 nt, Artificial Sequence
  Description of Artificial Sequence: Synthetic oligonucleotide
  Sense strand starting at position 3323 of SEQ ID NO: 1242914
gccacuaacucauugauug

SEQ ID NO: 1381747 - RNA, 19 nt, Artificial Sequence
  Description of Artificial Sequence: Synthetic oligonucleotide
  Antisense strand to SEQ ID NO: 1381746
caaucaaugaguuaguggc

SEQ ID NO: 1381748 - RNA, 19 nt, Artificial Sequence
  Description of Artificial Sequence: Synthetic oligonucleotide
  Sense strand starting at position 3614 of SEQ ID NO: 1242914
gaaguauagugaguaguca

SEQ ID NO: 1381749 - RNA, 19 nt, Artificial Sequence
  Description of Artificial Sequence: Synthetic oligonucleotide
  Antisense strand to SEQ ID NO: 1381748
ugacuacucacuauacuuc

SEQ ID NO: 1381750 - RNA, 19 nt, Artificial Sequence
  Description of Artificial Sequence: Synthetic oligonucleotide
  Sense strand starting at position 3615 of SEQ ID NO: 1242914
aaguauagugaguagucaa

SEQ ID NO: 1381751 - RNA, 19 nt, Artificial Sequence
  Description of Artificial Sequence: Synthetic oligonucleotide
  Antisense strand to SEQ ID NO: 1381750
uugacuacucacuauacuu

SEQ ID NO: 1381752 - RNA, 19 nt, Artificial Sequence
  Description of Artificial Sequence: Synthetic oligonucleotide
  Sense strand starting at position 3663 of SEQ ID NO: 1242914
gguggauggacaugucaug

SEQ ID NO: 1381753 - RNA, 19 nt, Artificial Sequence
  Description of Artificial Sequence: Synthetic oligonucleotide
  Antisense strand to SEQ ID NO: 1381752
caugacauguccauccacc

SEQ ID NO: 1381754 - RNA, 19 nt, Artificial Sequence
  Description of Artificial Sequence: Synthetic oligonucleotide
  Sense strand starting at position 3831 of SEQ ID NO: 1242914
gaggcaguuauaugaaggu

SEQ ID NO: 1381755 - RNA, 19 nt, Artificial Sequence
  Description of Artificial Sequence: Synthetic oligonucleotide
  Antisense strand to SEQ ID NO: 1381754
accuucauauaacugccuc

SEQ ID NO: 1381756 - RNA, 19 nt, Artificial Sequence
  Description of Artificial Sequence: Synthetic oligonucleotide
  Sense strand starting at position 3882 of SEQ ID NO: 1242914
ugugauacaguccaaugua

SEQ ID NO: 1381757 - RNA, 19 nt, Artificial Sequence
  Description of Artificial Sequence: Synthetic oligonucleotide
  Antisense strand to SEQ ID NO: 1381756
uacauuggacuguaucaca

SEQ ID NO: 1381758 - RNA, 19 nt, Artificial Sequence
  Description of Artificial Sequence: Synthetic oligonucleotide
  Sense strand starting at position 3952 of SEQ ID NO: 1242914
auauaugguacuggaugua

SEQ ID NO: 1381759 - RNA, 19 nt, Artificial Sequence
  Description of Artificial Sequence: Synthetic oligonucleotide
  Antisense strand to SEQ ID NO: 1381758
uacauccaguaccauauau

SEQ ID NO: 1381760 - RNA, 19 nt, Artificial Sequence
  Description of Artificial Sequence: Synthetic oligonucleotide
  Sense strand starting at position 3962 of SEQ ID NO: 1242914
cuggauguaguuugagaca

SEQ ID NO: 1381761 - RNA, 19 nt, Artificial Sequence
  Description of Artificial Sequence: Synthetic oligonucleotide
  Antisense strand to SEQ ID NO: 1381760
ugucucaaacuacauccag

SEQ ID NO: 1381762 - RNA, 19 nt, Artificial Sequence
  Description of Artificial Sequence: Synthetic oligonucleotide
  Sense strand starting at position 126 of SEQ ID NO: 1242915
uuuccaaauguccggaaua

SEQ ID NO: 1381763 - RNA, 19 nt, Artificial Sequence
  Description of Artificial Sequence: Synthetic oligonucleotide
  Antisense strand to SEQ ID NO: 1381762
uauuccggacauuuggaaa

SEQ ID NO: 1381764 - RNA, 19 nt, Artificial Sequence
  Description of Artificial Sequence: Synthetic oligonucleotide
  Sense strand starting at position 128 of SEQ ID NO: 1242915
uccaaauguccggaauaca

SEQ ID NO: 1381765 - RNA, 19 nt, Artificial Sequence
  Description of Artificial Sequence: Synthetic oligonucleotide
  Antisense strand to SEQ ID NO: 1381764
uguauuccggacauuugga

SEQ ID NO: 1381766 - RNA, 19 nt, Artificial Sequence
  Description of Artificial Sequence: Synthetic oligonucleotide
  Sense strand starting at position 250 of SEQ ID NO: 1242915
uuaggauccuaguuugaug

SEQ ID NO: 1381767 - RNA, 19 nt, Artificial Sequence
  Description of Artificial Sequence: Synthetic oligonucleotide
  Antisense strand to SEQ ID NO: 1381766
caucaaacuaggauccuaa

SEQ ID NO: 1381768 - RNA, 19 nt, Artificial Sequence
  Description of Artificial Sequence: Synthetic oligonucleotide
  Sense strand starting at position 252 of SEQ ID NO: 1242915
aggauccuaguuugaugaa

SEQ ID NO: 1381769 - RNA, 19 nt, Artificial Sequence
  Description of Artificial Sequence: Synthetic oligonucleotide
  Antisense strand to SEQ ID NO: 1381768
uucaucaaacuaggauccu

SEQ ID NO: 1381770 - RNA, 19 nt, Artificial Sequence
  Description of Artificial Sequence: Synthetic oligonucleotide
  Sense strand starting at position 261 of SEQ ID NO: 1242915
guuugaugaaacgacaucu

SEQ ID NO: 1381771 - RNA, 19 nt, Artificial Sequence
  Description of Artificial Sequence: Synthetic oligonucleotide
  Antisense strand to SEQ ID NO: 1381770
agaugucguuucaucaaac

SEQ ID NO: 1381772 - RNA, 19 nt, Artificial Sequence
  Description of Artificial Sequence: Synthetic oligonucleotide
  Sense strand starting at position 319 of SEQ ID NO: 1242915
guucgacagaguuaggaau

SEQ ID NO: 1381773 - RNA, 19 nt, Artificial Sequence
  Description of Artificial Sequence: Synthetic oligonucleotide
  Antisense strand to SEQ ID NO: 1381772
auuccuaacucugucgaac

SEQ ID NO: 1381774 - RNA, 19 nt, Artificial Sequence
  Description of Artificial Sequence: Synthetic oligonucleotide
  Sense strand starting at position 330 of SEQ ID NO: 1242915
uuaggaauauuagcuguau

SEQ ID NO: 1381775 - RNA, 19 nt, Artificial Sequence
  Description of Artificial Sequence: Synthetic oligonucleotide
  Antisense strand to SEQ ID NO: 1381774
auacagcuaauauuccuaa

SEQ ID NO: 1381776 - RNA, 19 nt, Artificial Sequence
  Description of Artificial Sequence: Synthetic oligonucleotide
  Sense strand starting at position 331 of SEQ ID NO: 1242915
uaggaauauuagcuguauc

SEQ ID NO: 1381777 - RNA, 19 nt, Artificial Sequence
  Description of Artificial Sequence: Synthetic oligonucleotide
  Antisense strand to SEQ ID NO: 1381776
gauacagcuaauauuccua

SEQ ID NO: 1381778 - RNA, 19 nt, Artificial Sequence
  Description of Artificial Sequence: Synthetic oligonucleotide
  Sense strand starting at position 354 of SEQ ID NO: 1242915
agaggacuaucccucuagu

SEQ ID NO: 1381779 - RNA, 19 nt, Artificial Sequence
  Description of Artificial Sequence: Synthetic oligonucleotide
  Antisense strand to SEQ ID NO: 1381778
acuagagggauaguccucu

SEQ ID NO: 1381780 - RNA, 19 nt, Artificial Sequence
  Description of Artificial Sequence: Synthetic oligonucleotide
  Sense strand starting at position 370 of SEQ ID NO: 1242915
agucguuaagcugaagaug

SEQ ID NO: 1381781 - RNA, 19 nt, Artificial Sequence
  Description of Artificial Sequence: Synthetic oligonucleotide
  Antisense strand to SEQ ID NO: 1381780
caucuucagcuuaacgacu

SEQ ID NO: 1381782 - RNA, 19 nt, Artificial Sequence
  Description of Artificial Sequence: Synthetic oligonucleotide
  Sense strand starting at position 567 of SEQ ID NO: 1242915
gcuugaacgccuuaaacaa

SEQ ID NO: 1381783 - RNA, 19 nt, Artificial Sequence
  Description of Artificial Sequence: Synthetic oligonucleotide
  Antisense strand to SEQ ID NO: 1381782
uuguuuaaggcguucaagc

SEQ ID NO: 1381784 - RNA, 19 nt, Artificial Sequence
  Description of Artificial Sequence: Synthetic oligonucleotide
  Sense strand starting at position 695 of SEQ ID NO: 1242915
cugucagauuugcucccaa

SEQ ID NO: 1381785 - RNA, 19 nt, Artificial Sequence
  Description of Artificial Sequence: Synthetic oligonucleotide
  Antisense strand to SEQ ID NO: 1381784
uugggagcaaaucugacag

SEQ ID NO: 1381786 - RNA, 19 nt, Artificial Sequence
  Description of Artificial Sequence: Synthetic oligonucleotide
  Sense strand starting at position 706 of SEQ ID NO: 1242915
gcucccaaacuuugagaau

SEQ ID NO: 1381787 - RNA, 19 nt, Artificial Sequence
  Description of Artificial Sequence: Synthetic oligonucleotide
  Antisense strand to SEQ ID NO: 1381786
auucucaaaguuugggagc

SEQ ID NO: 1381788 - RNA, 19 nt, Artificial Sequence
  Description of Artificial Sequence: Synthetic oligonucleotide
  Sense strand starting at position 715 of SEQ ID NO: 1242915
cuuugagaauugucauuau

SEQ ID NO: 1381789 - RNA, 19 nt, Artificial Sequence
  Description of Artificial Sequence: Synthetic oligonucleotide
  Antisense strand to SEQ ID NO: 1381788
auaaugacaauucucaaag

SEQ ID NO: 1381790 - RNA, 19 nt, Artificial Sequence
  Description of Artificial Sequence: Synthetic oligonucleotide
  Sense strand starting at position 718 of SEQ ID NO: 1242915
ugagaauugucauuauggu

SEQ ID NO: 1381791 - RNA, 19 nt, Artificial Sequence
  Description of Artificial Sequence: Synthetic oligonucleotide
  Antisense strand to SEQ ID NO: 1381790
accauaaugacaauucuca

SEQ ID NO: 1381792 - RNA, 19 nt, Artificial Sequence
  Description of Artificial Sequence: Synthetic oligonucleotide
  Sense strand starting at position 719 of SEQ ID NO: 1242915
gagaauugucauuaugguc

SEQ ID NO: 1381793 - RNA, 19 nt, Artificial Sequence
  Description of Artificial Sequence: Synthetic oligonucleotide
  Antisense strand to SEQ ID NO: 1381792
gaccauaaugacaauucuc

SEQ ID NO: 1381794 - RNA, 19 nt, Artificial Sequence
  Description of Artificial Sequence: Synthetic oligonucleotide
  Sense strand starting at position 1098 of SEQ ID NO: 1242915
cuaaguacgccaggcauuu

SEQ ID NO: 1381795 - RNA, 19 nt, Artificial Sequence
  Description of Artificial Sequence: Synthetic oligonucleotide
  Antisense strand to SEQ ID NO: 1381794
aaaugccuggcguacuuag

SEQ ID NO: 1381796 - RNA, 19 nt, Artificial Sequence
  Description of Artificial Sequence: Synthetic oligonucleotide
  Sense strand starting at position 1178 of SEQ ID NO: 1242915
cugaucuucggcgaggaga

SEQ ID NO: 1381797 - RNA, 19 nt, Artificial Sequence
  Description of Artificial Sequence: Synthetic oligonucleotide
  Antisense strand to SEQ ID NO: 1381796
ucuccucgccgaagaucag

SEQ ID NO: 1381798 - RNA, 19 nt, Artificial Sequence
  Description of Artificial Sequence: Synthetic oligonucleotide
  Sense strand starting at position 1191 of SEQ ID NO: 1242915
aggagacacucugcauaga

SEQ ID NO: 1381799 - RNA, 19 nt, Artificial Sequence
  Description of Artificial Sequence: Synthetic oligonucleotide
  Antisense strand to SEQ ID NO: 1381798
ucuaugcagagugucuccu

SEQ ID NO: 1381800 - RNA, 19 nt, Artificial Sequence
  Description of Artificial Sequence: Synthetic oligonucleotide
  Sense strand starting at position 1982 of SEQ ID NO: 1242915
cggcgccgcguauuuaaau

SEQ ID NO: 1381801 - RNA, 19 nt, Artificial Sequence
  Description of Artificial Sequence: Synthetic oligonucleotide
  Antisense strand to SEQ ID NO: 1381800
auuuaaauacgcggcgccg

SEQ ID NO: 1381802 - RNA, 19 nt, Artificial Sequence
  Description of Artificial Sequence: Synthetic oligonucleotide
  Sense strand starting at position 2270 of SEQ ID NO: 1242915
guagaauaugucgccgguu

SEQ ID NO: 1381803 - RNA, 19 nt, Artificial Sequence
  Description of Artificial Sequence: Synthetic oligonucleotide
  Antisense strand to SEQ ID NO: 1381802
aaccggcgacauauucuac

SEQ ID NO: 1381804 - RNA, 19 nt, Artificial Sequence
  Description of Artificial Sequence: Synthetic oligonucleotide
  Sense strand starting at position 2311 of SEQ ID NO: 1242915
uuuauauguagaggugaac

SEQ ID NO: 1381805 - RNA, 19 nt, Artificial Sequence
  Description of Artificial Sequence: Synthetic oligonucleotide
  Antisense strand to SEQ ID NO: 1381804
guucaccucuacauauaaa

SEQ ID NO: 1381806 - RNA, 19 nt, Artificial Sequence
  Description of Artificial Sequence: Synthetic oligonucleotide
  Sense strand starting at position 2320 of SEQ ID NO: 1242915
agaggugaacuuugcacaa

SEQ ID NO: 1381807 - RNA, 19 nt, Artificial Sequence
  Description of Artificial Sequence: Synthetic oligonucleotide
  Antisense strand to SEQ ID NO: 1381806
uugugcaaaguucaccucu

SEQ ID NO: 1381808 - RNA, 19 nt, Artificial Sequence
  Description of Artificial Sequence: Synthetic oligonucleotide
  Sense strand starting at position 2399 of SEQ ID NO: 1242915
uuccaucugccucagaagu

SEQ ID NO: 1381809 - RNA, 19 nt, Artificial Sequence
  Description of Artificial Sequence: Synthetic oligonucleotide
  Antisense strand to SEQ ID NO: 1381808
acuucugaggcagauggaa

SEQ ID NO: 1381810 - RNA, 19 nt, Artificial Sequence
  Description of Artificial Sequence: Synthetic oligonucleotide
  Sense strand starting at position 2450 of SEQ ID NO: 1242915
uaggguuaagagcauaagu

SEQ ID NO: 1381811 - RNA, 19 nt, Artificial Sequence
  Description of Artificial Sequence: Synthetic oligonucleotide
  Antisense strand to SEQ ID NO: 1381810
acuuaugcucuuaacccua

SEQ ID NO: 1381812 - RNA, 19 nt, Artificial Sequence
  Description of Artificial Sequence: Synthetic oligonucleotide
  Sense strand starting at position 2452 of SEQ ID NO: 1242915
ggguuaagagcauaaguuc

SEQ ID NO: 1381813 - RNA, 19 nt, Artificial Sequence
  Description of Artificial Sequence: Synthetic oligonucleotide
  Antisense strand to SEQ ID NO: 1381812
gaacuuaugcucuuaaccc

SEQ ID NO: 1381814 - RNA, 19 nt, Artificial Sequence
  Description of Artificial Sequence: Synthetic oligonucleotide
  Sense strand starting at position 2536 of SEQ ID NO: 1242915
aaaguaccauuggcaagau

SEQ ID NO: 1381815 - RNA, 19 nt, Artificial Sequence
  Description of Artificial Sequence: Synthetic oligonucleotide
  Antisense strand to SEQ ID NO: 1381814
aucuugccaaugguacuuu

SEQ ID NO: 1381816 - RNA, 19 nt, Artificial Sequence
  Description of Artificial Sequence: Synthetic oligonucleotide
  Sense strand starting at position 2713 of SEQ ID NO: 1242915
cuuugaggacucggguuaa

SEQ ID NO: 1381817 - RNA, 19 nt, Artificial Sequence
  Description of Artificial Sequence: Synthetic oligonucleotide
  Antisense strand to SEQ ID NO: 1381816
uuaacccgaguccucaaag

SEQ ID NO: 1381818 - RNA, 19 nt, Artificial Sequence
  Description of Artificial Sequence: Synthetic oligonucleotide
  Sense strand starting at position 2734 of SEQ ID NO: 1242915
cugugugucgguaacuguu

SEQ ID NO: 1381819 - RNA, 19 nt, Artificial Sequence
  Description of Artificial Sequence: Synthetic oligonucleotide
  Antisense strand to SEQ ID NO: 1381818
aacaguuaccgacacacag

SEQ ID NO: 1381820 - RNA, 19 nt, Artificial Sequence
  Description of Artificial Sequence: Synthetic oligonucleotide
  Sense strand starting at position 2799 of SEQ ID NO: 1242915
ccucccuguccuuaggaga

SEQ ID NO: 1381821 - RNA, 19 nt, Artificial Sequence
  Description of Artificial Sequence: Synthetic oligonucleotide
  Antisense strand to SEQ ID NO: 1381820
ucuccuaaggacagggagg

SEQ ID NO: 1381822 - RNA, 19 nt, Artificial Sequence
  Description of Artificial Sequence: Synthetic oligonucleotide
  Sense strand starting at position 2818 of SEQ ID NO: 1242915
gaggauauguucccaaagc

SEQ ID NO: 1381823 - RNA, 19 nt, Artificial Sequence
  Description of Artificial Sequence: Synthetic oligonucleotide
  Antisense strand to SEQ ID NO: 1381822
gcuuugggaacauauccuc

SEQ ID NO: 1381824 - RNA, 19 nt, Artificial Sequence
  Description of Artificial Sequence: Synthetic oligonucleotide
  Sense strand starting at position 3248 of SEQ ID NO: 1242915
gacugaagauauucuguga

SEQ ID NO: 1381825 - RNA, 19 nt, Artificial Sequence
  Description of Artificial Sequence: Synthetic oligonucleotide
  Antisense strand to SEQ ID NO: 1381824
ucacagaauaucuucaguc

SEQ ID NO: 1381826 - RNA, 19 nt, Artificial Sequence
  Description of Artificial Sequence: Synthetic oligonucleotide
  Sense strand starting at position 3251 of SEQ ID NO: 1242915
ugaagauauucugugagua

SEQ ID NO: 1381827 - RNA, 19 nt, Artificial Sequence
  Description of Artificial Sequence: Synthetic oligonucleotide
  Antisense strand to SEQ ID NO: 1381826
uacucacagaauaucuuca

SEQ ID NO: 1381828 - RNA, 19 nt, Artificial Sequence
  Description of Artificial Sequence: Synthetic oligonucleotide
  Sense strand starting at position 3252 of SEQ ID NO: 1242915
gaagauauucugugaguac

SEQ ID NO: 1381829 - RNA, 19 nt, Artificial Sequence
  Description of Artificial Sequence: Synthetic oligonucleotide
  Antisense strand to SEQ ID NO: 1381828
guacucacagaauaucuuc

SEQ ID NO: 1381830 - RNA, 19 nt, Artificial Sequence
  Description of Artificial Sequence: Synthetic oligonucleotide
  Sense strand starting at position 3255 of SEQ ID NO: 1242915
gauauucugugaguacaaa

SEQ ID NO: 1381831 - RNA, 19 nt, Artificial Sequence
  Description of Artificial Sequence: Synthetic oligonucleotide
  Antisense strand to SEQ ID NO: 1381830
uuuguacucacagaauauc

SEQ ID NO: 1381832 - RNA, 19 nt, Artificial Sequence
  Description of Artificial Sequence: Synthetic oligonucleotide
  Sense strand starting at position 3256 of SEQ ID NO: 1242915
auauucugugaguacaaau

SEQ ID NO: 1381833 - RNA, 19 nt, Artificial Sequence
  Description of Artificial Sequence: Synthetic oligonucleotide
  Antisense strand to SEQ ID NO: 1381832
auuuguacucacagaauau

SEQ ID NO: 1381834 - RNA, 19 nt, Artificial Sequence
  Description of Artificial Sequence: Synthetic oligonucleotide
  Sense strand starting at position 3471 of SEQ ID NO: 1242915
accagaaguccuugagaug

SEQ ID NO: 1381835 - RNA, 19 nt, Artificial Sequence
  Description of Artificial Sequence: Synthetic oligonucleotide
  Antisense strand to SEQ ID NO: 1381834
caucucaaggacuucuggu

SEQ ID NO: 1381836 - RNA, 19 nt, Artificial Sequence
  Description of Artificial Sequence: Synthetic oligonucleotide
  Sense strand starting at position 3472 of SEQ ID NO: 1242915
ccagaaguccuugagaugu

SEQ ID NO: 1381837 - RNA, 19 nt, Artificial Sequence
  Description of Artificial Sequence: Synthetic oligonucleotide
  Antisense strand to SEQ ID NO: 1381836
acaucucaaggacuucugg

SEQ ID NO: 1381838 - RNA, 19 nt, Artificial Sequence
  Description of Artificial Sequence: Synthetic oligonucleotide
  Sense strand starting at position 3566 of SEQ ID NO: 1242915
gcgugaucucugcucggag

SEQ ID NO: 1381839 - RNA, 19 nt, Artificial Sequence
  Description of Artificial Sequence: Synthetic oligonucleotide
  Antisense strand to SEQ ID NO: 1381838
cuccgagcagagaucacgc

SEQ ID NO: 1381840 - RNA, 19 nt, Artificial Sequence
  Description of Artificial Sequence: Synthetic oligonucleotide
  Sense strand starting at position 3976 of SEQ ID NO: 1242915
acacauggcuaucuugaaa

SEQ ID NO: 1381841 - RNA, 19 nt, Artificial Sequence
  Description of Artificial Sequence: Synthetic oligonucleotide
  Antisense strand to SEQ ID NO: 1381840
uuucaagauagccaugugu

SEQ ID NO: 1381842 - RNA, 19 nt, Artificial Sequence
  Description of Artificial Sequence: Synthetic oligonucleotide
  Sense strand starting at position 391 of SEQ ID NO: 1242916
ggccaugacuggugucuuu

SEQ ID NO: 1381843 - RNA, 19 nt, Artificial Sequence
  Description of Artificial Sequence: Synthetic oligonucleotide
  Antisense strand to SEQ ID NO: 1381842
aaagacaccagucauggcc

SEQ ID NO: 1381844 - RNA, 19 nt, Artificial Sequence
  Description of Artificial Sequence: Synthetic oligonucleotide
  Sense strand starting at position 402 of SEQ ID NO: 1242916
gugucuuuauaagagaaac

SEQ ID NO: 1381845 - RNA, 19 nt, Artificial Sequence
  Description of Artificial Sequence: Synthetic oligonucleotide
  Antisense strand to SEQ ID NO: 1381844
guuucucuuauaaagacac

SEQ ID NO: 1381846 - RNA, 19 nt, Artificial Sequence
  Description of Artificial Sequence: Synthetic oligonucleotide
  Sense strand starting at position 444 of SEQ ID NO: 1242916
ggacaaagaccgugugaag

SEQ ID NO: 1381847 - RNA, 19 nt, Artificial Sequence
  Description of Artificial Sequence: Synthetic oligonucleotide
  Antisense strand to SEQ ID NO: 1381846
cuucacacggucuuugucc

SEQ ID NO: 1381848 - RNA, 19 nt, Artificial Sequence
  Description of Artificial Sequence: Synthetic oligonucleotide
  Sense strand starting at position 1112 of SEQ ID NO: 1242916
ccgcuuugcagacgggaau

SEQ ID NO: 1381849 - RNA, 19 nt, Artificial Sequence
  Description of Artificial Sequence: Synthetic oligonucleotide
  Antisense strand to SEQ ID NO: 1381848
auucccgucugcaaagcgg

SEQ ID NO: 1381850 - RNA, 19 nt, Artificial Sequence
  Description of Artificial Sequence: Synthetic oligonucleotide
  Sense strand starting at position 1203 of SEQ ID NO: 1242916
guaggaaccuuucuagcuu

SEQ ID NO: 1381851 - RNA, 19 nt, Artificial Sequence
  Description of Artificial Sequence: Synthetic oligonucleotide
  Antisense strand to SEQ ID NO: 1381850
aagcuagaaagguuccuac

SEQ ID NO: 1381852 - RNA, 19 nt, Artificial Sequence
  Description of Artificial Sequence: Synthetic oligonucleotide
  Sense strand starting at position 1244 of SEQ ID NO: 1242916
aguguucccuucuguaaag

SEQ ID NO: 1381853 - RNA, 19 nt, Artificial Sequence
  Description of Artificial Sequence: Synthetic oligonucleotide
  Antisense strand to SEQ ID NO: 1381852
cuuuacagaagggaacacu

SEQ ID NO: 1381854 - RNA, 19 nt, Artificial Sequence
  Description of Artificial Sequence: Synthetic oligonucleotide
  Sense strand starting at position 1245 of SEQ ID NO: 1242916
guguucccuucuguaaagu

SEQ ID NO: 1381855 - RNA, 19 nt, Artificial Sequence
  Description of Artificial Sequence: Synthetic oligonucleotide
  Antisense strand to SEQ ID NO: 1381854
acuuuacagaagggaacac

SEQ ID NO: 1381856 - RNA, 19 nt, Artificial Sequence
  Description of Artificial Sequence: Synthetic oligonucleotide
  Sense strand starting at position 1328 of SEQ ID NO: 1242916
gggugacucugcucuugga

SEQ ID NO: 1381857 - RNA, 19 nt, Artificial Sequence
  Description of Artificial Sequence: Synthetic oligonucleotide
  Antisense strand to SEQ ID NO: 1381856
uccaagagcagagucaccc

SEQ ID NO: 1381858 - RNA, 19 nt, Artificial Sequence
  Description of Artificial Sequence: Synthetic oligonucleotide
  Sense strand starting at position 2061 of SEQ ID NO: 1242916
ucgggcuguacucaugaca

SEQ ID NO: 1381859 - RNA, 19 nt, Artificial Sequence
  Description of Artificial Sequence: Synthetic oligonucleotide
  Antisense strand to SEQ ID NO: 1381858
ugucaugaguacagcccga

SEQ ID NO: 1381860 - RNA, 19 nt, Artificial Sequence
  Description of Artificial Sequence: Synthetic oligonucleotide
  Sense strand starting at position 2111 of SEQ ID NO: 1242916
gagguugucuccuggguag

SEQ ID NO: 1381861 - RNA, 19 nt, Artificial Sequence
  Description of Artificial Sequence: Synthetic oligonucleotide
  Antisense strand to SEQ ID NO: 1381860
cuacccaggagacaaccuc

SEQ ID NO: 1381862 - RNA, 19 nt, Artificial Sequence
  Description of Artificial Sequence: Synthetic oligonucleotide
  Sense strand starting at position 2199 of SEQ ID NO: 1242916
gcaucugcuucccaugagu

SEQ ID NO: 1381863 - RNA, 19 nt, Artificial Sequence
  Description of Artificial Sequence: Synthetic oligonucleotide
  Antisense strand to SEQ ID NO: 1381862
acucaugggaagcagaugc

SEQ ID NO: 1381864 - RNA, 19 nt, Artificial Sequence
  Description of Artificial Sequence: Synthetic oligonucleotide
  Sense strand starting at position 2201 of SEQ ID NO: 1242916
aucugcuucccaugagucu

SEQ ID NO: 1381865 - RNA, 19 nt, Artificial Sequence
  Description of Artificial Sequence: Synthetic oligonucleotide
  Antisense strand to SEQ ID NO: 1381864
agacucaugggaagcagau

SEQ ID NO: 1381866 - RNA, 19 nt, Artificial Sequence
  Description of Artificial Sequence: Synthetic oligonucleotide
  Sense strand starting at position 2408 of SEQ ID NO: 1242916
accgcuccuggcuaauuaa

SEQ ID NO: 1381867 - RNA, 19 nt, Artificial Sequence
  Description of Artificial Sequence: Synthetic oligonucleotide
  Antisense strand to SEQ ID NO: 1381866
uuaauuagccaggagcggu

SEQ ID NO: 1381868 - RNA, 19 nt, Artificial Sequence
  Description of Artificial Sequence: Synthetic oligonucleotide
  Sense strand starting at position 3431 of SEQ ID NO: 1242916
gccuguucccaacaagauu

SEQ ID NO: 1381869 - RNA, 19 nt, Artificial Sequence
  Description of Artificial Sequence: Synthetic oligonucleotide
  Antisense strand to SEQ ID NO: 1381868
aaucuuguugggaacaggc

SEQ ID NO: 1381870 - RNA, 19 nt, Artificial Sequence
  Description of Artificial Sequence: Synthetic oligonucleotide
  Sense strand starting at position 3461 of SEQ ID NO: 1242916
gccagaucucccgggaacu

SEQ ID NO: 1381871 - RNA, 19 nt, Artificial Sequence
  Description of Artificial Sequence: Synthetic oligonucleotide
  Antisense strand to SEQ ID NO: 1381870
aguucccgggagaucuggc

SEQ ID NO: 1381872 - RNA, 19 nt, Artificial Sequence
  Description of Artificial Sequence: Synthetic oligonucleotide
  Sense strand starting at position 3478 of SEQ ID NO: 1242916
cuggcuagccguguccuaa

SEQ ID NO: 1381873 - RNA, 19 nt, Artificial Sequence
  Description of Artificial Sequence: Synthetic oligonucleotide
  Antisense strand to SEQ ID NO: 1381872
uuaggacacggcuagccag

SEQ ID NO: 1381874 - RNA, 19 nt, Artificial Sequence
  Description of Artificial Sequence: Synthetic oligonucleotide
  Sense strand starting at position 3580 of SEQ ID NO: 1242916
aggagcauccucugaaaug

SEQ ID NO: 1381875 - RNA, 19 nt, Artificial Sequence
  Description of Artificial Sequence: Synthetic oligonucleotide
  Antisense strand to SEQ ID NO: 1381874
cauuucagaggaugcuccu

SEQ ID NO: 1381876 - RNA, 19 nt, Artificial Sequence
  Description of Artificial Sequence: Synthetic oligonucleotide
  Sense strand starting at position 3809 of SEQ ID NO: 1242916
agcuguaucuggcgguuaa

SEQ ID NO: 1381877 - RNA, 19 nt, Artificial Sequence
  Description of Artificial Sequence: Synthetic oligonucleotide
  Antisense strand to SEQ ID NO: 1381876
uuaaccgccagauacagcu

SEQ ID NO: 1381878 - RNA, 19 nt, Artificial Sequence
  Description of Artificial Sequence: Synthetic oligonucleotide
  Sense strand starting at position 3810 of SEQ ID NO: 1242916
gcuguaucuggcgguuaau

SEQ ID NO: 1381879 - RNA, 19 nt, Artificial Sequence
  Description of Artificial Sequence: Synthetic oligonucleotide
  Antisense strand to SEQ ID NO: 1381878
auuaaccgccagauacagc

SEQ ID NO: 1381880 - RNA, 19 nt, Artificial Sequence
  Description of Artificial Sequence: Synthetic oligonucleotide
  Sense strand starting at position 3813 of SEQ ID NO: 1242916
guaucuggcgguuaauaua

SEQ ID NO: 1381881 - RNA, 19 nt, Artificial Sequence
  Description of Artificial Sequence: Synthetic oligonucleotide
  Antisense strand to SEQ ID NO: 1381880
uauauuaaccgccagauac

SEQ ID NO: 1381882 - RNA, 19 nt, Artificial Sequence
  Description of Artificial Sequence: Synthetic oligonucleotide
  Sense strand starting at position 3816 of SEQ ID NO: 1242916
ucuggcgguuaauauauaa

SEQ ID NO: 1381883 - RNA, 19 nt, Artificial Sequence
  Description of Artificial Sequence: Synthetic oligonucleotide
  Antisense strand to SEQ ID NO: 1381882
uuauauauuaaccgccaga

SEQ ID NO: 1381884 - RNA, 19 nt, Artificial Sequence
  Description of Artificial Sequence: Synthetic oligonucleotide
  Sense strand starting at position 3911 of SEQ ID NO: 1242916
cuuagaauuucucacuggu

SEQ ID NO: 1381885 - RNA, 19 nt, Artificial Sequence
  Description of Artificial Sequence: Synthetic oligonucleotide
  Antisense strand to SEQ ID NO: 1381884
accagugagaaauucuaag

SEQ ID NO: 1381886 - RNA, 19 nt, Artificial Sequence
  Description of Artificial Sequence: Synthetic oligonucleotide
  Sense strand starting at position 10 of SEQ ID NO: 1242917
ccuaguacuugucuaaauc

SEQ ID NO: 1381887 - RNA, 19 nt, Artificial Sequence
  Description of Artificial Sequence: Synthetic oligonucleotide
  Antisense strand to SEQ ID NO: 1381886
gauuuagacaaguacuagg

SEQ ID NO: 1381888 - RNA, 19 nt, Artificial Sequence
  Description of Artificial Sequence: Synthetic oligonucleotide
  Sense strand starting at position 11 of SEQ ID NO: 1242917
cuaguacuugucuaaaucu

SEQ ID NO: 1381889 - RNA, 19 nt, Artificial Sequence
  Description of Artificial Sequence: Synthetic oligonucleotide
  Antisense strand to SEQ ID NO: 1381888
agauuuagacaaguacuag

SEQ ID NO: 1381890 - RNA, 19 nt, Artificial Sequence
  Description of Artificial Sequence: Synthetic oligonucleotide
  Sense strand starting at position 38 of SEQ ID NO: 1242917
ucuauugagguguauggaa

SEQ ID NO: 1381891 - RNA, 19 nt, Artificial Sequence
  Description of Artificial Sequence: Synthetic oligonucleotide
  Antisense strand to SEQ ID NO: 1381890
uuccauacaccucaauaga

SEQ ID NO: 1381892 - RNA, 19 nt, Artificial Sequence
  Description of Artificial Sequence: Synthetic oligonucleotide
  Sense strand starting at position 40 of SEQ ID NO: 1242917
uauugagguguauggaaau

SEQ ID NO: 1381893 - RNA, 19 nt, Artificial Sequence
  Description of Artificial Sequence: Synthetic oligonucleotide
  Antisense strand to SEQ ID NO: 1381892
auuuccauacaccucaaua

SEQ ID NO: 1381894 - RNA, 19 nt, Artificial Sequence
  Description of Artificial Sequence: Synthetic oligonucleotide
  Sense strand starting at position 46 of SEQ ID NO: 1242917
gguguauggaaauguguag

SEQ ID NO: 1381895 - RNA, 19 nt, Artificial Sequence
  Description of Artificial Sequence: Synthetic oligonucleotide
  Antisense strand to SEQ ID NO: 1381894
cuacacauuuccauacacc

SEQ ID NO: 1381896 - RNA, 19 nt, Artificial Sequence
  Description of Artificial Sequence: Synthetic oligonucleotide
  Sense strand starting at position 57 of SEQ ID NO: 1242917
auguguagauauucuagaa

SEQ ID NO: 1381897 - RNA, 19 nt, Artificial Sequence
  Description of Artificial Sequence: Synthetic oligonucleotide
  Antisense strand to SEQ ID NO: 1381896
uucuagaauaucuacacau

SEQ ID NO: 1381898 - RNA, 19 nt, Artificial Sequence
  Description of Artificial Sequence: Synthetic oligonucleotide
  Sense strand starting at position 61 of SEQ ID NO: 1242917
guagauauucuagaaguuc

SEQ ID NO: 1381899 - RNA, 19 nt, Artificial Sequence
  Description of Artificial Sequence: Synthetic oligonucleotide
  Antisense strand to SEQ ID NO: 1381898
gaacuucuagaauaucuac

SEQ ID NO: 1381900 - RNA, 19 nt, Artificial Sequence
  Description of Artificial Sequence: Synthetic oligonucleotide
  Sense strand starting at position 239 of SEQ ID NO: 1242917
agacgacacucuuugaaau

SEQ ID NO: 1381901 - RNA, 19 nt, Artificial Sequence
  Description of Artificial Sequence: Synthetic oligonucleotide
  Antisense strand to SEQ ID NO: 1381900
auuucaaagagugucgucu

SEQ ID NO: 1381902 - RNA, 19 nt, Artificial Sequence
  Description of Artificial Sequence: Synthetic oligonucleotide
  Sense strand starting at position 251 of SEQ ID NO: 1242917
uugaaauacuuccugugca

SEQ ID NO: 1381903 - RNA, 19 nt, Artificial Sequence
  Description of Artificial Sequence: Synthetic oligonucleotide
  Antisense strand to SEQ ID NO: 1381902
ugcacaggaaguauuucaa

SEQ ID NO: 1381904 - RNA, 19 nt, Artificial Sequence
  Description of Artificial Sequence: Synthetic oligonucleotide
  Sense strand starting at position 254 of SEQ ID NO: 1242917
aaauacuuccugugcagga

SEQ ID NO: 1381905 - RNA, 19 nt, Artificial Sequence
  Description of Artificial Sequence: Synthetic oligonucleotide
  Antisense strand to SEQ ID NO: 1381904
uccugcacaggaaguauuu

SEQ ID NO: 1381906 - RNA, 19 nt, Artificial Sequence
  Description of Artificial Sequence: Synthetic oligonucleotide
  Sense strand starting at position 255 of SEQ ID NO: 1242917
aauacuuccugugcaggaa

SEQ ID NO: 1381907 - RNA, 19 nt, Artificial Sequence
  Description of Artificial Sequence: Synthetic oligonucleotide
  Antisense strand to SEQ ID NO: 1381906
uuccugcacaggaaguauu

SEQ ID NO: 1381908 - RNA, 19 nt, Artificial Sequence
  Description of Artificial Sequence: Synthetic oligonucleotide
  Sense strand starting at position 359 of SEQ ID NO: 1242917
ccgggcuccaagcaagaau

SEQ ID NO: 1381909 - RNA, 19 nt, Artificial Sequence
  Description of Artificial Sequence: Synthetic oligonucleotide
  Antisense strand to SEQ ID NO: 1381908
auucuugcuuggagcccgg

SEQ ID NO: 1381910 - RNA, 19 nt, Artificial Sequence
  Description of Artificial Sequence: Synthetic oligonucleotide
  Sense strand starting at position 362 of SEQ ID NO: 1242917
ggcuccaagcaagaauaua

SEQ ID NO: 1381911 - RNA, 19 nt, Artificial Sequence
  Description of Artificial Sequence: Synthetic oligonucleotide
  Antisense strand to SEQ ID NO: 1381910
uauauucuugcuuggagcc

SEQ ID NO: 1381912 - RNA, 19 nt, Artificial Sequence
  Description of Artificial Sequence: Synthetic oligonucleotide
  Sense strand starting at position 432 of SEQ ID NO: 1242917
augccaacuucugcaaaga

SEQ ID NO: 1381913 - RNA, 19 nt, Artificial Sequence
  Description of Artificial Sequence: Synthetic oligonucleotide
  Antisense strand to SEQ ID NO: 1381912
ucuuugcagaaguuggcau

SEQ ID NO: 1381914 - RNA, 19 nt, Artificial Sequence
  Description of Artificial Sequence: Synthetic oligonucleotide
  Sense strand starting at position 456 of SEQ ID NO: 1242917
uggaguagcacauauggua

SEQ ID NO: 1381915 - RNA, 19 nt, Artificial Sequence
  Description of Artificial Sequence: Synthetic oligonucleotide
  Antisense strand to SEQ ID NO: 1381914
uaccauaugugcuacucca

SEQ ID NO: 1381916 - RNA, 19 nt, Artificial Sequence
  Description of Artificial Sequence: Synthetic oligonucleotide
  Sense strand starting at position 537 of SEQ ID NO: 1242917
uuuagacuuucuuccugga

SEQ ID NO: 1381917 - RNA, 19 nt, Artificial Sequence
  Description of Artificial Sequence: Synthetic oligonucleotide
  Antisense strand to SEQ ID NO: 1381916
uccaggaagaaagucuaaa

SEQ ID NO: 1381918 - RNA, 19 nt, Artificial Sequence
  Description of Artificial Sequence: Synthetic oligonucleotide
  Sense strand starting at position 786 of SEQ ID NO: 1242917
acuagaaacugagaggaau

SEQ ID NO: 1381919 - RNA, 19 nt, Artificial Sequence
  Description of Artificial Sequence: Synthetic oligonucleotide
  Antisense strand to SEQ ID NO: 1381918
auuccucucaguuucuagu

SEQ ID NO: 1381920 - RNA, 19 nt, Artificial Sequence
  Description of Artificial Sequence: Synthetic oligonucleotide
  Sense strand starting at position 839 of SEQ ID NO: 1242917
ucagaucucuuccuuuagu

SEQ ID NO: 1381921 - RNA, 19 nt, Artificial Sequence
  Description of Artificial Sequence: Synthetic oligonucleotide
  Antisense strand to SEQ ID NO: 1381920
acuaaaggaagagaucuga

SEQ ID NO: 1381922 - RNA, 19 nt, Artificial Sequence
  Description of Artificial Sequence: Synthetic oligonucleotide
  Sense strand starting at position 1182 of SEQ ID NO: 1242917
gaggacagcuuccucugua

SEQ ID NO: 1381923 - RNA, 19 nt, Artificial Sequence
  Description of Artificial Sequence: Synthetic oligonucleotide
  Antisense strand to SEQ ID NO: 1381922
uacagaggaagcuguccuc

SEQ ID NO: 1381924 - RNA, 19 nt, Artificial Sequence
  Description of Artificial Sequence: Synthetic oligonucleotide
  Sense strand starting at position 1183 of SEQ ID NO: 1242917
aggacagcuuccucuguaa

SEQ ID NO: 1381925 - RNA, 19 nt, Artificial Sequence
  Description of Artificial Sequence: Synthetic oligonucleotide
  Antisense strand to SEQ ID NO: 1381924
uuacagaggaagcuguccu

SEQ ID NO: 1381926 - RNA, 19 nt, Artificial Sequence
  Description of Artificial Sequence: Synthetic oligonucleotide
  Sense strand starting at position 1217 of SEQ ID NO: 1242917
cccuaagucugguuuaauu

SEQ ID NO: 1381927 - RNA, 19 nt, Artificial Sequence
  Description of Artificial Sequence: Synthetic oligonucleotide
  Antisense strand to SEQ ID NO: 1381926
aauuaaaccagacuuaggg

SEQ ID NO: 1381928 - RNA, 19 nt, Artificial Sequence
  Description of Artificial Sequence: Synthetic oligonucleotide
  Sense strand starting at position 1246 of SEQ ID NO: 1242917
ccugccuggcuuugacaaa

SEQ ID NO: 1381929 - RNA, 19 nt, Artificial Sequence
  Description of Artificial Sequence: Synthetic oligonucleotide
  Antisense strand to SEQ ID NO: 1381928
uuugucaaagccaggcagg

SEQ ID NO: 1381930 - RNA, 19 nt, Artificial Sequence
  Description of Artificial Sequence: Synthetic oligonucleotide
  Sense strand starting at position 1277 of SEQ ID NO: 1242917
ccuuccucuggguggagaa

SEQ ID NO: 1381931 - RNA, 19 nt, Artificial Sequence
  Description of Artificial Sequence: Synthetic oligonucleotide
  Antisense strand to SEQ ID NO: 1381930
uucuccacccagaggaagg

SEQ ID NO: 1381932 - RNA, 19 nt, Artificial Sequence
  Description of Artificial Sequence: Synthetic oligonucleotide
  Sense strand starting at position 1278 of SEQ ID NO: 1242917
cuuccucuggguggagaaa

SEQ ID NO: 1381933 - RNA, 19 nt, Artificial Sequence
  Description of Artificial Sequence: Synthetic oligonucleotide
  Antisense strand to SEQ ID NO: 1381932
uuucuccacccagaggaag

SEQ ID NO: 1381934 - RNA, 19 nt, Artificial Sequence
  Description of Artificial Sequence: Synthetic oligonucleotide
  Sense strand starting at position 1459 of SEQ ID NO: 1242917
agcaguccgguuuagacaa

SEQ ID NO: 1381935 - RNA, 19 nt, Artificial Sequence
  Description of Artificial Sequence: Synthetic oligonucleotide
  Antisense strand to SEQ ID NO: 1381934
uugucuaaaccggacugcu

SEQ ID NO: 1381936 - RNA, 19 nt, Artificial Sequence
  Description of Artificial Sequence: Synthetic oligonucleotide
  Sense strand starting at position 2106 of SEQ ID NO: 1242917
gggaucauuggucgaccga

SEQ ID NO: 1381937 - RNA, 19 nt, Artificial Sequence
  Description of Artificial Sequence: Synthetic oligonucleotide
  Antisense strand to SEQ ID NO: 1381936
ucggucgaccaaugauccc

SEQ ID NO: 1381938 - RNA, 19 nt, Artificial Sequence
  Description of Artificial Sequence: Synthetic oligonucleotide
  Sense strand starting at position 3041 of SEQ ID NO: 1242917
aaguguuaacugcaguuga

SEQ ID NO: 1381939 - RNA, 19 nt, Artificial Sequence
  Description of Artificial Sequence: Synthetic oligonucleotide
  Antisense strand to SEQ ID NO: 1381938
ucaacugcaguuaacacuu

SEQ ID NO: 1381940 - RNA, 19 nt, Artificial Sequence
  Description of Artificial Sequence: Synthetic oligonucleotide
  Sense strand starting at position 3141 of SEQ ID NO: 1242917
aguguuaaggauugacuua

SEQ ID NO: 1381941 - RNA, 19 nt, Artificial Sequence
  Description of Artificial Sequence: Synthetic oligonucleotide
  Antisense strand to SEQ ID NO: 1381940
uaagucaauccuuaacacu

SEQ ID NO: 1381942 - RNA, 19 nt, Artificial Sequence
  Description of Artificial Sequence: Synthetic oligonucleotide
  Sense strand starting at position 3142 of SEQ ID NO: 1242917
guguuaaggauugacuuag

SEQ ID NO: 1381943 - RNA, 19 nt, Artificial Sequence
  Description of Artificial Sequence: Synthetic oligonucleotide
  Antisense strand to SEQ ID NO: 1381942
cuaagucaauccuuaacac

SEQ ID NO: 1381944 - RNA, 19 nt, Artificial Sequence
  Description of Artificial Sequence: Synthetic oligonucleotide
  Sense strand starting at position 3233 of SEQ ID NO: 1242917
cauuguggugguuagagau

SEQ ID NO: 1381945 - RNA, 19 nt, Artificial Sequence
  Description of Artificial Sequence: Synthetic oligonucleotide
  Antisense strand to SEQ ID NO: 1381944
aucucuaaccaccacaaug

SEQ ID NO: 1381946 - RNA, 19 nt, Artificial Sequence
  Description of Artificial Sequence: Synthetic oligonucleotide
  Sense strand starting at position 3246 of SEQ ID NO: 1242917
agagauuucgguugcaagu

SEQ ID NO: 1381947 - RNA, 19 nt, Artificial Sequence
  Description of Artificial Sequence: Synthetic oligonucleotide
  Antisense strand to SEQ ID NO: 1381946
acuugcaaccgaaaucucu

SEQ ID NO: 1381948 - RNA, 19 nt, Artificial Sequence
  Description of Artificial Sequence: Synthetic oligonucleotide
  Sense strand starting at position 3309 of SEQ ID NO: 1242917
ggagaucaguuucccugaa

SEQ ID NO: 1381949 - RNA, 19 nt, Artificial Sequence
  Description of Artificial Sequence: Synthetic oligonucleotide
  Antisense strand to SEQ ID NO: 1381948
uucagggaaacugaucucc

SEQ ID NO: 1381950 - RNA, 19 nt, Artificial Sequence
  Description of Artificial Sequence: Synthetic oligonucleotide
  Sense strand starting at position 3310 of SEQ ID NO: 1242917
gagaucaguuucccugaag

SEQ ID NO: 1381951 - RNA, 19 nt, Artificial Sequence
  Description of Artificial Sequence: Synthetic oligonucleotide
  Antisense strand to SEQ ID NO: 1381950
cuucagggaaacugaucuc

SEQ ID NO: 1381952 - RNA, 19 nt, Artificial Sequence
  Description of Artificial Sequence: Synthetic oligonucleotide
  Sense strand starting at position 3311 of SEQ ID NO: 1242917
agaucaguuucccugaagu

SEQ ID NO: 1381953 - RNA, 19 nt, Artificial Sequence
  Description of Artificial Sequence: Synthetic oligonucleotide
  Antisense strand to SEQ ID NO: 1381952
acuucagggaaacugaucu

SEQ ID NO: 1381954 - RNA, 19 nt, Artificial Sequence
  Description of Artificial Sequence: Synthetic oligonucleotide
  Sense strand starting at position 3313 of SEQ ID NO: 1242917
aucaguuucccugaaguac

SEQ ID NO: 1381955 - RNA, 19 nt, Artificial Sequence
  Description of Artificial Sequence: Synthetic oligonucleotide
  Antisense strand to SEQ ID NO: 1381954
guacuucagggaaacugau

SEQ ID NO: 1381956 - RNA, 19 nt, Artificial Sequence
  Description of Artificial Sequence: Synthetic oligonucleotide
  Sense strand starting at position 3354 of SEQ ID NO: 1242917
ucauuuacugcguguguau

SEQ ID NO: 1381957 - RNA, 19 nt, Artificial Sequence
  Description of Artificial Sequence: Synthetic oligonucleotide
  Antisense strand to SEQ ID NO: 1381956
auacacacgcaguaaauga

SEQ ID NO: 1381958 - RNA, 19 nt, Artificial Sequence
  Description of Artificial Sequence: Synthetic oligonucleotide
  Sense strand starting at position 3458 of SEQ ID NO: 1242917
uucugaauuugugaggaau

SEQ ID NO: 1381959 - RNA, 19 nt, Artificial Sequence
  Description of Artificial Sequence: Synthetic oligonucleotide
  Antisense strand to SEQ ID NO: 1381958
auuccucacaaauucagaa

SEQ ID NO: 1381960 - RNA, 19 nt, Artificial Sequence
  Description of Artificial Sequence: Synthetic oligonucleotide
  Sense strand starting at position 3460 of SEQ ID NO: 1242917
cugaauuugugaggaauug

SEQ ID NO: 1381961 - RNA, 19 nt, Artificial Sequence
  Description of Artificial Sequence: Synthetic oligonucleotide
  Antisense strand to SEQ ID NO: 1381960
caauuccucacaaauucag

SEQ ID NO: 1381962 - RNA, 19 nt, Artificial Sequence
  Description of Artificial Sequence: Synthetic oligonucleotide
  Sense strand starting at position 3617 of SEQ ID NO: 1242917
ggucaaacccaguacucua

SEQ ID NO: 1381963 - RNA, 19 nt, Artificial Sequence
  Description of Artificial Sequence: Synthetic oligonucleotide
  Antisense strand to SEQ ID NO: 1381962
uagaguacuggguuugacc

SEQ ID NO: 1381964 - RNA, 19 nt, Artificial Sequence
  Description of Artificial Sequence: Synthetic oligonucleotide
  Sense strand starting at position 3874 of SEQ ID NO: 1242917
ucagaaacaugguacauuu

SEQ ID NO: 1381965 - RNA, 19 nt, Artificial Sequence
  Description of Artificial Sequence: Synthetic oligonucleotide
  Antisense strand to SEQ ID NO: 1381964
aaauguaccauguuucuga

SEQ ID NO: 1381966 - RNA, 19 nt, Artificial Sequence
  Description of Artificial Sequence: Synthetic oligonucleotide
  Sense strand starting at position 432 of SEQ ID NO: 1242918
augccaauagugugauguu

SEQ ID NO: 1381967 - RNA, 19 nt, Artificial Sequence
  Description of Artificial Sequence: Synthetic oligonucleotide
  Antisense strand to SEQ ID NO: 1381966
aacaucacacuauuggcau

SEQ ID NO: 1381968 - RNA, 19 nt, Artificial Sequence
  Description of Artificial Sequence: Synthetic oligonucleotide
  Sense strand starting at position 453 of SEQ ID NO: 1242918
gaucaauauggcggacacu

SEQ ID NO: 1381969 - RNA, 19 nt, Artificial Sequence
  Description of Artificial Sequence: Synthetic oligonucleotide
  Antisense strand to SEQ ID NO: 1381968
aguguccgccauauugauc

SEQ ID NO: 1381970 - RNA, 19 nt, Artificial Sequence
  Description of Artificial Sequence: Synthetic oligonucleotide
  Sense strand starting at position 639 of SEQ ID NO: 1242918
agcaauguggaguaagcaa

SEQ ID NO: 1381971 - RNA, 19 nt, Artificial Sequence
  Description of Artificial Sequence: Synthetic oligonucleotide
  Antisense strand to SEQ ID NO: 1381970
uugcuuacuccacauugcu

SEQ ID NO: 1381972 - RNA, 19 nt, Artificial Sequence
  Description of Artificial Sequence: Synthetic oligonucleotide
  Sense strand starting at position 646 of SEQ ID NO: 1242918
uggaguaagcaauguaaua

SEQ ID NO: 1381973 - RNA, 19 nt, Artificial Sequence
  Description of Artificial Sequence: Synthetic oligonucleotide
  Antisense strand to SEQ ID NO: 1381972
uauuacauugcuuacucca

SEQ ID NO: 1381974 - RNA, 19 nt, Artificial Sequence
  Description of Artificial Sequence: Synthetic oligonucleotide
  Sense strand starting at position 796 of SEQ ID NO: 1242918
uggugagugucagcuuaag

SEQ ID NO: 1381975 - RNA, 19 nt, Artificial Sequence
  Description of Artificial Sequence: Synthetic oligonucleotide
  Antisense strand to SEQ ID NO: 1381974
cuuaagcugacacucacca

SEQ ID NO: 1381976 - RNA, 19 nt, Artificial Sequence
  Description of Artificial Sequence: Synthetic oligonucleotide
  Sense strand starting at position 2248 of SEQ ID NO: 1242918
cgcggaccuccuugucaau

SEQ ID NO: 1381977 - RNA, 19 nt, Artificial Sequence
  Description of Artificial Sequence: Synthetic oligonucleotide
  Antisense strand to SEQ ID NO: 1381976
auugacaaggagguccgcg

SEQ ID NO: 1381978 - RNA, 19 nt, Artificial Sequence
  Description of Artificial Sequence: Synthetic oligonucleotide
  Sense strand starting at position 2433 of SEQ ID NO: 1242918
caggaaacgcgauguggua

SEQ ID NO: 1381979 - RNA, 19 nt, Artificial Sequence
  Description of Artificial Sequence: Synthetic oligonucleotide
  Antisense strand to SEQ ID NO: 1381978
uaccacaucgcguuuccug

SEQ ID NO: 1381980 - RNA, 19 nt, Artificial Sequence
  Description of Artificial Sequence: Synthetic oligonucleotide
  Sense strand starting at position 2446 of SEQ ID NO: 1242918
gugguagugggucggaaua

SEQ ID NO: 1381981 - RNA, 19 nt, Artificial Sequence
  Description of Artificial Sequence: Synthetic oligonucleotide
  Antisense strand to SEQ ID NO: 1381980
uauuccgacccacuaccac

SEQ ID NO: 1381982 - RNA, 19 nt, Artificial Sequence
  Description of Artificial Sequence: Synthetic oligonucleotide
  Sense strand starting at position 2447 of SEQ ID NO: 1242918
ugguagugggucggaauaa

SEQ ID NO: 1381983 - RNA, 19 nt, Artificial Sequence
  Description of Artificial Sequence: Synthetic oligonucleotide
  Antisense strand to SEQ ID NO: 1381982
uuauuccgacccacuacca

SEQ ID NO: 1381984 - RNA, 19 nt, Artificial Sequence
  Description of Artificial Sequence: Synthetic oligonucleotide
  Sense strand starting at position 2448 of SEQ ID NO: 1242918
gguagugggucggaauaaa

SEQ ID NO: 1381985 - RNA, 19 nt, Artificial Sequence
  Description of Artificial Sequence: Synthetic oligonucleotide
  Antisense strand to SEQ ID NO: 1381984
uuuauuccgacccacuacc

SEQ ID NO: 1381986 - RNA, 19 nt, Artificial Sequence
  Description of Artificial Sequence: Synthetic oligonucleotide
  Sense strand starting at position 2810 of SEQ ID NO: 1242918
gacgguuucguuuggugga

SEQ ID NO: 1381987 - RNA, 19 nt, Artificial Sequence
  Description of Artificial Sequence: Synthetic oligonucleotide
  Antisense strand to SEQ ID NO: 1381986
uccaccaaacgaaaccguc

SEQ ID NO: 1381988 - RNA, 19 nt, Artificial Sequence
  Description of Artificial Sequence: Synthetic oligonucleotide
  Sense strand starting at position 2831 of SEQ ID NO: 1242918
ccgucuuugcacuaaauuc

SEQ ID NO: 1381989 - RNA, 19 nt, Artificial Sequence
  Description of Artificial Sequence: Synthetic oligonucleotide
  Antisense strand to SEQ ID NO: 1381988
gaauuuagugcaaagacgg

SEQ ID NO: 1381990 - RNA, 19 nt, Artificial Sequence
  Description of Artificial Sequence: Synthetic oligonucleotide
  Sense strand starting at position 2978 of SEQ ID NO: 1242918
gggacaguuacucggugua

SEQ ID NO: 1381991 - RNA, 19 nt, Artificial Sequence
  Description of Artificial Sequence: Synthetic oligonucleotide
  Antisense strand to SEQ ID NO: 1381990
uacaccgaguaacuguccc

SEQ ID NO: 1381992 - RNA, 19 nt, Artificial Sequence
  Description of Artificial Sequence: Synthetic oligonucleotide
  Sense strand starting at position 2980 of SEQ ID NO: 1242918
gacaguuacucgguguaca

SEQ ID NO: 1381993 - RNA, 19 nt, Artificial Sequence
  Description of Artificial Sequence: Synthetic oligonucleotide
  Antisense strand to SEQ ID NO: 1381992
uguacaccgaguaacuguc

SEQ ID NO: 1381994 - RNA, 19 nt, Artificial Sequence
  Description of Artificial Sequence: Synthetic oligonucleotide
  Sense strand starting at position 2981 of SEQ ID NO: 1242918
acaguuacucgguguacag

SEQ ID NO: 1381995 - RNA, 19 nt, Artificial Sequence
  Description of Artificial Sequence: Synthetic oligonucleotide
  Antisense strand to SEQ ID NO: 1381994
cuguacaccgaguaacugu

SEQ ID NO: 1381996 - RNA, 19 nt, Artificial Sequence
  Description of Artificial Sequence: Synthetic oligonucleotide
  Sense strand starting at position 2992 of SEQ ID NO: 1242918
guguacagcuagucaaaua

SEQ ID NO: 1381997 - RNA, 19 nt, Artificial Sequence
  Description of Artificial Sequence: Synthetic oligonucleotide
  Antisense strand to SEQ ID NO: 1381996
uauuugacuagcuguacac

SEQ ID NO: 1381998 - RNA, 19 nt, Artificial Sequence
  Description of Artificial Sequence: Synthetic oligonucleotide
  Sense strand starting at position 3000 of SEQ ID NO: 1242918
cuagucaaauacugaggaa

SEQ ID NO: 1381999 - RNA, 19 nt, Artificial Sequence
  Description of Artificial Sequence: Synthetic oligonucleotide
  Antisense strand to SEQ ID NO: 1381998
uuccucaguauuugacuag

SEQ ID NO: 1382000 - RNA, 19 nt, Artificial Sequence
  Description of Artificial Sequence: Synthetic oligonucleotide
  Sense strand starting at position 3023 of SEQ ID NO: 1242918
gucgauauuugccaaagau

SEQ ID NO: 1382001 - RNA, 19 nt, Artificial Sequence
  Description of Artificial Sequence: Synthetic oligonucleotide
  Antisense strand to SEQ ID NO: 1382000
aucuuuggcaaauaucgac

SEQ ID NO: 1382002 - RNA, 19 nt, Artificial Sequence
  Description of Artificial Sequence: Synthetic oligonucleotide
  Sense strand starting at position 3033 of SEQ ID NO: 1242918
gccaaagauugggcauguu

SEQ ID NO: 1382003 - RNA, 19 nt, Artificial Sequence
  Description of Artificial Sequence: Synthetic oligonucleotide
  Antisense strand to SEQ ID NO: 1382002
aacaugcccaaucuuuggc

SEQ ID NO: 1382004 - RNA, 19 nt, Artificial Sequence
  Description of Artificial Sequence: Synthetic oligonucleotide
  Sense strand starting at position 3048 of SEQ ID NO: 1242918
uguucuggguggucucaga

SEQ ID NO: 1382005 - RNA, 19 nt, Artificial Sequence
  Description of Artificial Sequence: Synthetic oligonucleotide
  Antisense strand to SEQ ID NO: 1382004
ucugagaccacccagaaca

SEQ ID NO: 1382006 - RNA, 19 nt, Artificial Sequence
  Description of Artificial Sequence: Synthetic oligonucleotide
  Sense strand starting at position 3237 of SEQ ID NO: 1242918
gcauuucuguagcucugaa

SEQ ID NO: 1382007 - RNA, 19 nt, Artificial Sequence
  Description of Artificial Sequence: Synthetic oligonucleotide
  Antisense strand to SEQ ID NO: 1382006
uucagagcuacagaaaugc

SEQ ID NO: 1382008 - RNA, 19 nt, Artificial Sequence
  Description of Artificial Sequence: Synthetic oligonucleotide
  Sense strand starting at position 3453 of SEQ ID NO: 1242918
caugucaagauguggguau

SEQ ID NO: 1382009 - RNA, 19 nt, Artificial Sequence
  Description of Artificial Sequence: Synthetic oligonucleotide
  Antisense strand to SEQ ID NO: 1382008
auacccacaucuugacaug

SEQ ID NO: 1382010 - RNA, 19 nt, Artificial Sequence
  Description of Artificial Sequence: Synthetic oligonucleotide
  Sense strand starting at position 3457 of SEQ ID NO: 1242918
ucaagauguggguauguga

SEQ ID NO: 1382011 - RNA, 19 nt, Artificial Sequence
  Description of Artificial Sequence: Synthetic oligonucleotide
  Antisense strand to SEQ ID NO: 1382010
ucacauacccacaucuuga

SEQ ID NO: 1382012 - RNA, 19 nt, Artificial Sequence
  Description of Artificial Sequence: Synthetic oligonucleotide
  Sense strand starting at position 3503 of SEQ ID NO: 1242918
uuacauagucuaggaaacu

SEQ ID NO: 1382013 - RNA, 19 nt, Artificial Sequence
  Description of Artificial Sequence: Synthetic oligonucleotide
  Antisense strand to SEQ ID NO: 1382012
aguuuccuagacuauguaa

SEQ ID NO: 1382014 - RNA, 19 nt, Artificial Sequence
  Description of Artificial Sequence: Synthetic oligonucleotide
  Sense strand starting at position 3556 of SEQ ID NO: 1242918
gugaauaacugcuucucua

SEQ ID NO: 1382015 - RNA, 19 nt, Artificial Sequence
  Description of Artificial Sequence: Synthetic oligonucleotide
  Antisense strand to SEQ ID NO: 1382014
uagagaagcaguuauucac

SEQ ID NO: 1382016 - RNA, 19 nt, Artificial Sequence
  Description of Artificial Sequence: Synthetic oligonucleotide
  Sense strand starting at position 3621 of SEQ ID NO: 1242918
gcuguuaugggauaaaucu

SEQ ID NO: 1382017 - RNA, 19 nt, Artificial Sequence
  Description of Artificial Sequence: Synthetic oligonucleotide
  Antisense strand to SEQ ID NO: 1382016
agauuuaucccauaacagc

SEQ ID NO: 1382018 - RNA, 19 nt, Artificial Sequence
  Description of Artificial Sequence: Synthetic oligonucleotide
  Sense strand starting at position 3630 of SEQ ID NO: 1242918
ggauaaaucuuguuuggcu

SEQ ID NO: 1382019 - RNA, 19 nt, Artificial Sequence
  Description of Artificial Sequence: Synthetic oligonucleotide
  Antisense strand to SEQ ID NO: 1382018
agccaaacaagauuuaucc

SEQ ID NO: 1382020 - RNA, 19 nt, Artificial Sequence
  Description of Artificial Sequence: Synthetic oligonucleotide
  Sense strand starting at position 3631 of SEQ ID NO: 1242918
gauaaaucuuguuuggcuu

SEQ ID NO: 1382021 - RNA, 19 nt, Artificial Sequence
  Description of Artificial Sequence: Synthetic oligonucleotide
  Antisense strand to SEQ ID NO: 1382020
aagccaaacaagauuuauc

SEQ ID NO: 1382022 - RNA, 19 nt, Artificial Sequence
  Description of Artificial Sequence: Synthetic oligonucleotide
  Sense strand starting at position 3632 of SEQ ID NO: 1242918
auaaaucuuguuuggcuua

SEQ ID NO: 1382023 - RNA, 19 nt, Artificial Sequence
  Description of Artificial Sequence: Synthetic oligonucleotide
  Antisense strand to SEQ ID NO: 1382022
uaagccaaacaagauuuau

SEQ ID NO: 1382024 - RNA, 19 nt, Artificial Sequence
  Description of Artificial Sequence: Synthetic oligonucleotide
  Sense strand starting at position 3732 of SEQ ID NO: 1242918
agagguugcuaggaacagu

SEQ ID NO: 1382025 - RNA, 19 nt, Artificial Sequence
  Description of Artificial Sequence: Synthetic oligonucleotide
  Antisense strand to SEQ ID NO: 1382024
acuguuccuagcaaccucu

SEQ ID NO: 1382026 - RNA, 19 nt, Artificial Sequence
  Description of Artificial Sequence: Synthetic oligonucleotide
  Sense strand starting at position 3735 of SEQ ID NO: 1242918
gguugcuaggaacaguuau

SEQ ID NO: 1382027 - RNA, 19 nt, Artificial Sequence
  Description of Artificial Sequence: Synthetic oligonucleotide
  Antisense strand to SEQ ID NO: 1382026
auaacuguuccuagcaacc

SEQ ID NO: 1382028 - RNA, 19 nt, Artificial Sequence
  Description of Artificial Sequence: Synthetic oligonucleotide
  Sense strand starting at position 3741 of SEQ ID NO: 1242918
uaggaacaguuauguagau

SEQ ID NO: 1382029 - RNA, 19 nt, Artificial Sequence
  Description of Artificial Sequence: Synthetic oligonucleotide
  Antisense strand to SEQ ID NO: 1382028
aucuacauaacuguuccua

SEQ ID NO: 1382030 - RNA, 19 nt, Artificial Sequence
  Description of Artificial Sequence: Synthetic oligonucleotide
  Sense strand starting at position 3800 of SEQ ID NO: 1242918
ccuguaucccugcaagacu

SEQ ID NO: 1382031 - RNA, 19 nt, Artificial Sequence
  Description of Artificial Sequence: Synthetic oligonucleotide
  Antisense strand to SEQ ID NO: 1382030
agucuugcagggauacagg

SEQ ID NO: 1382032 - RNA, 19 nt, Artificial Sequence
  Description of Artificial Sequence: Synthetic oligonucleotide
  Sense strand starting at position 3809 of SEQ ID NO: 1242918
cugcaagacugcguuggaa

SEQ ID NO: 1382033 - RNA, 19 nt, Artificial Sequence
  Description of Artificial Sequence: Synthetic oligonucleotide
  Antisense strand to SEQ ID NO: 1382032
uuccaacgcagucuugcag

SEQ ID NO: 1382034 - RNA, 19 nt, Artificial Sequence
  Description of Artificial Sequence: Synthetic oligonucleotide
  Sense strand starting at position 3811 of SEQ ID NO: 1242918
gcaagacugcguuggaaag

SEQ ID NO: 1382035 - RNA, 19 nt, Artificial Sequence
  Description of Artificial Sequence: Synthetic oligonucleotide
  Antisense strand to SEQ ID NO: 1382034
cuuuccaacgcagucuugc

SEQ ID NO: 1382036 - RNA, 19 nt, Artificial Sequence
  Description of Artificial Sequence: Synthetic oligonucleotide
  Sense strand starting at position 3812 of SEQ ID NO: 1242918
caagacugcguuggaaaga

SEQ ID NO: 1382037 - RNA, 19 nt, Artificial Sequence
  Description of Artificial Sequence: Synthetic oligonucleotide
  Antisense strand to SEQ ID NO: 1382036
ucuuuccaacgcagucuug

SEQ ID NO: 1382038 - RNA, 19 nt, Artificial Sequence
  Description of Artificial Sequence: Synthetic oligonucleotide
  Sense strand starting at position 3839 of SEQ ID NO: 1242918
guaagaauauaccgauuua

SEQ ID NO: 1382039 - RNA, 19 nt, Artificial Sequence
  Description of Artificial Sequence: Synthetic oligonucleotide
  Antisense strand to SEQ ID NO: 1382038
uaaaucgguauauucuuac

SEQ ID NO: 1382040 - RNA, 19 nt, Artificial Sequence
  Description of Artificial Sequence: Synthetic oligonucleotide
  Sense strand starting at position 3890 of SEQ ID NO: 1242918
augcucuuucuuugaagua

SEQ ID NO: 1382041 - RNA, 19 nt, Artificial Sequence
  Description of Artificial Sequence: Synthetic oligonucleotide
  Antisense strand to SEQ ID NO: 1382040
uacuucaaagaaagagcau

SEQ ID NO: 1382042 - RNA, 19 nt, Artificial Sequence
  Description of Artificial Sequence: Synthetic oligonucleotide
  Sense strand starting at position 3945 of SEQ ID NO: 1242918
ggguuuguaugguugaaug

SEQ ID NO: 1382043 - RNA, 19 nt, Artificial Sequence
  Description of Artificial Sequence: Synthetic oligonucleotide
  Antisense strand to SEQ ID NO: 1382042
cauucaaccauacaaaccc

SEQ ID NO: 1382044 - RNA, 19 nt, Artificial Sequence
  Description of Artificial Sequence: Synthetic oligonucleotide
  Sense strand starting at position 3947 of SEQ ID NO: 1242918
guuuguaugguugaaugaa

SEQ ID NO: 1382045 - RNA, 19 nt, Artificial Sequence
  Description of Artificial Sequence: Synthetic oligonucleotide
  Antisense strand to SEQ ID NO: 1382044
uucauucaaccauacaaac

SEQ ID NO: 1382046 - RNA, 19 nt, Artificial Sequence
  Description of Artificial Sequence: Synthetic oligonucleotide
  Sense strand starting at position 169 of SEQ ID NO: 1242919
gguggucguggcuauggaa

SEQ ID NO: 1382047 - RNA, 19 nt, Artificial Sequence
  Description of Artificial Sequence: Synthetic oligonucleotide
  Antisense strand to SEQ ID NO: 1382046
uuccauagccacgaccacc

SEQ ID NO: 1382048 - RNA, 19 nt, Artificial Sequence
  Description of Artificial Sequence: Synthetic oligonucleotide
  Sense strand starting at position 172 of SEQ ID NO: 1242919
ggucguggcuauggaaaug

SEQ ID NO: 1382049 - RNA, 19 nt, Artificial Sequence
  Description of Artificial Sequence: Synthetic oligonucleotide
  Antisense strand to SEQ ID NO: 1382048
cauuuccauagccacgacc

SEQ ID NO: 1382050 - RNA, 19 nt, Artificial Sequence
  Description of Artificial Sequence: Synthetic oligonucleotide
  Sense strand starting at position 803 of SEQ ID NO: 1242919
cuuugcuuugcauggcaga

SEQ ID NO: 1382051 - RNA, 19 nt, Artificial Sequence
  Description of Artificial Sequence: Synthetic oligonucleotide
  Antisense strand to SEQ ID NO: 1382050
ucugccaugcaaagcaaag

SEQ ID NO: 1382052 - RNA, 19 nt, Artificial Sequence
  Description of Artificial Sequence: Synthetic oligonucleotide
  Sense strand starting at position 848 of SEQ ID NO: 1242919
acaggaauguucugcugca

SEQ ID NO: 1382053 - RNA, 19 nt, Artificial Sequence
  Description of Artificial Sequence: Synthetic oligonucleotide
  Antisense strand to SEQ ID NO: 1382052
ugcagcagaacauuccugu

SEQ ID NO: 1382054 - RNA, 19 nt, Artificial Sequence
  Description of Artificial Sequence: Synthetic oligonucleotide
  Sense strand starting at position 864 of SEQ ID NO: 1242919
gcaguuugcuucucuggca

SEQ ID NO: 1382055 - RNA, 19 nt, Artificial Sequence
  Description of Artificial Sequence: Synthetic oligonucleotide
  Antisense strand to SEQ ID NO: 1382054
ugccagagaagcaaacugc

SEQ ID NO: 1382056 - RNA, 19 nt, Artificial Sequence
  Description of Artificial Sequence: Synthetic oligonucleotide
  Sense strand starting at position 887 of SEQ ID NO: 1242919
gggugugugcucaggaucu

SEQ ID NO: 1382057 - RNA, 19 nt, Artificial Sequence
  Description of Artificial Sequence: Synthetic oligonucleotide
  Antisense strand to SEQ ID NO: 1382056
agauccugagcacacaccc

SEQ ID NO: 1382058 - RNA, 19 nt, Artificial Sequence
  Description of Artificial Sequence: Synthetic oligonucleotide
  Sense strand starting at position 1056 of SEQ ID NO: 1242919
ccacaaguucgaggcaagu

SEQ ID NO: 1382059 - RNA, 19 nt, Artificial Sequence
  Description of Artificial Sequence: Synthetic oligonucleotide
  Antisense strand to SEQ ID NO: 1382058
acuugccucgaacuugugg

SEQ ID NO: 1382060 - RNA, 19 nt, Artificial Sequence
  Description of Artificial Sequence: Synthetic oligonucleotide
  Sense strand starting at position 1431 of SEQ ID NO: 1242919
gggagugaucagggucaug

SEQ ID NO: 1382061 - RNA, 19 nt, Artificial Sequence
  Description of Artificial Sequence: Synthetic oligonucleotide
  Antisense strand to SEQ ID NO: 1382060
caugacccugaucacuccc

SEQ ID NO: 1382062 - RNA, 19 nt, Artificial Sequence
  Description of Artificial Sequence: Synthetic oligonucleotide
  Sense strand starting at position 1440 of SEQ ID NO: 1242919
cagggucaugcagaggauu

SEQ ID NO: 1382063 - RNA, 19 nt, Artificial Sequence
  Description of Artificial Sequence: Synthetic oligonucleotide
  Antisense strand to SEQ ID NO: 1382062
aauccucugcaugacccug

SEQ ID NO: 1382064 - RNA, 19 nt, Artificial Sequence
  Description of Artificial Sequence: Synthetic oligonucleotide
  Sense strand starting at position 1998 of SEQ ID NO: 1242919
aagugauguuccgggaguc

SEQ ID NO: 1382065 - RNA, 19 nt, Artificial Sequence
  Description of Artificial Sequence: Synthetic oligonucleotide
  Antisense strand to SEQ ID NO: 1382064
gacucccggaacaucacuu

SEQ ID NO: 1382066 - RNA, 19 nt, Artificial Sequence
  Description of Artificial Sequence: Synthetic oligonucleotide
  Sense strand starting at position 2534 of SEQ ID NO: 1242919
ucugaucugagcugagagu

SEQ ID NO: 1382067 - RNA, 19 nt, Artificial Sequence
  Description of Artificial Sequence: Synthetic oligonucleotide
  Antisense strand to SEQ ID NO: 1382066
acucucagcucagaucaga

SEQ ID NO: 1382068 - RNA, 19 nt, Artificial Sequence
  Description of Artificial Sequence: Synthetic oligonucleotide
  Sense strand starting at position 2799 of SEQ ID NO: 1242919
ggagcugugcccuauguac

SEQ ID NO: 1382069 - RNA, 19 nt, Artificial Sequence
  Description of Artificial Sequence: Synthetic oligonucleotide
  Antisense strand to SEQ ID NO: 1382068
guacauagggcacagcucc

SEQ ID NO: 1382070 - RNA, 19 nt, Artificial Sequence
  Description of Artificial Sequence: Synthetic oligonucleotide
  Sense strand starting at position 3139 of SEQ ID NO: 1242919
cagugugacuccgugaauc

SEQ ID NO: 1382071 - RNA, 19 nt, Artificial Sequence
  Description of Artificial Sequence: Synthetic oligonucleotide
  Antisense strand to SEQ ID NO: 1382070
gauucacggagucacacug

SEQ ID NO: 1382072 - RNA, 19 nt, Artificial Sequence
  Description of Artificial Sequence: Synthetic oligonucleotide
  Sense strand starting at position 3181 of SEQ ID NO: 1242919
ugaugugugucggcuggau

SEQ ID NO: 1382073 - RNA, 19 nt, Artificial Sequence
  Description of Artificial Sequence: Synthetic oligonucleotide
  Antisense strand to SEQ ID NO: 1382072
auccagccgacacacauca

SEQ ID NO: 1382074 - RNA, 19 nt, Artificial Sequence
  Description of Artificial Sequence: Synthetic oligonucleotide
  Sense strand starting at position 3183 of SEQ ID NO: 1242919
augugugucggcuggauca

SEQ ID NO: 1382075 - RNA, 19 nt, Artificial Sequence
  Description of Artificial Sequence: Synthetic oligonucleotide
  Antisense strand to SEQ ID NO: 1382074
ugauccagccgacacacau

SEQ ID NO: 1382076 - RNA, 19 nt, Artificial Sequence
  Description of Artificial Sequence: Synthetic oligonucleotide
  Sense strand starting at position 3185 of SEQ ID NO: 1242919
gugugucggcuggaucaga

SEQ ID NO: 1382077 - RNA, 19 nt, Artificial Sequence
  Description of Artificial Sequence: Synthetic oligonucleotide
  Antisense strand to SEQ ID NO: 1382076
ucugauccagccgacacac

SEQ ID NO: 1382078 - RNA, 19 nt, Artificial Sequence
  Description of Artificial Sequence: Synthetic oligonucleotide
  Sense strand starting at position 3394 of SEQ ID NO: 1242919
ugcugugacuucggaugca

SEQ ID NO: 1382079 - RNA, 19 nt, Artificial Sequence
  Description of Artificial Sequence: Synthetic oligonucleotide
  Antisense strand to SEQ ID NO: 1382078
ugcauccgaagucacagca

SEQ ID NO: 1382080 - RNA, 19 nt, Artificial Sequence
  Description of Artificial Sequence: Synthetic oligonucleotide
  Sense strand starting at position 3677 of SEQ ID NO: 1242919
ugcaucugcucaucuggaa

SEQ ID NO: 1382081 - RNA, 19 nt, Artificial Sequence
  Description of Artificial Sequence: Synthetic oligonucleotide
  Antisense strand to SEQ ID NO: 1382080
uuccagaugagcagaugca

SEQ ID NO: 1382082 - RNA, 19 nt, Artificial Sequence
  Description of Artificial Sequence: Synthetic oligonucleotide
  Sense strand starting at position 3765 of SEQ ID NO: 1242919
caguaaggucccugagggu

SEQ ID NO: 1382083 - RNA, 19 nt, Artificial Sequence
  Description of Artificial Sequence: Synthetic oligonucleotide
  Antisense strand to SEQ ID NO: 1382082
acccucagggaccuuacug

SEQ ID NO: 1382084 - RNA, 19 nt, Artificial Sequence
  Description of Artificial Sequence: Synthetic oligonucleotide
  Sense strand starting at position 3782 of SEQ ID NO: 1242919
gugccugagcucuguccaa

SEQ ID NO: 1382085 - RNA, 19 nt, Artificial Sequence
  Description of Artificial Sequence: Synthetic oligonucleotide
  Antisense strand to SEQ ID NO: 1382084
uuggacagagcucaggcac

SEQ ID NO: 1382086 - RNA, 19 nt, Artificial Sequence
  Description of Artificial Sequence: Synthetic oligonucleotide
  Sense strand starting at position 3879 of SEQ ID NO: 1242919
gggucacguccuggaguga

SEQ ID NO: 1382087 - RNA, 19 nt, Artificial Sequence
  Description of Artificial Sequence: Synthetic oligonucleotide
  Antisense strand to SEQ ID NO: 1382086
ucacuccaggacgugaccc

SEQ ID NO: 1382088 - RNA, 19 nt, Artificial Sequence
  Description of Artificial Sequence: Synthetic oligonucleotide
  Sense strand starting at position 3934 of SEQ ID NO: 1242919
ucagcaucucagcagagaa

SEQ ID NO: 1382089 - RNA, 19 nt, Artificial Sequence
  Description of Artificial Sequence: Synthetic oligonucleotide
  Antisense strand to SEQ ID NO: 1382088
uucucugcugagaugcuga

SEQ ID NO: 1382090 - RNA, 19 nt, Artificial Sequence
  Description of Artificial Sequence: Synthetic oligonucleotide
  Sense strand starting at position 3946 of SEQ ID NO: 1242919
cagagaaguggcugugugu

SEQ ID NO: 1382091 - RNA, 19 nt, Artificial Sequence
  Description of Artificial Sequence: Synthetic oligonucleotide
  Antisense strand to SEQ ID NO: 1382090
acacacagccacuucucug

SEQ ID NO: 1382092 - RNA, 19 nt, Artificial Sequence
  Description of Artificial Sequence: Synthetic oligonucleotide
  Sense strand starting at position 67 of SEQ ID NO: 1242920
gcugaaaugucacuucuua

SEQ ID NO: 1382093 - RNA, 19 nt, Artificial Sequence
  Description of Artificial Sequence: Synthetic oligonucleotide
  Antisense strand to SEQ ID NO: 1382092
uaagaagugacauuucagc

SEQ ID NO: 1382094 - RNA, 19 nt, Artificial Sequence
  Description of Artificial Sequence: Synthetic oligonucleotide
  Sense strand starting at position 536 of SEQ ID NO: 1242920
gaggacaagcauugguaua

SEQ ID NO: 1382095 - RNA, 19 nt, Artificial Sequence
  Description of Artificial Sequence: Synthetic oligonucleotide
  Antisense strand to SEQ ID NO: 1382094
uauaccaaugcuuguccuc

SEQ ID NO: 1382096 - RNA, 19 nt, Artificial Sequence
  Description of Artificial Sequence: Synthetic oligonucleotide
  Sense strand starting at position 537 of SEQ ID NO: 1242920
aggacaagcauugguauau

SEQ ID NO: 1382097 - RNA, 19 nt, Artificial Sequence
  Description of Artificial Sequence: Synthetic oligonucleotide
  Antisense strand to SEQ ID NO: 1382096
auauaccaaugcuuguccu

SEQ ID NO: 1382098 - RNA, 19 nt, Artificial Sequence
  Description of Artificial Sequence: Synthetic oligonucleotide
  Sense strand starting at position 538 of SEQ ID NO: 1242920
ggacaagcauugguauauc

SEQ ID NO: 1382099 - RNA, 19 nt, Artificial Sequence
  Description of Artificial Sequence: Synthetic oligonucleotide
  Antisense strand to SEQ ID NO: 1382098
gauauaccaaugcuugucc

SEQ ID NO: 1382100 - RNA, 19 nt, Artificial Sequence
  Description of Artificial Sequence: Synthetic oligonucleotide
  Sense strand starting at position 554 of SEQ ID NO: 1242920
aucuguguucguuucugca

SEQ ID NO: 1382101 - RNA, 19 nt, Artificial Sequence
  Description of Artificial Sequence: Synthetic oligonucleotide
  Antisense strand to SEQ ID NO: 1382100
ugcagaaacgaacacagau

SEQ ID NO: 1382102 - RNA, 19 nt, Artificial Sequence
  Description of Artificial Sequence: Synthetic oligonucleotide
  Sense strand starting at position 593 of SEQ ID NO: 1242920
acauaaagguauucgauaa

SEQ ID NO: 1382103 - RNA, 19 nt, Artificial Sequence
  Description of Artificial Sequence: Synthetic oligonucleotide
  Antisense strand to SEQ ID NO: 1382102
uuaucgaauaccuuuaugu

SEQ ID NO: 1382104 - RNA, 19 nt, Artificial Sequence
  Description of Artificial Sequence: Synthetic oligonucleotide
  Sense strand starting at position 714 of SEQ ID NO: 1242920
uggucaauacggugaaaua

SEQ ID NO: 1382105 - RNA, 19 nt, Artificial Sequence
  Description of Artificial Sequence: Synthetic oligonucleotide
  Antisense strand to SEQ ID NO: 1382104
uauuucaccguauugacca

SEQ ID NO: 1382106 - RNA, 19 nt, Artificial Sequence
  Description of Artificial Sequence: Synthetic oligonucleotide
  Sense strand starting at position 767 of SEQ ID NO: 1242920
gggcgugauggugaugcau

SEQ ID NO: 1382107 - RNA, 19 nt, Artificial Sequence
  Description of Artificial Sequence: Synthetic oligonucleotide
  Antisense strand to SEQ ID NO: 1382106
augcaucaccaucacgccc

SEQ ID NO: 1382108 - RNA, 19 nt, Artificial Sequence
  Description of Artificial Sequence: Synthetic oligonucleotide
  Sense strand starting at position 1016 of SEQ ID NO: 1242920
ggaauccugcacugggaaa

SEQ ID NO: 1382109 - RNA, 19 nt, Artificial Sequence
  Description of Artificial Sequence: Synthetic oligonucleotide
  Antisense strand to SEQ ID NO: 1382108
uuucccagugcaggauucc

SEQ ID NO: 1382110 - RNA, 19 nt, Artificial Sequence
  Description of Artificial Sequence: Synthetic oligonucleotide
  Sense strand starting at position 1067 of SEQ ID NO: 1242920
acagcauguucuccacaga

SEQ ID NO: 1382111 - RNA, 19 nt, Artificial Sequence
  Description of Artificial Sequence: Synthetic oligonucleotide
  Antisense strand to SEQ ID NO: 1382110
ucuguggagaacaugcugu

SEQ ID NO: 1382112 - RNA, 19 nt, Artificial Sequence
  Description of Artificial Sequence: Synthetic oligonucleotide
  Sense strand starting at position 1221 of SEQ ID NO: 1242920
gcgagugacaacgacaaau

SEQ ID NO: 1382113 - RNA, 19 nt, Artificial Sequence
  Description of Artificial Sequence: Synthetic oligonucleotide
  Antisense strand to SEQ ID NO: 1382112
auuugucguugucacucgc

SEQ ID NO: 1382114 - RNA, 19 nt, Artificial Sequence
  Description of Artificial Sequence: Synthetic oligonucleotide
  Sense strand starting at position 1345 of SEQ ID NO: 1242920
cugcaaagucaccagacua

SEQ ID NO: 1382115 - RNA, 19 nt, Artificial Sequence
  Description of Artificial Sequence: Synthetic oligonucleotide
  Antisense strand to SEQ ID NO: 1382114
uagucuggugacuuugcag

SEQ ID NO: 1382116 - RNA, 19 nt, Artificial Sequence
  Description of Artificial Sequence: Synthetic oligonucleotide
  Sense strand starting at position 1396 of SEQ ID NO: 1242920
aggacuaagucuggagaua

SEQ ID NO: 1382117 - RNA, 19 nt, Artificial Sequence
  Description of Artificial Sequence: Synthetic oligonucleotide
  Antisense strand to SEQ ID NO: 1382116
uaucuccagacuuaguccu

SEQ ID NO: 1382118 - RNA, 19 nt, Artificial Sequence
  Description of Artificial Sequence: Synthetic oligonucleotide
  Sense strand starting at position 1416 of SEQ ID NO: 1242920
uuuaauucgcuacaagaac

SEQ ID NO: 1382119 - RNA, 19 nt, Artificial Sequence
  Description of Artificial Sequence: Synthetic oligonucleotide
  Antisense strand to SEQ ID NO: 1382118
guucuuguagcgaauuaaa

SEQ ID NO: 1382120 - RNA, 19 nt, Artificial Sequence
  Description of Artificial Sequence: Synthetic oligonucleotide
  Sense strand starting at position 1437 of SEQ ID NO: 1242920
ucugguauauucucucgua

SEQ ID NO: 1382121 - RNA, 19 nt, Artificial Sequence
  Description of Artificial Sequence: Synthetic oligonucleotide
  Antisense strand to SEQ ID NO: 1382120
uacgagagaauauaccaga

SEQ ID NO: 1382122 - RNA, 19 nt, Artificial Sequence
  Description of Artificial Sequence: Synthetic oligonucleotide
  Sense strand starting at position 1438 of SEQ ID NO: 1242920
cugguauauucucucguac

SEQ ID NO: 1382123 - RNA, 19 nt, Artificial Sequence
  Description of Artificial Sequence: Synthetic oligonucleotide
  Antisense strand to SEQ ID NO: 1382122
guacgagagaauauaccag

SEQ ID NO: 1382124 - RNA, 19 nt, Artificial Sequence
  Description of Artificial Sequence: Synthetic oligonucleotide
  Sense strand starting at position 1651 of SEQ ID NO: 1242920
gguuguucacccuacggga

SEQ ID NO: 1382125 - RNA, 19 nt, Artificial Sequence
  Description of Artificial Sequence: Synthetic oligonucleotide
  Antisense strand to SEQ ID NO: 1382124
ucccguagggugaacaacc

SEQ ID NO: 1382126 - RNA, 19 nt, Artificial Sequence
  Description of Artificial Sequence: Synthetic oligonucleotide
  Sense strand starting at position 2539 of SEQ ID NO: 1242920
gcccgaggucgucuucauu

SEQ ID NO: 1382127 - RNA, 19 nt, Artificial Sequence
  Description of Artificial Sequence: Synthetic oligonucleotide
  Antisense strand to SEQ ID NO: 1382126
aaugaagacgaccucgggc

SEQ ID NO: 1382128 - RNA, 19 nt, Artificial Sequence
  Description of Artificial Sequence: Synthetic oligonucleotide
  Sense strand starting at position 2565 of SEQ ID NO: 1242920
cgugguucccuucagggau

SEQ ID NO: 1382129 - RNA, 19 nt, Artificial Sequence
  Description of Artificial Sequence: Synthetic oligonucleotide
  Antisense strand to SEQ ID NO: 1382128
aucccugaagggaaccacg

SEQ ID NO: 1382130 - RNA, 19 nt, Artificial Sequence
  Description of Artificial Sequence: Synthetic oligonucleotide
  Sense strand starting at position 2631 of SEQ ID NO: 1242920
cagggaacgucugucuagu

SEQ ID NO: 1382131 - RNA, 19 nt, Artificial Sequence
  Description of Artificial Sequence: Synthetic oligonucleotide
  Antisense strand to SEQ ID NO: 1382130
acuagacagacguucccug

SEQ ID NO: 1382132 - RNA, 19 nt, Artificial Sequence
  Description of Artificial Sequence: Synthetic oligonucleotide
  Sense strand starting at position 2633 of SEQ ID NO: 1242920
gggaacgucugucuaguuu

SEQ ID NO: 1382133 - RNA, 19 nt, Artificial Sequence
  Description of Artificial Sequence: Synthetic oligonucleotide
  Antisense strand to SEQ ID NO: 1382132
aaacuagacagacguuccc

SEQ ID NO: 1382134 - RNA, 19 nt, Artificial Sequence
  Description of Artificial Sequence: Synthetic oligonucleotide
  Sense strand starting at position 2697 of SEQ ID NO: 1242920
guaauaaacguuuguugag

SEQ ID NO: 1382135 - RNA, 19 nt, Artificial Sequence
  Description of Artificial Sequence: Synthetic oligonucleotide
  Antisense strand to SEQ ID NO: 1382134
cucaacaaacguuuauuac

SEQ ID NO: 1382136 - RNA, 19 nt, Artificial Sequence
  Description of Artificial Sequence: Synthetic oligonucleotide
  Sense strand starting at position 2768 of SEQ ID NO: 1242920
gugaaguccguuugagggu

SEQ ID NO: 1382137 - RNA, 19 nt, Artificial Sequence
  Description of Artificial Sequence: Synthetic oligonucleotide
  Antisense strand to SEQ ID NO: 1382136
acccucaaacggacuucac

SEQ ID NO: 1382138 - RNA, 19 nt, Artificial Sequence
  Description of Artificial Sequence: Synthetic oligonucleotide
  Sense strand starting at position 2798 of SEQ ID NO: 1242920
gcggaaugaugucccugaa

SEQ ID NO: 1382139 - RNA, 19 nt, Artificial Sequence
  Description of Artificial Sequence: Synthetic oligonucleotide
  Antisense strand to SEQ ID NO: 1382138
uucagggacaucauuccgc

SEQ ID NO: 1382140 - RNA, 19 nt, Artificial Sequence
  Description of Artificial Sequence: Synthetic oligonucleotide
  Sense strand starting at position 2801 of SEQ ID NO: 1242920
gaaugaugucccugaaucc

SEQ ID NO: 1382141 - RNA, 19 nt, Artificial Sequence
  Description of Artificial Sequence: Synthetic oligonucleotide
  Antisense strand to SEQ ID NO: 1382140
ggauucagggacaucauuc

SEQ ID NO: 1382142 - RNA, 19 nt, Artificial Sequence
  Description of Artificial Sequence: Synthetic oligonucleotide
  Sense strand starting at position 2882 of SEQ ID NO: 1242920
ccaugcugucccuggcaga

SEQ ID NO: 1382143 - RNA, 19 nt, Artificial Sequence
  Description of Artificial Sequence: Synthetic oligonucleotide
  Antisense strand to SEQ ID NO: 1382142
ucugccagggacagcaugg

SEQ ID NO: 1382144 - RNA, 19 nt, Artificial Sequence
  Description of Artificial Sequence: Synthetic oligonucleotide
  Sense strand starting at position 3047 of SEQ ID NO: 1242920
cagacuuuccugcguggaa

SEQ ID NO: 1382145 - RNA, 19 nt, Artificial Sequence
  Description of Artificial Sequence: Synthetic oligonucleotide
  Antisense strand to SEQ ID NO: 1382144
uuccacgcaggaaagucug

SEQ ID NO: 1382146 - RNA, 19 nt, Artificial Sequence
  Description of Artificial Sequence: Synthetic oligonucleotide
  Sense strand starting at position 3048 of SEQ ID NO: 1242920
agacuuuccugcguggaag

SEQ ID NO: 1382147 - RNA, 19 nt, Artificial Sequence
  Description of Artificial Sequence: Synthetic oligonucleotide
  Antisense strand to SEQ ID NO: 1382146
cuuccacgcaggaaagucu

SEQ ID NO: 1382148 - RNA, 19 nt, Artificial Sequence
  Description of Artificial Sequence: Synthetic oligonucleotide
  Sense strand starting at position 3282 of SEQ ID NO: 1242920
gcagaaugggaucgcuguu

SEQ ID NO: 1382149 - RNA, 19 nt, Artificial Sequence
  Description of Artificial Sequence: Synthetic oligonucleotide
  Antisense strand to SEQ ID NO: 1382148
aacagcgaucccauucugc

SEQ ID NO: 1382150 - RNA, 19 nt, Artificial Sequence
  Description of Artificial Sequence: Synthetic oligonucleotide
  Sense strand starting at position 3288 of SEQ ID NO: 1242920
ugggaucgcuguucuauca

SEQ ID NO: 1382151 - RNA, 19 nt, Artificial Sequence
  Description of Artificial Sequence: Synthetic oligonucleotide
  Antisense strand to SEQ ID NO: 1382150
ugauagaacagcgauccca

SEQ ID NO: 1382152 - RNA, 19 nt, Artificial Sequence
  Description of Artificial Sequence: Synthetic oligonucleotide
  Sense strand starting at position 3371 of SEQ ID NO: 1242920
ccacguccuccuuacugaa

SEQ ID NO: 1382153 - RNA, 19 nt, Artificial Sequence
  Description of Artificial Sequence: Synthetic oligonucleotide
  Antisense strand to SEQ ID NO: 1382152
uucaguaaggaggacgugg

SEQ ID NO: 1382154 - RNA, 19 nt, Artificial Sequence
  Description of Artificial Sequence: Synthetic oligonucleotide
  Sense strand starting at position 3373 of SEQ ID NO: 1242920
acguccuccuuacugaauu

SEQ ID NO: 1382155 - RNA, 19 nt, Artificial Sequence
  Description of Artificial Sequence: Synthetic oligonucleotide
  Antisense strand to SEQ ID NO: 1382154
aauucaguaaggaggacgu

SEQ ID NO: 1382156 - RNA, 19 nt, Artificial Sequence
  Description of Artificial Sequence: Synthetic oligonucleotide
  Sense strand starting at position 3385 of SEQ ID NO: 1242920
cugaauugcugaucuaaag

SEQ ID NO: 1382157 - RNA, 19 nt, Artificial Sequence
  Description of Artificial Sequence: Synthetic oligonucleotide
  Antisense strand to SEQ ID NO: 1382156
cuuuagaucagcaauucag

SEQ ID NO: 1382158 - RNA, 19 nt, Artificial Sequence
  Description of Artificial Sequence: Synthetic oligonucleotide
  Sense strand starting at position 3423 of SEQ ID NO: 1242920
ggcagucuuggugggaaug

SEQ ID NO: 1382159 - RNA, 19 nt, Artificial Sequence
  Description of Artificial Sequence: Synthetic oligonucleotide
  Antisense strand to SEQ ID NO: 1382158
cauucccaccaagacugcc

SEQ ID NO: 1382160 - RNA, 19 nt, Artificial Sequence
  Description of Artificial Sequence: Synthetic oligonucleotide
  Sense strand starting at position 3424 of SEQ ID NO: 1242920
gcagucuuggugggaaugu

SEQ ID NO: 1382161 - RNA, 19 nt, Artificial Sequence
  Description of Artificial Sequence: Synthetic oligonucleotide
  Antisense strand to SEQ ID NO: 1382160
acauucccaccaagacugc

SEQ ID NO: 1382162 - RNA, 19 nt, Artificial Sequence
  Description of Artificial Sequence: Synthetic oligonucleotide
  Sense strand starting at position 3434 of SEQ ID NO: 1242920
ugggaauguuuguuucgca

SEQ ID NO: 1382163 - RNA, 19 nt, Artificial Sequence
  Description of Artificial Sequence: Synthetic oligonucleotide
  Antisense strand to SEQ ID NO: 1382162
ugcgaaacaaacauuccca

SEQ ID NO: 1382164 - RNA, 19 nt, Artificial Sequence
  Description of Artificial Sequence: Synthetic oligonucleotide
  Sense strand starting at position 3435 of SEQ ID NO: 1242920
gggaauguuuguuucgcag

SEQ ID NO: 1382165 - RNA, 19 nt, Artificial Sequence
  Description of Artificial Sequence: Synthetic oligonucleotide
  Antisense strand to SEQ ID NO: 1382164
cugcgaaacaaacauuccc

SEQ ID NO: 1382166 - RNA, 19 nt, Artificial Sequence
  Description of Artificial Sequence: Synthetic oligonucleotide
  Sense strand starting at position 3442 of SEQ ID NO: 1242920
uuuguuucgcagcaaagga

SEQ ID NO: 1382167 - RNA, 19 nt, Artificial Sequence
  Description of Artificial Sequence: Synthetic oligonucleotide
  Antisense strand to SEQ ID NO: 1382166
uccuuugcugcgaaacaaa

SEQ ID NO: 1382168 - RNA, 19 nt, Artificial Sequence
  Description of Artificial Sequence: Synthetic oligonucleotide
  Sense strand starting at position 3533 of SEQ ID NO: 1242920
aggacugugagcugauguu

SEQ ID NO: 1382169 - RNA, 19 nt, Artificial Sequence
  Description of Artificial Sequence: Synthetic oligonucleotide
  Antisense strand to SEQ ID NO: 1382168
aacaucagcucacaguccu

SEQ ID NO: 1382170 - RNA, 19 nt, Artificial Sequence
  Description of Artificial Sequence: Synthetic oligonucleotide
  Sense strand starting at position 3793 of SEQ ID NO: 1242920
gcaggaguucuuggccaau

SEQ ID NO: 1382171 - RNA, 19 nt, Artificial Sequence
  Description of Artificial Sequence: Synthetic oligonucleotide
  Antisense strand to SEQ ID NO: 1382170
auuggccaagaacuccugc

SEQ ID NO: 1382172 - RNA, 19 nt, Artificial Sequence
  Description of Artificial Sequence: Synthetic oligonucleotide
  Sense strand starting at position 6 of SEQ ID NO: 1242921
uguguaagauuagucgaga

SEQ ID NO: 1382173 - RNA, 19 nt, Artificial Sequence
  Description of Artificial Sequence: Synthetic oligonucleotide
  Antisense strand to SEQ ID NO: 1382172
ucucgacuaaucuuacaca

SEQ ID NO: 1382174 - RNA, 19 nt, Artificial Sequence
  Description of Artificial Sequence: Synthetic oligonucleotide
  Sense strand starting at position 7 of SEQ ID NO: 1242921
guguaagauuagucgagag

SEQ ID NO: 1382175 - RNA, 19 nt, Artificial Sequence
  Description of Artificial Sequence: Synthetic oligonucleotide
  Antisense strand to SEQ ID NO: 1382174
cucucgacuaaucuuacac

SEQ ID NO: 1382176 - RNA, 19 nt, Artificial Sequence
  Description of Artificial Sequence: Synthetic oligonucleotide
  Sense strand starting at position 141 of SEQ ID NO: 1242921
auuuguuuccguugcauua

SEQ ID NO: 1382177 - RNA, 19 nt, Artificial Sequence
  Description of Artificial Sequence: Synthetic oligonucleotide
  Antisense strand to SEQ ID NO: 1382176
uaaugcaacggaaacaaau

SEQ ID NO: 1382178 - RNA, 19 nt, Artificial Sequence
  Description of Artificial Sequence: Synthetic oligonucleotide
  Sense strand starting at position 200 of SEQ ID NO: 1242921
gagacaugccagcaacugu

SEQ ID NO: 1382179 - RNA, 19 nt, Artificial Sequence
  Description of Artificial Sequence: Synthetic oligonucleotide
  Antisense strand to SEQ ID NO: 1382178
acaguugcuggcaugucuc

SEQ ID NO: 1382180 - RNA, 19 nt, Artificial Sequence
  Description of Artificial Sequence: Synthetic oligonucleotide
  Sense strand starting at position 217 of SEQ ID NO: 1242921
guuaauagugcugagaugu

SEQ ID NO: 1382181 - RNA, 19 nt, Artificial Sequence
  Description of Artificial Sequence: Synthetic oligonucleotide
  Antisense strand to SEQ ID NO: 1382180
acaucucagcacuauuaac

SEQ ID NO: 1382182 - RNA, 19 nt, Artificial Sequence
  Description of Artificial Sequence: Synthetic oligonucleotide
  Sense strand starting at position 223 of SEQ ID NO: 1242921
agugcugagauguaacagu

SEQ ID NO: 1382183 - RNA, 19 nt, Artificial Sequence
  Description of Artificial Sequence: Synthetic oligonucleotide
  Antisense strand to SEQ ID NO: 1382182
acuguuacaucucagcacu

SEQ ID NO: 1382184 - RNA, 19 nt, Artificial Sequence
  Description of Artificial Sequence: Synthetic oligonucleotide
  Sense strand starting at position 447 of SEQ ID NO: 1242921
auacuuucucuugacggaa

SEQ ID NO: 1382185 - RNA, 19 nt, Artificial Sequence
  Description of Artificial Sequence: Synthetic oligonucleotide
  Antisense strand to SEQ ID NO: 1382184
uuccgucaagagaaaguau

SEQ ID NO: 1382186 - RNA, 19 nt, Artificial Sequence
  Description of Artificial Sequence: Synthetic oligonucleotide
  Sense strand starting at position 450 of SEQ ID NO: 1242921
cuuucucuugacggaaauu

SEQ ID NO: 1382187 - RNA, 19 nt, Artificial Sequence
  Description of Artificial Sequence: Synthetic oligonucleotide
  Antisense strand to SEQ ID NO: 1382186
aauuuccgucaagagaaag

SEQ ID NO: 1382188 - RNA, 19 nt, Artificial Sequence
  Description of Artificial Sequence: Synthetic oligonucleotide
  Sense strand starting at position 758 of SEQ ID NO: 1242921
cucaguuccuuauuaaggu

SEQ ID NO: 1382189 - RNA, 19 nt, Artificial Sequence
  Description of Artificial Sequence: Synthetic oligonucleotide
  Antisense strand to SEQ ID NO: 1382188
accuuaauaaggaacugag

SEQ ID NO: 1382190 - RNA, 19 nt, Artificial Sequence
  Description of Artificial Sequence: Synthetic oligonucleotide
  Sense strand starting at position 783 of SEQ ID NO: 1242921
uaaggagagugcuccaaau

SEQ ID NO: 1382191 - RNA, 19 nt, Artificial Sequence
  Description of Artificial Sequence: Synthetic oligonucleotide
  Antisense strand to SEQ ID NO: 1382190
auuuggagcacucuccuua

SEQ ID NO: 1382192 - RNA, 19 nt, Artificial Sequence
  Description of Artificial Sequence: Synthetic oligonucleotide
  Sense strand starting at position 803 of SEQ ID NO: 1242921
ggcuucuugaguugaauua

SEQ ID NO: 1382193 - RNA, 19 nt, Artificial Sequence
  Description of Artificial Sequence: Synthetic oligonucleotide
  Antisense strand to SEQ ID NO: 1382192
uaauucaacucaagaagcc

SEQ ID NO: 1382194 - RNA, 19 nt, Artificial Sequence
  Description of Artificial Sequence: Synthetic oligonucleotide
  Sense strand starting at position 804 of SEQ ID NO: 1242921
gcuucuugaguugaauuaa

SEQ ID NO: 1382195 - RNA, 19 nt, Artificial Sequence
  Description of Artificial Sequence: Synthetic oligonucleotide
  Antisense strand to SEQ ID NO: 1382194
uuaauucaacucaagaagc

SEQ ID NO: 1382196 - RNA, 19 nt, Artificial Sequence
  Description of Artificial Sequence: Synthetic oligonucleotide
  Sense strand starting at position 814 of SEQ ID NO: 1242921
uugaauuaaucuucuggcu

SEQ ID NO: 1382197 - RNA, 19 nt, Artificial Sequence
  Description of Artificial Sequence: Synthetic oligonucleotide
  Antisense strand to SEQ ID NO: 1382196
agccagaagauuaauucaa

SEQ ID NO: 1382198 - RNA, 19 nt, Artificial Sequence
  Description of Artificial Sequence: Synthetic oligonucleotide
  Sense strand starting at position 832 of SEQ ID NO: 1242921
uccggucuccacugggaau

SEQ ID NO: 1382199 - RNA, 19 nt, Artificial Sequence
  Description of Artificial Sequence: Synthetic oligonucleotide
  Antisense strand to SEQ ID NO: 1382198
auucccaguggagaccgga

SEQ ID NO: 1382200 - RNA, 19 nt, Artificial Sequence
  Description of Artificial Sequence: Synthetic oligonucleotide
  Sense strand starting at position 915 of SEQ ID NO: 1242921
gaaauuacguuugucauuu

SEQ ID NO: 1382201 - RNA, 19 nt, Artificial Sequence
  Description of Artificial Sequence: Synthetic oligonucleotide
  Antisense strand to SEQ ID NO: 1382200
aaaugacaaacguaauuuc

SEQ ID NO: 1382202 - RNA, 19 nt, Artificial Sequence
  Description of Artificial Sequence: Synthetic oligonucleotide
  Sense strand starting at position 945 of SEQ ID NO: 1242921
accauuugucauuguccuu

SEQ ID NO: 1382203 - RNA, 19 nt, Artificial Sequence
  Description of Artificial Sequence: Synthetic oligonucleotide
  Antisense strand to SEQ ID NO: 1382202
aaggacaaugacaaauggu

SEQ ID NO: 1382204 - RNA, 19 nt, Artificial Sequence
  Description of Artificial Sequence: Synthetic oligonucleotide
  Sense strand starting at position 1004 of SEQ ID NO: 1242921
agagccuggcucugagaaa

SEQ ID NO: 1382205 - RNA, 19 nt, Artificial Sequence
  Description of Artificial Sequence: Synthetic oligonucleotide
  Antisense strand to SEQ ID NO: 1382204
uuucucagagccaggcucu

SEQ ID NO: 1382206 - RNA, 19 nt, Artificial Sequence
  Description of Artificial Sequence: Synthetic oligonucleotide
  Sense strand starting at position 1032 of SEQ ID NO: 1242921
cgaaauauuuacugaauga

SEQ ID NO: 1382207 - RNA, 19 nt, Artificial Sequence
  Description of Artificial Sequence: Synthetic oligonucleotide
  Antisense strand to SEQ ID NO: 1382206
ucauucaguaaauauuucg

SEQ ID NO: 1382208 - RNA, 19 nt, Artificial Sequence
  Description of Artificial Sequence: Synthetic oligonucleotide
  Sense strand starting at position 1508 of SEQ ID NO: 1242921
acuuccuuucccuagggau

SEQ ID NO: 1382209 - RNA, 19 nt, Artificial Sequence
  Description of Artificial Sequence: Synthetic oligonucleotide
  Antisense strand to SEQ ID NO: 1382208
aucccuagggaaaggaagu

SEQ ID NO: 1382210 - RNA, 19 nt, Artificial Sequence
  Description of Artificial Sequence: Synthetic oligonucleotide
  Sense strand starting at position 1967 of SEQ ID NO: 1242921
gggacuucccugggccaga

SEQ ID NO: 1382211 - RNA, 19 nt, Artificial Sequence
  Description of Artificial Sequence: Synthetic oligonucleotide
  Antisense strand to SEQ ID NO: 1382210
ucuggcccagggaaguccc

SEQ ID NO: 1382212 - RNA, 19 nt, Artificial Sequence
  Description of Artificial Sequence: Synthetic oligonucleotide
  Sense strand starting at position 2299 of SEQ ID NO: 1242921
ugucacgucguuccugaau

SEQ ID NO: 1382213 - RNA, 19 nt, Artificial Sequence
  Description of Artificial Sequence: Synthetic oligonucleotide
  Antisense strand to SEQ ID NO: 1382212
auucaggaacgacgugaca

SEQ ID NO: 1382214 - RNA, 19 nt, Artificial Sequence
  Description of Artificial Sequence: Synthetic oligonucleotide
  Sense strand starting at position 2660 of SEQ ID NO: 1242921
gagggucgcauguguauuu

SEQ ID NO: 1382215 - RNA, 19 nt, Artificial Sequence
  Description of Artificial Sequence: Synthetic oligonucleotide
  Antisense strand to SEQ ID NO: 1382214
aaauacacaugcgacccuc

SEQ ID NO: 1382216 - RNA, 19 nt, Artificial Sequence
  Description of Artificial Sequence: Synthetic oligonucleotide
  Sense strand starting at position 2707 of SEQ ID NO: 1242921
uuagcagauuaugucuaaa

SEQ ID NO: 1382217 - RNA, 19 nt, Artificial Sequence
  Description of Artificial Sequence: Synthetic oligonucleotide
  Antisense strand to SEQ ID NO: 1382216
uuuagacauaaucugcuaa

SEQ ID NO: 1382218 - RNA, 19 nt, Artificial Sequence
  Description of Artificial Sequence: Synthetic oligonucleotide
  Sense strand starting at position 2771 of SEQ ID NO: 1242921
gacaaacucguguauguca

SEQ ID NO: 1382219 - RNA, 19 nt, Artificial Sequence
  Description of Artificial Sequence: Synthetic oligonucleotide
  Antisense strand to SEQ ID NO: 1382218
ugacauacacgaguuuguc

SEQ ID NO: 1382220 - RNA, 19 nt, Artificial Sequence
  Description of Artificial Sequence: Synthetic oligonucleotide
  Sense strand starting at position 2793 of SEQ ID NO: 1242921
ccugauaacuguuugugga

SEQ ID NO: 1382221 - RNA, 19 nt, Artificial Sequence
  Description of Artificial Sequence: Synthetic oligonucleotide
  Antisense strand to SEQ ID NO: 1382220
uccacaaacaguuaucagg

SEQ ID NO: 1382222 - RNA, 19 nt, Artificial Sequence
  Description of Artificial Sequence: Synthetic oligonucleotide
  Sense strand starting at position 2794 of SEQ ID NO: 1242921
cugauaacuguuuguggaa

SEQ ID NO: 1382223 - RNA, 19 nt, Artificial Sequence
  Description of Artificial Sequence: Synthetic oligonucleotide
  Antisense strand to SEQ ID NO: 1382222
uuccacaaacaguuaucag

SEQ ID NO: 1382224 - RNA, 19 nt, Artificial Sequence
  Description of Artificial Sequence: Synthetic oligonucleotide
  Sense strand starting at position 2795 of SEQ ID NO: 1242921
ugauaacuguuuguggaag

SEQ ID NO: 1382225 - RNA, 19 nt, Artificial Sequence
  Description of Artificial Sequence: Synthetic oligonucleotide
  Antisense strand to SEQ ID NO: 1382224
cuuccacaaacaguuauca

SEQ ID NO: 1382226 - RNA, 19 nt, Artificial Sequence
  Description of Artificial Sequence: Synthetic oligonucleotide
  Sense strand starting at position 2888 of SEQ ID NO: 1242921
ucaaacgagucuuucucau

SEQ ID NO: 1382227 - RNA, 19 nt, Artificial Sequence
  Description of Artificial Sequence: Synthetic oligonucleotide
  Antisense strand to SEQ ID NO: 1382226
augagaaagacucguuuga

SEQ ID NO: 1382228 - RNA, 19 nt, Artificial Sequence
  Description of Artificial Sequence: Synthetic oligonucleotide
  Sense strand starting at position 2901 of SEQ ID NO: 1242921
ucucauguguagucuauuu

SEQ ID NO: 1382229 - RNA, 19 nt, Artificial Sequence
  Description of Artificial Sequence: Synthetic oligonucleotide
  Antisense strand to SEQ ID NO: 1382228
aaauagacuacacaugaga

SEQ ID NO: 1382230 - RNA, 19 nt, Artificial Sequence
  Description of Artificial Sequence: Synthetic oligonucleotide
  Sense strand starting at position 2908 of SEQ ID NO: 1242921
uguagucuauuucucugau

SEQ ID NO: 1382231 - RNA, 19 nt, Artificial Sequence
  Description of Artificial Sequence: Synthetic oligonucleotide
  Antisense strand to SEQ ID NO: 1382230
aucagagaaauagacuaca

SEQ ID NO: 1382232 - RNA, 19 nt, Artificial Sequence
  Description of Artificial Sequence: Synthetic oligonucleotide
  Sense strand starting at position 2923 of SEQ ID NO: 1242921
ugauacucgucucuuaaac

SEQ ID NO: 1382233 - RNA, 19 nt, Artificial Sequence
  Description of Artificial Sequence: Synthetic oligonucleotide
  Antisense strand to SEQ ID NO: 1382232
guuuaagagacgaguauca

SEQ ID NO: 1382234 - RNA, 19 nt, Artificial Sequence
  Description of Artificial Sequence: Synthetic oligonucleotide
  Sense strand starting at position 3145 of SEQ ID NO: 1242921
auugcuugagcccauuaau

SEQ ID NO: 1382235 - RNA, 19 nt, Artificial Sequence
  Description of Artificial Sequence: Synthetic oligonucleotide
  Antisense strand to SEQ ID NO: 1382234
auuaaugggcucaagcaau

SEQ ID NO: 1382236 - RNA, 19 nt, Artificial Sequence
  Description of Artificial Sequence: Synthetic oligonucleotide
  Sense strand starting at position 3471 of SEQ ID NO: 1242921
agugcagugagccaggauu

SEQ ID NO: 1382237 - RNA, 19 nt, Artificial Sequence
  Description of Artificial Sequence: Synthetic oligonucleotide
  Antisense strand to SEQ ID NO: 1382236
aauccuggcucacugcacu

SEQ ID NO: 1382238 - RNA, 19 nt, Artificial Sequence
  Description of Artificial Sequence: Synthetic oligonucleotide
  Sense strand starting at position 3523 of SEQ ID NO: 1242921
agacgcuggcucuaaauaa

SEQ ID NO: 1382239 - RNA, 19 nt, Artificial Sequence
  Description of Artificial Sequence: Synthetic oligonucleotide
  Antisense strand to SEQ ID NO: 1382238
uuauuuagagccagcgucu

SEQ ID NO: 1382240 - RNA, 19 nt, Artificial Sequence
  Description of Artificial Sequence: Synthetic oligonucleotide
  Sense strand starting at position 3573 of SEQ ID NO: 1242921
ccgagauagaacuguguac

SEQ ID NO: 1382241 - RNA, 19 nt, Artificial Sequence
  Description of Artificial Sequence: Synthetic oligonucleotide
  Antisense strand to SEQ ID NO: 1382240
guacacaguucuaucucgg

SEQ ID NO: 1382242 - RNA, 19 nt, Artificial Sequence
  Description of Artificial Sequence: Synthetic oligonucleotide
  Sense strand starting at position 3575 of SEQ ID NO: 1242921
gagauagaacuguguaccu

SEQ ID NO: 1382243 - RNA, 19 nt, Artificial Sequence
  Description of Artificial Sequence: Synthetic oligonucleotide
  Antisense strand to SEQ ID NO: 1382242
agguacacaguucuaucuc

SEQ ID NO: 1382244 - RNA, 19 nt, Artificial Sequence
  Description of Artificial Sequence: Synthetic oligonucleotide
  Sense strand starting at position 3584 of SEQ ID NO: 1242921
cuguguaccuuggcaauuu

SEQ ID NO: 1382245 - RNA, 19 nt, Artificial Sequence
  Description of Artificial Sequence: Synthetic oligonucleotide
  Antisense strand to SEQ ID NO: 1382244
aaauugccaagguacacag

SEQ ID NO: 1382246 - RNA, 19 nt, Artificial Sequence
  Description of Artificial Sequence: Synthetic oligonucleotide
  Sense strand starting at position 3756 of SEQ ID NO: 1242921
uugggauucuaccugugaa

SEQ ID NO: 1382247 - RNA, 19 nt, Artificial Sequence
  Description of Artificial Sequence: Synthetic oligonucleotide
  Antisense strand to SEQ ID NO: 1382246
uucacagguagaaucccaa

SEQ ID NO: 1382248 - RNA, 19 nt, Artificial Sequence
  Description of Artificial Sequence: Synthetic oligonucleotide
  Sense strand starting at position 3757 of SEQ ID NO: 1242921
ugggauucuaccugugaaa

SEQ ID NO: 1382249 - RNA, 19 nt, Artificial Sequence
  Description of Artificial Sequence: Synthetic oligonucleotide
  Antisense strand to SEQ ID NO: 1382248
uuucacagguagaauccca

SEQ ID NO: 1382250 - RNA, 19 nt, Artificial Sequence
  Description of Artificial Sequence: Synthetic oligonucleotide
  Sense strand starting at position 3781 of SEQ ID NO: 1242921
aguagagauucuucuuuaa

SEQ ID NO: 1382251 - RNA, 19 nt, Artificial Sequence
  Description of Artificial Sequence: Synthetic oligonucleotide
  Antisense strand to SEQ ID NO: 1382250
uuaaagaagaaucucuacu

SEQ ID NO: 1382252 - RNA, 19 nt, Artificial Sequence
  Description of Artificial Sequence: Synthetic oligonucleotide
  Sense strand starting at position 21 of SEQ ID NO: 1242922
acgauuguuagaggauuaa

SEQ ID NO: 1382253 - RNA, 19 nt, Artificial Sequence
  Description of Artificial Sequence: Synthetic oligonucleotide
  Antisense strand to SEQ ID NO: 1382252
uuaauccucuaacaaucgu

SEQ ID NO: 1382254 - RNA, 19 nt, Artificial Sequence
  Description of Artificial Sequence: Synthetic oligonucleotide
  Sense strand starting at position 156 of SEQ ID NO: 1242922
ggaucaugugcuuacaaua

SEQ ID NO: 1382255 - RNA, 19 nt, Artificial Sequence
  Description of Artificial Sequence: Synthetic oligonucleotide
  Antisense strand to SEQ ID NO: 1382254
uauuguaagcacaugaucc

SEQ ID NO: 1382256 - RNA, 19 nt, Artificial Sequence
  Description of Artificial Sequence: Synthetic oligonucleotide
  Sense strand starting at position 312 of SEQ ID NO: 1242922
ugcauuuguuauucuuaga

SEQ ID NO: 1382257 - RNA, 19 nt, Artificial Sequence
  Description of Artificial Sequence: Synthetic oligonucleotide
  Antisense strand to SEQ ID NO: 1382256
ucuaagaauaacaaaugca

SEQ ID NO: 1382258 - RNA, 19 nt, Artificial Sequence
  Description of Artificial Sequence: Synthetic oligonucleotide
  Sense strand starting at position 516 of SEQ ID NO: 1242922
aggugacugaguuauguau

SEQ ID NO: 1382259 - RNA, 19 nt, Artificial Sequence
  Description of Artificial Sequence: Synthetic oligonucleotide
  Antisense strand to SEQ ID NO: 1382258
auacauaacucagucaccu

SEQ ID NO: 1382260 - RNA, 19 nt, Artificial Sequence
  Description of Artificial Sequence: Synthetic oligonucleotide
  Sense strand starting at position 584 of SEQ ID NO: 1242922
augggaaauuauguuaacu

SEQ ID NO: 1382261 - RNA, 19 nt, Artificial Sequence
  Description of Artificial Sequence: Synthetic oligonucleotide
  Antisense strand to SEQ ID NO: 1382260
aguuaacauaauuucccau

SEQ ID NO: 1382262 - RNA, 19 nt, Artificial Sequence
  Description of Artificial Sequence: Synthetic oligonucleotide
  Sense strand starting at position 621 of SEQ ID NO: 1242922
agaggaauuucugauuagg

SEQ ID NO: 1382263 - RNA, 19 nt, Artificial Sequence
  Description of Artificial Sequence: Synthetic oligonucleotide
  Antisense strand to SEQ ID NO: 1382262
ccuaaucagaaauuccucu

SEQ ID NO: 1382264 - RNA, 19 nt, Artificial Sequence
  Description of Artificial Sequence: Synthetic oligonucleotide
  Sense strand starting at position 632 of SEQ ID NO: 1242922
ugauuaggcucuuugagag

SEQ ID NO: 1382265 - RNA, 19 nt, Artificial Sequence
  Description of Artificial Sequence: Synthetic oligonucleotide
  Antisense strand to SEQ ID NO: 1382264
cucucaaagagccuaauca

SEQ ID NO: 1382266 - RNA, 19 nt, Artificial Sequence
  Description of Artificial Sequence: Synthetic oligonucleotide
  Sense strand starting at position 638 of SEQ ID NO: 1242922
ggcucuuugagagauugug

SEQ ID NO: 1382267 - RNA, 19 nt, Artificial Sequence
  Description of Artificial Sequence: Synthetic oligonucleotide
  Antisense strand to SEQ ID NO: 1382266
cacaaucucucaaagagcc

SEQ ID NO: 1382268 - RNA, 19 nt, Artificial Sequence
  Description of Artificial Sequence: Synthetic oligonucleotide
  Sense strand starting at position 646 of SEQ ID NO: 1242922
gagagauugugacuugauu

SEQ ID NO: 1382269 - RNA, 19 nt, Artificial Sequence
  Description of Artificial Sequence: Synthetic oligonucleotide
  Antisense strand to SEQ ID NO: 1382268
aaucaagucacaaucucuc

SEQ ID NO: 1382270 - RNA, 19 nt, Artificial Sequence
  Description of Artificial Sequence: Synthetic oligonucleotide
  Sense strand starting at position 658 of SEQ ID NO: 1242922
cuugauuuccauuguuucu

SEQ ID NO: 1382271 - RNA, 19 nt, Artificial Sequence
  Description of Artificial Sequence: Synthetic oligonucleotide
  Antisense strand to SEQ ID NO: 1382270
agaaacaauggaaaucaag

SEQ ID NO: 1382272 - RNA, 19 nt, Artificial Sequence
  Description of Artificial Sequence: Synthetic oligonucleotide
  Sense strand starting at position 992 of SEQ ID NO: 1242922
aggucuauguucuuagaaa

SEQ ID NO: 1382273 - RNA, 19 nt, Artificial Sequence
  Description of Artificial Sequence: Synthetic oligonucleotide
  Antisense strand to SEQ ID NO: 1382272
uuucuaagaacauagaccu

SEQ ID NO: 1382274 - RNA, 19 nt, Artificial Sequence
  Description of Artificial Sequence: Synthetic oligonucleotide
  Sense strand starting at position 1006 of SEQ ID NO: 1242922
agaaacagauccguugacu

SEQ ID NO: 1382275 - RNA, 19 nt, Artificial Sequence
  Description of Artificial Sequence: Synthetic oligonucleotide
  Antisense strand to SEQ ID NO: 1382274
agucaacggaucuguuucu

SEQ ID NO: 1382276 - RNA, 19 nt, Artificial Sequence
  Description of Artificial Sequence: Synthetic oligonucleotide
  Sense strand starting at position 1054 of SEQ ID NO: 1242922
guaggugugacuuauggac

SEQ ID NO: 1382277 - RNA, 19 nt, Artificial Sequence
  Description of Artificial Sequence: Synthetic oligonucleotide
  Antisense strand to SEQ ID NO: 1382276
guccauaagucacaccuac

SEQ ID NO: 1382278 - RNA, 19 nt, Artificial Sequence
  Description of Artificial Sequence: Synthetic oligonucleotide
  Sense strand starting at position 1058 of SEQ ID NO: 1242922
gugugacuuauggacagau

SEQ ID NO: 1382279 - RNA, 19 nt, Artificial Sequence
  Description of Artificial Sequence: Synthetic oligonucleotide
  Antisense strand to SEQ ID NO: 1382278
aucuguccauaagucacac

SEQ ID NO: 1382280 - RNA, 19 nt, Artificial Sequence
  Description of Artificial Sequence: Synthetic oligonucleotide
  Sense strand starting at position 1078 of SEQ ID NO: 1242922
gagcgagauaaugggugau

SEQ ID NO: 1382281 - RNA, 19 nt, Artificial Sequence
  Description of Artificial Sequence: Synthetic oligonucleotide
  Antisense strand to SEQ ID NO: 1382280
aucacccauuaucucgcuc

SEQ ID NO: 1382282 - RNA, 19 nt, Artificial Sequence
  Description of Artificial Sequence: Synthetic oligonucleotide
  Sense strand starting at position 1080 of SEQ ID NO: 1242922
gcgagauaaugggugauaa

SEQ ID NO: 1382283 - RNA, 19 nt, Artificial Sequence
  Description of Artificial Sequence: Synthetic oligonucleotide
  Antisense strand to SEQ ID NO: 1382282
uuaucacccauuaucucgc

SEQ ID NO: 1382284 - RNA, 19 nt, Artificial Sequence
  Description of Artificial Sequence: Synthetic oligonucleotide
  Sense strand starting at position 1192 of SEQ ID NO: 1242922
aguagaggcucuuuggaga

SEQ ID NO: 1382285 - RNA, 19 nt, Artificial Sequence
  Description of Artificial Sequence: Synthetic oligonucleotide
  Antisense strand to SEQ ID NO: 1382284
ucuccaaagagccucuacu

SEQ ID NO: 1382286 - RNA, 19 nt, Artificial Sequence
  Description of Artificial Sequence: Synthetic oligonucleotide
  Sense strand starting at position 1226 of SEQ ID NO: 1242922
gggauaugguaccugugaa

SEQ ID NO: 1382287 - RNA, 19 nt, Artificial Sequence
  Description of Artificial Sequence: Synthetic oligonucleotide
  Antisense strand to SEQ ID NO: 1382286
uucacagguaccauauccc

SEQ ID NO: 1382288 - RNA, 19 nt, Artificial Sequence
  Description of Artificial Sequence: Synthetic oligonucleotide
  Sense strand starting at position 1227 of SEQ ID NO: 1242922
ggauaugguaccugugaau

SEQ ID NO: 1382289 - RNA, 19 nt, Artificial Sequence
  Description of Artificial Sequence: Synthetic oligonucleotide
  Antisense strand to SEQ ID NO: 1382288
auucacagguaccauaucc

SEQ ID NO: 1382290 - RNA, 19 nt, Artificial Sequence
  Description of Artificial Sequence: Synthetic oligonucleotide
  Sense strand starting at position 1239 of SEQ ID NO: 1242922
ugugaauaccugcacacaa

SEQ ID NO: 1382291 - RNA, 19 nt, Artificial Sequence
  Description of Artificial Sequence: Synthetic oligonucleotide
  Antisense strand to SEQ ID NO: 1382290
uugugugcagguauucaca

SEQ ID NO: 1382292 - RNA, 19 nt, Artificial Sequence
  Description of Artificial Sequence: Synthetic oligonucleotide
  Sense strand starting at position 1310 of SEQ ID NO: 1242922
ccugaaauguccucuaugg

SEQ ID NO: 1382293 - RNA, 19 nt, Artificial Sequence
  Description of Artificial Sequence: Synthetic oligonucleotide
  Antisense strand to SEQ ID NO: 1382292
ccauagaggacauuucagg

SEQ ID NO: 1382294 - RNA, 19 nt, Artificial Sequence
  Description of Artificial Sequence: Synthetic oligonucleotide
  Sense strand starting at position 1330 of SEQ ID NO: 1242922
uguagauuucugugacugu

SEQ ID NO: 1382295 - RNA, 19 nt, Artificial Sequence
  Description of Artificial Sequence: Synthetic oligonucleotide
  Antisense strand to SEQ ID NO: 1382294
acagucacagaaaucuaca

SEQ ID NO: 1382296 - RNA, 19 nt, Artificial Sequence
  Description of Artificial Sequence: Synthetic oligonucleotide
  Sense strand starting at position 1411 of SEQ ID NO: 1242922
guacucaguagaggauuaa

SEQ ID NO: 1382297 - RNA, 19 nt, Artificial Sequence
  Description of Artificial Sequence: Synthetic oligonucleotide
  Antisense strand to SEQ ID NO: 1382296
uuaauccucuacugaguac

SEQ ID NO: 1382298 - RNA, 19 nt, Artificial Sequence
  Description of Artificial Sequence: Synthetic oligonucleotide
  Sense strand starting at position 1547 of SEQ ID NO: 1242922
auggccaaaucuuuggaua

SEQ ID NO: 1382299 - RNA, 19 nt, Artificial Sequence
  Description of Artificial Sequence: Synthetic oligonucleotide
  Antisense strand to SEQ ID NO: 1382298
uauccaaagauuuggccau

SEQ ID NO: 1382300 - RNA, 19 nt, Artificial Sequence
  Description of Artificial Sequence: Synthetic oligonucleotide
  Sense strand starting at position 1548 of SEQ ID NO: 1242922
uggccaaaucuuuggauaa

SEQ ID NO: 1382301 - RNA, 19 nt, Artificial Sequence
  Description of Artificial Sequence: Synthetic oligonucleotide
  Antisense strand to SEQ ID NO: 1382300
uuauccaaagauuuggcca

SEQ ID NO: 1382302 - RNA, 19 nt, Artificial Sequence
  Description of Artificial Sequence: Synthetic oligonucleotide
  Sense strand starting at position 1569 of SEQ ID NO: 1242922
uccuacaaccucuggaaga

SEQ ID NO: 1382303 - RNA, 19 nt, Artificial Sequence
  Description of Artificial Sequence: Synthetic oligonucleotide
  Antisense strand to SEQ ID NO: 1382302
ucuuccagagguuguagga

SEQ ID NO: 1382304 - RNA, 19 nt, Artificial Sequence
  Description of Artificial Sequence: Synthetic oligonucleotide
  Sense strand starting at position 1607 of SEQ ID NO: 1242922
ucgguuucgggcagggaua

SEQ ID NO: 1382305 - RNA, 19 nt, Artificial Sequence
  Description of Artificial Sequence: Synthetic oligonucleotide
  Antisense strand to SEQ ID NO: 1382304
uaucccugcccgaaaccga

SEQ ID NO: 1382306 - RNA, 19 nt, Artificial Sequence
  Description of Artificial Sequence: Synthetic oligonucleotide
  Sense strand starting at position 1621 of SEQ ID NO: 1242922
ggauaccaugaguaugcua

SEQ ID NO: 1382307 - RNA, 19 nt, Artificial Sequence
  Description of Artificial Sequence: Synthetic oligonucleotide
  Antisense strand to SEQ ID NO: 1382306
uagcauacucaugguaucc

SEQ ID NO: 1382308 - RNA, 19 nt, Artificial Sequence
  Description of Artificial Sequence: Synthetic oligonucleotide
  Sense strand starting at position 1628 of SEQ ID NO: 1242922
augaguaugcuaugagaca

SEQ ID NO: 1382309 - RNA, 19 nt, Artificial Sequence
  Description of Artificial Sequence: Synthetic oligonucleotide
  Antisense strand to SEQ ID NO: 1382308
ugucucauagcauacucau

SEQ ID NO: 1382310 - RNA, 19 nt, Artificial Sequence
  Description of Artificial Sequence: Synthetic oligonucleotide
  Sense strand starting at position 1666 of SEQ ID NO: 1242922
caggauuggugauucuuag

SEQ ID NO: 1382311 - RNA, 19 nt, Artificial Sequence
  Description of Artificial Sequence: Synthetic oligonucleotide
  Antisense strand to SEQ ID NO: 1382310
cuaagaaucaccaauccug

SEQ ID NO: 1382312 - RNA, 19 nt, Artificial Sequence
  Description of Artificial Sequence: Synthetic oligonucleotide
  Sense strand starting at position 1768 of SEQ ID NO: 1242922
cgcagaugacuggaagcau

SEQ ID NO: 1382313 - RNA, 19 nt, Artificial Sequence
  Description of Artificial Sequence: Synthetic oligonucleotide
  Antisense strand to SEQ ID NO: 1382312
augcuuccagucaucugcg

SEQ ID NO: 1382314 - RNA, 19 nt, Artificial Sequence
  Description of Artificial Sequence: Synthetic oligonucleotide
  Sense strand starting at position 1784 of SEQ ID NO: 1242922
caugacugaguuggacaua

SEQ ID NO: 1382315 - RNA, 19 nt, Artificial Sequence
  Description of Artificial Sequence: Synthetic oligonucleotide
  Antisense strand to SEQ ID NO: 1382314
uauguccaacucagucaug

SEQ ID NO: 1382316 - RNA, 19 nt, Artificial Sequence
  Description of Artificial Sequence: Synthetic oligonucleotide
  Sense strand starting at position 1889 of SEQ ID NO: 1242922
uguccaguggaucaagauu

SEQ ID NO: 1382317 - RNA, 19 nt, Artificial Sequence
  Description of Artificial Sequence: Synthetic oligonucleotide
  Antisense strand to SEQ ID NO: 1382316
aaucuugauccacuggaca

SEQ ID NO: 1382318 - RNA, 19 nt, Artificial Sequence
  Description of Artificial Sequence: Synthetic oligonucleotide
  Sense strand starting at position 2253 of SEQ ID NO: 1242922
cacugcuuugcguucuuga

SEQ ID NO: 1382319 - RNA, 19 nt, Artificial Sequence
  Description of Artificial Sequence: Synthetic oligonucleotide
  Antisense strand to SEQ ID NO: 1382318
ucaagaacgcaaagcagug

SEQ ID NO: 1382320 - RNA, 19 nt, Artificial Sequence
  Description of Artificial Sequence: Synthetic oligonucleotide
  Sense strand starting at position 2255 of SEQ ID NO: 1242922
cugcuuugcguucuugacu

SEQ ID NO: 1382321 - RNA, 19 nt, Artificial Sequence
  Description of Artificial Sequence: Synthetic oligonucleotide
  Antisense strand to SEQ ID NO: 1382320
agucaagaacgcaaagcag

SEQ ID NO: 1382322 - RNA, 19 nt, Artificial Sequence
  Description of Artificial Sequence: Synthetic oligonucleotide
  Sense strand starting at position 2438 of SEQ ID NO: 1242922
gcuaaucaucuuggaacau

SEQ ID NO: 1382323 - RNA, 19 nt, Artificial Sequence
  Description of Artificial Sequence: Synthetic oligonucleotide
  Antisense strand to SEQ ID NO: 1382322
auguuccaagaugauuagc

SEQ ID NO: 1382324 - RNA, 19 nt, Artificial Sequence
  Description of Artificial Sequence: Synthetic oligonucleotide
  Sense strand starting at position 2455 of SEQ ID NO: 1242922
auuucugcuucugucugaa

SEQ ID NO: 1382325 - RNA, 19 nt, Artificial Sequence
  Description of Artificial Sequence: Synthetic oligonucleotide
  Antisense strand to SEQ ID NO: 1382324
uucagacagaagcagaaau

SEQ ID NO: 1382326 - RNA, 19 nt, Artificial Sequence
  Description of Artificial Sequence: Synthetic oligonucleotide
  Sense strand starting at position 2556 of SEQ ID NO: 1242922
uuuauugguccauagaauc

SEQ ID NO: 1382327 - RNA, 19 nt, Artificial Sequence
  Description of Artificial Sequence: Synthetic oligonucleotide
  Antisense strand to SEQ ID NO: 1382326
gauucuauggaccaauaaa

SEQ ID NO: 1382328 - RNA, 19 nt, Artificial Sequence
  Description of Artificial Sequence: Synthetic oligonucleotide
  Sense strand starting at position 2813 of SEQ ID NO: 1242922
gguagaaaucauggacuuc

SEQ ID NO: 1382329 - RNA, 19 nt, Artificial Sequence
  Description of Artificial Sequence: Synthetic oligonucleotide
  Antisense strand to SEQ ID NO: 1382328
gaaguccaugauuucuacc

SEQ ID NO: 1382330 - RNA, 19 nt, Artificial Sequence
  Description of Artificial Sequence: Synthetic oligonucleotide
  Sense strand starting at position 3616 of SEQ ID NO: 1242922
aaacucucccugggaggua

SEQ ID NO: 1382331 - RNA, 19 nt, Artificial Sequence
  Description of Artificial Sequence: Synthetic oligonucleotide
  Antisense strand to SEQ ID NO: 1382330
uaccucccagggagaguuu

SEQ ID NO: 1382332 - RNA, 19 nt, Artificial Sequence
  Description of Artificial Sequence: Synthetic oligonucleotide
  Sense strand starting at position 10 of SEQ ID NO: 1242923
aaaggaucuugggccaauu

SEQ ID NO: 1382333 - RNA, 19 nt, Artificial Sequence
  Description of Artificial Sequence: Synthetic oligonucleotide
  Antisense strand to SEQ ID NO: 1382332
aauuggcccaagauccuuu

SEQ ID NO: 1382334 - RNA, 19 nt, Artificial Sequence
  Description of Artificial Sequence: Synthetic oligonucleotide
  Sense strand starting at position 41 of SEQ ID NO: 1242923
cacuauacuguuggugaaa

SEQ ID NO: 1382335 - RNA, 19 nt, Artificial Sequence
  Description of Artificial Sequence: Synthetic oligonucleotide
  Antisense strand to SEQ ID NO: 1382334
uuucaccaacaguauagug

SEQ ID NO: 1382336 - RNA, 19 nt, Artificial Sequence
  Description of Artificial Sequence: Synthetic oligonucleotide
  Sense strand starting at position 42 of SEQ ID NO: 1242923
acuauacuguuggugaaac

SEQ ID NO: 1382337 - RNA, 19 nt, Artificial Sequence
  Description of Artificial Sequence: Synthetic oligonucleotide
  Antisense strand to SEQ ID NO: 1382336
guuucaccaacaguauagu

SEQ ID NO: 1382338 - RNA, 19 nt, Artificial Sequence
  Description of Artificial Sequence: Synthetic oligonucleotide
  Sense strand starting at position 173 of SEQ ID NO: 1242923
ugaagaaauugaggccaaa

SEQ ID NO: 1382339 - RNA, 19 nt, Artificial Sequence
  Description of Artificial Sequence: Synthetic oligonucleotide
  Antisense strand to SEQ ID NO: 1382338
uuuggccucaauuucuuca

SEQ ID NO: 1382340 - RNA, 19 nt, Artificial Sequence
  Description of Artificial Sequence: Synthetic oligonucleotide
  Sense strand starting at position 421 of SEQ ID NO: 1242923
ccaggaugguuccaguuga

SEQ ID NO: 1382341 - RNA, 19 nt, Artificial Sequence
  Description of Artificial Sequence: Synthetic oligonucleotide
  Antisense strand to SEQ ID NO: 1382340
ucaacuggaaccauccugg

SEQ ID NO: 1382342 - RNA, 19 nt, Artificial Sequence
  Description of Artificial Sequence: Synthetic oligonucleotide
  Sense strand starting at position 425 of SEQ ID NO: 1242923
gaugguuccaguugauggu

SEQ ID NO: 1382343 - RNA, 19 nt, Artificial Sequence
  Description of Artificial Sequence: Synthetic oligonucleotide
  Antisense strand to SEQ ID NO: 1382342
accaucaacuggaaccauc

SEQ ID NO: 1382344 - RNA, 19 nt, Artificial Sequence
  Description of Artificial Sequence: Synthetic oligonucleotide
  Sense strand starting at position 449 of SEQ ID NO: 1242923
aaccgaauacugcguaaga

SEQ ID NO: 1382345 - RNA, 19 nt, Artificial Sequence
  Description of Artificial Sequence: Synthetic oligonucleotide
  Antisense strand to SEQ ID NO: 1382344
ucuuacgcaguauucgguu

SEQ ID NO: 1382346 - RNA, 19 nt, Artificial Sequence
  Description of Artificial Sequence: Synthetic oligonucleotide
  Sense strand starting at position 462 of SEQ ID NO: 1242923
guaagaggagucugcuuga

SEQ ID NO: 1382347 - RNA, 19 nt, Artificial Sequence
  Description of Artificial Sequence: Synthetic oligonucleotide
  Antisense strand to SEQ ID NO: 1382346
ucaagcagacuccucuuac

SEQ ID NO: 1382348 - RNA, 19 nt, Artificial Sequence
  Description of Artificial Sequence: Synthetic oligonucleotide
  Sense strand starting at position 465 of SEQ ID NO: 1242923
agaggagucugcuugaggu

SEQ ID NO: 1382349 - RNA, 19 nt, Artificial Sequence
  Description of Artificial Sequence: Synthetic oligonucleotide
  Antisense strand to SEQ ID NO: 1382348
accucaagcagacuccucu

SEQ ID NO: 1382350 - RNA, 19 nt, Artificial Sequence
  Description of Artificial Sequence: Synthetic oligonucleotide
  Sense strand starting at position 556 of SEQ ID NO: 1242923
acugcagccucccaaagau

SEQ ID NO: 1382351 - RNA, 19 nt, Artificial Sequence
  Description of Artificial Sequence: Synthetic oligonucleotide
  Antisense strand to SEQ ID NO: 1382350
aucuuugggaggcugcagu

SEQ ID NO: 1382352 - RNA, 19 nt, Artificial Sequence
  Description of Artificial Sequence: Synthetic oligonucleotide
  Sense strand starting at position 585 of SEQ ID NO: 1242923
cugaguugcuuugcagaca

SEQ ID NO: 1382353 - RNA, 19 nt, Artificial Sequence
  Description of Artificial Sequence: Synthetic oligonucleotide
  Antisense strand to SEQ ID NO: 1382352
ugucugcaaagcaacucag

SEQ ID NO: 1382354 - RNA, 19 nt, Artificial Sequence
  Description of Artificial Sequence: Synthetic oligonucleotide
  Sense strand starting at position 588 of SEQ ID NO: 1242923
aguugcuuugcagacaagu

SEQ ID NO: 1382355 - RNA, 19 nt, Artificial Sequence
  Description of Artificial Sequence: Synthetic oligonucleotide
  Antisense strand to SEQ ID NO: 1382354
acuugucugcaaagcaacu

SEQ ID NO: 1382356 - RNA, 19 nt, Artificial Sequence
  Description of Artificial Sequence: Synthetic oligonucleotide
  Sense strand starting at position 654 of SEQ ID NO: 1242923
gacagagccuuuggaagau

SEQ ID NO: 1382357 - RNA, 19 nt, Artificial Sequence
  Description of Artificial Sequence: Synthetic oligonucleotide
  Antisense strand to SEQ ID NO: 1382356
aucuuccaaaggcucuguc

SEQ ID NO: 1382358 - RNA, 19 nt, Artificial Sequence
  Description of Artificial Sequence: Synthetic oligonucleotide
  Sense strand starting at position 660 of SEQ ID NO: 1242923
gccuuuggaagaugagaau

SEQ ID NO: 1382359 - RNA, 19 nt, Artificial Sequence
  Description of Artificial Sequence: Synthetic oligonucleotide
  Antisense strand to SEQ ID NO: 1382358
auucucaucuuccaaaggc

SEQ ID NO: 1382360 - RNA, 19 nt, Artificial Sequence
  Description of Artificial Sequence: Synthetic oligonucleotide
  Sense strand starting at position 702 of SEQ ID NO: 1242923
gugccuaggcugugugaca

SEQ ID NO: 1382361 - RNA, 19 nt, Artificial Sequence
  Description of Artificial Sequence: Synthetic oligonucleotide
  Antisense strand to SEQ ID NO: 1382360
ugucacacagccuaggcac

SEQ ID NO: 1382362 - RNA, 19 nt, Artificial Sequence
  Description of Artificial Sequence: Synthetic oligonucleotide
  Sense strand starting at position 823 of SEQ ID NO: 1242923
cugauccucuccugggaau

SEQ ID NO: 1382363 - RNA, 19 nt, Artificial Sequence
  Description of Artificial Sequence: Synthetic oligonucleotide
  Antisense strand to SEQ ID NO: 1382362
auucccaggagaggaucag

SEQ ID NO: 1382364 - RNA, 19 nt, Artificial Sequence
  Description of Artificial Sequence: Synthetic oligonucleotide
  Sense strand starting at position 856 of SEQ ID NO: 1242923
gguccagggcucugaucaa

SEQ ID NO: 1382365 - RNA, 19 nt, Artificial Sequence
  Description of Artificial Sequence: Synthetic oligonucleotide
  Antisense strand to SEQ ID NO: 1382364
uugaucagagcccuggacc

SEQ ID NO: 1382366 - RNA, 19 nt, Artificial Sequence
  Description of Artificial Sequence: Synthetic oligonucleotide
  Sense strand starting at position 868 of SEQ ID NO: 1242923
ugaucaaaguccuuggcca

SEQ ID NO: 1382367 - RNA, 19 nt, Artificial Sequence
  Description of Artificial Sequence: Synthetic oligonucleotide
  Antisense strand to SEQ ID NO: 1382366
uggccaaggacuuugauca

SEQ ID NO: 1382368 - RNA, 19 nt, Artificial Sequence
  Description of Artificial Sequence: Synthetic oligonucleotide
  Sense strand starting at position 876 of SEQ ID NO: 1242923
guccuuggccaggaauaca

SEQ ID NO: 1382369 - RNA, 19 nt, Artificial Sequence
  Description of Artificial Sequence: Synthetic oligonucleotide
  Antisense strand to SEQ ID NO: 1382368
uguauuccuggccaaggac

SEQ ID NO: 1382370 - RNA, 19 nt, Artificial Sequence
  Description of Artificial Sequence: Synthetic oligonucleotide
  Sense strand starting at position 886 of SEQ ID NO: 1242923
aggaauacaucugagcaca

SEQ ID NO: 1382371 - RNA, 19 nt, Artificial Sequence
  Description of Artificial Sequence: Synthetic oligonucleotide
  Antisense strand to SEQ ID NO: 1382370
ugugcucagauguauuccu

SEQ ID NO: 1382372 - RNA, 19 nt, Artificial Sequence
  Description of Artificial Sequence: Synthetic oligonucleotide
  Sense strand starting at position 1477 of SEQ ID NO: 1242923
acaggaagucugugaccaa

SEQ ID NO: 1382373 - RNA, 19 nt, Artificial Sequence
  Description of Artificial Sequence: Synthetic oligonucleotide
  Antisense strand to SEQ ID NO: 1382372
uuggucacagacuuccugu

SEQ ID NO: 1382374 - RNA, 19 nt, Artificial Sequence
  Description of Artificial Sequence: Synthetic oligonucleotide
  Sense strand starting at position 2037 of SEQ ID NO: 1242923
guagcuucugcaggaagaa

SEQ ID NO: 1382375 - RNA, 19 nt, Artificial Sequence
  Description of Artificial Sequence: Synthetic oligonucleotide
  Antisense strand to SEQ ID NO: 1382374
uucuuccugcagaagcuac

SEQ ID NO: 1382376 - RNA, 19 nt, Artificial Sequence
  Description of Artificial Sequence: Synthetic oligonucleotide
  Sense strand starting at position 2433 of SEQ ID NO: 1242923
ccugacaauugauggcaua

SEQ ID NO: 1382377 - RNA, 19 nt, Artificial Sequence
  Description of Artificial Sequence: Synthetic oligonucleotide
  Antisense strand to SEQ ID NO: 1382376
uaugccaucaauugucagg

SEQ ID NO: 1382378 - RNA, 19 nt, Artificial Sequence
  Description of Artificial Sequence: Synthetic oligonucleotide
  Sense strand starting at position 2434 of SEQ ID NO: 1242923
cugacaauugauggcauau

SEQ ID NO: 1382379 - RNA, 19 nt, Artificial Sequence
  Description of Artificial Sequence: Synthetic oligonucleotide
  Antisense strand to SEQ ID NO: 1382378
auaugccaucaauugucag

SEQ ID NO: 1382380 - RNA, 19 nt, Artificial Sequence
  Description of Artificial Sequence: Synthetic oligonucleotide
  Sense strand starting at position 2445 of SEQ ID NO: 1242923
uggcauauugaugauggca

SEQ ID NO: 1382381 - RNA, 19 nt, Artificial Sequence
  Description of Artificial Sequence: Synthetic oligonucleotide
  Antisense strand to SEQ ID NO: 1382380
ugccaucaucaauaugcca

SEQ ID NO: 1382382 - RNA, 19 nt, Artificial Sequence
  Description of Artificial Sequence: Synthetic oligonucleotide
  Sense strand starting at position 2447 of SEQ ID NO: 1242923
gcauauugaugauggcaaa

SEQ ID NO: 1382383 - RNA, 19 nt, Artificial Sequence
  Description of Artificial Sequence: Synthetic oligonucleotide
  Antisense strand to SEQ ID NO: 1382382
uuugccaucaucaauaugc

SEQ ID NO: 1382384 - RNA, 19 nt, Artificial Sequence
  Description of Artificial Sequence: Synthetic oligonucleotide
  Sense strand starting at position 2474 of SEQ ID NO: 1242923
gcagcagcuuggucagacu

SEQ ID NO: 1382385 - RNA, 19 nt, Artificial Sequence
  Description of Artificial Sequence: Synthetic oligonucleotide
  Antisense strand to SEQ ID NO: 1382384
agucugaccaagcugcugc

SEQ ID NO: 1382386 - RNA, 19 nt, Artificial Sequence
  Description of Artificial Sequence: Synthetic oligonucleotide
  Sense strand starting at position 2642 of SEQ ID NO: 1242923
uggcaaagucacuggaagu

SEQ ID NO: 1382387 - RNA, 19 nt, Artificial Sequence
  Description of Artificial Sequence: Synthetic oligonucleotide
  Antisense strand to SEQ ID NO: 1382386
acuuccagugacuuugcca

SEQ ID NO: 1382388 - RNA, 19 nt, Artificial Sequence
  Description of Artificial Sequence: Synthetic oligonucleotide
  Sense strand starting at position 2653 of SEQ ID NO: 1242923
cuggaagugcucuaugaag

SEQ ID NO: 1382389 - RNA, 19 nt, Artificial Sequence
  Description of Artificial Sequence: Synthetic oligonucleotide
  Antisense strand to SEQ ID NO: 1382388
cuucauagagcacuuccag

SEQ ID NO: 1382390 - RNA, 19 nt, Artificial Sequence
  Description of Artificial Sequence: Synthetic oligonucleotide
  Sense strand starting at position 2661 of SEQ ID NO: 1242923
gcucuaugaagccgucaua

SEQ ID NO: 1382391 - RNA, 19 nt, Artificial Sequence
  Description of Artificial Sequence: Synthetic oligonucleotide
  Antisense strand to SEQ ID NO: 1382390
uaugacggcuucauagagc

SEQ ID NO: 1382392 - RNA, 19 nt, Artificial Sequence
  Description of Artificial Sequence: Synthetic oligonucleotide
  Sense strand starting at position 2808 of SEQ ID NO: 1242923
ccagcuucuccuugagcca

SEQ ID NO: 1382393 - RNA, 19 nt, Artificial Sequence
  Description of Artificial Sequence: Synthetic oligonucleotide
  Antisense strand to SEQ ID NO: 1382392
uggcucaaggagaagcugg

SEQ ID NO: 1382394 - RNA, 19 nt, Artificial Sequence
  Description of Artificial Sequence: Synthetic oligonucleotide
  Sense strand starting at position 3126 of SEQ ID NO: 1242923
acaaguggccucugcugaa

SEQ ID NO: 1382395 - RNA, 19 nt, Artificial Sequence
  Description of Artificial Sequence: Synthetic oligonucleotide
  Antisense strand to SEQ ID NO: 1382394
uucagcagaggccacuugu

SEQ ID NO: 1382396 - RNA, 19 nt, Artificial Sequence
  Description of Artificial Sequence: Synthetic oligonucleotide
  Sense strand starting at position 3300 of SEQ ID NO: 1242923
uuucuuugaucaggaucca

SEQ ID NO: 1382397 - RNA, 19 nt, Artificial Sequence
  Description of Artificial Sequence: Synthetic oligonucleotide
  Antisense strand to SEQ ID NO: 1382396
uggauccugaucaaagaaa

SEQ ID NO: 1382398 - RNA, 19 nt, Artificial Sequence
  Description of Artificial Sequence: Synthetic oligonucleotide
  Sense strand starting at position 3354 of SEQ ID NO: 1242923
cccagcuaccucuaggauu

SEQ ID NO: 1382399 - RNA, 19 nt, Artificial Sequence
  Description of Artificial Sequence: Synthetic oligonucleotide
  Antisense strand to SEQ ID NO: 1382398
aauccuagagguagcuggg

SEQ ID NO: 1382400 - RNA, 19 nt, Artificial Sequence
  Description of Artificial Sequence: Synthetic oligonucleotide
  Sense strand starting at position 3365 of SEQ ID NO: 1242923
cuaggauugccaugccaac

SEQ ID NO: 1382401 - RNA, 19 nt, Artificial Sequence
  Description of Artificial Sequence: Synthetic oligonucleotide
  Antisense strand to SEQ ID NO: 1382400
guuggcauggcaauccuag

SEQ ID NO: 1382402 - RNA, 19 nt, Artificial Sequence
  Description of Artificial Sequence: Synthetic oligonucleotide
  Sense strand starting at position 3515 of SEQ ID NO: 1242923
uaaguuagugcccguuacu

SEQ ID NO: 1382403 - RNA, 19 nt, Artificial Sequence
  Description of Artificial Sequence: Synthetic oligonucleotide
  Antisense strand to SEQ ID NO: 1382402
aguaacgggcacuaacuua

SEQ ID NO: 1382404 - RNA, 19 nt, Artificial Sequence
  Description of Artificial Sequence: Synthetic oligonucleotide
  Sense strand starting at position 3516 of SEQ ID NO: 1242923
aaguuagugcccguuacuu

SEQ ID NO: 1382405 - RNA, 19 nt, Artificial Sequence
  Description of Artificial Sequence: Synthetic oligonucleotide
  Antisense strand to SEQ ID NO: 1382404
aaguaacgggcacuaacuu

SEQ ID NO: 1382406 - RNA, 19 nt, Artificial Sequence
  Description of Artificial Sequence: Synthetic oligonucleotide
  Sense strand starting at position 3967 of SEQ ID NO: 1242923
gucugauugugcuugccau

SEQ ID NO: 1382407 - RNA, 19 nt, Artificial Sequence
  Description of Artificial Sequence: Synthetic oligonucleotide
  Antisense strand to SEQ ID NO: 1382406
auggcaagcacaaucagac

SEQ ID NO: 1382408 - RNA, 19 nt, Artificial Sequence
  Description of Artificial Sequence: Synthetic oligonucleotide
  Sense strand starting at position 3968 of SEQ ID NO: 1242923
ucugauugugcuugccaua

SEQ ID NO: 1382409 - RNA, 19 nt, Artificial Sequence
  Description of Artificial Sequence: Synthetic oligonucleotide
  Antisense strand to SEQ ID NO: 1382408
uauggcaagcacaaucaga

SEQ ID NO: 1382410 - RNA, 19 nt, Artificial Sequence
  Description of Artificial Sequence: Synthetic oligonucleotide
  Sense strand starting at position 3973 of SEQ ID NO: 1242923
uugugcuugccauauuaau

SEQ ID NO: 1382411 - RNA, 19 nt, Artificial Sequence
  Description of Artificial Sequence: Synthetic oligonucleotide
  Antisense strand to SEQ ID NO: 1382410
auuaauauggcaagcacaa

SEQ ID NO: 1382412 - RNA, 19 nt, Artificial Sequence
  Description of Artificial Sequence: Synthetic oligonucleotide
  Sense strand starting at position 12 of SEQ ID NO: 1242924
ugaacucuugaagggucaa

SEQ ID NO: 1382413 - RNA, 19 nt, Artificial Sequence
  Description of Artificial Sequence: Synthetic oligonucleotide
  Antisense strand to SEQ ID NO: 1382412
uugacccuucaagaguuca

SEQ ID NO: 1382414 - RNA, 19 nt, Artificial Sequence
  Description of Artificial Sequence: Synthetic oligonucleotide
  Sense strand starting at position 44 of SEQ ID NO: 1242924
uugucucugucccuuaaau

SEQ ID NO: 1382415 - RNA, 19 nt, Artificial Sequence
  Description of Artificial Sequence: Synthetic oligonucleotide
  Antisense strand to SEQ ID NO: 1382414
auuuaagggacagagacaa

SEQ ID NO: 1382416 - RNA, 19 nt, Artificial Sequence
  Description of Artificial Sequence: Synthetic oligonucleotide
  Sense strand starting at position 81 of SEQ ID NO: 1242924
ugggauagugagugaguga

SEQ ID NO: 1382417 - RNA, 19 nt, Artificial Sequence
  Description of Artificial Sequence: Synthetic oligonucleotide
  Antisense strand to SEQ ID NO: 1382416
ucacucacucacuauccca

SEQ ID NO: 1382418 - RNA, 19 nt, Artificial Sequence
  Description of Artificial Sequence: Synthetic oligonucleotide
  Sense strand starting at position 100 of SEQ ID NO: 1242924
guggcuaucucacucagua

SEQ ID NO: 1382419 - RNA, 19 nt, Artificial Sequence
  Description of Artificial Sequence: Synthetic oligonucleotide
  Antisense strand to SEQ ID NO: 1382418
uacugagugagauagccac

SEQ ID NO: 1382420 - RNA, 19 nt, Artificial Sequence
  Description of Artificial Sequence: Synthetic oligonucleotide
  Sense strand starting at position 319 of SEQ ID NO: 1242924
aucccagcucaagguaauu

SEQ ID NO: 1382421 - RNA, 19 nt, Artificial Sequence
  Description of Artificial Sequence: Synthetic oligonucleotide
  Antisense strand to SEQ ID NO: 1382420
aauuaccuugagcugggau

SEQ ID NO: 1382422 - RNA, 19 nt, Artificial Sequence
  Description of Artificial Sequence: Synthetic oligonucleotide
  Sense strand starting at position 449 of SEQ ID NO: 1242924
aggcucacacauuaguaaa

SEQ ID NO: 1382423 - RNA, 19 nt, Artificial Sequence
  Description of Artificial Sequence: Synthetic oligonucleotide
  Antisense strand to SEQ ID NO: 1382422
uuuacuaaugugugagccu

SEQ ID NO: 1382424 - RNA, 19 nt, Artificial Sequence
  Description of Artificial Sequence: Synthetic oligonucleotide
  Sense strand starting at position 542 of SEQ ID NO: 1242924
caaguugaauguuugggaa

SEQ ID NO: 1382425 - RNA, 19 nt, Artificial Sequence
  Description of Artificial Sequence: Synthetic oligonucleotide
  Antisense strand to SEQ ID NO: 1382424
uucccaaacauucaacuug

SEQ ID NO: 1382426 - RNA, 19 nt, Artificial Sequence
  Description of Artificial Sequence: Synthetic oligonucleotide
  Sense strand starting at position 546 of SEQ ID NO: 1242924
uugaauguuugggaaagga

SEQ ID NO: 1382427 - RNA, 19 nt, Artificial Sequence
  Description of Artificial Sequence: Synthetic oligonucleotide
  Antisense strand to SEQ ID NO: 1382426
uccuuucccaaacauucaa

SEQ ID NO: 1382428 - RNA, 19 nt, Artificial Sequence
  Description of Artificial Sequence: Synthetic oligonucleotide
  Sense strand starting at position 604 of SEQ ID NO: 1242924
ccaggaucgcaagaugcua

SEQ ID NO: 1382429 - RNA, 19 nt, Artificial Sequence
  Description of Artificial Sequence: Synthetic oligonucleotide
  Antisense strand to SEQ ID NO: 1382428
uagcaucuugcgauccugg

SEQ ID NO: 1382430 - RNA, 19 nt, Artificial Sequence
  Description of Artificial Sequence: Synthetic oligonucleotide
  Sense strand starting at position 737 of SEQ ID NO: 1242924
gcaaguaaucuuuagggau

SEQ ID NO: 1382431 - RNA, 19 nt, Artificial Sequence
  Description of Artificial Sequence: Synthetic oligonucleotide
  Antisense strand to SEQ ID NO: 1382430
aucccuaaagauuacuugc

SEQ ID NO: 1382432 - RNA, 19 nt, Artificial Sequence
  Description of Artificial Sequence: Synthetic oligonucleotide
  Sense strand starting at position 752 of SEQ ID NO: 1242924
ggaucuauuugucaccaag

SEQ ID NO: 1382433 - RNA, 19 nt, Artificial Sequence
  Description of Artificial Sequence: Synthetic oligonucleotide
  Antisense strand to SEQ ID NO: 1382432
cuuggugacaaauagaucc

SEQ ID NO: 1382434 - RNA, 19 nt, Artificial Sequence
  Description of Artificial Sequence: Synthetic oligonucleotide
  Sense strand starting at position 1016 of SEQ ID NO: 1242924
ccaggcauguccucaagga

SEQ ID NO: 1382435 - RNA, 19 nt, Artificial Sequence
  Description of Artificial Sequence: Synthetic oligonucleotide
  Antisense strand to SEQ ID NO: 1382434
uccuugaggacaugccugg

SEQ ID NO: 1382436 - RNA, 19 nt, Artificial Sequence
  Description of Artificial Sequence: Synthetic oligonucleotide
  Sense strand starting at position 1020 of SEQ ID NO: 1242924
gcauguccucaaggagacu

SEQ ID NO: 1382437 - RNA, 19 nt, Artificial Sequence
  Description of Artificial Sequence: Synthetic oligonucleotide
  Antisense strand to SEQ ID NO: 1382436
agucuccuugaggacaugc

SEQ ID NO: 1382438 - RNA, 19 nt, Artificial Sequence
  Description of Artificial Sequence: Synthetic oligonucleotide
  Sense strand starting at position 1198 of SEQ ID NO: 1242924
gcaagagagugcucaaugu

SEQ ID NO: 1382439 - RNA, 19 nt, Artificial Sequence
  Description of Artificial Sequence: Synthetic oligonucleotide
  Antisense strand to SEQ ID NO: 1382438
acauugagcacucucuugc

SEQ ID NO: 1382440 - RNA, 19 nt, Artificial Sequence
  Description of Artificial Sequence: Synthetic oligonucleotide
  Sense strand starting at position 1325 of SEQ ID NO: 1242924
gccuucuguccagaacaug

SEQ ID NO: 1382441 - RNA, 19 nt, Artificial Sequence
  Description of Artificial Sequence: Synthetic oligonucleotide
  Antisense strand to SEQ ID NO: 1382440
cauguucuggacagaaggc

SEQ ID NO: 1382442 - RNA, 19 nt, Artificial Sequence
  Description of Artificial Sequence: Synthetic oligonucleotide
  Sense strand starting at position 1462 of SEQ ID NO: 1242924
ccgucacagucaucacaca

SEQ ID NO: 1382443 - RNA, 19 nt, Artificial Sequence
  Description of Artificial Sequence: Synthetic oligonucleotide
  Antisense strand to SEQ ID NO: 1382442
ugugugaugacugugacgg

SEQ ID NO: 1382444 - RNA, 19 nt, Artificial Sequence
  Description of Artificial Sequence: Synthetic oligonucleotide
  Sense strand starting at position 1568 of SEQ ID NO: 1242924
uggaaauauccauaguugc

SEQ ID NO: 1382445 - RNA, 19 nt, Artificial Sequence
  Description of Artificial Sequence: Synthetic oligonucleotide
  Antisense strand to SEQ ID NO: 1382444
gcaacuauggauauuucca

SEQ ID NO: 1382446 - RNA, 19 nt, Artificial Sequence
  Description of Artificial Sequence: Synthetic oligonucleotide
  Sense strand starting at position 2277 of SEQ ID NO: 1242924
gggagaagaugcaguuaga

SEQ ID NO: 1382447 - RNA, 19 nt, Artificial Sequence
  Description of Artificial Sequence: Synthetic oligonucleotide
  Antisense strand to SEQ ID NO: 1382446
ucuaacugcaucuucuccc

SEQ ID NO: 1382448 - RNA, 19 nt, Artificial Sequence
  Description of Artificial Sequence: Synthetic oligonucleotide
  Sense strand starting at position 2495 of SEQ ID NO: 1242924
gauagaggauucuauaccu

SEQ ID NO: 1382449 - RNA, 19 nt, Artificial Sequence
  Description of Artificial Sequence: Synthetic oligonucleotide
  Antisense strand to SEQ ID NO: 1382448
agguauagaauccucuauc

SEQ ID NO: 1382450 - RNA, 19 nt, Artificial Sequence
  Description of Artificial Sequence: Synthetic oligonucleotide
  Sense strand starting at position 2503 of SEQ ID NO: 1242924
auucuauaccuagggcaaa

SEQ ID NO: 1382451 - RNA, 19 nt, Artificial Sequence
  Description of Artificial Sequence: Synthetic oligonucleotide
  Antisense strand to SEQ ID NO: 1382450
uuugcccuagguauagaau

SEQ ID NO: 1382452 - RNA, 19 nt, Artificial Sequence
  Description of Artificial Sequence: Synthetic oligonucleotide
  Sense strand starting at position 2694 of SEQ ID NO: 1242924
ugcguuugaagaggauaca

SEQ ID NO: 1382453 - RNA, 19 nt, Artificial Sequence
  Description of Artificial Sequence: Synthetic oligonucleotide
  Antisense strand to SEQ ID NO: 1382452
uguauccucuucaaacgca

SEQ ID NO: 1382454 - RNA, 19 nt, Artificial Sequence
  Description of Artificial Sequence: Synthetic oligonucleotide
  Sense strand starting at position 2763 of SEQ ID NO: 1242924
ggauguugcagacacucaa

SEQ ID NO: 1382455 - RNA, 19 nt, Artificial Sequence
  Description of Artificial Sequence: Synthetic oligonucleotide
  Antisense strand to SEQ ID NO: 1382454
uugagugucugcaacaucc

SEQ ID NO: 1382456 - RNA, 19 nt, Artificial Sequence
  Description of Artificial Sequence: Synthetic oligonucleotide
  Sense strand starting at position 2978 of SEQ ID NO: 1242924
gggcuugucgagagugcuu

SEQ ID NO: 1382457 - RNA, 19 nt, Artificial Sequence
  Description of Artificial Sequence: Synthetic oligonucleotide
  Antisense strand to SEQ ID NO: 1382456
aagcacucucgacaagccc

SEQ ID NO: 1382458 - RNA, 19 nt, Artificial Sequence
  Description of Artificial Sequence: Synthetic oligonucleotide
  Sense strand starting at position 2985 of SEQ ID NO: 1242924
ucgagagugcuugaagguu

SEQ ID NO: 1382459 - RNA, 19 nt, Artificial Sequence
  Description of Artificial Sequence: Synthetic oligonucleotide
  Antisense strand to SEQ ID NO: 1382458
aaccuucaagcacucucga

SEQ ID NO: 1382460 - RNA, 19 nt, Artificial Sequence
  Description of Artificial Sequence: Synthetic oligonucleotide
  Sense strand starting at position 3002 of SEQ ID NO: 1242924
uugugugaaggguagcauu

SEQ ID NO: 1382461 - RNA, 19 nt, Artificial Sequence
  Description of Artificial Sequence: Synthetic oligonucleotide
  Antisense strand to SEQ ID NO: 1382460
aaugcuacccuucacacaa

SEQ ID NO: 1382462 - RNA, 19 nt, Artificial Sequence
  Description of Artificial Sequence: Synthetic oligonucleotide
  Sense strand starting at position 3222 of SEQ ID NO: 1242924
gugagugugagagaguuaa

SEQ ID NO: 1382463 - RNA, 19 nt, Artificial Sequence
  Description of Artificial Sequence: Synthetic oligonucleotide
  Antisense strand to SEQ ID NO: 1382462
uuaacucucucacacucac

SEQ ID NO: 1382464 - RNA, 19 nt, Artificial Sequence
  Description of Artificial Sequence: Synthetic oligonucleotide
  Sense strand starting at position 3236 of SEQ ID NO: 1242924
guuaaagauucugcaggaa

SEQ ID NO: 1382465 - RNA, 19 nt, Artificial Sequence
  Description of Artificial Sequence: Synthetic oligonucleotide
  Antisense strand to SEQ ID NO: 1382464
uuccugcagaaucuuuaac

SEQ ID NO: 1382466 - RNA, 19 nt, Artificial Sequence
  Description of Artificial Sequence: Synthetic oligonucleotide
  Sense strand starting at position 3309 of SEQ ID NO: 1242924
cugugaugggucugagaag

SEQ ID NO: 1382467 - RNA, 19 nt, Artificial Sequence
  Description of Artificial Sequence: Synthetic oligonucleotide
  Antisense strand to SEQ ID NO: 1382466
cuucucagacccaucacag

SEQ ID NO: 1382468 - RNA, 19 nt, Artificial Sequence
  Description of Artificial Sequence: Synthetic oligonucleotide
  Sense strand starting at position 3410 of SEQ ID NO: 1242924
gaaggaacuggcuaagcuu

SEQ ID NO: 1382469 - RNA, 19 nt, Artificial Sequence
  Description of Artificial Sequence: Synthetic oligonucleotide
  Antisense strand to SEQ ID NO: 1382468
aagcuuagccaguuccuuc

SEQ ID NO: 1382470 - RNA, 19 nt, Artificial Sequence
  Description of Artificial Sequence: Synthetic oligonucleotide
  Sense strand starting at position 3502 of SEQ ID NO: 1242924
aguucuugucuuuguuaga

SEQ ID NO: 1382471 - RNA, 19 nt, Artificial Sequence
  Description of Artificial Sequence: Synthetic oligonucleotide
  Antisense strand to SEQ ID NO: 1382470
ucuaacaaagacaagaacu

SEQ ID NO: 1382472 - RNA, 19 nt, Artificial Sequence
  Description of Artificial Sequence: Synthetic oligonucleotide
  Sense strand starting at position 3503 of SEQ ID NO: 1242924
guucuugucuuuguuagag

SEQ ID NO: 1382473 - RNA, 19 nt, Artificial Sequence
  Description of Artificial Sequence: Synthetic oligonucleotide
  Antisense strand to SEQ ID NO: 1382472
cucuaacaaagacaagaac

SEQ ID NO: 1382474 - RNA, 19 nt, Artificial Sequence
  Description of Artificial Sequence: Synthetic oligonucleotide
  Sense strand starting at position 3697 of SEQ ID NO: 1242924
ugaggccaggucugagauu

SEQ ID NO: 1382475 - RNA, 19 nt, Artificial Sequence
  Description of Artificial Sequence: Synthetic oligonucleotide
  Antisense strand to SEQ ID NO: 1382474
aaucucagaccuggccuca

SEQ ID NO: 1382476 - RNA, 19 nt, Artificial Sequence
  Description of Artificial Sequence: Synthetic oligonucleotide
  Sense strand starting at position 3698 of SEQ ID NO: 1242924
gaggccaggucugagauuu

SEQ ID NO: 1382477 - RNA, 19 nt, Artificial Sequence
  Description of Artificial Sequence: Synthetic oligonucleotide
  Antisense strand to SEQ ID NO: 1382476
aaaucucagaccuggccuc

SEQ ID NO: 1382478 - RNA, 19 nt, Artificial Sequence
  Description of Artificial Sequence: Synthetic oligonucleotide
  Sense strand starting at position 3800 of SEQ ID NO: 1242924
cgcugcauugaugaauaaa

SEQ ID NO: 1382479 - RNA, 19 nt, Artificial Sequence
  Description of Artificial Sequence: Synthetic oligonucleotide
  Antisense strand to SEQ ID NO: 1382478
uuuauucaucaaugcagcg

SEQ ID NO: 1382480 - RNA, 19 nt, Artificial Sequence
  Description of Artificial Sequence: Synthetic oligonucleotide
  Sense strand starting at position 3803 of SEQ ID NO: 1242924
ugcauugaugaauaaagca

SEQ ID NO: 1382481 - RNA, 19 nt, Artificial Sequence
  Description of Artificial Sequence: Synthetic oligonucleotide
  Antisense strand to SEQ ID NO: 1382480
ugcuuuauucaucaaugca

SEQ ID NO: 1382482 - RNA, 19 nt, Artificial Sequence
  Description of Artificial Sequence: Synthetic oligonucleotide
  Sense strand starting at position 3890 of SEQ ID NO: 1242924
cagcuagacugagaugaga

SEQ ID NO: 1382483 - RNA, 19 nt, Artificial Sequence
  Description of Artificial Sequence: Synthetic oligonucleotide
  Antisense strand to SEQ ID NO: 1382482
ucucaucucagucuagcug

SEQ ID NO: 1382484 - RNA, 19 nt, Artificial Sequence
  Description of Artificial Sequence: Synthetic oligonucleotide
  Sense strand starting at position 3931 of SEQ ID NO: 1242924
gggaaauguaugugaucug

SEQ ID NO: 1382485 - RNA, 19 nt, Artificial Sequence
  Description of Artificial Sequence: Synthetic oligonucleotide
  Antisense strand to SEQ ID NO: 1382484
cagaucacauacauuuccc

SEQ ID NO: 1382486 - RNA, 19 nt, Artificial Sequence
  Description of Artificial Sequence: Synthetic oligonucleotide
  Sense strand starting at position 3934 of SEQ ID NO: 1242924
aaauguaugugaucugaca

SEQ ID NO: 1382487 - RNA, 19 nt, Artificial Sequence
  Description of Artificial Sequence: Synthetic oligonucleotide
  Antisense strand to SEQ ID NO: 1382486
ugucagaucacauacauuu

SEQ ID NO: 1382488 - RNA, 19 nt, Artificial Sequence
  Description of Artificial Sequence: Synthetic oligonucleotide
  Sense strand starting at position 3977 of SEQ ID NO: 1242924
ugcccucugcauugggaau

SEQ ID NO: 1382489 - RNA, 19 nt, Artificial Sequence
  Description of Artificial Sequence: Synthetic oligonucleotide
  Antisense strand to SEQ ID NO: 1382488
auucccaaugcagagggca

SEQ ID NO: 1382490 - RNA, 19 nt, Artificial Sequence
  Description of Artificial Sequence: Synthetic oligonucleotide
  Sense strand starting at position 3983 of SEQ ID NO: 1242924
cugcauugggaaugaugga

SEQ ID NO: 1382491 - RNA, 19 nt, Artificial Sequence
  Description of Artificial Sequence: Synthetic oligonucleotide
  Antisense strand to SEQ ID NO: 1382490
uccaucauucccaaugcag

SEQ ID NO: 1382492 - RNA, 19 nt, Artificial Sequence
  Description of Artificial Sequence: Synthetic oligonucleotide
  Sense strand starting at position 76 of SEQ ID NO: 1242925
cucugacuccucuguagaa

SEQ ID NO: 1382493 - RNA, 19 nt, Artificial Sequence
  Description of Artificial Sequence: Synthetic oligonucleotide
  Antisense strand to SEQ ID NO: 1382492
uucuacagaggagucagag

SEQ ID NO: 1382494 - RNA, 19 nt, Artificial Sequence
  Description of Artificial Sequence: Synthetic oligonucleotide
  Sense strand starting at position 77 of SEQ ID NO: 1242925
ucugacuccucuguagaaa

SEQ ID NO: 1382495 - RNA, 19 nt, Artificial Sequence
  Description of Artificial Sequence: Synthetic oligonucleotide
  Antisense strand to SEQ ID NO: 1382494
uuucuacagaggagucaga

SEQ ID NO: 1382496 - RNA, 19 nt, Artificial Sequence
  Description of Artificial Sequence: Synthetic oligonucleotide
  Sense strand starting at position 228 of SEQ ID NO: 1242925
cugugaggucugaguggca

SEQ ID NO: 1382497 - RNA, 19 nt, Artificial Sequence
  Description of Artificial Sequence: Synthetic oligonucleotide
  Antisense strand to SEQ ID NO: 1382496
ugccacucagaccucacag

SEQ ID NO: 1382498 - RNA, 19 nt, Artificial Sequence
  Description of Artificial Sequence: Synthetic oligonucleotide
  Sense strand starting at position 335 of SEQ ID NO: 1242925
cagagagguuuagugacua

SEQ ID NO: 1382499 - RNA, 19 nt, Artificial Sequence
  Description of Artificial Sequence: Synthetic oligonucleotide
  Antisense strand to SEQ ID NO: 1382498
uagucacuaaaccucucug

SEQ ID NO: 1382500 - RNA, 19 nt, Artificial Sequence
  Description of Artificial Sequence: Synthetic oligonucleotide
  Sense strand starting at position 339 of SEQ ID NO: 1242925
gagguuuagugacuaccca

SEQ ID NO: 1382501 - RNA, 19 nt, Artificial Sequence
  Description of Artificial Sequence: Synthetic oligonucleotide
  Antisense strand to SEQ ID NO: 1382500
uggguagucacuaaaccuc

SEQ ID NO: 1382502 - RNA, 19 nt, Artificial Sequence
  Description of Artificial Sequence: Synthetic oligonucleotide
  Sense strand starting at position 366 of SEQ ID NO: 1242925
cacagcagugugcaaagau

SEQ ID NO: 1382503 - RNA, 19 nt, Artificial Sequence
  Description of Artificial Sequence: Synthetic oligonucleotide
  Antisense strand to SEQ ID NO: 1382502
aucuuugcacacugcugug

SEQ ID NO: 1382504 - RNA, 19 nt, Artificial Sequence
  Description of Artificial Sequence: Synthetic oligonucleotide
  Sense strand starting at position 401 of SEQ ID NO: 1242925
acucgaaaggacuguguau

SEQ ID NO: 1382505 - RNA, 19 nt, Artificial Sequence
  Description of Artificial Sequence: Synthetic oligonucleotide
  Antisense strand to SEQ ID NO: 1382504
auacacaguccuuucgagu

SEQ ID NO: 1382506 - RNA, 19 nt, Artificial Sequence
  Description of Artificial Sequence: Synthetic oligonucleotide
  Sense strand starting at position 403 of SEQ ID NO: 1242925
ucgaaaggacuguguauca

SEQ ID NO: 1382507 - RNA, 19 nt, Artificial Sequence
  Description of Artificial Sequence: Synthetic oligonucleotide
  Antisense strand to SEQ ID NO: 1382506
ugauacacaguccuuucga

SEQ ID NO: 1382508 - RNA, 19 nt, Artificial Sequence
  Description of Artificial Sequence: Synthetic oligonucleotide
  Sense strand starting at position 538 of SEQ ID NO: 1242925
uaaaguguuggcuacaaga

SEQ ID NO: 1382509 - RNA, 19 nt, Artificial Sequence
  Description of Artificial Sequence: Synthetic oligonucleotide
  Antisense strand to SEQ ID NO: 1382508
ucuuguagccaacacuuua

SEQ ID NO: 1382510 - RNA, 19 nt, Artificial Sequence
  Description of Artificial Sequence: Synthetic oligonucleotide
  Sense strand starting at position 540 of SEQ ID NO: 1242925
aaguguuggcuacaagaga

SEQ ID NO: 1382511 - RNA, 19 nt, Artificial Sequence
  Description of Artificial Sequence: Synthetic oligonucleotide
  Antisense strand to SEQ ID NO: 1382510
ucucuuguagccaacacuu

SEQ ID NO: 1382512 - RNA, 19 nt, Artificial Sequence
  Description of Artificial Sequence: Synthetic oligonucleotide
  Sense strand starting at position 566 of SEQ ID NO: 1242925
cugggagaaucauaaagag

SEQ ID NO: 1382513 - RNA, 19 nt, Artificial Sequence
  Description of Artificial Sequence: Synthetic oligonucleotide
  Antisense strand to SEQ ID NO: 1382512
cucuuuaugauucucccag

SEQ ID NO: 1382514 - RNA, 19 nt, Artificial Sequence
  Description of Artificial Sequence: Synthetic oligonucleotide
  Sense strand starting at position 656 of SEQ ID NO: 1242925
uugaaacuacuuuguggaa

SEQ ID NO: 1382515 - RNA, 19 nt, Artificial Sequence
  Description of Artificial Sequence: Synthetic oligonucleotide
  Antisense strand to SEQ ID NO: 1382514
uuccacaaaguaguuucaa

SEQ ID NO: 1382516 - RNA, 19 nt, Artificial Sequence
  Description of Artificial Sequence: Synthetic oligonucleotide
  Sense strand starting at position 657 of SEQ ID NO: 1242925
ugaaacuacuuuguggaaa

SEQ ID NO: 1382517 - RNA, 19 nt, Artificial Sequence
  Description of Artificial Sequence: Synthetic oligonucleotide
  Antisense strand to SEQ ID NO: 1382516
uuuccacaaaguaguuuca

SEQ ID NO: 1382518 - RNA, 19 nt, Artificial Sequence
  Description of Artificial Sequence: Synthetic oligonucleotide
  Sense strand starting at position 798 of SEQ ID NO: 1242925
ggcguaauggagcaaugau

SEQ ID NO: 1382519 - RNA, 19 nt, Artificial Sequence
  Description of Artificial Sequence: Synthetic oligonucleotide
  Antisense strand to SEQ ID NO: 1382518
aucauugcuccauuacgcc

SEQ ID NO: 1382520 - RNA, 19 nt, Artificial Sequence
  Description of Artificial Sequence: Synthetic oligonucleotide
  Sense strand starting at position 1130 of SEQ ID NO: 1242925
ccuuucuuccacgacaguu

SEQ ID NO: 1382521 - RNA, 19 nt, Artificial Sequence
  Description of Artificial Sequence: Synthetic oligonucleotide
  Antisense strand to SEQ ID NO: 1382520
aacugucguggaagaaagg

SEQ ID NO: 1382522 - RNA, 19 nt, Artificial Sequence
  Description of Artificial Sequence: Synthetic oligonucleotide
  Sense strand starting at position 1217 of SEQ ID NO: 1242925
ggagggaccguuugaaguu

SEQ ID NO: 1382523 - RNA, 19 nt, Artificial Sequence
  Description of Artificial Sequence: Synthetic oligonucleotide
  Antisense strand to SEQ ID NO: 1382522
aacuucaaacggucccucc

SEQ ID NO: 1382524 - RNA, 19 nt, Artificial Sequence
  Description of Artificial Sequence: Synthetic oligonucleotide
  Sense strand starting at position 2299 of SEQ ID NO: 1242925
ccuggaauccugggccaga

SEQ ID NO: 1382525 - RNA, 19 nt, Artificial Sequence
  Description of Artificial Sequence: Synthetic oligonucleotide
  Antisense strand to SEQ ID NO: 1382524
ucuggcccaggauuccagg

SEQ ID NO: 1382526 - RNA, 19 nt, Artificial Sequence
  Description of Artificial Sequence: Synthetic oligonucleotide
  Sense strand starting at position 2315 of SEQ ID NO: 1242925
agacucaccugccuguaau

SEQ ID NO: 1382527 - RNA, 19 nt, Artificial Sequence
  Description of Artificial Sequence: Synthetic oligonucleotide
  Antisense strand to SEQ ID NO: 1382526
auuacaggcaggugagucu

SEQ ID NO: 1382528 - RNA, 19 nt, Artificial Sequence
  Description of Artificial Sequence: Synthetic oligonucleotide
  Sense strand starting at position 2391 of SEQ ID NO: 1242925
gggaguccugcucauucuu

SEQ ID NO: 1382529 - RNA, 19 nt, Artificial Sequence
  Description of Artificial Sequence: Synthetic oligonucleotide
  Antisense strand to SEQ ID NO: 1382528
aagaaugagcaggacuccc

SEQ ID NO: 1382530 - RNA, 19 nt, Artificial Sequence
  Description of Artificial Sequence: Synthetic oligonucleotide
  Sense strand starting at position 2402 of SEQ ID NO: 1242925
ucauucuucucucugaguu

SEQ ID NO: 1382531 - RNA, 19 nt, Artificial Sequence
  Description of Artificial Sequence: Synthetic oligonucleotide
  Antisense strand to SEQ ID NO: 1382530
aacucagagagaagaauga

SEQ ID NO: 1382532 - RNA, 19 nt, Artificial Sequence
  Description of Artificial Sequence: Synthetic oligonucleotide
  Sense strand starting at position 2679 of SEQ ID NO: 1242925
uccucuagaugcuuucuga

SEQ ID NO: 1382533 - RNA, 19 nt, Artificial Sequence
  Description of Artificial Sequence: Synthetic oligonucleotide
  Antisense strand to SEQ ID NO: 1382532
ucagaaagcaucuagagga

SEQ ID NO: 1382534 - RNA, 19 nt, Artificial Sequence
  Description of Artificial Sequence: Synthetic oligonucleotide
  Sense strand starting at position 2682 of SEQ ID NO: 1242925
ucuagaugcuuucugauuc

SEQ ID NO: 1382535 - RNA, 19 nt, Artificial Sequence
  Description of Artificial Sequence: Synthetic oligonucleotide
  Antisense strand to SEQ ID NO: 1382534
gaaucagaaagcaucuaga

SEQ ID NO: 1382536 - RNA, 19 nt, Artificial Sequence
  Description of Artificial Sequence: Synthetic oligonucleotide
  Sense strand starting at position 2763 of SEQ ID NO: 1242925
ccgggcaauggcugauuua

SEQ ID NO: 1382537 - RNA, 19 nt, Artificial Sequence
  Description of Artificial Sequence: Synthetic oligonucleotide
  Antisense strand to SEQ ID NO: 1382536
uaaaucagccauugcccgg

SEQ ID NO: 1382538 - RNA, 19 nt, Artificial Sequence
  Description of Artificial Sequence: Synthetic oligonucleotide
  Sense strand starting at position 2773 of SEQ ID NO: 1242925
gcugauuuauucuacaaag

SEQ ID NO: 1382539 - RNA, 19 nt, Artificial Sequence
  Description of Artificial Sequence: Synthetic oligonucleotide
  Antisense strand to SEQ ID NO: 1382538
cuuuguagaauaaaucagc

SEQ ID NO: 1382540 - RNA, 19 nt, Artificial Sequence
  Description of Artificial Sequence: Synthetic oligonucleotide
  Sense strand starting at position 2924 of SEQ ID NO: 1242925
gggaccaaucccuaagugu

SEQ ID NO: 1382541 - RNA, 19 nt, Artificial Sequence
  Description of Artificial Sequence: Synthetic oligonucleotide
  Antisense strand to SEQ ID NO: 1382540
acacuuagggauugguccc

SEQ ID NO: 1382542 - RNA, 19 nt, Artificial Sequence
  Description of Artificial Sequence: Synthetic oligonucleotide
  Sense strand starting at position 2944 of SEQ ID NO: 1242925
ggaauucuuucuuuccuga

SEQ ID NO: 1382543 - RNA, 19 nt, Artificial Sequence
  Description of Artificial Sequence: Synthetic oligonucleotide
  Antisense strand to SEQ ID NO: 1382542
ucaggaaagaaagaauucc

SEQ ID NO: 1382544 - RNA, 19 nt, Artificial Sequence
  Description of Artificial Sequence: Synthetic oligonucleotide
  Sense strand starting at position 3016 of SEQ ID NO: 1242925
cgagaaauucugggugauu

SEQ ID NO: 1382545 - RNA, 19 nt, Artificial Sequence
  Description of Artificial Sequence: Synthetic oligonucleotide
  Antisense strand to SEQ ID NO: 1382544
aaucacccagaauuucucg

SEQ ID NO: 1382546 - RNA, 19 nt, Artificial Sequence
  Description of Artificial Sequence: Synthetic oligonucleotide
  Sense strand starting at position 3028 of SEQ ID NO: 1242925
ggugauugaugggugagga

SEQ ID NO: 1382547 - RNA, 19 nt, Artificial Sequence
  Description of Artificial Sequence: Synthetic oligonucleotide
  Antisense strand to SEQ ID NO: 1382546
uccucacccaucaaucacc

SEQ ID NO: 1382548 - RNA, 19 nt, Artificial Sequence
  Description of Artificial Sequence: Synthetic oligonucleotide
  Sense strand starting at position 3029 of SEQ ID NO: 1242925
gugauugaugggugaggaa

SEQ ID NO: 1382549 - RNA, 19 nt, Artificial Sequence
  Description of Artificial Sequence: Synthetic oligonucleotide
  Antisense strand to SEQ ID NO: 1382548
uuccucacccaucaaucac

SEQ ID NO: 1382550 - RNA, 19 nt, Artificial Sequence
  Description of Artificial Sequence: Synthetic oligonucleotide
  Sense strand starting at position 3042 of SEQ ID NO: 1242925
gaggaagugugggaagaaa

SEQ ID NO: 1382551 - RNA, 19 nt, Artificial Sequence
  Description of Artificial Sequence: Synthetic oligonucleotide
  Antisense strand to SEQ ID NO: 1382550
uuucuucccacacuuccuc

SEQ ID NO: 1382552 - RNA, 19 nt, Artificial Sequence
  Description of Artificial Sequence: Synthetic oligonucleotide
  Sense strand starting at position 3558 of SEQ ID NO: 1242925
aaauaaauccagugguaag

SEQ ID NO: 1382553 - RNA, 19 nt, Artificial Sequence
  Description of Artificial Sequence: Synthetic oligonucleotide
  Antisense strand to SEQ ID NO: 1382552
cuuaccacuggauuuauuu

SEQ ID NO: 1382554 - RNA, 19 nt, Artificial Sequence
  Description of Artificial Sequence: Synthetic oligonucleotide
  Sense strand starting at position 3636 of SEQ ID NO: 1242925
cuuagaugcucucugggaa

SEQ ID NO: 1382555 - RNA, 19 nt, Artificial Sequence
  Description of Artificial Sequence: Synthetic oligonucleotide
  Antisense strand to SEQ ID NO: 1382554
uucccagagagcaucuaag

SEQ ID NO: 1382556 - RNA, 19 nt, Artificial Sequence
  Description of Artificial Sequence: Synthetic oligonucleotide
  Sense strand starting at position 3637 of SEQ ID NO: 1242925
uuagaugcucucugggaag

SEQ ID NO: 1382557 - RNA, 19 nt, Artificial Sequence
  Description of Artificial Sequence: Synthetic oligonucleotide
  Antisense strand to SEQ ID NO: 1382556
cuucccagagagcaucuaa

SEQ ID NO: 1382558 - RNA, 19 nt, Artificial Sequence
  Description of Artificial Sequence: Synthetic oligonucleotide
  Sense strand starting at position 3718 of SEQ ID NO: 1242925
agggauugguguuuaagga

SEQ ID NO: 1382559 - RNA, 19 nt, Artificial Sequence
  Description of Artificial Sequence: Synthetic oligonucleotide
  Antisense strand to SEQ ID NO: 1382558
uccuuaaacaccaaucccu

SEQ ID NO: 1382560 - RNA, 19 nt, Artificial Sequence
  Description of Artificial Sequence: Synthetic oligonucleotide
  Sense strand starting at position 3757 of SEQ ID NO: 1242925
uugauucuguggcugaaca

SEQ ID NO: 1382561 - RNA, 19 nt, Artificial Sequence
  Description of Artificial Sequence: Synthetic oligonucleotide
  Antisense strand to SEQ ID NO: 1382560
uguucagccacagaaucaa

SEQ ID NO: 1382562 - RNA, 19 nt, Artificial Sequence
  Description of Artificial Sequence: Synthetic oligonucleotide
  Sense strand starting at position 3758 of SEQ ID NO: 1242925
ugauucuguggcugaacaa

SEQ ID NO: 1382563 - RNA, 19 nt, Artificial Sequence
  Description of Artificial Sequence: Synthetic oligonucleotide
  Antisense strand to SEQ ID NO: 1382562
uuguucagccacagaauca

SEQ ID NO: 1382564 - RNA, 19 nt, Artificial Sequence
  Description of Artificial Sequence: Synthetic oligonucleotide
  Sense strand starting at position 3759 of SEQ ID NO: 1242925
gauucuguggcugaacaaa

SEQ ID NO: 1382565 - RNA, 19 nt, Artificial Sequence
  Description of Artificial Sequence: Synthetic oligonucleotide
  Antisense strand to SEQ ID NO: 1382564
uuuguucagccacagaauc

SEQ ID NO: 1382566 - RNA, 19 nt, Artificial Sequence
  Description of Artificial Sequence: Synthetic oligonucleotide
  Sense strand starting at position 3889 of SEQ ID NO: 1242925
ggcaguaaagaaggguuau

SEQ ID NO: 1382567 - RNA, 19 nt, Artificial Sequence
  Description of Artificial Sequence: Synthetic oligonucleotide
  Antisense strand to SEQ ID NO: 1382566
auaacccuucuuuacugcc

SEQ ID NO: 1382568 - RNA, 19 nt, Artificial Sequence
  Description of Artificial Sequence: Synthetic oligonucleotide
  Sense strand starting at position 3890 of SEQ ID NO: 1242925
gcaguaaagaaggguuauc

SEQ ID NO: 1382569 - RNA, 19 nt, Artificial Sequence
  Description of Artificial Sequence: Synthetic oligonucleotide
  Antisense strand to SEQ ID NO: 1382568
gauaacccuucuuuacugc

SEQ ID NO: 1382570 - RNA, 19 nt, Artificial Sequence
  Description of Artificial Sequence: Synthetic oligonucleotide
  Sense strand starting at position 3922 of SEQ ID NO: 1242925
ccagguccauuccugaaga

SEQ ID NO: 1382571 - RNA, 19 nt, Artificial Sequence
  Description of Artificial Sequence: Synthetic oligonucleotide
  Antisense strand to SEQ ID NO: 1382570
ucuucaggaauggaccugg

SEQ ID NO: 1382572 - RNA, 19 nt, Artificial Sequence
  Description of Artificial Sequence: Synthetic oligonucleotide
  Sense strand starting at position 77 of SEQ ID NO: 1242926
acucacgaguucugagaua

SEQ ID NO: 1382573 - RNA, 19 nt, Artificial Sequence
  Description of Artificial Sequence: Synthetic oligonucleotide
  Antisense strand to SEQ ID NO: 1382572
uaucucagaacucgugagu

SEQ ID NO: 1382574 - RNA, 19 nt, Artificial Sequence
  Description of Artificial Sequence: Synthetic oligonucleotide
  Sense strand starting at position 82 of SEQ ID NO: 1242926
cgaguucugagauaccuua

SEQ ID NO: 1382575 - RNA, 19 nt, Artificial Sequence
  Description of Artificial Sequence: Synthetic oligonucleotide
  Antisense strand to SEQ ID NO: 1382574
uaagguaucucagaacucg

SEQ ID NO: 1382576 - RNA, 19 nt, Artificial Sequence
  Description of Artificial Sequence: Synthetic oligonucleotide
  Sense strand starting at position 117 of SEQ ID NO: 1242926
ccauguucccgacagagca

SEQ ID NO: 1382577 - RNA, 19 nt, Artificial Sequence
  Description of Artificial Sequence: Synthetic oligonucleotide
  Antisense strand to SEQ ID NO: 1382576
ugcucugucgggaacaugg

SEQ ID NO: 1382578 - RNA, 19 nt, Artificial Sequence
  Description of Artificial Sequence: Synthetic oligonucleotide
  Sense strand starting at position 394 of SEQ ID NO: 1242926
aggaaucauugguuuccua

SEQ ID NO: 1382579 - RNA, 19 nt, Artificial Sequence
  Description of Artificial Sequence: Synthetic oligonucleotide
  Antisense strand to SEQ ID NO: 1382578
uaggaaaccaaugauuccu

SEQ ID NO: 1382580 - RNA, 19 nt, Artificial Sequence
  Description of Artificial Sequence: Synthetic oligonucleotide
  Sense strand starting at position 398 of SEQ ID NO: 1242926
aucauugguuuccuacaca

SEQ ID NO: 1382581 - RNA, 19 nt, Artificial Sequence
  Description of Artificial Sequence: Synthetic oligonucleotide
  Antisense strand to SEQ ID NO: 1382580
uguguaggaaaccaaugau

SEQ ID NO: 1382582 - RNA, 19 nt, Artificial Sequence
  Description of Artificial Sequence: Synthetic oligonucleotide
  Sense strand starting at position 804 of SEQ ID NO: 1242926
uucucccaucuguguagua

SEQ ID NO: 1382583 - RNA, 19 nt, Artificial Sequence
  Description of Artificial Sequence: Synthetic oligonucleotide
  Antisense strand to SEQ ID NO: 1382582
uacuacacagaugggagaa

SEQ ID NO: 1382584 - RNA, 19 nt, Artificial Sequence
  Description of Artificial Sequence: Synthetic oligonucleotide
  Sense strand starting at position 2003 of SEQ ID NO: 1242926
cccuuuccugaaggagagu

SEQ ID NO: 1382585 - RNA, 19 nt, Artificial Sequence
  Description of Artificial Sequence: Synthetic oligonucleotide
  Antisense strand to SEQ ID NO: 1382584
acucuccuucaggaaaggg

SEQ ID NO: 1382586 - RNA, 19 nt, Artificial Sequence
  Description of Artificial Sequence: Synthetic oligonucleotide
  Sense strand starting at position 2378 of SEQ ID NO: 1242926
ucuggucauuccucuguca

SEQ ID NO: 1382587 - RNA, 19 nt, Artificial Sequence
  Description of Artificial Sequence: Synthetic oligonucleotide
  Antisense strand to SEQ ID NO: 1382586
ugacagaggaaugaccaga

SEQ ID NO: 1382588 - RNA, 19 nt, Artificial Sequence
  Description of Artificial Sequence: Synthetic oligonucleotide
  Sense strand starting at position 2381 of SEQ ID NO: 1242926
ggucauuccucugucagca

SEQ ID NO: 1382589 - RNA, 19 nt, Artificial Sequence
  Description of Artificial Sequence: Synthetic oligonucleotide
  Antisense strand to SEQ ID NO: 1382588
ugcugacagaggaaugacc

SEQ ID NO: 1382590 - RNA, 19 nt, Artificial Sequence
  Description of Artificial Sequence: Synthetic oligonucleotide
  Sense strand starting at position 2437 of SEQ ID NO: 1242926
ucaggaggcuuuggauaac

SEQ ID NO: 1382591 - RNA, 19 nt, Artificial Sequence
  Description of Artificial Sequence: Synthetic oligonucleotide
  Antisense strand to SEQ ID NO: 1382590
guuauccaaagccuccuga

SEQ ID NO: 1382592 - RNA, 19 nt, Artificial Sequence
  Description of Artificial Sequence: Synthetic oligonucleotide
  Sense strand starting at position 2506 of SEQ ID NO: 1242926
gauagaugauuccucaguc

SEQ ID NO: 1382593 - RNA, 19 nt, Artificial Sequence
  Description of Artificial Sequence: Synthetic oligonucleotide
  Antisense strand to SEQ ID NO: 1382592
gacugaggaaucaucuauc

SEQ ID NO: 1382594 - RNA, 19 nt, Artificial Sequence
  Description of Artificial Sequence: Synthetic oligonucleotide
  Sense strand starting at position 2507 of SEQ ID NO: 1242926
auagaugauuccucaguca

SEQ ID NO: 1382595 - RNA, 19 nt, Artificial Sequence
  Description of Artificial Sequence: Synthetic oligonucleotide
  Antisense strand to SEQ ID NO: 1382594
ugacugaggaaucaucuau

SEQ ID NO: 1382596 - RNA, 19 nt, Artificial Sequence
  Description of Artificial Sequence: Synthetic oligonucleotide
  Sense strand starting at position 2510 of SEQ ID NO: 1242926
gaugauuccucagucagau

SEQ ID NO: 1382597 - RNA, 19 nt, Artificial Sequence
  Description of Artificial Sequence: Synthetic oligonucleotide
  Antisense strand to SEQ ID NO: 1382596
aucugacugaggaaucauc

SEQ ID NO: 1382598 - RNA, 19 nt, Artificial Sequence
  Description of Artificial Sequence: Synthetic oligonucleotide
  Sense strand starting at position 2555 of SEQ ID NO: 1242926
aagggugaguggugacaau

SEQ ID NO: 1382599 - RNA, 19 nt, Artificial Sequence
  Description of Artificial Sequence: Synthetic oligonucleotide
  Antisense strand to SEQ ID NO: 1382598
auugucaccacucacccuu

SEQ ID NO: 1382600 - RNA, 19 nt, Artificial Sequence
  Description of Artificial Sequence: Synthetic oligonucleotide
  Sense strand starting at position 2564 of SEQ ID NO: 1242926
uggugacaauaacaguaau

SEQ ID NO: 1382601 - RNA, 19 nt, Artificial Sequence
  Description of Artificial Sequence: Synthetic oligonucleotide
  Antisense strand to SEQ ID NO: 1382600
auuacuguuauugucacca

SEQ ID NO: 1382602 - RNA, 19 nt, Artificial Sequence
  Description of Artificial Sequence: Synthetic oligonucleotide
  Sense strand starting at position 2701 of SEQ ID NO: 1242926
ugugaauguggugaugaag

SEQ ID NO: 1382603 - RNA, 19 nt, Artificial Sequence
  Description of Artificial Sequence: Synthetic oligonucleotide
  Antisense strand to SEQ ID NO: 1382602
cuucaucaccacauucaca

SEQ ID NO: 1382604 - RNA, 19 nt, Artificial Sequence
  Description of Artificial Sequence: Synthetic oligonucleotide
  Sense strand starting at position 2726 of SEQ ID NO: 1242926
gagcuuaaggcagauacau

SEQ ID NO: 1382605 - RNA, 19 nt, Artificial Sequence
  Description of Artificial Sequence: Synthetic oligonucleotide
  Antisense strand to SEQ ID NO: 1382604
auguaucugccuuaagcuc

SEQ ID NO: 1382606 - RNA, 19 nt, Artificial Sequence
  Description of Artificial Sequence: Synthetic oligonucleotide
  Sense strand starting at position 2728 of SEQ ID NO: 1242926
gcuuaaggcagauacaugu

SEQ ID NO: 1382607 - RNA, 19 nt, Artificial Sequence
  Description of Artificial Sequence: Synthetic oligonucleotide
  Antisense strand to SEQ ID NO: 1382606
acauguaucugccuuaagc

SEQ ID NO: 1382608 - RNA, 19 nt, Artificial Sequence
  Description of Artificial Sequence: Synthetic oligonucleotide
  Sense strand starting at position 2734 of SEQ ID NO: 1242926
ggcagauacauguagcuca

SEQ ID NO: 1382609 - RNA, 19 nt, Artificial Sequence
  Description of Artificial Sequence: Synthetic oligonucleotide
  Antisense strand to SEQ ID NO: 1382608
ugagcuacauguaucugcc

SEQ ID NO: 1382610 - RNA, 19 nt, Artificial Sequence
  Description of Artificial Sequence: Synthetic oligonucleotide
  Sense strand starting at position 2739 of SEQ ID NO: 1242926
auacauguagcucagagau

SEQ ID NO: 1382611 - RNA, 19 nt, Artificial Sequence
  Description of Artificial Sequence: Synthetic oligonucleotide
  Antisense strand to SEQ ID NO: 1382610
aucucugagcuacauguau

SEQ ID NO: 1382612 - RNA, 19 nt, Artificial Sequence
  Description of Artificial Sequence: Synthetic oligonucleotide
  Sense strand starting at position 2741 of SEQ ID NO: 1242926
acauguagcucagagauga

SEQ ID NO: 1382613 - RNA, 19 nt, Artificial Sequence
  Description of Artificial Sequence: Synthetic oligonucleotide
  Antisense strand to SEQ ID NO: 1382612
ucaucucugagcuacaugu

SEQ ID NO: 1382614 - RNA, 19 nt, Artificial Sequence
  Description of Artificial Sequence: Synthetic oligonucleotide
  Sense strand starting at position 2745 of SEQ ID NO: 1242926
guagcucagagaugagaau

SEQ ID NO: 1382615 - RNA, 19 nt, Artificial Sequence
  Description of Artificial Sequence: Synthetic oligonucleotide
  Antisense strand to SEQ ID NO: 1382614
auucucaucucugagcuac

SEQ ID NO: 1382616 - RNA, 19 nt, Artificial Sequence
  Description of Artificial Sequence: Synthetic oligonucleotide
  Sense strand starting at position 2920 of SEQ ID NO: 1242926
auuccuucucuccgguaga

SEQ ID NO: 1382617 - RNA, 19 nt, Artificial Sequence
  Description of Artificial Sequence: Synthetic oligonucleotide
  Antisense strand to SEQ ID NO: 1382616
ucuaccggagagaaggaau

SEQ ID NO: 1382618 - RNA, 19 nt, Artificial Sequence
  Description of Artificial Sequence: Synthetic oligonucleotide
  Sense strand starting at position 2923 of SEQ ID NO: 1242926
ccuucucuccgguagagau

SEQ ID NO: 1382619 - RNA, 19 nt, Artificial Sequence
  Description of Artificial Sequence: Synthetic oligonucleotide
  Antisense strand to SEQ ID NO: 1382618
aucucuaccggagagaagg

SEQ ID NO: 1382620 - RNA, 19 nt, Artificial Sequence
  Description of Artificial Sequence: Synthetic oligonucleotide
  Sense strand starting at position 3333 of SEQ ID NO: 1242926
gaggacaagugaguuaucu

SEQ ID NO: 1382621 - RNA, 19 nt, Artificial Sequence
  Description of Artificial Sequence: Synthetic oligonucleotide
  Antisense strand to SEQ ID NO: 1382620
agauaacucacuuguccuc

SEQ ID NO: 1382622 - RNA, 19 nt, Artificial Sequence
  Description of Artificial Sequence: Synthetic oligonucleotide
  Sense strand starting at position 3360 of SEQ ID NO: 1242926
auggguugucccugacaua

SEQ ID NO: 1382623 - RNA, 19 nt, Artificial Sequence
  Description of Artificial Sequence: Synthetic oligonucleotide
  Antisense strand to SEQ ID NO: 1382622
uaugucagggacaacccau

SEQ ID NO: 1382624 - RNA, 19 nt, Artificial Sequence
  Description of Artificial Sequence: Synthetic oligonucleotide
  Sense strand starting at position 3361 of SEQ ID NO: 1242926
uggguugucccugacauac

SEQ ID NO: 1382625 - RNA, 19 nt, Artificial Sequence
  Description of Artificial Sequence: Synthetic oligonucleotide
  Antisense strand to SEQ ID NO: 1382624
guaugucagggacaaccca

SEQ ID NO: 1382626 - RNA, 19 nt, Artificial Sequence
  Description of Artificial Sequence: Synthetic oligonucleotide
  Sense strand starting at position 3363 of SEQ ID NO: 1242926
gguugucccugacauacca

SEQ ID NO: 1382627 - RNA, 19 nt, Artificial Sequence
  Description of Artificial Sequence: Synthetic oligonucleotide
  Antisense strand to SEQ ID NO: 1382626
ugguaugucagggacaacc

SEQ ID NO: 1382628 - RNA, 19 nt, Artificial Sequence
  Description of Artificial Sequence: Synthetic oligonucleotide
  Sense strand starting at position 3575 of SEQ ID NO: 1242926
gcagauggcugaagagagu

SEQ ID NO: 1382629 - RNA, 19 nt, Artificial Sequence
  Description of Artificial Sequence: Synthetic oligonucleotide
  Antisense strand to SEQ ID NO: 1382628
acucucuucagccaucugc

SEQ ID NO: 1382630 - RNA, 19 nt, Artificial Sequence
  Description of Artificial Sequence: Synthetic oligonucleotide
  Sense strand starting at position 3751 of SEQ ID NO: 1242926
cucugagucuggcuagaga

SEQ ID NO: 1382631 - RNA, 19 nt, Artificial Sequence
  Description of Artificial Sequence: Synthetic oligonucleotide
  Antisense strand to SEQ ID NO: 1382630
ucucuagccagacucagag

SEQ ID NO: 1382632 - RNA, 19 nt, Artificial Sequence
  Description of Artificial Sequence: Synthetic oligonucleotide
  Sense strand starting at position 3769 of SEQ ID NO: 1242926
agacaagccugguucucau

SEQ ID NO: 1382633 - RNA, 19 nt, Artificial Sequence
  Description of Artificial Sequence: Synthetic oligonucleotide
  Antisense strand to SEQ ID NO: 1382632
augagaaccaggcuugucu

SEQ ID NO: 1382634 - RNA, 19 nt, Artificial Sequence
  Description of Artificial Sequence: Synthetic oligonucleotide
  Sense strand starting at position 3788 of SEQ ID NO: 1242926
aguagcgauaccuggaguu

SEQ ID NO: 1382635 - RNA, 19 nt, Artificial Sequence
  Description of Artificial Sequence: Synthetic oligonucleotide
  Antisense strand to SEQ ID NO: 1382634
aacuccagguaucgcuacu

SEQ ID NO: 1382636 - RNA, 19 nt, Artificial Sequence
  Description of Artificial Sequence: Synthetic oligonucleotide
  Sense strand starting at position 3791 of SEQ ID NO: 1242926
agcgauaccuggaguuggu

SEQ ID NO: 1382637 - RNA, 19 nt, Artificial Sequence
  Description of Artificial Sequence: Synthetic oligonucleotide
  Antisense strand to SEQ ID NO: 1382636
accaacuccagguaucgcu

SEQ ID NO: 1382638 - RNA, 19 nt, Artificial Sequence
  Description of Artificial Sequence: Synthetic oligonucleotide
  Sense strand starting at position 3794 of SEQ ID NO: 1242926
gauaccuggaguugguauu

SEQ ID NO: 1382639 - RNA, 19 nt, Artificial Sequence
  Description of Artificial Sequence: Synthetic oligonucleotide
  Antisense strand to SEQ ID NO: 1382638
aauaccaacuccagguauc

SEQ ID NO: 1382640 - RNA, 19 nt, Artificial Sequence
  Description of Artificial Sequence: Synthetic oligonucleotide
  Sense strand starting at position 3800 of SEQ ID NO: 1242926
uggaguugguauucagcau

SEQ ID NO: 1382641 - RNA, 19 nt, Artificial Sequence
  Description of Artificial Sequence: Synthetic oligonucleotide
  Antisense strand to SEQ ID NO: 1382640
augcugaauaccaacucca

SEQ ID NO: 1382642 - RNA, 19 nt, Artificial Sequence
  Description of Artificial Sequence: Synthetic oligonucleotide
  Sense strand starting at position 3876 of SEQ ID NO: 1242926
aucuguuaugagugcugau

SEQ ID NO: 1382643 - RNA, 19 nt, Artificial Sequence
  Description of Artificial Sequence: Synthetic oligonucleotide
  Antisense strand to SEQ ID NO: 1382642
aucagcacucauaacagau

SEQ ID NO: 1382644 - RNA, 19 nt, Artificial Sequence
  Description of Artificial Sequence: Synthetic oligonucleotide
  Sense strand starting at position 3913 of SEQ ID NO: 1242926
cugcuaugucuggagguuu

SEQ ID NO: 1382645 - RNA, 19 nt, Artificial Sequence
  Description of Artificial Sequence: Synthetic oligonucleotide
  Antisense strand to SEQ ID NO: 1382644
aaaccuccagacauagcag

SEQ ID NO: 1382646 - RNA, 19 nt, Artificial Sequence
  Description of Artificial Sequence: Synthetic oligonucleotide
  Sense strand starting at position 3935 of SEQ ID NO: 1242926
gguguaagaugcucugcuu

SEQ ID NO: 1382647 - RNA, 19 nt, Artificial Sequence
  Description of Artificial Sequence: Synthetic oligonucleotide
  Antisense strand to SEQ ID NO: 1382646
aagcagagcaucuuacacc

SEQ ID NO: 1382648 - RNA, 19 nt, Artificial Sequence
  Description of Artificial Sequence: Synthetic oligonucleotide
  Sense strand starting at position 3938 of SEQ ID NO: 1242926
guaagaugcucugcuugua

SEQ ID NO: 1382649 - RNA, 19 nt, Artificial Sequence
  Description of Artificial Sequence: Synthetic oligonucleotide
  Antisense strand to SEQ ID NO: 1382648
uacaagcagagcaucuuac

SEQ ID NO: 1382650 - RNA, 19 nt, Artificial Sequence
  Description of Artificial Sequence: Synthetic oligonucleotide
  Sense strand starting at position 3952 of SEQ ID NO: 1242926
uuguacagaucauucucau

SEQ ID NO: 1382651 - RNA, 19 nt, Artificial Sequence
  Description of Artificial Sequence: Synthetic oligonucleotide
  Antisense strand to SEQ ID NO: 1382650
augagaaugaucuguacaa

SEQ ID NO: 1382652 - RNA, 19 nt, Artificial Sequence
  Description of Artificial Sequence: Synthetic oligonucleotide
  Sense strand starting at position 130 of SEQ ID NO: 1242927
gugggcaacucugauguuu

SEQ ID NO: 1382653 - RNA, 19 nt, Artificial Sequence
  Description of Artificial Sequence: Synthetic oligonucleotide
  Antisense strand to SEQ ID NO: 1382652
aaacaucagaguugcccac

SEQ ID NO: 1382654 - RNA, 19 nt, Artificial Sequence
  Description of Artificial Sequence: Synthetic oligonucleotide
  Sense strand starting at position 132 of SEQ ID NO: 1242927
gggcaacucugauguuugu

SEQ ID NO: 1382655 - RNA, 19 nt, Artificial Sequence
  Description of Artificial Sequence: Synthetic oligonucleotide
  Antisense strand to SEQ ID NO: 1382654
acaaacaucagaguugccc

SEQ ID NO: 1382656 - RNA, 19 nt, Artificial Sequence
  Description of Artificial Sequence: Synthetic oligonucleotide
  Sense strand starting at position 200 of SEQ ID NO: 1242927
ucaggaugccuacagguaa

SEQ ID NO: 1382657 - RNA, 19 nt, Artificial Sequence
  Description of Artificial Sequence: Synthetic oligonucleotide
  Antisense strand to SEQ ID NO: 1382656
uuaccuguaggcauccuga

SEQ ID NO: 1382658 - RNA, 19 nt, Artificial Sequence
  Description of Artificial Sequence: Synthetic oligonucleotide
  Sense strand starting at position 319 of SEQ ID NO: 1242927
accucaguugucuggcuga

SEQ ID NO: 1382659 - RNA, 19 nt, Artificial Sequence
  Description of Artificial Sequence: Synthetic oligonucleotide
  Antisense strand to SEQ ID NO: 1382658
ucagccagacaacugaggu

SEQ ID NO: 1382660 - RNA, 19 nt, Artificial Sequence
  Description of Artificial Sequence: Synthetic oligonucleotide
  Sense strand starting at position 322 of SEQ ID NO: 1242927
ucaguugucuggcugaggu

SEQ ID NO: 1382661 - RNA, 19 nt, Artificial Sequence
  Description of Artificial Sequence: Synthetic oligonucleotide
  Antisense strand to SEQ ID NO: 1382660
accucagccagacaacuga

SEQ ID NO: 1382662 - RNA, 19 nt, Artificial Sequence
  Description of Artificial Sequence: Synthetic oligonucleotide
  Sense strand starting at position 937 of SEQ ID NO: 1242927
gcuagcaaguaaugaagau

SEQ ID NO: 1382663 - RNA, 19 nt, Artificial Sequence
  Description of Artificial Sequence: Synthetic oligonucleotide
  Antisense strand to SEQ ID NO: 1382662
aucuucauuacuugcuagc

SEQ ID NO: 1382664 - RNA, 19 nt, Artificial Sequence
  Description of Artificial Sequence: Synthetic oligonucleotide
  Sense strand starting at position 1024 of SEQ ID NO: 1242927
uuaccugacucuuagaaag

SEQ ID NO: 1382665 - RNA, 19 nt, Artificial Sequence
  Description of Artificial Sequence: Synthetic oligonucleotide
  Antisense strand to SEQ ID NO: 1382664
cuuucuaagagucagguaa

SEQ ID NO: 1382666 - RNA, 19 nt, Artificial Sequence
  Description of Artificial Sequence: Synthetic oligonucleotide
  Sense strand starting at position 1026 of SEQ ID NO: 1242927
accugacucuuagaaagca

SEQ ID NO: 1382667 - RNA, 19 nt, Artificial Sequence
  Description of Artificial Sequence: Synthetic oligonucleotide
  Antisense strand to SEQ ID NO: 1382666
ugcuuucuaagagucaggu

SEQ ID NO: 1382668 - RNA, 19 nt, Artificial Sequence
  Description of Artificial Sequence: Synthetic oligonucleotide
  Sense strand starting at position 1077 of SEQ ID NO: 1242927
ccaacaauguguuuccaug

SEQ ID NO: 1382669 - RNA, 19 nt, Artificial Sequence
  Description of Artificial Sequence: Synthetic oligonucleotide
  Antisense strand to SEQ ID NO: 1382668
cauggaaacacauuguugg

SEQ ID NO: 1382670 - RNA, 19 nt, Artificial Sequence
  Description of Artificial Sequence: Synthetic oligonucleotide
  Sense strand starting at position 1213 of SEQ ID NO: 1242927
acgcccuggacuugucaga

SEQ ID NO: 1382671 - RNA, 19 nt, Artificial Sequence
  Description of Artificial Sequence: Synthetic oligonucleotide
  Antisense strand to SEQ ID NO: 1382670
ucugacaaguccagggcgu

SEQ ID NO: 1382672 - RNA, 19 nt, Artificial Sequence
  Description of Artificial Sequence: Synthetic oligonucleotide
  Sense strand starting at position 1218 of SEQ ID NO: 1242927
cuggacuugucagaggcuu

SEQ ID NO: 1382673 - RNA, 19 nt, Artificial Sequence
  Description of Artificial Sequence: Synthetic oligonucleotide
  Antisense strand to SEQ ID NO: 1382672
aagccucugacaaguccag

SEQ ID NO: 1382674 - RNA, 19 nt, Artificial Sequence
  Description of Artificial Sequence: Synthetic oligonucleotide
  Sense strand starting at position 1220 of SEQ ID NO: 1242927
ggacuugucagaggcuugu

SEQ ID NO: 1382675 - RNA, 19 nt, Artificial Sequence
  Description of Artificial Sequence: Synthetic oligonucleotide
  Antisense strand to SEQ ID NO: 1382674
acaagccucugacaagucc

SEQ ID NO: 1382676 - RNA, 19 nt, Artificial Sequence
  Description of Artificial Sequence: Synthetic oligonucleotide
  Sense strand starting at position 1226 of SEQ ID NO: 1242927
gucagaggcuuguuucuga

SEQ ID NO: 1382677 - RNA, 19 nt, Artificial Sequence
  Description of Artificial Sequence: Synthetic oligonucleotide
  Antisense strand to SEQ ID NO: 1382676
ucagaaacaagccucugac

SEQ ID NO: 1382678 - RNA, 19 nt, Artificial Sequence
  Description of Artificial Sequence: Synthetic oligonucleotide
  Sense strand starting at position 1327 of SEQ ID NO: 1242927
acuauuuccuuguaguuga

SEQ ID NO: 1382679 - RNA, 19 nt, Artificial Sequence
  Description of Artificial Sequence: Synthetic oligonucleotide
  Antisense strand to SEQ ID NO: 1382678
ucaacuacaaggaaauagu

SEQ ID NO: 1382680 - RNA, 19 nt, Artificial Sequence
  Description of Artificial Sequence: Synthetic oligonucleotide
  Sense strand starting at position 1340 of SEQ ID NO: 1242927
aguugaggcugcugucuua

SEQ ID NO: 1382681 - RNA, 19 nt, Artificial Sequence
  Description of Artificial Sequence: Synthetic oligonucleotide
  Antisense strand to SEQ ID NO: 1382680
uaagacagcagccucaacu

SEQ ID NO: 1382682 - RNA, 19 nt, Artificial Sequence
  Description of Artificial Sequence: Synthetic oligonucleotide
  Sense strand starting at position 1363 of SEQ ID NO: 1242927
gcccaagucccuuggagua

SEQ ID NO: 1382683 - RNA, 19 nt, Artificial Sequence
  Description of Artificial Sequence: Synthetic oligonucleotide
  Antisense strand to SEQ ID NO: 1382682
uacuccaagggacuugggc

SEQ ID NO: 1382684 - RNA, 19 nt, Artificial Sequence
  Description of Artificial Sequence: Synthetic oligonucleotide
  Sense strand starting at position 1614 of SEQ ID NO: 1242927
ggagaaucguaccuggacu

SEQ ID NO: 1382685 - RNA, 19 nt, Artificial Sequence
  Description of Artificial Sequence: Synthetic oligonucleotide
  Antisense strand to SEQ ID NO: 1382684
aguccagguacgauucucc

SEQ ID NO: 1382686 - RNA, 19 nt, Artificial Sequence
  Description of Artificial Sequence: Synthetic oligonucleotide
  Sense strand starting at position 2128 of SEQ ID NO: 1242927
cuuccaauuucucgagaga

SEQ ID NO: 1382687 - RNA, 19 nt, Artificial Sequence
  Description of Artificial Sequence: Synthetic oligonucleotide
  Antisense strand to SEQ ID NO: 1382686
ucucucgagaaauuggaag

SEQ ID NO: 1382688 - RNA, 19 nt, Artificial Sequence
  Description of Artificial Sequence: Synthetic oligonucleotide
  Sense strand starting at position 2166 of SEQ ID NO: 1242927
acaugaaaucugcaaguuu

SEQ ID NO: 1382689 - RNA, 19 nt, Artificial Sequence
  Description of Artificial Sequence: Synthetic oligonucleotide
  Antisense strand to SEQ ID NO: 1382688
aaacuugcagauuucaugu

SEQ ID NO: 1382690 - RNA, 19 nt, Artificial Sequence
  Description of Artificial Sequence: Synthetic oligonucleotide
  Sense strand starting at position 2174 of SEQ ID NO: 1242927
ucugcaaguuugucaacau

SEQ ID NO: 1382691 - RNA, 19 nt, Artificial Sequence
  Description of Artificial Sequence: Synthetic oligonucleotide
  Antisense strand to SEQ ID NO: 1382690
auguugacaaacuugcaga

SEQ ID NO: 1382692 - RNA, 19 nt, Artificial Sequence
  Description of Artificial Sequence: Synthetic oligonucleotide
  Sense strand starting at position 2175 of SEQ ID NO: 1242927
cugcaaguuugucaacauu

SEQ ID NO: 1382693 - RNA, 19 nt, Artificial Sequence
  Description of Artificial Sequence: Synthetic oligonucleotide
  Antisense strand to SEQ ID NO: 1382692
aauguugacaaacuugcag

SEQ ID NO: 1382694 - RNA, 19 nt, Artificial Sequence
  Description of Artificial Sequence: Synthetic oligonucleotide
  Sense strand starting at position 2181 of SEQ ID NO: 1242927
guuugucaacauugacuuu

SEQ ID NO: 1382695 - RNA, 19 nt, Artificial Sequence
  Description of Artificial Sequence: Synthetic oligonucleotide
  Antisense strand to SEQ ID NO: 1382694
aaagucaauguugacaaac

SEQ ID NO: 1382696 - RNA, 19 nt, Artificial Sequence
  Description of Artificial Sequence: Synthetic oligonucleotide
  Sense strand starting at position 2657 of SEQ ID NO: 1242927
agcacaaugugugcaucau

SEQ ID NO: 1382697 - RNA, 19 nt, Artificial Sequence
  Description of Artificial Sequence: Synthetic oligonucleotide
  Antisense strand to SEQ ID NO: 1382696
augaugcacacauugugcu

SEQ ID NO: 1382698 - RNA, 19 nt, Artificial Sequence
  Description of Artificial Sequence: Synthetic oligonucleotide
  Sense strand starting at position 2658 of SEQ ID NO: 1242927
gcacaaugugugcaucaua

SEQ ID NO: 1382699 - RNA, 19 nt, Artificial Sequence
  Description of Artificial Sequence: Synthetic oligonucleotide
  Antisense strand to SEQ ID NO: 1382698
uaugaugcacacauugugc

SEQ ID NO: 1382700 - RNA, 19 nt, Artificial Sequence
  Description of Artificial Sequence: Synthetic oligonucleotide
  Sense strand starting at position 2865 of SEQ ID NO: 1242927
ggcagagcuucugaaacuc

SEQ ID NO: 1382701 - RNA, 19 nt, Artificial Sequence
  Description of Artificial Sequence: Synthetic oligonucleotide
  Antisense strand to SEQ ID NO: 1382700
gaguuucagaagcucugcc

SEQ ID NO: 1382702 - RNA, 19 nt, Artificial Sequence
  Description of Artificial Sequence: Synthetic oligonucleotide
  Sense strand starting at position 3096 of SEQ ID NO: 1242927
gcacuuggcuaaucccuaa

SEQ ID NO: 1382703 - RNA, 19 nt, Artificial Sequence
  Description of Artificial Sequence: Synthetic oligonucleotide
  Antisense strand to SEQ ID NO: 1382702
uuagggauuagccaagugc

SEQ ID NO: 1382704 - RNA, 19 nt, Artificial Sequence
  Description of Artificial Sequence: Synthetic oligonucleotide
  Sense strand starting at position 3169 of SEQ ID NO: 1242927
ggagcucgcucucuuccaa

SEQ ID NO: 1382705 - RNA, 19 nt, Artificial Sequence
  Description of Artificial Sequence: Synthetic oligonucleotide
  Antisense strand to SEQ ID NO: 1382704
uuggaagagagcgagcucc

SEQ ID NO: 1382706 - RNA, 19 nt, Artificial Sequence
  Description of Artificial Sequence: Synthetic oligonucleotide
  Sense strand starting at position 3191 of SEQ ID NO: 1242927
ggcacauuccuuugaucuc

SEQ ID NO: 1382707 - RNA, 19 nt, Artificial Sequence
  Description of Artificial Sequence: Synthetic oligonucleotide
  Antisense strand to SEQ ID NO: 1382706
gagaucaaaggaaugugcc

SEQ ID NO: 1382708 - RNA, 19 nt, Artificial Sequence
  Description of Artificial Sequence: Synthetic oligonucleotide
  Sense strand starting at position 3470 of SEQ ID NO: 1242927
ugggaugauuucuggcaga

SEQ ID NO: 1382709 - RNA, 19 nt, Artificial Sequence
  Description of Artificial Sequence: Synthetic oligonucleotide
  Antisense strand to SEQ ID NO: 1382708
ucugccagaaaucauccca

SEQ ID NO: 1382710 - RNA, 19 nt, Artificial Sequence
  Description of Artificial Sequence: Synthetic oligonucleotide
  Sense strand starting at position 3601 of SEQ ID NO: 1242927
cugcuauugucucacugca

SEQ ID NO: 1382711 - RNA, 19 nt, Artificial Sequence
  Description of Artificial Sequence: Synthetic oligonucleotide
  Antisense strand to SEQ ID NO: 1382710
ugcagugagacaauagcag

SEQ ID NO: 1382712 - RNA, 19 nt, Artificial Sequence
  Description of Artificial Sequence: Synthetic oligonucleotide
  Sense strand starting at position 3696 of SEQ ID NO: 1242927
gcuguucucuggugaaacc

SEQ ID NO: 1382713 - RNA, 19 nt, Artificial Sequence
  Description of Artificial Sequence: Synthetic oligonucleotide
  Antisense strand to SEQ ID NO: 1382712
gguuucaccagagaacagc

SEQ ID NO: 1382714 - RNA, 19 nt, Artificial Sequence
  Description of Artificial Sequence: Synthetic oligonucleotide
  Sense strand starting at position 3706 of SEQ ID NO: 1242927
ggugaaaccuucucccgga

SEQ ID NO: 1382715 - RNA, 19 nt, Artificial Sequence
  Description of Artificial Sequence: Synthetic oligonucleotide
  Antisense strand to SEQ ID NO: 1382714
uccgggagaagguuucacc

SEQ ID NO: 1382716 - RNA, 19 nt, Artificial Sequence
  Description of Artificial Sequence: Synthetic oligonucleotide
  Sense strand starting at position 3707 of SEQ ID NO: 1242927
gugaaaccuucucccggaa

SEQ ID NO: 1382717 - RNA, 19 nt, Artificial Sequence
  Description of Artificial Sequence: Synthetic oligonucleotide
  Antisense strand to SEQ ID NO: 1382716
uuccgggagaagguuucac

SEQ ID NO: 1382718 - RNA, 19 nt, Artificial Sequence
  Description of Artificial Sequence: Synthetic oligonucleotide
  Sense strand starting at position 3709 of SEQ ID NO: 1242927
gaaaccuucucccggaaag

SEQ ID NO: 1382719 - RNA, 19 nt, Artificial Sequence
  Description of Artificial Sequence: Synthetic oligonucleotide
  Antisense strand to SEQ ID NO: 1382718
cuuuccgggagaagguuuc

SEQ ID NO: 1382720 - RNA, 19 nt, Artificial Sequence
  Description of Artificial Sequence: Synthetic oligonucleotide
  Sense strand starting at position 3735 of SEQ ID NO: 1242927
aggcuugcuggccggagaa

SEQ ID NO: 1382721 - RNA, 19 nt, Artificial Sequence
  Description of Artificial Sequence: Synthetic oligonucleotide
  Antisense strand to SEQ ID NO: 1382720
uucuccggccagcaagccu

SEQ ID NO: 1382722 - RNA, 19 nt, Artificial Sequence
  Description of Artificial Sequence: Synthetic oligonucleotide
  Sense strand starting at position 3756 of SEQ ID NO: 1242927
cggccucuguugcaucaaa

SEQ ID NO: 1382723 - RNA, 19 nt, Artificial Sequence
  Description of Artificial Sequence: Synthetic oligonucleotide
  Antisense strand to SEQ ID NO: 1382722
uuugaugcaacagaggccg

SEQ ID NO: 1382724 - RNA, 19 nt, Artificial Sequence
  Description of Artificial Sequence: Synthetic oligonucleotide
  Sense strand starting at position 3769 of SEQ ID NO: 1242927
aucaaaggauccugugcuu

SEQ ID NO: 1382725 - RNA, 19 nt, Artificial Sequence
  Description of Artificial Sequence: Synthetic oligonucleotide
  Antisense strand to SEQ ID NO: 1382724
aagcacaggauccuuugau

SEQ ID NO: 1382726 - RNA, 19 nt, Artificial Sequence
  Description of Artificial Sequence: Synthetic oligonucleotide
  Sense strand starting at position 3772 of SEQ ID NO: 1242927
aaaggauccugugcuuaaa

SEQ ID NO: 1382727 - RNA, 19 nt, Artificial Sequence
  Description of Artificial Sequence: Synthetic oligonucleotide
  Antisense strand to SEQ ID NO: 1382726
uuuaagcacaggauccuuu

SEQ ID NO: 1382728 - RNA, 19 nt, Artificial Sequence
  Description of Artificial Sequence: Synthetic oligonucleotide
  Sense strand starting at position 30 of SEQ ID NO: 1242928
cagagagguuuagugacua

SEQ ID NO: 1382729 - RNA, 19 nt, Artificial Sequence
  Description of Artificial Sequence: Synthetic oligonucleotide
  Antisense strand to SEQ ID NO: 1382728
uagucacuaaaccucucug

SEQ ID NO: 1382730 - RNA, 19 nt, Artificial Sequence
  Description of Artificial Sequence: Synthetic oligonucleotide
  Sense strand starting at position 34 of SEQ ID NO: 1242928
gagguuuagugacuaccca

SEQ ID NO: 1382731 - RNA, 19 nt, Artificial Sequence
  Description of Artificial Sequence: Synthetic oligonucleotide
  Antisense strand to SEQ ID NO: 1382730
uggguagucacuaaaccuc

SEQ ID NO: 1382732 - RNA, 19 nt, Artificial Sequence
  Description of Artificial Sequence: Synthetic oligonucleotide
  Sense strand starting at position 61 of SEQ ID NO: 1242928
cacagcagugugcaaagau

SEQ ID NO: 1382733 - RNA, 19 nt, Artificial Sequence
  Description of Artificial Sequence: Synthetic oligonucleotide
  Antisense strand to SEQ ID NO: 1382732
aucuuugcacacugcugug

SEQ ID NO: 1382734 - RNA, 19 nt, Artificial Sequence
  Description of Artificial Sequence: Synthetic oligonucleotide
  Sense strand starting at position 96 of SEQ ID NO: 1242928
acucgaaaggacuguguau

SEQ ID NO: 1382735 - RNA, 19 nt, Artificial Sequence
  Description of Artificial Sequence: Synthetic oligonucleotide
  Antisense strand to SEQ ID NO: 1382734
auacacaguccuuucgagu

SEQ ID NO: 1382736 - RNA, 19 nt, Artificial Sequence
  Description of Artificial Sequence: Synthetic oligonucleotide
  Sense strand starting at position 98 of SEQ ID NO: 1242928
ucgaaaggacuguguauca

SEQ ID NO: 1382737 - RNA, 19 nt, Artificial Sequence
  Description of Artificial Sequence: Synthetic oligonucleotide
  Antisense strand to SEQ ID NO: 1382736
ugauacacaguccuuucga

SEQ ID NO: 1382738 - RNA, 19 nt, Artificial Sequence
  Description of Artificial Sequence: Synthetic oligonucleotide
  Sense strand starting at position 231 of SEQ ID NO: 1242928
guuaaaguguuggcuacaa

SEQ ID NO: 1382739 - RNA, 19 nt, Artificial Sequence
  Description of Artificial Sequence: Synthetic oligonucleotide
  Antisense strand to SEQ ID NO: 1382738
uuguagccaacacuuuaac

SEQ ID NO: 1382740 - RNA, 19 nt, Artificial Sequence
  Description of Artificial Sequence: Synthetic oligonucleotide
  Sense strand starting at position 233 of SEQ ID NO: 1242928
uaaaguguuggcuacaaga

SEQ ID NO: 1382741 - RNA, 19 nt, Artificial Sequence
  Description of Artificial Sequence: Synthetic oligonucleotide
  Antisense strand to SEQ ID NO: 1382740
ucuuguagccaacacuuua

SEQ ID NO: 1382742 - RNA, 19 nt, Artificial Sequence
  Description of Artificial Sequence: Synthetic oligonucleotide
  Sense strand starting at position 235 of SEQ ID NO: 1242928
aaguguuggcuacaagaga

SEQ ID NO: 1382743 - RNA, 19 nt, Artificial Sequence
  Description of Artificial Sequence: Synthetic oligonucleotide
  Antisense strand to SEQ ID NO: 1382742
ucucuuguagccaacacuu

SEQ ID NO: 1382744 - RNA, 19 nt, Artificial Sequence
  Description of Artificial Sequence: Synthetic oligonucleotide
  Sense strand starting at position 261 of SEQ ID NO: 1242928
cugggagaaucauaaagag

SEQ ID NO: 1382745 - RNA, 19 nt, Artificial Sequence
  Description of Artificial Sequence: Synthetic oligonucleotide
  Antisense strand to SEQ ID NO: 1382744
cucuuuaugauucucccag

SEQ ID NO: 1382746 - RNA, 19 nt, Artificial Sequence
  Description of Artificial Sequence: Synthetic oligonucleotide
  Sense strand starting at position 351 of SEQ ID NO: 1242928
uugaaacuacuuuguggaa

SEQ ID NO: 1382747 - RNA, 19 nt, Artificial Sequence
  Description of Artificial Sequence: Synthetic oligonucleotide
  Antisense strand to SEQ ID NO: 1382746
uuccacaaaguaguuucaa

SEQ ID NO: 1382748 - RNA, 19 nt, Artificial Sequence
  Description of Artificial Sequence: Synthetic oligonucleotide
  Sense strand starting at position 352 of SEQ ID NO: 1242928
ugaaacuacuuuguggaaa

SEQ ID NO: 1382749 - RNA, 19 nt, Artificial Sequence
  Description of Artificial Sequence: Synthetic oligonucleotide
  Antisense strand to SEQ ID NO: 1382748
uuuccacaaaguaguuuca

SEQ ID NO: 1382750 - RNA, 19 nt, Artificial Sequence
  Description of Artificial Sequence: Synthetic oligonucleotide
  Sense strand starting at position 493 of SEQ ID NO: 1242928
ggcguaauggagcaaugau

SEQ ID NO: 1382751 - RNA, 19 nt, Artificial Sequence
  Description of Artificial Sequence: Synthetic oligonucleotide
  Antisense strand to SEQ ID NO: 1382750
aucauugcuccauuacgcc

SEQ ID NO: 1382752 - RNA, 19 nt, Artificial Sequence
  Description of Artificial Sequence: Synthetic oligonucleotide
  Sense strand starting at position 825 of SEQ ID NO: 1242928
ccuuucuuccacgacaguu

SEQ ID NO: 1382753 - RNA, 19 nt, Artificial Sequence
  Description of Artificial Sequence: Synthetic oligonucleotide
  Antisense strand to SEQ ID NO: 1382752
aacugucguggaagaaagg

SEQ ID NO: 1382754 - RNA, 19 nt, Artificial Sequence
  Description of Artificial Sequence: Synthetic oligonucleotide
  Sense strand starting at position 912 of SEQ ID NO: 1242928
ggagggaccguuugaaguu

SEQ ID NO: 1382755 - RNA, 19 nt, Artificial Sequence
  Description of Artificial Sequence: Synthetic oligonucleotide
  Antisense strand to SEQ ID NO: 1382754
aacuucaaacggucccucc

SEQ ID NO: 1382756 - RNA, 19 nt, Artificial Sequence
  Description of Artificial Sequence: Synthetic oligonucleotide
  Sense strand starting at position 1994 of SEQ ID NO: 1242928
ccuggaauccugggccaga

SEQ ID NO: 1382757 - RNA, 19 nt, Artificial Sequence
  Description of Artificial Sequence: Synthetic oligonucleotide
  Antisense strand to SEQ ID NO: 1382756
ucuggcccaggauuccagg

SEQ ID NO: 1382758 - RNA, 19 nt, Artificial Sequence
  Description of Artificial Sequence: Synthetic oligonucleotide
  Sense strand starting at position 2010 of SEQ ID NO: 1242928
agacucaccugccuguaau

SEQ ID NO: 1382759 - RNA, 19 nt, Artificial Sequence
  Description of Artificial Sequence: Synthetic oligonucleotide
  Antisense strand to SEQ ID NO: 1382758
auuacaggcaggugagucu

SEQ ID NO: 1382760 - RNA, 19 nt, Artificial Sequence
  Description of Artificial Sequence: Synthetic oligonucleotide
  Sense strand starting at position 2086 of SEQ ID NO: 1242928
gggaguccugcucauucuu

SEQ ID NO: 1382761 - RNA, 19 nt, Artificial Sequence
  Description of Artificial Sequence: Synthetic oligonucleotide
  Antisense strand to SEQ ID NO: 1382760
aagaaugagcaggacuccc

SEQ ID NO: 1382762 - RNA, 19 nt, Artificial Sequence
  Description of Artificial Sequence: Synthetic oligonucleotide
  Sense strand starting at position 2097 of SEQ ID NO: 1242928
ucauucuucucucugaguu

SEQ ID NO: 1382763 - RNA, 19 nt, Artificial Sequence
  Description of Artificial Sequence: Synthetic oligonucleotide
  Antisense strand to SEQ ID NO: 1382762
aacucagagagaagaauga

SEQ ID NO: 1382764 - RNA, 19 nt, Artificial Sequence
  Description of Artificial Sequence: Synthetic oligonucleotide
  Sense strand starting at position 2374 of SEQ ID NO: 1242928
uccucuagaugcuuucuga

SEQ ID NO: 1382765 - RNA, 19 nt, Artificial Sequence
  Description of Artificial Sequence: Synthetic oligonucleotide
  Antisense strand to SEQ ID NO: 1382764
ucagaaagcaucuagagga

SEQ ID NO: 1382766 - RNA, 19 nt, Artificial Sequence
  Description of Artificial Sequence: Synthetic oligonucleotide
  Sense strand starting at position 2377 of SEQ ID NO: 1242928
ucuagaugcuuucugauuc

SEQ ID NO: 1382767 - RNA, 19 nt, Artificial Sequence
  Description of Artificial Sequence: Synthetic oligonucleotide
  Antisense strand to SEQ ID NO: 1382766
gaaucagaaagcaucuaga

SEQ ID NO: 1382768 - RNA, 19 nt, Artificial Sequence
  Description of Artificial Sequence: Synthetic oligonucleotide
  Sense strand starting at position 2458 of SEQ ID NO: 1242928
ccgggcaauggcugauuua

SEQ ID NO: 1382769 - RNA, 19 nt, Artificial Sequence
  Description of Artificial Sequence: Synthetic oligonucleotide
  Antisense strand to SEQ ID NO: 1382768
uaaaucagccauugcccgg

SEQ ID NO: 1382770 - RNA, 19 nt, Artificial Sequence
  Description of Artificial Sequence: Synthetic oligonucleotide
  Sense strand starting at position 2468 of SEQ ID NO: 1242928
gcugauuuauucuacaaag

SEQ ID NO: 1382771 - RNA, 19 nt, Artificial Sequence
  Description of Artificial Sequence: Synthetic oligonucleotide
  Antisense strand to SEQ ID NO: 1382770
cuuuguagaauaaaucagc

SEQ ID NO: 1382772 - RNA, 19 nt, Artificial Sequence
  Description of Artificial Sequence: Synthetic oligonucleotide
  Sense strand starting at position 2619 of SEQ ID NO: 1242928
gggaccaaucccuaagugu

SEQ ID NO: 1382773 - RNA, 19 nt, Artificial Sequence
  Description of Artificial Sequence: Synthetic oligonucleotide
  Antisense strand to SEQ ID NO: 1382772
acacuuagggauugguccc

SEQ ID NO: 1382774 - RNA, 19 nt, Artificial Sequence
  Description of Artificial Sequence: Synthetic oligonucleotide
  Sense strand starting at position 2639 of SEQ ID NO: 1242928
ggaauucuuucuuuccuga

SEQ ID NO: 1382775 - RNA, 19 nt, Artificial Sequence
  Description of Artificial Sequence: Synthetic oligonucleotide
  Antisense strand to SEQ ID NO: 1382774
ucaggaaagaaagaauucc

SEQ ID NO: 1382776 - RNA, 19 nt, Artificial Sequence
  Description of Artificial Sequence: Synthetic oligonucleotide
  Sense strand starting at position 2711 of SEQ ID NO: 1242928
cgagaaauucugggugauu

SEQ ID NO: 1382777 - RNA, 19 nt, Artificial Sequence
  Description of Artificial Sequence: Synthetic oligonucleotide
  Antisense strand to SEQ ID NO: 1382776
aaucacccagaauuucucg

SEQ ID NO: 1382778 - RNA, 19 nt, Artificial Sequence
  Description of Artificial Sequence: Synthetic oligonucleotide
  Sense strand starting at position 2723 of SEQ ID NO: 1242928
ggugauugaugggugagga

SEQ ID NO: 1382779 - RNA, 19 nt, Artificial Sequence
  Description of Artificial Sequence: Synthetic oligonucleotide
  Antisense strand to SEQ ID NO: 1382778
uccucacccaucaaucacc

SEQ ID NO: 1382780 - RNA, 19 nt, Artificial Sequence
  Description of Artificial Sequence: Synthetic oligonucleotide
  Sense strand starting at position 2724 of SEQ ID NO: 1242928
gugauugaugggugaggaa

SEQ ID NO: 1382781 - RNA, 19 nt, Artificial Sequence
  Description of Artificial Sequence: Synthetic oligonucleotide
  Antisense strand to SEQ ID NO: 1382780
uuccucacccaucaaucac

SEQ ID NO: 1382782 - RNA, 19 nt, Artificial Sequence
  Description of Artificial Sequence: Synthetic oligonucleotide
  Sense strand starting at position 2737 of SEQ ID NO: 1242928
gaggaagugugggaagaaa

SEQ ID NO: 1382783 - RNA, 19 nt, Artificial Sequence
  Description of Artificial Sequence: Synthetic oligonucleotide
  Antisense strand to SEQ ID NO: 1382782
uuucuucccacacuuccuc

SEQ ID NO: 1382784 - RNA, 19 nt, Artificial Sequence
  Description of Artificial Sequence: Synthetic oligonucleotide
  Sense strand starting at position 3253 of SEQ ID NO: 1242928
aaauaaauccagugguaag

SEQ ID NO: 1382785 - RNA, 19 nt, Artificial Sequence
  Description of Artificial Sequence: Synthetic oligonucleotide
  Antisense strand to SEQ ID NO: 1382784
cuuaccacuggauuuauuu

SEQ ID NO: 1382786 - RNA, 19 nt, Artificial Sequence
  Description of Artificial Sequence: Synthetic oligonucleotide
  Sense strand starting at position 3331 of SEQ ID NO: 1242928
cuuagaugcucucugggaa

SEQ ID NO: 1382787 - RNA, 19 nt, Artificial Sequence
  Description of Artificial Sequence: Synthetic oligonucleotide
  Antisense strand to SEQ ID NO: 1382786
uucccagagagcaucuaag

SEQ ID NO: 1382788 - RNA, 19 nt, Artificial Sequence
  Description of Artificial Sequence: Synthetic oligonucleotide
  Sense strand starting at position 3332 of SEQ ID NO: 1242928
uuagaugcucucugggaag

SEQ ID NO: 1382789 - RNA, 19 nt, Artificial Sequence
  Description of Artificial Sequence: Synthetic oligonucleotide
  Antisense strand to SEQ ID NO: 1382788
cuucccagagagcaucuaa

SEQ ID NO: 1382790 - RNA, 19 nt, Artificial Sequence
  Description of Artificial Sequence: Synthetic oligonucleotide
  Sense strand starting at position 3413 of SEQ ID NO: 1242928
agggauugguguuuaagga

SEQ ID NO: 1382791 - RNA, 19 nt, Artificial Sequence
  Description of Artificial Sequence: Synthetic oligonucleotide
  Antisense strand to SEQ ID NO: 1382790
uccuuaaacaccaaucccu

SEQ ID NO: 1382792 - RNA, 19 nt, Artificial Sequence
  Description of Artificial Sequence: Synthetic oligonucleotide
  Sense strand starting at position 3452 of SEQ ID NO: 1242928
uugauucuguggcugaaca

SEQ ID NO: 1382793 - RNA, 19 nt, Artificial Sequence
  Description of Artificial Sequence: Synthetic oligonucleotide
  Antisense strand to SEQ ID NO: 1382792
uguucagccacagaaucaa

SEQ ID NO: 1382794 - RNA, 19 nt, Artificial Sequence
  Description of Artificial Sequence: Synthetic oligonucleotide
  Sense strand starting at position 3453 of SEQ ID NO: 1242928
ugauucuguggcugaacaa

SEQ ID NO: 1382795 - RNA, 19 nt, Artificial Sequence
  Description of Artificial Sequence: Synthetic oligonucleotide
  Antisense strand to SEQ ID NO: 1382794
uuguucagccacagaauca

SEQ ID NO: 1382796 - RNA, 19 nt, Artificial Sequence
  Description of Artificial Sequence: Synthetic oligonucleotide
  Sense strand starting at position 3454 of SEQ ID NO: 1242928
gauucuguggcugaacaaa

SEQ ID NO: 1382797 - RNA, 19 nt, Artificial Sequence
  Description of Artificial Sequence: Synthetic oligonucleotide
  Antisense strand to SEQ ID NO: 1382796
uuuguucagccacagaauc

SEQ ID NO: 1382798 - RNA, 19 nt, Artificial Sequence
  Description of Artificial Sequence: Synthetic oligonucleotide
  Sense strand starting at position 3584 of SEQ ID NO: 1242928
ggcaguaaagaaggguuau

SEQ ID NO: 1382799 - RNA, 19 nt, Artificial Sequence
  Description of Artificial Sequence: Synthetic oligonucleotide
  Antisense strand to SEQ ID NO: 1382798
auaacccuucuuuacugcc

SEQ ID NO: 1382800 - RNA, 19 nt, Artificial Sequence
  Description of Artificial Sequence: Synthetic oligonucleotide
  Sense strand starting at position 3585 of SEQ ID NO: 1242928
gcaguaaagaaggguuauc

SEQ ID NO: 1382801 - RNA, 19 nt, Artificial Sequence
  Description of Artificial Sequence: Synthetic oligonucleotide
  Antisense strand to SEQ ID NO: 1382800
gauaacccuucuuuacugc

SEQ ID NO: 1382802 - RNA, 19 nt, Artificial Sequence
  Description of Artificial Sequence: Synthetic oligonucleotide
  Sense strand starting at position 3617 of SEQ ID NO: 1242928
ccagguccauuccugaaga

SEQ ID NO: 1382803 - RNA, 19 nt, Artificial Sequence
  Description of Artificial Sequence: Synthetic oligonucleotide
  Antisense strand to SEQ ID NO: 1382802
ucuucaggaauggaccugg

SEQ ID NO: 1382804 - RNA, 19 nt, Artificial Sequence
  Description of Artificial Sequence: Synthetic oligonucleotide
  Sense strand starting at position 3764 of SEQ ID NO: 1242928
ucuccugcuugaguacaga

SEQ ID NO: 1382805 - RNA, 19 nt, Artificial Sequence
  Description of Artificial Sequence: Synthetic oligonucleotide
  Antisense strand to SEQ ID NO: 1382804
ucuguacucaagcaggaga

SEQ ID NO: 1382806 - RNA, 19 nt, Artificial Sequence
  Description of Artificial Sequence: Synthetic oligonucleotide
  Sense strand starting at position 3919 of SEQ ID NO: 1242928
cccagugacuuccugucua

SEQ ID NO: 1382807 - RNA, 19 nt, Artificial Sequence
  Description of Artificial Sequence: Synthetic oligonucleotide
  Antisense strand to SEQ ID NO: 1382806
uagacaggaagucacuggg

SEQ ID NO: 1382808 - RNA, 19 nt, Artificial Sequence
  Description of Artificial Sequence: Synthetic oligonucleotide
  Sense strand starting at position 174 of SEQ ID NO: 1242929
gcuggcucaccgugagcaa

SEQ ID NO: 1382809 - RNA, 19 nt, Artificial Sequence
  Description of Artificial Sequence: Synthetic oligonucleotide
  Antisense strand to SEQ ID NO: 1382808
uugcucacggugagccagc

SEQ ID NO: 1382810 - RNA, 19 nt, Artificial Sequence
  Description of Artificial Sequence: Synthetic oligonucleotide
  Sense strand starting at position 175 of SEQ ID NO: 1242929
cuggcucaccgugagcaaa

SEQ ID NO: 1382811 - RNA, 19 nt, Artificial Sequence
  Description of Artificial Sequence: Synthetic oligonucleotide
  Antisense strand to SEQ ID NO: 1382810
uuugcucacggugagccag

SEQ ID NO: 1382812 - RNA, 19 nt, Artificial Sequence
  Description of Artificial Sequence: Synthetic oligonucleotide
  Sense strand starting at position 513 of SEQ ID NO: 1242929
caucgaugcuuccugaaug

SEQ ID NO: 1382813 - RNA, 19 nt, Artificial Sequence
  Description of Artificial Sequence: Synthetic oligonucleotide
  Antisense strand to SEQ ID NO: 1382812
cauucaggaagcaucgaug

SEQ ID NO: 1382814 - RNA, 19 nt, Artificial Sequence
  Description of Artificial Sequence: Synthetic oligonucleotide
  Sense strand starting at position 514 of SEQ ID NO: 1242929
aucgaugcuuccugaauga

SEQ ID NO: 1382815 - RNA, 19 nt, Artificial Sequence
  Description of Artificial Sequence: Synthetic oligonucleotide
  Antisense strand to SEQ ID NO: 1382814
ucauucaggaagcaucgau

SEQ ID NO: 1382816 - RNA, 19 nt, Artificial Sequence
  Description of Artificial Sequence: Synthetic oligonucleotide
  Sense strand starting at position 603 of SEQ ID NO: 1242929
agaccuuccuguguguaga

SEQ ID NO: 1382817 - RNA, 19 nt, Artificial Sequence
  Description of Artificial Sequence: Synthetic oligonucleotide
  Antisense strand to SEQ ID NO: 1382816
ucuacacacaggaaggucu

SEQ ID NO: 1382818 - RNA, 19 nt, Artificial Sequence
  Description of Artificial Sequence: Synthetic oligonucleotide
  Sense strand starting at position 625 of SEQ ID NO: 1242929
cucagagcuccuugcucaa

SEQ ID NO: 1382819 - RNA, 19 nt, Artificial Sequence
  Description of Artificial Sequence: Synthetic oligonucleotide
  Antisense strand to SEQ ID NO: 1382818
uugagcaaggagcucugag

SEQ ID NO: 1382820 - RNA, 19 nt, Artificial Sequence
  Description of Artificial Sequence: Synthetic oligonucleotide
  Sense strand starting at position 628 of SEQ ID NO: 1242929
agagcuccuugcucaauca

SEQ ID NO: 1382821 - RNA, 19 nt, Artificial Sequence
  Description of Artificial Sequence: Synthetic oligonucleotide
  Antisense strand to SEQ ID NO: 1382820
ugauugagcaaggagcucu

SEQ ID NO: 1382822 - RNA, 19 nt, Artificial Sequence
  Description of Artificial Sequence: Synthetic oligonucleotide
  Sense strand starting at position 860 of SEQ ID NO: 1242929
ggaggacagugcugucauc

SEQ ID NO: 1382823 - RNA, 19 nt, Artificial Sequence
  Description of Artificial Sequence: Synthetic oligonucleotide
  Antisense strand to SEQ ID NO: 1382822
gaugacagcacuguccucc

SEQ ID NO: 1382824 - RNA, 19 nt, Artificial Sequence
  Description of Artificial Sequence: Synthetic oligonucleotide
  Sense strand starting at position 917 of SEQ ID NO: 1242929
ugaaucuuccaauguuuga

SEQ ID NO: 1382825 - RNA, 19 nt, Artificial Sequence
  Description of Artificial Sequence: Synthetic oligonucleotide
  Antisense strand to SEQ ID NO: 1382824
ucaaacauuggaagauuca

SEQ ID NO: 1382826 - RNA, 19 nt, Artificial Sequence
  Description of Artificial Sequence: Synthetic oligonucleotide
  Sense strand starting at position 965 of SEQ ID NO: 1242929
aguugaucuauguggccaa

SEQ ID NO: 1382827 - RNA, 19 nt, Artificial Sequence
  Description of Artificial Sequence: Synthetic oligonucleotide
  Antisense strand to SEQ ID NO: 1382826
uuggccacauagaucaacu

SEQ ID NO: 1382828 - RNA, 19 nt, Artificial Sequence
  Description of Artificial Sequence: Synthetic oligonucleotide
  Sense strand starting at position 968 of SEQ ID NO: 1242929
ugaucuauguggccaaagu

SEQ ID NO: 1382829 - RNA, 19 nt, Artificial Sequence
  Description of Artificial Sequence: Synthetic oligonucleotide
  Antisense strand to SEQ ID NO: 1382828
acuuuggccacauagauca

SEQ ID NO: 1382830 - RNA, 19 nt, Artificial Sequence
  Description of Artificial Sequence: Synthetic oligonucleotide
  Sense strand starting at position 969 of SEQ ID NO: 1242929
gaucuauguggccaaaguc

SEQ ID NO: 1382831 - RNA, 19 nt, Artificial Sequence
  Description of Artificial Sequence: Synthetic oligonucleotide
  Antisense strand to SEQ ID NO: 1382830
gacuuuggccacauagauc

SEQ ID NO: 1382832 - RNA, 19 nt, Artificial Sequence
  Description of Artificial Sequence: Synthetic oligonucleotide
  Sense strand starting at position 1119 of SEQ ID NO: 1242929
cccucuguccgagaggguu

SEQ ID NO: 1382833 - RNA, 19 nt, Artificial Sequence
  Description of Artificial Sequence: Synthetic oligonucleotide
  Antisense strand to SEQ ID NO: 1382832
aacccucucggacagaggg

SEQ ID NO: 1382834 - RNA, 19 nt, Artificial Sequence
  Description of Artificial Sequence: Synthetic oligonucleotide
  Sense strand starting at position 1164 of SEQ ID NO: 1242929
gguaaauggagcuggcuaa

SEQ ID NO: 1382835 - RNA, 19 nt, Artificial Sequence
  Description of Artificial Sequence: Synthetic oligonucleotide
  Antisense strand to SEQ ID NO: 1382834
uuagccagcuccauuuacc

SEQ ID NO: 1382836 - RNA, 19 nt, Artificial Sequence
  Description of Artificial Sequence: Synthetic oligonucleotide
  Sense strand starting at position 1201 of SEQ ID NO: 1242929
gacagcuuuccugggagag

SEQ ID NO: 1382837 - RNA, 19 nt, Artificial Sequence
  Description of Artificial Sequence: Synthetic oligonucleotide
  Antisense strand to SEQ ID NO: 1382836
cucucccaggaaagcuguc

SEQ ID NO: 1382838 - RNA, 19 nt, Artificial Sequence
  Description of Artificial Sequence: Synthetic oligonucleotide
  Sense strand starting at position 1202 of SEQ ID NO: 1242929
acagcuuuccugggagaga

SEQ ID NO: 1382839 - RNA, 19 nt, Artificial Sequence
  Description of Artificial Sequence: Synthetic oligonucleotide
  Antisense strand to SEQ ID NO: 1382838
ucucucccaggaaagcugu

SEQ ID NO: 1382840 - RNA, 19 nt, Artificial Sequence
  Description of Artificial Sequence: Synthetic oligonucleotide
  Sense strand starting at position 1203 of SEQ ID NO: 1242929
cagcuuuccugggagagag

SEQ ID NO: 1382841 - RNA, 19 nt, Artificial Sequence
  Description of Artificial Sequence: Synthetic oligonucleotide
  Antisense strand to SEQ ID NO: 1382840
cucucucccaggaaagcug

SEQ ID NO: 1382842 - RNA, 19 nt, Artificial Sequence
  Description of Artificial Sequence: Synthetic oligonucleotide
  Sense strand starting at position 1341 of SEQ ID NO: 1242929
agagguuguggcugagacu

SEQ ID NO: 1382843 - RNA, 19 nt, Artificial Sequence
  Description of Artificial Sequence: Synthetic oligonucleotide
  Antisense strand to SEQ ID NO: 1382842
agucucagccacaaccucu

SEQ ID NO: 1382844 - RNA, 19 nt, Artificial Sequence
  Description of Artificial Sequence: Synthetic oligonucleotide
  Sense strand starting at position 1621 of SEQ ID NO: 1242929
ugagaccaguccugagcaa

SEQ ID NO: 1382845 - RNA, 19 nt, Artificial Sequence
  Description of Artificial Sequence: Synthetic oligonucleotide
  Antisense strand to SEQ ID NO: 1382844
uugcucaggacuggucuca

SEQ ID NO: 1382846 - RNA, 19 nt, Artificial Sequence
  Description of Artificial Sequence: Synthetic oligonucleotide
  Sense strand starting at position 2054 of SEQ ID NO: 1242929
gguugugaaaggugagugu

SEQ ID NO: 1382847 - RNA, 19 nt, Artificial Sequence
  Description of Artificial Sequence: Synthetic oligonucleotide
  Antisense strand to SEQ ID NO: 1382846
acacucaccuuucacaacc

SEQ ID NO: 1382848 - RNA, 19 nt, Artificial Sequence
  Description of Artificial Sequence: Synthetic oligonucleotide
  Sense strand starting at position 2369 of SEQ ID NO: 1242929
gugucaggguuugaugaga

SEQ ID NO: 1382849 - RNA, 19 nt, Artificial Sequence
  Description of Artificial Sequence: Synthetic oligonucleotide
  Antisense strand to SEQ ID NO: 1382848
ucucaucaaacccugacac

SEQ ID NO: 1382850 - RNA, 19 nt, Artificial Sequence
  Description of Artificial Sequence: Synthetic oligonucleotide
  Sense strand starting at position 2445 of SEQ ID NO: 1242929
gugccuauggcuugaacca

SEQ ID NO: 1382851 - RNA, 19 nt, Artificial Sequence
  Description of Artificial Sequence: Synthetic oligonucleotide
  Antisense strand to SEQ ID NO: 1382850
ugguucaagccauaggcac

SEQ ID NO: 1382852 - RNA, 19 nt, Artificial Sequence
  Description of Artificial Sequence: Synthetic oligonucleotide
  Sense strand starting at position 2666 of SEQ ID NO: 1242929
ucccgaggugugugaugaa

SEQ ID NO: 1382853 - RNA, 19 nt, Artificial Sequence
  Description of Artificial Sequence: Synthetic oligonucleotide
  Antisense strand to SEQ ID NO: 1382852
uucaucacacaccucggga

SEQ ID NO: 1382854 - RNA, 19 nt, Artificial Sequence
  Description of Artificial Sequence: Synthetic oligonucleotide
  Sense strand starting at position 2681 of SEQ ID NO: 1242929
ugaaaucauggaugacgca

SEQ ID NO: 1382855 - RNA, 19 nt, Artificial Sequence
  Description of Artificial Sequence: Synthetic oligonucleotide
  Antisense strand to SEQ ID NO: 1382854
ugcgucauccaugauuuca

SEQ ID NO: 1382856 - RNA, 19 nt, Artificial Sequence
  Description of Artificial Sequence: Synthetic oligonucleotide
  Sense strand starting at position 2735 of SEQ ID NO: 1242929
ucaucagagcugugaaauu

SEQ ID NO: 1382857 - RNA, 19 nt, Artificial Sequence
  Description of Artificial Sequence: Synthetic oligonucleotide
  Antisense strand to SEQ ID NO: 1382856
aauuucacagcucugauga

SEQ ID NO: 1382858 - RNA, 19 nt, Artificial Sequence
  Description of Artificial Sequence: Synthetic oligonucleotide
  Sense strand starting at position 2746 of SEQ ID NO: 1242929
gugaaauuguugucuuuac

SEQ ID NO: 1382859 - RNA, 19 nt, Artificial Sequence
  Description of Artificial Sequence: Synthetic oligonucleotide
  Antisense strand to SEQ ID NO: 1382858
guaaagacaacaauuucac

SEQ ID NO: 1382860 - RNA, 19 nt, Artificial Sequence
  Description of Artificial Sequence: Synthetic oligonucleotide
  Sense strand starting at position 2747 of SEQ ID NO: 1242929
ugaaauuguugucuuuaca

SEQ ID NO: 1382861 - RNA, 19 nt, Artificial Sequence
  Description of Artificial Sequence: Synthetic oligonucleotide
  Antisense strand to SEQ ID NO: 1382860
uguaaagacaacaauuuca

SEQ ID NO: 1382862 - RNA, 19 nt, Artificial Sequence
  Description of Artificial Sequence: Synthetic oligonucleotide
  Sense strand starting at position 2767 of SEQ ID NO: 1242929
cccaaauggucacugauca

SEQ ID NO: 1382863 - RNA, 19 nt, Artificial Sequence
  Description of Artificial Sequence: Synthetic oligonucleotide
  Antisense strand to SEQ ID NO: 1382862
ugaucagugaccauuuggg

SEQ ID NO: 1382864 - RNA, 19 nt, Artificial Sequence
  Description of Artificial Sequence: Synthetic oligonucleotide
  Sense strand starting at position 2985 of SEQ ID NO: 1242929
ccuacucagccuugggauu

SEQ ID NO: 1382865 - RNA, 19 nt, Artificial Sequence
  Description of Artificial Sequence: Synthetic oligonucleotide
  Antisense strand to SEQ ID NO: 1382864
aaucccaaggcugaguagg

SEQ ID NO: 1382866 - RNA, 19 nt, Artificial Sequence
  Description of Artificial Sequence: Synthetic oligonucleotide
  Sense strand starting at position 3103 of SEQ ID NO: 1242929
ggaugucagggucacucau

SEQ ID NO: 1382867 - RNA, 19 nt, Artificial Sequence
  Description of Artificial Sequence: Synthetic oligonucleotide
  Antisense strand to SEQ ID NO: 1382866
augagugacccugacaucc

SEQ ID NO: 1382868 - RNA, 19 nt, Artificial Sequence
  Description of Artificial Sequence: Synthetic oligonucleotide
  Sense strand starting at position 3137 of SEQ ID NO: 1242929
gggaauucagcauggagca

SEQ ID NO: 1382869 - RNA, 19 nt, Artificial Sequence
  Description of Artificial Sequence: Synthetic oligonucleotide
  Antisense strand to SEQ ID NO: 1382868
ugcuccaugcugaauuccc

SEQ ID NO: 1382870 - RNA, 19 nt, Artificial Sequence
  Description of Artificial Sequence: Synthetic oligonucleotide
  Sense strand starting at position 3188 of SEQ ID NO: 1242929
gaaacuuccucugcaggga

SEQ ID NO: 1382871 - RNA, 19 nt, Artificial Sequence
  Description of Artificial Sequence: Synthetic oligonucleotide
  Antisense strand to SEQ ID NO: 1382870
ucccugcagaggaaguuuc

SEQ ID NO: 1382872 - RNA, 19 nt, Artificial Sequence
  Description of Artificial Sequence: Synthetic oligonucleotide
  Sense strand starting at position 3257 of SEQ ID NO: 1242929
ccagccuucuccuggaaga

SEQ ID NO: 1382873 - RNA, 19 nt, Artificial Sequence
  Description of Artificial Sequence: Synthetic oligonucleotide
  Antisense strand to SEQ ID NO: 1382872
ucuuccaggagaaggcugg

SEQ ID NO: 1382874 - RNA, 19 nt, Artificial Sequence
  Description of Artificial Sequence: Synthetic oligonucleotide
  Sense strand starting at position 3259 of SEQ ID NO: 1242929
agccuucuccuggaagauc

SEQ ID NO: 1382875 - RNA, 19 nt, Artificial Sequence
  Description of Artificial Sequence: Synthetic oligonucleotide
  Antisense strand to SEQ ID NO: 1382874
gaucuuccaggagaaggcu

SEQ ID NO: 1382876 - RNA, 19 nt, Artificial Sequence
  Description of Artificial Sequence: Synthetic oligonucleotide
  Sense strand starting at position 3391 of SEQ ID NO: 1242929
gguaccagugugugaagaa

SEQ ID NO: 1382877 - RNA, 19 nt, Artificial Sequence
  Description of Artificial Sequence: Synthetic oligonucleotide
  Antisense strand to SEQ ID NO: 1382876
uucuucacacacugguacc

SEQ ID NO: 1382878 - RNA, 19 nt, Artificial Sequence
  Description of Artificial Sequence: Synthetic oligonucleotide
  Sense strand starting at position 3392 of SEQ ID NO: 1242929
guaccagugugugaagaag

SEQ ID NO: 1382879 - RNA, 19 nt, Artificial Sequence
  Description of Artificial Sequence: Synthetic oligonucleotide
  Antisense strand to SEQ ID NO: 1382878
cuucuucacacacugguac

SEQ ID NO: 1382880 - RNA, 19 nt, Artificial Sequence
  Description of Artificial Sequence: Synthetic oligonucleotide
  Sense strand starting at position 3418 of SEQ ID NO: 1242929
gggugagcagacugagauu

SEQ ID NO: 1382881 - RNA, 19 nt, Artificial Sequence
  Description of Artificial Sequence: Synthetic oligonucleotide
  Antisense strand to SEQ ID NO: 1382880
aaucucagucugcucaccc

SEQ ID NO: 1382882 - RNA, 19 nt, Artificial Sequence
  Description of Artificial Sequence: Synthetic oligonucleotide
  Sense strand starting at position 3793 of SEQ ID NO: 1242929
gggcgaucccacuguccaa

SEQ ID NO: 1382883 - RNA, 19 nt, Artificial Sequence
  Description of Artificial Sequence: Synthetic oligonucleotide
  Antisense strand to SEQ ID NO: 1382882
uuggacagugggaucgccc

SEQ ID NO: 1382884 - RNA, 19 nt, Artificial Sequence
  Description of Artificial Sequence: Synthetic oligonucleotide
  Sense strand starting at position 3824 of SEQ ID NO: 1242929
ugggaaagugcaugauaau

SEQ ID NO: 1382885 - RNA, 19 nt, Artificial Sequence
  Description of Artificial Sequence: Synthetic oligonucleotide
  Antisense strand to SEQ ID NO: 1382884
auuaucaugcacuuuccca

SEQ ID NO: 1382886 - RNA, 19 nt, Artificial Sequence
  Description of Artificial Sequence: Synthetic oligonucleotide
  Sense strand starting at position 3969 of SEQ ID NO: 1242929
guuugagaagcaggagaau

SEQ ID NO: 1382887 - RNA, 19 nt, Artificial Sequence
  Description of Artificial Sequence: Synthetic oligonucleotide
  Antisense strand to SEQ ID NO: 1382886
auucuccugcuucucaaac

SEQ ID NO: 1382888 - RNA, 19 nt, Artificial Sequence
  Description of Artificial Sequence: Synthetic oligonucleotide
  Sense strand starting at position 144 of SEQ ID NO: 1242930
aaaugucacucccggaaca

SEQ ID NO: 1382889 - RNA, 19 nt, Artificial Sequence
  Description of Artificial Sequence: Synthetic oligonucleotide
  Antisense strand to SEQ ID NO: 1382888
uguuccgggagugacauuu

SEQ ID NO: 1382890 - RNA, 19 nt, Artificial Sequence
  Description of Artificial Sequence: Synthetic oligonucleotide
  Sense strand starting at position 146 of SEQ ID NO: 1242930
augucacucccggaacagu

SEQ ID NO: 1382891 - RNA, 19 nt, Artificial Sequence
  Description of Artificial Sequence: Synthetic oligonucleotide
  Antisense strand to SEQ ID NO: 1382890
acuguuccgggagugacau

SEQ ID NO: 1382892 - RNA, 19 nt, Artificial Sequence
  Description of Artificial Sequence: Synthetic oligonucleotide
  Sense strand starting at position 160 of SEQ ID NO: 1242930
acagucaucucagguacau

SEQ ID NO: 1382893 - RNA, 19 nt, Artificial Sequence
  Description of Artificial Sequence: Synthetic oligonucleotide
  Antisense strand to SEQ ID NO: 1382892
auguaccugagaugacugu

SEQ ID NO: 1382894 - RNA, 19 nt, Artificial Sequence
  Description of Artificial Sequence: Synthetic oligonucleotide
  Sense strand starting at position 257 of SEQ ID NO: 1242930
uugcuauggguuuguuuaa

SEQ ID NO: 1382895 - RNA, 19 nt, Artificial Sequence
  Description of Artificial Sequence: Synthetic oligonucleotide
  Antisense strand to SEQ ID NO: 1382894
uuaaacaaacccauagcaa

SEQ ID NO: 1382896 - RNA, 19 nt, Artificial Sequence
  Description of Artificial Sequence: Synthetic oligonucleotide
  Sense strand starting at position 258 of SEQ ID NO: 1242930
ugcuauggguuuguuuaau

SEQ ID NO: 1382897 - RNA, 19 nt, Artificial Sequence
  Description of Artificial Sequence: Synthetic oligonucleotide
  Antisense strand to SEQ ID NO: 1382896
auuaaacaaacccauagca

SEQ ID NO: 1382898 - RNA, 19 nt, Artificial Sequence
  Description of Artificial Sequence: Synthetic oligonucleotide
  Sense strand starting at position 269 of SEQ ID NO: 1242930
uguuuaauguuuguccacu

SEQ ID NO: 1382899 - RNA, 19 nt, Artificial Sequence
  Description of Artificial Sequence: Synthetic oligonucleotide
  Antisense strand to SEQ ID NO: 1382898
aguggacaaacauuaaaca

SEQ ID NO: 1382900 - RNA, 19 nt, Artificial Sequence
  Description of Artificial Sequence: Synthetic oligonucleotide
  Sense strand starting at position 270 of SEQ ID NO: 1242930
guuuaauguuuguccacuc

SEQ ID NO: 1382901 - RNA, 19 nt, Artificial Sequence
  Description of Artificial Sequence: Synthetic oligonucleotide
  Antisense strand to SEQ ID NO: 1382900
gaguggacaaacauuaaac

SEQ ID NO: 1382902 - RNA, 19 nt, Artificial Sequence
  Description of Artificial Sequence: Synthetic oligonucleotide
  Sense strand starting at position 351 of SEQ ID NO: 1242930
ccuggcacguuucuugaaa

SEQ ID NO: 1382903 - RNA, 19 nt, Artificial Sequence
  Description of Artificial Sequence: Synthetic oligonucleotide
  Antisense strand to SEQ ID NO: 1382902
uuucaagaaacgugccagg

SEQ ID NO: 1382904 - RNA, 19 nt, Artificial Sequence
  Description of Artificial Sequence: Synthetic oligonucleotide
  Sense strand starting at position 352 of SEQ ID NO: 1242930
cuggcacguuucuugaaau

SEQ ID NO: 1382905 - RNA, 19 nt, Artificial Sequence
  Description of Artificial Sequence: Synthetic oligonucleotide
  Antisense strand to SEQ ID NO: 1382904
auuucaagaaacgugccag

SEQ ID NO: 1382906 - RNA, 19 nt, Artificial Sequence
  Description of Artificial Sequence: Synthetic oligonucleotide
  Sense strand starting at position 389 of SEQ ID NO: 1242930
agauucugaguuuaucuuu

SEQ ID NO: 1382907 - RNA, 19 nt, Artificial Sequence
  Description of Artificial Sequence: Synthetic oligonucleotide
  Antisense strand to SEQ ID NO: 1382906
aaagauaaacucagaaucu

SEQ ID NO: 1382908 - RNA, 19 nt, Artificial Sequence
  Description of Artificial Sequence: Synthetic oligonucleotide
  Sense strand starting at position 392 of SEQ ID NO: 1242930
uucugaguuuaucuuucua

SEQ ID NO: 1382909 - RNA, 19 nt, Artificial Sequence
  Description of Artificial Sequence: Synthetic oligonucleotide
  Antisense strand to SEQ ID NO: 1382908
uagaaagauaaacucagaa

SEQ ID NO: 1382910 - RNA, 19 nt, Artificial Sequence
  Description of Artificial Sequence: Synthetic oligonucleotide
  Sense strand starting at position 597 of SEQ ID NO: 1242930
gcauucuauuuacauguca

SEQ ID NO: 1382911 - RNA, 19 nt, Artificial Sequence
  Description of Artificial Sequence: Synthetic oligonucleotide
  Antisense strand to SEQ ID NO: 1382910
ugacauguaaauagaaugc

SEQ ID NO: 1382912 - RNA, 19 nt, Artificial Sequence
  Description of Artificial Sequence: Synthetic oligonucleotide
  Sense strand starting at position 610 of SEQ ID NO: 1242930
augucauuugcaugcaguu

SEQ ID NO: 1382913 - RNA, 19 nt, Artificial Sequence
  Description of Artificial Sequence: Synthetic oligonucleotide
  Antisense strand to SEQ ID NO: 1382912
aacugcaugcaaaugacau

SEQ ID NO: 1382914 - RNA, 19 nt, Artificial Sequence
  Description of Artificial Sequence: Synthetic oligonucleotide
  Sense strand starting at position 669 of SEQ ID NO: 1242930
cgaagaaacuucugaauua

SEQ ID NO: 1382915 - RNA, 19 nt, Artificial Sequence
  Description of Artificial Sequence: Synthetic oligonucleotide
  Antisense strand to SEQ ID NO: 1382914
uaauucagaaguuucuucg

SEQ ID NO: 1382916 - RNA, 19 nt, Artificial Sequence
  Description of Artificial Sequence: Synthetic oligonucleotide
  Sense strand starting at position 689 of SEQ ID NO: 1242930
gaagguuccuuggcugaag

SEQ ID NO: 1382917 - RNA, 19 nt, Artificial Sequence
  Description of Artificial Sequence: Synthetic oligonucleotide
  Antisense strand to SEQ ID NO: 1382916
cuucagccaaggaaccuuc

SEQ ID NO: 1382918 - RNA, 19 nt, Artificial Sequence
  Description of Artificial Sequence: Synthetic oligonucleotide
  Sense strand starting at position 879 of SEQ ID NO: 1242930
gccuuuguccgcgcuccaa

SEQ ID NO: 1382919 - RNA, 19 nt, Artificial Sequence
  Description of Artificial Sequence: Synthetic oligonucleotide
  Antisense strand to SEQ ID NO: 1382918
uuggagcgcggacaaaggc

SEQ ID NO: 1382920 - RNA, 19 nt, Artificial Sequence
  Description of Artificial Sequence: Synthetic oligonucleotide
  Sense strand starting at position 1183 of SEQ ID NO: 1242930
aguccuuaucuccagccua

SEQ ID NO: 1382921 - RNA, 19 nt, Artificial Sequence
  Description of Artificial Sequence: Synthetic oligonucleotide
  Antisense strand to SEQ ID NO: 1382920
uaggcuggagauaaggacu

SEQ ID NO: 1382922 - RNA, 19 nt, Artificial Sequence
  Description of Artificial Sequence: Synthetic oligonucleotide
  Sense strand starting at position 1369 of SEQ ID NO: 1242930
cugaguaaugcgcacucaa

SEQ ID NO: 1382923 - RNA, 19 nt, Artificial Sequence
  Description of Artificial Sequence: Synthetic oligonucleotide
  Antisense strand to SEQ ID NO: 1382922
uugagugcgcauuacucag

SEQ ID NO: 1382924 - RNA, 19 nt, Artificial Sequence
  Description of Artificial Sequence: Synthetic oligonucleotide
  Sense strand starting at position 1756 of SEQ ID NO: 1242930
gcaauaaacucccuggcuu

SEQ ID NO: 1382925 - RNA, 19 nt, Artificial Sequence
  Description of Artificial Sequence: Synthetic oligonucleotide
  Antisense strand to SEQ ID NO: 1382924
aagccagggaguuuauugc

SEQ ID NO: 1382926 - RNA, 19 nt, Artificial Sequence
  Description of Artificial Sequence: Synthetic oligonucleotide
  Sense strand starting at position 2221 of SEQ ID NO: 1242930
ccggaucucagagacgauu

SEQ ID NO: 1382927 - RNA, 19 nt, Artificial Sequence
  Description of Artificial Sequence: Synthetic oligonucleotide
  Antisense strand to SEQ ID NO: 1382926
aaucgucucugagauccgg

SEQ ID NO: 1382928 - RNA, 19 nt, Artificial Sequence
  Description of Artificial Sequence: Synthetic oligonucleotide
  Sense strand starting at position 2333 of SEQ ID NO: 1242930
agauccauuugcgggaaca

SEQ ID NO: 1382929 - RNA, 19 nt, Artificial Sequence
  Description of Artificial Sequence: Synthetic oligonucleotide
  Antisense strand to SEQ ID NO: 1382928
uguucccgcaaauggaucu

SEQ ID NO: 1382930 - RNA, 19 nt, Artificial Sequence
  Description of Artificial Sequence: Synthetic oligonucleotide
  Sense strand starting at position 2366 of SEQ ID NO: 1242930
acacuuaccgagggaggua

SEQ ID NO: 1382931 - RNA, 19 nt, Artificial Sequence
  Description of Artificial Sequence: Synthetic oligonucleotide
  Antisense strand to SEQ ID NO: 1382930
uaccucccucgguaagugu

SEQ ID NO: 1382932 - RNA, 19 nt, Artificial Sequence
  Description of Artificial Sequence: Synthetic oligonucleotide
  Sense strand starting at position 2631 of SEQ ID NO: 1242930
cccagaugucguuguccgu

SEQ ID NO: 1382933 - RNA, 19 nt, Artificial Sequence
  Description of Artificial Sequence: Synthetic oligonucleotide
  Antisense strand to SEQ ID NO: 1382932
acggacaacgacaucuggg

SEQ ID NO: 1382934 - RNA, 19 nt, Artificial Sequence
  Description of Artificial Sequence: Synthetic oligonucleotide
  Sense strand starting at position 2634 of SEQ ID NO: 1242930
agaugucguuguccguuua

SEQ ID NO: 1382935 - RNA, 19 nt, Artificial Sequence
  Description of Artificial Sequence: Synthetic oligonucleotide
  Antisense strand to SEQ ID NO: 1382934
uaaacggacaacgacaucu

SEQ ID NO: 1382936 - RNA, 19 nt, Artificial Sequence
  Description of Artificial Sequence: Synthetic oligonucleotide
  Sense strand starting at position 2638 of SEQ ID NO: 1242930
gucguuguccguuuacgca

SEQ ID NO: 1382937 - RNA, 19 nt, Artificial Sequence
  Description of Artificial Sequence: Synthetic oligonucleotide
  Antisense strand to SEQ ID NO: 1382936
ugcguaaacggacaacgac

SEQ ID NO: 1382938 - RNA, 19 nt, Artificial Sequence
  Description of Artificial Sequence: Synthetic oligonucleotide
  Sense strand starting at position 3124 of SEQ ID NO: 1242930
ccagauucucagggugaga

SEQ ID NO: 1382939 - RNA, 19 nt, Artificial Sequence
  Description of Artificial Sequence: Synthetic oligonucleotide
  Antisense strand to SEQ ID NO: 1382938
ucucacccugagaaucugg

SEQ ID NO: 1382940 - RNA, 19 nt, Artificial Sequence
  Description of Artificial Sequence: Synthetic oligonucleotide
  Sense strand starting at position 3126 of SEQ ID NO: 1242930
agauucucagggugagauu

SEQ ID NO: 1382941 - RNA, 19 nt, Artificial Sequence
  Description of Artificial Sequence: Synthetic oligonucleotide
  Antisense strand to SEQ ID NO: 1382940
aaucucacccugagaaucu

SEQ ID NO: 1382942 - RNA, 19 nt, Artificial Sequence
  Description of Artificial Sequence: Synthetic oligonucleotide
  Sense strand starting at position 3279 of SEQ ID NO: 1242930
acaccuccuucugggaaua

SEQ ID NO: 1382943 - RNA, 19 nt, Artificial Sequence
  Description of Artificial Sequence: Synthetic oligonucleotide
  Antisense strand to SEQ ID NO: 1382942
uauucccagaaggaggugu

SEQ ID NO: 1382944 - RNA, 19 nt, Artificial Sequence
  Description of Artificial Sequence: Synthetic oligonucleotide
  Sense strand starting at position 3281 of SEQ ID NO: 1242930
accuccuucugggaauagu

SEQ ID NO: 1382945 - RNA, 19 nt, Artificial Sequence
  Description of Artificial Sequence: Synthetic oligonucleotide
  Antisense strand to SEQ ID NO: 1382944
acuauucccagaaggaggu

SEQ ID NO: 1382946 - RNA, 19 nt, Artificial Sequence
  Description of Artificial Sequence: Synthetic oligonucleotide
  Sense strand starting at position 3403 of SEQ ID NO: 1242930
gcaucucugggauaccuuu

SEQ ID NO: 1382947 - RNA, 19 nt, Artificial Sequence
  Description of Artificial Sequence: Synthetic oligonucleotide
  Antisense strand to SEQ ID NO: 1382946
aaagguaucccagagaugc

SEQ ID NO: 1382948 - RNA, 19 nt, Artificial Sequence
  Description of Artificial Sequence: Synthetic oligonucleotide
  Sense strand starting at position 3481 of SEQ ID NO: 1242930
cugguuuauuugcauggau

SEQ ID NO: 1382949 - RNA, 19 nt, Artificial Sequence
  Description of Artificial Sequence: Synthetic oligonucleotide
  Antisense strand to SEQ ID NO: 1382948
auccaugcaaauaaaccag

SEQ ID NO: 1382950 - RNA, 19 nt, Artificial Sequence
  Description of Artificial Sequence: Synthetic oligonucleotide
  Sense strand starting at position 3484 of SEQ ID NO: 1242930
guuuauuugcauggauccu

SEQ ID NO: 1382951 - RNA, 19 nt, Artificial Sequence
  Description of Artificial Sequence: Synthetic oligonucleotide
  Antisense strand to SEQ ID NO: 1382950
aggauccaugcaaauaaac

SEQ ID NO: 1382952 - RNA, 19 nt, Artificial Sequence
  Description of Artificial Sequence: Synthetic oligonucleotide
  Sense strand starting at position 3537 of SEQ ID NO: 1242930
ucauuaaauguuugcggga

SEQ ID NO: 1382953 - RNA, 19 nt, Artificial Sequence
  Description of Artificial Sequence: Synthetic oligonucleotide
  Antisense strand to SEQ ID NO: 1382952
ucccgcaaacauuuaauga

SEQ ID NO: 1382954 - RNA, 19 nt, Artificial Sequence
  Description of Artificial Sequence: Synthetic oligonucleotide
  Sense strand starting at position 3668 of SEQ ID NO: 1242930
ucacuuucgugagccacau

SEQ ID NO: 1382955 - RNA, 19 nt, Artificial Sequence
  Description of Artificial Sequence: Synthetic oligonucleotide
  Antisense strand to SEQ ID NO: 1382954
auguggcucacgaaaguga

SEQ ID NO: 1382956 - RNA, 19 nt, Artificial Sequence
  Description of Artificial Sequence: Synthetic oligonucleotide
  Sense strand starting at position 3738 of SEQ ID NO: 1242930
gguuguugugaaggucuaa

SEQ ID NO: 1382957 - RNA, 19 nt, Artificial Sequence
  Description of Artificial Sequence: Synthetic oligonucleotide
  Antisense strand to SEQ ID NO: 1382956
uuagaccuucacaacaacc

SEQ ID NO: 1382958 - RNA, 19 nt, Artificial Sequence
  Description of Artificial Sequence: Synthetic oligonucleotide
  Sense strand starting at position 3752 of SEQ ID NO: 1242930
ucuaacacgugcuaacaua

SEQ ID NO: 1382959 - RNA, 19 nt, Artificial Sequence
  Description of Artificial Sequence: Synthetic oligonucleotide
  Antisense strand to SEQ ID NO: 1382958
uauguuagcacguguuaga

SEQ ID NO: 1382960 - RNA, 19 nt, Artificial Sequence
  Description of Artificial Sequence: Synthetic oligonucleotide
  Sense strand starting at position 3806 of SEQ ID NO: 1242930
uccuuaauaugagcugauu

SEQ ID NO: 1382961 - RNA, 19 nt, Artificial Sequence
  Description of Artificial Sequence: Synthetic oligonucleotide
  Antisense strand to SEQ ID NO: 1382960
aaucagcucauauuaagga

SEQ ID NO: 1382962 - RNA, 19 nt, Artificial Sequence
  Description of Artificial Sequence: Synthetic oligonucleotide
  Sense strand starting at position 3818 of SEQ ID NO: 1242930
gcugauuaacauugcaguu

SEQ ID NO: 1382963 - RNA, 19 nt, Artificial Sequence
  Description of Artificial Sequence: Synthetic oligonucleotide
  Antisense strand to SEQ ID NO: 1382962
aacugcaauguuaaucagc

SEQ ID NO: 1382964 - RNA, 19 nt, Artificial Sequence
  Description of Artificial Sequence: Synthetic oligonucleotide
  Sense strand starting at position 3830 of SEQ ID NO: 1242930
ugcaguuacgguuauauuc

SEQ ID NO: 1382965 - RNA, 19 nt, Artificial Sequence
  Description of Artificial Sequence: Synthetic oligonucleotide
  Antisense strand to SEQ ID NO: 1382964
gaauauaaccguaacugca

SEQ ID NO: 1382966 - RNA, 19 nt, Artificial Sequence
  Description of Artificial Sequence: Synthetic oligonucleotide
  Sense strand starting at position 3892 of SEQ ID NO: 1242930
guuucacuuugggugauga

SEQ ID NO: 1382967 - RNA, 19 nt, Artificial Sequence
  Description of Artificial Sequence: Synthetic oligonucleotide
  Antisense strand to SEQ ID NO: 1382966
ucaucacccaaagugaaac

SEQ ID NO: 1382968 - RNA, 19 nt, Artificial Sequence
  Description of Artificial Sequence: Synthetic oligonucleotide
  Sense strand starting at position 158 of SEQ ID NO: 1242931
gcugucucccaagaaggaa

SEQ ID NO: 1382969 - RNA, 19 nt, Artificial Sequence
  Description of Artificial Sequence: Synthetic oligonucleotide
  Antisense strand to SEQ ID NO: 1382968
uuccuucuugggagacagc

SEQ ID NO: 1382970 - RNA, 19 nt, Artificial Sequence
  Description of Artificial Sequence: Synthetic oligonucleotide
  Sense strand starting at position 258 of SEQ ID NO: 1242931
aagggaugcgcuugaauga

SEQ ID NO: 1382971 - RNA, 19 nt, Artificial Sequence
  Description of Artificial Sequence: Synthetic oligonucleotide
  Antisense strand to SEQ ID NO: 1382970
ucauucaagcgcaucccuu

SEQ ID NO: 1382972 - RNA, 19 nt, Artificial Sequence
  Description of Artificial Sequence: Synthetic oligonucleotide
  Sense strand starting at position 259 of SEQ ID NO: 1242931
agggaugcgcuugaaugaa

SEQ ID NO: 1382973 - RNA, 19 nt, Artificial Sequence
  Description of Artificial Sequence: Synthetic oligonucleotide
  Antisense strand to SEQ ID NO: 1382972
uucauucaagcgcaucccu

SEQ ID NO: 1382974 - RNA, 19 nt, Artificial Sequence
  Description of Artificial Sequence: Synthetic oligonucleotide
  Sense strand starting at position 340 of SEQ ID NO: 1242931
uggagcuucugucucagaa

SEQ ID NO: 1382975 - RNA, 19 nt, Artificial Sequence
  Description of Artificial Sequence: Synthetic oligonucleotide
  Antisense strand to SEQ ID NO: 1382974
uucugagacagaagcucca

SEQ ID NO: 1382976 - RNA, 19 nt, Artificial Sequence
  Description of Artificial Sequence: Synthetic oligonucleotide
  Sense strand starting at position 342 of SEQ ID NO: 1242931
gagcuucugucucagaaau

SEQ ID NO: 1382977 - RNA, 19 nt, Artificial Sequence
  Description of Artificial Sequence: Synthetic oligonucleotide
  Antisense strand to SEQ ID NO: 1382976
auuucugagacagaagcuc

SEQ ID NO: 1382978 - RNA, 19 nt, Artificial Sequence
  Description of Artificial Sequence: Synthetic oligonucleotide
  Sense strand starting at position 361 of SEQ ID NO: 1242931
cagagaugucccuggccca

SEQ ID NO: 1382979 - RNA, 19 nt, Artificial Sequence
  Description of Artificial Sequence: Synthetic oligonucleotide
  Antisense strand to SEQ ID NO: 1382978
ugggccagggacaucucug

SEQ ID NO: 1382980 - RNA, 19 nt, Artificial Sequence
  Description of Artificial Sequence: Synthetic oligonucleotide
  Sense strand starting at position 526 of SEQ ID NO: 1242931
cccacaucccucuguuagu

SEQ ID NO: 1382981 - RNA, 19 nt, Artificial Sequence
  Description of Artificial Sequence: Synthetic oligonucleotide
  Antisense strand to SEQ ID NO: 1382980
acuaacagagggauguggg

SEQ ID NO: 1382982 - RNA, 19 nt, Artificial Sequence
  Description of Artificial Sequence: Synthetic oligonucleotide
  Sense strand starting at position 535 of SEQ ID NO: 1242931
cucuguuaguguuccacua

SEQ ID NO: 1382983 - RNA, 19 nt, Artificial Sequence
  Description of Artificial Sequence: Synthetic oligonucleotide
  Antisense strand to SEQ ID NO: 1382982
uaguggaacacuaacagag

SEQ ID NO: 1382984 - RNA, 19 nt, Artificial Sequence
  Description of Artificial Sequence: Synthetic oligonucleotide
  Sense strand starting at position 637 of SEQ ID NO: 1242931
ucacguauucugccugcua

SEQ ID NO: 1382985 - RNA, 19 nt, Artificial Sequence
  Description of Artificial Sequence: Synthetic oligonucleotide
  Antisense strand to SEQ ID NO: 1382984
uagcaggcagaauacguga

SEQ ID NO: 1382986 - RNA, 19 nt, Artificial Sequence
  Description of Artificial Sequence: Synthetic oligonucleotide
  Sense strand starting at position 638 of SEQ ID NO: 1242931
cacguauucugccugcuaa

SEQ ID NO: 1382987 - RNA, 19 nt, Artificial Sequence
  Description of Artificial Sequence: Synthetic oligonucleotide
  Antisense strand to SEQ ID NO: 1382986
uuagcaggcagaauacgug

SEQ ID NO: 1382988 - RNA, 19 nt, Artificial Sequence
  Description of Artificial Sequence: Synthetic oligonucleotide
  Sense strand starting at position 639 of SEQ ID NO: 1242931
acguauucugccugcuaaa

SEQ ID NO: 1382989 - RNA, 19 nt, Artificial Sequence
  Description of Artificial Sequence: Synthetic oligonucleotide
  Antisense strand to SEQ ID NO: 1382988
uuuagcaggcagaauacgu

SEQ ID NO: 1382990 - RNA, 19 nt, Artificial Sequence
  Description of Artificial Sequence: Synthetic oligonucleotide
  Sense strand starting at position 747 of SEQ ID NO: 1242931
gcccuucuguccucaucau

SEQ ID NO: 1382991 - RNA, 19 nt, Artificial Sequence
  Description of Artificial Sequence: Synthetic oligonucleotide
  Antisense strand to SEQ ID NO: 1382990
augaugaggacagaagggc

SEQ ID NO: 1382992 - RNA, 19 nt, Artificial Sequence
  Description of Artificial Sequence: Synthetic oligonucleotide
  Sense strand starting at position 851 of SEQ ID NO: 1242931
agagaaaucagcuguaacg

SEQ ID NO: 1382993 - RNA, 19 nt, Artificial Sequence
  Description of Artificial Sequence: Synthetic oligonucleotide
  Antisense strand to SEQ ID NO: 1382992
cguuacagcugauuucucu

SEQ ID NO: 1382994 - RNA, 19 nt, Artificial Sequence
  Description of Artificial Sequence: Synthetic oligonucleotide
  Sense strand starting at position 858 of SEQ ID NO: 1242931
ucagcuguaacgugauaaa

SEQ ID NO: 1382995 - RNA, 19 nt, Artificial Sequence
  Description of Artificial Sequence: Synthetic oligonucleotide
  Antisense strand to SEQ ID NO: 1382994
uuuaucacguuacagcuga

SEQ ID NO: 1382996 - RNA, 19 nt, Artificial Sequence
  Description of Artificial Sequence: Synthetic oligonucleotide
  Sense strand starting at position 885 of SEQ ID NO: 1242931
gcguuaaucccagcugugu

SEQ ID NO: 1382997 - RNA, 19 nt, Artificial Sequence
  Description of Artificial Sequence: Synthetic oligonucleotide
  Antisense strand to SEQ ID NO: 1382996
acacagcugggauuaacgc

SEQ ID NO: 1382998 - RNA, 19 nt, Artificial Sequence
  Description of Artificial Sequence: Synthetic oligonucleotide
  Sense strand starting at position 886 of SEQ ID NO: 1242931
cguuaaucccagcuguguu

SEQ ID NO: 1382999 - RNA, 19 nt, Artificial Sequence
  Description of Artificial Sequence: Synthetic oligonucleotide
  Antisense strand to SEQ ID NO: 1382998
aacacagcugggauuaacg

SEQ ID NO: 1383000 - RNA, 19 nt, Artificial Sequence
  Description of Artificial Sequence: Synthetic oligonucleotide
  Sense strand starting at position 887 of SEQ ID NO: 1242931
guuaaucccagcuguguuu

SEQ ID NO: 1383001 - RNA, 19 nt, Artificial Sequence
  Description of Artificial Sequence: Synthetic oligonucleotide
  Antisense strand to SEQ ID NO: 1383000
aaacacagcugggauuaac

SEQ ID NO: 1383002 - RNA, 19 nt, Artificial Sequence
  Description of Artificial Sequence: Synthetic oligonucleotide
  Sense strand starting at position 1105 of SEQ ID NO: 1242931
agcagaacugagugucuca

SEQ ID NO: 1383003 - RNA, 19 nt, Artificial Sequence
  Description of Artificial Sequence: Synthetic oligonucleotide
  Antisense strand to SEQ ID NO: 1383002
ugagacacucaguucugcu

SEQ ID NO: 1383004 - RNA, 19 nt, Artificial Sequence
  Description of Artificial Sequence: Synthetic oligonucleotide
  Sense strand starting at position 1108 of SEQ ID NO: 1242931
agaacugagugucucaaca

SEQ ID NO: 1383005 - RNA, 19 nt, Artificial Sequence
  Description of Artificial Sequence: Synthetic oligonucleotide
  Antisense strand to SEQ ID NO: 1383004
uguugagacacucaguucu

SEQ ID NO: 1383006 - RNA, 19 nt, Artificial Sequence
  Description of Artificial Sequence: Synthetic oligonucleotide
  Sense strand starting at position 1110 of SEQ ID NO: 1242931
aacugagugucucaacaag

SEQ ID NO: 1383007 - RNA, 19 nt, Artificial Sequence
  Description of Artificial Sequence: Synthetic oligonucleotide
  Antisense strand to SEQ ID NO: 1383006
cuuguugagacacucaguu

SEQ ID NO: 1383008 - RNA, 19 nt, Artificial Sequence
  Description of Artificial Sequence: Synthetic oligonucleotide
  Sense strand starting at position 1138 of SEQ ID NO: 1242931
ggcccaggagcucauuaaa

SEQ ID NO: 1383009 - RNA, 19 nt, Artificial Sequence
  Description of Artificial Sequence: Synthetic oligonucleotide
  Antisense strand to SEQ ID NO: 1383008
uuuaaugagcuccugggcc

SEQ ID NO: 1383010 - RNA, 19 nt, Artificial Sequence
  Description of Artificial Sequence: Synthetic oligonucleotide
  Sense strand starting at position 1276 of SEQ ID NO: 1242931
cuucuauucucagucagac

SEQ ID NO: 1383011 - RNA, 19 nt, Artificial Sequence
  Description of Artificial Sequence: Synthetic oligonucleotide
  Antisense strand to SEQ ID NO: 1383010
gucugacugagaauagaag

SEQ ID NO: 1383012 - RNA, 19 nt, Artificial Sequence
  Description of Artificial Sequence: Synthetic oligonucleotide
  Sense strand starting at position 1303 of SEQ ID NO: 1242931
gcaagcagcuaggugauua

SEQ ID NO: 1383013 - RNA, 19 nt, Artificial Sequence
  Description of Artificial Sequence: Synthetic oligonucleotide
  Antisense strand to SEQ ID NO: 1383012
uaaucaccuagcugcuugc

SEQ ID NO: 1383014 - RNA, 19 nt, Artificial Sequence
  Description of Artificial Sequence: Synthetic oligonucleotide
  Sense strand starting at position 1313 of SEQ ID NO: 1242931
aggugauuauuagcuucuu

SEQ ID NO: 1383015 - RNA, 19 nt, Artificial Sequence
  Description of Artificial Sequence: Synthetic oligonucleotide
  Antisense strand to SEQ ID NO: 1383014
aagaagcuaauaaucaccu

SEQ ID NO: 1383016 - RNA, 19 nt, Artificial Sequence
  Description of Artificial Sequence: Synthetic oligonucleotide
  Sense strand starting at position 1314 of SEQ ID NO: 1242931
ggugauuauuagcuucuua

SEQ ID NO: 1383017 - RNA, 19 nt, Artificial Sequence
  Description of Artificial Sequence: Synthetic oligonucleotide
  Antisense strand to SEQ ID NO: 1383016
uaagaagcuaauaaucacc

SEQ ID NO: 1383018 - RNA, 19 nt, Artificial Sequence
  Description of Artificial Sequence: Synthetic oligonucleotide
  Sense strand starting at position 1328 of SEQ ID NO: 1242931
ucuuacaaaucuuaggagu

SEQ ID NO: 1383019 - RNA, 19 nt, Artificial Sequence
  Description of Artificial Sequence: Synthetic oligonucleotide
  Antisense strand to SEQ ID NO: 1383018
acuccuaagauuuguaaga

SEQ ID NO: 1383020 - RNA, 19 nt, Artificial Sequence
  Description of Artificial Sequence: Synthetic oligonucleotide
  Sense strand starting at position 1330 of SEQ ID NO: 1242931
uuacaaaucuuaggaguau

SEQ ID NO: 1383021 - RNA, 19 nt, Artificial Sequence
  Description of Artificial Sequence: Synthetic oligonucleotide
  Antisense strand to SEQ ID NO: 1383020
auacuccuaagauuuguaa

SEQ ID NO: 1383022 - RNA, 19 nt, Artificial Sequence
  Description of Artificial Sequence: Synthetic oligonucleotide
  Sense strand starting at position 1486 of SEQ ID NO: 1242931
gugggcucaccuuacauga

SEQ ID NO: 1383023 - RNA, 19 nt, Artificial Sequence
  Description of Artificial Sequence: Synthetic oligonucleotide
  Antisense strand to SEQ ID NO: 1383022
ucauguaaggugagcccac

SEQ ID NO: 1383024 - RNA, 19 nt, Artificial Sequence
  Description of Artificial Sequence: Synthetic oligonucleotide
  Sense strand starting at position 2017 of SEQ ID NO: 1242931
acaagugaaccguauugca

SEQ ID NO: 1383025 - RNA, 19 nt, Artificial Sequence
  Description of Artificial Sequence: Synthetic oligonucleotide
  Antisense strand to SEQ ID NO: 1383024
ugcaauacgguucacuugu

SEQ ID NO: 1383026 - RNA, 19 nt, Artificial Sequence
  Description of Artificial Sequence: Synthetic oligonucleotide
  Sense strand starting at position 2932 of SEQ ID NO: 1242931
cggagagugacgcgaacua

SEQ ID NO: 1383027 - RNA, 19 nt, Artificial Sequence
  Description of Artificial Sequence: Synthetic oligonucleotide
  Antisense strand to SEQ ID NO: 1383026
uaguucgcgucacucuccg

SEQ ID NO: 1383028 - RNA, 19 nt, Artificial Sequence
  Description of Artificial Sequence: Synthetic oligonucleotide
  Sense strand starting at position 3477 of SEQ ID NO: 1242931
aucugaaauuaucuucggu

SEQ ID NO: 1383029 - RNA, 19 nt, Artificial Sequence
  Description of Artificial Sequence: Synthetic oligonucleotide
  Antisense strand to SEQ ID NO: 1383028
accgaagauaauuucagau

SEQ ID NO: 1383030 - RNA, 19 nt, Artificial Sequence
  Description of Artificial Sequence: Synthetic oligonucleotide
  Sense strand starting at position 3479 of SEQ ID NO: 1242931
cugaaauuaucuucgguua

SEQ ID NO: 1383031 - RNA, 19 nt, Artificial Sequence
  Description of Artificial Sequence: Synthetic oligonucleotide
  Antisense strand to SEQ ID NO: 1383030
uaaccgaagauaauuucag

SEQ ID NO: 1383032 - RNA, 19 nt, Artificial Sequence
  Description of Artificial Sequence: Synthetic oligonucleotide
  Sense strand starting at position 3480 of SEQ ID NO: 1242931
ugaaauuaucuucgguuac

SEQ ID NO: 1383033 - RNA, 19 nt, Artificial Sequence
  Description of Artificial Sequence: Synthetic oligonucleotide
  Antisense strand to SEQ ID NO: 1383032
guaaccgaagauaauuuca

SEQ ID NO: 1383034 - RNA, 19 nt, Artificial Sequence
  Description of Artificial Sequence: Synthetic oligonucleotide
  Sense strand starting at position 3614 of SEQ ID NO: 1242931
aggagccacucaguaaaua

SEQ ID NO: 1383035 - RNA, 19 nt, Artificial Sequence
  Description of Artificial Sequence: Synthetic oligonucleotide
  Antisense strand to SEQ ID NO: 1383034
uauuuacugaguggcuccu

SEQ ID NO: 1383036 - RNA, 19 nt, Artificial Sequence
  Description of Artificial Sequence: Synthetic oligonucleotide
  Sense strand starting at position 3615 of SEQ ID NO: 1242931
ggagccacucaguaaauau

SEQ ID NO: 1383037 - RNA, 19 nt, Artificial Sequence
  Description of Artificial Sequence: Synthetic oligonucleotide
  Antisense strand to SEQ ID NO: 1383036
auauuuacugaguggcucc

SEQ ID NO: 1383038 - RNA, 19 nt, Artificial Sequence
  Description of Artificial Sequence: Synthetic oligonucleotide
  Sense strand starting at position 3663 of SEQ ID NO: 1242931
gggcuauuauguuugguaa

SEQ ID NO: 1383039 - RNA, 19 nt, Artificial Sequence
  Description of Artificial Sequence: Synthetic oligonucleotide
  Antisense strand to SEQ ID NO: 1383038
uuaccaaacauaauagccc

SEQ ID NO: 1383040 - RNA, 19 nt, Artificial Sequence
  Description of Artificial Sequence: Synthetic oligonucleotide
  Sense strand starting at position 3664 of SEQ ID NO: 1242931
ggcuauuauguuugguaac

SEQ ID NO: 1383041 - RNA, 19 nt, Artificial Sequence
  Description of Artificial Sequence: Synthetic oligonucleotide
  Antisense strand to SEQ ID NO: 1383040
guuaccaaacauaauagcc

SEQ ID NO: 1383042 - RNA, 19 nt, Artificial Sequence
  Description of Artificial Sequence: Synthetic oligonucleotide
  Sense strand starting at position 3681 of SEQ ID NO: 1242931
acggugucugcuggcgaaa

SEQ ID NO: 1383043 - RNA, 19 nt, Artificial Sequence
  Description of Artificial Sequence: Synthetic oligonucleotide
  Antisense strand to SEQ ID NO: 1383042
uuucgccagcagacaccgu

SEQ ID NO: 1383044 - RNA, 19 nt, Artificial Sequence
  Description of Artificial Sequence: Synthetic oligonucleotide
  Sense strand starting at position 3907 of SEQ ID NO: 1242931
uuggaaauucugugagucu

SEQ ID NO: 1383045 - RNA, 19 nt, Artificial Sequence
  Description of Artificial Sequence: Synthetic oligonucleotide
  Antisense strand to SEQ ID NO: 1383044
agacucacagaauuuccaa

SEQ ID NO: 1383046 - RNA, 19 nt, Artificial Sequence
  Description of Artificial Sequence: Synthetic oligonucleotide
  Sense strand starting at position 3908 of SEQ ID NO: 1242931
uggaaauucugugagucug

SEQ ID NO: 1383047 - RNA, 19 nt, Artificial Sequence
  Description of Artificial Sequence: Synthetic oligonucleotide
  Antisense strand to SEQ ID NO: 1383046
cagacucacagaauuucca

SEQ ID NO: 1383048 - RNA, 19 nt, Artificial Sequence
  Description of Artificial Sequence: Synthetic oligonucleotide
  Sense strand starting at position 57 of SEQ ID NO: 1242932
agagaaaucagcuguaacg

SEQ ID NO: 1383049 - RNA, 19 nt, Artificial Sequence
  Description of Artificial Sequence: Synthetic oligonucleotide
  Antisense strand to SEQ ID NO: 1383048
cguuacagcugauuucucu

SEQ ID NO: 1383050 - RNA, 19 nt, Artificial Sequence
  Description of Artificial Sequence: Synthetic oligonucleotide
  Sense strand starting at position 91 of SEQ ID NO: 1242932
gcguuaaucccagcugugu

SEQ ID NO: 1383051 - RNA, 19 nt, Artificial Sequence
  Description of Artificial Sequence: Synthetic oligonucleotide
  Antisense strand to SEQ ID NO: 1383050
acacagcugggauuaacgc

SEQ ID NO: 1383052 - RNA, 19 nt, Artificial Sequence
  Description of Artificial Sequence: Synthetic oligonucleotide
  Sense strand starting at position 92 of SEQ ID NO: 1242932
cguuaaucccagcuguguu

SEQ ID NO: 1383053 - RNA, 19 nt, Artificial Sequence
  Description of Artificial Sequence: Synthetic oligonucleotide
  Antisense strand to SEQ ID NO: 1383052
aacacagcugggauuaacg

SEQ ID NO: 1383054 - RNA, 19 nt, Artificial Sequence
  Description of Artificial Sequence: Synthetic oligonucleotide
  Sense strand starting at position 311 of SEQ ID NO: 1242932
agcagaacugagugucuca

SEQ ID NO: 1383055 - RNA, 19 nt, Artificial Sequence
  Description of Artificial Sequence: Synthetic oligonucleotide
  Antisense strand to SEQ ID NO: 1383054
ugagacacucaguucugcu

SEQ ID NO: 1383056 - RNA, 19 nt, Artificial Sequence
  Description of Artificial Sequence: Synthetic oligonucleotide
  Sense strand starting at position 314 of SEQ ID NO: 1242932
agaacugagugucucaaca

SEQ ID NO: 1383057 - RNA, 19 nt, Artificial Sequence
  Description of Artificial Sequence: Synthetic oligonucleotide
  Antisense strand to SEQ ID NO: 1383056
uguugagacacucaguucu

SEQ ID NO: 1383058 - RNA, 19 nt, Artificial Sequence
  Description of Artificial Sequence: Synthetic oligonucleotide
  Sense strand starting at position 344 of SEQ ID NO: 1242932
ggcccaggagcucauuaaa

SEQ ID NO: 1383059 - RNA, 19 nt, Artificial Sequence
  Description of Artificial Sequence: Synthetic oligonucleotide
  Antisense strand to SEQ ID NO: 1383058
uuuaaugagcuccugggcc

SEQ ID NO: 1383060 - RNA, 19 nt, Artificial Sequence
  Description of Artificial Sequence: Synthetic oligonucleotide
  Sense strand starting at position 482 of SEQ ID NO: 1242932
cuucuauucucagucagac

SEQ ID NO: 1383061 - RNA, 19 nt, Artificial Sequence
  Description of Artificial Sequence: Synthetic oligonucleotide
  Antisense strand to SEQ ID NO: 1383060
gucugacugagaauagaag

SEQ ID NO: 1383062 - RNA, 19 nt, Artificial Sequence
  Description of Artificial Sequence: Synthetic oligonucleotide
  Sense strand starting at position 519 of SEQ ID NO: 1242932
aggugauuauuagcuucuu

SEQ ID NO: 1383063 - RNA, 19 nt, Artificial Sequence
  Description of Artificial Sequence: Synthetic oligonucleotide
  Antisense strand to SEQ ID NO: 1383062
aagaagcuaauaaucaccu

SEQ ID NO: 1383064 - RNA, 19 nt, Artificial Sequence
  Description of Artificial Sequence: Synthetic oligonucleotide
  Sense strand starting at position 520 of SEQ ID NO: 1242932
ggugauuauuagcuucuua

SEQ ID NO: 1383065 - RNA, 19 nt, Artificial Sequence
  Description of Artificial Sequence: Synthetic oligonucleotide
  Antisense strand to SEQ ID NO: 1383064
uaagaagcuaauaaucacc

SEQ ID NO: 1383066 - RNA, 19 nt, Artificial Sequence
  Description of Artificial Sequence: Synthetic oligonucleotide
  Sense strand starting at position 692 of SEQ ID NO: 1242932
gugggcucaccuuacauga

SEQ ID NO: 1383067 - RNA, 19 nt, Artificial Sequence
  Description of Artificial Sequence: Synthetic oligonucleotide
  Antisense strand to SEQ ID NO: 1383066
ucauguaaggugagcccac

SEQ ID NO: 1383068 - RNA, 19 nt, Artificial Sequence
  Description of Artificial Sequence: Synthetic oligonucleotide
  Sense strand starting at position 1223 of SEQ ID NO: 1242932
acaagugaaccguauugca

SEQ ID NO: 1383069 - RNA, 19 nt, Artificial Sequence
  Description of Artificial Sequence: Synthetic oligonucleotide
  Antisense strand to SEQ ID NO: 1383068
ugcaauacgguucacuugu

SEQ ID NO: 1383070 - RNA, 19 nt, Artificial Sequence
  Description of Artificial Sequence: Synthetic oligonucleotide
  Sense strand starting at position 2683 of SEQ ID NO: 1242932
aucugaaauuaucuucggu

SEQ ID NO: 1383071 - RNA, 19 nt, Artificial Sequence
  Description of Artificial Sequence: Synthetic oligonucleotide
  Antisense strand to SEQ ID NO: 1383070
accgaagauaauuucagau

SEQ ID NO: 1383072 - RNA, 19 nt, Artificial Sequence
  Description of Artificial Sequence: Synthetic oligonucleotide
  Sense strand starting at position 2685 of SEQ ID NO: 1242932
cugaaauuaucuucgguua

SEQ ID NO: 1383073 - RNA, 19 nt, Artificial Sequence
  Description of Artificial Sequence: Synthetic oligonucleotide
  Antisense strand to SEQ ID NO: 1383072
uaaccgaagauaauuucag

SEQ ID NO: 1383074 - RNA, 19 nt, Artificial Sequence
  Description of Artificial Sequence: Synthetic oligonucleotide
  Sense strand starting at position 2686 of SEQ ID NO: 1242932
ugaaauuaucuucgguuac

SEQ ID NO: 1383075 - RNA, 19 nt, Artificial Sequence
  Description of Artificial Sequence: Synthetic oligonucleotide
  Antisense strand to SEQ ID NO: 1383074
guaaccgaagauaauuuca

SEQ ID NO: 1383076 - RNA, 19 nt, Artificial Sequence
  Description of Artificial Sequence: Synthetic oligonucleotide
  Sense strand starting at position 2820 of SEQ ID NO: 1242932
aggagccacucaguaaaua

SEQ ID NO: 1383077 - RNA, 19 nt, Artificial Sequence
  Description of Artificial Sequence: Synthetic oligonucleotide
  Antisense strand to SEQ ID NO: 1383076
uauuuacugaguggcuccu

SEQ ID NO: 1383078 - RNA, 19 nt, Artificial Sequence
  Description of Artificial Sequence: Synthetic oligonucleotide
  Sense strand starting at position 2821 of SEQ ID NO: 1242932
ggagccacucaguaaauau

SEQ ID NO: 1383079 - RNA, 19 nt, Artificial Sequence
  Description of Artificial Sequence: Synthetic oligonucleotide
  Antisense strand to SEQ ID NO: 1383078
auauuuacugaguggcucc

SEQ ID NO: 1383080 - RNA, 19 nt, Artificial Sequence
  Description of Artificial Sequence: Synthetic oligonucleotide
  Sense strand starting at position 2869 of SEQ ID NO: 1242932
gggcuauuauguuugguaa

SEQ ID NO: 1383081 - RNA, 19 nt, Artificial Sequence
  Description of Artificial Sequence: Synthetic oligonucleotide
  Antisense strand to SEQ ID NO: 1383080
uuaccaaacauaauagccc

SEQ ID NO: 1383082 - RNA, 19 nt, Artificial Sequence
  Description of Artificial Sequence: Synthetic oligonucleotide
  Sense strand starting at position 3113 of SEQ ID NO: 1242932
uuggaaauucugugagucu

SEQ ID NO: 1383083 - RNA, 19 nt, Artificial Sequence
  Description of Artificial Sequence: Synthetic oligonucleotide
  Antisense strand to SEQ ID NO: 1383082
agacucacagaauuuccaa

SEQ ID NO: 1383084 - RNA, 19 nt, Artificial Sequence
  Description of Artificial Sequence: Synthetic oligonucleotide
  Sense strand starting at position 3233 of SEQ ID NO: 1242932
guagaccugagucggaaua

SEQ ID NO: 1383085 - RNA, 19 nt, Artificial Sequence
  Description of Artificial Sequence: Synthetic oligonucleotide
  Antisense strand to SEQ ID NO: 1383084
uauuccgacucaggucuac

SEQ ID NO: 1383086 - RNA, 19 nt, Artificial Sequence
  Description of Artificial Sequence: Synthetic oligonucleotide
  Sense strand starting at position 3234 of SEQ ID NO: 1242932
uagaccugagucggaauau

SEQ ID NO: 1383087 - RNA, 19 nt, Artificial Sequence
  Description of Artificial Sequence: Synthetic oligonucleotide
  Antisense strand to SEQ ID NO: 1383086
auauuccgacucaggucua

SEQ ID NO: 1383088 - RNA, 19 nt, Artificial Sequence
  Description of Artificial Sequence: Synthetic oligonucleotide
  Sense strand starting at position 3279 of SEQ ID NO: 1242932
cuuaacugaguuuguacua

SEQ ID NO: 1383089 - RNA, 19 nt, Artificial Sequence
  Description of Artificial Sequence: Synthetic oligonucleotide
  Antisense strand to SEQ ID NO: 1383088
uaguacaaacucaguuaag

SEQ ID NO: 1383090 - RNA, 19 nt, Artificial Sequence
  Description of Artificial Sequence: Synthetic oligonucleotide
  Sense strand starting at position 3292 of SEQ ID NO: 1242932
guacuaccucgucuucgua

SEQ ID NO: 1383091 - RNA, 19 nt, Artificial Sequence
  Description of Artificial Sequence: Synthetic oligonucleotide
  Antisense strand to SEQ ID NO: 1383090
uacgaagacgagguaguac

SEQ ID NO: 1383092 - RNA, 19 nt, Artificial Sequence
  Description of Artificial Sequence: Synthetic oligonucleotide
  Sense strand starting at position 3368 of SEQ ID NO: 1242932
auacauugguugccaauaa

SEQ ID NO: 1383093 - RNA, 19 nt, Artificial Sequence
  Description of Artificial Sequence: Synthetic oligonucleotide
  Antisense strand to SEQ ID NO: 1383092
uuauuggcaaccaauguau

SEQ ID NO: 1383094 - RNA, 19 nt, Artificial Sequence
  Description of Artificial Sequence: Synthetic oligonucleotide
  Sense strand starting at position 3420 of SEQ ID NO: 1242932
cgaagauaucuuugaguau

SEQ ID NO: 1383095 - RNA, 19 nt, Artificial Sequence
  Description of Artificial Sequence: Synthetic oligonucleotide
  Antisense strand to SEQ ID NO: 1383094
auacucaaagauaucuucg

SEQ ID NO: 1383096 - RNA, 19 nt, Artificial Sequence
  Description of Artificial Sequence: Synthetic oligonucleotide
  Sense strand starting at position 3427 of SEQ ID NO: 1242932
aucuuugaguauuccuaug

SEQ ID NO: 1383097 - RNA, 19 nt, Artificial Sequence
  Description of Artificial Sequence: Synthetic oligonucleotide
  Antisense strand to SEQ ID NO: 1383096
cauaggaauacucaaagau

SEQ ID NO: 1383098 - RNA, 19 nt, Artificial Sequence
  Description of Artificial Sequence: Synthetic oligonucleotide
  Sense strand starting at position 3429 of SEQ ID NO: 1242932
cuuugaguauuccuauguc

SEQ ID NO: 1383099 - RNA, 19 nt, Artificial Sequence
  Description of Artificial Sequence: Synthetic oligonucleotide
  Antisense strand to SEQ ID NO: 1383098
gacauaggaauacucaaag

SEQ ID NO: 1383100 - RNA, 19 nt, Artificial Sequence
  Description of Artificial Sequence: Synthetic oligonucleotide
  Sense strand starting at position 3516 of SEQ ID NO: 1242932
cgcaccuuugucuacacua

SEQ ID NO: 1383101 - RNA, 19 nt, Artificial Sequence
  Description of Artificial Sequence: Synthetic oligonucleotide
  Antisense strand to SEQ ID NO: 1383100
uaguguagacaaaggugcg

SEQ ID NO: 1383102 - RNA, 19 nt, Artificial Sequence
  Description of Artificial Sequence: Synthetic oligonucleotide
  Sense strand starting at position 3534 of SEQ ID NO: 1242932
aggucuugauggccaggua

SEQ ID NO: 1383103 - RNA, 19 nt, Artificial Sequence
  Description of Artificial Sequence: Synthetic oligonucleotide
  Antisense strand to SEQ ID NO: 1383102
uaccuggccaucaagaccu

SEQ ID NO: 1383104 - RNA, 19 nt, Artificial Sequence
  Description of Artificial Sequence: Synthetic oligonucleotide
  Sense strand starting at position 3535 of SEQ ID NO: 1242932
ggucuugauggccagguau

SEQ ID NO: 1383105 - RNA, 19 nt, Artificial Sequence
  Description of Artificial Sequence: Synthetic oligonucleotide
  Antisense strand to SEQ ID NO: 1383104
auaccuggccaucaagacc

SEQ ID NO: 1383106 - RNA, 19 nt, Artificial Sequence
  Description of Artificial Sequence: Synthetic oligonucleotide
  Sense strand starting at position 3537 of SEQ ID NO: 1242932
ucuugauggccagguauuc

SEQ ID NO: 1383107 - RNA, 19 nt, Artificial Sequence
  Description of Artificial Sequence: Synthetic oligonucleotide
  Antisense strand to SEQ ID NO: 1383106
gaauaccuggccaucaaga

SEQ ID NO: 1383108 - RNA, 19 nt, Artificial Sequence
  Description of Artificial Sequence: Synthetic oligonucleotide
  Sense strand starting at position 3598 of SEQ ID NO: 1242932
uucagugucgucguuauca

SEQ ID NO: 1383109 - RNA, 19 nt, Artificial Sequence
  Description of Artificial Sequence: Synthetic oligonucleotide
  Antisense strand to SEQ ID NO: 1383108
ugauaacgacgacacugaa

SEQ ID NO: 1383110 - RNA, 19 nt, Artificial Sequence
  Description of Artificial Sequence: Synthetic oligonucleotide
  Sense strand starting at position 3668 of SEQ ID NO: 1242932
ccuugacuugcauguaaug

SEQ ID NO: 1383111 - RNA, 19 nt, Artificial Sequence
  Description of Artificial Sequence: Synthetic oligonucleotide
  Antisense strand to SEQ ID NO: 1383110
cauuacaugcaagucaagg

SEQ ID NO: 1383112 - RNA, 19 nt, Artificial Sequence
  Description of Artificial Sequence: Synthetic oligonucleotide
  Sense strand starting at position 3739 of SEQ ID NO: 1242932
uuaucucugucucugauca

SEQ ID NO: 1383113 - RNA, 19 nt, Artificial Sequence
  Description of Artificial Sequence: Synthetic oligonucleotide
  Antisense strand to SEQ ID NO: 1383112
ugaucagagacagagauaa

SEQ ID NO: 1383114 - RNA, 19 nt, Artificial Sequence
  Description of Artificial Sequence: Synthetic oligonucleotide
  Sense strand starting at position 3746 of SEQ ID NO: 1242932
ugucucugaucaguaggga

SEQ ID NO: 1383115 - RNA, 19 nt, Artificial Sequence
  Description of Artificial Sequence: Synthetic oligonucleotide
  Antisense strand to SEQ ID NO: 1383114
ucccuacugaucagagaca

SEQ ID NO: 1383116 - RNA, 19 nt, Artificial Sequence
  Description of Artificial Sequence: Synthetic oligonucleotide
  Sense strand starting at position 3777 of SEQ ID NO: 1242932
ggcuuagagaggugaucac

SEQ ID NO: 1383117 - RNA, 19 nt, Artificial Sequence
  Description of Artificial Sequence: Synthetic oligonucleotide
  Antisense strand to SEQ ID NO: 1383116
gugaucaccucucuaagcc

SEQ ID NO: 1383118 - RNA, 19 nt, Artificial Sequence
  Description of Artificial Sequence: Synthetic oligonucleotide
  Sense strand starting at position 3850 of SEQ ID NO: 1242932
ccacgucaucacugugaaa

SEQ ID NO: 1383119 - RNA, 19 nt, Artificial Sequence
  Description of Artificial Sequence: Synthetic oligonucleotide
  Antisense strand to SEQ ID NO: 1383118
uuucacagugaugacgugg

SEQ ID NO: 1383120 - RNA, 19 nt, Artificial Sequence
  Description of Artificial Sequence: Synthetic oligonucleotide
  Sense strand starting at position 3868 of SEQ ID NO: 1242932
aaacaagucgagugccuaa

SEQ ID NO: 1383121 - RNA, 19 nt, Artificial Sequence
  Description of Artificial Sequence: Synthetic oligonucleotide
  Antisense strand to SEQ ID NO: 1383120
uuaggcacucgacuuguuu

SEQ ID NO: 1383122 - RNA, 19 nt, Artificial Sequence
  Description of Artificial Sequence: Synthetic oligonucleotide
  Sense strand starting at position 3899 of SEQ ID NO: 1242932
caacccgucucucugagau

SEQ ID NO: 1383123 - RNA, 19 nt, Artificial Sequence
  Description of Artificial Sequence: Synthetic oligonucleotide
  Antisense strand to SEQ ID NO: 1383122
aucucagagagacggguug

SEQ ID NO: 1383124 - RNA, 19 nt, Artificial Sequence
  Description of Artificial Sequence: Synthetic oligonucleotide
  Sense strand starting at position 3939 of SEQ ID NO: 1242932
uugauuucuugugaaccac

SEQ ID NO: 1383125 - RNA, 19 nt, Artificial Sequence
  Description of Artificial Sequence: Synthetic oligonucleotide
  Antisense strand to SEQ ID NO: 1383124
gugguucacaagaaaucaa

SEQ ID NO: 1383126 - RNA, 19 nt, Artificial Sequence
  Description of Artificial Sequence: Synthetic oligonucleotide
  Sense strand starting at position 3948 of SEQ ID NO: 1242932
ugugaaccacuguacaauu

SEQ ID NO: 1383127 - RNA, 19 nt, Artificial Sequence
  Description of Artificial Sequence: Synthetic oligonucleotide
  Antisense strand to SEQ ID NO: 1383126
aauuguacagugguucaca

SEQ ID NO: 1383128 - RNA, 19 nt, Artificial Sequence
  Description of Artificial Sequence: Synthetic oligonucleotide
  Sense strand starting at position 42 of SEQ ID NO: 1242933
cuccuaggugcacagaaua

SEQ ID NO: 1383129 - RNA, 19 nt, Artificial Sequence
  Description of Artificial Sequence: Synthetic oligonucleotide
  Antisense strand to SEQ ID NO: 1383128
uauucugugcaccuaggag

SEQ ID NO: 1383130 - RNA, 19 nt, Artificial Sequence
  Description of Artificial Sequence: Synthetic oligonucleotide
  Sense strand starting at position 287 of SEQ ID NO: 1242933
uccucucagucagaguaca

SEQ ID NO: 1383131 - RNA, 19 nt, Artificial Sequence
  Description of Artificial Sequence: Synthetic oligonucleotide
  Antisense strand to SEQ ID NO: 1383130
uguacucugacugagagga

SEQ ID NO: 1383132 - RNA, 19 nt, Artificial Sequence
  Description of Artificial Sequence: Synthetic oligonucleotide
  Sense strand starting at position 498 of SEQ ID NO: 1242933
cgccgugugcaaugcugaa

SEQ ID NO: 1383133 - RNA, 19 nt, Artificial Sequence
  Description of Artificial Sequence: Synthetic oligonucleotide
  Antisense strand to SEQ ID NO: 1383132
uucagcauugcacacggcg

SEQ ID NO: 1383134 - RNA, 19 nt, Artificial Sequence
  Description of Artificial Sequence: Synthetic oligonucleotide
  Sense strand starting at position 500 of SEQ ID NO: 1242933
ccgugugcaaugcugaauu

SEQ ID NO: 1383135 - RNA, 19 nt, Artificial Sequence
  Description of Artificial Sequence: Synthetic oligonucleotide
  Antisense strand to SEQ ID NO: 1383134
aauucagcauugcacacgg

SEQ ID NO: 1383136 - RNA, 19 nt, Artificial Sequence
  Description of Artificial Sequence: Synthetic oligonucleotide
  Sense strand starting at position 502 of SEQ ID NO: 1242933
gugugcaaugcugaauucu

SEQ ID NO: 1383137 - RNA, 19 nt, Artificial Sequence
  Description of Artificial Sequence: Synthetic oligonucleotide
  Antisense strand to SEQ ID NO: 1383136
agaauucagcauugcacac

SEQ ID NO: 1383138 - RNA, 19 nt, Artificial Sequence
  Description of Artificial Sequence: Synthetic oligonucleotide
  Sense strand starting at position 932 of SEQ ID NO: 1242933
ccucgacguuccuggguaa

SEQ ID NO: 1383139 - RNA, 19 nt, Artificial Sequence
  Description of Artificial Sequence: Synthetic oligonucleotide
  Antisense strand to SEQ ID NO: 1383138
uuacccaggaacgucgagg

SEQ ID NO: 1383140 - RNA, 19 nt, Artificial Sequence
  Description of Artificial Sequence: Synthetic oligonucleotide
  Sense strand starting at position 1702 of SEQ ID NO: 1242933
cugaguuugugacgagcca

SEQ ID NO: 1383141 - RNA, 19 nt, Artificial Sequence
  Description of Artificial Sequence: Synthetic oligonucleotide
  Antisense strand to SEQ ID NO: 1383140
uggcucgucacaaacucag

SEQ ID NO: 1383142 - RNA, 19 nt, Artificial Sequence
  Description of Artificial Sequence: Synthetic oligonucleotide
  Sense strand starting at position 1779 of SEQ ID NO: 1242933
gguggaucuuucccacgca

SEQ ID NO: 1383143 - RNA, 19 nt, Artificial Sequence
  Description of Artificial Sequence: Synthetic oligonucleotide
  Antisense strand to SEQ ID NO: 1383142
ugcgugggaaagauccacc

SEQ ID NO: 1383144 - RNA, 19 nt, Artificial Sequence
  Description of Artificial Sequence: Synthetic oligonucleotide
  Sense strand starting at position 1796 of SEQ ID NO: 1242933
cagcgacccucuugugauc

SEQ ID NO: 1383145 - RNA, 19 nt, Artificial Sequence
  Description of Artificial Sequence: Synthetic oligonucleotide
  Antisense strand to SEQ ID NO: 1383144
gaucacaagagggucgcug

SEQ ID NO: 1383146 - RNA, 19 nt, Artificial Sequence
  Description of Artificial Sequence: Synthetic oligonucleotide
  Sense strand starting at position 1912 of SEQ ID NO: 1242933
ccacauaguucucagcagu

SEQ ID NO: 1383147 - RNA, 19 nt, Artificial Sequence
  Description of Artificial Sequence: Synthetic oligonucleotide
  Antisense strand to SEQ ID NO: 1383146
acugcugagaacuaugugg

SEQ ID NO: 1383148 - RNA, 19 nt, Artificial Sequence
  Description of Artificial Sequence: Synthetic oligonucleotide
  Sense strand starting at position 1940 of SEQ ID NO: 1242933
uggucaucuccagggcuga

SEQ ID NO: 1383149 - RNA, 19 nt, Artificial Sequence
  Description of Artificial Sequence: Synthetic oligonucleotide
  Antisense strand to SEQ ID NO: 1383148
ucagcccuggagaugacca

SEQ ID NO: 1383150 - RNA, 19 nt, Artificial Sequence
  Description of Artificial Sequence: Synthetic oligonucleotide
  Sense strand starting at position 1941 of SEQ ID NO: 1242933
ggucaucuccagggcugau

SEQ ID NO: 1383151 - RNA, 19 nt, Artificial Sequence
  Description of Artificial Sequence: Synthetic oligonucleotide
  Antisense strand to SEQ ID NO: 1383150
aucagcccuggagaugacc

SEQ ID NO: 1383152 - RNA, 19 nt, Artificial Sequence
  Description of Artificial Sequence: Synthetic oligonucleotide
  Sense strand starting at position 1968 of SEQ ID NO: 1242933
ccgcgauucucagcgcuca

SEQ ID NO: 1383153 - RNA, 19 nt, Artificial Sequence
  Description of Artificial Sequence: Synthetic oligonucleotide
  Antisense strand to SEQ ID NO: 1383152
ugagcgcugagaaucgcgg

SEQ ID NO: 1383154 - RNA, 19 nt, Artificial Sequence
  Description of Artificial Sequence: Synthetic oligonucleotide
  Sense strand starting at position 2851 of SEQ ID NO: 1242933
cacagagucugcuccaaug

SEQ ID NO: 1383155 - RNA, 19 nt, Artificial Sequence
  Description of Artificial Sequence: Synthetic oligonucleotide
  Antisense strand to SEQ ID NO: 1383154
cauuggagcagacucugug

SEQ ID NO: 1383156 - RNA, 19 nt, Artificial Sequence
  Description of Artificial Sequence: Synthetic oligonucleotide
  Sense strand starting at position 2911 of SEQ ID NO: 1242933
cucugaucucagggagcca

SEQ ID NO: 1383157 - RNA, 19 nt, Artificial Sequence
  Description of Artificial Sequence: Synthetic oligonucleotide
  Antisense strand to SEQ ID NO: 1383156
uggcucccugagaucagag

SEQ ID NO: 1383158 - RNA, 19 nt, Artificial Sequence
  Description of Artificial Sequence: Synthetic oligonucleotide
  Sense strand starting at position 3004 of SEQ ID NO: 1242933
ggcugccacuucuaagcua

SEQ ID NO: 1383159 - RNA, 19 nt, Artificial Sequence
  Description of Artificial Sequence: Synthetic oligonucleotide
  Antisense strand to SEQ ID NO: 1383158
uagcuuagaaguggcagcc

SEQ ID NO: 1383160 - RNA, 19 nt, Artificial Sequence
  Description of Artificial Sequence: Synthetic oligonucleotide
  Sense strand starting at position 3012 of SEQ ID NO: 1242933
cuucuaagcuaccagaaga

SEQ ID NO: 1383161 - RNA, 19 nt, Artificial Sequence
  Description of Artificial Sequence: Synthetic oligonucleotide
  Antisense strand to SEQ ID NO: 1383160
ucuucugguagcuuagaag

SEQ ID NO: 1383162 - RNA, 19 nt, Artificial Sequence
  Description of Artificial Sequence: Synthetic oligonucleotide
  Sense strand starting at position 3068 of SEQ ID NO: 1242933
gggcuugguugacuugaau

SEQ ID NO: 1383163 - RNA, 19 nt, Artificial Sequence
  Description of Artificial Sequence: Synthetic oligonucleotide
  Antisense strand to SEQ ID NO: 1383162
auucaagucaaccaagccc

SEQ ID NO: 1383164 - RNA, 19 nt, Artificial Sequence
  Description of Artificial Sequence: Synthetic oligonucleotide
  Sense strand starting at position 3090 of SEQ ID NO: 1242933
agcgacugggcaugaaaua

SEQ ID NO: 1383165 - RNA, 19 nt, Artificial Sequence
  Description of Artificial Sequence: Synthetic oligonucleotide
  Antisense strand to SEQ ID NO: 1383164
uauuucaugcccagucgcu

SEQ ID NO: 1383166 - RNA, 19 nt, Artificial Sequence
  Description of Artificial Sequence: Synthetic oligonucleotide
  Sense strand starting at position 3193 of SEQ ID NO: 1242933
ggucuuaaauucuaagagg

SEQ ID NO: 1383167 - RNA, 19 nt, Artificial Sequence
  Description of Artificial Sequence: Synthetic oligonucleotide
  Antisense strand to SEQ ID NO: 1383166
ccucuuagaauuuaagacc

SEQ ID NO: 1383168 - RNA, 19 nt, Artificial Sequence
  Description of Artificial Sequence: Synthetic oligonucleotide
  Sense strand starting at position 3196 of SEQ ID NO: 1242933
cuuaaauucuaagagguuu

SEQ ID NO: 1383169 - RNA, 19 nt, Artificial Sequence
  Description of Artificial Sequence: Synthetic oligonucleotide
  Antisense strand to SEQ ID NO: 1383168
aaaccucuuagaauuuaag

SEQ ID NO: 1383170 - RNA, 19 nt, Artificial Sequence
  Description of Artificial Sequence: Synthetic oligonucleotide
  Sense strand starting at position 3555 of SEQ ID NO: 1242933
auaaacuucugcuguugau

SEQ ID NO: 1383171 - RNA, 19 nt, Artificial Sequence
  Description of Artificial Sequence: Synthetic oligonucleotide
  Antisense strand to SEQ ID NO: 1383170
aucaacagcagaaguuuau

SEQ ID NO: 1383172 - RNA, 19 nt, Artificial Sequence
  Description of Artificial Sequence: Synthetic oligonucleotide
  Sense strand starting at position 3558 of SEQ ID NO: 1242933
aacuucugcuguugaugau

SEQ ID NO: 1383173 - RNA, 19 nt, Artificial Sequence
  Description of Artificial Sequence: Synthetic oligonucleotide
  Antisense strand to SEQ ID NO: 1383172
aucaucaacagcagaaguu

SEQ ID NO: 1383174 - RNA, 19 nt, Artificial Sequence
  Description of Artificial Sequence: Synthetic oligonucleotide
  Sense strand starting at position 3798 of SEQ ID NO: 1242933
gggaacuucuuccaagaau

SEQ ID NO: 1383175 - RNA, 19 nt, Artificial Sequence
  Description of Artificial Sequence: Synthetic oligonucleotide
  Antisense strand to SEQ ID NO: 1383174
auucuuggaagaaguuccc

SEQ ID NO: 1383176 - RNA, 19 nt, Artificial Sequence
  Description of Artificial Sequence: Synthetic oligonucleotide
  Sense strand starting at position 3819 of SEQ ID NO: 1242933
ggauguggcugcugaaaug

SEQ ID NO: 1383177 - RNA, 19 nt, Artificial Sequence
  Description of Artificial Sequence: Synthetic oligonucleotide
  Antisense strand to SEQ ID NO: 1383176
cauuucagcagccacaucc

SEQ ID NO: 1383178 - RNA, 19 nt, Artificial Sequence
  Description of Artificial Sequence: Synthetic oligonucleotide
  Sense strand starting at position 3881 of SEQ ID NO: 1242933
uauugagcugguuguucua

SEQ ID NO: 1383179 - RNA, 19 nt, Artificial Sequence
  Description of Artificial Sequence: Synthetic oligonucleotide
  Antisense strand to SEQ ID NO: 1383178
uagaacaaccagcucaaua

SEQ ID NO: 1383180 - RNA, 19 nt, Artificial Sequence
  Description of Artificial Sequence: Synthetic oligonucleotide
  Sense strand starting at position 3951 of SEQ ID NO: 1242933
gagaaagcgugagggaaau

SEQ ID NO: 1383181 - RNA, 19 nt, Artificial Sequence
  Description of Artificial Sequence: Synthetic oligonucleotide
  Antisense strand to SEQ ID NO: 1383180
auuucccucacgcuuucuc

SEQ ID NO: 1383182 - RNA, 19 nt, Artificial Sequence
  Description of Artificial Sequence: Synthetic oligonucleotide
  Sense strand starting at position 3961 of SEQ ID NO: 1242933
gagggaaaugcuggaaagu

SEQ ID NO: 1383183 - RNA, 19 nt, Artificial Sequence
  Description of Artificial Sequence: Synthetic oligonucleotide
  Antisense strand to SEQ ID NO: 1383182
acuuuccagcauuucccuc

SEQ ID NO: 1383184 - RNA, 19 nt, Artificial Sequence
  Description of Artificial Sequence: Synthetic oligonucleotide
  Sense strand starting at position 390 of SEQ ID NO: 1242934
cuccuaggugcacagaaua

SEQ ID NO: 1383185 - RNA, 19 nt, Artificial Sequence
  Description of Artificial Sequence: Synthetic oligonucleotide
  Antisense strand to SEQ ID NO: 1383184
uauucugugcaccuaggag

SEQ ID NO: 1383186 - RNA, 19 nt, Artificial Sequence
  Description of Artificial Sequence: Synthetic oligonucleotide
  Sense strand starting at position 635 of SEQ ID NO: 1242934
uccucucagucagaguaca

SEQ ID NO: 1383187 - RNA, 19 nt, Artificial Sequence
  Description of Artificial Sequence: Synthetic oligonucleotide
  Antisense strand to SEQ ID NO: 1383186
uguacucugacugagagga

SEQ ID NO: 1383188 - RNA, 19 nt, Artificial Sequence
  Description of Artificial Sequence: Synthetic oligonucleotide
  Sense strand starting at position 846 of SEQ ID NO: 1242934
cgccgugugcaaugcugaa

SEQ ID NO: 1383189 - RNA, 19 nt, Artificial Sequence
  Description of Artificial Sequence: Synthetic oligonucleotide
  Antisense strand to SEQ ID NO: 1383188
uucagcauugcacacggcg

SEQ ID NO: 1383190 - RNA, 19 nt, Artificial Sequence
  Description of Artificial Sequence: Synthetic oligonucleotide
  Sense strand starting at position 848 of SEQ ID NO: 1242934
ccgugugcaaugcugaauu

SEQ ID NO: 1383191 - RNA, 19 nt, Artificial Sequence
  Description of Artificial Sequence: Synthetic oligonucleotide
  Antisense strand to SEQ ID NO: 1383190
aauucagcauugcacacgg

SEQ ID NO: 1383192 - RNA, 19 nt, Artificial Sequence
  Description of Artificial Sequence: Synthetic oligonucleotide
  Sense strand starting at position 850 of SEQ ID NO: 1242934
gugugcaaugcugaauucu

SEQ ID NO: 1383193 - RNA, 19 nt, Artificial Sequence
  Description of Artificial Sequence: Synthetic oligonucleotide
  Antisense strand to SEQ ID NO: 1383192
agaauucagcauugcacac

SEQ ID NO: 1383194 - RNA, 19 nt, Artificial Sequence
  Description of Artificial Sequence: Synthetic oligonucleotide
  Sense strand starting at position 1280 of SEQ ID NO: 1242934
ccucgacguuccuggguaa

SEQ ID NO: 1383195 - RNA, 19 nt, Artificial Sequence
  Description of Artificial Sequence: Synthetic oligonucleotide
  Antisense strand to SEQ ID NO: 1383194
uuacccaggaacgucgagg

SEQ ID NO: 1383196 - RNA, 19 nt, Artificial Sequence
  Description of Artificial Sequence: Synthetic oligonucleotide
  Sense strand starting at position 2050 of SEQ ID NO: 1242934
cugaguuugugacgagcca

SEQ ID NO: 1383197 - RNA, 19 nt, Artificial Sequence
  Description of Artificial Sequence: Synthetic oligonucleotide
  Antisense strand to SEQ ID NO: 1383196
uggcucgucacaaacucag

SEQ ID NO: 1383198 - RNA, 19 nt, Artificial Sequence
  Description of Artificial Sequence: Synthetic oligonucleotide
  Sense strand starting at position 2127 of SEQ ID NO: 1242934
gguggaucuuucccacgca

SEQ ID NO: 1383199 - RNA, 19 nt, Artificial Sequence
  Description of Artificial Sequence: Synthetic oligonucleotide
  Antisense strand to SEQ ID NO: 1383198
ugcgugggaaagauccacc

SEQ ID NO: 1383200 - RNA, 19 nt, Artificial Sequence
  Description of Artificial Sequence: Synthetic oligonucleotide
  Sense strand starting at position 2144 of SEQ ID NO: 1242934
cagcgacccucuugugauc

SEQ ID NO: 1383201 - RNA, 19 nt, Artificial Sequence
  Description of Artificial Sequence: Synthetic oligonucleotide
  Antisense strand to SEQ ID NO: 1383200
gaucacaagagggucgcug

SEQ ID NO: 1383202 - RNA, 19 nt, Artificial Sequence
  Description of Artificial Sequence: Synthetic oligonucleotide
  Sense strand starting at position 2260 of SEQ ID NO: 1242934
ccacauaguucucagcagu

SEQ ID NO: 1383203 - RNA, 19 nt, Artificial Sequence
  Description of Artificial Sequence: Synthetic oligonucleotide
  Antisense strand to SEQ ID NO: 1383202
acugcugagaacuaugugg

SEQ ID NO: 1383204 - RNA, 19 nt, Artificial Sequence
  Description of Artificial Sequence: Synthetic oligonucleotide
  Sense strand starting at position 2288 of SEQ ID NO: 1242934
uggucaucuccagggcuga

SEQ ID NO: 1383205 - RNA, 19 nt, Artificial Sequence
  Description of Artificial Sequence: Synthetic oligonucleotide
  Antisense strand to SEQ ID NO: 1383204
ucagcccuggagaugacca

SEQ ID NO: 1383206 - RNA, 19 nt, Artificial Sequence
  Description of Artificial Sequence: Synthetic oligonucleotide
  Sense strand starting at position 2289 of SEQ ID NO: 1242934
ggucaucuccagggcugau

SEQ ID NO: 1383207 - RNA, 19 nt, Artificial Sequence
  Description of Artificial Sequence: Synthetic oligonucleotide
  Antisense strand to SEQ ID NO: 1383206
aucagcccuggagaugacc

SEQ ID NO: 1383208 - RNA, 19 nt, Artificial Sequence
  Description of Artificial Sequence: Synthetic oligonucleotide
  Sense strand starting at position 2316 of SEQ ID NO: 1242934
ccgcgauucucagcgcuca

SEQ ID NO: 1383209 - RNA, 19 nt, Artificial Sequence
  Description of Artificial Sequence: Synthetic oligonucleotide
  Antisense strand to SEQ ID NO: 1383208
ugagcgcugagaaucgcgg

SEQ ID NO: 1383210 - RNA, 19 nt, Artificial Sequence
  Description of Artificial Sequence: Synthetic oligonucleotide
  Sense strand starting at position 3199 of SEQ ID NO: 1242934
cacagagucugcuccaaug

SEQ ID NO: 1383211 - RNA, 19 nt, Artificial Sequence
  Description of Artificial Sequence: Synthetic oligonucleotide
  Antisense strand to SEQ ID NO: 1383210
cauuggagcagacucugug

SEQ ID NO: 1383212 - RNA, 19 nt, Artificial Sequence
  Description of Artificial Sequence: Synthetic oligonucleotide
  Sense strand starting at position 3259 of SEQ ID NO: 1242934
cucugaucucagggagcca

SEQ ID NO: 1383213 - RNA, 19 nt, Artificial Sequence
  Description of Artificial Sequence: Synthetic oligonucleotide
  Antisense strand to SEQ ID NO: 1383212
uggcucccugagaucagag

SEQ ID NO: 1383214 - RNA, 19 nt, Artificial Sequence
  Description of Artificial Sequence: Synthetic oligonucleotide
  Sense strand starting at position 3352 of SEQ ID NO: 1242934
ggcugccacuucuaagcua

SEQ ID NO: 1383215 - RNA, 19 nt, Artificial Sequence
  Description of Artificial Sequence: Synthetic oligonucleotide
  Antisense strand to SEQ ID NO: 1383214
uagcuuagaaguggcagcc

SEQ ID NO: 1383216 - RNA, 19 nt, Artificial Sequence
  Description of Artificial Sequence: Synthetic oligonucleotide
  Sense strand starting at position 3360 of SEQ ID NO: 1242934
cuucuaagcuaccagaaga

SEQ ID NO: 1383217 - RNA, 19 nt, Artificial Sequence
  Description of Artificial Sequence: Synthetic oligonucleotide
  Antisense strand to SEQ ID NO: 1383216
ucuucugguagcuuagaag

SEQ ID NO: 1383218 - RNA, 19 nt, Artificial Sequence
  Description of Artificial Sequence: Synthetic oligonucleotide
  Sense strand starting at position 3416 of SEQ ID NO: 1242934
gggcuugguugacuugaau

SEQ ID NO: 1383219 - RNA, 19 nt, Artificial Sequence
  Description of Artificial Sequence: Synthetic oligonucleotide
  Antisense strand to SEQ ID NO: 1383218
auucaagucaaccaagccc

SEQ ID NO: 1383220 - RNA, 19 nt, Artificial Sequence
  Description of Artificial Sequence: Synthetic oligonucleotide
  Sense strand starting at position 3438 of SEQ ID NO: 1242934
agcgacugggcaugaaaua

SEQ ID NO: 1383221 - RNA, 19 nt, Artificial Sequence
  Description of Artificial Sequence: Synthetic oligonucleotide
  Antisense strand to SEQ ID NO: 1383220
uauuucaugcccagucgcu

SEQ ID NO: 1383222 - RNA, 19 nt, Artificial Sequence
  Description of Artificial Sequence: Synthetic oligonucleotide
  Sense strand starting at position 3541 of SEQ ID NO: 1242934
ggucuuaaauucuaagagg

SEQ ID NO: 1383223 - RNA, 19 nt, Artificial Sequence
  Description of Artificial Sequence: Synthetic oligonucleotide
  Antisense strand to SEQ ID NO: 1383222
ccucuuagaauuuaagacc

SEQ ID NO: 1383224 - RNA, 19 nt, Artificial Sequence
  Description of Artificial Sequence: Synthetic oligonucleotide
  Sense strand starting at position 3544 of SEQ ID NO: 1242934
cuuaaauucuaagagguuu

SEQ ID NO: 1383225 - RNA, 19 nt, Artificial Sequence
  Description of Artificial Sequence: Synthetic oligonucleotide
  Antisense strand to SEQ ID NO: 1383224
aaaccucuuagaauuuaag

SEQ ID NO: 1383226 - RNA, 19 nt, Artificial Sequence
  Description of Artificial Sequence: Synthetic oligonucleotide
  Sense strand starting at position 3903 of SEQ ID NO: 1242934
auaaacuucugcuguugau

SEQ ID NO: 1383227 - RNA, 19 nt, Artificial Sequence
  Description of Artificial Sequence: Synthetic oligonucleotide
  Antisense strand to SEQ ID NO: 1383226
aucaacagcagaaguuuau

SEQ ID NO: 1383228 - RNA, 19 nt, Artificial Sequence
  Description of Artificial Sequence: Synthetic oligonucleotide
  Sense strand starting at position 3906 of SEQ ID NO: 1242934
aacuucugcuguugaugau

SEQ ID NO: 1383229 - RNA, 19 nt, Artificial Sequence
  Description of Artificial Sequence: Synthetic oligonucleotide
  Antisense strand to SEQ ID NO: 1383228
aucaucaacagcagaaguu

SEQ ID NO: 1383230 - RNA, 19 nt, Artificial Sequence
  Description of Artificial Sequence: Synthetic oligonucleotide
  Sense strand starting at position 190 of SEQ ID NO: 1242935
cgaaguucgcgcucuguca

SEQ ID NO: 1383231 - RNA, 19 nt, Artificial Sequence
  Description of Artificial Sequence: Synthetic oligonucleotide
  Antisense strand to SEQ ID NO: 1383230
ugacagagcgcgaacuucg

SEQ ID NO: 1383232 - RNA, 19 nt, Artificial Sequence
  Description of Artificial Sequence: Synthetic oligonucleotide
  Sense strand starting at position 224 of SEQ ID NO: 1242935
ccagcaucaccgcaauauu

SEQ ID NO: 1383233 - RNA, 19 nt, Artificial Sequence
  Description of Artificial Sequence: Synthetic oligonucleotide
  Antisense strand to SEQ ID NO: 1383232
aauauugcggugaugcugg

SEQ ID NO: 1383234 - RNA, 19 nt, Artificial Sequence
  Description of Artificial Sequence: Synthetic oligonucleotide
  Sense strand starting at position 729 of SEQ ID NO: 1242935
cuccuaggugcacagaaua

SEQ ID NO: 1383235 - RNA, 19 nt, Artificial Sequence
  Description of Artificial Sequence: Synthetic oligonucleotide
  Antisense strand to SEQ ID NO: 1383234
uauucugugcaccuaggag

SEQ ID NO: 1383236 - RNA, 19 nt, Artificial Sequence
  Description of Artificial Sequence: Synthetic oligonucleotide
  Sense strand starting at position 974 of SEQ ID NO: 1242935
uccucucagucagaguaca

SEQ ID NO: 1383237 - RNA, 19 nt, Artificial Sequence
  Description of Artificial Sequence: Synthetic oligonucleotide
  Antisense strand to SEQ ID NO: 1383236
uguacucugacugagagga

SEQ ID NO: 1383238 - RNA, 19 nt, Artificial Sequence
  Description of Artificial Sequence: Synthetic oligonucleotide
  Sense strand starting at position 1185 of SEQ ID NO: 1242935
cgccgugugcaaugcugaa

SEQ ID NO: 1383239 - RNA, 19 nt, Artificial Sequence
  Description of Artificial Sequence: Synthetic oligonucleotide
  Antisense strand to SEQ ID NO: 1383238
uucagcauugcacacggcg

SEQ ID NO: 1383240 - RNA, 19 nt, Artificial Sequence
  Description of Artificial Sequence: Synthetic oligonucleotide
  Sense strand starting at position 1187 of SEQ ID NO: 1242935
ccgugugcaaugcugaauu

SEQ ID NO: 1383241 - RNA, 19 nt, Artificial Sequence
  Description of Artificial Sequence: Synthetic oligonucleotide
  Antisense strand to SEQ ID NO: 1383240
aauucagcauugcacacgg

SEQ ID NO: 1383242 - RNA, 19 nt, Artificial Sequence
  Description of Artificial Sequence: Synthetic oligonucleotide
  Sense strand starting at position 1189 of SEQ ID NO: 1242935
gugugcaaugcugaauucu

SEQ ID NO: 1383243 - RNA, 19 nt, Artificial Sequence
  Description of Artificial Sequence: Synthetic oligonucleotide
  Antisense strand to SEQ ID NO: 1383242
agaauucagcauugcacac

SEQ ID NO: 1383244 - RNA, 19 nt, Artificial Sequence
  Description of Artificial Sequence: Synthetic oligonucleotide
  Sense strand starting at position 1619 of SEQ ID NO: 1242935
ccucgacguuccuggguaa

SEQ ID NO: 1383245 - RNA, 19 nt, Artificial Sequence
  Description of Artificial Sequence: Synthetic oligonucleotide
  Antisense strand to SEQ ID NO: 1383244
uuacccaggaacgucgagg

SEQ ID NO: 1383246 - RNA, 19 nt, Artificial Sequence
  Description of Artificial Sequence: Synthetic oligonucleotide
  Sense strand starting at position 2389 of SEQ ID NO: 1242935
cugaguuugugacgagcca

SEQ ID NO: 1383247 - RNA, 19 nt, Artificial Sequence
  Description of Artificial Sequence: Synthetic oligonucleotide
  Antisense strand to SEQ ID NO: 1383246
uggcucgucacaaacucag

SEQ ID NO: 1383248 - RNA, 19 nt, Artificial Sequence
  Description of Artificial Sequence: Synthetic oligonucleotide
  Sense strand starting at position 2466 of SEQ ID NO: 1242935
gguggaucuuucccacgca

SEQ ID NO: 1383249 - RNA, 19 nt, Artificial Sequence
  Description of Artificial Sequence: Synthetic oligonucleotide
  Antisense strand to SEQ ID NO: 1383248
ugcgugggaaagauccacc

SEQ ID NO: 1383250 - RNA, 19 nt, Artificial Sequence
  Description of Artificial Sequence: Synthetic oligonucleotide
  Sense strand starting at position 2483 of SEQ ID NO: 1242935
cagcgacccucuugugauc

SEQ ID NO: 1383251 - RNA, 19 nt, Artificial Sequence
  Description of Artificial Sequence: Synthetic oligonucleotide
  Antisense strand to SEQ ID NO: 1383250
gaucacaagagggucgcug

SEQ ID NO: 1383252 - RNA, 19 nt, Artificial Sequence
  Description of Artificial Sequence: Synthetic oligonucleotide
  Sense strand starting at position 2599 of SEQ ID NO: 1242935
ccacauaguucucagcagu

SEQ ID NO: 1383253 - RNA, 19 nt, Artificial Sequence
  Description of Artificial Sequence: Synthetic oligonucleotide
  Antisense strand to SEQ ID NO: 1383252
acugcugagaacuaugugg

SEQ ID NO: 1383254 - RNA, 19 nt, Artificial Sequence
  Description of Artificial Sequence: Synthetic oligonucleotide
  Sense strand starting at position 2627 of SEQ ID NO: 1242935
uggucaucuccagggcuga

SEQ ID NO: 1383255 - RNA, 19 nt, Artificial Sequence
  Description of Artificial Sequence: Synthetic oligonucleotide
  Antisense strand to SEQ ID NO: 1383254
ucagcccuggagaugacca

SEQ ID NO: 1383256 - RNA, 19 nt, Artificial Sequence
  Description of Artificial Sequence: Synthetic oligonucleotide
  Sense strand starting at position 2628 of SEQ ID NO: 1242935
ggucaucuccagggcugau

SEQ ID NO: 1383257 - RNA, 19 nt, Artificial Sequence
  Description of Artificial Sequence: Synthetic oligonucleotide
  Antisense strand to SEQ ID NO: 1383256
aucagcccuggagaugacc

SEQ ID NO: 1383258 - RNA, 19 nt, Artificial Sequence
  Description of Artificial Sequence: Synthetic oligonucleotide
  Sense strand starting at position 2655 of SEQ ID NO: 1242935
ccgcgauucucagcgcuca

SEQ ID NO: 1383259 - RNA, 19 nt, Artificial Sequence
  Description of Artificial Sequence: Synthetic oligonucleotide
  Antisense strand to SEQ ID NO: 1383258
ugagcgcugagaaucgcgg

SEQ ID NO: 1383260 - RNA, 19 nt, Artificial Sequence
  Description of Artificial Sequence: Synthetic oligonucleotide
  Sense strand starting at position 3538 of SEQ ID NO: 1242935
cacagagucugcuccaaug

SEQ ID NO: 1383261 - RNA, 19 nt, Artificial Sequence
  Description of Artificial Sequence: Synthetic oligonucleotide
  Antisense strand to SEQ ID NO: 1383260
cauuggagcagacucugug

SEQ ID NO: 1383262 - RNA, 19 nt, Artificial Sequence
  Description of Artificial Sequence: Synthetic oligonucleotide
  Sense strand starting at position 3598 of SEQ ID NO: 1242935
cucugaucucagggagcca

SEQ ID NO: 1383263 - RNA, 19 nt, Artificial Sequence
  Description of Artificial Sequence: Synthetic oligonucleotide
  Antisense strand to SEQ ID NO: 1383262
uggcucccugagaucagag

SEQ ID NO: 1383264 - RNA, 19 nt, Artificial Sequence
  Description of Artificial Sequence: Synthetic oligonucleotide
  Sense strand starting at position 3691 of SEQ ID NO: 1242935
ggcugccacuucuaagcua

SEQ ID NO: 1383265 - RNA, 19 nt, Artificial Sequence
  Description of Artificial Sequence: Synthetic oligonucleotide
  Antisense strand to SEQ ID NO: 1383264
uagcuuagaaguggcagcc

SEQ ID NO: 1383266 - RNA, 19 nt, Artificial Sequence
  Description of Artificial Sequence: Synthetic oligonucleotide
  Sense strand starting at position 3699 of SEQ ID NO: 1242935
cuucuaagcuaccagaaga

SEQ ID NO: 1383267 - RNA, 19 nt, Artificial Sequence
  Description of Artificial Sequence: Synthetic oligonucleotide
  Antisense strand to SEQ ID NO: 1383266
ucuucugguagcuuagaag

SEQ ID NO: 1383268 - RNA, 19 nt, Artificial Sequence
  Description of Artificial Sequence: Synthetic oligonucleotide
  Sense strand starting at position 3755 of SEQ ID NO: 1242935
gggcuugguugacuugaau

SEQ ID NO: 1383269 - RNA, 19 nt, Artificial Sequence
  Description of Artificial Sequence: Synthetic oligonucleotide
  Antisense strand to SEQ ID NO: 1383268
auucaagucaaccaagccc

SEQ ID NO: 1383270 - RNA, 19 nt, Artificial Sequence
  Description of Artificial Sequence: Synthetic oligonucleotide
  Sense strand starting at position 3777 of SEQ ID NO: 1242935
agcgacugggcaugaaaua

SEQ ID NO: 1383271 - RNA, 19 nt, Artificial Sequence
  Description of Artificial Sequence: Synthetic oligonucleotide
  Antisense strand to SEQ ID NO: 1383270
uauuucaugcccagucgcu

SEQ ID NO: 1383272 - RNA, 19 nt, Artificial Sequence
  Description of Artificial Sequence: Synthetic oligonucleotide
  Sense strand starting at position 3880 of SEQ ID NO: 1242935
ggucuuaaauucuaagagg

SEQ ID NO: 1383273 - RNA, 19 nt, Artificial Sequence
  Description of Artificial Sequence: Synthetic oligonucleotide
  Antisense strand to SEQ ID NO: 1383272
ccucuuagaauuuaagacc

SEQ ID NO: 1383274 - RNA, 19 nt, Artificial Sequence
  Description of Artificial Sequence: Synthetic oligonucleotide
  Sense strand starting at position 3883 of SEQ ID NO: 1242935
cuuaaauucuaagagguuu

SEQ ID NO: 1383275 - RNA, 19 nt, Artificial Sequence
  Description of Artificial Sequence: Synthetic oligonucleotide
  Antisense strand to SEQ ID NO: 1383274
aaaccucuuagaauuuaag

SEQ ID NO: 1383276 - RNA, 19 nt, Artificial Sequence
  Description of Artificial Sequence: Synthetic oligonucleotide
  Sense strand starting at position 756 of SEQ ID NO: 1242936
gcugaauacuaagaacuug

SEQ ID NO: 1383277 - RNA, 19 nt, Artificial Sequence
  Description of Artificial Sequence: Synthetic oligonucleotide
  Antisense strand to SEQ ID NO: 1383276
caaguucuuaguauucagc

SEQ ID NO: 1383278 - RNA, 19 nt, Artificial Sequence
  Description of Artificial Sequence: Synthetic oligonucleotide
  Sense strand starting at position 764 of SEQ ID NO: 1242936
cuaagaacuuggccucaaa

SEQ ID NO: 1383279 - RNA, 19 nt, Artificial Sequence
  Description of Artificial Sequence: Synthetic oligonucleotide
  Antisense strand to SEQ ID NO: 1383278
uuugaggccaaguucuuag

SEQ ID NO: 1383280 - RNA, 19 nt, Artificial Sequence
  Description of Artificial Sequence: Synthetic oligonucleotide
  Sense strand starting at position 1071 of SEQ ID NO: 1242936
cagggagcguccugaaauu

SEQ ID NO: 1383281 - RNA, 19 nt, Artificial Sequence
  Description of Artificial Sequence: Synthetic oligonucleotide
  Antisense strand to SEQ ID NO: 1383280
aauuucaggacgcucccug

SEQ ID NO: 1383282 - RNA, 19 nt, Artificial Sequence
  Description of Artificial Sequence: Synthetic oligonucleotide
  Sense strand starting at position 2036 of SEQ ID NO: 1242936
gguaauuuauacccgcacu

SEQ ID NO: 1383283 - RNA, 19 nt, Artificial Sequence
  Description of Artificial Sequence: Synthetic oligonucleotide
  Antisense strand to SEQ ID NO: 1383282
agugcggguauaaauuacc

SEQ ID NO: 1383284 - RNA, 19 nt, Artificial Sequence
  Description of Artificial Sequence: Synthetic oligonucleotide
  Sense strand starting at position 2156 of SEQ ID NO: 1242936
ggaggauagggagguguua

SEQ ID NO: 1383285 - RNA, 19 nt, Artificial Sequence
  Description of Artificial Sequence: Synthetic oligonucleotide
  Antisense strand to SEQ ID NO: 1383284
uaacaccucccuauccucc

SEQ ID NO: 1383286 - RNA, 19 nt, Artificial Sequence
  Description of Artificial Sequence: Synthetic oligonucleotide
  Sense strand starting at position 2164 of SEQ ID NO: 1242936
gggagguguuaggaaggaa

SEQ ID NO: 1383287 - RNA, 19 nt, Artificial Sequence
  Description of Artificial Sequence: Synthetic oligonucleotide
  Antisense strand to SEQ ID NO: 1383286
uuccuuccuaacaccuccc

SEQ ID NO: 1383288 - RNA, 19 nt, Artificial Sequence
  Description of Artificial Sequence: Synthetic oligonucleotide
  Sense strand starting at position 2546 of SEQ ID NO: 1242936
ccuggauugcgagaugggu

SEQ ID NO: 1383289 - RNA, 19 nt, Artificial Sequence
  Description of Artificial Sequence: Synthetic oligonucleotide
  Antisense strand to SEQ ID NO: 1383288
acccaucucgcaauccagg

SEQ ID NO: 1383290 - RNA, 19 nt, Artificial Sequence
  Description of Artificial Sequence: Synthetic oligonucleotide
  Sense strand starting at position 2570 of SEQ ID NO: 1242936
ggucccguuucacagauga

SEQ ID NO: 1383291 - RNA, 19 nt, Artificial Sequence
  Description of Artificial Sequence: Synthetic oligonucleotide
  Antisense strand to SEQ ID NO: 1383290
ucaucugugaaacgggacc

SEQ ID NO: 1383292 - RNA, 19 nt, Artificial Sequence
  Description of Artificial Sequence: Synthetic oligonucleotide
  Sense strand starting at position 2598 of SEQ ID NO: 1242936
ggcccugaguugcucaaga

SEQ ID NO: 1383293 - RNA, 19 nt, Artificial Sequence
  Description of Artificial Sequence: Synthetic oligonucleotide
  Antisense strand to SEQ ID NO: 1383292
ucuugagcaacucagggcc

SEQ ID NO: 1383294 - RNA, 19 nt, Artificial Sequence
  Description of Artificial Sequence: Synthetic oligonucleotide
  Sense strand starting at position 2600 of SEQ ID NO: 1242936
cccugaguugcucaagauc

SEQ ID NO: 1383295 - RNA, 19 nt, Artificial Sequence
  Description of Artificial Sequence: Synthetic oligonucleotide
  Antisense strand to SEQ ID NO: 1383294
gaucuugagcaacucaggg

SEQ ID NO: 1383296 - RNA, 19 nt, Artificial Sequence
  Description of Artificial Sequence: Synthetic oligonucleotide
  Sense strand starting at position 2603 of SEQ ID NO: 1242936
ugaguugcucaagaucaug

SEQ ID NO: 1383297 - RNA, 19 nt, Artificial Sequence
  Description of Artificial Sequence: Synthetic oligonucleotide
  Antisense strand to SEQ ID NO: 1383296
caugaucuugagcaacuca

SEQ ID NO: 1383298 - RNA, 19 nt, Artificial Sequence
  Description of Artificial Sequence: Synthetic oligonucleotide
  Sense strand starting at position 2611 of SEQ ID NO: 1242936
ucaagaucaugugcacaca

SEQ ID NO: 1383299 - RNA, 19 nt, Artificial Sequence
  Description of Artificial Sequence: Synthetic oligonucleotide
  Antisense strand to SEQ ID NO: 1383298
ugugugcacaugaucuuga

SEQ ID NO: 1383300 - RNA, 19 nt, Artificial Sequence
  Description of Artificial Sequence: Synthetic oligonucleotide
  Sense strand starting at position 2761 of SEQ ID NO: 1242936
gugaguccuggccgggaaa

SEQ ID NO: 1383301 - RNA, 19 nt, Artificial Sequence
  Description of Artificial Sequence: Synthetic oligonucleotide
  Antisense strand to SEQ ID NO: 1383300
uuucccggccaggacucac

SEQ ID NO: 1383302 - RNA, 19 nt, Artificial Sequence
  Description of Artificial Sequence: Synthetic oligonucleotide
  Sense strand starting at position 2878 of SEQ ID NO: 1242936
cgaguuuaagggugggaau

SEQ ID NO: 1383303 - RNA, 19 nt, Artificial Sequence
  Description of Artificial Sequence: Synthetic oligonucleotide
  Antisense strand to SEQ ID NO: 1383302
auucccacccuuaaacucg

SEQ ID NO: 1383304 - RNA, 19 nt, Artificial Sequence
  Description of Artificial Sequence: Synthetic oligonucleotide
  Sense strand starting at position 2879 of SEQ ID NO: 1242936
gaguuuaagggugggaauu

SEQ ID NO: 1383305 - RNA, 19 nt, Artificial Sequence
  Description of Artificial Sequence: Synthetic oligonucleotide
  Antisense strand to SEQ ID NO: 1383304
aauucccacccuuaaacuc

SEQ ID NO: 1383306 - RNA, 19 nt, Artificial Sequence
  Description of Artificial Sequence: Synthetic oligonucleotide
  Sense strand starting at position 2891 of SEQ ID NO: 1242936
gggaauugcucuccugcag

SEQ ID NO: 1383307 - RNA, 19 nt, Artificial Sequence
  Description of Artificial Sequence: Synthetic oligonucleotide
  Antisense strand to SEQ ID NO: 1383306
cugcaggagagcaauuccc

SEQ ID NO: 1383308 - RNA, 19 nt, Artificial Sequence
  Description of Artificial Sequence: Synthetic oligonucleotide
  Sense strand starting at position 2929 of SEQ ID NO: 1242936
cgagguuugucgcuugacu

SEQ ID NO: 1383309 - RNA, 19 nt, Artificial Sequence
  Description of Artificial Sequence: Synthetic oligonucleotide
  Antisense strand to SEQ ID NO: 1383308
agucaagcgacaaaccucg

SEQ ID NO: 1383310 - RNA, 19 nt, Artificial Sequence
  Description of Artificial Sequence: Synthetic oligonucleotide
  Sense strand starting at position 2938 of SEQ ID NO: 1242936
ucgcuugacuccuaauuuc

SEQ ID NO: 1383311 - RNA, 19 nt, Artificial Sequence
  Description of Artificial Sequence: Synthetic oligonucleotide
  Antisense strand to SEQ ID NO: 1383310
gaaauuaggagucaagcga

SEQ ID NO: 1383312 - RNA, 19 nt, Artificial Sequence
  Description of Artificial Sequence: Synthetic oligonucleotide
  Sense strand starting at position 3511 of SEQ ID NO: 1242936
gggccaagauaggcauauu

SEQ ID NO: 1383313 - RNA, 19 nt, Artificial Sequence
  Description of Artificial Sequence: Synthetic oligonucleotide
  Antisense strand to SEQ ID NO: 1383312
aauaugccuaucuuggccc

SEQ ID NO: 1383314 - RNA, 19 nt, Artificial Sequence
  Description of Artificial Sequence: Synthetic oligonucleotide
  Sense strand starting at position 3514 of SEQ ID NO: 1242936
ccaagauaggcauauugcu

SEQ ID NO: 1383315 - RNA, 19 nt, Artificial Sequence
  Description of Artificial Sequence: Synthetic oligonucleotide
  Antisense strand to SEQ ID NO: 1383314
agcaauaugccuaucuugg

SEQ ID NO: 1383316 - RNA, 19 nt, Artificial Sequence
  Description of Artificial Sequence: Synthetic oligonucleotide
  Sense strand starting at position 3519 of SEQ ID NO: 1242936
auaggcauauugcuugaga

SEQ ID NO: 1383317 - RNA, 19 nt, Artificial Sequence
  Description of Artificial Sequence: Synthetic oligonucleotide
  Antisense strand to SEQ ID NO: 1383316
ucucaagcaauaugccuau

SEQ ID NO: 1383318 - RNA, 19 nt, Artificial Sequence
  Description of Artificial Sequence: Synthetic oligonucleotide
  Sense strand starting at position 3520 of SEQ ID NO: 1242936
uaggcauauugcuugagau

SEQ ID NO: 1383319 - RNA, 19 nt, Artificial Sequence
  Description of Artificial Sequence: Synthetic oligonucleotide
  Antisense strand to SEQ ID NO: 1383318
aucucaagcaauaugccua

SEQ ID NO: 1383320 - RNA, 19 nt, Artificial Sequence
  Description of Artificial Sequence: Synthetic oligonucleotide
  Sense strand starting at position 3521 of SEQ ID NO: 1242936
aggcauauugcuugagauc

SEQ ID NO: 1383321 - RNA, 19 nt, Artificial Sequence
  Description of Artificial Sequence: Synthetic oligonucleotide
  Antisense strand to SEQ ID NO: 1383320
gaucucaagcaauaugccu

SEQ ID NO: 1383322 - RNA, 19 nt, Artificial Sequence
  Description of Artificial Sequence: Synthetic oligonucleotide
  Sense strand starting at position 3773 of SEQ ID NO: 1242936
agcuuuccaucucagauga

SEQ ID NO: 1383323 - RNA, 19 nt, Artificial Sequence
  Description of Artificial Sequence: Synthetic oligonucleotide
  Antisense strand to SEQ ID NO: 1383322
ucaucugagauggaaagcu

SEQ ID NO: 1383324 - RNA, 19 nt, Artificial Sequence
  Description of Artificial Sequence: Synthetic oligonucleotide
  Sense strand starting at position 3849 of SEQ ID NO: 1242936
acgggaguccuaggaggau

SEQ ID NO: 1383325 - RNA, 19 nt, Artificial Sequence
  Description of Artificial Sequence: Synthetic oligonucleotide
  Antisense strand to SEQ ID NO: 1383324
auccuccuaggacucccgu

SEQ ID NO: 1383326 - RNA, 19 nt, Artificial Sequence
  Description of Artificial Sequence: Synthetic oligonucleotide
  Sense strand starting at position 510 of SEQ ID NO: 1242937
uacaaaggcuaguuuguaa

SEQ ID NO: 1383327 - RNA, 19 nt, Artificial Sequence
  Description of Artificial Sequence: Synthetic oligonucleotide
  Antisense strand to SEQ ID NO: 1383326
uuacaaacuagccuuugua

SEQ ID NO: 1383328 - RNA, 19 nt, Artificial Sequence
  Description of Artificial Sequence: Synthetic oligonucleotide
  Sense strand starting at position 517 of SEQ ID NO: 1242937
gcuaguuuguaagagccaa

SEQ ID NO: 1383329 - RNA, 19 nt, Artificial Sequence
  Description of Artificial Sequence: Synthetic oligonucleotide
  Antisense strand to SEQ ID NO: 1383328
uuggcucuuacaaacuagc

SEQ ID NO: 1383330 - RNA, 19 nt, Artificial Sequence
  Description of Artificial Sequence: Synthetic oligonucleotide
  Sense strand starting at position 885 of SEQ ID NO: 1242937
uaauuagccugcuagagag

SEQ ID NO: 1383331 - RNA, 19 nt, Artificial Sequence
  Description of Artificial Sequence: Synthetic oligonucleotide
  Antisense strand to SEQ ID NO: 1383330
cucucuagcaggcuaauua

SEQ ID NO: 1383332 - RNA, 19 nt, Artificial Sequence
  Description of Artificial Sequence: Synthetic oligonucleotide
  Sense strand starting at position 925 of SEQ ID NO: 1242937
ugucucuggugcugcaaua

SEQ ID NO: 1383333 - RNA, 19 nt, Artificial Sequence
  Description of Artificial Sequence: Synthetic oligonucleotide
  Antisense strand to SEQ ID NO: 1383332
uauugcagcaccagagaca

SEQ ID NO: 1383334 - RNA, 19 nt, Artificial Sequence
  Description of Artificial Sequence: Synthetic oligonucleotide
  Sense strand starting at position 935 of SEQ ID NO: 1242937
gcugcaauauaauugaauc

SEQ ID NO: 1383335 - RNA, 19 nt, Artificial Sequence
  Description of Artificial Sequence: Synthetic oligonucleotide
  Antisense strand to SEQ ID NO: 1383334
gauucaauuauauugcagc

SEQ ID NO: 1383336 - RNA, 19 nt, Artificial Sequence
  Description of Artificial Sequence: Synthetic oligonucleotide
  Sense strand starting at position 1695 of SEQ ID NO: 1242937
cggcucuuaucgccgcuaa

SEQ ID NO: 1383337 - RNA, 19 nt, Artificial Sequence
  Description of Artificial Sequence: Synthetic oligonucleotide
  Antisense strand to SEQ ID NO: 1383336
uuagcggcgauaagagccg

SEQ ID NO: 1383338 - RNA, 19 nt, Artificial Sequence
  Description of Artificial Sequence: Synthetic oligonucleotide
  Sense strand starting at position 1697 of SEQ ID NO: 1242937
gcucuuaucgccgcuaaca

SEQ ID NO: 1383339 - RNA, 19 nt, Artificial Sequence
  Description of Artificial Sequence: Synthetic oligonucleotide
  Antisense strand to SEQ ID NO: 1383338
uguuagcggcgauaagagc

SEQ ID NO: 1383340 - RNA, 19 nt, Artificial Sequence
  Description of Artificial Sequence: Synthetic oligonucleotide
  Sense strand starting at position 2569 of SEQ ID NO: 1242937
gcugaauacuaagaacuug

SEQ ID NO: 1383341 - RNA, 19 nt, Artificial Sequence
  Description of Artificial Sequence: Synthetic oligonucleotide
  Antisense strand to SEQ ID NO: 1383340
caaguucuuaguauucagc

SEQ ID NO: 1383342 - RNA, 19 nt, Artificial Sequence
  Description of Artificial Sequence: Synthetic oligonucleotide
  Sense strand starting at position 2577 of SEQ ID NO: 1242937
cuaagaacuuggccucaaa

SEQ ID NO: 1383343 - RNA, 19 nt, Artificial Sequence
  Description of Artificial Sequence: Synthetic oligonucleotide
  Antisense strand to SEQ ID NO: 1383342
uuugaggccaaguucuuag

SEQ ID NO: 1383344 - RNA, 19 nt, Artificial Sequence
  Description of Artificial Sequence: Synthetic oligonucleotide
  Sense strand starting at position 2884 of SEQ ID NO: 1242937
cagggagcguccugaaauu

SEQ ID NO: 1383345 - RNA, 19 nt, Artificial Sequence
  Description of Artificial Sequence: Synthetic oligonucleotide
  Antisense strand to SEQ ID NO: 1383344
aauuucaggacgcucccug

SEQ ID NO: 1383346 - RNA, 19 nt, Artificial Sequence
  Description of Artificial Sequence: Synthetic oligonucleotide
  Sense strand starting at position 3849 of SEQ ID NO: 1242937
gguaauuuauacccgcacu

SEQ ID NO: 1383347 - RNA, 19 nt, Artificial Sequence
  Description of Artificial Sequence: Synthetic oligonucleotide
  Antisense strand to SEQ ID NO: 1383346
agugcggguauaaauuacc

SEQ ID NO: 1383348 - RNA, 19 nt, Artificial Sequence
  Description of Artificial Sequence: Synthetic oligonucleotide
  Sense strand starting at position 3969 of SEQ ID NO: 1242937
ggaggauagggagguguua

SEQ ID NO: 1383349 - RNA, 19 nt, Artificial Sequence
  Description of Artificial Sequence: Synthetic oligonucleotide
  Antisense strand to SEQ ID NO: 1383348
uaacaccucccuauccucc

SEQ ID NO: 1383350 - RNA, 19 nt, Artificial Sequence
  Description of Artificial Sequence: Synthetic oligonucleotide
  Sense strand starting at position 3977 of SEQ ID NO: 1242937
gggagguguuaggaaggaa

SEQ ID NO: 1383351 - RNA, 19 nt, Artificial Sequence
  Description of Artificial Sequence: Synthetic oligonucleotide
  Antisense strand to SEQ ID NO: 1383350
uuccuuccuaacaccuccc

SEQ ID NO: 1383352 - RNA, 19 nt, Artificial Sequence
  Description of Artificial Sequence: Synthetic oligonucleotide
  Sense strand starting at position 31 of SEQ ID NO: 1242938
ccaguaugcacccggcaaa

SEQ ID NO: 1383353 - RNA, 19 nt, Artificial Sequence
  Description of Artificial Sequence: Synthetic oligonucleotide
  Antisense strand to SEQ ID NO: 1383352
uuugccgggugcauacugg

SEQ ID NO: 1383354 - RNA, 19 nt, Artificial Sequence
  Description of Artificial Sequence: Synthetic oligonucleotide
  Sense strand starting at position 42 of SEQ ID NO: 1242938
ccggcaaauguuuauugaa

SEQ ID NO: 1383355 - RNA, 19 nt, Artificial Sequence
  Description of Artificial Sequence: Synthetic oligonucleotide
  Antisense strand to SEQ ID NO: 1383354
uucaauaaacauuugccgg

SEQ ID NO: 1383356 - RNA, 19 nt, Artificial Sequence
  Description of Artificial Sequence: Synthetic oligonucleotide
  Sense strand starting at position 44 of SEQ ID NO: 1242938
ggcaaauguuuauugaaga

SEQ ID NO: 1383357 - RNA, 19 nt, Artificial Sequence
  Description of Artificial Sequence: Synthetic oligonucleotide
  Antisense strand to SEQ ID NO: 1383356
ucuucaauaaacauuugcc

SEQ ID NO: 1383358 - RNA, 19 nt, Artificial Sequence
  Description of Artificial Sequence: Synthetic oligonucleotide
  Sense strand starting at position 65 of SEQ ID NO: 1242938
uacuaugcgcuagacauua

SEQ ID NO: 1383359 - RNA, 19 nt, Artificial Sequence
  Description of Artificial Sequence: Synthetic oligonucleotide
  Antisense strand to SEQ ID NO: 1383358
uaaugucuagcgcauagua

SEQ ID NO: 1383360 - RNA, 19 nt, Artificial Sequence
  Description of Artificial Sequence: Synthetic oligonucleotide
  Sense strand starting at position 153 of SEQ ID NO: 1242938
acuauaagcuagugaccaa

SEQ ID NO: 1383361 - RNA, 19 nt, Artificial Sequence
  Description of Artificial Sequence: Synthetic oligonucleotide
  Antisense strand to SEQ ID NO: 1383360
uuggucacuagcuuauagu

SEQ ID NO: 1383362 - RNA, 19 nt, Artificial Sequence
  Description of Artificial Sequence: Synthetic oligonucleotide
  Sense strand starting at position 276 of SEQ ID NO: 1242938
gguugucccuccucaguau

SEQ ID NO: 1383363 - RNA, 19 nt, Artificial Sequence
  Description of Artificial Sequence: Synthetic oligonucleotide
  Antisense strand to SEQ ID NO: 1383362
auacugaggagggacaacc

SEQ ID NO: 1383364 - RNA, 19 nt, Artificial Sequence
  Description of Artificial Sequence: Synthetic oligonucleotide
  Sense strand starting at position 288 of SEQ ID NO: 1242938
ucaguauccugacauggaa

SEQ ID NO: 1383365 - RNA, 19 nt, Artificial Sequence
  Description of Artificial Sequence: Synthetic oligonucleotide
  Antisense strand to SEQ ID NO: 1383364
uuccaugucaggauacuga

SEQ ID NO: 1383366 - RNA, 19 nt, Artificial Sequence
  Description of Artificial Sequence: Synthetic oligonucleotide
  Sense strand starting at position 312 of SEQ ID NO: 1242938
gugggagagucccagugaa

SEQ ID NO: 1383367 - RNA, 19 nt, Artificial Sequence
  Description of Artificial Sequence: Synthetic oligonucleotide
  Antisense strand to SEQ ID NO: 1383366
uucacugggacucucccac

SEQ ID NO: 1383368 - RNA, 19 nt, Artificial Sequence
  Description of Artificial Sequence: Synthetic oligonucleotide
  Sense strand starting at position 465 of SEQ ID NO: 1242938
cuggcuuauuuagggcaaa

SEQ ID NO: 1383369 - RNA, 19 nt, Artificial Sequence
  Description of Artificial Sequence: Synthetic oligonucleotide
  Antisense strand to SEQ ID NO: 1383368
uuugcccuaaauaagccag

SEQ ID NO: 1383370 - RNA, 19 nt, Artificial Sequence
  Description of Artificial Sequence: Synthetic oligonucleotide
  Sense strand starting at position 488 of SEQ ID NO: 1242938
ggguggaggucugcuguaa

SEQ ID NO: 1383371 - RNA, 19 nt, Artificial Sequence
  Description of Artificial Sequence: Synthetic oligonucleotide
  Antisense strand to SEQ ID NO: 1383370
uuacagcagaccuccaccc

SEQ ID NO: 1383372 - RNA, 19 nt, Artificial Sequence
  Description of Artificial Sequence: Synthetic oligonucleotide
  Sense strand starting at position 492 of SEQ ID NO: 1242938
ggaggucugcuguaaccca

SEQ ID NO: 1383373 - RNA, 19 nt, Artificial Sequence
  Description of Artificial Sequence: Synthetic oligonucleotide
  Antisense strand to SEQ ID NO: 1383372
uggguuacagcagaccucc

SEQ ID NO: 1383374 - RNA, 19 nt, Artificial Sequence
  Description of Artificial Sequence: Synthetic oligonucleotide
  Sense strand starting at position 1218 of SEQ ID NO: 1242938
agaugaguucaggagcgga

SEQ ID NO: 1383375 - RNA, 19 nt, Artificial Sequence
  Description of Artificial Sequence: Synthetic oligonucleotide
  Antisense strand to SEQ ID NO: 1383374
uccgcuccugaacucaucu

SEQ ID NO: 1383376 - RNA, 19 nt, Artificial Sequence
  Description of Artificial Sequence: Synthetic oligonucleotide
  Sense strand starting at position 1597 of SEQ ID NO: 1242938
accagaugccgguguggaa

SEQ ID NO: 1383377 - RNA, 19 nt, Artificial Sequence
  Description of Artificial Sequence: Synthetic oligonucleotide
  Antisense strand to SEQ ID NO: 1383376
uuccacaccggcaucuggu

SEQ ID NO: 1383378 - RNA, 19 nt, Artificial Sequence
  Description of Artificial Sequence: Synthetic oligonucleotide
  Sense strand starting at position 1609 of SEQ ID NO: 1242938
uguggaaauuccugaagag

SEQ ID NO: 1383379 - RNA, 19 nt, Artificial Sequence
  Description of Artificial Sequence: Synthetic oligonucleotide
  Antisense strand to SEQ ID NO: 1383378
cucuucaggaauuuccaca

SEQ ID NO: 1383380 - RNA, 19 nt, Artificial Sequence
  Description of Artificial Sequence: Synthetic oligonucleotide
  Sense strand starting at position 3011 of SEQ ID NO: 1242938
acaugcacaccaugugaau

SEQ ID NO: 1383381 - RNA, 19 nt, Artificial Sequence
  Description of Artificial Sequence: Synthetic oligonucleotide
  Antisense strand to SEQ ID NO: 1383380
auucacauggugugcaugu

SEQ ID NO: 1383382 - RNA, 19 nt, Artificial Sequence
  Description of Artificial Sequence: Synthetic oligonucleotide
  Sense strand starting at position 3022 of SEQ ID NO: 1242938
augugaauguggguagaau

SEQ ID NO: 1383383 - RNA, 19 nt, Artificial Sequence
  Description of Artificial Sequence: Synthetic oligonucleotide
  Antisense strand to SEQ ID NO: 1383382
auucuacccacauucacau

SEQ ID NO: 1383384 - RNA, 19 nt, Artificial Sequence
  Description of Artificial Sequence: Synthetic oligonucleotide
  Sense strand starting at position 3023 of SEQ ID NO: 1242938
ugugaauguggguagaauc

SEQ ID NO: 1383385 - RNA, 19 nt, Artificial Sequence
  Description of Artificial Sequence: Synthetic oligonucleotide
  Antisense strand to SEQ ID NO: 1383384
gauucuacccacauucaca

SEQ ID NO: 1383386 - RNA, 19 nt, Artificial Sequence
  Description of Artificial Sequence: Synthetic oligonucleotide
  Sense strand starting at position 3067 of SEQ ID NO: 1242938
ggccaaacauacugacuuu

SEQ ID NO: 1383387 - RNA, 19 nt, Artificial Sequence
  Description of Artificial Sequence: Synthetic oligonucleotide
  Antisense strand to SEQ ID NO: 1383386
aaagucaguauguuuggcc

SEQ ID NO: 1383388 - RNA, 19 nt, Artificial Sequence
  Description of Artificial Sequence: Synthetic oligonucleotide
  Sense strand starting at position 3076 of SEQ ID NO: 1242938
uacugacuuugggaucaag

SEQ ID NO: 1383389 - RNA, 19 nt, Artificial Sequence
  Description of Artificial Sequence: Synthetic oligonucleotide
  Antisense strand to SEQ ID NO: 1383388
cuugaucccaaagucagua

SEQ ID NO: 1383390 - RNA, 19 nt, Artificial Sequence
  Description of Artificial Sequence: Synthetic oligonucleotide
  Sense strand starting at position 3210 of SEQ ID NO: 1242938
gugggcugcuguaaugaga

SEQ ID NO: 1383391 - RNA, 19 nt, Artificial Sequence
  Description of Artificial Sequence: Synthetic oligonucleotide
  Antisense strand to SEQ ID NO: 1383390
ucucauuacagcagcccac

SEQ ID NO: 1383392 - RNA, 19 nt, Artificial Sequence
  Description of Artificial Sequence: Synthetic oligonucleotide
  Sense strand starting at position 3213 of SEQ ID NO: 1242938
ggcugcuguaaugagauca

SEQ ID NO: 1383393 - RNA, 19 nt, Artificial Sequence
  Description of Artificial Sequence: Synthetic oligonucleotide
  Antisense strand to SEQ ID NO: 1383392
ugaucucauuacagcagcc

SEQ ID NO: 1383394 - RNA, 19 nt, Artificial Sequence
  Description of Artificial Sequence: Synthetic oligonucleotide
  Sense strand starting at position 3221 of SEQ ID NO: 1242938
uaaugagaucauggcugca

SEQ ID NO: 1383395 - RNA, 19 nt, Artificial Sequence
  Description of Artificial Sequence: Synthetic oligonucleotide
  Antisense strand to SEQ ID NO: 1383394
ugcagccaugaucucauua

SEQ ID NO: 1383396 - RNA, 19 nt, Artificial Sequence
  Description of Artificial Sequence: Synthetic oligonucleotide
  Sense strand starting at position 3223 of SEQ ID NO: 1242938
augagaucauggcugcaaa

SEQ ID NO: 1383397 - RNA, 19 nt, Artificial Sequence
  Description of Artificial Sequence: Synthetic oligonucleotide
  Antisense strand to SEQ ID NO: 1383396
uuugcagccaugaucucau

SEQ ID NO: 1383398 - RNA, 19 nt, Artificial Sequence
  Description of Artificial Sequence: Synthetic oligonucleotide
  Sense strand starting at position 3375 of SEQ ID NO: 1242938
ccaccucugcucuaagaug

SEQ ID NO: 1383399 - RNA, 19 nt, Artificial Sequence
  Description of Artificial Sequence: Synthetic oligonucleotide
  Antisense strand to SEQ ID NO: 1383398
caucuuagagcagaggugg

SEQ ID NO: 1383400 - RNA, 19 nt, Artificial Sequence
  Description of Artificial Sequence: Synthetic oligonucleotide
  Sense strand starting at position 3465 of SEQ ID NO: 1242938
auugcauguugauuauaag

SEQ ID NO: 1383401 - RNA, 19 nt, Artificial Sequence
  Description of Artificial Sequence: Synthetic oligonucleotide
  Antisense strand to SEQ ID NO: 1383400
cuuauaaucaacaugcaau

SEQ ID NO: 1383402 - RNA, 19 nt, Artificial Sequence
  Description of Artificial Sequence: Synthetic oligonucleotide
  Sense strand starting at position 3466 of SEQ ID NO: 1242938
uugcauguugauuauaaga

SEQ ID NO: 1383403 - RNA, 19 nt, Artificial Sequence
  Description of Artificial Sequence: Synthetic oligonucleotide
  Antisense strand to SEQ ID NO: 1383402
ucuuauaaucaacaugcaa

SEQ ID NO: 1383404 - RNA, 19 nt, Artificial Sequence
  Description of Artificial Sequence: Synthetic oligonucleotide
  Sense strand starting at position 3471 of SEQ ID NO: 1242938
uguugauuauaagagcuca

SEQ ID NO: 1383405 - RNA, 19 nt, Artificial Sequence
  Description of Artificial Sequence: Synthetic oligonucleotide
  Antisense strand to SEQ ID NO: 1383404
ugagcucuuauaaucaaca

SEQ ID NO: 1383406 - RNA, 19 nt, Artificial Sequence
  Description of Artificial Sequence: Synthetic oligonucleotide
  Sense strand starting at position 3490 of SEQ ID NO: 1242938
uuugaauucugcccaagcu

SEQ ID NO: 1383407 - RNA, 19 nt, Artificial Sequence
  Description of Artificial Sequence: Synthetic oligonucleotide
  Antisense strand to SEQ ID NO: 1383406
agcuugggcagaauucaaa

SEQ ID NO: 1383408 - RNA, 19 nt, Artificial Sequence
  Description of Artificial Sequence: Synthetic oligonucleotide
  Sense strand starting at position 3508 of SEQ ID NO: 1242938
ugagaacugcuccgacaac

SEQ ID NO: 1383409 - RNA, 19 nt, Artificial Sequence
  Description of Artificial Sequence: Synthetic oligonucleotide
  Antisense strand to SEQ ID NO: 1383408
guugucggagcaguucuca

SEQ ID NO: 1383410 - RNA, 19 nt, Artificial Sequence
  Description of Artificial Sequence: Synthetic oligonucleotide
  Sense strand starting at position 3583 of SEQ ID NO: 1242938
gccuuacuccuguggguga

SEQ ID NO: 1383411 - RNA, 19 nt, Artificial Sequence
  Description of Artificial Sequence: Synthetic oligonucleotide
  Antisense strand to SEQ ID NO: 1383410
ucacccacaggaguaaggc

SEQ ID NO: 1383412 - RNA, 19 nt, Artificial Sequence
  Description of Artificial Sequence: Synthetic oligonucleotide
  Sense strand starting at position 3664 of SEQ ID NO: 1242938
ggcaacgucccugguaaga

SEQ ID NO: 1383413 - RNA, 19 nt, Artificial Sequence
  Description of Artificial Sequence: Synthetic oligonucleotide
  Antisense strand to SEQ ID NO: 1383412
ucuuaccagggacguugcc

SEQ ID NO: 1383414 - RNA, 19 nt, Artificial Sequence
  Description of Artificial Sequence: Synthetic oligonucleotide
  Sense strand starting at position 3745 of SEQ ID NO: 1242938
gcaagagauucucaacuau

SEQ ID NO: 1383415 - RNA, 19 nt, Artificial Sequence
  Description of Artificial Sequence: Synthetic oligonucleotide
  Antisense strand to SEQ ID NO: 1383414
auaguugagaaucucuugc

SEQ ID NO: 1383416 - RNA, 19 nt, Artificial Sequence
  Description of Artificial Sequence: Synthetic oligonucleotide
  Sense strand starting at position 3772 of SEQ ID NO: 1242938
agaggaccuccaugugaua

SEQ ID NO: 1383417 - RNA, 19 nt, Artificial Sequence
  Description of Artificial Sequence: Synthetic oligonucleotide
  Antisense strand to SEQ ID NO: 1383416
uaucacauggagguccucu

SEQ ID NO: 1383418 - RNA, 19 nt, Artificial Sequence
  Description of Artificial Sequence: Synthetic oligonucleotide
  Sense strand starting at position 3775 of SEQ ID NO: 1242938
ggaccuccaugugauaaug

SEQ ID NO: 1383419 - RNA, 19 nt, Artificial Sequence
  Description of Artificial Sequence: Synthetic oligonucleotide
  Antisense strand to SEQ ID NO: 1383418
cauuaucacauggaggucc

SEQ ID NO: 1383420 - RNA, 19 nt, Artificial Sequence
  Description of Artificial Sequence: Synthetic oligonucleotide
  Sense strand starting at position 3790 of SEQ ID NO: 1242938
aaugguggcauugagagua

SEQ ID NO: 1383421 - RNA, 19 nt, Artificial Sequence
  Description of Artificial Sequence: Synthetic oligonucleotide
  Antisense strand to SEQ ID NO: 1383420
uacucucaaugccaccauu

SEQ ID NO: 1383422 - RNA, 19 nt, Artificial Sequence
  Description of Artificial Sequence: Synthetic oligonucleotide
  Sense strand starting at position 3795 of SEQ ID NO: 1242938
uggcauugagaguauuggu

SEQ ID NO: 1383423 - RNA, 19 nt, Artificial Sequence
  Description of Artificial Sequence: Synthetic oligonucleotide
  Antisense strand to SEQ ID NO: 1383422
accaauacucucaaugcca

SEQ ID NO: 1383424 - RNA, 19 nt, Artificial Sequence
  Description of Artificial Sequence: Synthetic oligonucleotide
  Sense strand starting at position 3798 of SEQ ID NO: 1242938
cauugagaguauugguuga

SEQ ID NO: 1383425 - RNA, 19 nt, Artificial Sequence
  Description of Artificial Sequence: Synthetic oligonucleotide
  Antisense strand to SEQ ID NO: 1383424
ucaaccaauacucucaaug

SEQ ID NO: 1383426 - RNA, 19 nt, Artificial Sequence
  Description of Artificial Sequence: Synthetic oligonucleotide
  Sense strand starting at position 3800 of SEQ ID NO: 1242938
uugagaguauugguugaca

SEQ ID NO: 1383427 - RNA, 19 nt, Artificial Sequence
  Description of Artificial Sequence: Synthetic oligonucleotide
  Antisense strand to SEQ ID NO: 1383426
ugucaaccaauacucucaa

SEQ ID NO: 1383428 - RNA, 19 nt, Artificial Sequence
  Description of Artificial Sequence: Synthetic oligonucleotide
  Sense strand starting at position 3802 of SEQ ID NO: 1242938
gagaguauugguugacaga

SEQ ID NO: 1383429 - RNA, 19 nt, Artificial Sequence
  Description of Artificial Sequence: Synthetic oligonucleotide
  Antisense strand to SEQ ID NO: 1383428
ucugucaaccaauacucuc

SEQ ID NO: 1383430 - RNA, 19 nt, Artificial Sequence
  Description of Artificial Sequence: Synthetic oligonucleotide
  Sense strand starting at position 3805 of SEQ ID NO: 1242938
aguauugguugacagagaa

SEQ ID NO: 1383431 - RNA, 19 nt, Artificial Sequence
  Description of Artificial Sequence: Synthetic oligonucleotide
  Antisense strand to SEQ ID NO: 1383430
uucucugucaaccaauacu

SEQ ID NO: 1383432 - RNA, 19 nt, Artificial Sequence
  Description of Artificial Sequence: Synthetic oligonucleotide
  Sense strand starting at position 325 of SEQ ID NO: 1242939
caguguuguggugauguga

SEQ ID NO: 1383433 - RNA, 19 nt, Artificial Sequence
  Description of Artificial Sequence: Synthetic oligonucleotide
  Antisense strand to SEQ ID NO: 1383432
ucacaucaccacaacacug

SEQ ID NO: 1383434 - RNA, 19 nt, Artificial Sequence
  Description of Artificial Sequence: Synthetic oligonucleotide
  Sense strand starting at position 341 of SEQ ID NO: 1242939
ugaggauucgguugcacag

SEQ ID NO: 1383435 - RNA, 19 nt, Artificial Sequence
  Description of Artificial Sequence: Synthetic oligonucleotide
  Antisense strand to SEQ ID NO: 1383434
cugugcaaccgaauccuca

SEQ ID NO: 1383436 - RNA, 19 nt, Artificial Sequence
  Description of Artificial Sequence: Synthetic oligonucleotide
  Sense strand starting at position 386 of SEQ ID NO: 1242939
auaguaagagcucaaguca

SEQ ID NO: 1383437 - RNA, 19 nt, Artificial Sequence
  Description of Artificial Sequence: Synthetic oligonucleotide
  Antisense strand to SEQ ID NO: 1383436
ugacuugagcucuuacuau

SEQ ID NO: 1383438 - RNA, 19 nt, Artificial Sequence
  Description of Artificial Sequence: Synthetic oligonucleotide
  Sense strand starting at position 397 of SEQ ID NO: 1242939
ucaagucauuuguacuauu

SEQ ID NO: 1383439 - RNA, 19 nt, Artificial Sequence
  Description of Artificial Sequence: Synthetic oligonucleotide
  Antisense strand to SEQ ID NO: 1383438
aauaguacaaaugacuuga

SEQ ID NO: 1383440 - RNA, 19 nt, Artificial Sequence
  Description of Artificial Sequence: Synthetic oligonucleotide
  Sense strand starting at position 400 of SEQ ID NO: 1242939
agucauuuguacuauuaca

SEQ ID NO: 1383441 - RNA, 19 nt, Artificial Sequence
  Description of Artificial Sequence: Synthetic oligonucleotide
  Antisense strand to SEQ ID NO: 1383440
uguaauaguacaaaugacu

SEQ ID NO: 1383442 - RNA, 19 nt, Artificial Sequence
  Description of Artificial Sequence: Synthetic oligonucleotide
  Sense strand starting at position 487 of SEQ ID NO: 1242939
cgaggucaaggcuagagau

SEQ ID NO: 1383443 - RNA, 19 nt, Artificial Sequence
  Description of Artificial Sequence: Synthetic oligonucleotide
  Antisense strand to SEQ ID NO: 1383442
aucucuagccuugaccucg

SEQ ID NO: 1383444 - RNA, 19 nt, Artificial Sequence
  Description of Artificial Sequence: Synthetic oligonucleotide
  Sense strand starting at position 521 of SEQ ID NO: 1242939
aaaugaaauugugagggua

SEQ ID NO: 1383445 - RNA, 19 nt, Artificial Sequence
  Description of Artificial Sequence: Synthetic oligonucleotide
  Antisense strand to SEQ ID NO: 1383444
uacccucacaauuucauuu

SEQ ID NO: 1383446 - RNA, 19 nt, Artificial Sequence
  Description of Artificial Sequence: Synthetic oligonucleotide
  Sense strand starting at position 524 of SEQ ID NO: 1242939
ugaaauugugaggguacau

SEQ ID NO: 1383447 - RNA, 19 nt, Artificial Sequence
  Description of Artificial Sequence: Synthetic oligonucleotide
  Antisense strand to SEQ ID NO: 1383446
auguacccucacaauuuca

SEQ ID NO: 1383448 - RNA, 19 nt, Artificial Sequence
  Description of Artificial Sequence: Synthetic oligonucleotide
  Sense strand starting at position 539 of SEQ ID NO: 1242939
acauaugauuucugaaaga

SEQ ID NO: 1383449 - RNA, 19 nt, Artificial Sequence
  Description of Artificial Sequence: Synthetic oligonucleotide
  Antisense strand to SEQ ID NO: 1383448
ucuuucagaaaucauaugu

SEQ ID NO: 1383450 - RNA, 19 nt, Artificial Sequence
  Description of Artificial Sequence: Synthetic oligonucleotide
  Sense strand starting at position 1109 of SEQ ID NO: 1242939
cuauuucuaccacguuuga

SEQ ID NO: 1383451 - RNA, 19 nt, Artificial Sequence
  Description of Artificial Sequence: Synthetic oligonucleotide
  Antisense strand to SEQ ID NO: 1383450
ucaaacgugguagaaauag

SEQ ID NO: 1383452 - RNA, 19 nt, Artificial Sequence
  Description of Artificial Sequence: Synthetic oligonucleotide
  Sense strand starting at position 1122 of SEQ ID NO: 1242939
guuugaggcuagaaggaug

SEQ ID NO: 1383453 - RNA, 19 nt, Artificial Sequence
  Description of Artificial Sequence: Synthetic oligonucleotide
  Antisense strand to SEQ ID NO: 1383452
cauccuucuagccucaaac

SEQ ID NO: 1383454 - RNA, 19 nt, Artificial Sequence
  Description of Artificial Sequence: Synthetic oligonucleotide
  Sense strand starting at position 1226 of SEQ ID NO: 1242939
gaggaagauugcguccuga

SEQ ID NO: 1383455 - RNA, 19 nt, Artificial Sequence
  Description of Artificial Sequence: Synthetic oligonucleotide
  Antisense strand to SEQ ID NO: 1383454
ucaggacgcaaucuuccuc

SEQ ID NO: 1383456 - RNA, 19 nt, Artificial Sequence
  Description of Artificial Sequence: Synthetic oligonucleotide
  Sense strand starting at position 1523 of SEQ ID NO: 1242939
ccacuugcucccugaugaa

SEQ ID NO: 1383457 - RNA, 19 nt, Artificial Sequence
  Description of Artificial Sequence: Synthetic oligonucleotide
  Antisense strand to SEQ ID NO: 1383456
uucaucagggagcaagugg

SEQ ID NO: 1383458 - RNA, 19 nt, Artificial Sequence
  Description of Artificial Sequence: Synthetic oligonucleotide
  Sense strand starting at position 1673 of SEQ ID NO: 1242939
aucacaucuccugggcaau

SEQ ID NO: 1383459 - RNA, 19 nt, Artificial Sequence
  Description of Artificial Sequence: Synthetic oligonucleotide
  Antisense strand to SEQ ID NO: 1383458
auugcccaggagaugugau

SEQ ID NO: 1383460 - RNA, 19 nt, Artificial Sequence
  Description of Artificial Sequence: Synthetic oligonucleotide
  Sense strand starting at position 1683 of SEQ ID NO: 1242939
cugggcaauuccuuggauu

SEQ ID NO: 1383461 - RNA, 19 nt, Artificial Sequence
  Description of Artificial Sequence: Synthetic oligonucleotide
  Antisense strand to SEQ ID NO: 1383460
aauccaaggaauugcccag

SEQ ID NO: 1383462 - RNA, 19 nt, Artificial Sequence
  Description of Artificial Sequence: Synthetic oligonucleotide
  Sense strand starting at position 1684 of SEQ ID NO: 1242939
ugggcaauuccuuggauug

SEQ ID NO: 1383463 - RNA, 19 nt, Artificial Sequence
  Description of Artificial Sequence: Synthetic oligonucleotide
  Antisense strand to SEQ ID NO: 1383462
caauccaaggaauugccca

SEQ ID NO: 1383464 - RNA, 19 nt, Artificial Sequence
  Description of Artificial Sequence: Synthetic oligonucleotide
  Sense strand starting at position 1685 of SEQ ID NO: 1242939
gggcaauuccuuggauugu

SEQ ID NO: 1383465 - RNA, 19 nt, Artificial Sequence
  Description of Artificial Sequence: Synthetic oligonucleotide
  Antisense strand to SEQ ID NO: 1383464
acaauccaaggaauugccc

SEQ ID NO: 1383466 - RNA, 19 nt, Artificial Sequence
  Description of Artificial Sequence: Synthetic oligonucleotide
  Sense strand starting at position 1893 of SEQ ID NO: 1242939
cagucuuuaccucggagau

SEQ ID NO: 1383467 - RNA, 19 nt, Artificial Sequence
  Description of Artificial Sequence: Synthetic oligonucleotide
  Antisense strand to SEQ ID NO: 1383466
aucuccgagguaaagacug

SEQ ID NO: 1383468 - RNA, 19 nt, Artificial Sequence
  Description of Artificial Sequence: Synthetic oligonucleotide
  Sense strand starting at position 1894 of SEQ ID NO: 1242939
agucuuuaccucggagaug

SEQ ID NO: 1383469 - RNA, 19 nt, Artificial Sequence
  Description of Artificial Sequence: Synthetic oligonucleotide
  Antisense strand to SEQ ID NO: 1383468
caucuccgagguaaagacu

SEQ ID NO: 1383470 - RNA, 19 nt, Artificial Sequence
  Description of Artificial Sequence: Synthetic oligonucleotide
  Sense strand starting at position 2756 of SEQ ID NO: 1242939
cuggcuugugcuuagauag

SEQ ID NO: 1383471 - RNA, 19 nt, Artificial Sequence
  Description of Artificial Sequence: Synthetic oligonucleotide
  Antisense strand to SEQ ID NO: 1383470
cuaucuaagcacaagccag

SEQ ID NO: 1383472 - RNA, 19 nt, Artificial Sequence
  Description of Artificial Sequence: Synthetic oligonucleotide
  Sense strand starting at position 2762 of SEQ ID NO: 1242939
ugugcuuagauagauauag

SEQ ID NO: 1383473 - RNA, 19 nt, Artificial Sequence
  Description of Artificial Sequence: Synthetic oligonucleotide
  Antisense strand to SEQ ID NO: 1383472
cuauaucuaucuaagcaca

SEQ ID NO: 1383474 - RNA, 19 nt, Artificial Sequence
  Description of Artificial Sequence: Synthetic oligonucleotide
  Sense strand starting at position 2852 of SEQ ID NO: 1242939
ggaucuugcucuuugucca

SEQ ID NO: 1383475 - RNA, 19 nt, Artificial Sequence
  Description of Artificial Sequence: Synthetic oligonucleotide
  Antisense strand to SEQ ID NO: 1383474
uggacaaagagcaagaucc

SEQ ID NO: 1383476 - RNA, 19 nt, Artificial Sequence
  Description of Artificial Sequence: Synthetic oligonucleotide
  Sense strand starting at position 3136 of SEQ ID NO: 1242939
ccagcuagauugcuagauu

SEQ ID NO: 1383477 - RNA, 19 nt, Artificial Sequence
  Description of Artificial Sequence: Synthetic oligonucleotide
  Antisense strand to SEQ ID NO: 1383476
aaucuagcaaucuagcugg

SEQ ID NO: 1383478 - RNA, 19 nt, Artificial Sequence
  Description of Artificial Sequence: Synthetic oligonucleotide
  Sense strand starting at position 3137 of SEQ ID NO: 1242939
cagcuagauugcuagauuu

SEQ ID NO: 1383479 - RNA, 19 nt, Artificial Sequence
  Description of Artificial Sequence: Synthetic oligonucleotide
  Antisense strand to SEQ ID NO: 1383478
aaaucuagcaaucuagcug

SEQ ID NO: 1383480 - RNA, 19 nt, Artificial Sequence
  Description of Artificial Sequence: Synthetic oligonucleotide
  Sense strand starting at position 3182 of SEQ ID NO: 1242939
ggagcauccgucugagagu

SEQ ID NO: 1383481 - RNA, 19 nt, Artificial Sequence
  Description of Artificial Sequence: Synthetic oligonucleotide
  Antisense strand to SEQ ID NO: 1383480
acucucagacggaugcucc

SEQ ID NO: 1383482 - RNA, 19 nt, Artificial Sequence
  Description of Artificial Sequence: Synthetic oligonucleotide
  Sense strand starting at position 3237 of SEQ ID NO: 1242939
acgauuguucuugucguua

SEQ ID NO: 1383483 - RNA, 19 nt, Artificial Sequence
  Description of Artificial Sequence: Synthetic oligonucleotide
  Antisense strand to SEQ ID NO: 1383482
uaacgacaagaacaaucgu

SEQ ID NO: 1383484 - RNA, 19 nt, Artificial Sequence
  Description of Artificial Sequence: Synthetic oligonucleotide
  Sense strand starting at position 3242 of SEQ ID NO: 1242939
uguucuugucguuauaauu

SEQ ID NO: 1383485 - RNA, 19 nt, Artificial Sequence
  Description of Artificial Sequence: Synthetic oligonucleotide
  Antisense strand to SEQ ID NO: 1383484
aauuauaacgacaagaaca

SEQ ID NO: 1383486 - RNA, 19 nt, Artificial Sequence
  Description of Artificial Sequence: Synthetic oligonucleotide
  Sense strand starting at position 3248 of SEQ ID NO: 1242939
ugucguuauaauugucaca

SEQ ID NO: 1383487 - RNA, 19 nt, Artificial Sequence
  Description of Artificial Sequence: Synthetic oligonucleotide
  Antisense strand to SEQ ID NO: 1383486
ugugacaauuauaacgaca

SEQ ID NO: 1383488 - RNA, 19 nt, Artificial Sequence
  Description of Artificial Sequence: Synthetic oligonucleotide
  Sense strand starting at position 3250 of SEQ ID NO: 1242939
ucguuauaauugucacaau

SEQ ID NO: 1383489 - RNA, 19 nt, Artificial Sequence
  Description of Artificial Sequence: Synthetic oligonucleotide
  Antisense strand to SEQ ID NO: 1383488
auugugacaauuauaacga

SEQ ID NO: 1383490 - RNA, 19 nt, Artificial Sequence
  Description of Artificial Sequence: Synthetic oligonucleotide
  Sense strand starting at position 3281 of SEQ ID NO: 1242939
uuaugaggucuuuauuaug

SEQ ID NO: 1383491 - RNA, 19 nt, Artificial Sequence
  Description of Artificial Sequence: Synthetic oligonucleotide
  Antisense strand to SEQ ID NO: 1383490
cauaauaaagaccucauaa

SEQ ID NO: 1383492 - RNA, 19 nt, Artificial Sequence
  Description of Artificial Sequence: Synthetic oligonucleotide
  Sense strand starting at position 3289 of SEQ ID NO: 1242939
ucuuuauuaugagccaagu

SEQ ID NO: 1383493 - RNA, 19 nt, Artificial Sequence
  Description of Artificial Sequence: Synthetic oligonucleotide
  Antisense strand to SEQ ID NO: 1383492
acuuggcucauaauaaaga

SEQ ID NO: 1383494 - RNA, 19 nt, Artificial Sequence
  Description of Artificial Sequence: Synthetic oligonucleotide
  Sense strand starting at position 3356 of SEQ ID NO: 1242939
uagaguuucugucuuugga

SEQ ID NO: 1383495 - RNA, 19 nt, Artificial Sequence
  Description of Artificial Sequence: Synthetic oligonucleotide
  Antisense strand to SEQ ID NO: 1383494
uccaaagacagaaacucua

SEQ ID NO: 1383496 - RNA, 19 nt, Artificial Sequence
  Description of Artificial Sequence: Synthetic oligonucleotide
  Sense strand starting at position 3359 of SEQ ID NO: 1242939
aguuucugucuuuggagga

SEQ ID NO: 1383497 - RNA, 19 nt, Artificial Sequence
  Description of Artificial Sequence: Synthetic oligonucleotide
  Antisense strand to SEQ ID NO: 1383496
uccuccaaagacagaaacu

SEQ ID NO: 1383498 - RNA, 19 nt, Artificial Sequence
  Description of Artificial Sequence: Synthetic oligonucleotide
  Sense strand starting at position 3372 of SEQ ID NO: 1242939
ggaggauugucuuugggca

SEQ ID NO: 1383499 - RNA, 19 nt, Artificial Sequence
  Description of Artificial Sequence: Synthetic oligonucleotide
  Antisense strand to SEQ ID NO: 1383498
ugcccaaagacaauccucc

SEQ ID NO: 1383500 - RNA, 19 nt, Artificial Sequence
  Description of Artificial Sequence: Synthetic oligonucleotide
  Sense strand starting at position 3373 of SEQ ID NO: 1242939
gaggauugucuuugggcaa

SEQ ID NO: 1383501 - RNA, 19 nt, Artificial Sequence
  Description of Artificial Sequence: Synthetic oligonucleotide
  Antisense strand to SEQ ID NO: 1383500
uugcccaaagacaauccuc

SEQ ID NO: 1383502 - RNA, 19 nt, Artificial Sequence
  Description of Artificial Sequence: Synthetic oligonucleotide
  Sense strand starting at position 3376 of SEQ ID NO: 1242939
gauugucuuugggcaacca

SEQ ID NO: 1383503 - RNA, 19 nt, Artificial Sequence
  Description of Artificial Sequence: Synthetic oligonucleotide
  Antisense strand to SEQ ID NO: 1383502
ugguugcccaaagacaauc

SEQ ID NO: 1383504 - RNA, 19 nt, Artificial Sequence
  Description of Artificial Sequence: Synthetic oligonucleotide
  Sense strand starting at position 3442 of SEQ ID NO: 1242939
ucucuuagccgccaucaau

SEQ ID NO: 1383505 - RNA, 19 nt, Artificial Sequence
  Description of Artificial Sequence: Synthetic oligonucleotide
  Antisense strand to SEQ ID NO: 1383504
auugauggcggcuaagaga

SEQ ID NO: 1383506 - RNA, 19 nt, Artificial Sequence
  Description of Artificial Sequence: Synthetic oligonucleotide
  Sense strand starting at position 3452 of SEQ ID NO: 1242939
gccaucaaugcaugacuga

SEQ ID NO: 1383507 - RNA, 19 nt, Artificial Sequence
  Description of Artificial Sequence: Synthetic oligonucleotide
  Antisense strand to SEQ ID NO: 1383506
ucagucaugcauugauggc

SEQ ID NO: 1383508 - RNA, 19 nt, Artificial Sequence
  Description of Artificial Sequence: Synthetic oligonucleotide
  Sense strand starting at position 3791 of SEQ ID NO: 1242939
ucagcuucugagggauuaa

SEQ ID NO: 1383509 - RNA, 19 nt, Artificial Sequence
  Description of Artificial Sequence: Synthetic oligonucleotide
  Antisense strand to SEQ ID NO: 1383508
uuaaucccucagaagcuga

SEQ ID NO: 1383510 - RNA, 19 nt, Artificial Sequence
  Description of Artificial Sequence: Synthetic oligonucleotide
  Sense strand starting at position 3828 of SEQ ID NO: 1242939
uagguaguggcauagucua

SEQ ID NO: 1383511 - RNA, 19 nt, Artificial Sequence
  Description of Artificial Sequence: Synthetic oligonucleotide
  Antisense strand to SEQ ID NO: 1383510
uagacuaugccacuaccua

SEQ ID NO: 1383512 - RNA, 19 nt, Artificial Sequence
  Description of Artificial Sequence: Synthetic oligonucleotide
  Sense strand starting at position 162 of SEQ ID NO: 1242940
cacuaacguccuggcuaaa

SEQ ID NO: 1383513 - RNA, 19 nt, Artificial Sequence
  Description of Artificial Sequence: Synthetic oligonucleotide
  Antisense strand to SEQ ID NO: 1383512
uuuagccaggacguuagug

SEQ ID NO: 1383514 - RNA, 19 nt, Artificial Sequence
  Description of Artificial Sequence: Synthetic oligonucleotide
  Sense strand starting at position 165 of SEQ ID NO: 1242940
uaacguccuggcuaaauga

SEQ ID NO: 1383515 - RNA, 19 nt, Artificial Sequence
  Description of Artificial Sequence: Synthetic oligonucleotide
  Antisense strand to SEQ ID NO: 1383514
ucauuuagccaggacguua

SEQ ID NO: 1383516 - RNA, 19 nt, Artificial Sequence
  Description of Artificial Sequence: Synthetic oligonucleotide
  Sense strand starting at position 376 of SEQ ID NO: 1242940
cggauauuccuacaacguc

SEQ ID NO: 1383517 - RNA, 19 nt, Artificial Sequence
  Description of Artificial Sequence: Synthetic oligonucleotide
  Antisense strand to SEQ ID NO: 1383516
gacguuguaggaauauccg

SEQ ID NO: 1383518 - RNA, 19 nt, Artificial Sequence
  Description of Artificial Sequence: Synthetic oligonucleotide
  Sense strand starting at position 511 of SEQ ID NO: 1242940
gucagaaagacacgugaga

SEQ ID NO: 1383519 - RNA, 19 nt, Artificial Sequence
  Description of Artificial Sequence: Synthetic oligonucleotide
  Antisense strand to SEQ ID NO: 1383518
ucucacgugucuuucugac

SEQ ID NO: 1383520 - RNA, 19 nt, Artificial Sequence
  Description of Artificial Sequence: Synthetic oligonucleotide
  Sense strand starting at position 541 of SEQ ID NO: 1242940
auaacaaaugcucaagugu

SEQ ID NO: 1383521 - RNA, 19 nt, Artificial Sequence
  Description of Artificial Sequence: Synthetic oligonucleotide
  Antisense strand to SEQ ID NO: 1383520
acacuugagcauuuguuau

SEQ ID NO: 1383522 - RNA, 19 nt, Artificial Sequence
  Description of Artificial Sequence: Synthetic oligonucleotide
  Sense strand starting at position 548 of SEQ ID NO: 1242940
augcucaagugucugaaga

SEQ ID NO: 1383523 - RNA, 19 nt, Artificial Sequence
  Description of Artificial Sequence: Synthetic oligonucleotide
  Antisense strand to SEQ ID NO: 1383522
ucuucagacacuugagcau

SEQ ID NO: 1383524 - RNA, 19 nt, Artificial Sequence
  Description of Artificial Sequence: Synthetic oligonucleotide
  Sense strand starting at position 586 of SEQ ID NO: 1242940
gcacgaacacagugaguua

SEQ ID NO: 1383525 - RNA, 19 nt, Artificial Sequence
  Description of Artificial Sequence: Synthetic oligonucleotide
  Antisense strand to SEQ ID NO: 1383524
uaacucacuguguucgugc

SEQ ID NO: 1383526 - RNA, 19 nt, Artificial Sequence
  Description of Artificial Sequence: Synthetic oligonucleotide
  Sense strand starting at position 651 of SEQ ID NO: 1242940
ucucuaaacgugucgcuga

SEQ ID NO: 1383527 - RNA, 19 nt, Artificial Sequence
  Description of Artificial Sequence: Synthetic oligonucleotide
  Antisense strand to SEQ ID NO: 1383526
ucagcgacacguuuagaga

SEQ ID NO: 1383528 - RNA, 19 nt, Artificial Sequence
  Description of Artificial Sequence: Synthetic oligonucleotide
  Sense strand starting at position 656 of SEQ ID NO: 1242940
aaacgugucgcugacaaag

SEQ ID NO: 1383529 - RNA, 19 nt, Artificial Sequence
  Description of Artificial Sequence: Synthetic oligonucleotide
  Antisense strand to SEQ ID NO: 1383528
cuuugucagcgacacguuu

SEQ ID NO: 1383530 - RNA, 19 nt, Artificial Sequence
  Description of Artificial Sequence: Synthetic oligonucleotide
  Sense strand starting at position 662 of SEQ ID NO: 1242940
gucgcugacaaaggauaaa

SEQ ID NO: 1383531 - RNA, 19 nt, Artificial Sequence
  Description of Artificial Sequence: Synthetic oligonucleotide
  Antisense strand to SEQ ID NO: 1383530
uuuauccuuugucagcgac

SEQ ID NO: 1383532 - RNA, 19 nt, Artificial Sequence
  Description of Artificial Sequence: Synthetic oligonucleotide
  Sense strand starting at position 740 of SEQ ID NO: 1242940
gaggaauccuaacuuugug

SEQ ID NO: 1383533 - RNA, 19 nt, Artificial Sequence
  Description of Artificial Sequence: Synthetic oligonucleotide
  Antisense strand to SEQ ID NO: 1383532
cacaaaguuaggauuccuc

SEQ ID NO: 1383534 - RNA, 19 nt, Artificial Sequence
  Description of Artificial Sequence: Synthetic oligonucleotide
  Sense strand starting at position 770 of SEQ ID NO: 1242940
acuuuagaagcguacacaa

SEQ ID NO: 1383535 - RNA, 19 nt, Artificial Sequence
  Description of Artificial Sequence: Synthetic oligonucleotide
  Antisense strand to SEQ ID NO: 1383534
uuguguacgcuucuaaagu

SEQ ID NO: 1383536 - RNA, 19 nt, Artificial Sequence
  Description of Artificial Sequence: Synthetic oligonucleotide
  Sense strand starting at position 810 of SEQ ID NO: 1242940
ugguauugauagccaaguu

SEQ ID NO: 1383537 - RNA, 19 nt, Artificial Sequence
  Description of Artificial Sequence: Synthetic oligonucleotide
  Antisense strand to SEQ ID NO: 1383536
aacuuggcuaucaauacca

SEQ ID NO: 1383538 - RNA, 19 nt, Artificial Sequence
  Description of Artificial Sequence: Synthetic oligonucleotide
  Sense strand starting at position 811 of SEQ ID NO: 1242940
gguauugauagccaaguuu

SEQ ID NO: 1383539 - RNA, 19 nt, Artificial Sequence
  Description of Artificial Sequence: Synthetic oligonucleotide
  Antisense strand to SEQ ID NO: 1383538
aaacuuggcuaucaauacc

SEQ ID NO: 1383540 - RNA, 19 nt, Artificial Sequence
  Description of Artificial Sequence: Synthetic oligonucleotide
  Sense strand starting at position 824 of SEQ ID NO: 1242940
aaguuucugcccgaucaca

SEQ ID NO: 1383541 - RNA, 19 nt, Artificial Sequence
  Description of Artificial Sequence: Synthetic oligonucleotide
  Antisense strand to SEQ ID NO: 1383540
ugugaucgggcagaaacuu

SEQ ID NO: 1383542 - RNA, 19 nt, Artificial Sequence
  Description of Artificial Sequence: Synthetic oligonucleotide
  Sense strand starting at position 1866 of SEQ ID NO: 1242940
gggagcuagcgacaaagau

SEQ ID NO: 1383543 - RNA, 19 nt, Artificial Sequence
  Description of Artificial Sequence: Synthetic oligonucleotide
  Antisense strand to SEQ ID NO: 1383542
aucuuugucgcuagcuccc

SEQ ID NO: 1383544 - RNA, 19 nt, Artificial Sequence
  Description of Artificial Sequence: Synthetic oligonucleotide
  Sense strand starting at position 2352 of SEQ ID NO: 1242940
gccgaagaccgagaguauu

SEQ ID NO: 1383545 - RNA, 19 nt, Artificial Sequence
  Description of Artificial Sequence: Synthetic oligonucleotide
  Antisense strand to SEQ ID NO: 1383544
aauacucucggucuucggc

SEQ ID NO: 1383546 - RNA, 19 nt, Artificial Sequence
  Description of Artificial Sequence: Synthetic oligonucleotide
  Sense strand starting at position 2502 of SEQ ID NO: 1242940
cugcguucucugccucaca

SEQ ID NO: 1383547 - RNA, 19 nt, Artificial Sequence
  Description of Artificial Sequence: Synthetic oligonucleotide
  Antisense strand to SEQ ID NO: 1383546
ugugaggcagagaacgcag

SEQ ID NO: 1383548 - RNA, 19 nt, Artificial Sequence
  Description of Artificial Sequence: Synthetic oligonucleotide
  Sense strand starting at position 2504 of SEQ ID NO: 1242940
gcguucucugccucacagu

SEQ ID NO: 1383549 - RNA, 19 nt, Artificial Sequence
  Description of Artificial Sequence: Synthetic oligonucleotide
  Antisense strand to SEQ ID NO: 1383548
acugugaggcagagaacgc

SEQ ID NO: 1383550 - RNA, 19 nt, Artificial Sequence
  Description of Artificial Sequence: Synthetic oligonucleotide
  Sense strand starting at position 2679 of SEQ ID NO: 1242940
ugcaguguggcucauaaag

SEQ ID NO: 1383551 - RNA, 19 nt, Artificial Sequence
  Description of Artificial Sequence: Synthetic oligonucleotide
  Antisense strand to SEQ ID NO: 1383550
cuuuaugagccacacugca

SEQ ID NO: 1383552 - RNA, 19 nt, Artificial Sequence
  Description of Artificial Sequence: Synthetic oligonucleotide
  Sense strand starting at position 2721 of SEQ ID NO: 1242940
ggcagaagggauuguuaac

SEQ ID NO: 1383553 - RNA, 19 nt, Artificial Sequence
  Description of Artificial Sequence: Synthetic oligonucleotide
  Antisense strand to SEQ ID NO: 1383552
guuaacaaucccuucugcc

SEQ ID NO: 1383554 - RNA, 19 nt, Artificial Sequence
  Description of Artificial Sequence: Synthetic oligonucleotide
  Sense strand starting at position 2753 of SEQ ID NO: 1242940
ugacucaccguuuguuuga

SEQ ID NO: 1383555 - RNA, 19 nt, Artificial Sequence
  Description of Artificial Sequence: Synthetic oligonucleotide
  Antisense strand to SEQ ID NO: 1383554
ucaaacaaacggugaguca

SEQ ID NO: 1383556 - RNA, 19 nt, Artificial Sequence
  Description of Artificial Sequence: Synthetic oligonucleotide
  Sense strand starting at position 2764 of SEQ ID NO: 1242940
uuguuugacuagucauaua

SEQ ID NO: 1383557 - RNA, 19 nt, Artificial Sequence
  Description of Artificial Sequence: Synthetic oligonucleotide
  Antisense strand to SEQ ID NO: 1383556
uauaugacuagucaaacaa

SEQ ID NO: 1383558 - RNA, 19 nt, Artificial Sequence
  Description of Artificial Sequence: Synthetic oligonucleotide
  Sense strand starting at position 2821 of SEQ ID NO: 1242940
cgccaaaggguuugcaaau

SEQ ID NO: 1383559 - RNA, 19 nt, Artificial Sequence
  Description of Artificial Sequence: Synthetic oligonucleotide
  Antisense strand to SEQ ID NO: 1383558
auuugcaaacccuuuggcg

SEQ ID NO: 1383560 - RNA, 19 nt, Artificial Sequence
  Description of Artificial Sequence: Synthetic oligonucleotide
  Sense strand starting at position 2822 of SEQ ID NO: 1242940
gccaaaggguuugcaaauu

SEQ ID NO: 1383561 - RNA, 19 nt, Artificial Sequence
  Description of Artificial Sequence: Synthetic oligonucleotide
  Antisense strand to SEQ ID NO: 1383560
aauuugcaaacccuuuggc

SEQ ID NO: 1383562 - RNA, 19 nt, Artificial Sequence
  Description of Artificial Sequence: Synthetic oligonucleotide
  Sense strand starting at position 2842 of SEQ ID NO: 1242940
aacagaggauugccguauu

SEQ ID NO: 1383563 - RNA, 19 nt, Artificial Sequence
  Description of Artificial Sequence: Synthetic oligonucleotide
  Antisense strand to SEQ ID NO: 1383562
aauacggcaauccucuguu

SEQ ID NO: 1383564 - RNA, 19 nt, Artificial Sequence
  Description of Artificial Sequence: Synthetic oligonucleotide
  Sense strand starting at position 2845 of SEQ ID NO: 1242940
agaggauugccguauucca

SEQ ID NO: 1383565 - RNA, 19 nt, Artificial Sequence
  Description of Artificial Sequence: Synthetic oligonucleotide
  Antisense strand to SEQ ID NO: 1383564
uggaauacggcaauccucu

SEQ ID NO: 1383566 - RNA, 19 nt, Artificial Sequence
  Description of Artificial Sequence: Synthetic oligonucleotide
  Sense strand starting at position 2866 of SEQ ID NO: 1242940
guguauccggcuuaccuaa

SEQ ID NO: 1383567 - RNA, 19 nt, Artificial Sequence
  Description of Artificial Sequence: Synthetic oligonucleotide
  Antisense strand to SEQ ID NO: 1383566
uuagguaagccggauacac

SEQ ID NO: 1383568 - RNA, 19 nt, Artificial Sequence
  Description of Artificial Sequence: Synthetic oligonucleotide
  Sense strand starting at position 2959 of SEQ ID NO: 1242940
gcucaagaauucccauagu

SEQ ID NO: 1383569 - RNA, 19 nt, Artificial Sequence
  Description of Artificial Sequence: Synthetic oligonucleotide
  Antisense strand to SEQ ID NO: 1383568
acuaugggaauucuugagc

SEQ ID NO: 1383570 - RNA, 19 nt, Artificial Sequence
  Description of Artificial Sequence: Synthetic oligonucleotide
  Sense strand starting at position 3049 of SEQ ID NO: 1242940
uacuuaagaguucgcauuu

SEQ ID NO: 1383571 - RNA, 19 nt, Artificial Sequence
  Description of Artificial Sequence: Synthetic oligonucleotide
  Antisense strand to SEQ ID NO: 1383570
aaaugcgaacucuuaagua

SEQ ID NO: 1383572 - RNA, 19 nt, Artificial Sequence
  Description of Artificial Sequence: Synthetic oligonucleotide
  Sense strand starting at position 3096 of SEQ ID NO: 1242940
ugcucugaguaccuguuaa

SEQ ID NO: 1383573 - RNA, 19 nt, Artificial Sequence
  Description of Artificial Sequence: Synthetic oligonucleotide
  Antisense strand to SEQ ID NO: 1383572
uuaacagguacucagagca

SEQ ID NO: 1383574 - RNA, 19 nt, Artificial Sequence
  Description of Artificial Sequence: Synthetic oligonucleotide
  Sense strand starting at position 3108 of SEQ ID NO: 1242940
cuguuaagcuuuccuguaa

SEQ ID NO: 1383575 - RNA, 19 nt, Artificial Sequence
  Description of Artificial Sequence: Synthetic oligonucleotide
  Antisense strand to SEQ ID NO: 1383574
uuacaggaaagcuuaacag

SEQ ID NO: 1383576 - RNA, 19 nt, Artificial Sequence
  Description of Artificial Sequence: Synthetic oligonucleotide
  Sense strand starting at position 3109 of SEQ ID NO: 1242940
uguuaagcuuuccuguaau

SEQ ID NO: 1383577 - RNA, 19 nt, Artificial Sequence
  Description of Artificial Sequence: Synthetic oligonucleotide
  Antisense strand to SEQ ID NO: 1383576
auuacaggaaagcuuaaca

SEQ ID NO: 1383578 - RNA, 19 nt, Artificial Sequence
  Description of Artificial Sequence: Synthetic oligonucleotide
  Sense strand starting at position 3243 of SEQ ID NO: 1242940
uagaauagauguuucugaa

SEQ ID NO: 1383579 - RNA, 19 nt, Artificial Sequence
  Description of Artificial Sequence: Synthetic oligonucleotide
  Antisense strand to SEQ ID NO: 1383578
uucagaaacaucuauucua

SEQ ID NO: 1383580 - RNA, 19 nt, Artificial Sequence
  Description of Artificial Sequence: Synthetic oligonucleotide
  Sense strand starting at position 3259 of SEQ ID NO: 1242940
gaacaaccuuagguuguua

SEQ ID NO: 1383581 - RNA, 19 nt, Artificial Sequence
  Description of Artificial Sequence: Synthetic oligonucleotide
  Antisense strand to SEQ ID NO: 1383580
uaacaaccuaagguuguuc

SEQ ID NO: 1383582 - RNA, 19 nt, Artificial Sequence
  Description of Artificial Sequence: Synthetic oligonucleotide
  Sense strand starting at position 3261 of SEQ ID NO: 1242940
acaaccuuagguuguuaaa

SEQ ID NO: 1383583 - RNA, 19 nt, Artificial Sequence
  Description of Artificial Sequence: Synthetic oligonucleotide
  Antisense strand to SEQ ID NO: 1383582
uuuaacaaccuaagguugu

SEQ ID NO: 1383584 - RNA, 19 nt, Artificial Sequence
  Description of Artificial Sequence: Synthetic oligonucleotide
  Sense strand starting at position 3505 of SEQ ID NO: 1242940
uguuauuagagacgagguu

SEQ ID NO: 1383585 - RNA, 19 nt, Artificial Sequence
  Description of Artificial Sequence: Synthetic oligonucleotide
  Antisense strand to SEQ ID NO: 1383584
aaccucgucucuaauaaca

SEQ ID NO: 1383586 - RNA, 19 nt, Artificial Sequence
  Description of Artificial Sequence: Synthetic oligonucleotide
  Sense strand starting at position 3506 of SEQ ID NO: 1242940
guuauuagagacgagguuu

SEQ ID NO: 1383587 - RNA, 19 nt, Artificial Sequence
  Description of Artificial Sequence: Synthetic oligonucleotide
  Antisense strand to SEQ ID NO: 1383586
aaaccucgucucuaauaac

SEQ ID NO: 1383588 - RNA, 19 nt, Artificial Sequence
  Description of Artificial Sequence: Synthetic oligonucleotide
  Sense strand starting at position 3519 of SEQ ID NO: 1242940
agguuuacaccguguuaga

SEQ ID NO: 1383589 - RNA, 19 nt, Artificial Sequence
  Description of Artificial Sequence: Synthetic oligonucleotide
  Antisense strand to SEQ ID NO: 1383588
ucuaacacgguguaaaccu

SEQ ID NO: 1383590 - RNA, 19 nt, Artificial Sequence
  Description of Artificial Sequence: Synthetic oligonucleotide
  Sense strand starting at position 3728 of SEQ ID NO: 1242940
aguccuaggcuacaguaau

SEQ ID NO: 1383591 - RNA, 19 nt, Artificial Sequence
  Description of Artificial Sequence: Synthetic oligonucleotide
  Antisense strand to SEQ ID NO: 1383590
auuacuguagccuaggacu

SEQ ID NO: 1383592 - RNA, 19 nt, Artificial Sequence
  Description of Artificial Sequence: Synthetic oligonucleotide
  Sense strand starting at position 46 of SEQ ID NO: 1242941
gaggaauccuaacuuugug

SEQ ID NO: 1383593 - RNA, 19 nt, Artificial Sequence
  Description of Artificial Sequence: Synthetic oligonucleotide
  Antisense strand to SEQ ID NO: 1383592
cacaaaguuaggauuccuc

SEQ ID NO: 1383594 - RNA, 19 nt, Artificial Sequence
  Description of Artificial Sequence: Synthetic oligonucleotide
  Sense strand starting at position 76 of SEQ ID NO: 1242941
acuuuagaagcguacacaa

SEQ ID NO: 1383595 - RNA, 19 nt, Artificial Sequence
  Description of Artificial Sequence: Synthetic oligonucleotide
  Antisense strand to SEQ ID NO: 1383594
uuguguacgcuucuaaagu

SEQ ID NO: 1383596 - RNA, 19 nt, Artificial Sequence
  Description of Artificial Sequence: Synthetic oligonucleotide
  Sense strand starting at position 116 of SEQ ID NO: 1242941
ugguauugauagccaaguu

SEQ ID NO: 1383597 - RNA, 19 nt, Artificial Sequence
  Description of Artificial Sequence: Synthetic oligonucleotide
  Antisense strand to SEQ ID NO: 1383596
aacuuggcuaucaauacca

SEQ ID NO: 1383598 - RNA, 19 nt, Artificial Sequence
  Description of Artificial Sequence: Synthetic oligonucleotide
  Sense strand starting at position 117 of SEQ ID NO: 1242941
gguauugauagccaaguuu

SEQ ID NO: 1383599 - RNA, 19 nt, Artificial Sequence
  Description of Artificial Sequence: Synthetic oligonucleotide
  Antisense strand to SEQ ID NO: 1383598
aaacuuggcuaucaauacc

SEQ ID NO: 1383600 - RNA, 19 nt, Artificial Sequence
  Description of Artificial Sequence: Synthetic oligonucleotide
  Sense strand starting at position 128 of SEQ ID NO: 1242941
ccaaguuucugcccgauca

SEQ ID NO: 1383601 - RNA, 19 nt, Artificial Sequence
  Description of Artificial Sequence: Synthetic oligonucleotide
  Antisense strand to SEQ ID NO: 1383600
ugaucgggcagaaacuugg

SEQ ID NO: 1383602 - RNA, 19 nt, Artificial Sequence
  Description of Artificial Sequence: Synthetic oligonucleotide
  Sense strand starting at position 130 of SEQ ID NO: 1242941
aaguuucugcccgaucaca

SEQ ID NO: 1383603 - RNA, 19 nt, Artificial Sequence
  Description of Artificial Sequence: Synthetic oligonucleotide
  Antisense strand to SEQ ID NO: 1383602
ugugaucgggcagaaacuu

SEQ ID NO: 1383604 - RNA, 19 nt, Artificial Sequence
  Description of Artificial Sequence: Synthetic oligonucleotide
  Sense strand starting at position 1172 of SEQ ID NO: 1242941
gggagcuagcgacaaagau

SEQ ID NO: 1383605 - RNA, 19 nt, Artificial Sequence
  Description of Artificial Sequence: Synthetic oligonucleotide
  Antisense strand to SEQ ID NO: 1383604
aucuuugucgcuagcuccc

SEQ ID NO: 1383606 - RNA, 19 nt, Artificial Sequence
  Description of Artificial Sequence: Synthetic oligonucleotide
  Sense strand starting at position 1658 of SEQ ID NO: 1242941
gccgaagaccgagaguauu

SEQ ID NO: 1383607 - RNA, 19 nt, Artificial Sequence
  Description of Artificial Sequence: Synthetic oligonucleotide
  Antisense strand to SEQ ID NO: 1383606
aauacucucggucuucggc

SEQ ID NO: 1383608 - RNA, 19 nt, Artificial Sequence
  Description of Artificial Sequence: Synthetic oligonucleotide
  Sense strand starting at position 1808 of SEQ ID NO: 1242941
cugcguucucugccucaca

SEQ ID NO: 1383609 - RNA, 19 nt, Artificial Sequence
  Description of Artificial Sequence: Synthetic oligonucleotide
  Antisense strand to SEQ ID NO: 1383608
ugugaggcagagaacgcag

SEQ ID NO: 1383610 - RNA, 19 nt, Artificial Sequence
  Description of Artificial Sequence: Synthetic oligonucleotide
  Sense strand starting at position 1810 of SEQ ID NO: 1242941
gcguucucugccucacagu

SEQ ID NO: 1383611 - RNA, 19 nt, Artificial Sequence
  Description of Artificial Sequence: Synthetic oligonucleotide
  Antisense strand to SEQ ID NO: 1383610
acugugaggcagagaacgc

SEQ ID NO: 1383612 - RNA, 19 nt, Artificial Sequence
  Description of Artificial Sequence: Synthetic oligonucleotide
  Sense strand starting at position 1985 of SEQ ID NO: 1242941
ugcaguguggcucauaaag

SEQ ID NO: 1383613 - RNA, 19 nt, Artificial Sequence
  Description of Artificial Sequence: Synthetic oligonucleotide
  Antisense strand to SEQ ID NO: 1383612
cuuuaugagccacacugca

SEQ ID NO: 1383614 - RNA, 19 nt, Artificial Sequence
  Description of Artificial Sequence: Synthetic oligonucleotide
  Sense strand starting at position 2027 of SEQ ID NO: 1242941
ggcagaagggauuguuaac

SEQ ID NO: 1383615 - RNA, 19 nt, Artificial Sequence
  Description of Artificial Sequence: Synthetic oligonucleotide
  Antisense strand to SEQ ID NO: 1383614
guuaacaaucccuucugcc

SEQ ID NO: 1383616 - RNA, 19 nt, Artificial Sequence
  Description of Artificial Sequence: Synthetic oligonucleotide
  Sense strand starting at position 2059 of SEQ ID NO: 1242941
ugacucaccguuuguuuga

SEQ ID NO: 1383617 - RNA, 19 nt, Artificial Sequence
  Description of Artificial Sequence: Synthetic oligonucleotide
  Antisense strand to SEQ ID NO: 1383616
ucaaacaaacggugaguca

SEQ ID NO: 1383618 - RNA, 19 nt, Artificial Sequence
  Description of Artificial Sequence: Synthetic oligonucleotide
  Sense strand starting at position 2070 of SEQ ID NO: 1242941
uuguuugacuagucauaua

SEQ ID NO: 1383619 - RNA, 19 nt, Artificial Sequence
  Description of Artificial Sequence: Synthetic oligonucleotide
  Antisense strand to SEQ ID NO: 1383618
uauaugacuagucaaacaa

SEQ ID NO: 1383620 - RNA, 19 nt, Artificial Sequence
  Description of Artificial Sequence: Synthetic oligonucleotide
  Sense strand starting at position 2127 of SEQ ID NO: 1242941
cgccaaaggguuugcaaau

SEQ ID NO: 1383621 - RNA, 19 nt, Artificial Sequence
  Description of Artificial Sequence: Synthetic oligonucleotide
  Antisense strand to SEQ ID NO: 1383620
auuugcaaacccuuuggcg

SEQ ID NO: 1383622 - RNA, 19 nt, Artificial Sequence
  Description of Artificial Sequence: Synthetic oligonucleotide
  Sense strand starting at position 2128 of SEQ ID NO: 1242941
gccaaaggguuugcaaauu

SEQ ID NO: 1383623 - RNA, 19 nt, Artificial Sequence
  Description of Artificial Sequence: Synthetic oligonucleotide
  Antisense strand to SEQ ID NO: 1383622
aauuugcaaacccuuuggc

SEQ ID NO: 1383624 - RNA, 19 nt, Artificial Sequence
  Description of Artificial Sequence: Synthetic oligonucleotide
  Sense strand starting at position 2148 of SEQ ID NO: 1242941
aacagaggauugccguauu

SEQ ID NO: 1383625 - RNA, 19 nt, Artificial Sequence
  Description of Artificial Sequence: Synthetic oligonucleotide
  Antisense strand to SEQ ID NO: 1383624
aauacggcaauccucuguu

SEQ ID NO: 1383626 - RNA, 19 nt, Artificial Sequence
  Description of Artificial Sequence: Synthetic oligonucleotide
  Sense strand starting at position 2151 of SEQ ID NO: 1242941
agaggauugccguauucca

SEQ ID NO: 1383627 - RNA, 19 nt, Artificial Sequence
  Description of Artificial Sequence: Synthetic oligonucleotide
  Antisense strand to SEQ ID NO: 1383626
uggaauacggcaauccucu

SEQ ID NO: 1383628 - RNA, 19 nt, Artificial Sequence
  Description of Artificial Sequence: Synthetic oligonucleotide
  Sense strand starting at position 2172 of SEQ ID NO: 1242941
guguauccggcuuaccuaa

SEQ ID NO: 1383629 - RNA, 19 nt, Artificial Sequence
  Description of Artificial Sequence: Synthetic oligonucleotide
  Antisense strand to SEQ ID NO: 1383628
uuagguaagccggauacac

SEQ ID NO: 1383630 - RNA, 19 nt, Artificial Sequence
  Description of Artificial Sequence: Synthetic oligonucleotide
  Sense strand starting at position 2207 of SEQ ID NO: 1242941
agucuagcuuccuuaugca

SEQ ID NO: 1383631 - RNA, 19 nt, Artificial Sequence
  Description of Artificial Sequence: Synthetic oligonucleotide
  Antisense strand to SEQ ID NO: 1383630
ugcauaaggaagcuagacu

SEQ ID NO: 1383632 - RNA, 19 nt, Artificial Sequence
  Description of Artificial Sequence: Synthetic oligonucleotide
  Sense strand starting at position 2265 of SEQ ID NO: 1242941
gcucaagaauucccauagu

SEQ ID NO: 1383633 - RNA, 19 nt, Artificial Sequence
  Description of Artificial Sequence: Synthetic oligonucleotide
  Antisense strand to SEQ ID NO: 1383632
acuaugggaauucuugagc

SEQ ID NO: 1383634 - RNA, 19 nt, Artificial Sequence
  Description of Artificial Sequence: Synthetic oligonucleotide
  Sense strand starting at position 2355 of SEQ ID NO: 1242941
uacuuaagaguucgcauuu

SEQ ID NO: 1383635 - RNA, 19 nt, Artificial Sequence
  Description of Artificial Sequence: Synthetic oligonucleotide
  Antisense strand to SEQ ID NO: 1383634
aaaugcgaacucuuaagua

SEQ ID NO: 1383636 - RNA, 19 nt, Artificial Sequence
  Description of Artificial Sequence: Synthetic oligonucleotide
  Sense strand starting at position 2402 of SEQ ID NO: 1242941
ugcucugaguaccuguuaa

SEQ ID NO: 1383637 - RNA, 19 nt, Artificial Sequence
  Description of Artificial Sequence: Synthetic oligonucleotide
  Antisense strand to SEQ ID NO: 1383636
uuaacagguacucagagca

SEQ ID NO: 1383638 - RNA, 19 nt, Artificial Sequence
  Description of Artificial Sequence: Synthetic oligonucleotide
  Sense strand starting at position 2414 of SEQ ID NO: 1242941
cuguuaagcuuuccuguaa

SEQ ID NO: 1383639 - RNA, 19 nt, Artificial Sequence
  Description of Artificial Sequence: Synthetic oligonucleotide
  Antisense strand to SEQ ID NO: 1383638
uuacaggaaagcuuaacag

SEQ ID NO: 1383640 - RNA, 19 nt, Artificial Sequence
  Description of Artificial Sequence: Synthetic oligonucleotide
  Sense strand starting at position 2415 of SEQ ID NO: 1242941
uguuaagcuuuccuguaau

SEQ ID NO: 1383641 - RNA, 19 nt, Artificial Sequence
  Description of Artificial Sequence: Synthetic oligonucleotide
  Antisense strand to SEQ ID NO: 1383640
auuacaggaaagcuuaaca

SEQ ID NO: 1383642 - RNA, 19 nt, Artificial Sequence
  Description of Artificial Sequence: Synthetic oligonucleotide
  Sense strand starting at position 2549 of SEQ ID NO: 1242941
uagaauagauguuucugaa

SEQ ID NO: 1383643 - RNA, 19 nt, Artificial Sequence
  Description of Artificial Sequence: Synthetic oligonucleotide
  Antisense strand to SEQ ID NO: 1383642
uucagaaacaucuauucua

SEQ ID NO: 1383644 - RNA, 19 nt, Artificial Sequence
  Description of Artificial Sequence: Synthetic oligonucleotide
  Sense strand starting at position 2565 of SEQ ID NO: 1242941
gaacaaccuuagguuguua

SEQ ID NO: 1383645 - RNA, 19 nt, Artificial Sequence
  Description of Artificial Sequence: Synthetic oligonucleotide
  Antisense strand to SEQ ID NO: 1383644
uaacaaccuaagguuguuc

SEQ ID NO: 1383646 - RNA, 19 nt, Artificial Sequence
  Description of Artificial Sequence: Synthetic oligonucleotide
  Sense strand starting at position 2567 of SEQ ID NO: 1242941
acaaccuuagguuguuaaa

SEQ ID NO: 1383647 - RNA, 19 nt, Artificial Sequence
  Description of Artificial Sequence: Synthetic oligonucleotide
  Antisense strand to SEQ ID NO: 1383646
uuuaacaaccuaagguugu

SEQ ID NO: 1383648 - RNA, 19 nt, Artificial Sequence
  Description of Artificial Sequence: Synthetic oligonucleotide
  Sense strand starting at position 2811 of SEQ ID NO: 1242941
uguuauuagagacgagguu

SEQ ID NO: 1383649 - RNA, 19 nt, Artificial Sequence
  Description of Artificial Sequence: Synthetic oligonucleotide
  Antisense strand to SEQ ID NO: 1383648
aaccucgucucuaauaaca

SEQ ID NO: 1383650 - RNA, 19 nt, Artificial Sequence
  Description of Artificial Sequence: Synthetic oligonucleotide
  Sense strand starting at position 2812 of SEQ ID NO: 1242941
guuauuagagacgagguuu

SEQ ID NO: 1383651 - RNA, 19 nt, Artificial Sequence
  Description of Artificial Sequence: Synthetic oligonucleotide
  Antisense strand to SEQ ID NO: 1383650
aaaccucgucucuaauaac

SEQ ID NO: 1383652 - RNA, 19 nt, Artificial Sequence
  Description of Artificial Sequence: Synthetic oligonucleotide
  Sense strand starting at position 2825 of SEQ ID NO: 1242941
agguuuacaccguguuaga

SEQ ID NO: 1383653 - RNA, 19 nt, Artificial Sequence
  Description of Artificial Sequence: Synthetic oligonucleotide
  Antisense strand to SEQ ID NO: 1383652
ucuaacacgguguaaaccu

SEQ ID NO: 1383654 - RNA, 19 nt, Artificial Sequence
  Description of Artificial Sequence: Synthetic oligonucleotide
  Sense strand starting at position 3034 of SEQ ID NO: 1242941
aguccuaggcuacaguaau

SEQ ID NO: 1383655 - RNA, 19 nt, Artificial Sequence
  Description of Artificial Sequence: Synthetic oligonucleotide
  Antisense strand to SEQ ID NO: 1383654
auuacuguagccuaggacu

SEQ ID NO: 1383656 - RNA, 19 nt, Artificial Sequence
  Description of Artificial Sequence: Synthetic oligonucleotide
  Sense strand starting at position 3602 of SEQ ID NO: 1242941
agaguuugccucugcuuaa

SEQ ID NO: 1383657 - RNA, 19 nt, Artificial Sequence
  Description of Artificial Sequence: Synthetic oligonucleotide
  Antisense strand to SEQ ID NO: 1383656
uuaagcagaggcaaacucu

SEQ ID NO: 1383658 - RNA, 19 nt, Artificial Sequence
  Description of Artificial Sequence: Synthetic oligonucleotide
  Sense strand starting at position 3630 of SEQ ID NO: 1242941
uugguuauagccuauuauu

SEQ ID NO: 1383659 - RNA, 19 nt, Artificial Sequence
  Description of Artificial Sequence: Synthetic oligonucleotide
  Antisense strand to SEQ ID NO: 1383658
aauaauaggcuauaaccaa

SEQ ID NO: 1383660 - RNA, 19 nt, Artificial Sequence
  Description of Artificial Sequence: Synthetic oligonucleotide
  Sense strand starting at position 3696 of SEQ ID NO: 1242941
guugguauuaagugacugu

SEQ ID NO: 1383661 - RNA, 19 nt, Artificial Sequence
  Description of Artificial Sequence: Synthetic oligonucleotide
  Antisense strand to SEQ ID NO: 1383660
acagucacuuaauaccaac

SEQ ID NO: 1383662 - RNA, 19 nt, Artificial Sequence
  Description of Artificial Sequence: Synthetic oligonucleotide
  Sense strand starting at position 3700 of SEQ ID NO: 1242941
guauuaagugacugucaga

SEQ ID NO: 1383663 - RNA, 19 nt, Artificial Sequence
  Description of Artificial Sequence: Synthetic oligonucleotide
  Antisense strand to SEQ ID NO: 1383662
ucugacagucacuuaauac

SEQ ID NO: 1383664 - RNA, 19 nt, Artificial Sequence
  Description of Artificial Sequence: Synthetic oligonucleotide
  Sense strand starting at position 3703 of SEQ ID NO: 1242941
uuaagugacugucagauuu

SEQ ID NO: 1383665 - RNA, 19 nt, Artificial Sequence
  Description of Artificial Sequence: Synthetic oligonucleotide
  Antisense strand to SEQ ID NO: 1383664
aaaucugacagucacuuaa

SEQ ID NO: 1383666 - RNA, 19 nt, Artificial Sequence
  Description of Artificial Sequence: Synthetic oligonucleotide
  Sense strand starting at position 3705 of SEQ ID NO: 1242941
aagugacugucagauuuac

SEQ ID NO: 1383667 - RNA, 19 nt, Artificial Sequence
  Description of Artificial Sequence: Synthetic oligonucleotide
  Antisense strand to SEQ ID NO: 1383666
guaaaucugacagucacuu

SEQ ID NO: 1383668 - RNA, 19 nt, Artificial Sequence
  Description of Artificial Sequence: Synthetic oligonucleotide
  Sense strand starting at position 3764 of SEQ ID NO: 1242941
augcgagaccuguauugcu

SEQ ID NO: 1383669 - RNA, 19 nt, Artificial Sequence
  Description of Artificial Sequence: Synthetic oligonucleotide
  Antisense strand to SEQ ID NO: 1383668
agcaauacaggucucgcau

SEQ ID NO: 1383670 - RNA, 19 nt, Artificial Sequence
  Description of Artificial Sequence: Synthetic oligonucleotide
  Sense strand starting at position 3769 of SEQ ID NO: 1242941
agaccuguauugcuauuga

SEQ ID NO: 1383671 - RNA, 19 nt, Artificial Sequence
  Description of Artificial Sequence: Synthetic oligonucleotide
  Antisense strand to SEQ ID NO: 1383670
ucaauagcaauacaggucu

SEQ ID NO: 1383672 - RNA, 19 nt, Artificial Sequence
  Description of Artificial Sequence: Synthetic oligonucleotide
  Sense strand starting at position 46 of SEQ ID NO: 1242942
ccucaaagucuggguucuu

SEQ ID NO: 1383673 - RNA, 19 nt, Artificial Sequence
  Description of Artificial Sequence: Synthetic oligonucleotide
  Antisense strand to SEQ ID NO: 1383672
aagaacccagacuuugagg

SEQ ID NO: 1383674 - RNA, 19 nt, Artificial Sequence
  Description of Artificial Sequence: Synthetic oligonucleotide
  Sense strand starting at position 150 of SEQ ID NO: 1242942
cuccuaagguuucuguaaa

SEQ ID NO: 1383675 - RNA, 19 nt, Artificial Sequence
  Description of Artificial Sequence: Synthetic oligonucleotide
  Antisense strand to SEQ ID NO: 1383674
uuuacagaaaccuuaggag

SEQ ID NO: 1383676 - RNA, 19 nt, Artificial Sequence
  Description of Artificial Sequence: Synthetic oligonucleotide
  Sense strand starting at position 267 of SEQ ID NO: 1242942
cuguucucuguccaacagu

SEQ ID NO: 1383677 - RNA, 19 nt, Artificial Sequence
  Description of Artificial Sequence: Synthetic oligonucleotide
  Antisense strand to SEQ ID NO: 1383676
acuguuggacagagaacag

SEQ ID NO: 1383678 - RNA, 19 nt, Artificial Sequence
  Description of Artificial Sequence: Synthetic oligonucleotide
  Sense strand starting at position 674 of SEQ ID NO: 1242942
cucacaauauggcuuaaga

SEQ ID NO: 1383679 - RNA, 19 nt, Artificial Sequence
  Description of Artificial Sequence: Synthetic oligonucleotide
  Antisense strand to SEQ ID NO: 1383678
ucuuaagccauauugugag

SEQ ID NO: 1383680 - RNA, 19 nt, Artificial Sequence
  Description of Artificial Sequence: Synthetic oligonucleotide
  Sense strand starting at position 748 of SEQ ID NO: 1242942
ccagaaccuuagguuacau

SEQ ID NO: 1383681 - RNA, 19 nt, Artificial Sequence
  Description of Artificial Sequence: Synthetic oligonucleotide
  Antisense strand to SEQ ID NO: 1383680
auguaaccuaagguucugg

SEQ ID NO: 1383682 - RNA, 19 nt, Artificial Sequence
  Description of Artificial Sequence: Synthetic oligonucleotide
  Sense strand starting at position 822 of SEQ ID NO: 1242942
cuaccucauaggugaggau

SEQ ID NO: 1383683 - RNA, 19 nt, Artificial Sequence
  Description of Artificial Sequence: Synthetic oligonucleotide
  Antisense strand to SEQ ID NO: 1383682
auccucaccuaugagguag

SEQ ID NO: 1383684 - RNA, 19 nt, Artificial Sequence
  Description of Artificial Sequence: Synthetic oligonucleotide
  Sense strand starting at position 856 of SEQ ID NO: 1242942
uccuguuuaacggaguuua

SEQ ID NO: 1383685 - RNA, 19 nt, Artificial Sequence
  Description of Artificial Sequence: Synthetic oligonucleotide
  Antisense strand to SEQ ID NO: 1383684
uaaacuccguuaaacagga

SEQ ID NO: 1383686 - RNA, 19 nt, Artificial Sequence
  Description of Artificial Sequence: Synthetic oligonucleotide
  Sense strand starting at position 864 of SEQ ID NO: 1242942
aacggaguuuaaucaagug

SEQ ID NO: 1383687 - RNA, 19 nt, Artificial Sequence
  Description of Artificial Sequence: Synthetic oligonucleotide
  Antisense strand to SEQ ID NO: 1383686
cacuugauuaaacuccguu

SEQ ID NO: 1383688 - RNA, 19 nt, Artificial Sequence
  Description of Artificial Sequence: Synthetic oligonucleotide
  Sense strand starting at position 869 of SEQ ID NO: 1242942
aguuuaaucaagugaggau

SEQ ID NO: 1383689 - RNA, 19 nt, Artificial Sequence
  Description of Artificial Sequence: Synthetic oligonucleotide
  Antisense strand to SEQ ID NO: 1383688
auccucacuugauuaaacu

SEQ ID NO: 1383690 - RNA, 19 nt, Artificial Sequence
  Description of Artificial Sequence: Synthetic oligonucleotide
  Sense strand starting at position 889 of SEQ ID NO: 1242942
aagugaguuuaagcuccua

SEQ ID NO: 1383691 - RNA, 19 nt, Artificial Sequence
  Description of Artificial Sequence: Synthetic oligonucleotide
  Antisense strand to SEQ ID NO: 1383690
uaggagcuuaaacucacuu

SEQ ID NO: 1383692 - RNA, 19 nt, Artificial Sequence
  Description of Artificial Sequence: Synthetic oligonucleotide
  Sense strand starting at position 916 of SEQ ID NO: 1242942
agaauagauucuuagaaca

SEQ ID NO: 1383693 - RNA, 19 nt, Artificial Sequence
  Description of Artificial Sequence: Synthetic oligonucleotide
  Antisense strand to SEQ ID NO: 1383692
uguucuaagaaucuauucu

SEQ ID NO: 1383694 - RNA, 19 nt, Artificial Sequence
  Description of Artificial Sequence: Synthetic oligonucleotide
  Sense strand starting at position 1257 of SEQ ID NO: 1242942
ccaugaagucccugauaaa

SEQ ID NO: 1383695 - RNA, 19 nt, Artificial Sequence
  Description of Artificial Sequence: Synthetic oligonucleotide
  Antisense strand to SEQ ID NO: 1383694
uuuaucagggacuucaugg

SEQ ID NO: 1383696 - RNA, 19 nt, Artificial Sequence
  Description of Artificial Sequence: Synthetic oligonucleotide
  Sense strand starting at position 1337 of SEQ ID NO: 1242942
aucugcaccgaaugaauau

SEQ ID NO: 1383697 - RNA, 19 nt, Artificial Sequence
  Description of Artificial Sequence: Synthetic oligonucleotide
  Antisense strand to SEQ ID NO: 1383696
auauucauucggugcagau

SEQ ID NO: 1383698 - RNA, 19 nt, Artificial Sequence
  Description of Artificial Sequence: Synthetic oligonucleotide
  Sense strand starting at position 1357 of SEQ ID NO: 1242942
ccaugagggucuguugauc

SEQ ID NO: 1383699 - RNA, 19 nt, Artificial Sequence
  Description of Artificial Sequence: Synthetic oligonucleotide
  Antisense strand to SEQ ID NO: 1383698
gaucaacagacccucaugg

SEQ ID NO: 1383700 - RNA, 19 nt, Artificial Sequence
  Description of Artificial Sequence: Synthetic oligonucleotide
  Sense strand starting at position 1383 of SEQ ID NO: 1242942
ucuccagucuggcucuaaa

SEQ ID NO: 1383701 - RNA, 19 nt, Artificial Sequence
  Description of Artificial Sequence: Synthetic oligonucleotide
  Antisense strand to SEQ ID NO: 1383700
uuuagagccagacuggaga

SEQ ID NO: 1383702 - RNA, 19 nt, Artificial Sequence
  Description of Artificial Sequence: Synthetic oligonucleotide
  Sense strand starting at position 2315 of SEQ ID NO: 1242942
ggcagaauccuaggccaug

SEQ ID NO: 1383703 - RNA, 19 nt, Artificial Sequence
  Description of Artificial Sequence: Synthetic oligonucleotide
  Antisense strand to SEQ ID NO: 1383702
cauggccuaggauucugcc

SEQ ID NO: 1383704 - RNA, 19 nt, Artificial Sequence
  Description of Artificial Sequence: Synthetic oligonucleotide
  Sense strand starting at position 2316 of SEQ ID NO: 1242942
gcagaauccuaggccauga

SEQ ID NO: 1383705 - RNA, 19 nt, Artificial Sequence
  Description of Artificial Sequence: Synthetic oligonucleotide
  Antisense strand to SEQ ID NO: 1383704
ucauggccuaggauucugc

SEQ ID NO: 1383706 - RNA, 19 nt, Artificial Sequence
  Description of Artificial Sequence: Synthetic oligonucleotide
  Sense strand starting at position 2388 of SEQ ID NO: 1242942
gaggcuuaguggucuggaa

SEQ ID NO: 1383707 - RNA, 19 nt, Artificial Sequence
  Description of Artificial Sequence: Synthetic oligonucleotide
  Antisense strand to SEQ ID NO: 1383706
uuccagaccacuaagccuc

SEQ ID NO: 1383708 - RNA, 19 nt, Artificial Sequence
  Description of Artificial Sequence: Synthetic oligonucleotide
  Sense strand starting at position 2455 of SEQ ID NO: 1242942
ggcuguggucgugaaggaa

SEQ ID NO: 1383709 - RNA, 19 nt, Artificial Sequence
  Description of Artificial Sequence: Synthetic oligonucleotide
  Antisense strand to SEQ ID NO: 1383708
uuccuucacgaccacagcc

SEQ ID NO: 1383710 - RNA, 19 nt, Artificial Sequence
  Description of Artificial Sequence: Synthetic oligonucleotide
  Sense strand starting at position 2490 of SEQ ID NO: 1242942
agcucagugaagggaugua

SEQ ID NO: 1383711 - RNA, 19 nt, Artificial Sequence
  Description of Artificial Sequence: Synthetic oligonucleotide
  Antisense strand to SEQ ID NO: 1383710
uacaucccuucacugagcu

SEQ ID NO: 1383712 - RNA, 19 nt, Artificial Sequence
  Description of Artificial Sequence: Synthetic oligonucleotide
  Sense strand starting at position 2682 of SEQ ID NO: 1242942
cugugccuuggcguuaaua

SEQ ID NO: 1383713 - RNA, 19 nt, Artificial Sequence
  Description of Artificial Sequence: Synthetic oligonucleotide
  Antisense strand to SEQ ID NO: 1383712
uauuaacgccaaggcacag

SEQ ID NO: 1383714 - RNA, 19 nt, Artificial Sequence
  Description of Artificial Sequence: Synthetic oligonucleotide
  Sense strand starting at position 2683 of SEQ ID NO: 1242942
ugugccuuggcguuaauaa

SEQ ID NO: 1383715 - RNA, 19 nt, Artificial Sequence
  Description of Artificial Sequence: Synthetic oligonucleotide
  Antisense strand to SEQ ID NO: 1383714
uuauuaacgccaaggcaca

SEQ ID NO: 1383716 - RNA, 19 nt, Artificial Sequence
  Description of Artificial Sequence: Synthetic oligonucleotide
  Sense strand starting at position 2721 of SEQ ID NO: 1242942
agugcuuuccaguaccaag

SEQ ID NO: 1383717 - RNA, 19 nt, Artificial Sequence
  Description of Artificial Sequence: Synthetic oligonucleotide
  Antisense strand to SEQ ID NO: 1383716
cuugguacuggaaagcacu

SEQ ID NO: 1383718 - RNA, 19 nt, Artificial Sequence
  Description of Artificial Sequence: Synthetic oligonucleotide
  Sense strand starting at position 2735 of SEQ ID NO: 1242942
ccaagaacucuguaaguac

SEQ ID NO: 1383719 - RNA, 19 nt, Artificial Sequence
  Description of Artificial Sequence: Synthetic oligonucleotide
  Antisense strand to SEQ ID NO: 1383718
guacuuacagaguucuugg

SEQ ID NO: 1383720 - RNA, 19 nt, Artificial Sequence
  Description of Artificial Sequence: Synthetic oligonucleotide
  Sense strand starting at position 2746 of SEQ ID NO: 1242942
guaaguacucuugggcaac

SEQ ID NO: 1383721 - RNA, 19 nt, Artificial Sequence
  Description of Artificial Sequence: Synthetic oligonucleotide
  Antisense strand to SEQ ID NO: 1383720
guugcccaagaguacuuac

SEQ ID NO: 1383722 - RNA, 19 nt, Artificial Sequence
  Description of Artificial Sequence: Synthetic oligonucleotide
  Sense strand starting at position 2909 of SEQ ID NO: 1242942
ugucucuggagcugaauua

SEQ ID NO: 1383723 - RNA, 19 nt, Artificial Sequence
  Description of Artificial Sequence: Synthetic oligonucleotide
  Antisense strand to SEQ ID NO: 1383722
uaauucagcuccagagaca

SEQ ID NO: 1383724 - RNA, 19 nt, Artificial Sequence
  Description of Artificial Sequence: Synthetic oligonucleotide
  Sense strand starting at position 2910 of SEQ ID NO: 1242942
gucucuggagcugaauuau

SEQ ID NO: 1383725 - RNA, 19 nt, Artificial Sequence
  Description of Artificial Sequence: Synthetic oligonucleotide
  Antisense strand to SEQ ID NO: 1383724
auaauucagcuccagagac

SEQ ID NO: 1383726 - RNA, 19 nt, Artificial Sequence
  Description of Artificial Sequence: Synthetic oligonucleotide
  Sense strand starting at position 2923 of SEQ ID NO: 1242942
aauuauggagcuugagauu

SEQ ID NO: 1383727 - RNA, 19 nt, Artificial Sequence
  Description of Artificial Sequence: Synthetic oligonucleotide
  Antisense strand to SEQ ID NO: 1383726
aaucucaagcuccauaauu

SEQ ID NO: 1383728 - RNA, 19 nt, Artificial Sequence
  Description of Artificial Sequence: Synthetic oligonucleotide
  Sense strand starting at position 2960 of SEQ ID NO: 1242942
cccuuuauuccagagguug

SEQ ID NO: 1383729 - RNA, 19 nt, Artificial Sequence
  Description of Artificial Sequence: Synthetic oligonucleotide
  Antisense strand to SEQ ID NO: 1383728
caaccucuggaauaaaggg

SEQ ID NO: 1383730 - RNA, 19 nt, Artificial Sequence
  Description of Artificial Sequence: Synthetic oligonucleotide
  Sense strand starting at position 2965 of SEQ ID NO: 1242942
uauuccagagguuguaaau

SEQ ID NO: 1383731 - RNA, 19 nt, Artificial Sequence
  Description of Artificial Sequence: Synthetic oligonucleotide
  Antisense strand to SEQ ID NO: 1383730
auuuacaaccucuggaaua

SEQ ID NO: 1383732 - RNA, 19 nt, Artificial Sequence
  Description of Artificial Sequence: Synthetic oligonucleotide
  Sense strand starting at position 2971 of SEQ ID NO: 1242942
agagguuguaaaugcagau

SEQ ID NO: 1383733 - RNA, 19 nt, Artificial Sequence
  Description of Artificial Sequence: Synthetic oligonucleotide
  Antisense strand to SEQ ID NO: 1383732
aucugcauuuacaaccucu

SEQ ID NO: 1383734 - RNA, 19 nt, Artificial Sequence
  Description of Artificial Sequence: Synthetic oligonucleotide
  Sense strand starting at position 2975 of SEQ ID NO: 1242942
guuguaaaugcagaugucu

SEQ ID NO: 1383735 - RNA, 19 nt, Artificial Sequence
  Description of Artificial Sequence: Synthetic oligonucleotide
  Antisense strand to SEQ ID NO: 1383734
agacaucugcauuuacaac

SEQ ID NO: 1383736 - RNA, 19 nt, Artificial Sequence
  Description of Artificial Sequence: Synthetic oligonucleotide
  Sense strand starting at position 3014 of SEQ ID NO: 1242942
ccggauugaggcuguaacu

SEQ ID NO: 1383737 - RNA, 19 nt, Artificial Sequence
  Description of Artificial Sequence: Synthetic oligonucleotide
  Antisense strand to SEQ ID NO: 1383736
aguuacagccucaauccgg

SEQ ID NO: 1383738 - RNA, 19 nt, Artificial Sequence
  Description of Artificial Sequence: Synthetic oligonucleotide
  Sense strand starting at position 3163 of SEQ ID NO: 1242942
agggaucccugauuagagu

SEQ ID NO: 1383739 - RNA, 19 nt, Artificial Sequence
  Description of Artificial Sequence: Synthetic oligonucleotide
  Antisense strand to SEQ ID NO: 1383738
acucuaaucagggaucccu

SEQ ID NO: 1383740 - RNA, 19 nt, Artificial Sequence
  Description of Artificial Sequence: Synthetic oligonucleotide
  Sense strand starting at position 3170 of SEQ ID NO: 1242942
ccugauuagagucauggua

SEQ ID NO: 1383741 - RNA, 19 nt, Artificial Sequence
  Description of Artificial Sequence: Synthetic oligonucleotide
  Antisense strand to SEQ ID NO: 1383740
uaccaugacucuaaucagg

SEQ ID NO: 1383742 - RNA, 19 nt, Artificial Sequence
  Description of Artificial Sequence: Synthetic oligonucleotide
  Sense strand starting at position 3318 of SEQ ID NO: 1242942
cccucacuucucgggaauu

SEQ ID NO: 1383743 - RNA, 19 nt, Artificial Sequence
  Description of Artificial Sequence: Synthetic oligonucleotide
  Antisense strand to SEQ ID NO: 1383742
aauucccgagaagugaggg

SEQ ID NO: 1383744 - RNA, 19 nt, Artificial Sequence
  Description of Artificial Sequence: Synthetic oligonucleotide
  Sense strand starting at position 3481 of SEQ ID NO: 1242942
gccuucuggaaaggucaau

SEQ ID NO: 1383745 - RNA, 19 nt, Artificial Sequence
  Description of Artificial Sequence: Synthetic oligonucleotide
  Antisense strand to SEQ ID NO: 1383744
auugaccuuuccagaaggc

SEQ ID NO: 1383746 - RNA, 19 nt, Artificial Sequence
  Description of Artificial Sequence: Synthetic oligonucleotide
  Sense strand starting at position 3487 of SEQ ID NO: 1242942
uggaaaggucaauguaaug

SEQ ID NO: 1383747 - RNA, 19 nt, Artificial Sequence
  Description of Artificial Sequence: Synthetic oligonucleotide
  Antisense strand to SEQ ID NO: 1383746
cauuacauugaccuuucca

SEQ ID NO: 1383748 - RNA, 19 nt, Artificial Sequence
  Description of Artificial Sequence: Synthetic oligonucleotide
  Sense strand starting at position 3497 of SEQ ID NO: 1242942
aauguaauguugcuauaga

SEQ ID NO: 1383749 - RNA, 19 nt, Artificial Sequence
  Description of Artificial Sequence: Synthetic oligonucleotide
  Antisense strand to SEQ ID NO: 1383748
ucuauagcaacauuacauu

SEQ ID NO: 1383750 - RNA, 19 nt, Artificial Sequence
  Description of Artificial Sequence: Synthetic oligonucleotide
  Sense strand starting at position 3957 of SEQ ID NO: 1242942
ggugcaguggcucauaaua

SEQ ID NO: 1383751 - RNA, 19 nt, Artificial Sequence
  Description of Artificial Sequence: Synthetic oligonucleotide
  Antisense strand to SEQ ID NO: 1383750
uauuaugagccacugcacc

SEQ ID NO: 1383752 - RNA, 19 nt, Artificial Sequence
  Description of Artificial Sequence: Synthetic oligonucleotide
  Sense strand starting at position 145 of SEQ ID NO: 1242943
aucacagccuccugaagaa

SEQ ID NO: 1383753 - RNA, 19 nt, Artificial Sequence
  Description of Artificial Sequence: Synthetic oligonucleotide
  Antisense strand to SEQ ID NO: 1383752
uucuucaggaggcugugau

SEQ ID NO: 1383754 - RNA, 19 nt, Artificial Sequence
  Description of Artificial Sequence: Synthetic oligonucleotide
  Sense strand starting at position 182 of SEQ ID NO: 1242943
ugccuuuauuucugaggaa

SEQ ID NO: 1383755 - RNA, 19 nt, Artificial Sequence
  Description of Artificial Sequence: Synthetic oligonucleotide
  Antisense strand to SEQ ID NO: 1383754
uuccucagaaauaaaggca

SEQ ID NO: 1383756 - RNA, 19 nt, Artificial Sequence
  Description of Artificial Sequence: Synthetic oligonucleotide
  Sense strand starting at position 183 of SEQ ID NO: 1242943
gccuuuauuucugaggaaa

SEQ ID NO: 1383757 - RNA, 19 nt, Artificial Sequence
  Description of Artificial Sequence: Synthetic oligonucleotide
  Antisense strand to SEQ ID NO: 1383756
uuuccucagaaauaaaggc

SEQ ID NO: 1383758 - RNA, 19 nt, Artificial Sequence
  Description of Artificial Sequence: Synthetic oligonucleotide
  Sense strand starting at position 185 of SEQ ID NO: 1242943
cuuuauuucugaggaaaga

SEQ ID NO: 1383759 - RNA, 19 nt, Artificial Sequence
  Description of Artificial Sequence: Synthetic oligonucleotide
  Antisense strand to SEQ ID NO: 1383758
ucuuuccucagaaauaaag

SEQ ID NO: 1383760 - RNA, 19 nt, Artificial Sequence
  Description of Artificial Sequence: Synthetic oligonucleotide
  Sense strand starting at position 299 of SEQ ID NO: 1242943
acuguaauacuuuguacaa

SEQ ID NO: 1383761 - RNA, 19 nt, Artificial Sequence
  Description of Artificial Sequence: Synthetic oligonucleotide
  Antisense strand to SEQ ID NO: 1383760
uuguacaaaguauuacagu

SEQ ID NO: 1383762 - RNA, 19 nt, Artificial Sequence
  Description of Artificial Sequence: Synthetic oligonucleotide
  Sense strand starting at position 300 of SEQ ID NO: 1242943
cuguaauacuuuguacaaa

SEQ ID NO: 1383763 - RNA, 19 nt, Artificial Sequence
  Description of Artificial Sequence: Synthetic oligonucleotide
  Antisense strand to SEQ ID NO: 1383762
uuuguacaaaguauuacag

SEQ ID NO: 1383764 - RNA, 19 nt, Artificial Sequence
  Description of Artificial Sequence: Synthetic oligonucleotide
  Sense strand starting at position 301 of SEQ ID NO: 1242943
uguaauacuuuguacaaac

SEQ ID NO: 1383765 - RNA, 19 nt, Artificial Sequence
  Description of Artificial Sequence: Synthetic oligonucleotide
  Antisense strand to SEQ ID NO: 1383764
guuuguacaaaguauuaca

SEQ ID NO: 1383766 - RNA, 19 nt, Artificial Sequence
  Description of Artificial Sequence: Synthetic oligonucleotide
  Sense strand starting at position 356 of SEQ ID NO: 1242943
ccagaaacauguucgguuu

SEQ ID NO: 1383767 - RNA, 19 nt, Artificial Sequence
  Description of Artificial Sequence: Synthetic oligonucleotide
  Antisense strand to SEQ ID NO: 1383766
aaaccgaacauguuucugg

SEQ ID NO: 1383768 - RNA, 19 nt, Artificial Sequence
  Description of Artificial Sequence: Synthetic oligonucleotide
  Sense strand starting at position 701 of SEQ ID NO: 1242943
gcaucuugcuucccuugaa

SEQ ID NO: 1383769 - RNA, 19 nt, Artificial Sequence
  Description of Artificial Sequence: Synthetic oligonucleotide
  Antisense strand to SEQ ID NO: 1383768
uucaagggaagcaagaugc

SEQ ID NO: 1383770 - RNA, 19 nt, Artificial Sequence
  Description of Artificial Sequence: Synthetic oligonucleotide
  Sense strand starting at position 810 of SEQ ID NO: 1242943
ccuggacccuuaugaaugu

SEQ ID NO: 1383771 - RNA, 19 nt, Artificial Sequence
  Description of Artificial Sequence: Synthetic oligonucleotide
  Antisense strand to SEQ ID NO: 1383770
acauucauaaggguccagg

SEQ ID NO: 1383772 - RNA, 19 nt, Artificial Sequence
  Description of Artificial Sequence: Synthetic oligonucleotide
  Sense strand starting at position 837 of SEQ ID NO: 1242943
cuguaauucugaggaccuc

SEQ ID NO: 1383773 - RNA, 19 nt, Artificial Sequence
  Description of Artificial Sequence: Synthetic oligonucleotide
  Antisense strand to SEQ ID NO: 1383772
gagguccucagaauuacag

SEQ ID NO: 1383774 - RNA, 19 nt, Artificial Sequence
  Description of Artificial Sequence: Synthetic oligonucleotide
  Sense strand starting at position 875 of SEQ ID NO: 1242943
uagcaauggcgacauucua

SEQ ID NO: 1383775 - RNA, 19 nt, Artificial Sequence
  Description of Artificial Sequence: Synthetic oligonucleotide
  Antisense strand to SEQ ID NO: 1383774
uagaaugucgccauugcua

SEQ ID NO: 1383776 - RNA, 19 nt, Artificial Sequence
  Description of Artificial Sequence: Synthetic oligonucleotide
  Sense strand starting at position 910 of SEQ ID NO: 1242943
gacagcuuucggcgagauc

SEQ ID NO: 1383777 - RNA, 19 nt, Artificial Sequence
  Description of Artificial Sequence: Synthetic oligonucleotide
  Antisense strand to SEQ ID NO: 1383776
gaucucgccgaaagcuguc

SEQ ID NO: 1383778 - RNA, 19 nt, Artificial Sequence
  Description of Artificial Sequence: Synthetic oligonucleotide
  Sense strand starting at position 911 of SEQ ID NO: 1242943
acagcuuucggcgagaucu

SEQ ID NO: 1383779 - RNA, 19 nt, Artificial Sequence
  Description of Artificial Sequence: Synthetic oligonucleotide
  Antisense strand to SEQ ID NO: 1383778
agaucucgccgaaagcugu

SEQ ID NO: 1383780 - RNA, 19 nt, Artificial Sequence
  Description of Artificial Sequence: Synthetic oligonucleotide
  Sense strand starting at position 2027 of SEQ ID NO: 1242943
gggcacuugaugggaauca

SEQ ID NO: 1383781 - RNA, 19 nt, Artificial Sequence
  Description of Artificial Sequence: Synthetic oligonucleotide
  Antisense strand to SEQ ID NO: 1383780
ugauucccaucaagugccc

SEQ ID NO: 1383782 - RNA, 19 nt, Artificial Sequence
  Description of Artificial Sequence: Synthetic oligonucleotide
  Sense strand starting at position 2028 of SEQ ID NO: 1242943
ggcacuugaugggaaucau

SEQ ID NO: 1383783 - RNA, 19 nt, Artificial Sequence
  Description of Artificial Sequence: Synthetic oligonucleotide
  Antisense strand to SEQ ID NO: 1383782
augauucccaucaagugcc

SEQ ID NO: 1383784 - RNA, 19 nt, Artificial Sequence
  Description of Artificial Sequence: Synthetic oligonucleotide
  Sense strand starting at position 3709 of SEQ ID NO: 1242943
ccuucuaaguggcuuacaa

SEQ ID NO: 1383785 - RNA, 19 nt, Artificial Sequence
  Description of Artificial Sequence: Synthetic oligonucleotide
  Antisense strand to SEQ ID NO: 1383784
uuguaagccacuuagaagg

SEQ ID NO: 1383786 - RNA, 19 nt, Artificial Sequence
  Description of Artificial Sequence: Synthetic oligonucleotide
  Sense strand starting at position 3716 of SEQ ID NO: 1242943
aguggcuuacaaggguaau

SEQ ID NO: 1383787 - RNA, 19 nt, Artificial Sequence
  Description of Artificial Sequence: Synthetic oligonucleotide
  Antisense strand to SEQ ID NO: 1383786
auuacccuuguaagccacu

SEQ ID NO: 1383788 - RNA, 19 nt, Artificial Sequence
  Description of Artificial Sequence: Synthetic oligonucleotide
  Sense strand starting at position 3717 of SEQ ID NO: 1242943
guggcuuacaaggguaauu

SEQ ID NO: 1383789 - RNA, 19 nt, Artificial Sequence
  Description of Artificial Sequence: Synthetic oligonucleotide
  Antisense strand to SEQ ID NO: 1383788
aauuacccuuguaagccac

SEQ ID NO: 1383790 - RNA, 19 nt, Artificial Sequence
  Description of Artificial Sequence: Synthetic oligonucleotide
  Sense strand starting at position 3789 of SEQ ID NO: 1242943
accuuagucuuugaccuuu

SEQ ID NO: 1383791 - RNA, 19 nt, Artificial Sequence
  Description of Artificial Sequence: Synthetic oligonucleotide
  Antisense strand to SEQ ID NO: 1383790
aaaggucaaagacuaaggu

SEQ ID NO: 1383792 - RNA, 19 nt, Artificial Sequence
  Description of Artificial Sequence: Synthetic oligonucleotide
  Sense strand starting at position 3815 of SEQ ID NO: 1242943
ugagcacugugcuguguua

SEQ ID NO: 1383793 - RNA, 19 nt, Artificial Sequence
  Description of Artificial Sequence: Synthetic oligonucleotide
  Antisense strand to SEQ ID NO: 1383792
uaacacagcacagugcuca

SEQ ID NO: 1383794 - RNA, 19 nt, Artificial Sequence
  Description of Artificial Sequence: Synthetic oligonucleotide
  Sense strand starting at position 3817 of SEQ ID NO: 1242943
agcacugugcuguguuaac

SEQ ID NO: 1383795 - RNA, 19 nt, Artificial Sequence
  Description of Artificial Sequence: Synthetic oligonucleotide
  Antisense strand to SEQ ID NO: 1383794
guuaacacagcacagugcu

SEQ ID NO: 1383796 - RNA, 19 nt, Artificial Sequence
  Description of Artificial Sequence: Synthetic oligonucleotide
  Sense strand starting at position 3836 of SEQ ID NO: 1242943
acaguuaaucagcaacugu

SEQ ID NO: 1383797 - RNA, 19 nt, Artificial Sequence
  Description of Artificial Sequence: Synthetic oligonucleotide
  Antisense strand to SEQ ID NO: 1383796
acaguugcugauuaacugu

SEQ ID NO: 1383798 - RNA, 19 nt, Artificial Sequence
  Description of Artificial Sequence: Synthetic oligonucleotide
  Sense strand starting at position 3888 of SEQ ID NO: 1242943
aguugaauagccugggacu

SEQ ID NO: 1383799 - RNA, 19 nt, Artificial Sequence
  Description of Artificial Sequence: Synthetic oligonucleotide
  Antisense strand to SEQ ID NO: 1383798
agucccaggcuauucaacu

SEQ ID NO: 1383800 - RNA, 19 nt, Artificial Sequence
  Description of Artificial Sequence: Synthetic oligonucleotide
  Sense strand starting at position 3969 of SEQ ID NO: 1242943
gcugucaaugccuggagga

SEQ ID NO: 1383801 - RNA, 19 nt, Artificial Sequence
  Description of Artificial Sequence: Synthetic oligonucleotide
  Antisense strand to SEQ ID NO: 1383800
uccuccaggcauugacagc

SEQ ID NO: 1383802 - RNA, 19 nt, Artificial Sequence
  Description of Artificial Sequence: Synthetic oligonucleotide
  Sense strand starting at position 3971 of SEQ ID NO: 1242943
ugucaaugccuggaggagu

SEQ ID NO: 1383803 - RNA, 19 nt, Artificial Sequence
  Description of Artificial Sequence: Synthetic oligonucleotide
  Antisense strand to SEQ ID NO: 1383802
acuccuccaggcauugaca

SEQ ID NO: 1383804 - RNA, 19 nt, Artificial Sequence
  Description of Artificial Sequence: Synthetic oligonucleotide
  Sense strand starting at position 3982 of SEQ ID NO: 1242943
ggaggaguccuuugggcuu

SEQ ID NO: 1383805 - RNA, 19 nt, Artificial Sequence
  Description of Artificial Sequence: Synthetic oligonucleotide
  Antisense strand to SEQ ID NO: 1383804
aagcccaaaggacuccucc

SEQ ID NO: 1383806 - RNA, 19 nt, Artificial Sequence
  Description of Artificial Sequence: Synthetic oligonucleotide
  Sense strand starting at position 1215 of SEQ ID NO: 1242944
caaugacuuccggagagca

SEQ ID NO: 1383807 - RNA, 19 nt, Artificial Sequence
  Description of Artificial Sequence: Synthetic oligonucleotide
  Antisense strand to SEQ ID NO: 1383806
ugcucuccggaagucauug

SEQ ID NO: 1383808 - RNA, 19 nt, Artificial Sequence
  Description of Artificial Sequence: Synthetic oligonucleotide
  Sense strand starting at position 2082 of SEQ ID NO: 1242944
gagccagucguuuccgagu

SEQ ID NO: 1383809 - RNA, 19 nt, Artificial Sequence
  Description of Artificial Sequence: Synthetic oligonucleotide
  Antisense strand to SEQ ID NO: 1383808
acucggaaacgacuggcuc

SEQ ID NO: 1383810 - RNA, 19 nt, Artificial Sequence
  Description of Artificial Sequence: Synthetic oligonucleotide
  Sense strand starting at position 2142 of SEQ ID NO: 1242944
gccagaggugcagagauau

SEQ ID NO: 1383811 - RNA, 19 nt, Artificial Sequence
  Description of Artificial Sequence: Synthetic oligonucleotide
  Antisense strand to SEQ ID NO: 1383810
auaucucugcaccucuggc

SEQ ID NO: 1383812 - RNA, 19 nt, Artificial Sequence
  Description of Artificial Sequence: Synthetic oligonucleotide
  Sense strand starting at position 2204 of SEQ ID NO: 1242944
gaagguguccagcgagugu

SEQ ID NO: 1383813 - RNA, 19 nt, Artificial Sequence
  Description of Artificial Sequence: Synthetic oligonucleotide
  Antisense strand to SEQ ID NO: 1383812
acacucgcuggacaccuuc

SEQ ID NO: 1383814 - RNA, 19 nt, Artificial Sequence
  Description of Artificial Sequence: Synthetic oligonucleotide
  Sense strand starting at position 2622 of SEQ ID NO: 1242944
uggagaaugugaguccucu

SEQ ID NO: 1383815 - RNA, 19 nt, Artificial Sequence
  Description of Artificial Sequence: Synthetic oligonucleotide
  Antisense strand to SEQ ID NO: 1383814
agaggacucacauucucca

SEQ ID NO: 1383816 - RNA, 19 nt, Artificial Sequence
  Description of Artificial Sequence: Synthetic oligonucleotide
  Sense strand starting at position 2626 of SEQ ID NO: 1242944
gaaugugaguccucuggga

SEQ ID NO: 1383817 - RNA, 19 nt, Artificial Sequence
  Description of Artificial Sequence: Synthetic oligonucleotide
  Antisense strand to SEQ ID NO: 1383816
ucccagaggacucacauuc

SEQ ID NO: 1383818 - RNA, 19 nt, Artificial Sequence
  Description of Artificial Sequence: Synthetic oligonucleotide
  Sense strand starting at position 2628 of SEQ ID NO: 1242944
augugaguccucugggacu

SEQ ID NO: 1383819 - RNA, 19 nt, Artificial Sequence
  Description of Artificial Sequence: Synthetic oligonucleotide
  Antisense strand to SEQ ID NO: 1383818
agucccagaggacucacau

SEQ ID NO: 1383820 - RNA, 19 nt, Artificial Sequence
  Description of Artificial Sequence: Synthetic oligonucleotide
  Sense strand starting at position 2938 of SEQ ID NO: 1242944
agaucuagcgcucaauaag

SEQ ID NO: 1383821 - RNA, 19 nt, Artificial Sequence
  Description of Artificial Sequence: Synthetic oligonucleotide
  Antisense strand to SEQ ID NO: 1383820
cuuauugagcgcuagaucu

SEQ ID NO: 1383822 - RNA, 19 nt, Artificial Sequence
  Description of Artificial Sequence: Synthetic oligonucleotide
  Sense strand starting at position 3062 of SEQ ID NO: 1242944
caaggagcuggucgacauu

SEQ ID NO: 1383823 - RNA, 19 nt, Artificial Sequence
  Description of Artificial Sequence: Synthetic oligonucleotide
  Antisense strand to SEQ ID NO: 1383822
aaugucgaccagcuccuug

SEQ ID NO: 1383824 - RNA, 19 nt, Artificial Sequence
  Description of Artificial Sequence: Synthetic oligonucleotide
  Sense strand starting at position 3107 of SEQ ID NO: 1242944
gcagcaugaggcugaaauc

SEQ ID NO: 1383825 - RNA, 19 nt, Artificial Sequence
  Description of Artificial Sequence: Synthetic oligonucleotide
  Antisense strand to SEQ ID NO: 1383824
gauuucagccucaugcugc

SEQ ID NO: 1383826 - RNA, 19 nt, Artificial Sequence
  Description of Artificial Sequence: Synthetic oligonucleotide
  Sense strand starting at position 3122 of SEQ ID NO: 1242944
aaucuuccagcugaagagu

SEQ ID NO: 1383827 - RNA, 19 nt, Artificial Sequence
  Description of Artificial Sequence: Synthetic oligonucleotide
  Antisense strand to SEQ ID NO: 1383826
acucuucagcuggaagauu

SEQ ID NO: 1383828 - RNA, 19 nt, Artificial Sequence
  Description of Artificial Sequence: Synthetic oligonucleotide
  Sense strand starting at position 3287 of SEQ ID NO: 1242944
ccgggugaauguucaccua

SEQ ID NO: 1383829 - RNA, 19 nt, Artificial Sequence
  Description of Artificial Sequence: Synthetic oligonucleotide
  Antisense strand to SEQ ID NO: 1383828
uaggugaacauucacccgg

SEQ ID NO: 1383830 - RNA, 19 nt, Artificial Sequence
  Description of Artificial Sequence: Synthetic oligonucleotide
  Sense strand starting at position 3521 of SEQ ID NO: 1242944
ccagguuaccaugagcaua

SEQ ID NO: 1383831 - RNA, 19 nt, Artificial Sequence
  Description of Artificial Sequence: Synthetic oligonucleotide
  Antisense strand to SEQ ID NO: 1383830
uaugcucaugguaaccugg

SEQ ID NO: 1383832 - RNA, 19 nt, Artificial Sequence
  Description of Artificial Sequence: Synthetic oligonucleotide
  Sense strand starting at position 263 of SEQ ID NO: 1242945
accauuaggccuugucuga

SEQ ID NO: 1383833 - RNA, 19 nt, Artificial Sequence
  Description of Artificial Sequence: Synthetic oligonucleotide
  Antisense strand to SEQ ID NO: 1383832
ucagacaaggccuaauggu

SEQ ID NO: 1383834 - RNA, 19 nt, Artificial Sequence
  Description of Artificial Sequence: Synthetic oligonucleotide
  Sense strand starting at position 1525 of SEQ ID NO: 1242945
caaugacuuccggagagca

SEQ ID NO: 1383835 - RNA, 19 nt, Artificial Sequence
  Description of Artificial Sequence: Synthetic oligonucleotide
  Antisense strand to SEQ ID NO: 1383834
ugcucuccggaagucauug

SEQ ID NO: 1383836 - RNA, 19 nt, Artificial Sequence
  Description of Artificial Sequence: Synthetic oligonucleotide
  Sense strand starting at position 2392 of SEQ ID NO: 1242945
gagccagucguuuccgagu

SEQ ID NO: 1383837 - RNA, 19 nt, Artificial Sequence
  Description of Artificial Sequence: Synthetic oligonucleotide
  Antisense strand to SEQ ID NO: 1383836
acucggaaacgacuggcuc

SEQ ID NO: 1383838 - RNA, 19 nt, Artificial Sequence
  Description of Artificial Sequence: Synthetic oligonucleotide
  Sense strand starting at position 2452 of SEQ ID NO: 1242945
gccagaggugcagagauau

SEQ ID NO: 1383839 - RNA, 19 nt, Artificial Sequence
  Description of Artificial Sequence: Synthetic oligonucleotide
  Antisense strand to SEQ ID NO: 1383838
auaucucugcaccucuggc

SEQ ID NO: 1383840 - RNA, 19 nt, Artificial Sequence
  Description of Artificial Sequence: Synthetic oligonucleotide
  Sense strand starting at position 2514 of SEQ ID NO: 1242945
gaagguguccagcgagugu

SEQ ID NO: 1383841 - RNA, 19 nt, Artificial Sequence
  Description of Artificial Sequence: Synthetic oligonucleotide
  Antisense strand to SEQ ID NO: 1383840
acacucgcuggacaccuuc

SEQ ID NO: 1383842 - RNA, 19 nt, Artificial Sequence
  Description of Artificial Sequence: Synthetic oligonucleotide
  Sense strand starting at position 2932 of SEQ ID NO: 1242945
uggagaaugugaguccucu

SEQ ID NO: 1383843 - RNA, 19 nt, Artificial Sequence
  Description of Artificial Sequence: Synthetic oligonucleotide
  Antisense strand to SEQ ID NO: 1383842
agaggacucacauucucca

SEQ ID NO: 1383844 - RNA, 19 nt, Artificial Sequence
  Description of Artificial Sequence: Synthetic oligonucleotide
  Sense strand starting at position 2936 of SEQ ID NO: 1242945
gaaugugaguccucuggga

SEQ ID NO: 1383845 - RNA, 19 nt, Artificial Sequence
  Description of Artificial Sequence: Synthetic oligonucleotide
  Antisense strand to SEQ ID NO: 1383844
ucccagaggacucacauuc

SEQ ID NO: 1383846 - RNA, 19 nt, Artificial Sequence
  Description of Artificial Sequence: Synthetic oligonucleotide
  Sense strand starting at position 2938 of SEQ ID NO: 1242945
augugaguccucugggacu

SEQ ID NO: 1383847 - RNA, 19 nt, Artificial Sequence
  Description of Artificial Sequence: Synthetic oligonucleotide
  Antisense strand to SEQ ID NO: 1383846
agucccagaggacucacau

SEQ ID NO: 1383848 - RNA, 19 nt, Artificial Sequence
  Description of Artificial Sequence: Synthetic oligonucleotide
  Sense strand starting at position 3248 of SEQ ID NO: 1242945
agaucuagcgcucaauaag

SEQ ID NO: 1383849 - RNA, 19 nt, Artificial Sequence
  Description of Artificial Sequence: Synthetic oligonucleotide
  Antisense strand to SEQ ID NO: 1383848
cuuauugagcgcuagaucu

SEQ ID NO: 1383850 - RNA, 19 nt, Artificial Sequence
  Description of Artificial Sequence: Synthetic oligonucleotide
  Sense strand starting at position 3372 of SEQ ID NO: 1242945
caaggagcuggucgacauu

SEQ ID NO: 1383851 - RNA, 19 nt, Artificial Sequence
  Description of Artificial Sequence: Synthetic oligonucleotide
  Antisense strand to SEQ ID NO: 1383850
aaugucgaccagcuccuug

SEQ ID NO: 1383852 - RNA, 19 nt, Artificial Sequence
  Description of Artificial Sequence: Synthetic oligonucleotide
  Sense strand starting at position 3417 of SEQ ID NO: 1242945
gcagcaugaggcugaaauc

SEQ ID NO: 1383853 - RNA, 19 nt, Artificial Sequence
  Description of Artificial Sequence: Synthetic oligonucleotide
  Antisense strand to SEQ ID NO: 1383852
gauuucagccucaugcugc

SEQ ID NO: 1383854 - RNA, 19 nt, Artificial Sequence
  Description of Artificial Sequence: Synthetic oligonucleotide
  Sense strand starting at position 3432 of SEQ ID NO: 1242945
aaucuuccagcugaagagu

SEQ ID NO: 1383855 - RNA, 19 nt, Artificial Sequence
  Description of Artificial Sequence: Synthetic oligonucleotide
  Antisense strand to SEQ ID NO: 1383854
acucuucagcuggaagauu

SEQ ID NO: 1383856 - RNA, 19 nt, Artificial Sequence
  Description of Artificial Sequence: Synthetic oligonucleotide
  Sense strand starting at position 3597 of SEQ ID NO: 1242945
ccgggugaauguucaccua

SEQ ID NO: 1383857 - RNA, 19 nt, Artificial Sequence
  Description of Artificial Sequence: Synthetic oligonucleotide
  Antisense strand to SEQ ID NO: 1383856
uaggugaacauucacccgg

SEQ ID NO: 1383858 - RNA, 19 nt, Artificial Sequence
  Description of Artificial Sequence: Synthetic oligonucleotide
  Sense strand starting at position 3831 of SEQ ID NO: 1242945
ccagguuaccaugagcaua

SEQ ID NO: 1383859 - RNA, 19 nt, Artificial Sequence
  Description of Artificial Sequence: Synthetic oligonucleotide
  Antisense strand to SEQ ID NO: 1383858
uaugcucaugguaaccugg

SEQ ID NO: 1383860 - RNA, 19 nt, Artificial Sequence
  Description of Artificial Sequence: Synthetic oligonucleotide
  Sense strand starting at position 184 of SEQ ID NO: 1242946
ggcaaagugugccuguaga

SEQ ID NO: 1383861 - RNA, 19 nt, Artificial Sequence
  Description of Artificial Sequence: Synthetic oligonucleotide
  Antisense strand to SEQ ID NO: 1383860
ucuacaggcacacuuugcc

SEQ ID NO: 1383862 - RNA, 19 nt, Artificial Sequence
  Description of Artificial Sequence: Synthetic oligonucleotide
  Sense strand starting at position 261 of SEQ ID NO: 1242946
gcaggaauuagaggcauua

SEQ ID NO: 1383863 - RNA, 19 nt, Artificial Sequence
  Description of Artificial Sequence: Synthetic oligonucleotide
  Antisense strand to SEQ ID NO: 1383862
uaaugccucuaauuccugc

SEQ ID NO: 1383864 - RNA, 19 nt, Artificial Sequence
  Description of Artificial Sequence: Synthetic oligonucleotide
  Sense strand starting at position 270 of SEQ ID NO: 1242946
agaggcauuacccagguua

SEQ ID NO: 1383865 - RNA, 19 nt, Artificial Sequence
  Description of Artificial Sequence: Synthetic oligonucleotide
  Antisense strand to SEQ ID NO: 1383864
uaaccuggguaaugccucu

SEQ ID NO: 1383866 - RNA, 19 nt, Artificial Sequence
  Description of Artificial Sequence: Synthetic oligonucleotide
  Sense strand starting at position 272 of SEQ ID NO: 1242946
aggcauuacccagguuacu

SEQ ID NO: 1383867 - RNA, 19 nt, Artificial Sequence
  Description of Artificial Sequence: Synthetic oligonucleotide
  Antisense strand to SEQ ID NO: 1383866
aguaaccuggguaaugccu

SEQ ID NO: 1383868 - RNA, 19 nt, Artificial Sequence
  Description of Artificial Sequence: Synthetic oligonucleotide
  Sense strand starting at position 611 of SEQ ID NO: 1242946
ccaucaagccuccgaaacu

SEQ ID NO: 1383869 - RNA, 19 nt, Artificial Sequence
  Description of Artificial Sequence: Synthetic oligonucleotide
  Antisense strand to SEQ ID NO: 1383868
aguuucggaggcuugaugg

SEQ ID NO: 1383870 - RNA, 19 nt, Artificial Sequence
  Description of Artificial Sequence: Synthetic oligonucleotide
  Sense strand starting at position 934 of SEQ ID NO: 1242946
cggcguccgccuccuaauu

SEQ ID NO: 1383871 - RNA, 19 nt, Artificial Sequence
  Description of Artificial Sequence: Synthetic oligonucleotide
  Antisense strand to SEQ ID NO: 1383870
aauuaggaggcggacgccg

SEQ ID NO: 1383872 - RNA, 19 nt, Artificial Sequence
  Description of Artificial Sequence: Synthetic oligonucleotide
  Sense strand starting at position 1421 of SEQ ID NO: 1242946
cgggaaaguugaccagagu

SEQ ID NO: 1383873 - RNA, 19 nt, Artificial Sequence
  Description of Artificial Sequence: Synthetic oligonucleotide
  Antisense strand to SEQ ID NO: 1383872
acucuggucaacuuucccg

SEQ ID NO: 1383874 - RNA, 19 nt, Artificial Sequence
  Description of Artificial Sequence: Synthetic oligonucleotide
  Sense strand starting at position 1651 of SEQ ID NO: 1242946
ggucauugggcucaaccua

SEQ ID NO: 1383875 - RNA, 19 nt, Artificial Sequence
  Description of Artificial Sequence: Synthetic oligonucleotide
  Antisense strand to SEQ ID NO: 1383874
uagguugagcccaaugacc

SEQ ID NO: 1383876 - RNA, 19 nt, Artificial Sequence
  Description of Artificial Sequence: Synthetic oligonucleotide
  Sense strand starting at position 1673 of SEQ ID NO: 1242946
ccugaagcgucguuaacuu

SEQ ID NO: 1383877 - RNA, 19 nt, Artificial Sequence
  Description of Artificial Sequence: Synthetic oligonucleotide
  Antisense strand to SEQ ID NO: 1383876
aaguuaacgacgcuucagg

SEQ ID NO: 1383878 - RNA, 19 nt, Artificial Sequence
  Description of Artificial Sequence: Synthetic oligonucleotide
  Sense strand starting at position 1681 of SEQ ID NO: 1242946
gucguuaacuuuccagaua

SEQ ID NO: 1383879 - RNA, 19 nt, Artificial Sequence
  Description of Artificial Sequence: Synthetic oligonucleotide
  Antisense strand to SEQ ID NO: 1383878
uaucuggaaaguuaacgac

SEQ ID NO: 1383880 - RNA, 19 nt, Artificial Sequence
  Description of Artificial Sequence: Synthetic oligonucleotide
  Sense strand starting at position 1682 of SEQ ID NO: 1242946
ucguuaacuuuccagauac

SEQ ID NO: 1383881 - RNA, 19 nt, Artificial Sequence
  Description of Artificial Sequence: Synthetic oligonucleotide
  Antisense strand to SEQ ID NO: 1383880
guaucuggaaaguuaacga

SEQ ID NO: 1383882 - RNA, 19 nt, Artificial Sequence
  Description of Artificial Sequence: Synthetic oligonucleotide
  Sense strand starting at position 2131 of SEQ ID NO: 1242946
ugaccuuaucgacaguagu

SEQ ID NO: 1383883 - RNA, 19 nt, Artificial Sequence
  Description of Artificial Sequence: Synthetic oligonucleotide
  Antisense strand to SEQ ID NO: 1383882
acuacugucgauaagguca

SEQ ID NO: 1383884 - RNA, 19 nt, Artificial Sequence
  Description of Artificial Sequence: Synthetic oligonucleotide
  Sense strand starting at position 2168 of SEQ ID NO: 1242946
uagugcuagacucgaguaa

SEQ ID NO: 1383885 - RNA, 19 nt, Artificial Sequence
  Description of Artificial Sequence: Synthetic oligonucleotide
  Antisense strand to SEQ ID NO: 1383884
uuacucgagucuagcacua

SEQ ID NO: 1383886 - RNA, 19 nt, Artificial Sequence
  Description of Artificial Sequence: Synthetic oligonucleotide
  Sense strand starting at position 2169 of SEQ ID NO: 1242946
agugcuagacucgaguaaa

SEQ ID NO: 1383887 - RNA, 19 nt, Artificial Sequence
  Description of Artificial Sequence: Synthetic oligonucleotide
  Antisense strand to SEQ ID NO: 1383886
uuuacucgagucuagcacu

SEQ ID NO: 1383888 - RNA, 19 nt, Artificial Sequence
  Description of Artificial Sequence: Synthetic oligonucleotide
  Sense strand starting at position 2172 of SEQ ID NO: 1242946
gcuagacucgaguaaagug

SEQ ID NO: 1383889 - RNA, 19 nt, Artificial Sequence
  Description of Artificial Sequence: Synthetic oligonucleotide
  Antisense strand to SEQ ID NO: 1383888
cacuuuacucgagucuagc

SEQ ID NO: 1383890 - RNA, 19 nt, Artificial Sequence
  Description of Artificial Sequence: Synthetic oligonucleotide
  Sense strand starting at position 2180 of SEQ ID NO: 1242946
cgaguaaagugagaugaag

SEQ ID NO: 1383891 - RNA, 19 nt, Artificial Sequence
  Description of Artificial Sequence: Synthetic oligonucleotide
  Antisense strand to SEQ ID NO: 1383890
cuucaucucacuuuacucg

SEQ ID NO: 1383892 - RNA, 19 nt, Artificial Sequence
  Description of Artificial Sequence: Synthetic oligonucleotide
  Sense strand starting at position 2241 of SEQ ID NO: 1242946
gagaguuguuagcagagac

SEQ ID NO: 1383893 - RNA, 19 nt, Artificial Sequence
  Description of Artificial Sequence: Synthetic oligonucleotide
  Antisense strand to SEQ ID NO: 1383892
gucucugcuaacaacucuc

SEQ ID NO: 1383894 - RNA, 19 nt, Artificial Sequence
  Description of Artificial Sequence: Synthetic oligonucleotide
  Sense strand starting at position 2245 of SEQ ID NO: 1242946
guuguuagcagagacaaga

SEQ ID NO: 1383895 - RNA, 19 nt, Artificial Sequence
  Description of Artificial Sequence: Synthetic oligonucleotide
  Antisense strand to SEQ ID NO: 1383894
ucuugucucugcuaacaac

SEQ ID NO: 1383896 - RNA, 19 nt, Artificial Sequence
  Description of Artificial Sequence: Synthetic oligonucleotide
  Sense strand starting at position 2275 of SEQ ID NO: 1242946
agcugaaggcgaugaguuu

SEQ ID NO: 1383897 - RNA, 19 nt, Artificial Sequence
  Description of Artificial Sequence: Synthetic oligonucleotide
  Antisense strand to SEQ ID NO: 1383896
aaacucaucgccuucagcu

SEQ ID NO: 1383898 - RNA, 19 nt, Artificial Sequence
  Description of Artificial Sequence: Synthetic oligonucleotide
  Sense strand starting at position 2662 of SEQ ID NO: 1242946
agcugcagucuauaaacuu

SEQ ID NO: 1383899 - RNA, 19 nt, Artificial Sequence
  Description of Artificial Sequence: Synthetic oligonucleotide
  Antisense strand to SEQ ID NO: 1383898
aaguuuauagacugcagcu

SEQ ID NO: 1383900 - RNA, 19 nt, Artificial Sequence
  Description of Artificial Sequence: Synthetic oligonucleotide
  Sense strand starting at position 2678 of SEQ ID NO: 1242946
cuucuccucucgcaaguuu

SEQ ID NO: 1383901 - RNA, 19 nt, Artificial Sequence
  Description of Artificial Sequence: Synthetic oligonucleotide
  Antisense strand to SEQ ID NO: 1383900
aaacuugcgagaggagaag

SEQ ID NO: 1383902 - RNA, 19 nt, Artificial Sequence
  Description of Artificial Sequence: Synthetic oligonucleotide
  Sense strand starting at position 3395 of SEQ ID NO: 1242946
aacagugagcuaugaucga

SEQ ID NO: 1383903 - RNA, 19 nt, Artificial Sequence
  Description of Artificial Sequence: Synthetic oligonucleotide
  Antisense strand to SEQ ID NO: 1383902
ucgaucauagcucacuguu

SEQ ID NO: 1383904 - RNA, 19 nt, Artificial Sequence
  Description of Artificial Sequence: Synthetic oligonucleotide
  Sense strand starting at position 3506 of SEQ ID NO: 1242946
gagcuaguccuauaggcau

SEQ ID NO: 1383905 - RNA, 19 nt, Artificial Sequence
  Description of Artificial Sequence: Synthetic oligonucleotide
  Antisense strand to SEQ ID NO: 1383904
augccuauaggacuagcuc

SEQ ID NO: 1383906 - RNA, 19 nt, Artificial Sequence
  Description of Artificial Sequence: Synthetic oligonucleotide
  Sense strand starting at position 3512 of SEQ ID NO: 1242946
guccuauaggcaugcuauc

SEQ ID NO: 1383907 - RNA, 19 nt, Artificial Sequence
  Description of Artificial Sequence: Synthetic oligonucleotide
  Antisense strand to SEQ ID NO: 1383906
gauagcaugccuauaggac

SEQ ID NO: 1383908 - RNA, 19 nt, Artificial Sequence
  Description of Artificial Sequence: Synthetic oligonucleotide
  Sense strand starting at position 3641 of SEQ ID NO: 1242946
gcucuagagucugccagua

SEQ ID NO: 1383909 - RNA, 19 nt, Artificial Sequence
  Description of Artificial Sequence: Synthetic oligonucleotide
  Antisense strand to SEQ ID NO: 1383908
uacuggcagacucuagagc

SEQ ID NO: 1383910 - RNA, 19 nt, Artificial Sequence
  Description of Artificial Sequence: Synthetic oligonucleotide
  Sense strand starting at position 3643 of SEQ ID NO: 1242946
ucuagagucugccaguaag

SEQ ID NO: 1383911 - RNA, 19 nt, Artificial Sequence
  Description of Artificial Sequence: Synthetic oligonucleotide
  Antisense strand to SEQ ID NO: 1383910
cuuacuggcagacucuaga

SEQ ID NO: 1383912 - RNA, 19 nt, Artificial Sequence
  Description of Artificial Sequence: Synthetic oligonucleotide
  Sense strand starting at position 3696 of SEQ ID NO: 1242946
ggcggacugauaggaaguu

SEQ ID NO: 1383913 - RNA, 19 nt, Artificial Sequence
  Description of Artificial Sequence: Synthetic oligonucleotide
  Antisense strand to SEQ ID NO: 1383912
aacuuccuaucaguccgcc

SEQ ID NO: 1383914 - RNA, 19 nt, Artificial Sequence
  Description of Artificial Sequence: Synthetic oligonucleotide
  Sense strand starting at position 3697 of SEQ ID NO: 1242946
gcggacugauaggaaguuu

SEQ ID NO: 1383915 - RNA, 19 nt, Artificial Sequence
  Description of Artificial Sequence: Synthetic oligonucleotide
  Antisense strand to SEQ ID NO: 1383914
aaacuuccuaucaguccgc

SEQ ID NO: 1383916 - RNA, 19 nt, Artificial Sequence
  Description of Artificial Sequence: Synthetic oligonucleotide
  Sense strand starting at position 3712 of SEQ ID NO: 1242946
guuugaagagauuggcuga

SEQ ID NO: 1383917 - RNA, 19 nt, Artificial Sequence
  Description of Artificial Sequence: Synthetic oligonucleotide
  Antisense strand to SEQ ID NO: 1383916
ucagccaaucucuucaaac

SEQ ID NO: 1383918 - RNA, 19 nt, Artificial Sequence
  Description of Artificial Sequence: Synthetic oligonucleotide
  Sense strand starting at position 3737 of SEQ ID NO: 1242946
gcgcucagcaaguguuagu

SEQ ID NO: 1383919 - RNA, 19 nt, Artificial Sequence
  Description of Artificial Sequence: Synthetic oligonucleotide
  Antisense strand to SEQ ID NO: 1383918
acuaacacuugcugagcgc

SEQ ID NO: 1383920 - RNA, 19 nt, Artificial Sequence
  Description of Artificial Sequence: Synthetic oligonucleotide
  Sense strand starting at position 3738 of SEQ ID NO: 1242946
cgcucagcaaguguuagua

SEQ ID NO: 1383921 - RNA, 19 nt, Artificial Sequence
  Description of Artificial Sequence: Synthetic oligonucleotide
  Antisense strand to SEQ ID NO: 1383920
uacuaacacuugcugagcg

SEQ ID NO: 1383922 - RNA, 19 nt, Artificial Sequence
  Description of Artificial Sequence: Synthetic oligonucleotide
  Sense strand starting at position 3740 of SEQ ID NO: 1242946
cucagcaaguguuaguaaa

SEQ ID NO: 1383923 - RNA, 19 nt, Artificial Sequence
  Description of Artificial Sequence: Synthetic oligonucleotide
  Antisense strand to SEQ ID NO: 1383922
uuuacuaacacuugcugag

SEQ ID NO: 1383924 - RNA, 19 nt, Artificial Sequence
  Description of Artificial Sequence: Synthetic oligonucleotide
  Sense strand starting at position 3836 of SEQ ID NO: 1242946
aaggaucaguguuugaaua

SEQ ID NO: 1383925 - RNA, 19 nt, Artificial Sequence
  Description of Artificial Sequence: Synthetic oligonucleotide
  Antisense strand to SEQ ID NO: 1383924
uauucaaacacugauccuu

SEQ ID NO: 1383926 - RNA, 19 nt, Artificial Sequence
  Description of Artificial Sequence: Synthetic oligonucleotide
  Sense strand starting at position 3837 of SEQ ID NO: 1242946
aggaucaguguuugaauaa

SEQ ID NO: 1383927 - RNA, 19 nt, Artificial Sequence
  Description of Artificial Sequence: Synthetic oligonucleotide
  Antisense strand to SEQ ID NO: 1383926
uuauucaaacacugauccu

SEQ ID NO: 1383928 - RNA, 19 nt, Artificial Sequence
  Description of Artificial Sequence: Synthetic oligonucleotide
  Sense strand starting at position 3838 of SEQ ID NO: 1242946
ggaucaguguuugaauaaa

SEQ ID NO: 1383929 - RNA, 19 nt, Artificial Sequence
  Description of Artificial Sequence: Synthetic oligonucleotide
  Antisense strand to SEQ ID NO: 1383928
uuuauucaaacacugaucc

SEQ ID NO: 1383930 - RNA, 19 nt, Artificial Sequence
  Description of Artificial Sequence: Synthetic oligonucleotide
  Sense strand starting at position 139 of SEQ ID NO: 1242947
ccggcaucuggcgagagaa

SEQ ID NO: 1383931 - RNA, 19 nt, Artificial Sequence
  Description of Artificial Sequence: Synthetic oligonucleotide
  Antisense strand to SEQ ID NO: 1383930
uucucucgccagaugccgg

SEQ ID NO: 1383932 - RNA, 19 nt, Artificial Sequence
  Description of Artificial Sequence: Synthetic oligonucleotide
  Sense strand starting at position 209 of SEQ ID NO: 1242947
auggguguucucuguuacu

SEQ ID NO: 1383933 - RNA, 19 nt, Artificial Sequence
  Description of Artificial Sequence: Synthetic oligonucleotide
  Antisense strand to SEQ ID NO: 1383932
aguaacagagaacacccau

SEQ ID NO: 1383934 - RNA, 19 nt, Artificial Sequence
  Description of Artificial Sequence: Synthetic oligonucleotide
  Sense strand starting at position 212 of SEQ ID NO: 1242947
gguguucucuguuacuagu

SEQ ID NO: 1383935 - RNA, 19 nt, Artificial Sequence
  Description of Artificial Sequence: Synthetic oligonucleotide
  Antisense strand to SEQ ID NO: 1383934
acuaguaacagagaacacc

SEQ ID NO: 1383936 - RNA, 19 nt, Artificial Sequence
  Description of Artificial Sequence: Synthetic oligonucleotide
  Sense strand starting at position 218 of SEQ ID NO: 1242947
cucuguuacuaguggacau

SEQ ID NO: 1383937 - RNA, 19 nt, Artificial Sequence
  Description of Artificial Sequence: Synthetic oligonucleotide
  Antisense strand to SEQ ID NO: 1383936
auguccacuaguaacagag

SEQ ID NO: 1383938 - RNA, 19 nt, Artificial Sequence
  Description of Artificial Sequence: Synthetic oligonucleotide
  Sense strand starting at position 259 of SEQ ID NO: 1242947
ccgcuuacugagcauaaga

SEQ ID NO: 1383939 - RNA, 19 nt, Artificial Sequence
  Description of Artificial Sequence: Synthetic oligonucleotide
  Antisense strand to SEQ ID NO: 1383938
ucuuaugcucaguaagcgg

SEQ ID NO: 1383940 - RNA, 19 nt, Artificial Sequence
  Description of Artificial Sequence: Synthetic oligonucleotide
  Sense strand starting at position 261 of SEQ ID NO: 1242947
gcuuacugagcauaagacu

SEQ ID NO: 1383941 - RNA, 19 nt, Artificial Sequence
  Description of Artificial Sequence: Synthetic oligonucleotide
  Antisense strand to SEQ ID NO: 1383940
agucuuaugcucaguaagc

SEQ ID NO: 1383942 - RNA, 19 nt, Artificial Sequence
  Description of Artificial Sequence: Synthetic oligonucleotide
  Sense strand starting at position 270 of SEQ ID NO: 1242947
gcauaagacuugguagacu

SEQ ID NO: 1383943 - RNA, 19 nt, Artificial Sequence
  Description of Artificial Sequence: Synthetic oligonucleotide
  Antisense strand to SEQ ID NO: 1383942
agucuaccaagucuuaugc

SEQ ID NO: 1383944 - RNA, 19 nt, Artificial Sequence
  Description of Artificial Sequence: Synthetic oligonucleotide
  Sense strand starting at position 387 of SEQ ID NO: 1242947
aggcaucuuugaggguuaa

SEQ ID NO: 1383945 - RNA, 19 nt, Artificial Sequence
  Description of Artificial Sequence: Synthetic oligonucleotide
  Antisense strand to SEQ ID NO: 1383944
uuaacccucaaagaugccu

SEQ ID NO: 1383946 - RNA, 19 nt, Artificial Sequence
  Description of Artificial Sequence: Synthetic oligonucleotide
  Sense strand starting at position 388 of SEQ ID NO: 1242947
ggcaucuuugaggguuaaa

SEQ ID NO: 1383947 - RNA, 19 nt, Artificial Sequence
  Description of Artificial Sequence: Synthetic oligonucleotide
  Antisense strand to SEQ ID NO: 1383946
uuuaacccucaaagaugcc

SEQ ID NO: 1383948 - RNA, 19 nt, Artificial Sequence
  Description of Artificial Sequence: Synthetic oligonucleotide
  Sense strand starting at position 399 of SEQ ID NO: 1242947
ggguuaaaugggcgacaca

SEQ ID NO: 1383949 - RNA, 19 nt, Artificial Sequence
  Description of Artificial Sequence: Synthetic oligonucleotide
  Antisense strand to SEQ ID NO: 1383948
ugugucgcccauuuaaccc

SEQ ID NO: 1383950 - RNA, 19 nt, Artificial Sequence
  Description of Artificial Sequence: Synthetic oligonucleotide
  Sense strand starting at position 400 of SEQ ID NO: 1242947
gguuaaaugggcgacacau

SEQ ID NO: 1383951 - RNA, 19 nt, Artificial Sequence
  Description of Artificial Sequence: Synthetic oligonucleotide
  Antisense strand to SEQ ID NO: 1383950
augugucgcccauuuaacc

SEQ ID NO: 1383952 - RNA, 19 nt, Artificial Sequence
  Description of Artificial Sequence: Synthetic oligonucleotide
  Sense strand starting at position 417 of SEQ ID NO: 1242947
auacaaagcccuuagugua

SEQ ID NO: 1383953 - RNA, 19 nt, Artificial Sequence
  Description of Artificial Sequence: Synthetic oligonucleotide
  Antisense strand to SEQ ID NO: 1383952
uacacuaagggcuuuguau

SEQ ID NO: 1383954 - RNA, 19 nt, Artificial Sequence
  Description of Artificial Sequence: Synthetic oligonucleotide
  Sense strand starting at position 746 of SEQ ID NO: 1242947
caagacaguuauuagagaa

SEQ ID NO: 1383955 - RNA, 19 nt, Artificial Sequence
  Description of Artificial Sequence: Synthetic oligonucleotide
  Antisense strand to SEQ ID NO: 1383954
uucucuaauaacugucuug

SEQ ID NO: 1383956 - RNA, 19 nt, Artificial Sequence
  Description of Artificial Sequence: Synthetic oligonucleotide
  Sense strand starting at position 759 of SEQ ID NO: 1242947
agagaaacuuucccugugu

SEQ ID NO: 1383957 - RNA, 19 nt, Artificial Sequence
  Description of Artificial Sequence: Synthetic oligonucleotide
  Antisense strand to SEQ ID NO: 1383956
acacagggaaaguuucucu

SEQ ID NO: 1383958 - RNA, 19 nt, Artificial Sequence
  Description of Artificial Sequence: Synthetic oligonucleotide
  Sense strand starting at position 760 of SEQ ID NO: 1242947
gagaaacuuucccuguguc

SEQ ID NO: 1383959 - RNA, 19 nt, Artificial Sequence
  Description of Artificial Sequence: Synthetic oligonucleotide
  Antisense strand to SEQ ID NO: 1383958
gacacagggaaaguuucuc

SEQ ID NO: 1383960 - RNA, 19 nt, Artificial Sequence
  Description of Artificial Sequence: Synthetic oligonucleotide
  Sense strand starting at position 1034 of SEQ ID NO: 1242947
gguuuccauuugcaacuaa

SEQ ID NO: 1383961 - RNA, 19 nt, Artificial Sequence
  Description of Artificial Sequence: Synthetic oligonucleotide
  Antisense strand to SEQ ID NO: 1383960
uuaguugcaaauggaaacc

SEQ ID NO: 1383962 - RNA, 19 nt, Artificial Sequence
  Description of Artificial Sequence: Synthetic oligonucleotide
  Sense strand starting at position 1115 of SEQ ID NO: 1242947
gcacuagagaauuggguuu

SEQ ID NO: 1383963 - RNA, 19 nt, Artificial Sequence
  Description of Artificial Sequence: Synthetic oligonucleotide
  Antisense strand to SEQ ID NO: 1383962
aaacccaauucucuagugc

SEQ ID NO: 1383964 - RNA, 19 nt, Artificial Sequence
  Description of Artificial Sequence: Synthetic oligonucleotide
  Sense strand starting at position 1117 of SEQ ID NO: 1242947
acuagagaauuggguuuaa

SEQ ID NO: 1383965 - RNA, 19 nt, Artificial Sequence
  Description of Artificial Sequence: Synthetic oligonucleotide
  Antisense strand to SEQ ID NO: 1383964
uuaaacccaauucucuagu

SEQ ID NO: 1383966 - RNA, 19 nt, Artificial Sequence
  Description of Artificial Sequence: Synthetic oligonucleotide
  Sense strand starting at position 1227 of SEQ ID NO: 1242947
ugccucaugucucagguaa

SEQ ID NO: 1383967 - RNA, 19 nt, Artificial Sequence
  Description of Artificial Sequence: Synthetic oligonucleotide
  Antisense strand to SEQ ID NO: 1383966
uuaccugagacaugaggca

SEQ ID NO: 1383968 - RNA, 19 nt, Artificial Sequence
  Description of Artificial Sequence: Synthetic oligonucleotide
  Sense strand starting at position 1229 of SEQ ID NO: 1242947
ccucaugucucagguaagu

SEQ ID NO: 1383969 - RNA, 19 nt, Artificial Sequence
  Description of Artificial Sequence: Synthetic oligonucleotide
  Antisense strand to SEQ ID NO: 1383968
acuuaccugagacaugagg

SEQ ID NO: 1383970 - RNA, 19 nt, Artificial Sequence
  Description of Artificial Sequence: Synthetic oligonucleotide
  Sense strand starting at position 1231 of SEQ ID NO: 1242947
ucaugucucagguaaguca

SEQ ID NO: 1383971 - RNA, 19 nt, Artificial Sequence
  Description of Artificial Sequence: Synthetic oligonucleotide
  Antisense strand to SEQ ID NO: 1383970
ugacuuaccugagacauga

SEQ ID NO: 1383972 - RNA, 19 nt, Artificial Sequence
  Description of Artificial Sequence: Synthetic oligonucleotide
  Sense strand starting at position 1306 of SEQ ID NO: 1242947
gacugugguuuccuccaga

SEQ ID NO: 1383973 - RNA, 19 nt, Artificial Sequence
  Description of Artificial Sequence: Synthetic oligonucleotide
  Antisense strand to SEQ ID NO: 1383972
ucuggaggaaaccacaguc

SEQ ID NO: 1383974 - RNA, 19 nt, Artificial Sequence
  Description of Artificial Sequence: Synthetic oligonucleotide
  Sense strand starting at position 1309 of SEQ ID NO: 1242947
ugugguuuccuccagagca

SEQ ID NO: 1383975 - RNA, 19 nt, Artificial Sequence
  Description of Artificial Sequence: Synthetic oligonucleotide
  Antisense strand to SEQ ID NO: 1383974
ugcucuggaggaaaccaca

SEQ ID NO: 1383976 - RNA, 19 nt, Artificial Sequence
  Description of Artificial Sequence: Synthetic oligonucleotide
  Sense strand starting at position 1494 of SEQ ID NO: 1242947
acucuuaggucucaggaaa

SEQ ID NO: 1383977 - RNA, 19 nt, Artificial Sequence
  Description of Artificial Sequence: Synthetic oligonucleotide
  Antisense strand to SEQ ID NO: 1383976
uuuccugagaccuaagagu

SEQ ID NO: 1383978 - RNA, 19 nt, Artificial Sequence
  Description of Artificial Sequence: Synthetic oligonucleotide
  Sense strand starting at position 1546 of SEQ ID NO: 1242947
ggacgccucucacguagaa

SEQ ID NO: 1383979 - RNA, 19 nt, Artificial Sequence
  Description of Artificial Sequence: Synthetic oligonucleotide
  Antisense strand to SEQ ID NO: 1383978
uucuacgugagaggcgucc

SEQ ID NO: 1383980 - RNA, 19 nt, Artificial Sequence
  Description of Artificial Sequence: Synthetic oligonucleotide
  Sense strand starting at position 2160 of SEQ ID NO: 1242947
ggcaaagugugccuguaga

SEQ ID NO: 1383981 - RNA, 19 nt, Artificial Sequence
  Description of Artificial Sequence: Synthetic oligonucleotide
  Antisense strand to SEQ ID NO: 1383980
ucuacaggcacacuuugcc

SEQ ID NO: 1383982 - RNA, 19 nt, Artificial Sequence
  Description of Artificial Sequence: Synthetic oligonucleotide
  Sense strand starting at position 2237 of SEQ ID NO: 1242947
gcaggaauuagaggcauua

SEQ ID NO: 1383983 - RNA, 19 nt, Artificial Sequence
  Description of Artificial Sequence: Synthetic oligonucleotide
  Antisense strand to SEQ ID NO: 1383982
uaaugccucuaauuccugc

SEQ ID NO: 1383984 - RNA, 19 nt, Artificial Sequence
  Description of Artificial Sequence: Synthetic oligonucleotide
  Sense strand starting at position 2246 of SEQ ID NO: 1242947
agaggcauuacccagguua

SEQ ID NO: 1383985 - RNA, 19 nt, Artificial Sequence
  Description of Artificial Sequence: Synthetic oligonucleotide
  Antisense strand to SEQ ID NO: 1383984
uaaccuggguaaugccucu

SEQ ID NO: 1383986 - RNA, 19 nt, Artificial Sequence
  Description of Artificial Sequence: Synthetic oligonucleotide
  Sense strand starting at position 2248 of SEQ ID NO: 1242947
aggcauuacccagguuacu

SEQ ID NO: 1383987 - RNA, 19 nt, Artificial Sequence
  Description of Artificial Sequence: Synthetic oligonucleotide
  Antisense strand to SEQ ID NO: 1383986
aguaaccuggguaaugccu

SEQ ID NO: 1383988 - RNA, 19 nt, Artificial Sequence
  Description of Artificial Sequence: Synthetic oligonucleotide
  Sense strand starting at position 2587 of SEQ ID NO: 1242947
ccaucaagccuccgaaacu

SEQ ID NO: 1383989 - RNA, 19 nt, Artificial Sequence
  Description of Artificial Sequence: Synthetic oligonucleotide
  Antisense strand to SEQ ID NO: 1383988
aguuucggaggcuugaugg

SEQ ID NO: 1383990 - RNA, 19 nt, Artificial Sequence
  Description of Artificial Sequence: Synthetic oligonucleotide
  Sense strand starting at position 2910 of SEQ ID NO: 1242947
cggcguccgccuccuaauu

SEQ ID NO: 1383991 - RNA, 19 nt, Artificial Sequence
  Description of Artificial Sequence: Synthetic oligonucleotide
  Antisense strand to SEQ ID NO: 1383990
aauuaggaggcggacgccg

SEQ ID NO: 1383992 - RNA, 19 nt, Artificial Sequence
  Description of Artificial Sequence: Synthetic oligonucleotide
  Sense strand starting at position 3397 of SEQ ID NO: 1242947
cgggaaaguugaccagagu

SEQ ID NO: 1383993 - RNA, 19 nt, Artificial Sequence
  Description of Artificial Sequence: Synthetic oligonucleotide
  Antisense strand to SEQ ID NO: 1383992
acucuggucaacuuucccg

SEQ ID NO: 1383994 - RNA, 19 nt, Artificial Sequence
  Description of Artificial Sequence: Synthetic oligonucleotide
  Sense strand starting at position 3627 of SEQ ID NO: 1242947
ggucauugggcucaaccua

SEQ ID NO: 1383995 - RNA, 19 nt, Artificial Sequence
  Description of Artificial Sequence: Synthetic oligonucleotide
  Antisense strand to SEQ ID NO: 1383994
uagguugagcccaaugacc

SEQ ID NO: 1383996 - RNA, 19 nt, Artificial Sequence
  Description of Artificial Sequence: Synthetic oligonucleotide
  Sense strand starting at position 3649 of SEQ ID NO: 1242947
ccugaagcgucguuaacuu

SEQ ID NO: 1383997 - RNA, 19 nt, Artificial Sequence
  Description of Artificial Sequence: Synthetic oligonucleotide
  Antisense strand to SEQ ID NO: 1383996
aaguuaacgacgcuucagg

SEQ ID NO: 1383998 - RNA, 19 nt, Artificial Sequence
  Description of Artificial Sequence: Synthetic oligonucleotide
  Sense strand starting at position 3657 of SEQ ID NO: 1242947
gucguuaacuuuccagaua

SEQ ID NO: 1383999 - RNA, 19 nt, Artificial Sequence
  Description of Artificial Sequence: Synthetic oligonucleotide
  Antisense strand to SEQ ID NO: 1383998
uaucuggaaaguuaacgac

SEQ ID NO: 1384000 - RNA, 19 nt, Artificial Sequence
  Description of Artificial Sequence: Synthetic oligonucleotide
  Sense strand starting at position 3658 of SEQ ID NO: 1242947
ucguuaacuuuccagauac

SEQ ID NO: 1384001 - RNA, 19 nt, Artificial Sequence
  Description of Artificial Sequence: Synthetic oligonucleotide
  Antisense strand to SEQ ID NO: 1384000
guaucuggaaaguuaacga

SEQ ID NO: 1384002 - RNA, 19 nt, Artificial Sequence
  Description of Artificial Sequence: Synthetic oligonucleotide
  Sense strand starting at position 180 of SEQ ID NO: 1242948
acucuuaggucucaggaaa

SEQ ID NO: 1384003 - RNA, 19 nt, Artificial Sequence
  Description of Artificial Sequence: Synthetic oligonucleotide
  Antisense strand to SEQ ID NO: 1384002
uuuccugagaccuaagagu

SEQ ID NO: 1384004 - RNA, 19 nt, Artificial Sequence
  Description of Artificial Sequence: Synthetic oligonucleotide
  Sense strand starting at position 232 of SEQ ID NO: 1242948
ggacgccucucacguagaa

SEQ ID NO: 1384005 - RNA, 19 nt, Artificial Sequence
  Description of Artificial Sequence: Synthetic oligonucleotide
  Antisense strand to SEQ ID NO: 1384004
uucuacgugagaggcgucc

SEQ ID NO: 1384006 - RNA, 19 nt, Artificial Sequence
  Description of Artificial Sequence: Synthetic oligonucleotide
  Sense strand starting at position 846 of SEQ ID NO: 1242948
ggcaaagugugccuguaga

SEQ ID NO: 1384007 - RNA, 19 nt, Artificial Sequence
  Description of Artificial Sequence: Synthetic oligonucleotide
  Antisense strand to SEQ ID NO: 1384006
ucuacaggcacacuuugcc

SEQ ID NO: 1384008 - RNA, 19 nt, Artificial Sequence
  Description of Artificial Sequence: Synthetic oligonucleotide
  Sense strand starting at position 923 of SEQ ID NO: 1242948
gcaggaauuagaggcauua

SEQ ID NO: 1384009 - RNA, 19 nt, Artificial Sequence
  Description of Artificial Sequence: Synthetic oligonucleotide
  Antisense strand to SEQ ID NO: 1384008
uaaugccucuaauuccugc

SEQ ID NO: 1384010 - RNA, 19 nt, Artificial Sequence
  Description of Artificial Sequence: Synthetic oligonucleotide
  Sense strand starting at position 932 of SEQ ID NO: 1242948
agaggcauuacccagguua

SEQ ID NO: 1384011 - RNA, 19 nt, Artificial Sequence
  Description of Artificial Sequence: Synthetic oligonucleotide
  Antisense strand to SEQ ID NO: 1384010
uaaccuggguaaugccucu

SEQ ID NO: 1384012 - RNA, 19 nt, Artificial Sequence
  Description of Artificial Sequence: Synthetic oligonucleotide
  Sense strand starting at position 934 of SEQ ID NO: 1242948
aggcauuacccagguuacu

SEQ ID NO: 1384013 - RNA, 19 nt, Artificial Sequence
  Description of Artificial Sequence: Synthetic oligonucleotide
  Antisense strand to SEQ ID NO: 1384012
aguaaccuggguaaugccu

SEQ ID NO: 1384014 - RNA, 19 nt, Artificial Sequence
  Description of Artificial Sequence: Synthetic oligonucleotide
  Sense strand starting at position 1273 of SEQ ID NO: 1242948
ccaucaagccuccgaaacu

SEQ ID NO: 1384015 - RNA, 19 nt, Artificial Sequence
  Description of Artificial Sequence: Synthetic oligonucleotide
  Antisense strand to SEQ ID NO: 1384014
aguuucggaggcuugaugg

SEQ ID NO: 1384016 - RNA, 19 nt, Artificial Sequence
  Description of Artificial Sequence: Synthetic oligonucleotide
  Sense strand starting at position 1596 of SEQ ID NO: 1242948
cggcguccgccuccuaauu

SEQ ID NO: 1384017 - RNA, 19 nt, Artificial Sequence
  Description of Artificial Sequence: Synthetic oligonucleotide
  Antisense strand to SEQ ID NO: 1384016
aauuaggaggcggacgccg

SEQ ID NO: 1384018 - RNA, 19 nt, Artificial Sequence
  Description of Artificial Sequence: Synthetic oligonucleotide
  Sense strand starting at position 2083 of SEQ ID NO: 1242948
cgggaaaguugaccagagu

SEQ ID NO: 1384019 - RNA, 19 nt, Artificial Sequence
  Description of Artificial Sequence: Synthetic oligonucleotide
  Antisense strand to SEQ ID NO: 1384018
acucuggucaacuuucccg

SEQ ID NO: 1384020 - RNA, 19 nt, Artificial Sequence
  Description of Artificial Sequence: Synthetic oligonucleotide
  Sense strand starting at position 2313 of SEQ ID NO: 1242948
ggucauugggcucaaccua

SEQ ID NO: 1384021 - RNA, 19 nt, Artificial Sequence
  Description of Artificial Sequence: Synthetic oligonucleotide
  Antisense strand to SEQ ID NO: 1384020
uagguugagcccaaugacc

SEQ ID NO: 1384022 - RNA, 19 nt, Artificial Sequence
  Description of Artificial Sequence: Synthetic oligonucleotide
  Sense strand starting at position 2335 of SEQ ID NO: 1242948
ccugaagcgucguuaacuu

SEQ ID NO: 1384023 - RNA, 19 nt, Artificial Sequence
  Description of Artificial Sequence: Synthetic oligonucleotide
  Antisense strand to SEQ ID NO: 1384022
aaguuaacgacgcuucagg

SEQ ID NO: 1384024 - RNA, 19 nt, Artificial Sequence
  Description of Artificial Sequence: Synthetic oligonucleotide
  Sense strand starting at position 2343 of SEQ ID NO: 1242948
gucguuaacuuuccagaua

SEQ ID NO: 1384025 - RNA, 19 nt, Artificial Sequence
  Description of Artificial Sequence: Synthetic oligonucleotide
  Antisense strand to SEQ ID NO: 1384024
uaucuggaaaguuaacgac

SEQ ID NO: 1384026 - RNA, 19 nt, Artificial Sequence
  Description of Artificial Sequence: Synthetic oligonucleotide
  Sense strand starting at position 2344 of SEQ ID NO: 1242948
ucguuaacuuuccagauac

SEQ ID NO: 1384027 - RNA, 19 nt, Artificial Sequence
  Description of Artificial Sequence: Synthetic oligonucleotide
  Antisense strand to SEQ ID NO: 1384026
guaucuggaaaguuaacga

SEQ ID NO: 1384028 - RNA, 19 nt, Artificial Sequence
  Description of Artificial Sequence: Synthetic oligonucleotide
  Sense strand starting at position 2793 of SEQ ID NO: 1242948
ugaccuuaucgacaguagu

SEQ ID NO: 1384029 - RNA, 19 nt, Artificial Sequence
  Description of Artificial Sequence: Synthetic oligonucleotide
  Antisense strand to SEQ ID NO: 1384028
acuacugucgauaagguca

SEQ ID NO: 1384030 - RNA, 19 nt, Artificial Sequence
  Description of Artificial Sequence: Synthetic oligonucleotide
  Sense strand starting at position 2830 of SEQ ID NO: 1242948
uagugcuagacucgaguaa

SEQ ID NO: 1384031 - RNA, 19 nt, Artificial Sequence
  Description of Artificial Sequence: Synthetic oligonucleotide
  Antisense strand to SEQ ID NO: 1384030
uuacucgagucuagcacua

SEQ ID NO: 1384032 - RNA, 19 nt, Artificial Sequence
  Description of Artificial Sequence: Synthetic oligonucleotide
  Sense strand starting at position 2831 of SEQ ID NO: 1242948
agugcuagacucgaguaaa

SEQ ID NO: 1384033 - RNA, 19 nt, Artificial Sequence
  Description of Artificial Sequence: Synthetic oligonucleotide
  Antisense strand to SEQ ID NO: 1384032
uuuacucgagucuagcacu

SEQ ID NO: 1384034 - RNA, 19 nt, Artificial Sequence
  Description of Artificial Sequence: Synthetic oligonucleotide
  Sense strand starting at position 2834 of SEQ ID NO: 1242948
gcuagacucgaguaaagug

SEQ ID NO: 1384035 - RNA, 19 nt, Artificial Sequence
  Description of Artificial Sequence: Synthetic oligonucleotide
  Antisense strand to SEQ ID NO: 1384034
cacuuuacucgagucuagc

SEQ ID NO: 1384036 - RNA, 19 nt, Artificial Sequence
  Description of Artificial Sequence: Synthetic oligonucleotide
  Sense strand starting at position 2842 of SEQ ID NO: 1242948
cgaguaaagugagaugaag

SEQ ID NO: 1384037 - RNA, 19 nt, Artificial Sequence
  Description of Artificial Sequence: Synthetic oligonucleotide
  Antisense strand to SEQ ID NO: 1384036
cuucaucucacuuuacucg

SEQ ID NO: 1384038 - RNA, 19 nt, Artificial Sequence
  Description of Artificial Sequence: Synthetic oligonucleotide
  Sense strand starting at position 2903 of SEQ ID NO: 1242948
gagaguuguuagcagagac

SEQ ID NO: 1384039 - RNA, 19 nt, Artificial Sequence
  Description of Artificial Sequence: Synthetic oligonucleotide
  Antisense strand to SEQ ID NO: 1384038
gucucugcuaacaacucuc

SEQ ID NO: 1384040 - RNA, 19 nt, Artificial Sequence
  Description of Artificial Sequence: Synthetic oligonucleotide
  Sense strand starting at position 2907 of SEQ ID NO: 1242948
guuguuagcagagacaaga

SEQ ID NO: 1384041 - RNA, 19 nt, Artificial Sequence
  Description of Artificial Sequence: Synthetic oligonucleotide
  Antisense strand to SEQ ID NO: 1384040
ucuugucucugcuaacaac

SEQ ID NO: 1384042 - RNA, 19 nt, Artificial Sequence
  Description of Artificial Sequence: Synthetic oligonucleotide
  Sense strand starting at position 2937 of SEQ ID NO: 1242948
agcugaaggcgaugaguuu

SEQ ID NO: 1384043 - RNA, 19 nt, Artificial Sequence
  Description of Artificial Sequence: Synthetic oligonucleotide
  Antisense strand to SEQ ID NO: 1384042
aaacucaucgccuucagcu

SEQ ID NO: 1384044 - RNA, 19 nt, Artificial Sequence
  Description of Artificial Sequence: Synthetic oligonucleotide
  Sense strand starting at position 3324 of SEQ ID NO: 1242948
agcugcagucuauaaacuu

SEQ ID NO: 1384045 - RNA, 19 nt, Artificial Sequence
  Description of Artificial Sequence: Synthetic oligonucleotide
  Antisense strand to SEQ ID NO: 1384044
aaguuuauagacugcagcu

SEQ ID NO: 1384046 - RNA, 19 nt, Artificial Sequence
  Description of Artificial Sequence: Synthetic oligonucleotide
  Sense strand starting at position 3340 of SEQ ID NO: 1242948
cuucuccucucgcaaguuu

SEQ ID NO: 1384047 - RNA, 19 nt, Artificial Sequence
  Description of Artificial Sequence: Synthetic oligonucleotide
  Antisense strand to SEQ ID NO: 1384046
aaacuugcgagaggagaag

SEQ ID NO: 1384048 - RNA, 19 nt, Artificial Sequence
  Description of Artificial Sequence: Synthetic oligonucleotide
  Sense strand starting at position 48 of SEQ ID NO: 1242949
auaacugguucugaucaau

SEQ ID NO: 1384049 - RNA, 19 nt, Artificial Sequence
  Description of Artificial Sequence: Synthetic oligonucleotide
  Antisense strand to SEQ ID NO: 1384048
auugaucagaaccaguuau

SEQ ID NO: 1384050 - RNA, 19 nt, Artificial Sequence
  Description of Artificial Sequence: Synthetic oligonucleotide
  Sense strand starting at position 131 of SEQ ID NO: 1242949
aggucagaccuccauucuu

SEQ ID NO: 1384051 - RNA, 19 nt, Artificial Sequence
  Description of Artificial Sequence: Synthetic oligonucleotide
  Antisense strand to SEQ ID NO: 1384050
aagaauggaggucugaccu

SEQ ID NO: 1384052 - RNA, 19 nt, Artificial Sequence
  Description of Artificial Sequence: Synthetic oligonucleotide
  Sense strand starting at position 169 of SEQ ID NO: 1242949
caccgucuuccugacaguu

SEQ ID NO: 1384053 - RNA, 19 nt, Artificial Sequence
  Description of Artificial Sequence: Synthetic oligonucleotide
  Antisense strand to SEQ ID NO: 1384052
aacugucaggaagacggug

SEQ ID NO: 1384054 - RNA, 19 nt, Artificial Sequence
  Description of Artificial Sequence: Synthetic oligonucleotide
  Sense strand starting at position 241 of SEQ ID NO: 1242949
ugccauagguguuuaccaa

SEQ ID NO: 1384055 - RNA, 19 nt, Artificial Sequence
  Description of Artificial Sequence: Synthetic oligonucleotide
  Antisense strand to SEQ ID NO: 1384054
uugguaaacaccuauggca

SEQ ID NO: 1384056 - RNA, 19 nt, Artificial Sequence
  Description of Artificial Sequence: Synthetic oligonucleotide
  Sense strand starting at position 242 of SEQ ID NO: 1242949
gccauagguguuuaccaag

SEQ ID NO: 1384057 - RNA, 19 nt, Artificial Sequence
  Description of Artificial Sequence: Synthetic oligonucleotide
  Antisense strand to SEQ ID NO: 1384056
cuugguaaacaccuauggc

SEQ ID NO: 1384058 - RNA, 19 nt, Artificial Sequence
  Description of Artificial Sequence: Synthetic oligonucleotide
  Sense strand starting at position 248 of SEQ ID NO: 1242949
gguguuuaccaagggugau

SEQ ID NO: 1384059 - RNA, 19 nt, Artificial Sequence
  Description of Artificial Sequence: Synthetic oligonucleotide
  Antisense strand to SEQ ID NO: 1384058
aucacccuugguaaacacc

SEQ ID NO: 1384060 - RNA, 19 nt, Artificial Sequence
  Description of Artificial Sequence: Synthetic oligonucleotide
  Sense strand starting at position 249 of SEQ ID NO: 1242949
guguuuaccaagggugauu

SEQ ID NO: 1384061 - RNA, 19 nt, Artificial Sequence
  Description of Artificial Sequence: Synthetic oligonucleotide
  Antisense strand to SEQ ID NO: 1384060
aaucacccuugguaaacac

SEQ ID NO: 1384062 - RNA, 19 nt, Artificial Sequence
  Description of Artificial Sequence: Synthetic oligonucleotide
  Sense strand starting at position 287 of SEQ ID NO: 1242949
agauauuccuaucaguuga

SEQ ID NO: 1384063 - RNA, 19 nt, Artificial Sequence
  Description of Artificial Sequence: Synthetic oligonucleotide
  Antisense strand to SEQ ID NO: 1384062
ucaacugauaggaauaucu

SEQ ID NO: 1384064 - RNA, 19 nt, Artificial Sequence
  Description of Artificial Sequence: Synthetic oligonucleotide
  Sense strand starting at position 520 of SEQ ID NO: 1242949
gagacaaacgccugaucuu

SEQ ID NO: 1384065 - RNA, 19 nt, Artificial Sequence
  Description of Artificial Sequence: Synthetic oligonucleotide
  Antisense strand to SEQ ID NO: 1384064
aagaucaggcguuugucuc

SEQ ID NO: 1384066 - RNA, 19 nt, Artificial Sequence
  Description of Artificial Sequence: Synthetic oligonucleotide
  Sense strand starting at position 553 of SEQ ID NO: 1242949
gucagugucugguguguga

SEQ ID NO: 1384067 - RNA, 19 nt, Artificial Sequence
  Description of Artificial Sequence: Synthetic oligonucleotide
  Antisense strand to SEQ ID NO: 1384066
ucacacaccagacacugac

SEQ ID NO: 1384068 - RNA, 19 nt, Artificial Sequence
  Description of Artificial Sequence: Synthetic oligonucleotide
  Sense strand starting at position 557 of SEQ ID NO: 1242949
gugucuggugugugagcau

SEQ ID NO: 1384069 - RNA, 19 nt, Artificial Sequence
  Description of Artificial Sequence: Synthetic oligonucleotide
  Antisense strand to SEQ ID NO: 1384068
augcucacacaccagacac

SEQ ID NO: 1384070 - RNA, 19 nt, Artificial Sequence
  Description of Artificial Sequence: Synthetic oligonucleotide
  Sense strand starting at position 667 of SEQ ID NO: 1242949
gccuguaucugggagguuu

SEQ ID NO: 1384071 - RNA, 19 nt, Artificial Sequence
  Description of Artificial Sequence: Synthetic oligonucleotide
  Antisense strand to SEQ ID NO: 1384070
aaaccucccagauacaggc

SEQ ID NO: 1384072 - RNA, 19 nt, Artificial Sequence
  Description of Artificial Sequence: Synthetic oligonucleotide
  Sense strand starting at position 689 of SEQ ID NO: 1242949
ggagacuagugggaacgau

SEQ ID NO: 1384073 - RNA, 19 nt, Artificial Sequence
  Description of Artificial Sequence: Synthetic oligonucleotide
  Antisense strand to SEQ ID NO: 1384072
aucguucccacuagucucc

SEQ ID NO: 1384074 - RNA, 19 nt, Artificial Sequence
  Description of Artificial Sequence: Synthetic oligonucleotide
  Sense strand starting at position 733 of SEQ ID NO: 1242949
gugggacuucucugaccua

SEQ ID NO: 1384075 - RNA, 19 nt, Artificial Sequence
  Description of Artificial Sequence: Synthetic oligonucleotide
  Antisense strand to SEQ ID NO: 1384074
uaggucagagaagucccac

SEQ ID NO: 1384076 - RNA, 19 nt, Artificial Sequence
  Description of Artificial Sequence: Synthetic oligonucleotide
  Sense strand starting at position 810 of SEQ ID NO: 1242949
cagccaguucuuggcacaa

SEQ ID NO: 1384077 - RNA, 19 nt, Artificial Sequence
  Description of Artificial Sequence: Synthetic oligonucleotide
  Antisense strand to SEQ ID NO: 1384076
uugugccaagaacuggcug

SEQ ID NO: 1384078 - RNA, 19 nt, Artificial Sequence
  Description of Artificial Sequence: Synthetic oligonucleotide
  Sense strand starting at position 812 of SEQ ID NO: 1242949
gccaguucuuggcacaaga

SEQ ID NO: 1384079 - RNA, 19 nt, Artificial Sequence
  Description of Artificial Sequence: Synthetic oligonucleotide
  Antisense strand to SEQ ID NO: 1384078
ucuugugccaagaacuggc

SEQ ID NO: 1384080 - RNA, 19 nt, Artificial Sequence
  Description of Artificial Sequence: Synthetic oligonucleotide
  Sense strand starting at position 823 of SEQ ID NO: 1242949
gcacaagagugcccagaaa

SEQ ID NO: 1384081 - RNA, 19 nt, Artificial Sequence
  Description of Artificial Sequence: Synthetic oligonucleotide
  Antisense strand to SEQ ID NO: 1384080
uuucugggcacucuugugc

SEQ ID NO: 1384082 - RNA, 19 nt, Artificial Sequence
  Description of Artificial Sequence: Synthetic oligonucleotide
  Sense strand starting at position 832 of SEQ ID NO: 1242949
ugcccagaaacguaaagau

SEQ ID NO: 1384083 - RNA, 19 nt, Artificial Sequence
  Description of Artificial Sequence: Synthetic oligonucleotide
  Antisense strand to SEQ ID NO: 1384082
aucuuuacguuucugggca

SEQ ID NO: 1384084 - RNA, 19 nt, Artificial Sequence
  Description of Artificial Sequence: Synthetic oligonucleotide
  Sense strand starting at position 867 of SEQ ID NO: 1242949
ucagcaaaccugcauugaa

SEQ ID NO: 1384085 - RNA, 19 nt, Artificial Sequence
  Description of Artificial Sequence: Synthetic oligonucleotide
  Antisense strand to SEQ ID NO: 1384084
uucaaugcagguuugcuga

SEQ ID NO: 1384086 - RNA, 19 nt, Artificial Sequence
  Description of Artificial Sequence: Synthetic oligonucleotide
  Sense strand starting at position 1043 of SEQ ID NO: 1242949
agagguucuagccaugugu

SEQ ID NO: 1384087 - RNA, 19 nt, Artificial Sequence
  Description of Artificial Sequence: Synthetic oligonucleotide
  Antisense strand to SEQ ID NO: 1384086
acacauggcuagaaccucu

SEQ ID NO: 1384088 - RNA, 19 nt, Artificial Sequence
  Description of Artificial Sequence: Synthetic oligonucleotide
  Sense strand starting at position 1045 of SEQ ID NO: 1242949
agguucuagccaugugugu

SEQ ID NO: 1384089 - RNA, 19 nt, Artificial Sequence
  Description of Artificial Sequence: Synthetic oligonucleotide
  Antisense strand to SEQ ID NO: 1384088
acacacauggcuagaaccu

SEQ ID NO: 1384090 - RNA, 19 nt, Artificial Sequence
  Description of Artificial Sequence: Synthetic oligonucleotide
  Sense strand starting at position 2426 of SEQ ID NO: 1242949
ccgggaggcuucgcccaau

SEQ ID NO: 1384091 - RNA, 19 nt, Artificial Sequence
  Description of Artificial Sequence: Synthetic oligonucleotide
  Antisense strand to SEQ ID NO: 1384090
auugggcgaagccucccgg

SEQ ID NO: 1384092 - RNA, 19 nt, Artificial Sequence
  Description of Artificial Sequence: Synthetic oligonucleotide
  Sense strand starting at position 2826 of SEQ ID NO: 1242949
cuagguaaauacugguuaa

SEQ ID NO: 1384093 - RNA, 19 nt, Artificial Sequence
  Description of Artificial Sequence: Synthetic oligonucleotide
  Antisense strand to SEQ ID NO: 1384092
uuaaccaguauuuaccuag

SEQ ID NO: 1384094 - RNA, 19 nt, Artificial Sequence
  Description of Artificial Sequence: Synthetic oligonucleotide
  Sense strand starting at position 2829 of SEQ ID NO: 1242949
gguaaauacugguuaaaca

SEQ ID NO: 1384095 - RNA, 19 nt, Artificial Sequence
  Description of Artificial Sequence: Synthetic oligonucleotide
  Antisense strand to SEQ ID NO: 1384094
uguuuaaccaguauuuacc

SEQ ID NO: 1384096 - RNA, 19 nt, Artificial Sequence
  Description of Artificial Sequence: Synthetic oligonucleotide
  Sense strand starting at position 3045 of SEQ ID NO: 1242949
auauguauuagguggagga

SEQ ID NO: 1384097 - RNA, 19 nt, Artificial Sequence
  Description of Artificial Sequence: Synthetic oligonucleotide
  Antisense strand to SEQ ID NO: 1384096
uccuccaccuaauacauau

SEQ ID NO: 1384098 - RNA, 19 nt, Artificial Sequence
  Description of Artificial Sequence: Synthetic oligonucleotide
  Sense strand starting at position 3117 of SEQ ID NO: 1242949
gggcccugugguuggagaa

SEQ ID NO: 1384099 - RNA, 19 nt, Artificial Sequence
  Description of Artificial Sequence: Synthetic oligonucleotide
  Antisense strand to SEQ ID NO: 1384098
uucuccaaccacagggccc

SEQ ID NO: 1384100 - RNA, 19 nt, Artificial Sequence
  Description of Artificial Sequence: Synthetic oligonucleotide
  Sense strand starting at position 3118 of SEQ ID NO: 1242949
ggcccugugguuggagaau

SEQ ID NO: 1384101 - RNA, 19 nt, Artificial Sequence
  Description of Artificial Sequence: Synthetic oligonucleotide
  Antisense strand to SEQ ID NO: 1384100
auucuccaaccacagggcc

SEQ ID NO: 1384102 - RNA, 19 nt, Artificial Sequence
  Description of Artificial Sequence: Synthetic oligonucleotide
  Sense strand starting at position 3241 of SEQ ID NO: 1242949
ggugcaucccugugcauga

SEQ ID NO: 1384103 - RNA, 19 nt, Artificial Sequence
  Description of Artificial Sequence: Synthetic oligonucleotide
  Antisense strand to SEQ ID NO: 1384102
ucaugcacagggaugcacc

SEQ ID NO: 1384104 - RNA, 19 nt, Artificial Sequence
  Description of Artificial Sequence: Synthetic oligonucleotide
  Sense strand starting at position 3306 of SEQ ID NO: 1242949
agaaaucacugauaaguca

SEQ ID NO: 1384105 - RNA, 19 nt, Artificial Sequence
  Description of Artificial Sequence: Synthetic oligonucleotide
  Antisense strand to SEQ ID NO: 1384104
ugacuuaucagugauuucu

SEQ ID NO: 1384106 - RNA, 19 nt, Artificial Sequence
  Description of Artificial Sequence: Synthetic oligonucleotide
  Sense strand starting at position 3339 of SEQ ID NO: 1242949
ggcagaagaucuugcuuug

SEQ ID NO: 1384107 - RNA, 19 nt, Artificial Sequence
  Description of Artificial Sequence: Synthetic oligonucleotide
  Antisense strand to SEQ ID NO: 1384106
caaagcaagaucuucugcc

SEQ ID NO: 1384108 - RNA, 19 nt, Artificial Sequence
  Description of Artificial Sequence: Synthetic oligonucleotide
  Sense strand starting at position 3342 of SEQ ID NO: 1242949
agaagaucuugcuuugagg

SEQ ID NO: 1384109 - RNA, 19 nt, Artificial Sequence
  Description of Artificial Sequence: Synthetic oligonucleotide
  Antisense strand to SEQ ID NO: 1384108
ccucaaagcaagaucuucu

SEQ ID NO: 1384110 - RNA, 19 nt, Artificial Sequence
  Description of Artificial Sequence: Synthetic oligonucleotide
  Sense strand starting at position 3345 of SEQ ID NO: 1242949
agaucuugcuuugaggagu

SEQ ID NO: 1384111 - RNA, 19 nt, Artificial Sequence
  Description of Artificial Sequence: Synthetic oligonucleotide
  Antisense strand to SEQ ID NO: 1384110
acuccucaaagcaagaucu

SEQ ID NO: 1384112 - RNA, 19 nt, Artificial Sequence
  Description of Artificial Sequence: Synthetic oligonucleotide
  Sense strand starting at position 3351 of SEQ ID NO: 1242949
ugcuuugaggagugcauca

SEQ ID NO: 1384113 - RNA, 19 nt, Artificial Sequence
  Description of Artificial Sequence: Synthetic oligonucleotide
  Antisense strand to SEQ ID NO: 1384112
ugaugcacuccucaaagca

SEQ ID NO: 1384114 - RNA, 19 nt, Artificial Sequence
  Description of Artificial Sequence: Synthetic oligonucleotide
  Sense strand starting at position 3510 of SEQ ID NO: 1242949
cccguuggaucuucucauu

SEQ ID NO: 1384115 - RNA, 19 nt, Artificial Sequence
  Description of Artificial Sequence: Synthetic oligonucleotide
  Antisense strand to SEQ ID NO: 1384114
aaugagaagauccaacggg

SEQ ID NO: 1384116 - RNA, 19 nt, Artificial Sequence
  Description of Artificial Sequence: Synthetic oligonucleotide
  Sense strand starting at position 3620 of SEQ ID NO: 1242949
cggaguuucgcuguuguuu

SEQ ID NO: 1384117 - RNA, 19 nt, Artificial Sequence
  Description of Artificial Sequence: Synthetic oligonucleotide
  Antisense strand to SEQ ID NO: 1384116
aaacaacagcgaaacuccg

SEQ ID NO: 1384118 - RNA, 19 nt, Artificial Sequence
  Description of Artificial Sequence: Synthetic oligonucleotide
  Sense strand starting at position 3915 of SEQ ID NO: 1242949
uaaaguguuucugcugaaa

SEQ ID NO: 1384119 - RNA, 19 nt, Artificial Sequence
  Description of Artificial Sequence: Synthetic oligonucleotide
  Antisense strand to SEQ ID NO: 1384118
uuucagcagaaacacuuua

SEQ ID NO: 1384120 - RNA, 19 nt, Artificial Sequence
  Description of Artificial Sequence: Synthetic oligonucleotide
  Sense strand starting at position 3918 of SEQ ID NO: 1242949
aguguuucugcugaaauaa

SEQ ID NO: 1384121 - RNA, 19 nt, Artificial Sequence
  Description of Artificial Sequence: Synthetic oligonucleotide
  Antisense strand to SEQ ID NO: 1384120
uuauuucagcagaaacacu

SEQ ID NO: 1384122 - RNA, 19 nt, Artificial Sequence
  Description of Artificial Sequence: Synthetic oligonucleotide
  Sense strand starting at position 111 of SEQ ID NO: 1242950
uaaaguguuucugcugaaa

SEQ ID NO: 1384123 - RNA, 19 nt, Artificial Sequence
  Description of Artificial Sequence: Synthetic oligonucleotide
  Antisense strand to SEQ ID NO: 1384122
uuucagcagaaacacuuua

SEQ ID NO: 1384124 - RNA, 19 nt, Artificial Sequence
  Description of Artificial Sequence: Synthetic oligonucleotide
  Sense strand starting at position 114 of SEQ ID NO: 1242950
aguguuucugcugaaauaa

SEQ ID NO: 1384125 - RNA, 19 nt, Artificial Sequence
  Description of Artificial Sequence: Synthetic oligonucleotide
  Antisense strand to SEQ ID NO: 1384124
uuauuucagcagaaacacu

SEQ ID NO: 1384126 - RNA, 19 nt, Artificial Sequence
  Description of Artificial Sequence: Synthetic oligonucleotide
  Sense strand starting at position 1079 of SEQ ID NO: 1242950
gguaaacaccuccauuguu

SEQ ID NO: 1384127 - RNA, 19 nt, Artificial Sequence
  Description of Artificial Sequence: Synthetic oligonucleotide
  Antisense strand to SEQ ID NO: 1384126
aacaauggagguguuuacc

SEQ ID NO: 1384128 - RNA, 19 nt, Artificial Sequence
  Description of Artificial Sequence: Synthetic oligonucleotide
  Sense strand starting at position 1087 of SEQ ID NO: 1242950
ccuccauuguuggcacauu

SEQ ID NO: 1384129 - RNA, 19 nt, Artificial Sequence
  Description of Artificial Sequence: Synthetic oligonucleotide
  Antisense strand to SEQ ID NO: 1384128
aaugugccaacaauggagg

SEQ ID NO: 1384130 - RNA, 19 nt, Artificial Sequence
  Description of Artificial Sequence: Synthetic oligonucleotide
  Sense strand starting at position 1097 of SEQ ID NO: 1242950
uggcacauuccgggauaga

SEQ ID NO: 1384131 - RNA, 19 nt, Artificial Sequence
  Description of Artificial Sequence: Synthetic oligonucleotide
  Antisense strand to SEQ ID NO: 1384130
ucuaucccggaaugugcca

SEQ ID NO: 1384132 - RNA, 19 nt, Artificial Sequence
  Description of Artificial Sequence: Synthetic oligonucleotide
  Sense strand starting at position 1098 of SEQ ID NO: 1242950
ggcacauuccgggauagag

SEQ ID NO: 1384133 - RNA, 19 nt, Artificial Sequence
  Description of Artificial Sequence: Synthetic oligonucleotide
  Antisense strand to SEQ ID NO: 1384132
cucuaucccggaaugugcc

SEQ ID NO: 1384134 - RNA, 19 nt, Artificial Sequence
  Description of Artificial Sequence: Synthetic oligonucleotide
  Sense strand starting at position 1446 of SEQ ID NO: 1242950
gcgugauccucugcccuga

SEQ ID NO: 1384135 - RNA, 19 nt, Artificial Sequence
  Description of Artificial Sequence: Synthetic oligonucleotide
  Antisense strand to SEQ ID NO: 1384134
ucagggcagaggaucacgc

SEQ ID NO: 1384136 - RNA, 19 nt, Artificial Sequence
  Description of Artificial Sequence: Synthetic oligonucleotide
  Sense strand starting at position 1448 of SEQ ID NO: 1242950
gugauccucugcccugaga

SEQ ID NO: 1384137 - RNA, 19 nt, Artificial Sequence
  Description of Artificial Sequence: Synthetic oligonucleotide
  Antisense strand to SEQ ID NO: 1384136
ucucagggcagaggaucac

SEQ ID NO: 1384138 - RNA, 19 nt, Artificial Sequence
  Description of Artificial Sequence: Synthetic oligonucleotide
  Sense strand starting at position 2829 of SEQ ID NO: 1242950
gguaaauacugguuguaaa

SEQ ID NO: 1384139 - RNA, 19 nt, Artificial Sequence
  Description of Artificial Sequence: Synthetic oligonucleotide
  Antisense strand to SEQ ID NO: 1384138
uuuacaaccaguauuuacc

SEQ ID NO: 1384140 - RNA, 19 nt, Artificial Sequence
  Description of Artificial Sequence: Synthetic oligonucleotide
  Sense strand starting at position 2830 of SEQ ID NO: 1242950
guaaauacugguuguaaac

SEQ ID NO: 1384141 - RNA, 19 nt, Artificial Sequence
  Description of Artificial Sequence: Synthetic oligonucleotide
  Antisense strand to SEQ ID NO: 1384140
guuuacaaccaguauuuac

SEQ ID NO: 1384142 - RNA, 19 nt, Artificial Sequence
  Description of Artificial Sequence: Synthetic oligonucleotide
  Sense strand starting at position 2995 of SEQ ID NO: 1242950
gugcaucccugcucaugaa

SEQ ID NO: 1384143 - RNA, 19 nt, Artificial Sequence
  Description of Artificial Sequence: Synthetic oligonucleotide
  Antisense strand to SEQ ID NO: 1384142
uucaugagcagggaugcac

SEQ ID NO: 1384144 - RNA, 19 nt, Artificial Sequence
  Description of Artificial Sequence: Synthetic oligonucleotide
  Sense strand starting at position 2996 of SEQ ID NO: 1242950
ugcaucccugcucaugaaa

SEQ ID NO: 1384145 - RNA, 19 nt, Artificial Sequence
  Description of Artificial Sequence: Synthetic oligonucleotide
  Antisense strand to SEQ ID NO: 1384144
uuucaugagcagggaugca

SEQ ID NO: 1384146 - RNA, 19 nt, Artificial Sequence
  Description of Artificial Sequence: Synthetic oligonucleotide
  Sense strand starting at position 3212 of SEQ ID NO: 1242950
gcuggagaauccuuugaac

SEQ ID NO: 1384147 - RNA, 19 nt, Artificial Sequence
  Description of Artificial Sequence: Synthetic oligonucleotide
  Antisense strand to SEQ ID NO: 1384146
guucaaaggauucuccagc

SEQ ID NO: 1384148 - RNA, 19 nt, Artificial Sequence
  Description of Artificial Sequence: Synthetic oligonucleotide
  Sense strand starting at position 3412 of SEQ ID NO: 1242950
ucgcuaaugcagugaaacu

SEQ ID NO: 1384149 - RNA, 19 nt, Artificial Sequence
  Description of Artificial Sequence: Synthetic oligonucleotide
  Antisense strand to SEQ ID NO: 1384148
aguuucacugcauuagcga

SEQ ID NO: 1384150 - RNA, 19 nt, Artificial Sequence
  Description of Artificial Sequence: Synthetic oligonucleotide
  Sense strand starting at position 3691 of SEQ ID NO: 1242950
uaguaauaaucagugagac

SEQ ID NO: 1384151 - RNA, 19 nt, Artificial Sequence
  Description of Artificial Sequence: Synthetic oligonucleotide
  Antisense strand to SEQ ID NO: 1384150
gucucacugauuauuacua

SEQ ID NO: 1384152 - RNA, 19 nt, Artificial Sequence
  Description of Artificial Sequence: Synthetic oligonucleotide
  Sense strand starting at position 3692 of SEQ ID NO: 1242950
aguaauaaucagugagacu

SEQ ID NO: 1384153 - RNA, 19 nt, Artificial Sequence
  Description of Artificial Sequence: Synthetic oligonucleotide
  Antisense strand to SEQ ID NO: 1384152
agucucacugauuauuacu

SEQ ID NO: 1384154 - RNA, 19 nt, Artificial Sequence
  Description of Artificial Sequence: Synthetic oligonucleotide
  Sense strand starting at position 3777 of SEQ ID NO: 1242950
ggaaguuguacacagguau

SEQ ID NO: 1384155 - RNA, 19 nt, Artificial Sequence
  Description of Artificial Sequence: Synthetic oligonucleotide
  Antisense strand to SEQ ID NO: 1384154
auaccuguguacaacuucc

SEQ ID NO: 1384156 - RNA, 19 nt, Artificial Sequence
  Description of Artificial Sequence: Synthetic oligonucleotide
  Sense strand starting at position 3795 of SEQ ID NO: 1242950
ucuacaguaugaugguauu

SEQ ID NO: 1384157 - RNA, 19 nt, Artificial Sequence
  Description of Artificial Sequence: Synthetic oligonucleotide
  Antisense strand to SEQ ID NO: 1384156
aauaccaucauacuguaga

SEQ ID NO: 1384158 - RNA, 19 nt, Artificial Sequence
  Description of Artificial Sequence: Synthetic oligonucleotide
  Sense strand starting at position 3833 of SEQ ID NO: 1242950
uguggcaguaguuguagau

SEQ ID NO: 1384159 - RNA, 19 nt, Artificial Sequence
  Description of Artificial Sequence: Synthetic oligonucleotide
  Antisense strand to SEQ ID NO: 1384158
aucuacaacuacugccaca

SEQ ID NO: 1384160 - RNA, 19 nt, Artificial Sequence
  Description of Artificial Sequence: Synthetic oligonucleotide
  Sense strand starting at position 3836 of SEQ ID NO: 1242950
ggcaguaguuguagaugua

SEQ ID NO: 1384161 - RNA, 19 nt, Artificial Sequence
  Description of Artificial Sequence: Synthetic oligonucleotide
  Antisense strand to SEQ ID NO: 1384160
uacaucuacaacuacugcc

SEQ ID NO: 1384162 - RNA, 19 nt, Artificial Sequence
  Description of Artificial Sequence: Synthetic oligonucleotide
  Sense strand starting at position 3854 of SEQ ID NO: 1242950
agcuguguucccucagcau

SEQ ID NO: 1384163 - RNA, 19 nt, Artificial Sequence
  Description of Artificial Sequence: Synthetic oligonucleotide
  Antisense strand to SEQ ID NO: 1384162
augcugagggaacacagcu

SEQ ID NO: 1384164 - RNA, 19 nt, Artificial Sequence
  Description of Artificial Sequence: Synthetic oligonucleotide
  Sense strand starting at position 72 of SEQ ID NO: 1242951
ggccaaguucuccaaacua

SEQ ID NO: 1384165 - RNA, 19 nt, Artificial Sequence
  Description of Artificial Sequence: Synthetic oligonucleotide
  Antisense strand to SEQ ID NO: 1384164
uaguuuggagaacuuggcc

SEQ ID NO: 1384166 - RNA, 19 nt, Artificial Sequence
  Description of Artificial Sequence: Synthetic oligonucleotide
  Sense strand starting at position 549 of SEQ ID NO: 1242951
ucgugaguuggacguuguu

SEQ ID NO: 1384167 - RNA, 19 nt, Artificial Sequence
  Description of Artificial Sequence: Synthetic oligonucleotide
  Antisense strand to SEQ ID NO: 1384166
aacaacguccaacucacga

SEQ ID NO: 1384168 - RNA, 19 nt, Artificial Sequence
  Description of Artificial Sequence: Synthetic oligonucleotide
  Sense strand starting at position 569 of SEQ ID NO: 1242951
uucuauucgauagguaaag

SEQ ID NO: 1384169 - RNA, 19 nt, Artificial Sequence
  Description of Artificial Sequence: Synthetic oligonucleotide
  Antisense strand to SEQ ID NO: 1384168
cuuuaccuaucgaauagaa

SEQ ID NO: 1384170 - RNA, 19 nt, Artificial Sequence
  Description of Artificial Sequence: Synthetic oligonucleotide
  Sense strand starting at position 588 of SEQ ID NO: 1242951
gccugagagcucugggaca

SEQ ID NO: 1384171 - RNA, 19 nt, Artificial Sequence
  Description of Artificial Sequence: Synthetic oligonucleotide
  Antisense strand to SEQ ID NO: 1384170
ugucccagagcucucaggc

SEQ ID NO: 1384172 - RNA, 19 nt, Artificial Sequence
  Description of Artificial Sequence: Synthetic oligonucleotide
  Sense strand starting at position 614 of SEQ ID NO: 1242951
ggucgcacagcuugucauu

SEQ ID NO: 1384173 - RNA, 19 nt, Artificial Sequence
  Description of Artificial Sequence: Synthetic oligonucleotide
  Antisense strand to SEQ ID NO: 1384172
aaugacaagcugugcgacc

SEQ ID NO: 1384174 - RNA, 19 nt, Artificial Sequence
  Description of Artificial Sequence: Synthetic oligonucleotide
  Sense strand starting at position 619 of SEQ ID NO: 1242951
cacagcuugucauugagca

SEQ ID NO: 1384175 - RNA, 19 nt, Artificial Sequence
  Description of Artificial Sequence: Synthetic oligonucleotide
  Antisense strand to SEQ ID NO: 1384174
ugcucaaugacaagcugug

SEQ ID NO: 1384176 - RNA, 19 nt, Artificial Sequence
  Description of Artificial Sequence: Synthetic oligonucleotide
  Sense strand starting at position 652 of SEQ ID NO: 1242951
accugcucugucugccaaa

SEQ ID NO: 1384177 - RNA, 19 nt, Artificial Sequence
  Description of Artificial Sequence: Synthetic oligonucleotide
  Antisense strand to SEQ ID NO: 1384176
uuuggcagacagagcaggu

SEQ ID NO: 1384178 - RNA, 19 nt, Artificial Sequence
  Description of Artificial Sequence: Synthetic oligonucleotide
  Sense strand starting at position 653 of SEQ ID NO: 1242951
ccugcucugucugccaaau

SEQ ID NO: 1384179 - RNA, 19 nt, Artificial Sequence
  Description of Artificial Sequence: Synthetic oligonucleotide
  Antisense strand to SEQ ID NO: 1384178
auuuggcagacagagcagg

SEQ ID NO: 1384180 - RNA, 19 nt, Artificial Sequence
  Description of Artificial Sequence: Synthetic oligonucleotide
  Sense strand starting at position 665 of SEQ ID NO: 1242951
gccaaauuguggccacuga

SEQ ID NO: 1384181 - RNA, 19 nt, Artificial Sequence
  Description of Artificial Sequence: Synthetic oligonucleotide
  Antisense strand to SEQ ID NO: 1384180
ucaguggccacaauuuggc

SEQ ID NO: 1384182 - RNA, 19 nt, Artificial Sequence
  Description of Artificial Sequence: Synthetic oligonucleotide
  Sense strand starting at position 747 of SEQ ID NO: 1242951
cagguuugccacugaggaa

SEQ ID NO: 1384183 - RNA, 19 nt, Artificial Sequence
  Description of Artificial Sequence: Synthetic oligonucleotide
  Antisense strand to SEQ ID NO: 1384182
uuccucaguggcaaaccug

SEQ ID NO: 1384184 - RNA, 19 nt, Artificial Sequence
  Description of Artificial Sequence: Synthetic oligonucleotide
  Sense strand starting at position 825 of SEQ ID NO: 1242951
aacgaauuagguugcacau

SEQ ID NO: 1384185 - RNA, 19 nt, Artificial Sequence
  Description of Artificial Sequence: Synthetic oligonucleotide
  Antisense strand to SEQ ID NO: 1384184
augugcaaccuaauucguu

SEQ ID NO: 1384186 - RNA, 19 nt, Artificial Sequence
  Description of Artificial Sequence: Synthetic oligonucleotide
  Sense strand starting at position 827 of SEQ ID NO: 1242951
cgaauuagguugcacauuu

SEQ ID NO: 1384187 - RNA, 19 nt, Artificial Sequence
  Description of Artificial Sequence: Synthetic oligonucleotide
  Antisense strand to SEQ ID NO: 1384186
aaaugugcaaccuaauucg

SEQ ID NO: 1384188 - RNA, 19 nt, Artificial Sequence
  Description of Artificial Sequence: Synthetic oligonucleotide
  Sense strand starting at position 964 of SEQ ID NO: 1242951
gugcuuugcgaacaguaug

SEQ ID NO: 1384189 - RNA, 19 nt, Artificial Sequence
  Description of Artificial Sequence: Synthetic oligonucleotide
  Antisense strand to SEQ ID NO: 1384188
cauacuguucgcaaagcac

SEQ ID NO: 1384190 - RNA, 19 nt, Artificial Sequence
  Description of Artificial Sequence: Synthetic oligonucleotide
  Sense strand starting at position 1109 of SEQ ID NO: 1242951
uugagaguucuaggaggcu

SEQ ID NO: 1384191 - RNA, 19 nt, Artificial Sequence
  Description of Artificial Sequence: Synthetic oligonucleotide
  Antisense strand to SEQ ID NO: 1384190
agccuccuagaacucucaa

SEQ ID NO: 1384192 - RNA, 19 nt, Artificial Sequence
  Description of Artificial Sequence: Synthetic oligonucleotide
  Sense strand starting at position 1161 of SEQ ID NO: 1242951
uagugaccucgcuuugcua

SEQ ID NO: 1384193 - RNA, 19 nt, Artificial Sequence
  Description of Artificial Sequence: Synthetic oligonucleotide
  Antisense strand to SEQ ID NO: 1384192
uagcaaagcgaggucacua

SEQ ID NO: 1384194 - RNA, 19 nt, Artificial Sequence
  Description of Artificial Sequence: Synthetic oligonucleotide
  Sense strand starting at position 2382 of SEQ ID NO: 1242951
gacgucaggcuuuguggaa

SEQ ID NO: 1384195 - RNA, 19 nt, Artificial Sequence
  Description of Artificial Sequence: Synthetic oligonucleotide
  Antisense strand to SEQ ID NO: 1384194
uuccacaaagccugacguc

SEQ ID NO: 1384196 - RNA, 19 nt, Artificial Sequence
  Description of Artificial Sequence: Synthetic oligonucleotide
  Sense strand starting at position 2383 of SEQ ID NO: 1242951
acgucaggcuuuguggaaa

SEQ ID NO: 1384197 - RNA, 19 nt, Artificial Sequence
  Description of Artificial Sequence: Synthetic oligonucleotide
  Antisense strand to SEQ ID NO: 1384196
uuuccacaaagccugacgu

SEQ ID NO: 1384198 - RNA, 19 nt, Artificial Sequence
  Description of Artificial Sequence: Synthetic oligonucleotide
  Sense strand starting at position 2424 of SEQ ID NO: 1242951
uuccaauacgcuuagugaa

SEQ ID NO: 1384199 - RNA, 19 nt, Artificial Sequence
  Description of Artificial Sequence: Synthetic oligonucleotide
  Antisense strand to SEQ ID NO: 1384198
uucacuaagcguauuggaa

SEQ ID NO: 1384200 - RNA, 19 nt, Artificial Sequence
  Description of Artificial Sequence: Synthetic oligonucleotide
  Sense strand starting at position 2426 of SEQ ID NO: 1242951
ccaauacgcuuagugaagu

SEQ ID NO: 1384201 - RNA, 19 nt, Artificial Sequence
  Description of Artificial Sequence: Synthetic oligonucleotide
  Antisense strand to SEQ ID NO: 1384200
acuucacuaagcguauugg

SEQ ID NO: 1384202 - RNA, 19 nt, Artificial Sequence
  Description of Artificial Sequence: Synthetic oligonucleotide
  Sense strand starting at position 2432 of SEQ ID NO: 1242951
cgcuuagugaagugacaau

SEQ ID NO: 1384203 - RNA, 19 nt, Artificial Sequence
  Description of Artificial Sequence: Synthetic oligonucleotide
  Antisense strand to SEQ ID NO: 1384202
auugucacuucacuaagcg

SEQ ID NO: 1384204 - RNA, 19 nt, Artificial Sequence
  Description of Artificial Sequence: Synthetic oligonucleotide
  Sense strand starting at position 2442 of SEQ ID NO: 1242951
agugacaaucuuugugcga

SEQ ID NO: 1384205 - RNA, 19 nt, Artificial Sequence
  Description of Artificial Sequence: Synthetic oligonucleotide
  Antisense strand to SEQ ID NO: 1384204
ucgcacaaagauugucacu

SEQ ID NO: 1384206 - RNA, 19 nt, Artificial Sequence
  Description of Artificial Sequence: Synthetic oligonucleotide
  Sense strand starting at position 2443 of SEQ ID NO: 1242951
gugacaaucuuugugcgau

SEQ ID NO: 1384207 - RNA, 19 nt, Artificial Sequence
  Description of Artificial Sequence: Synthetic oligonucleotide
  Antisense strand to SEQ ID NO: 1384206
aucgcacaaagauugucac

SEQ ID NO: 1384208 - RNA, 19 nt, Artificial Sequence
  Description of Artificial Sequence: Synthetic oligonucleotide
  Sense strand starting at position 2444 of SEQ ID NO: 1242951
ugacaaucuuugugcgaua

SEQ ID NO: 1384209 - RNA, 19 nt, Artificial Sequence
  Description of Artificial Sequence: Synthetic oligonucleotide
  Antisense strand to SEQ ID NO: 1384208
uaucgcacaaagauuguca

SEQ ID NO: 1384210 - RNA, 19 nt, Artificial Sequence
  Description of Artificial Sequence: Synthetic oligonucleotide
  Sense strand starting at position 2445 of SEQ ID NO: 1242951
gacaaucuuugugcgauau

SEQ ID NO: 1384211 - RNA, 19 nt, Artificial Sequence
  Description of Artificial Sequence: Synthetic oligonucleotide
  Antisense strand to SEQ ID NO: 1384210
auaucgcacaaagauuguc

SEQ ID NO: 1384212 - RNA, 19 nt, Artificial Sequence
  Description of Artificial Sequence: Synthetic oligonucleotide
  Sense strand starting at position 2446 of SEQ ID NO: 1242951
acaaucuuugugcgauaug

SEQ ID NO: 1384213 - RNA, 19 nt, Artificial Sequence
  Description of Artificial Sequence: Synthetic oligonucleotide
  Antisense strand to SEQ ID NO: 1384212
cauaucgcacaaagauugu

SEQ ID NO: 1384214 - RNA, 19 nt, Artificial Sequence
  Description of Artificial Sequence: Synthetic oligonucleotide
  Sense strand starting at position 2449 of SEQ ID NO: 1242951
aucuuugugcgauauggga

SEQ ID NO: 1384215 - RNA, 19 nt, Artificial Sequence
  Description of Artificial Sequence: Synthetic oligonucleotide
  Antisense strand to SEQ ID NO: 1384214
ucccauaucgcacaaagau

SEQ ID NO: 1384216 - RNA, 19 nt, Artificial Sequence
  Description of Artificial Sequence: Synthetic oligonucleotide
  Sense strand starting at position 256 of SEQ ID NO: 1242952
ucuacaugugccuagaaga

SEQ ID NO: 1384217 - RNA, 19 nt, Artificial Sequence
  Description of Artificial Sequence: Synthetic oligonucleotide
  Antisense strand to SEQ ID NO: 1384216
ucuucuaggcacauguaga

SEQ ID NO: 1384218 - RNA, 19 nt, Artificial Sequence
  Description of Artificial Sequence: Synthetic oligonucleotide
  Sense strand starting at position 350 of SEQ ID NO: 1242952
guggcaugucuguguuaca

SEQ ID NO: 1384219 - RNA, 19 nt, Artificial Sequence
  Description of Artificial Sequence: Synthetic oligonucleotide
  Antisense strand to SEQ ID NO: 1384218
uguaacacagacaugccac

SEQ ID NO: 1384220 - RNA, 19 nt, Artificial Sequence
  Description of Artificial Sequence: Synthetic oligonucleotide
  Sense strand starting at position 361 of SEQ ID NO: 1242952
guguuacacaugugcucuu

SEQ ID NO: 1384221 - RNA, 19 nt, Artificial Sequence
  Description of Artificial Sequence: Synthetic oligonucleotide
  Antisense strand to SEQ ID NO: 1384220
aagagcacauguguaacac

SEQ ID NO: 1384222 - RNA, 19 nt, Artificial Sequence
  Description of Artificial Sequence: Synthetic oligonucleotide
  Sense strand starting at position 368 of SEQ ID NO: 1242952
acaugugcucuuggauaug

SEQ ID NO: 1384223 - RNA, 19 nt, Artificial Sequence
  Description of Artificial Sequence: Synthetic oligonucleotide
  Antisense strand to SEQ ID NO: 1384222
cauauccaagagcacaugu

SEQ ID NO: 1384224 - RNA, 19 nt, Artificial Sequence
  Description of Artificial Sequence: Synthetic oligonucleotide
  Sense strand starting at position 371 of SEQ ID NO: 1242952
ugugcucuuggauaugaca

SEQ ID NO: 1384225 - RNA, 19 nt, Artificial Sequence
  Description of Artificial Sequence: Synthetic oligonucleotide
  Antisense strand to SEQ ID NO: 1384224
ugucauauccaagagcaca

SEQ ID NO: 1384226 - RNA, 19 nt, Artificial Sequence
  Description of Artificial Sequence: Synthetic oligonucleotide
  Sense strand starting at position 396 of SEQ ID NO: 1242952
uccuguucuuguuuacaca

SEQ ID NO: 1384227 - RNA, 19 nt, Artificial Sequence
  Description of Artificial Sequence: Synthetic oligonucleotide
  Antisense strand to SEQ ID NO: 1384226
uguguaaacaagaacagga

SEQ ID NO: 1384228 - RNA, 19 nt, Artificial Sequence
  Description of Artificial Sequence: Synthetic oligonucleotide
  Sense strand starting at position 397 of SEQ ID NO: 1242952
ccuguucuuguuuacacau

SEQ ID NO: 1384229 - RNA, 19 nt, Artificial Sequence
  Description of Artificial Sequence: Synthetic oligonucleotide
  Antisense strand to SEQ ID NO: 1384228
auguguaaacaagaacagg

SEQ ID NO: 1384230 - RNA, 19 nt, Artificial Sequence
  Description of Artificial Sequence: Synthetic oligonucleotide
  Sense strand starting at position 419 of SEQ ID NO: 1242952
acaguuugccgcgugucaa

SEQ ID NO: 1384231 - RNA, 19 nt, Artificial Sequence
  Description of Artificial Sequence: Synthetic oligonucleotide
  Antisense strand to SEQ ID NO: 1384230
uugacacgcggcaaacugu

SEQ ID NO: 1384232 - RNA, 19 nt, Artificial Sequence
  Description of Artificial Sequence: Synthetic oligonucleotide
  Sense strand starting at position 1122 of SEQ ID NO: 1242952
gcguccugaccucgagaga

SEQ ID NO: 1384233 - RNA, 19 nt, Artificial Sequence
  Description of Artificial Sequence: Synthetic oligonucleotide
  Antisense strand to SEQ ID NO: 1384232
ucucucgaggucaggacgc

SEQ ID NO: 1384234 - RNA, 19 nt, Artificial Sequence
  Description of Artificial Sequence: Synthetic oligonucleotide
  Sense strand starting at position 2052 of SEQ ID NO: 1242952
cgucuuagguguucacuau

SEQ ID NO: 1384235 - RNA, 19 nt, Artificial Sequence
  Description of Artificial Sequence: Synthetic oligonucleotide
  Antisense strand to SEQ ID NO: 1384234
auagugaacaccuaagacg

SEQ ID NO: 1384236 - RNA, 19 nt, Artificial Sequence
  Description of Artificial Sequence: Synthetic oligonucleotide
  Sense strand starting at position 2261 of SEQ ID NO: 1242952
ccguguuaggcugaucuca

SEQ ID NO: 1384237 - RNA, 19 nt, Artificial Sequence
  Description of Artificial Sequence: Synthetic oligonucleotide
  Antisense strand to SEQ ID NO: 1384236
ugagaucagccuaacacgg

SEQ ID NO: 1384238 - RNA, 19 nt, Artificial Sequence
  Description of Artificial Sequence: Synthetic oligonucleotide
  Sense strand starting at position 2263 of SEQ ID NO: 1242952
guguuaggcugaucucaaa

SEQ ID NO: 1384239 - RNA, 19 nt, Artificial Sequence
  Description of Artificial Sequence: Synthetic oligonucleotide
  Antisense strand to SEQ ID NO: 1384238
uuugagaucagccuaacac

SEQ ID NO: 1384240 - RNA, 19 nt, Artificial Sequence
  Description of Artificial Sequence: Synthetic oligonucleotide
  Sense strand starting at position 2355 of SEQ ID NO: 1242952
ggccauguacauuauuaua

SEQ ID NO: 1384241 - RNA, 19 nt, Artificial Sequence
  Description of Artificial Sequence: Synthetic oligonucleotide
  Antisense strand to SEQ ID NO: 1384240
uauaauaauguacauggcc

SEQ ID NO: 1384242 - RNA, 19 nt, Artificial Sequence
  Description of Artificial Sequence: Synthetic oligonucleotide
  Sense strand starting at position 2384 of SEQ ID NO: 1242952
ucggcauggauuuggcauu

SEQ ID NO: 1384243 - RNA, 19 nt, Artificial Sequence
  Description of Artificial Sequence: Synthetic oligonucleotide
  Antisense strand to SEQ ID NO: 1384242
aaugccaaauccaugccga

SEQ ID NO: 1384244 - RNA, 19 nt, Artificial Sequence
  Description of Artificial Sequence: Synthetic oligonucleotide
  Sense strand starting at position 2397 of SEQ ID NO: 1242952
ggcauuggaagucaguuua

SEQ ID NO: 1384245 - RNA, 19 nt, Artificial Sequence
  Description of Artificial Sequence: Synthetic oligonucleotide
  Antisense strand to SEQ ID NO: 1384244
uaaacugacuuccaaugcc

SEQ ID NO: 1384246 - RNA, 19 nt, Artificial Sequence
  Description of Artificial Sequence: Synthetic oligonucleotide
  Sense strand starting at position 2410 of SEQ ID NO: 1242952
aguuuauucugccucuuga

SEQ ID NO: 1384247 - RNA, 19 nt, Artificial Sequence
  Description of Artificial Sequence: Synthetic oligonucleotide
  Antisense strand to SEQ ID NO: 1384246
ucaagaggcagaauaaacu

SEQ ID NO: 1384248 - RNA, 19 nt, Artificial Sequence
  Description of Artificial Sequence: Synthetic oligonucleotide
  Sense strand starting at position 2481 of SEQ ID NO: 1242952
gggugacaguuucuucuca

SEQ ID NO: 1384249 - RNA, 19 nt, Artificial Sequence
  Description of Artificial Sequence: Synthetic oligonucleotide
  Antisense strand to SEQ ID NO: 1384248
ugagaagaaacugucaccc

SEQ ID NO: 1384250 - RNA, 19 nt, Artificial Sequence
  Description of Artificial Sequence: Synthetic oligonucleotide
  Sense strand starting at position 2483 of SEQ ID NO: 1242952
gugacaguuucuucucaga

SEQ ID NO: 1384251 - RNA, 19 nt, Artificial Sequence
  Description of Artificial Sequence: Synthetic oligonucleotide
  Antisense strand to SEQ ID NO: 1384250
ucugagaagaaacugucac

SEQ ID NO: 1384252 - RNA, 19 nt, Artificial Sequence
  Description of Artificial Sequence: Synthetic oligonucleotide
  Sense strand starting at position 2491 of SEQ ID NO: 1242952
uucuucucagauugugaga

SEQ ID NO: 1384253 - RNA, 19 nt, Artificial Sequence
  Description of Artificial Sequence: Synthetic oligonucleotide
  Antisense strand to SEQ ID NO: 1384252
ucucacaaucugagaagaa

SEQ ID NO: 1384254 - RNA, 19 nt, Artificial Sequence
  Description of Artificial Sequence: Synthetic oligonucleotide
  Sense strand starting at position 2494 of SEQ ID NO: 1242952
uucucagauugugagaauu

SEQ ID NO: 1384255 - RNA, 19 nt, Artificial Sequence
  Description of Artificial Sequence: Synthetic oligonucleotide
  Antisense strand to SEQ ID NO: 1384254
aauucucacaaucugagaa

SEQ ID NO: 1384256 - RNA, 19 nt, Artificial Sequence
  Description of Artificial Sequence: Synthetic oligonucleotide
  Sense strand starting at position 2496 of SEQ ID NO: 1242952
cucagauugugagaauuaa

SEQ ID NO: 1384257 - RNA, 19 nt, Artificial Sequence
  Description of Artificial Sequence: Synthetic oligonucleotide
  Antisense strand to SEQ ID NO: 1384256
uuaauucucacaaucugag

SEQ ID NO: 1384258 - RNA, 19 nt, Artificial Sequence
  Description of Artificial Sequence: Synthetic oligonucleotide
  Sense strand starting at position 2553 of SEQ ID NO: 1242952
guuucuucagggcagugaa

SEQ ID NO: 1384259 - RNA, 19 nt, Artificial Sequence
  Description of Artificial Sequence: Synthetic oligonucleotide
  Antisense strand to SEQ ID NO: 1384258
uucacugcccugaagaaac

SEQ ID NO: 1384260 - RNA, 19 nt, Artificial Sequence
  Description of Artificial Sequence: Synthetic oligonucleotide
  Sense strand starting at position 2578 of SEQ ID NO: 1242952
uugaguaccugggauguaa

SEQ ID NO: 1384261 - RNA, 19 nt, Artificial Sequence
  Description of Artificial Sequence: Synthetic oligonucleotide
  Antisense strand to SEQ ID NO: 1384260
uuacaucccagguacucaa

SEQ ID NO: 1384262 - RNA, 19 nt, Artificial Sequence
  Description of Artificial Sequence: Synthetic oligonucleotide
  Sense strand starting at position 2723 of SEQ ID NO: 1242952
uggugauauuaagaacacu

SEQ ID NO: 1384263 - RNA, 19 nt, Artificial Sequence
  Description of Artificial Sequence: Synthetic oligonucleotide
  Antisense strand to SEQ ID NO: 1384262
aguguucuuaauaucacca

SEQ ID NO: 1384264 - RNA, 19 nt, Artificial Sequence
  Description of Artificial Sequence: Synthetic oligonucleotide
  Sense strand starting at position 2760 of SEQ ID NO: 1242952
accacuaucuaggucagaa

SEQ ID NO: 1384265 - RNA, 19 nt, Artificial Sequence
  Description of Artificial Sequence: Synthetic oligonucleotide
  Antisense strand to SEQ ID NO: 1384264
uucugaccuagauaguggu

SEQ ID NO: 1384266 - RNA, 19 nt, Artificial Sequence
  Description of Artificial Sequence: Synthetic oligonucleotide
  Sense strand starting at position 2799 of SEQ ID NO: 1242952
ccaccucgguacucauuaa

SEQ ID NO: 1384267 - RNA, 19 nt, Artificial Sequence
  Description of Artificial Sequence: Synthetic oligonucleotide
  Antisense strand to SEQ ID NO: 1384266
uuaaugaguaccgaggugg

SEQ ID NO: 1384268 - RNA, 19 nt, Artificial Sequence
  Description of Artificial Sequence: Synthetic oligonucleotide
  Sense strand starting at position 2803 of SEQ ID NO: 1242952
cucgguacucauuaacagu

SEQ ID NO: 1384269 - RNA, 19 nt, Artificial Sequence
  Description of Artificial Sequence: Synthetic oligonucleotide
  Antisense strand to SEQ ID NO: 1384268
acuguuaaugaguaccgag

SEQ ID NO: 1384270 - RNA, 19 nt, Artificial Sequence
  Description of Artificial Sequence: Synthetic oligonucleotide
  Sense strand starting at position 2877 of SEQ ID NO: 1242952
gcggauauugcauauagau

SEQ ID NO: 1384271 - RNA, 19 nt, Artificial Sequence
  Description of Artificial Sequence: Synthetic oligonucleotide
  Antisense strand to SEQ ID NO: 1384270
aucuauaugcaauauccgc

SEQ ID NO: 1384272 - RNA, 19 nt, Artificial Sequence
  Description of Artificial Sequence: Synthetic oligonucleotide
  Sense strand starting at position 3494 of SEQ ID NO: 1242952
cagguuuacaggcaugagu

SEQ ID NO: 1384273 - RNA, 19 nt, Artificial Sequence
  Description of Artificial Sequence: Synthetic oligonucleotide
  Antisense strand to SEQ ID NO: 1384272
acucaugccuguaaaccug

SEQ ID NO: 1384274 - RNA, 19 nt, Artificial Sequence
  Description of Artificial Sequence: Synthetic oligonucleotide
  Sense strand starting at position 3511 of SEQ ID NO: 1242952
gucaucacaccuggacaau

SEQ ID NO: 1384275 - RNA, 19 nt, Artificial Sequence
  Description of Artificial Sequence: Synthetic oligonucleotide
  Antisense strand to SEQ ID NO: 1384274
auuguccaggugugaugac

SEQ ID NO: 1384276 - RNA, 19 nt, Artificial Sequence
  Description of Artificial Sequence: Synthetic oligonucleotide
  Sense strand starting at position 3619 of SEQ ID NO: 1242952
ggcaaagugcugcaauuac

SEQ ID NO: 1384277 - RNA, 19 nt, Artificial Sequence
  Description of Artificial Sequence: Synthetic oligonucleotide
  Antisense strand to SEQ ID NO: 1384276
guaauugcagcacuuugcc

SEQ ID NO: 1384278 - RNA, 19 nt, Artificial Sequence
  Description of Artificial Sequence: Synthetic oligonucleotide
  Sense strand starting at position 3683 of SEQ ID NO: 1242952
ggcuuagucaacugaagca

SEQ ID NO: 1384279 - RNA, 19 nt, Artificial Sequence
  Description of Artificial Sequence: Synthetic oligonucleotide
  Antisense strand to SEQ ID NO: 1384278
ugcuucaguugacuaagcc

SEQ ID NO: 1384280 - RNA, 19 nt, Artificial Sequence
  Description of Artificial Sequence: Synthetic oligonucleotide
  Sense strand starting at position 3731 of SEQ ID NO: 1242952
auaacugguucugaucaau

SEQ ID NO: 1384281 - RNA, 19 nt, Artificial Sequence
  Description of Artificial Sequence: Synthetic oligonucleotide
  Antisense strand to SEQ ID NO: 1384280
auugaucagaaccaguuau

SEQ ID NO: 1384282 - RNA, 19 nt, Artificial Sequence
  Description of Artificial Sequence: Synthetic oligonucleotide
  Sense strand starting at position 3814 of SEQ ID NO: 1242952
aggucagaccuccauucuu

SEQ ID NO: 1384283 - RNA, 19 nt, Artificial Sequence
  Description of Artificial Sequence: Synthetic oligonucleotide
  Antisense strand to SEQ ID NO: 1384282
aagaauggaggucugaccu

SEQ ID NO: 1384284 - RNA, 19 nt, Artificial Sequence
  Description of Artificial Sequence: Synthetic oligonucleotide
  Sense strand starting at position 3852 of SEQ ID NO: 1242952
caccgucuuccugacaguu

SEQ ID NO: 1384285 - RNA, 19 nt, Artificial Sequence
  Description of Artificial Sequence: Synthetic oligonucleotide
  Antisense strand to SEQ ID NO: 1384284
aacugucaggaagacggug

SEQ ID NO: 1384286 - RNA, 19 nt, Artificial Sequence
  Description of Artificial Sequence: Synthetic oligonucleotide
  Sense strand starting at position 3924 of SEQ ID NO: 1242952
ugccauagguguuuaccaa

SEQ ID NO: 1384287 - RNA, 19 nt, Artificial Sequence
  Description of Artificial Sequence: Synthetic oligonucleotide
  Antisense strand to SEQ ID NO: 1384286
uugguaaacaccuauggca

SEQ ID NO: 1384288 - RNA, 19 nt, Artificial Sequence
  Description of Artificial Sequence: Synthetic oligonucleotide
  Sense strand starting at position 3925 of SEQ ID NO: 1242952
gccauagguguuuaccaag

SEQ ID NO: 1384289 - RNA, 19 nt, Artificial Sequence
  Description of Artificial Sequence: Synthetic oligonucleotide
  Antisense strand to SEQ ID NO: 1384288
cuugguaaacaccuauggc

SEQ ID NO: 1384290 - RNA, 19 nt, Artificial Sequence
  Description of Artificial Sequence: Synthetic oligonucleotide
  Sense strand starting at position 3931 of SEQ ID NO: 1242952
gguguuuaccaagggugau

SEQ ID NO: 1384291 - RNA, 19 nt, Artificial Sequence
  Description of Artificial Sequence: Synthetic oligonucleotide
  Antisense strand to SEQ ID NO: 1384290
aucacccuugguaaacacc

SEQ ID NO: 1384292 - RNA, 19 nt, Artificial Sequence
  Description of Artificial Sequence: Synthetic oligonucleotide
  Sense strand starting at position 3932 of SEQ ID NO: 1242952
guguuuaccaagggugauu

SEQ ID NO: 1384293 - RNA, 19 nt, Artificial Sequence
  Description of Artificial Sequence: Synthetic oligonucleotide
  Antisense strand to SEQ ID NO: 1384292
aaucacccuugguaaacac

SEQ ID NO: 1384294 - RNA, 19 nt, Artificial Sequence
  Description of Artificial Sequence: Synthetic oligonucleotide
  Sense strand starting at position 3970 of SEQ ID NO: 1242952
agauauuccuaucaguuga

SEQ ID NO: 1384295 - RNA, 19 nt, Artificial Sequence
  Description of Artificial Sequence: Synthetic oligonucleotide
  Antisense strand to SEQ ID NO: 1384294
ucaacugauaggaauaucu

SEQ ID NO: 1384296 - RNA, 19 nt, Artificial Sequence
  Description of Artificial Sequence: Synthetic oligonucleotide
  Sense strand starting at position 13 of SEQ ID NO: 1242953
ucguccugaucguucugaa

SEQ ID NO: 1384297 - RNA, 19 nt, Artificial Sequence
  Description of Artificial Sequence: Synthetic oligonucleotide
  Antisense strand to SEQ ID NO: 1384296
uucagaacgaucaggacga

SEQ ID NO: 1384298 - RNA, 19 nt, Artificial Sequence
  Description of Artificial Sequence: Synthetic oligonucleotide
  Sense strand starting at position 42 of SEQ ID NO: 1242953
aguacacauucgggagaaa

SEQ ID NO: 1384299 - RNA, 19 nt, Artificial Sequence
  Description of Artificial Sequence: Synthetic oligonucleotide
  Antisense strand to SEQ ID NO: 1384298
uuucucccgaauguguacu

SEQ ID NO: 1384300 - RNA, 19 nt, Artificial Sequence
  Description of Artificial Sequence: Synthetic oligonucleotide
  Sense strand starting at position 2196 of SEQ ID NO: 1242953
gguguuggccagagucuga

SEQ ID NO: 1384301 - RNA, 19 nt, Artificial Sequence
  Description of Artificial Sequence: Synthetic oligonucleotide
  Antisense strand to SEQ ID NO: 1384300
ucagacucuggccaacacc

SEQ ID NO: 1384302 - RNA, 19 nt, Artificial Sequence
  Description of Artificial Sequence: Synthetic oligonucleotide
  Sense strand starting at position 2203 of SEQ ID NO: 1242953
gccagagucugaccacaga

SEQ ID NO: 1384303 - RNA, 19 nt, Artificial Sequence
  Description of Artificial Sequence: Synthetic oligonucleotide
  Antisense strand to SEQ ID NO: 1384302
ucuguggucagacucuggc

SEQ ID NO: 1384304 - RNA, 19 nt, Artificial Sequence
  Description of Artificial Sequence: Synthetic oligonucleotide
  Sense strand starting at position 2216 of SEQ ID NO: 1242953
cacagagucuaggagagau

SEQ ID NO: 1384305 - RNA, 19 nt, Artificial Sequence
  Description of Artificial Sequence: Synthetic oligonucleotide
  Antisense strand to SEQ ID NO: 1384304
aucucuccuagacucugug

SEQ ID NO: 1384306 - RNA, 19 nt, Artificial Sequence
  Description of Artificial Sequence: Synthetic oligonucleotide
  Sense strand starting at position 2253 of SEQ ID NO: 1242953
ggaagucacuccugcauuu

SEQ ID NO: 1384307 - RNA, 19 nt, Artificial Sequence
  Description of Artificial Sequence: Synthetic oligonucleotide
  Antisense strand to SEQ ID NO: 1384306
aaaugcaggagugacuucc

SEQ ID NO: 1384308 - RNA, 19 nt, Artificial Sequence
  Description of Artificial Sequence: Synthetic oligonucleotide
  Sense strand starting at position 2264 of SEQ ID NO: 1242953
cugcauuuguaguccaguu

SEQ ID NO: 1384309 - RNA, 19 nt, Artificial Sequence
  Description of Artificial Sequence: Synthetic oligonucleotide
  Antisense strand to SEQ ID NO: 1384308
aacuggacuacaaaugcag

SEQ ID NO: 1384310 - RNA, 19 nt, Artificial Sequence
  Description of Artificial Sequence: Synthetic oligonucleotide
  Sense strand starting at position 2426 of SEQ ID NO: 1242953
uccacuuugucucuggauu

SEQ ID NO: 1384311 - RNA, 19 nt, Artificial Sequence
  Description of Artificial Sequence: Synthetic oligonucleotide
  Antisense strand to SEQ ID NO: 1384310
aauccagagacaaagugga

SEQ ID NO: 1384312 - RNA, 19 nt, Artificial Sequence
  Description of Artificial Sequence: Synthetic oligonucleotide
  Sense strand starting at position 2449 of SEQ ID NO: 1242953
gguuuccuccaagaaagca

SEQ ID NO: 1384313 - RNA, 19 nt, Artificial Sequence
  Description of Artificial Sequence: Synthetic oligonucleotide
  Antisense strand to SEQ ID NO: 1384312
ugcuuucuuggaggaaacc

SEQ ID NO: 1384314 - RNA, 19 nt, Artificial Sequence
  Description of Artificial Sequence: Synthetic oligonucleotide
  Sense strand starting at position 2493 of SEQ ID NO: 1242953
gggagauguacuggaucug

SEQ ID NO: 1384315 - RNA, 19 nt, Artificial Sequence
  Description of Artificial Sequence: Synthetic oligonucleotide
  Antisense strand to SEQ ID NO: 1384314
cagauccaguacaucuccc

SEQ ID NO: 1384316 - RNA, 19 nt, Artificial Sequence
  Description of Artificial Sequence: Synthetic oligonucleotide
  Sense strand starting at position 2494 of SEQ ID NO: 1242953
ggagauguacuggaucugu

SEQ ID NO: 1384317 - RNA, 19 nt, Artificial Sequence
  Description of Artificial Sequence: Synthetic oligonucleotide
  Antisense strand to SEQ ID NO: 1384316
acagauccaguacaucucc

SEQ ID NO: 1384318 - RNA, 19 nt, Artificial Sequence
  Description of Artificial Sequence: Synthetic oligonucleotide
  Sense strand starting at position 2576 of SEQ ID NO: 1242953
gcuaauaggcauugcaaua

SEQ ID NO: 1384319 - RNA, 19 nt, Artificial Sequence
  Description of Artificial Sequence: Synthetic oligonucleotide
  Antisense strand to SEQ ID NO: 1384318
uauugcaaugccuauuagc

SEQ ID NO: 1384320 - RNA, 19 nt, Artificial Sequence
  Description of Artificial Sequence: Synthetic oligonucleotide
  Sense strand starting at position 2602 of SEQ ID NO: 1242953
ccauauuaguuauuguaac

SEQ ID NO: 1384321 - RNA, 19 nt, Artificial Sequence
  Description of Artificial Sequence: Synthetic oligonucleotide
  Antisense strand to SEQ ID NO: 1384320
guuacaauaacuaauaugg

SEQ ID NO: 1384322 - RNA, 19 nt, Artificial Sequence
  Description of Artificial Sequence: Synthetic oligonucleotide
  Sense strand starting at position 2793 of SEQ ID NO: 1242953
cggcaucaucucuggcuaa

SEQ ID NO: 1384323 - RNA, 19 nt, Artificial Sequence
  Description of Artificial Sequence: Synthetic oligonucleotide
  Antisense strand to SEQ ID NO: 1384322
uuagccagagaugaugccg

SEQ ID NO: 1384324 - RNA, 19 nt, Artificial Sequence
  Description of Artificial Sequence: Synthetic oligonucleotide
  Sense strand starting at position 3077 of SEQ ID NO: 1242953
gcgccuagccaauaucuuu

SEQ ID NO: 1384325 - RNA, 19 nt, Artificial Sequence
  Description of Artificial Sequence: Synthetic oligonucleotide
  Antisense strand to SEQ ID NO: 1384324
aaagauauuggcuaggcgc

SEQ ID NO: 1384326 - RNA, 19 nt, Artificial Sequence
  Description of Artificial Sequence: Synthetic oligonucleotide
  Sense strand starting at position 3421 of SEQ ID NO: 1242953
ggugguuuauucucuuaag

SEQ ID NO: 1384327 - RNA, 19 nt, Artificial Sequence
  Description of Artificial Sequence: Synthetic oligonucleotide
  Antisense strand to SEQ ID NO: 1384326
cuuaagagaauaaaccacc

SEQ ID NO: 1384328 - RNA, 19 nt, Artificial Sequence
  Description of Artificial Sequence: Synthetic oligonucleotide
  Sense strand starting at position 3424 of SEQ ID NO: 1242953
gguuuauucucuuaaggau

SEQ ID NO: 1384329 - RNA, 19 nt, Artificial Sequence
  Description of Artificial Sequence: Synthetic oligonucleotide
  Antisense strand to SEQ ID NO: 1384328
auccuuaagagaauaaacc

SEQ ID NO: 1384330 - RNA, 19 nt, Artificial Sequence
  Description of Artificial Sequence: Synthetic oligonucleotide
  Sense strand starting at position 3427 of SEQ ID NO: 1242953
uuauucucuuaaggaugaa

SEQ ID NO: 1384331 - RNA, 19 nt, Artificial Sequence
  Description of Artificial Sequence: Synthetic oligonucleotide
  Antisense strand to SEQ ID NO: 1384330
uucauccuuaagagaauaa

SEQ ID NO: 1384332 - RNA, 19 nt, Artificial Sequence
  Description of Artificial Sequence: Synthetic oligonucleotide
  Sense strand starting at position 3448 of SEQ ID NO: 1242953
uuuagaauucuguguaucg

SEQ ID NO: 1384333 - RNA, 19 nt, Artificial Sequence
  Description of Artificial Sequence: Synthetic oligonucleotide
  Antisense strand to SEQ ID NO: 1384332
cgauacacagaauucuaaa

SEQ ID NO: 1384334 - RNA, 19 nt, Artificial Sequence
  Description of Artificial Sequence: Synthetic oligonucleotide
  Sense strand starting at position 3449 of SEQ ID NO: 1242953
uuagaauucuguguaucgu

SEQ ID NO: 1384335 - RNA, 19 nt, Artificial Sequence
  Description of Artificial Sequence: Synthetic oligonucleotide
  Antisense strand to SEQ ID NO: 1384334
acgauacacagaauucuaa

SEQ ID NO: 1384336 - RNA, 19 nt, Artificial Sequence
  Description of Artificial Sequence: Synthetic oligonucleotide
  Sense strand starting at position 3450 of SEQ ID NO: 1242953
uagaauucuguguaucguc

SEQ ID NO: 1384337 - RNA, 19 nt, Artificial Sequence
  Description of Artificial Sequence: Synthetic oligonucleotide
  Antisense strand to SEQ ID NO: 1384336
gacgauacacagaauucua

SEQ ID NO: 1384338 - RNA, 19 nt, Artificial Sequence
  Description of Artificial Sequence: Synthetic oligonucleotide
  Sense strand starting at position 3455 of SEQ ID NO: 1242953
uucuguguaucgucuggaa

SEQ ID NO: 1384339 - RNA, 19 nt, Artificial Sequence
  Description of Artificial Sequence: Synthetic oligonucleotide
  Antisense strand to SEQ ID NO: 1384338
uuccagacgauacacagaa

SEQ ID NO: 1384340 - RNA, 19 nt, Artificial Sequence
  Description of Artificial Sequence: Synthetic oligonucleotide
  Sense strand starting at position 3459 of SEQ ID NO: 1242953
guguaucgucuggaagcaa

SEQ ID NO: 1384341 - RNA, 19 nt, Artificial Sequence
  Description of Artificial Sequence: Synthetic oligonucleotide
  Antisense strand to SEQ ID NO: 1384340
uugcuuccagacgauacac

SEQ ID NO: 1384342 - RNA, 19 nt, Artificial Sequence
  Description of Artificial Sequence: Synthetic oligonucleotide
  Sense strand starting at position 3471 of SEQ ID NO: 1242953
gaagcaaucccuugucaga

SEQ ID NO: 1384343 - RNA, 19 nt, Artificial Sequence
  Description of Artificial Sequence: Synthetic oligonucleotide
  Antisense strand to SEQ ID NO: 1384342
ucugacaagggauugcuuc

SEQ ID NO: 1384344 - RNA, 19 nt, Artificial Sequence
  Description of Artificial Sequence: Synthetic oligonucleotide
  Sense strand starting at position 3473 of SEQ ID NO: 1242953
agcaaucccuugucagaua

SEQ ID NO: 1384345 - RNA, 19 nt, Artificial Sequence
  Description of Artificial Sequence: Synthetic oligonucleotide
  Antisense strand to SEQ ID NO: 1384344
uaucugacaagggauugcu

SEQ ID NO: 1384346 - RNA, 19 nt, Artificial Sequence
  Description of Artificial Sequence: Synthetic oligonucleotide
  Sense strand starting at position 3513 of SEQ ID NO: 1242953
cuuaguuuguagcuuguua

SEQ ID NO: 1384347 - RNA, 19 nt, Artificial Sequence
  Description of Artificial Sequence: Synthetic oligonucleotide
  Antisense strand to SEQ ID NO: 1384346
uaacaagcuacaaacuaag

SEQ ID NO: 1384348 - RNA, 19 nt, Artificial Sequence
  Description of Artificial Sequence: Synthetic oligonucleotide
  Sense strand starting at position 3515 of SEQ ID NO: 1242953
uaguuuguagcuuguuagu

SEQ ID NO: 1384349 - RNA, 19 nt, Artificial Sequence
  Description of Artificial Sequence: Synthetic oligonucleotide
  Antisense strand to SEQ ID NO: 1384348
acuaacaagcuacaaacua

SEQ ID NO: 1384350 - RNA, 19 nt, Artificial Sequence
  Description of Artificial Sequence: Synthetic oligonucleotide
  Sense strand starting at position 3626 of SEQ ID NO: 1242953
cuaggaacugucugccuaa

SEQ ID NO: 1384351 - RNA, 19 nt, Artificial Sequence
  Description of Artificial Sequence: Synthetic oligonucleotide
  Antisense strand to SEQ ID NO: 1384350
uuaggcagacaguuccuag

SEQ ID NO: 1384352 - RNA, 19 nt, Artificial Sequence
  Description of Artificial Sequence: Synthetic oligonucleotide
  Sense strand starting at position 3629 of SEQ ID NO: 1242953
ggaacugucugccuaacca

SEQ ID NO: 1384353 - RNA, 19 nt, Artificial Sequence
  Description of Artificial Sequence: Synthetic oligonucleotide
  Antisense strand to SEQ ID NO: 1384352
ugguuaggcagacaguucc

SEQ ID NO: 1384354 - RNA, 19 nt, Artificial Sequence
  Description of Artificial Sequence: Synthetic oligonucleotide
  Sense strand starting at position 3698 of SEQ ID NO: 1242953
uguuuauauugagaucuac

SEQ ID NO: 1384355 - RNA, 19 nt, Artificial Sequence
  Description of Artificial Sequence: Synthetic oligonucleotide
  Antisense strand to SEQ ID NO: 1384354
guagaucucaauauaaaca

SEQ ID NO: 1384356 - RNA, 19 nt, Artificial Sequence
  Description of Artificial Sequence: Synthetic oligonucleotide
  Sense strand starting at position 3758 of SEQ ID NO: 1242953
gguccagauucuucuguuu

SEQ ID NO: 1384357 - RNA, 19 nt, Artificial Sequence
  Description of Artificial Sequence: Synthetic oligonucleotide
  Antisense strand to SEQ ID NO: 1384356
aaacagaagaaucuggacc

SEQ ID NO: 1384358 - RNA, 19 nt, Artificial Sequence
  Description of Artificial Sequence: Synthetic oligonucleotide
  Sense strand starting at position 3794 of SEQ ID NO: 1242953
ccuacagauguccaauugu

SEQ ID NO: 1384359 - RNA, 19 nt, Artificial Sequence
  Description of Artificial Sequence: Synthetic oligonucleotide
  Antisense strand to SEQ ID NO: 1384358
acaauuggacaucuguagg

SEQ ID NO: 1384360 - RNA, 19 nt, Artificial Sequence
  Description of Artificial Sequence: Synthetic oligonucleotide
  Sense strand starting at position 3861 of SEQ ID NO: 1242953
ucucgcacuuauuuguaaa

SEQ ID NO: 1384361 - RNA, 19 nt, Artificial Sequence
  Description of Artificial Sequence: Synthetic oligonucleotide
  Antisense strand to SEQ ID NO: 1384360
uuuacaaauaagugcgaga

SEQ ID NO: 1384362 - RNA, 19 nt, Artificial Sequence
  Description of Artificial Sequence: Synthetic oligonucleotide
  Sense strand starting at position 3925 of SEQ ID NO: 1242953
uucuguucugugugucuau

SEQ ID NO: 1384363 - RNA, 19 nt, Artificial Sequence
  Description of Artificial Sequence: Synthetic oligonucleotide
  Antisense strand to SEQ ID NO: 1384362
auagacacacagaacagaa

SEQ ID NO: 1384364 - RNA, 19 nt, Artificial Sequence
  Description of Artificial Sequence: Synthetic oligonucleotide
  Sense strand starting at position 3934 of SEQ ID NO: 1242953
gugugucuauccuuuacca

SEQ ID NO: 1384365 - RNA, 19 nt, Artificial Sequence
  Description of Artificial Sequence: Synthetic oligonucleotide
  Antisense strand to SEQ ID NO: 1384364
ugguaaaggauagacacac

SEQ ID NO: 1384366 - RNA, 19 nt, Artificial Sequence
  Description of Artificial Sequence: Synthetic oligonucleotide
  Sense strand starting at position 3936 of SEQ ID NO: 1242953
gugucuauccuuuaccaca

SEQ ID NO: 1384367 - RNA, 19 nt, Artificial Sequence
  Description of Artificial Sequence: Synthetic oligonucleotide
  Antisense strand to SEQ ID NO: 1384366
ugugguaaaggauagacac

SEQ ID NO: 1384368 - RNA, 19 nt, Artificial Sequence
  Description of Artificial Sequence: Synthetic oligonucleotide
  Sense strand starting at position 3955 of SEQ ID NO: 1242953
gccacagugccuugauuaa

SEQ ID NO: 1384369 - RNA, 19 nt, Artificial Sequence
  Description of Artificial Sequence: Synthetic oligonucleotide
  Antisense strand to SEQ ID NO: 1384368
uuaaucaaggcacuguggc

SEQ ID NO: 1384370 - RNA, 19 nt, Artificial Sequence
  Description of Artificial Sequence: Synthetic oligonucleotide
  Sense strand starting at position 3970 of SEQ ID NO: 1242953
uuaacauagcucugugaug

SEQ ID NO: 1384371 - RNA, 19 nt, Artificial Sequence
  Description of Artificial Sequence: Synthetic oligonucleotide
  Antisense strand to SEQ ID NO: 1384370
caucacagagcuauguuaa

SEQ ID NO: 1384372 - RNA, 19 nt, Artificial Sequence
  Description of Artificial Sequence: Synthetic oligonucleotide
  Sense strand starting at position 3971 of SEQ ID NO: 1242953
uaacauagcucugugaugu

SEQ ID NO: 1384373 - RNA, 19 nt, Artificial Sequence
  Description of Artificial Sequence: Synthetic oligonucleotide
  Antisense strand to SEQ ID NO: 1384372
acaucacagagcuauguua

SEQ ID NO: 1384374 - RNA, 19 nt, Artificial Sequence
  Description of Artificial Sequence: Synthetic oligonucleotide
  Sense strand starting at position 3972 of SEQ ID NO: 1242953
aacauagcucugugauguc

SEQ ID NO: 1384375 - RNA, 19 nt, Artificial Sequence
  Description of Artificial Sequence: Synthetic oligonucleotide
  Antisense strand to SEQ ID NO: 1384374
gacaucacagagcuauguu

SEQ ID NO: 1384376 - RNA, 19 nt, Artificial Sequence
  Description of Artificial Sequence: Synthetic oligonucleotide
  Sense strand starting at position 91 of SEQ ID NO: 1242954
cuuuaaaugguuuggagag

SEQ ID NO: 1384377 - RNA, 19 nt, Artificial Sequence
  Description of Artificial Sequence: Synthetic oligonucleotide
  Antisense strand to SEQ ID NO: 1384376
cucuccaaaccauuuaaag

SEQ ID NO: 1384378 - RNA, 19 nt, Artificial Sequence
  Description of Artificial Sequence: Synthetic oligonucleotide
  Sense strand starting at position 255 of SEQ ID NO: 1242954
ggaagaucuugaggagaaa

SEQ ID NO: 1384379 - RNA, 19 nt, Artificial Sequence
  Description of Artificial Sequence: Synthetic oligonucleotide
  Antisense strand to SEQ ID NO: 1384378
uuucuccucaagaucuucc

SEQ ID NO: 1384380 - RNA, 19 nt, Artificial Sequence
  Description of Artificial Sequence: Synthetic oligonucleotide
  Sense strand starting at position 336 of SEQ ID NO: 1242954
gccuuccuuugcucagcaa

SEQ ID NO: 1384381 - RNA, 19 nt, Artificial Sequence
  Description of Artificial Sequence: Synthetic oligonucleotide
  Antisense strand to SEQ ID NO: 1384380
uugcugagcaaaggaaggc

SEQ ID NO: 1384382 - RNA, 19 nt, Artificial Sequence
  Description of Artificial Sequence: Synthetic oligonucleotide
  Sense strand starting at position 437 of SEQ ID NO: 1242954
guguccucuguugagggaa

SEQ ID NO: 1384383 - RNA, 19 nt, Artificial Sequence
  Description of Artificial Sequence: Synthetic oligonucleotide
  Antisense strand to SEQ ID NO: 1384382
uucccucaacagaggacac

SEQ ID NO: 1384384 - RNA, 19 nt, Artificial Sequence
  Description of Artificial Sequence: Synthetic oligonucleotide
  Sense strand starting at position 491 of SEQ ID NO: 1242954
ggaggaaccuugucccuuu

SEQ ID NO: 1384385 - RNA, 19 nt, Artificial Sequence
  Description of Artificial Sequence: Synthetic oligonucleotide
  Antisense strand to SEQ ID NO: 1384384
aaagggacaagguuccucc

SEQ ID NO: 1384386 - RNA, 19 nt, Artificial Sequence
  Description of Artificial Sequence: Synthetic oligonucleotide
  Sense strand starting at position 663 of SEQ ID NO: 1242954
ggaugaggcugccaggaua

SEQ ID NO: 1384387 - RNA, 19 nt, Artificial Sequence
  Description of Artificial Sequence: Synthetic oligonucleotide
  Antisense strand to SEQ ID NO: 1384386
uauccuggcagccucaucc

SEQ ID NO: 1384388 - RNA, 19 nt, Artificial Sequence
  Description of Artificial Sequence: Synthetic oligonucleotide
  Sense strand starting at position 674 of SEQ ID NO: 1242954
ccaggauagcgccagagaa

SEQ ID NO: 1384389 - RNA, 19 nt, Artificial Sequence
  Description of Artificial Sequence: Synthetic oligonucleotide
  Antisense strand to SEQ ID NO: 1384388
uucucuggcgcuauccugg

SEQ ID NO: 1384390 - RNA, 19 nt, Artificial Sequence
  Description of Artificial Sequence: Synthetic oligonucleotide
  Sense strand starting at position 843 of SEQ ID NO: 1242954
agaggucagcuagagcuaa

SEQ ID NO: 1384391 - RNA, 19 nt, Artificial Sequence
  Description of Artificial Sequence: Synthetic oligonucleotide
  Antisense strand to SEQ ID NO: 1384390
uuagcucuagcugaccucu

SEQ ID NO: 1384392 - RNA, 19 nt, Artificial Sequence
  Description of Artificial Sequence: Synthetic oligonucleotide
  Sense strand starting at position 905 of SEQ ID NO: 1242954
gccugugauucugcagaag

SEQ ID NO: 1384393 - RNA, 19 nt, Artificial Sequence
  Description of Artificial Sequence: Synthetic oligonucleotide
  Antisense strand to SEQ ID NO: 1384392
cuucugcagaaucacaggc

SEQ ID NO: 1384394 - RNA, 19 nt, Artificial Sequence
  Description of Artificial Sequence: Synthetic oligonucleotide
  Sense strand starting at position 1032 of SEQ ID NO: 1242954
uggccauguucuccucaga

SEQ ID NO: 1384395 - RNA, 19 nt, Artificial Sequence
  Description of Artificial Sequence: Synthetic oligonucleotide
  Antisense strand to SEQ ID NO: 1384394
ucugaggagaacauggcca

SEQ ID NO: 1384396 - RNA, 19 nt, Artificial Sequence
  Description of Artificial Sequence: Synthetic oligonucleotide
  Sense strand starting at position 1035 of SEQ ID NO: 1242954
ccauguucuccucagacag

SEQ ID NO: 1384397 - RNA, 19 nt, Artificial Sequence
  Description of Artificial Sequence: Synthetic oligonucleotide
  Antisense strand to SEQ ID NO: 1384396
cugucugaggagaacaugg

SEQ ID NO: 1384398 - RNA, 19 nt, Artificial Sequence
  Description of Artificial Sequence: Synthetic oligonucleotide
  Sense strand starting at position 1037 of SEQ ID NO: 1242954
auguucuccucagacagaa

SEQ ID NO: 1384399 - RNA, 19 nt, Artificial Sequence
  Description of Artificial Sequence: Synthetic oligonucleotide
  Antisense strand to SEQ ID NO: 1384398
uucugucugaggagaacau

SEQ ID NO: 1384400 - RNA, 19 nt, Artificial Sequence
  Description of Artificial Sequence: Synthetic oligonucleotide
  Sense strand starting at position 1147 of SEQ ID NO: 1242954
cagagaucuuguugggagu

SEQ ID NO: 1384401 - RNA, 19 nt, Artificial Sequence
  Description of Artificial Sequence: Synthetic oligonucleotide
  Antisense strand to SEQ ID NO: 1384400
acucccaacaagaucucug

SEQ ID NO: 1384402 - RNA, 19 nt, Artificial Sequence
  Description of Artificial Sequence: Synthetic oligonucleotide
  Sense strand starting at position 1293 of SEQ ID NO: 1242954
caaggaucugcccgccuaa

SEQ ID NO: 1384403 - RNA, 19 nt, Artificial Sequence
  Description of Artificial Sequence: Synthetic oligonucleotide
  Antisense strand to SEQ ID NO: 1384402
uuaggcgggcagauccuug

SEQ ID NO: 1384404 - RNA, 19 nt, Artificial Sequence
  Description of Artificial Sequence: Synthetic oligonucleotide
  Sense strand starting at position 2111 of SEQ ID NO: 1242954
ggguuuguaguucacgcau

SEQ ID NO: 1384405 - RNA, 19 nt, Artificial Sequence
  Description of Artificial Sequence: Synthetic oligonucleotide
  Antisense strand to SEQ ID NO: 1384404
augcgugaacuacaaaccc

SEQ ID NO: 1384406 - RNA, 19 nt, Artificial Sequence
  Description of Artificial Sequence: Synthetic oligonucleotide
  Sense strand starting at position 2214 of SEQ ID NO: 1242954
gcgggauaguaacccagaa

SEQ ID NO: 1384407 - RNA, 19 nt, Artificial Sequence
  Description of Artificial Sequence: Synthetic oligonucleotide
  Antisense strand to SEQ ID NO: 1384406
uucuggguuacuaucccgc

SEQ ID NO: 1384408 - RNA, 19 nt, Artificial Sequence
  Description of Artificial Sequence: Synthetic oligonucleotide
  Sense strand starting at position 2255 of SEQ ID NO: 1242954
gucagagaguaggaauuau

SEQ ID NO: 1384409 - RNA, 19 nt, Artificial Sequence
  Description of Artificial Sequence: Synthetic oligonucleotide
  Antisense strand to SEQ ID NO: 1384408
auaauuccuacucucugac

SEQ ID NO: 1384410 - RNA, 19 nt, Artificial Sequence
  Description of Artificial Sequence: Synthetic oligonucleotide
  Sense strand starting at position 3063 of SEQ ID NO: 1242954
cggcuuaagcacugaguga

SEQ ID NO: 1384411 - RNA, 19 nt, Artificial Sequence
  Description of Artificial Sequence: Synthetic oligonucleotide
  Antisense strand to SEQ ID NO: 1384410
ucacucagugcuuaagccg

SEQ ID NO: 1384412 - RNA, 19 nt, Artificial Sequence
  Description of Artificial Sequence: Synthetic oligonucleotide
  Sense strand starting at position 3089 of SEQ ID NO: 1242954
auguaaagcucuugucuau

SEQ ID NO: 1384413 - RNA, 19 nt, Artificial Sequence
  Description of Artificial Sequence: Synthetic oligonucleotide
  Antisense strand to SEQ ID NO: 1384412
auagacaagagcuuuacau

SEQ ID NO: 1384414 - RNA, 19 nt, Artificial Sequence
  Description of Artificial Sequence: Synthetic oligonucleotide
  Sense strand starting at position 3095 of SEQ ID NO: 1242954
agcucuugucuauacacua

SEQ ID NO: 1384415 - RNA, 19 nt, Artificial Sequence
  Description of Artificial Sequence: Synthetic oligonucleotide
  Antisense strand to SEQ ID NO: 1384414
uaguguauagacaagagcu

SEQ ID NO: 1384416 - RNA, 19 nt, Artificial Sequence
  Description of Artificial Sequence: Synthetic oligonucleotide
  Sense strand starting at position 3115 of SEQ ID NO: 1242954
cucaucuaauugugaugga

SEQ ID NO: 1384417 - RNA, 19 nt, Artificial Sequence
  Description of Artificial Sequence: Synthetic oligonucleotide
  Antisense strand to SEQ ID NO: 1384416
uccaucacaauuagaugag

SEQ ID NO: 1384418 - RNA, 19 nt, Artificial Sequence
  Description of Artificial Sequence: Synthetic oligonucleotide
  Sense strand starting at position 3118 of SEQ ID NO: 1242954
aucuaauugugauggaauc

SEQ ID NO: 1384419 - RNA, 19 nt, Artificial Sequence
  Description of Artificial Sequence: Synthetic oligonucleotide
  Antisense strand to SEQ ID NO: 1384418
gauuccaucacaauuagau

SEQ ID NO: 1384420 - RNA, 19 nt, Artificial Sequence
  Description of Artificial Sequence: Synthetic oligonucleotide
  Sense strand starting at position 3119 of SEQ ID NO: 1242954
ucuaauugugauggaaucu

SEQ ID NO: 1384421 - RNA, 19 nt, Artificial Sequence
  Description of Artificial Sequence: Synthetic oligonucleotide
  Antisense strand to SEQ ID NO: 1384420
agauuccaucacaauuaga

SEQ ID NO: 1384422 - RNA, 19 nt, Artificial Sequence
  Description of Artificial Sequence: Synthetic oligonucleotide
  Sense strand starting at position 3128 of SEQ ID NO: 1242954
gauggaaucuucugugagc

SEQ ID NO: 1384423 - RNA, 19 nt, Artificial Sequence
  Description of Artificial Sequence: Synthetic oligonucleotide
  Antisense strand to SEQ ID NO: 1384422
gcucacagaagauuccauc

SEQ ID NO: 1384424 - RNA, 19 nt, Artificial Sequence
  Description of Artificial Sequence: Synthetic oligonucleotide
  Sense strand starting at position 3129 of SEQ ID NO: 1242954
auggaaucuucugugagcu

SEQ ID NO: 1384425 - RNA, 19 nt, Artificial Sequence
  Description of Artificial Sequence: Synthetic oligonucleotide
  Antisense strand to SEQ ID NO: 1384424
agcucacagaagauuccau

SEQ ID NO: 1384426 - RNA, 19 nt, Artificial Sequence
  Description of Artificial Sequence: Synthetic oligonucleotide
  Sense strand starting at position 3130 of SEQ ID NO: 1242954
uggaaucuucugugagcuc

SEQ ID NO: 1384427 - RNA, 19 nt, Artificial Sequence
  Description of Artificial Sequence: Synthetic oligonucleotide
  Antisense strand to SEQ ID NO: 1384426
gagcucacagaagauucca

SEQ ID NO: 1384428 - RNA, 19 nt, Artificial Sequence
  Description of Artificial Sequence: Synthetic oligonucleotide
  Sense strand starting at position 3137 of SEQ ID NO: 1242954
uucugugagcuccauuugu

SEQ ID NO: 1384429 - RNA, 19 nt, Artificial Sequence
  Description of Artificial Sequence: Synthetic oligonucleotide
  Antisense strand to SEQ ID NO: 1384428
acaaauggagcucacagaa

SEQ ID NO: 1384430 - RNA, 19 nt, Artificial Sequence
  Description of Artificial Sequence: Synthetic oligonucleotide
  Sense strand starting at position 3141 of SEQ ID NO: 1242954
gugagcuccauuugucagu

SEQ ID NO: 1384431 - RNA, 19 nt, Artificial Sequence
  Description of Artificial Sequence: Synthetic oligonucleotide
  Antisense strand to SEQ ID NO: 1384430
acugacaaauggagcucac

SEQ ID NO: 1384432 - RNA, 19 nt, Artificial Sequence
  Description of Artificial Sequence: Synthetic oligonucleotide
  Sense strand starting at position 3234 of SEQ ID NO: 1242954
cagugucuucuuggagcca

SEQ ID NO: 1384433 - RNA, 19 nt, Artificial Sequence
  Description of Artificial Sequence: Synthetic oligonucleotide
  Antisense strand to SEQ ID NO: 1384432
uggcuccaagaagacacug

SEQ ID NO: 1384434 - RNA, 19 nt, Artificial Sequence
  Description of Artificial Sequence: Synthetic oligonucleotide
  Sense strand starting at position 3404 of SEQ ID NO: 1242954
uccagucuuucccugcaga

SEQ ID NO: 1384435 - RNA, 19 nt, Artificial Sequence
  Description of Artificial Sequence: Synthetic oligonucleotide
  Antisense strand to SEQ ID NO: 1384434
ucugcagggaaagacugga

SEQ ID NO: 1384436 - RNA, 19 nt, Artificial Sequence
  Description of Artificial Sequence: Synthetic oligonucleotide
  Sense strand starting at position 3686 of SEQ ID NO: 1242954
gguggugacuuuccaaggu

SEQ ID NO: 1384437 - RNA, 19 nt, Artificial Sequence
  Description of Artificial Sequence: Synthetic oligonucleotide
  Antisense strand to SEQ ID NO: 1384436
accuuggaaagucaccacc

SEQ ID NO: 1384438 - RNA, 19 nt, Artificial Sequence
  Description of Artificial Sequence: Synthetic oligonucleotide
  Sense strand starting at position 3704 of SEQ ID NO: 1242954
uggguauaccuguggaguc

SEQ ID NO: 1384439 - RNA, 19 nt, Artificial Sequence
  Description of Artificial Sequence: Synthetic oligonucleotide
  Antisense strand to SEQ ID NO: 1384438
gacuccacagguauaccca

SEQ ID NO: 1384440 - RNA, 19 nt, Artificial Sequence
  Description of Artificial Sequence: Synthetic oligonucleotide
  Sense strand starting at position 3705 of SEQ ID NO: 1242954
ggguauaccuguggagucu

SEQ ID NO: 1384441 - RNA, 19 nt, Artificial Sequence
  Description of Artificial Sequence: Synthetic oligonucleotide
  Antisense strand to SEQ ID NO: 1384440
agacuccacagguauaccc

SEQ ID NO: 1384442 - RNA, 19 nt, Artificial Sequence
  Description of Artificial Sequence: Synthetic oligonucleotide
  Sense strand starting at position 3729 of SEQ ID NO: 1242954
caggacuuugggugggauu

SEQ ID NO: 1384443 - RNA, 19 nt, Artificial Sequence
  Description of Artificial Sequence: Synthetic oligonucleotide
  Antisense strand to SEQ ID NO: 1384442
aaucccacccaaaguccug

SEQ ID NO: 1384444 - RNA, 19 nt, Artificial Sequence
  Description of Artificial Sequence: Synthetic oligonucleotide
  Sense strand starting at position 3742 of SEQ ID NO: 1242954
gggauuggcucacucaguu

SEQ ID NO: 1384445 - RNA, 19 nt, Artificial Sequence
  Description of Artificial Sequence: Synthetic oligonucleotide
  Antisense strand to SEQ ID NO: 1384444
aacugagugagccaauccc

SEQ ID NO: 1384446 - RNA, 19 nt, Artificial Sequence
  Description of Artificial Sequence: Synthetic oligonucleotide
  Sense strand starting at position 3884 of SEQ ID NO: 1242954
aggagucgagcuugggaaa

SEQ ID NO: 1384447 - RNA, 19 nt, Artificial Sequence
  Description of Artificial Sequence: Synthetic oligonucleotide
  Antisense strand to SEQ ID NO: 1384446
uuucccaagcucgacuccu

SEQ ID NO: 1384448 - RNA, 19 nt, Artificial Sequence
  Description of Artificial Sequence: Synthetic oligonucleotide
  Sense strand starting at position 15 of SEQ ID NO: 1242955
uuuagcacccuuugucauu

SEQ ID NO: 1384449 - RNA, 19 nt, Artificial Sequence
  Description of Artificial Sequence: Synthetic oligonucleotide
  Antisense strand to SEQ ID NO: 1384448
aaugacaaagggugcuaaa

SEQ ID NO: 1384450 - RNA, 19 nt, Artificial Sequence
  Description of Artificial Sequence: Synthetic oligonucleotide
  Sense strand starting at position 16 of SEQ ID NO: 1242955
uuagcacccuuugucauua

SEQ ID NO: 1384451 - RNA, 19 nt, Artificial Sequence
  Description of Artificial Sequence: Synthetic oligonucleotide
  Antisense strand to SEQ ID NO: 1384450
uaaugacaaagggugcuaa

SEQ ID NO: 1384452 - RNA, 19 nt, Artificial Sequence
  Description of Artificial Sequence: Synthetic oligonucleotide
  Sense strand starting at position 56 of SEQ ID NO: 1242955
uuauguaacuguuugguua

SEQ ID NO: 1384453 - RNA, 19 nt, Artificial Sequence
  Description of Artificial Sequence: Synthetic oligonucleotide
  Antisense strand to SEQ ID NO: 1384452
uaaccaaacaguuacauaa

SEQ ID NO: 1384454 - RNA, 19 nt, Artificial Sequence
  Description of Artificial Sequence: Synthetic oligonucleotide
  Sense strand starting at position 57 of SEQ ID NO: 1242955
uauguaacuguuugguuaa

SEQ ID NO: 1384455 - RNA, 19 nt, Artificial Sequence
  Description of Artificial Sequence: Synthetic oligonucleotide
  Antisense strand to SEQ ID NO: 1384454
uuaaccaaacaguuacaua

SEQ ID NO: 1384456 - RNA, 19 nt, Artificial Sequence
  Description of Artificial Sequence: Synthetic oligonucleotide
  Sense strand starting at position 115 of SEQ ID NO: 1242955
gagacauugccuugcucau

SEQ ID NO: 1384457 - RNA, 19 nt, Artificial Sequence
  Description of Artificial Sequence: Synthetic oligonucleotide
  Antisense strand to SEQ ID NO: 1384456
augagcaaggcaaugucuc

SEQ ID NO: 1384458 - RNA, 19 nt, Artificial Sequence
  Description of Artificial Sequence: Synthetic oligonucleotide
  Sense strand starting at position 191 of SEQ ID NO: 1242955
uuugcuauaucagugaaug

SEQ ID NO: 1384459 - RNA, 19 nt, Artificial Sequence
  Description of Artificial Sequence: Synthetic oligonucleotide
  Antisense strand to SEQ ID NO: 1384458
cauucacugauauagcaaa

SEQ ID NO: 1384460 - RNA, 19 nt, Artificial Sequence
  Description of Artificial Sequence: Synthetic oligonucleotide
  Sense strand starting at position 192 of SEQ ID NO: 1242955
uugcuauaucagugaauga

SEQ ID NO: 1384461 - RNA, 19 nt, Artificial Sequence
  Description of Artificial Sequence: Synthetic oligonucleotide
  Antisense strand to SEQ ID NO: 1384460
ucauucacugauauagcaa

SEQ ID NO: 1384462 - RNA, 19 nt, Artificial Sequence
  Description of Artificial Sequence: Synthetic oligonucleotide
  Sense strand starting at position 336 of SEQ ID NO: 1242955
ucacuucccugcuuagagu

SEQ ID NO: 1384463 - RNA, 19 nt, Artificial Sequence
  Description of Artificial Sequence: Synthetic oligonucleotide
  Antisense strand to SEQ ID NO: 1384462
acucuaagcagggaaguga

SEQ ID NO: 1384464 - RNA, 19 nt, Artificial Sequence
  Description of Artificial Sequence: Synthetic oligonucleotide
  Sense strand starting at position 351 of SEQ ID NO: 1242955
gaguuaaguccucagcccu

SEQ ID NO: 1384465 - RNA, 19 nt, Artificial Sequence
  Description of Artificial Sequence: Synthetic oligonucleotide
  Antisense strand to SEQ ID NO: 1384464
agggcugaggacuuaacuc

SEQ ID NO: 1384466 - RNA, 19 nt, Artificial Sequence
  Description of Artificial Sequence: Synthetic oligonucleotide
  Sense strand starting at position 458 of SEQ ID NO: 1242955
gcuguuuaaccacgucaag

SEQ ID NO: 1384467 - RNA, 19 nt, Artificial Sequence
  Description of Artificial Sequence: Synthetic oligonucleotide
  Antisense strand to SEQ ID NO: 1384466
cuugacgugguuaaacagc

SEQ ID NO: 1384468 - RNA, 19 nt, Artificial Sequence
  Description of Artificial Sequence: Synthetic oligonucleotide
  Sense strand starting at position 757 of SEQ ID NO: 1242955
cccgacuaauuguuuauaa

SEQ ID NO: 1384469 - RNA, 19 nt, Artificial Sequence
  Description of Artificial Sequence: Synthetic oligonucleotide
  Antisense strand to SEQ ID NO: 1384468
uuauaaacaauuagucggg

SEQ ID NO: 1384470 - RNA, 19 nt, Artificial Sequence
  Description of Artificial Sequence: Synthetic oligonucleotide
  Sense strand starting at position 758 of SEQ ID NO: 1242955
ccgacuaauuguuuauaau

SEQ ID NO: 1384471 - RNA, 19 nt, Artificial Sequence
  Description of Artificial Sequence: Synthetic oligonucleotide
  Antisense strand to SEQ ID NO: 1384470
auuauaaacaauuagucgg

SEQ ID NO: 1384472 - RNA, 19 nt, Artificial Sequence
  Description of Artificial Sequence: Synthetic oligonucleotide
  Sense strand starting at position 1040 of SEQ ID NO: 1242955
cagggaucuuggcugucaa

SEQ ID NO: 1384473 - RNA, 19 nt, Artificial Sequence
  Description of Artificial Sequence: Synthetic oligonucleotide
  Antisense strand to SEQ ID NO: 1384472
uugacagccaagaucccug

SEQ ID NO: 1384474 - RNA, 19 nt, Artificial Sequence
  Description of Artificial Sequence: Synthetic oligonucleotide
  Sense strand starting at position 1041 of SEQ ID NO: 1242955
agggaucuuggcugucaac

SEQ ID NO: 1384475 - RNA, 19 nt, Artificial Sequence
  Description of Artificial Sequence: Synthetic oligonucleotide
  Antisense strand to SEQ ID NO: 1384474
guugacagccaagaucccu

SEQ ID NO: 1384476 - RNA, 19 nt, Artificial Sequence
  Description of Artificial Sequence: Synthetic oligonucleotide
  Sense strand starting at position 2475 of SEQ ID NO: 1242955
ccuaacuugcaagguuauu

SEQ ID NO: 1384477 - RNA, 19 nt, Artificial Sequence
  Description of Artificial Sequence: Synthetic oligonucleotide
  Antisense strand to SEQ ID NO: 1384476
aauaaccuugcaaguuagg

SEQ ID NO: 1384478 - RNA, 19 nt, Artificial Sequence
  Description of Artificial Sequence: Synthetic oligonucleotide
  Sense strand starting at position 2486 of SEQ ID NO: 1242955
agguuauuguaaguucugu

SEQ ID NO: 1384479 - RNA, 19 nt, Artificial Sequence
  Description of Artificial Sequence: Synthetic oligonucleotide
  Antisense strand to SEQ ID NO: 1384478
acagaacuuacaauaaccu

SEQ ID NO: 1384480 - RNA, 19 nt, Artificial Sequence
  Description of Artificial Sequence: Synthetic oligonucleotide
  Sense strand starting at position 2491 of SEQ ID NO: 1242955
auuguaaguucuguaaagu

SEQ ID NO: 1384481 - RNA, 19 nt, Artificial Sequence
  Description of Artificial Sequence: Synthetic oligonucleotide
  Antisense strand to SEQ ID NO: 1384480
acuuuacagaacuuacaau

SEQ ID NO: 1384482 - RNA, 19 nt, Artificial Sequence
  Description of Artificial Sequence: Synthetic oligonucleotide
  Sense strand starting at position 2492 of SEQ ID NO: 1242955
uuguaaguucuguaaaguu

SEQ ID NO: 1384483 - RNA, 19 nt, Artificial Sequence
  Description of Artificial Sequence: Synthetic oligonucleotide
  Antisense strand to SEQ ID NO: 1384482
aacuuuacagaacuuacaa

SEQ ID NO: 1384484 - RNA, 19 nt, Artificial Sequence
  Description of Artificial Sequence: Synthetic oligonucleotide
  Sense strand starting at position 2510 of SEQ ID NO: 1242955
ucauaaaguucuguaaagu

SEQ ID NO: 1384485 - RNA, 19 nt, Artificial Sequence
  Description of Artificial Sequence: Synthetic oligonucleotide
  Antisense strand to SEQ ID NO: 1384484
acuuuacagaacuuuauga

SEQ ID NO: 1384486 - RNA, 19 nt, Artificial Sequence
  Description of Artificial Sequence: Synthetic oligonucleotide
  Sense strand starting at position 2511 of SEQ ID NO: 1242955
cauaaaguucuguaaagug

SEQ ID NO: 1384487 - RNA, 19 nt, Artificial Sequence
  Description of Artificial Sequence: Synthetic oligonucleotide
  Antisense strand to SEQ ID NO: 1384486
cacuuuacagaacuuuaug

SEQ ID NO: 1384488 - RNA, 19 nt, Artificial Sequence
  Description of Artificial Sequence: Synthetic oligonucleotide
  Sense strand starting at position 2623 of SEQ ID NO: 1242955
gacagagacuaguuaaugu

SEQ ID NO: 1384489 - RNA, 19 nt, Artificial Sequence
  Description of Artificial Sequence: Synthetic oligonucleotide
  Antisense strand to SEQ ID NO: 1384488
acauuaacuagucucuguc

SEQ ID NO: 1384490 - RNA, 19 nt, Artificial Sequence
  Description of Artificial Sequence: Synthetic oligonucleotide
  Sense strand starting at position 2646 of SEQ ID NO: 1242955
gaacgaaugugugucuaua

SEQ ID NO: 1384491 - RNA, 19 nt, Artificial Sequence
  Description of Artificial Sequence: Synthetic oligonucleotide
  Antisense strand to SEQ ID NO: 1384490
uauagacacacauucguuc

SEQ ID NO: 1384492 - RNA, 19 nt, Artificial Sequence
  Description of Artificial Sequence: Synthetic oligonucleotide
  Sense strand starting at position 2648 of SEQ ID NO: 1242955
acgaaugugugucuauauu

SEQ ID NO: 1384493 - RNA, 19 nt, Artificial Sequence
  Description of Artificial Sequence: Synthetic oligonucleotide
  Antisense strand to SEQ ID NO: 1384492
aauauagacacacauucgu

SEQ ID NO: 1384494 - RNA, 19 nt, Artificial Sequence
  Description of Artificial Sequence: Synthetic oligonucleotide
  Sense strand starting at position 2756 of SEQ ID NO: 1242955
aguuguuacgaagacuaaa

SEQ ID NO: 1384495 - RNA, 19 nt, Artificial Sequence
  Description of Artificial Sequence: Synthetic oligonucleotide
  Antisense strand to SEQ ID NO: 1384494
uuuagucuucguaacaacu

SEQ ID NO: 1384496 - RNA, 19 nt, Artificial Sequence
  Description of Artificial Sequence: Synthetic oligonucleotide
  Sense strand starting at position 2776 of SEQ ID NO: 1242955
guguucauauguuuaaggu

SEQ ID NO: 1384497 - RNA, 19 nt, Artificial Sequence
  Description of Artificial Sequence: Synthetic oligonucleotide
  Antisense strand to SEQ ID NO: 1384496
accuuaaacauaugaacac

SEQ ID NO: 1384498 - RNA, 19 nt, Artificial Sequence
  Description of Artificial Sequence: Synthetic oligonucleotide
  Sense strand starting at position 2811 of SEQ ID NO: 1242955
ggcagauacuaagcacuau

SEQ ID NO: 1384499 - RNA, 19 nt, Artificial Sequence
  Description of Artificial Sequence: Synthetic oligonucleotide
  Antisense strand to SEQ ID NO: 1384498
auagugcuuaguaucugcc

SEQ ID NO: 1384500 - RNA, 19 nt, Artificial Sequence
  Description of Artificial Sequence: Synthetic oligonucleotide
  Sense strand starting at position 2826 of SEQ ID NO: 1242955
cuauguaaauguuuggaaa

SEQ ID NO: 1384501 - RNA, 19 nt, Artificial Sequence
  Description of Artificial Sequence: Synthetic oligonucleotide
  Antisense strand to SEQ ID NO: 1384500
uuuccaaacauuuacauag

SEQ ID NO: 1384502 - RNA, 19 nt, Artificial Sequence
  Description of Artificial Sequence: Synthetic oligonucleotide
  Sense strand starting at position 2827 of SEQ ID NO: 1242955
uauguaaauguuuggaaac

SEQ ID NO: 1384503 - RNA, 19 nt, Artificial Sequence
  Description of Artificial Sequence: Synthetic oligonucleotide
  Antisense strand to SEQ ID NO: 1384502
guuuccaaacauuuacaua

SEQ ID NO: 1384504 - RNA, 19 nt, Artificial Sequence
  Description of Artificial Sequence: Synthetic oligonucleotide
  Sense strand starting at position 2895 of SEQ ID NO: 1242955
agugcugggcauuggaaua

SEQ ID NO: 1384505 - RNA, 19 nt, Artificial Sequence
  Description of Artificial Sequence: Synthetic oligonucleotide
  Antisense strand to SEQ ID NO: 1384504
uauuccaaugcccagcacu

SEQ ID NO: 1384506 - RNA, 19 nt, Artificial Sequence
  Description of Artificial Sequence: Synthetic oligonucleotide
  Sense strand starting at position 2948 of SEQ ID NO: 1242955
ucucccuguccuuauggaa

SEQ ID NO: 1384507 - RNA, 19 nt, Artificial Sequence
  Description of Artificial Sequence: Synthetic oligonucleotide
  Antisense strand to SEQ ID NO: 1384506
uuccauaaggacagggaga

SEQ ID NO: 1384508 - RNA, 19 nt, Artificial Sequence
  Description of Artificial Sequence: Synthetic oligonucleotide
  Sense strand starting at position 3015 of SEQ ID NO: 1242955
uuugguuauaauuguggua

SEQ ID NO: 1384509 - RNA, 19 nt, Artificial Sequence
  Description of Artificial Sequence: Synthetic oligonucleotide
  Antisense strand to SEQ ID NO: 1384508
uaccacaauuauaaccaaa

SEQ ID NO: 1384510 - RNA, 19 nt, Artificial Sequence
  Description of Artificial Sequence: Synthetic oligonucleotide
  Sense strand starting at position 3059 of SEQ ID NO: 1242955
ggagaaucuuagguggucu

SEQ ID NO: 1384511 - RNA, 19 nt, Artificial Sequence
  Description of Artificial Sequence: Synthetic oligonucleotide
  Antisense strand to SEQ ID NO: 1384510
agaccaccuaagauucucc

SEQ ID NO: 1384512 - RNA, 19 nt, Artificial Sequence
  Description of Artificial Sequence: Synthetic oligonucleotide
  Sense strand starting at position 3060 of SEQ ID NO: 1242955
gagaaucuuagguggucuu

SEQ ID NO: 1384513 - RNA, 19 nt, Artificial Sequence
  Description of Artificial Sequence: Synthetic oligonucleotide
  Antisense strand to SEQ ID NO: 1384512
aagaccaccuaagauucuc

SEQ ID NO: 1384514 - RNA, 19 nt, Artificial Sequence
  Description of Artificial Sequence: Synthetic oligonucleotide
  Sense strand starting at position 3063 of SEQ ID NO: 1242955
aaucuuagguggucuuuau

SEQ ID NO: 1384515 - RNA, 19 nt, Artificial Sequence
  Description of Artificial Sequence: Synthetic oligonucleotide
  Antisense strand to SEQ ID NO: 1384514
auaaagaccaccuaagauu

SEQ ID NO: 1384516 - RNA, 19 nt, Artificial Sequence
  Description of Artificial Sequence: Synthetic oligonucleotide
  Sense strand starting at position 3067 of SEQ ID NO: 1242955
uuagguggucuuuauaauu

SEQ ID NO: 1384517 - RNA, 19 nt, Artificial Sequence
  Description of Artificial Sequence: Synthetic oligonucleotide
  Antisense strand to SEQ ID NO: 1384516
aauuauaaagaccaccuaa

SEQ ID NO: 1384518 - RNA, 19 nt, Artificial Sequence
  Description of Artificial Sequence: Synthetic oligonucleotide
  Sense strand starting at position 3072 of SEQ ID NO: 1242955
uggucuuuauaauuagaca

SEQ ID NO: 1384519 - RNA, 19 nt, Artificial Sequence
  Description of Artificial Sequence: Synthetic oligonucleotide
  Antisense strand to SEQ ID NO: 1384518
ugucuaauuauaaagacca

SEQ ID NO: 1384520 - RNA, 19 nt, Artificial Sequence
  Description of Artificial Sequence: Synthetic oligonucleotide
  Sense strand starting at position 3095 of SEQ ID NO: 1242955
acgagugaguacucaauau

SEQ ID NO: 1384521 - RNA, 19 nt, Artificial Sequence
  Description of Artificial Sequence: Synthetic oligonucleotide
  Antisense strand to SEQ ID NO: 1384520
auauugaguacucacucgu

SEQ ID NO: 1384522 - RNA, 19 nt, Artificial Sequence
  Description of Artificial Sequence: Synthetic oligonucleotide
  Sense strand starting at position 3443 of SEQ ID NO: 1242955
ggcucaggucaacauucua

SEQ ID NO: 1384523 - RNA, 19 nt, Artificial Sequence
  Description of Artificial Sequence: Synthetic oligonucleotide
  Antisense strand to SEQ ID NO: 1384522
uagaauguugaccugagcc

SEQ ID NO: 1384524 - RNA, 19 nt, Artificial Sequence
  Description of Artificial Sequence: Synthetic oligonucleotide
  Sense strand starting at position 3494 of SEQ ID NO: 1242955
cugucaaagaguugacugu

SEQ ID NO: 1384525 - RNA, 19 nt, Artificial Sequence
  Description of Artificial Sequence: Synthetic oligonucleotide
  Antisense strand to SEQ ID NO: 1384524
acagucaacucuuugacag

SEQ ID NO: 1384526 - RNA, 19 nt, Artificial Sequence
  Description of Artificial Sequence: Synthetic oligonucleotide
  Sense strand starting at position 3560 of SEQ ID NO: 1242955
aguguagcucauguugcau

SEQ ID NO: 1384527 - RNA, 19 nt, Artificial Sequence
  Description of Artificial Sequence: Synthetic oligonucleotide
  Antisense strand to SEQ ID NO: 1384526
augcaacaugagcuacacu

SEQ ID NO: 1384528 - RNA, 19 nt, Artificial Sequence
  Description of Artificial Sequence: Synthetic oligonucleotide
  Sense strand starting at position 151 of SEQ ID NO: 1242956
gguaaaugcuaauacauac

SEQ ID NO: 1384529 - RNA, 19 nt, Artificial Sequence
  Description of Artificial Sequence: Synthetic oligonucleotide
  Antisense strand to SEQ ID NO: 1384528
guauguauuagcauuuacc

SEQ ID NO: 1384530 - RNA, 19 nt, Artificial Sequence
  Description of Artificial Sequence: Synthetic oligonucleotide
  Sense strand starting at position 158 of SEQ ID NO: 1242956
gcuaauacauacgugaauu

SEQ ID NO: 1384531 - RNA, 19 nt, Artificial Sequence
  Description of Artificial Sequence: Synthetic oligonucleotide
  Antisense strand to SEQ ID NO: 1384530
aauucacguauguauuagc

SEQ ID NO: 1384532 - RNA, 19 nt, Artificial Sequence
  Description of Artificial Sequence: Synthetic oligonucleotide
  Sense strand starting at position 198 of SEQ ID NO: 1242956
uauguaggguccugcauuu

SEQ ID NO: 1384533 - RNA, 19 nt, Artificial Sequence
  Description of Artificial Sequence: Synthetic oligonucleotide
  Antisense strand to SEQ ID NO: 1384532
aaaugcaggacccuacaua

SEQ ID NO: 1384534 - RNA, 19 nt, Artificial Sequence
  Description of Artificial Sequence: Synthetic oligonucleotide
  Sense strand starting at position 209 of SEQ ID NO: 1242956
cugcauuuauuacagaguu

SEQ ID NO: 1384535 - RNA, 19 nt, Artificial Sequence
  Description of Artificial Sequence: Synthetic oligonucleotide
  Antisense strand to SEQ ID NO: 1384534
aacucuguaauaaaugcag

SEQ ID NO: 1384536 - RNA, 19 nt, Artificial Sequence
  Description of Artificial Sequence: Synthetic oligonucleotide
  Sense strand starting at position 294 of SEQ ID NO: 1242956
ggccuaacuugauauugag

SEQ ID NO: 1384537 - RNA, 19 nt, Artificial Sequence
  Description of Artificial Sequence: Synthetic oligonucleotide
  Antisense strand to SEQ ID NO: 1384536
cucaauaucaaguuaggcc

SEQ ID NO: 1384538 - RNA, 19 nt, Artificial Sequence
  Description of Artificial Sequence: Synthetic oligonucleotide
  Sense strand starting at position 455 of SEQ ID NO: 1242956
uuguauaccugagagguau

SEQ ID NO: 1384539 - RNA, 19 nt, Artificial Sequence
  Description of Artificial Sequence: Synthetic oligonucleotide
  Antisense strand to SEQ ID NO: 1384538
auaccucucagguauacaa

SEQ ID NO: 1384540 - RNA, 19 nt, Artificial Sequence
  Description of Artificial Sequence: Synthetic oligonucleotide
  Sense strand starting at position 469 of SEQ ID NO: 1242956
gguauuuguuuacaauguu

SEQ ID NO: 1384541 - RNA, 19 nt, Artificial Sequence
  Description of Artificial Sequence: Synthetic oligonucleotide
  Antisense strand to SEQ ID NO: 1384540
aacauuguaaacaaauacc

SEQ ID NO: 1384542 - RNA, 19 nt, Artificial Sequence
  Description of Artificial Sequence: Synthetic oligonucleotide
  Sense strand starting at position 512 of SEQ ID NO: 1242956
agcggcauuccucaucaaa

SEQ ID NO: 1384543 - RNA, 19 nt, Artificial Sequence
  Description of Artificial Sequence: Synthetic oligonucleotide
  Antisense strand to SEQ ID NO: 1384542
uuugaugaggaaugccgcu

SEQ ID NO: 1384544 - RNA, 19 nt, Artificial Sequence
  Description of Artificial Sequence: Synthetic oligonucleotide
  Sense strand starting at position 610 of SEQ ID NO: 1242956
uuguguacccaauagucau

SEQ ID NO: 1384545 - RNA, 19 nt, Artificial Sequence
  Description of Artificial Sequence: Synthetic oligonucleotide
  Antisense strand to SEQ ID NO: 1384544
augacuauuggguacacaa

SEQ ID NO: 1384546 - RNA, 19 nt, Artificial Sequence
  Description of Artificial Sequence: Synthetic oligonucleotide
  Sense strand starting at position 623 of SEQ ID NO: 1242956
agucauucucauggcaaca

SEQ ID NO: 1384547 - RNA, 19 nt, Artificial Sequence
  Description of Artificial Sequence: Synthetic oligonucleotide
  Antisense strand to SEQ ID NO: 1384546
uguugccaugagaaugacu

SEQ ID NO: 1384548 - RNA, 19 nt, Artificial Sequence
  Description of Artificial Sequence: Synthetic oligonucleotide
  Sense strand starting at position 659 of SEQ ID NO: 1242956
ggaagcagcuauggugaaa

SEQ ID NO: 1384549 - RNA, 19 nt, Artificial Sequence
  Description of Artificial Sequence: Synthetic oligonucleotide
  Antisense strand to SEQ ID NO: 1384548
uuucaccauagcugcuucc

SEQ ID NO: 1384550 - RNA, 19 nt, Artificial Sequence
  Description of Artificial Sequence: Synthetic oligonucleotide
  Sense strand starting at position 691 of SEQ ID NO: 1242956
cagggugaauucuagagga

SEQ ID NO: 1384551 - RNA, 19 nt, Artificial Sequence
  Description of Artificial Sequence: Synthetic oligonucleotide
  Antisense strand to SEQ ID NO: 1384550
uccucuagaauucacccug

SEQ ID NO: 1384552 - RNA, 19 nt, Artificial Sequence
  Description of Artificial Sequence: Synthetic oligonucleotide
  Sense strand starting at position 869 of SEQ ID NO: 1242956
gcccucuccugugugauga

SEQ ID NO: 1384553 - RNA, 19 nt, Artificial Sequence
  Description of Artificial Sequence: Synthetic oligonucleotide
  Antisense strand to SEQ ID NO: 1384552
ucaucacacaggagagggc

SEQ ID NO: 1384554 - RNA, 19 nt, Artificial Sequence
  Description of Artificial Sequence: Synthetic oligonucleotide
  Sense strand starting at position 870 of SEQ ID NO: 1242956
cccucuccugugugaugaa

SEQ ID NO: 1384555 - RNA, 19 nt, Artificial Sequence
  Description of Artificial Sequence: Synthetic oligonucleotide
  Antisense strand to SEQ ID NO: 1384554
uucaucacacaggagaggg

SEQ ID NO: 1384556 - RNA, 19 nt, Artificial Sequence
  Description of Artificial Sequence: Synthetic oligonucleotide
  Sense strand starting at position 873 of SEQ ID NO: 1242956
ucuccugugugaugaagaa

SEQ ID NO: 1384557 - RNA, 19 nt, Artificial Sequence
  Description of Artificial Sequence: Synthetic oligonucleotide
  Antisense strand to SEQ ID NO: 1384556
uucuucaucacacaggaga

SEQ ID NO: 1384558 - RNA, 19 nt, Artificial Sequence
  Description of Artificial Sequence: Synthetic oligonucleotide
  Sense strand starting at position 896 of SEQ ID NO: 1242956
gcucgugggcagugaagaa

SEQ ID NO: 1384559 - RNA, 19 nt, Artificial Sequence
  Description of Artificial Sequence: Synthetic oligonucleotide
  Antisense strand to SEQ ID NO: 1384558
uucuucacugcccacgagc

SEQ ID NO: 1384560 - RNA, 19 nt, Artificial Sequence
  Description of Artificial Sequence: Synthetic oligonucleotide
  Sense strand starting at position 1011 of SEQ ID NO: 1242956
gggugauguugacagaugu

SEQ ID NO: 1384561 - RNA, 19 nt, Artificial Sequence
  Description of Artificial Sequence: Synthetic oligonucleotide
  Antisense strand to SEQ ID NO: 1384560
acaucugucaacaucaccc

SEQ ID NO: 1384562 - RNA, 19 nt, Artificial Sequence
  Description of Artificial Sequence: Synthetic oligonucleotide
  Sense strand starting at position 1015 of SEQ ID NO: 1242956
gauguugacagauguguca

SEQ ID NO: 1384563 - RNA, 19 nt, Artificial Sequence
  Description of Artificial Sequence: Synthetic oligonucleotide
  Antisense strand to SEQ ID NO: 1384562
ugacacaucugucaacauc

SEQ ID NO: 1384564 - RNA, 19 nt, Artificial Sequence
  Description of Artificial Sequence: Synthetic oligonucleotide
  Sense strand starting at position 1017 of SEQ ID NO: 1242956
uguugacagaugugucaac

SEQ ID NO: 1384565 - RNA, 19 nt, Artificial Sequence
  Description of Artificial Sequence: Synthetic oligonucleotide
  Antisense strand to SEQ ID NO: 1384564
guugacacaucugucaaca

SEQ ID NO: 1384566 - RNA, 19 nt, Artificial Sequence
  Description of Artificial Sequence: Synthetic oligonucleotide
  Sense strand starting at position 1124 of SEQ ID NO: 1242956
agucgcucuuggucagaaa

SEQ ID NO: 1384567 - RNA, 19 nt, Artificial Sequence
  Description of Artificial Sequence: Synthetic oligonucleotide
  Antisense strand to SEQ ID NO: 1384566
uuucugaccaagagcgacu

SEQ ID NO: 1384568 - RNA, 19 nt, Artificial Sequence
  Description of Artificial Sequence: Synthetic oligonucleotide
  Sense strand starting at position 2215 of SEQ ID NO: 1242956
ggagcuuggucugagaccu

SEQ ID NO: 1384569 - RNA, 19 nt, Artificial Sequence
  Description of Artificial Sequence: Synthetic oligonucleotide
  Antisense strand to SEQ ID NO: 1384568
aggucucagaccaagcucc

SEQ ID NO: 1384570 - RNA, 19 nt, Artificial Sequence
  Description of Artificial Sequence: Synthetic oligonucleotide
  Sense strand starting at position 2619 of SEQ ID NO: 1242956
acuugaacguuugggacau

SEQ ID NO: 1384571 - RNA, 19 nt, Artificial Sequence
  Description of Artificial Sequence: Synthetic oligonucleotide
  Antisense strand to SEQ ID NO: 1384570
augucccaaacguucaagu

SEQ ID NO: 1384572 - RNA, 19 nt, Artificial Sequence
  Description of Artificial Sequence: Synthetic oligonucleotide
  Sense strand starting at position 2644 of SEQ ID NO: 1242956
aaugaugauugacaaguca

SEQ ID NO: 1384573 - RNA, 19 nt, Artificial Sequence
  Description of Artificial Sequence: Synthetic oligonucleotide
  Antisense strand to SEQ ID NO: 1384572
ugacuugucaaucaucauu

SEQ ID NO: 1384574 - RNA, 19 nt, Artificial Sequence
  Description of Artificial Sequence: Synthetic oligonucleotide
  Sense strand starting at position 2699 of SEQ ID NO: 1242956
cgcgucacuuuauaagaua

SEQ ID NO: 1384575 - RNA, 19 nt, Artificial Sequence
  Description of Artificial Sequence: Synthetic oligonucleotide
  Antisense strand to SEQ ID NO: 1384574
uaucuuauaaagugacgcg

SEQ ID NO: 1384576 - RNA, 19 nt, Artificial Sequence
  Description of Artificial Sequence: Synthetic oligonucleotide
  Sense strand starting at position 2819 of SEQ ID NO: 1242956
ccuccuccucuguaggaaa

SEQ ID NO: 1384577 - RNA, 19 nt, Artificial Sequence
  Description of Artificial Sequence: Synthetic oligonucleotide
  Antisense strand to SEQ ID NO: 1384576
uuuccuacagaggaggagg

SEQ ID NO: 1384578 - RNA, 19 nt, Artificial Sequence
  Description of Artificial Sequence: Synthetic oligonucleotide
  Sense strand starting at position 2967 of SEQ ID NO: 1242956
ggaggagccuggucugguu

SEQ ID NO: 1384579 - RNA, 19 nt, Artificial Sequence
  Description of Artificial Sequence: Synthetic oligonucleotide
  Antisense strand to SEQ ID NO: 1384578
aaccagaccaggcuccucc

SEQ ID NO: 1384580 - RNA, 19 nt, Artificial Sequence
  Description of Artificial Sequence: Synthetic oligonucleotide
  Sense strand starting at position 2979 of SEQ ID NO: 1242956
ucugguugguggguauauu

SEQ ID NO: 1384581 - RNA, 19 nt, Artificial Sequence
  Description of Artificial Sequence: Synthetic oligonucleotide
  Antisense strand to SEQ ID NO: 1384580
aauauacccaccaaccaga

SEQ ID NO: 1384582 - RNA, 19 nt, Artificial Sequence
  Description of Artificial Sequence: Synthetic oligonucleotide
  Sense strand starting at position 3080 of SEQ ID NO: 1242956
cuaugagucccuggccuau

SEQ ID NO: 1384583 - RNA, 19 nt, Artificial Sequence
  Description of Artificial Sequence: Synthetic oligonucleotide
  Antisense strand to SEQ ID NO: 1384582
auaggccagggacucauag

SEQ ID NO: 1384584 - RNA, 19 nt, Artificial Sequence
  Description of Artificial Sequence: Synthetic oligonucleotide
  Sense strand starting at position 3082 of SEQ ID NO: 1242956
augagucccuggccuauua

SEQ ID NO: 1384585 - RNA, 19 nt, Artificial Sequence
  Description of Artificial Sequence: Synthetic oligonucleotide
  Antisense strand to SEQ ID NO: 1384584
uaauaggccagggacucau

SEQ ID NO: 1384586 - RNA, 19 nt, Artificial Sequence
  Description of Artificial Sequence: Synthetic oligonucleotide
  Sense strand starting at position 3161 of SEQ ID NO: 1242956
gcucccuaucgcugcauua

SEQ ID NO: 1384587 - RNA, 19 nt, Artificial Sequence
  Description of Artificial Sequence: Synthetic oligonucleotide
  Antisense strand to SEQ ID NO: 1384586
uaaugcagcgauagggagc

SEQ ID NO: 1384588 - RNA, 19 nt, Artificial Sequence
  Description of Artificial Sequence: Synthetic oligonucleotide
  Sense strand starting at position 3270 of SEQ ID NO: 1242956
ggcugugcuccuuacgaga

SEQ ID NO: 1384589 - RNA, 19 nt, Artificial Sequence
  Description of Artificial Sequence: Synthetic oligonucleotide
  Antisense strand to SEQ ID NO: 1384588
ucucguaaggagcacagcc

SEQ ID NO: 1384590 - RNA, 19 nt, Artificial Sequence
  Description of Artificial Sequence: Synthetic oligonucleotide
  Sense strand starting at position 3272 of SEQ ID NO: 1242956
cugugcuccuuacgagaau

SEQ ID NO: 1384591 - RNA, 19 nt, Artificial Sequence
  Description of Artificial Sequence: Synthetic oligonucleotide
  Antisense strand to SEQ ID NO: 1384590
auucucguaaggagcacag

SEQ ID NO: 1384592 - RNA, 19 nt, Artificial Sequence
  Description of Artificial Sequence: Synthetic oligonucleotide
  Sense strand starting at position 3283 of SEQ ID NO: 1242956
acgagaaucgaaugccuga

SEQ ID NO: 1384593 - RNA, 19 nt, Artificial Sequence
  Description of Artificial Sequence: Synthetic oligonucleotide
  Antisense strand to SEQ ID NO: 1384592
ucaggcauucgauucucgu

SEQ ID NO: 1384594 - RNA, 19 nt, Artificial Sequence
  Description of Artificial Sequence: Synthetic oligonucleotide
  Sense strand starting at position 3315 of SEQ ID NO: 1242956
agcugaguugcugaugcua

SEQ ID NO: 1384595 - RNA, 19 nt, Artificial Sequence
  Description of Artificial Sequence: Synthetic oligonucleotide
  Antisense strand to SEQ ID NO: 1384594
uagcaucagcaacucagcu

SEQ ID NO: 1384596 - RNA, 19 nt, Artificial Sequence
  Description of Artificial Sequence: Synthetic oligonucleotide
  Sense strand starting at position 3349 of SEQ ID NO: 1242956
gcaaauacggauuaacauu

SEQ ID NO: 1384597 - RNA, 19 nt, Artificial Sequence
  Description of Artificial Sequence: Synthetic oligonucleotide
  Antisense strand to SEQ ID NO: 1384596
aauguuaauccguauuugc

SEQ ID NO: 1384598 - RNA, 19 nt, Artificial Sequence
  Description of Artificial Sequence: Synthetic oligonucleotide
  Sense strand starting at position 3893 of SEQ ID NO: 1242956
cuccacguucuggguuaaa

SEQ ID NO: 1384599 - RNA, 19 nt, Artificial Sequence
  Description of Artificial Sequence: Synthetic oligonucleotide
  Antisense strand to SEQ ID NO: 1384598
uuuaacccagaacguggag

SEQ ID NO: 1384600 - RNA, 19 nt, Artificial Sequence
  Description of Artificial Sequence: Synthetic oligonucleotide
  Sense strand starting at position 3905 of SEQ ID NO: 1242956
gguuaaagucuaggcuuua

SEQ ID NO: 1384601 - RNA, 19 nt, Artificial Sequence
  Description of Artificial Sequence: Synthetic oligonucleotide
  Antisense strand to SEQ ID NO: 1384600
uaaagccuagacuuuaacc

SEQ ID NO: 1384602 - RNA, 19 nt, Artificial Sequence
  Description of Artificial Sequence: Synthetic oligonucleotide
  Sense strand starting at position 3906 of SEQ ID NO: 1242956
guuaaagucuaggcuuuaa

SEQ ID NO: 1384603 - RNA, 19 nt, Artificial Sequence
  Description of Artificial Sequence: Synthetic oligonucleotide
  Antisense strand to SEQ ID NO: 1384602
uuaaagccuagacuuuaac

SEQ ID NO: 1384604 - RNA, 19 nt, Artificial Sequence
  Description of Artificial Sequence: Synthetic oligonucleotide
  Sense strand starting at position 3916 of SEQ ID NO: 1242956
aggcuuuaauccugagaug

SEQ ID NO: 1384605 - RNA, 19 nt, Artificial Sequence
  Description of Artificial Sequence: Synthetic oligonucleotide
  Antisense strand to SEQ ID NO: 1384604
caucucaggauuaaagccu

SEQ ID NO: 1384606 - RNA, 19 nt, Artificial Sequence
  Description of Artificial Sequence: Synthetic oligonucleotide
  Sense strand starting at position 3917 of SEQ ID NO: 1242956
ggcuuuaauccugagaugg

SEQ ID NO: 1384607 - RNA, 19 nt, Artificial Sequence
  Description of Artificial Sequence: Synthetic oligonucleotide
  Antisense strand to SEQ ID NO: 1384606
ccaucucaggauuaaagcc

SEQ ID NO: 1384608 - RNA, 19 nt, Artificial Sequence
  Description of Artificial Sequence: Synthetic oligonucleotide
  Sense strand starting at position 511 of SEQ ID NO: 1242957
gcuucuuuaccacagguuu

SEQ ID NO: 1384609 - RNA, 19 nt, Artificial Sequence
  Description of Artificial Sequence: Synthetic oligonucleotide
  Antisense strand to SEQ ID NO: 1384608
aaaccugugguaaagaagc

SEQ ID NO: 1384610 - RNA, 19 nt, Artificial Sequence
  Description of Artificial Sequence: Synthetic oligonucleotide
  Sense strand starting at position 522 of SEQ ID NO: 1242957
acagguuucuuccuagucu

SEQ ID NO: 1384611 - RNA, 19 nt, Artificial Sequence
  Description of Artificial Sequence: Synthetic oligonucleotide
  Antisense strand to SEQ ID NO: 1384610
agacuaggaagaaaccugu

SEQ ID NO: 1384612 - RNA, 19 nt, Artificial Sequence
  Description of Artificial Sequence: Synthetic oligonucleotide
  Sense strand starting at position 852 of SEQ ID NO: 1242957
gcaggaaacagcuaucugu

SEQ ID NO: 1384613 - RNA, 19 nt, Artificial Sequence
  Description of Artificial Sequence: Synthetic oligonucleotide
  Antisense strand to SEQ ID NO: 1384612
acagauagcuguuuccugc

SEQ ID NO: 1384614 - RNA, 19 nt, Artificial Sequence
  Description of Artificial Sequence: Synthetic oligonucleotide
  Sense strand starting at position 855 of SEQ ID NO: 1242957
ggaaacagcuaucuguacu

SEQ ID NO: 1384615 - RNA, 19 nt, Artificial Sequence
  Description of Artificial Sequence: Synthetic oligonucleotide
  Antisense strand to SEQ ID NO: 1384614
aguacagauagcuguuucc

SEQ ID NO: 1384616 - RNA, 19 nt, Artificial Sequence
  Description of Artificial Sequence: Synthetic oligonucleotide
  Sense strand starting at position 930 of SEQ ID NO: 1242957
auaagagaugcgcagugaa

SEQ ID NO: 1384617 - RNA, 19 nt, Artificial Sequence
  Description of Artificial Sequence: Synthetic oligonucleotide
  Antisense strand to SEQ ID NO: 1384616
uucacugcgcaucucuuau

SEQ ID NO: 1384618 - RNA, 19 nt, Artificial Sequence
  Description of Artificial Sequence: Synthetic oligonucleotide
  Sense strand starting at position 940 of SEQ ID NO: 1242957
cgcagugaaugcuucuuga

SEQ ID NO: 1384619 - RNA, 19 nt, Artificial Sequence
  Description of Artificial Sequence: Synthetic oligonucleotide
  Antisense strand to SEQ ID NO: 1384618
ucaagaagcauucacugcg

SEQ ID NO: 1384620 - RNA, 19 nt, Artificial Sequence
  Description of Artificial Sequence: Synthetic oligonucleotide
  Sense strand starting at position 948 of SEQ ID NO: 1242957
augcuucuugagugaacca

SEQ ID NO: 1384621 - RNA, 19 nt, Artificial Sequence
  Description of Artificial Sequence: Synthetic oligonucleotide
  Antisense strand to SEQ ID NO: 1384620
ugguucacucaagaagcau

SEQ ID NO: 1384622 - RNA, 19 nt, Artificial Sequence
  Description of Artificial Sequence: Synthetic oligonucleotide
  Sense strand starting at position 953 of SEQ ID NO: 1242957
ucuugagugaaccaacgau

SEQ ID NO: 1384623 - RNA, 19 nt, Artificial Sequence
  Description of Artificial Sequence: Synthetic oligonucleotide
  Antisense strand to SEQ ID NO: 1384622
aucguugguucacucaaga

SEQ ID NO: 1384624 - RNA, 19 nt, Artificial Sequence
  Description of Artificial Sequence: Synthetic oligonucleotide
  Sense strand starting at position 1089 of SEQ ID NO: 1242957
caguuugucuucccuggaa

SEQ ID NO: 1384625 - RNA, 19 nt, Artificial Sequence
  Description of Artificial Sequence: Synthetic oligonucleotide
  Antisense strand to SEQ ID NO: 1384624
uuccagggaagacaaacug

SEQ ID NO: 1384626 - RNA, 19 nt, Artificial Sequence
  Description of Artificial Sequence: Synthetic oligonucleotide
  Sense strand starting at position 1642 of SEQ ID NO: 1242957
ccgcgugggccgagaacuu

SEQ ID NO: 1384627 - RNA, 19 nt, Artificial Sequence
  Description of Artificial Sequence: Synthetic oligonucleotide
  Antisense strand to SEQ ID NO: 1384626
aaguucucggcccacgcgg

SEQ ID NO: 1384628 - RNA, 19 nt, Artificial Sequence
  Description of Artificial Sequence: Synthetic oligonucleotide
  Sense strand starting at position 1649 of SEQ ID NO: 1242957
ggccgagaacuuugccaga

SEQ ID NO: 1384629 - RNA, 19 nt, Artificial Sequence
  Description of Artificial Sequence: Synthetic oligonucleotide
  Antisense strand to SEQ ID NO: 1384628
ucuggcaaaguucucggcc

SEQ ID NO: 1384630 - RNA, 19 nt, Artificial Sequence
  Description of Artificial Sequence: Synthetic oligonucleotide
  Sense strand starting at position 1804 of SEQ ID NO: 1242957
cugccuuucucacugguca

SEQ ID NO: 1384631 - RNA, 19 nt, Artificial Sequence
  Description of Artificial Sequence: Synthetic oligonucleotide
  Antisense strand to SEQ ID NO: 1384630
ugaccagugagaaaggcag

SEQ ID NO: 1384632 - RNA, 19 nt, Artificial Sequence
  Description of Artificial Sequence: Synthetic oligonucleotide
  Sense strand starting at position 1836 of SEQ ID NO: 1242957
ggcugcuguuauuucgcaa

SEQ ID NO: 1384633 - RNA, 19 nt, Artificial Sequence
  Description of Artificial Sequence: Synthetic oligonucleotide
  Antisense strand to SEQ ID NO: 1384632
uugcgaaauaacagcagcc

SEQ ID NO: 1384634 - RNA, 19 nt, Artificial Sequence
  Description of Artificial Sequence: Synthetic oligonucleotide
  Sense strand starting at position 1843 of SEQ ID NO: 1242957
guuauuucgcaaggcagaa

SEQ ID NO: 1384635 - RNA, 19 nt, Artificial Sequence
  Description of Artificial Sequence: Synthetic oligonucleotide
  Antisense strand to SEQ ID NO: 1384634
uucugccuugcgaaauaac

SEQ ID NO: 1384636 - RNA, 19 nt, Artificial Sequence
  Description of Artificial Sequence: Synthetic oligonucleotide
  Sense strand starting at position 1920 of SEQ ID NO: 1242957
ucaagugucuaaguacauu

SEQ ID NO: 1384637 - RNA, 19 nt, Artificial Sequence
  Description of Artificial Sequence: Synthetic oligonucleotide
  Antisense strand to SEQ ID NO: 1384636
aauguacuuagacacuuga

SEQ ID NO: 1384638 - RNA, 19 nt, Artificial Sequence
  Description of Artificial Sequence: Synthetic oligonucleotide
  Sense strand starting at position 2096 of SEQ ID NO: 1242957
aguuguaguccugacggca

SEQ ID NO: 1384639 - RNA, 19 nt, Artificial Sequence
  Description of Artificial Sequence: Synthetic oligonucleotide
  Antisense strand to SEQ ID NO: 1384638
ugccgucaggacuacaacu

SEQ ID NO: 1384640 - RNA, 19 nt, Artificial Sequence
  Description of Artificial Sequence: Synthetic oligonucleotide
  Sense strand starting at position 2350 of SEQ ID NO: 1242957
ucaguuuacccagguguaa

SEQ ID NO: 1384641 - RNA, 19 nt, Artificial Sequence
  Description of Artificial Sequence: Synthetic oligonucleotide
  Antisense strand to SEQ ID NO: 1384640
uuacaccuggguaaacuga

SEQ ID NO: 1384642 - RNA, 19 nt, Artificial Sequence
  Description of Artificial Sequence: Synthetic oligonucleotide
  Sense strand starting at position 2352 of SEQ ID NO: 1242957
aguuuacccagguguaaag

SEQ ID NO: 1384643 - RNA, 19 nt, Artificial Sequence
  Description of Artificial Sequence: Synthetic oligonucleotide
  Antisense strand to SEQ ID NO: 1384642
cuuuacaccuggguaaacu

SEQ ID NO: 1384644 - RNA, 19 nt, Artificial Sequence
  Description of Artificial Sequence: Synthetic oligonucleotide
  Sense strand starting at position 2550 of SEQ ID NO: 1242957
augugcuuccuaggaaauc

SEQ ID NO: 1384645 - RNA, 19 nt, Artificial Sequence
  Description of Artificial Sequence: Synthetic oligonucleotide
  Antisense strand to SEQ ID NO: 1384644
gauuuccuaggaagcacau

SEQ ID NO: 1384646 - RNA, 19 nt, Artificial Sequence
  Description of Artificial Sequence: Synthetic oligonucleotide
  Sense strand starting at position 2617 of SEQ ID NO: 1242957
ucaaguauccgaugggcca

SEQ ID NO: 1384647 - RNA, 19 nt, Artificial Sequence
  Description of Artificial Sequence: Synthetic oligonucleotide
  Antisense strand to SEQ ID NO: 1384646
uggcccaucggauacuuga

SEQ ID NO: 1384648 - RNA, 19 nt, Artificial Sequence
  Description of Artificial Sequence: Synthetic oligonucleotide
  Sense strand starting at position 2660 of SEQ ID NO: 1242957
ggacauugcugcgcuggaa

SEQ ID NO: 1384649 - RNA, 19 nt, Artificial Sequence
  Description of Artificial Sequence: Synthetic oligonucleotide
  Antisense strand to SEQ ID NO: 1384648
uuccagcgcagcaaugucc

SEQ ID NO: 1384650 - RNA, 19 nt, Artificial Sequence
  Description of Artificial Sequence: Synthetic oligonucleotide
  Sense strand starting at position 2705 of SEQ ID NO: 1242957
cccucaguuuccuccuaga

SEQ ID NO: 1384651 - RNA, 19 nt, Artificial Sequence
  Description of Artificial Sequence: Synthetic oligonucleotide
  Antisense strand to SEQ ID NO: 1384650
ucuaggaggaaacugaggg

SEQ ID NO: 1384652 - RNA, 19 nt, Artificial Sequence
  Description of Artificial Sequence: Synthetic oligonucleotide
  Sense strand starting at position 2754 of SEQ ID NO: 1242957
agacucuucgggugagcaa

SEQ ID NO: 1384653 - RNA, 19 nt, Artificial Sequence
  Description of Artificial Sequence: Synthetic oligonucleotide
  Antisense strand to SEQ ID NO: 1384652
uugcucacccgaagagucu

SEQ ID NO: 1384654 - RNA, 19 nt, Artificial Sequence
  Description of Artificial Sequence: Synthetic oligonucleotide
  Sense strand starting at position 3002 of SEQ ID NO: 1242957
ggccucuuguaauuuauau

SEQ ID NO: 1384655 - RNA, 19 nt, Artificial Sequence
  Description of Artificial Sequence: Synthetic oligonucleotide
  Antisense strand to SEQ ID NO: 1384654
auauaaauuacaagaggcc

SEQ ID NO: 1384656 - RNA, 19 nt, Artificial Sequence
  Description of Artificial Sequence: Synthetic oligonucleotide
  Sense strand starting at position 3018 of SEQ ID NO: 1242957
uauucuaguugggaagaau

SEQ ID NO: 1384657 - RNA, 19 nt, Artificial Sequence
  Description of Artificial Sequence: Synthetic oligonucleotide
  Antisense strand to SEQ ID NO: 1384656
auucuucccaacuagaaua

SEQ ID NO: 1384658 - RNA, 19 nt, Artificial Sequence
  Description of Artificial Sequence: Synthetic oligonucleotide
  Sense strand starting at position 3098 of SEQ ID NO: 1242957
acaguuaugcgguaaugau

SEQ ID NO: 1384659 - RNA, 19 nt, Artificial Sequence
  Description of Artificial Sequence: Synthetic oligonucleotide
  Antisense strand to SEQ ID NO: 1384658
aucauuaccgcauaacugu

SEQ ID NO: 1384660 - RNA, 19 nt, Artificial Sequence
  Description of Artificial Sequence: Synthetic oligonucleotide
  Sense strand starting at position 3102 of SEQ ID NO: 1242957
uuaugcgguaaugauuaua

SEQ ID NO: 1384661 - RNA, 19 nt, Artificial Sequence
  Description of Artificial Sequence: Synthetic oligonucleotide
  Antisense strand to SEQ ID NO: 1384660
uauaaucauuaccgcauaa

SEQ ID NO: 1384662 - RNA, 19 nt, Artificial Sequence
  Description of Artificial Sequence: Synthetic oligonucleotide
  Sense strand starting at position 3105 of SEQ ID NO: 1242957
ugcgguaaugauuauagua

SEQ ID NO: 1384663 - RNA, 19 nt, Artificial Sequence
  Description of Artificial Sequence: Synthetic oligonucleotide
  Antisense strand to SEQ ID NO: 1384662
uacuauaaucauuaccgca

SEQ ID NO: 1384664 - RNA, 19 nt, Artificial Sequence
  Description of Artificial Sequence: Synthetic oligonucleotide
  Sense strand starting at position 3135 of SEQ ID NO: 1242957
gaugaauuguuucugcaaa

SEQ ID NO: 1384665 - RNA, 19 nt, Artificial Sequence
  Description of Artificial Sequence: Synthetic oligonucleotide
  Antisense strand to SEQ ID NO: 1384664
uuugcagaaacaauucauc

SEQ ID NO: 1384666 - RNA, 19 nt, Artificial Sequence
  Description of Artificial Sequence: Synthetic oligonucleotide
  Sense strand starting at position 3137 of SEQ ID NO: 1242957
ugaauuguuucugcaaagg

SEQ ID NO: 1384667 - RNA, 19 nt, Artificial Sequence
  Description of Artificial Sequence: Synthetic oligonucleotide
  Antisense strand to SEQ ID NO: 1384666
ccuuugcagaaacaauuca

SEQ ID NO: 1384668 - RNA, 19 nt, Artificial Sequence
  Description of Artificial Sequence: Synthetic oligonucleotide
  Sense strand starting at position 3246 of SEQ ID NO: 1242957
aauacaugaguauggcuau

SEQ ID NO: 1384669 - RNA, 19 nt, Artificial Sequence
  Description of Artificial Sequence: Synthetic oligonucleotide
  Antisense strand to SEQ ID NO: 1384668
auagccauacucauguauu

SEQ ID NO: 1384670 - RNA, 19 nt, Artificial Sequence
  Description of Artificial Sequence: Synthetic oligonucleotide
  Sense strand starting at position 3249 of SEQ ID NO: 1242957
acaugaguauggcuauguu

SEQ ID NO: 1384671 - RNA, 19 nt, Artificial Sequence
  Description of Artificial Sequence: Synthetic oligonucleotide
  Antisense strand to SEQ ID NO: 1384670
aacauagccauacucaugu

SEQ ID NO: 1384672 - RNA, 19 nt, Artificial Sequence
  Description of Artificial Sequence: Synthetic oligonucleotide
  Sense strand starting at position 3252 of SEQ ID NO: 1242957
ugaguauggcuauguuucu

SEQ ID NO: 1384673 - RNA, 19 nt, Artificial Sequence
  Description of Artificial Sequence: Synthetic oligonucleotide
  Antisense strand to SEQ ID NO: 1384672
agaaacauagccauacuca

SEQ ID NO: 1384674 - RNA, 19 nt, Artificial Sequence
  Description of Artificial Sequence: Synthetic oligonucleotide
  Sense strand starting at position 3253 of SEQ ID NO: 1242957
gaguauggcuauguuucua

SEQ ID NO: 1384675 - RNA, 19 nt, Artificial Sequence
  Description of Artificial Sequence: Synthetic oligonucleotide
  Antisense strand to SEQ ID NO: 1384674
uagaaacauagccauacuc

SEQ ID NO: 1384676 - RNA, 19 nt, Artificial Sequence
  Description of Artificial Sequence: Synthetic oligonucleotide
  Sense strand starting at position 3257 of SEQ ID NO: 1242957
auggcuauguuucuauaaa

SEQ ID NO: 1384677 - RNA, 19 nt, Artificial Sequence
  Description of Artificial Sequence: Synthetic oligonucleotide
  Antisense strand to SEQ ID NO: 1384676
uuuauagaaacauagccau

SEQ ID NO: 1384678 - RNA, 19 nt, Artificial Sequence
  Description of Artificial Sequence: Synthetic oligonucleotide
  Sense strand starting at position 3277 of SEQ ID NO: 1242957
cuuuauaggcacugaaauu

SEQ ID NO: 1384679 - RNA, 19 nt, Artificial Sequence
  Description of Artificial Sequence: Synthetic oligonucleotide
  Antisense strand to SEQ ID NO: 1384678
aauuucagugccuauaaag

SEQ ID NO: 1384680 - RNA, 19 nt, Artificial Sequence
  Description of Artificial Sequence: Synthetic oligonucleotide
  Sense strand starting at position 3713 of SEQ ID NO: 1242957
gcaaccucugaauggagua

SEQ ID NO: 1384681 - RNA, 19 nt, Artificial Sequence
  Description of Artificial Sequence: Synthetic oligonucleotide
  Antisense strand to SEQ ID NO: 1384680
uacuccauucagagguugc

SEQ ID NO: 1384682 - RNA, 19 nt, Artificial Sequence
  Description of Artificial Sequence: Synthetic oligonucleotide
  Sense strand starting at position 3844 of SEQ ID NO: 1242957
uguauagugguguauacau

SEQ ID NO: 1384683 - RNA, 19 nt, Artificial Sequence
  Description of Artificial Sequence: Synthetic oligonucleotide
  Antisense strand to SEQ ID NO: 1384682
auguauacaccacuauaca

SEQ ID NO: 1384684 - RNA, 19 nt, Artificial Sequence
  Description of Artificial Sequence: Synthetic oligonucleotide
  Sense strand starting at position 3894 of SEQ ID NO: 1242957
gaggaucccuugccugaaa

SEQ ID NO: 1384685 - RNA, 19 nt, Artificial Sequence
  Description of Artificial Sequence: Synthetic oligonucleotide
  Antisense strand to SEQ ID NO: 1384684
uuucaggcaagggauccuc

SEQ ID NO: 1384686 - RNA, 19 nt, Artificial Sequence
  Description of Artificial Sequence: Synthetic oligonucleotide
  Sense strand starting at position 3897 of SEQ ID NO: 1242957
gaucccuugccugaaaggu

SEQ ID NO: 1384687 - RNA, 19 nt, Artificial Sequence
  Description of Artificial Sequence: Synthetic oligonucleotide
  Antisense strand to SEQ ID NO: 1384686
accuuucaggcaagggauc

SEQ ID NO: 1384688 - RNA, 19 nt, Artificial Sequence
  Description of Artificial Sequence: Synthetic oligonucleotide
  Sense strand starting at position 1 of SEQ ID NO: 1242958
gguagcucuagcuguccaa

SEQ ID NO: 1384689 - RNA, 19 nt, Artificial Sequence
  Description of Artificial Sequence: Synthetic oligonucleotide
  Antisense strand to SEQ ID NO: 1384688
uuggacagcuagagcuacc

SEQ ID NO: 1384690 - RNA, 19 nt, Artificial Sequence
  Description of Artificial Sequence: Synthetic oligonucleotide
  Sense strand starting at position 4 of SEQ ID NO: 1242958
agcucuagcuguccaauuu

SEQ ID NO: 1384691 - RNA, 19 nt, Artificial Sequence
  Description of Artificial Sequence: Synthetic oligonucleotide
  Antisense strand to SEQ ID NO: 1384690
aaauuggacagcuagagcu

SEQ ID NO: 1384692 - RNA, 19 nt, Artificial Sequence
  Description of Artificial Sequence: Synthetic oligonucleotide
  Sense strand starting at position 62 of SEQ ID NO: 1242958
gcggucaaugcuuuauugu

SEQ ID NO: 1384693 - RNA, 19 nt, Artificial Sequence
  Description of Artificial Sequence: Synthetic oligonucleotide
  Antisense strand to SEQ ID NO: 1384692
acaauaaagcauugaccgc

SEQ ID NO: 1384694 - RNA, 19 nt, Artificial Sequence
  Description of Artificial Sequence: Synthetic oligonucleotide
  Sense strand starting at position 69 of SEQ ID NO: 1242958
augcuuuauugucuguaac

SEQ ID NO: 1384695 - RNA, 19 nt, Artificial Sequence
  Description of Artificial Sequence: Synthetic oligonucleotide
  Antisense strand to SEQ ID NO: 1384694
guuacagacaauaaagcau

SEQ ID NO: 1384696 - RNA, 19 nt, Artificial Sequence
  Description of Artificial Sequence: Synthetic oligonucleotide
  Sense strand starting at position 70 of SEQ ID NO: 1242958
ugcuuuauugucuguaacu

SEQ ID NO: 1384697 - RNA, 19 nt, Artificial Sequence
  Description of Artificial Sequence: Synthetic oligonucleotide
  Antisense strand to SEQ ID NO: 1384696
aguuacagacaauaaagca

SEQ ID NO: 1384698 - RNA, 19 nt, Artificial Sequence
  Description of Artificial Sequence: Synthetic oligonucleotide
  Sense strand starting at position 71 of SEQ ID NO: 1242958
gcuuuauugucuguaacuc

SEQ ID NO: 1384699 - RNA, 19 nt, Artificial Sequence
  Description of Artificial Sequence: Synthetic oligonucleotide
  Antisense strand to SEQ ID NO: 1384698
gaguuacagacaauaaagc

SEQ ID NO: 1384700 - RNA, 19 nt, Artificial Sequence
  Description of Artificial Sequence: Synthetic oligonucleotide
  Sense strand starting at position 72 of SEQ ID NO: 1242958
cuuuauugucuguaacuca

SEQ ID NO: 1384701 - RNA, 19 nt, Artificial Sequence
  Description of Artificial Sequence: Synthetic oligonucleotide
  Antisense strand to SEQ ID NO: 1384700
ugaguuacagacaauaaag

SEQ ID NO: 1384702 - RNA, 19 nt, Artificial Sequence
  Description of Artificial Sequence: Synthetic oligonucleotide
  Sense strand starting at position 228 of SEQ ID NO: 1242958
ccagguagaugaggucauu

SEQ ID NO: 1384703 - RNA, 19 nt, Artificial Sequence
  Description of Artificial Sequence: Synthetic oligonucleotide
  Antisense strand to SEQ ID NO: 1384702
aaugaccucaucuaccugg

SEQ ID NO: 1384704 - RNA, 19 nt, Artificial Sequence
  Description of Artificial Sequence: Synthetic oligonucleotide
  Sense strand starting at position 241 of SEQ ID NO: 1242958
gucauucaaugaguguguu

SEQ ID NO: 1384705 - RNA, 19 nt, Artificial Sequence
  Description of Artificial Sequence: Synthetic oligonucleotide
  Antisense strand to SEQ ID NO: 1384704
aacacacucauugaaugac

SEQ ID NO: 1384706 - RNA, 19 nt, Artificial Sequence
  Description of Artificial Sequence: Synthetic oligonucleotide
  Sense strand starting at position 247 of SEQ ID NO: 1242958
caaugaguguguuuccaag

SEQ ID NO: 1384707 - RNA, 19 nt, Artificial Sequence
  Description of Artificial Sequence: Synthetic oligonucleotide
  Antisense strand to SEQ ID NO: 1384706
cuuggaaacacacucauug

SEQ ID NO: 1384708 - RNA, 19 nt, Artificial Sequence
  Description of Artificial Sequence: Synthetic oligonucleotide
  Sense strand starting at position 253 of SEQ ID NO: 1242958
guguguuuccaaggcucca

SEQ ID NO: 1384709 - RNA, 19 nt, Artificial Sequence
  Description of Artificial Sequence: Synthetic oligonucleotide
  Antisense strand to SEQ ID NO: 1384708
uggagccuuggaaacacac

SEQ ID NO: 1384710 - RNA, 19 nt, Artificial Sequence
  Description of Artificial Sequence: Synthetic oligonucleotide
  Sense strand starting at position 293 of SEQ ID NO: 1242958
guguuuaaaccugaauguu

SEQ ID NO: 1384711 - RNA, 19 nt, Artificial Sequence
  Description of Artificial Sequence: Synthetic oligonucleotide
  Antisense strand to SEQ ID NO: 1384710
aacauucagguuuaaacac

SEQ ID NO: 1384712 - RNA, 19 nt, Artificial Sequence
  Description of Artificial Sequence: Synthetic oligonucleotide
  Sense strand starting at position 354 of SEQ ID NO: 1242958
augucuuaacugugaacuc

SEQ ID NO: 1384713 - RNA, 19 nt, Artificial Sequence
  Description of Artificial Sequence: Synthetic oligonucleotide
  Antisense strand to SEQ ID NO: 1384712
gaguucacaguuaagacau

SEQ ID NO: 1384714 - RNA, 19 nt, Artificial Sequence
  Description of Artificial Sequence: Synthetic oligonucleotide
  Sense strand starting at position 363 of SEQ ID NO: 1242958
cugugaacuccugauaagc

SEQ ID NO: 1384715 - RNA, 19 nt, Artificial Sequence
  Description of Artificial Sequence: Synthetic oligonucleotide
  Antisense strand to SEQ ID NO: 1384714
gcuuaucaggaguucacag

SEQ ID NO: 1384716 - RNA, 19 nt, Artificial Sequence
  Description of Artificial Sequence: Synthetic oligonucleotide
  Sense strand starting at position 738 of SEQ ID NO: 1242958
ugguuuguagcgccaucaa

SEQ ID NO: 1384717 - RNA, 19 nt, Artificial Sequence
  Description of Artificial Sequence: Synthetic oligonucleotide
  Antisense strand to SEQ ID NO: 1384716
uugauggcgcuacaaacca

SEQ ID NO: 1384718 - RNA, 19 nt, Artificial Sequence
  Description of Artificial Sequence: Synthetic oligonucleotide
  Sense strand starting at position 1127 of SEQ ID NO: 1242958
acgcgauuuaaauggcaug

SEQ ID NO: 1384719 - RNA, 19 nt, Artificial Sequence
  Description of Artificial Sequence: Synthetic oligonucleotide
  Antisense strand to SEQ ID NO: 1384718
caugccauuuaaaucgcgu

SEQ ID NO: 1384720 - RNA, 19 nt, Artificial Sequence
  Description of Artificial Sequence: Synthetic oligonucleotide
  Sense strand starting at position 1128 of SEQ ID NO: 1242958
cgcgauuuaaauggcauga

SEQ ID NO: 1384721 - RNA, 19 nt, Artificial Sequence
  Description of Artificial Sequence: Synthetic oligonucleotide
  Antisense strand to SEQ ID NO: 1384720
ucaugccauuuaaaucgcg

SEQ ID NO: 1384722 - RNA, 19 nt, Artificial Sequence
  Description of Artificial Sequence: Synthetic oligonucleotide
  Sense strand starting at position 1130 of SEQ ID NO: 1242958
cgauuuaaauggcaugaca

SEQ ID NO: 1384723 - RNA, 19 nt, Artificial Sequence
  Description of Artificial Sequence: Synthetic oligonucleotide
  Antisense strand to SEQ ID NO: 1384722
ugucaugccauuuaaaucg

SEQ ID NO: 1384724 - RNA, 19 nt, Artificial Sequence
  Description of Artificial Sequence: Synthetic oligonucleotide
  Sense strand starting at position 1226 of SEQ ID NO: 1242958
cucagaaaguaauagguaa

SEQ ID NO: 1384725 - RNA, 19 nt, Artificial Sequence
  Description of Artificial Sequence: Synthetic oligonucleotide
  Antisense strand to SEQ ID NO: 1384724
uuaccuauuacuuucugag

SEQ ID NO: 1384726 - RNA, 19 nt, Artificial Sequence
  Description of Artificial Sequence: Synthetic oligonucleotide
  Sense strand starting at position 1316 of SEQ ID NO: 1242958
aggguucacucgugaaguc

SEQ ID NO: 1384727 - RNA, 19 nt, Artificial Sequence
  Description of Artificial Sequence: Synthetic oligonucleotide
  Antisense strand to SEQ ID NO: 1384726
gacuucacgagugaacccu

SEQ ID NO: 1384728 - RNA, 19 nt, Artificial Sequence
  Description of Artificial Sequence: Synthetic oligonucleotide
  Sense strand starting at position 1317 of SEQ ID NO: 1242958
ggguucacucgugaaguca

SEQ ID NO: 1384729 - RNA, 19 nt, Artificial Sequence
  Description of Artificial Sequence: Synthetic oligonucleotide
  Antisense strand to SEQ ID NO: 1384728
ugacuucacgagugaaccc

SEQ ID NO: 1384730 - RNA, 19 nt, Artificial Sequence
  Description of Artificial Sequence: Synthetic oligonucleotide
  Sense strand starting at position 2113 of SEQ ID NO: 1242958
gcgugcuucggcaggaaca

SEQ ID NO: 1384731 - RNA, 19 nt, Artificial Sequence
  Description of Artificial Sequence: Synthetic oligonucleotide
  Antisense strand to SEQ ID NO: 1384730
uguuccugccgaagcacgc

SEQ ID NO: 1384732 - RNA, 19 nt, Artificial Sequence
  Description of Artificial Sequence: Synthetic oligonucleotide
  Sense strand starting at position 2196 of SEQ ID NO: 1242958
gugguuuaauccuuguaca

SEQ ID NO: 1384733 - RNA, 19 nt, Artificial Sequence
  Description of Artificial Sequence: Synthetic oligonucleotide
  Antisense strand to SEQ ID NO: 1384732
uguacaaggauuaaaccac

SEQ ID NO: 1384734 - RNA, 19 nt, Artificial Sequence
  Description of Artificial Sequence: Synthetic oligonucleotide
  Sense strand starting at position 2197 of SEQ ID NO: 1242958
ugguuuaauccuuguacau

SEQ ID NO: 1384735 - RNA, 19 nt, Artificial Sequence
  Description of Artificial Sequence: Synthetic oligonucleotide
  Antisense strand to SEQ ID NO: 1384734
auguacaaggauuaaacca

SEQ ID NO: 1384736 - RNA, 19 nt, Artificial Sequence
  Description of Artificial Sequence: Synthetic oligonucleotide
  Sense strand starting at position 2212 of SEQ ID NO: 1242958
acauccacucagugaugua

SEQ ID NO: 1384737 - RNA, 19 nt, Artificial Sequence
  Description of Artificial Sequence: Synthetic oligonucleotide
  Antisense strand to SEQ ID NO: 1384736
uacaucacugaguggaugu

SEQ ID NO: 1384738 - RNA, 19 nt, Artificial Sequence
  Description of Artificial Sequence: Synthetic oligonucleotide
  Sense strand starting at position 2215 of SEQ ID NO: 1242958
uccacucagugauguaaga

SEQ ID NO: 1384739 - RNA, 19 nt, Artificial Sequence
  Description of Artificial Sequence: Synthetic oligonucleotide
  Antisense strand to SEQ ID NO: 1384738
ucuuacaucacugagugga

SEQ ID NO: 1384740 - RNA, 19 nt, Artificial Sequence
  Description of Artificial Sequence: Synthetic oligonucleotide
  Sense strand starting at position 2230 of SEQ ID NO: 1242958
aagaaauaggguugucaac

SEQ ID NO: 1384741 - RNA, 19 nt, Artificial Sequence
  Description of Artificial Sequence: Synthetic oligonucleotide
  Antisense strand to SEQ ID NO: 1384740
guugacaacccuauuucuu

SEQ ID NO: 1384742 - RNA, 19 nt, Artificial Sequence
  Description of Artificial Sequence: Synthetic oligonucleotide
  Sense strand starting at position 2316 of SEQ ID NO: 1242958
gguuaccagucuuguaucu

SEQ ID NO: 1384743 - RNA, 19 nt, Artificial Sequence
  Description of Artificial Sequence: Synthetic oligonucleotide
  Antisense strand to SEQ ID NO: 1384742
agauacaagacugguaacc

SEQ ID NO: 1384744 - RNA, 19 nt, Artificial Sequence
  Description of Artificial Sequence: Synthetic oligonucleotide
  Sense strand starting at position 2318 of SEQ ID NO: 1242958
uuaccagucuuguaucuga

SEQ ID NO: 1384745 - RNA, 19 nt, Artificial Sequence
  Description of Artificial Sequence: Synthetic oligonucleotide
  Antisense strand to SEQ ID NO: 1384744
ucagauacaagacugguaa

SEQ ID NO: 1384746 - RNA, 19 nt, Artificial Sequence
  Description of Artificial Sequence: Synthetic oligonucleotide
  Sense strand starting at position 2331 of SEQ ID NO: 1242958
aucugaucucccuguugca

SEQ ID NO: 1384747 - RNA, 19 nt, Artificial Sequence
  Description of Artificial Sequence: Synthetic oligonucleotide
  Antisense strand to SEQ ID NO: 1384746
ugcaacagggagaucagau

SEQ ID NO: 1384748 - RNA, 19 nt, Artificial Sequence
  Description of Artificial Sequence: Synthetic oligonucleotide
  Sense strand starting at position 2334 of SEQ ID NO: 1242958
ugaucucccuguugcauua

SEQ ID NO: 1384749 - RNA, 19 nt, Artificial Sequence
  Description of Artificial Sequence: Synthetic oligonucleotide
  Antisense strand to SEQ ID NO: 1384748
uaaugcaacagggagauca

SEQ ID NO: 1384750 - RNA, 19 nt, Artificial Sequence
  Description of Artificial Sequence: Synthetic oligonucleotide
  Sense strand starting at position 2344 of SEQ ID NO: 1242958
guugcauuauucgcauucu

SEQ ID NO: 1384751 - RNA, 19 nt, Artificial Sequence
  Description of Artificial Sequence: Synthetic oligonucleotide
  Antisense strand to SEQ ID NO: 1384750
agaaugcgaauaaugcaac

SEQ ID NO: 1384752 - RNA, 19 nt, Artificial Sequence
  Description of Artificial Sequence: Synthetic oligonucleotide
  Sense strand starting at position 2345 of SEQ ID NO: 1242958
uugcauuauucgcauucuu

SEQ ID NO: 1384753 - RNA, 19 nt, Artificial Sequence
  Description of Artificial Sequence: Synthetic oligonucleotide
  Antisense strand to SEQ ID NO: 1384752
aagaaugcgaauaaugcaa

SEQ ID NO: 1384754 - RNA, 19 nt, Artificial Sequence
  Description of Artificial Sequence: Synthetic oligonucleotide
  Sense strand starting at position 3045 of SEQ ID NO: 1242958
aacugaaaucagugcaagu

SEQ ID NO: 1384755 - RNA, 19 nt, Artificial Sequence
  Description of Artificial Sequence: Synthetic oligonucleotide
  Antisense strand to SEQ ID NO: 1384754
acuugcacugauuucaguu

SEQ ID NO: 1384756 - RNA, 19 nt, Artificial Sequence
  Description of Artificial Sequence: Synthetic oligonucleotide
  Sense strand starting at position 3443 of SEQ ID NO: 1242958
ggauaagacucauggacau

SEQ ID NO: 1384757 - RNA, 19 nt, Artificial Sequence
  Description of Artificial Sequence: Synthetic oligonucleotide
  Antisense strand to SEQ ID NO: 1384756
auguccaugagucuuaucc

SEQ ID NO: 1384758 - RNA, 19 nt, Artificial Sequence
  Description of Artificial Sequence: Synthetic oligonucleotide
  Sense strand starting at position 3455 of SEQ ID NO: 1242958
uggacauagcuuuaauuau

SEQ ID NO: 1384759 - RNA, 19 nt, Artificial Sequence
  Description of Artificial Sequence: Synthetic oligonucleotide
  Antisense strand to SEQ ID NO: 1384758
auaauuaaagcuaugucca

SEQ ID NO: 1384760 - RNA, 19 nt, Artificial Sequence
  Description of Artificial Sequence: Synthetic oligonucleotide
  Sense strand starting at position 161 of SEQ ID NO: 1242959
agaagagaagugugcucau

SEQ ID NO: 1384761 - RNA, 19 nt, Artificial Sequence
  Description of Artificial Sequence: Synthetic oligonucleotide
  Antisense strand to SEQ ID NO: 1384760
augagcacacuucucuucu

SEQ ID NO: 1384762 - RNA, 19 nt, Artificial Sequence
  Description of Artificial Sequence: Synthetic oligonucleotide
  Sense strand starting at position 267 of SEQ ID NO: 1242959
gggccuggaaucgacuauu

SEQ ID NO: 1384763 - RNA, 19 nt, Artificial Sequence
  Description of Artificial Sequence: Synthetic oligonucleotide
  Antisense strand to SEQ ID NO: 1384762
aauagucgauuccaggccc

SEQ ID NO: 1384764 - RNA, 19 nt, Artificial Sequence
  Description of Artificial Sequence: Synthetic oligonucleotide
  Sense strand starting at position 270 of SEQ ID NO: 1242959
ccuggaaucgacuauuguu

SEQ ID NO: 1384765 - RNA, 19 nt, Artificial Sequence
  Description of Artificial Sequence: Synthetic oligonucleotide
  Antisense strand to SEQ ID NO: 1384764
aacaauagucgauuccagg

SEQ ID NO: 1384766 - RNA, 19 nt, Artificial Sequence
  Description of Artificial Sequence: Synthetic oligonucleotide
  Sense strand starting at position 277 of SEQ ID NO: 1242959
ucgacuauuguugggacaa

SEQ ID NO: 1384767 - RNA, 19 nt, Artificial Sequence
  Description of Artificial Sequence: Synthetic oligonucleotide
  Antisense strand to SEQ ID NO: 1384766
uugucccaacaauagucga

SEQ ID NO: 1384768 - RNA, 19 nt, Artificial Sequence
  Description of Artificial Sequence: Synthetic oligonucleotide
  Sense strand starting at position 408 of SEQ ID NO: 1242959
agaugaggauucuuuaguu

SEQ ID NO: 1384769 - RNA, 19 nt, Artificial Sequence
  Description of Artificial Sequence: Synthetic oligonucleotide
  Antisense strand to SEQ ID NO: 1384768
aacuaaagaauccucaucu

SEQ ID NO: 1384770 - RNA, 19 nt, Artificial Sequence
  Description of Artificial Sequence: Synthetic oligonucleotide
  Sense strand starting at position 412 of SEQ ID NO: 1242959
gaggauucuuuaguuccau

SEQ ID NO: 1384771 - RNA, 19 nt, Artificial Sequence
  Description of Artificial Sequence: Synthetic oligonucleotide
  Antisense strand to SEQ ID NO: 1384770
auggaacuaaagaauccuc

SEQ ID NO: 1384772 - RNA, 19 nt, Artificial Sequence
  Description of Artificial Sequence: Synthetic oligonucleotide
  Sense strand starting at position 413 of SEQ ID NO: 1242959
aggauucuuuaguuccaua

SEQ ID NO: 1384773 - RNA, 19 nt, Artificial Sequence
  Description of Artificial Sequence: Synthetic oligonucleotide
  Antisense strand to SEQ ID NO: 1384772
uauggaacuaaagaauccu

SEQ ID NO: 1384774 - RNA, 19 nt, Artificial Sequence
  Description of Artificial Sequence: Synthetic oligonucleotide
  Sense strand starting at position 418 of SEQ ID NO: 1242959
ucuuuaguuccauaagcag

SEQ ID NO: 1384775 - RNA, 19 nt, Artificial Sequence
  Description of Artificial Sequence: Synthetic oligonucleotide
  Antisense strand to SEQ ID NO: 1384774
cugcuuauggaacuaaaga

SEQ ID NO: 1384776 - RNA, 19 nt, Artificial Sequence
  Description of Artificial Sequence: Synthetic oligonucleotide
  Sense strand starting at position 452 of SEQ ID NO: 1242959
gggugaaguccugagugaa

SEQ ID NO: 1384777 - RNA, 19 nt, Artificial Sequence
  Description of Artificial Sequence: Synthetic oligonucleotide
  Antisense strand to SEQ ID NO: 1384776
uucacucaggacuucaccc

SEQ ID NO: 1384778 - RNA, 19 nt, Artificial Sequence
  Description of Artificial Sequence: Synthetic oligonucleotide
  Sense strand starting at position 455 of SEQ ID NO: 1242959
ugaaguccugagugaauuc

SEQ ID NO: 1384779 - RNA, 19 nt, Artificial Sequence
  Description of Artificial Sequence: Synthetic oligonucleotide
  Antisense strand to SEQ ID NO: 1384778
gaauucacucaggacuuca

SEQ ID NO: 1384780 - RNA, 19 nt, Artificial Sequence
  Description of Artificial Sequence: Synthetic oligonucleotide
  Sense strand starting at position 530 of SEQ ID NO: 1242959
cagggcuggcuuuaacuaa

SEQ ID NO: 1384781 - RNA, 19 nt, Artificial Sequence
  Description of Artificial Sequence: Synthetic oligonucleotide
  Antisense strand to SEQ ID NO: 1384780
uuaguuaaagccagcccug

SEQ ID NO: 1384782 - RNA, 19 nt, Artificial Sequence
  Description of Artificial Sequence: Synthetic oligonucleotide
  Sense strand starting at position 546 of SEQ ID NO: 1242959
uaaugaaaccuugggucau

SEQ ID NO: 1384783 - RNA, 19 nt, Artificial Sequence
  Description of Artificial Sequence: Synthetic oligonucleotide
  Antisense strand to SEQ ID NO: 1384782
augacccaagguuucauua

SEQ ID NO: 1384784 - RNA, 19 nt, Artificial Sequence
  Description of Artificial Sequence: Synthetic oligonucleotide
  Sense strand starting at position 556 of SEQ ID NO: 1242959
uugggucaucccuagguua

SEQ ID NO: 1384785 - RNA, 19 nt, Artificial Sequence
  Description of Artificial Sequence: Synthetic oligonucleotide
  Antisense strand to SEQ ID NO: 1384784
uaaccuagggaugacccaa

SEQ ID NO: 1384786 - RNA, 19 nt, Artificial Sequence
  Description of Artificial Sequence: Synthetic oligonucleotide
  Sense strand starting at position 567 of SEQ ID NO: 1242959
cuagguuaccaucaagcaa

SEQ ID NO: 1384787 - RNA, 19 nt, Artificial Sequence
  Description of Artificial Sequence: Synthetic oligonucleotide
  Antisense strand to SEQ ID NO: 1384786
uugcuugaugguaaccuag

SEQ ID NO: 1384788 - RNA, 19 nt, Artificial Sequence
  Description of Artificial Sequence: Synthetic oligonucleotide
  Sense strand starting at position 749 of SEQ ID NO: 1242959
aggugauuaagaugcauau

SEQ ID NO: 1384789 - RNA, 19 nt, Artificial Sequence
  Description of Artificial Sequence: Synthetic oligonucleotide
  Antisense strand to SEQ ID NO: 1384788
auaugcaucuuaaucaccu

SEQ ID NO: 1384790 - RNA, 19 nt, Artificial Sequence
  Description of Artificial Sequence: Synthetic oligonucleotide
  Sense strand starting at position 759 of SEQ ID NO: 1242959
gaugcauaugcagaacugu

SEQ ID NO: 1384791 - RNA, 19 nt, Artificial Sequence
  Description of Artificial Sequence: Synthetic oligonucleotide
  Antisense strand to SEQ ID NO: 1384790
acaguucugcauaugcauc

SEQ ID NO: 1384792 - RNA, 19 nt, Artificial Sequence
  Description of Artificial Sequence: Synthetic oligonucleotide
  Sense strand starting at position 1083 of SEQ ID NO: 1242959
gucugacagaccuggguau

SEQ ID NO: 1384793 - RNA, 19 nt, Artificial Sequence
  Description of Artificial Sequence: Synthetic oligonucleotide
  Antisense strand to SEQ ID NO: 1384792
auacccaggucugucagac

SEQ ID NO: 1384794 - RNA, 19 nt, Artificial Sequence
  Description of Artificial Sequence: Synthetic oligonucleotide
  Sense strand starting at position 1084 of SEQ ID NO: 1242959
ucugacagaccuggguaua

SEQ ID NO: 1384795 - RNA, 19 nt, Artificial Sequence
  Description of Artificial Sequence: Synthetic oligonucleotide
  Antisense strand to SEQ ID NO: 1384794
uauacccaggucugucaga

SEQ ID NO: 1384796 - RNA, 19 nt, Artificial Sequence
  Description of Artificial Sequence: Synthetic oligonucleotide
  Sense strand starting at position 1129 of SEQ ID NO: 1242959
ucucacuggcucugaagaa

SEQ ID NO: 1384797 - RNA, 19 nt, Artificial Sequence
  Description of Artificial Sequence: Synthetic oligonucleotide
  Antisense strand to SEQ ID NO: 1384796
uucuucagagccagugaga

SEQ ID NO: 1384798 - RNA, 19 nt, Artificial Sequence
  Description of Artificial Sequence: Synthetic oligonucleotide
  Sense strand starting at position 1186 of SEQ ID NO: 1242959
gagagcuaauggucaaguu

SEQ ID NO: 1384799 - RNA, 19 nt, Artificial Sequence
  Description of Artificial Sequence: Synthetic oligonucleotide
  Antisense strand to SEQ ID NO: 1384798
aacuugaccauuagcucuc

SEQ ID NO: 1384800 - RNA, 19 nt, Artificial Sequence
  Description of Artificial Sequence: Synthetic oligonucleotide
  Sense strand starting at position 1281 of SEQ ID NO: 1242959
gugagauuaguauaguguc

SEQ ID NO: 1384801 - RNA, 19 nt, Artificial Sequence
  Description of Artificial Sequence: Synthetic oligonucleotide
  Antisense strand to SEQ ID NO: 1384800
gacacuauacuaaucucac

SEQ ID NO: 1384802 - RNA, 19 nt, Artificial Sequence
  Description of Artificial Sequence: Synthetic oligonucleotide
  Sense strand starting at position 1289 of SEQ ID NO: 1242959
aguauagugucaccacaga

SEQ ID NO: 1384803 - RNA, 19 nt, Artificial Sequence
  Description of Artificial Sequence: Synthetic oligonucleotide
  Antisense strand to SEQ ID NO: 1384802
ucuguggugacacuauacu

SEQ ID NO: 1384804 - RNA, 19 nt, Artificial Sequence
  Description of Artificial Sequence: Synthetic oligonucleotide
  Sense strand starting at position 1362 of SEQ ID NO: 1242959
ugcauuuaugcaugcagua

SEQ ID NO: 1384805 - RNA, 19 nt, Artificial Sequence
  Description of Artificial Sequence: Synthetic oligonucleotide
  Antisense strand to SEQ ID NO: 1384804
uacugcaugcauaaaugca

SEQ ID NO: 1384806 - RNA, 19 nt, Artificial Sequence
  Description of Artificial Sequence: Synthetic oligonucleotide
  Sense strand starting at position 2076 of SEQ ID NO: 1242959
cugccauaguaacugaaga

SEQ ID NO: 1384807 - RNA, 19 nt, Artificial Sequence
  Description of Artificial Sequence: Synthetic oligonucleotide
  Antisense strand to SEQ ID NO: 1384806
ucuucaguuacuauggcag

SEQ ID NO: 1384808 - RNA, 19 nt, Artificial Sequence
  Description of Artificial Sequence: Synthetic oligonucleotide
  Sense strand starting at position 2099 of SEQ ID NO: 1242959
uagacuaaacugugucaag

SEQ ID NO: 1384809 - RNA, 19 nt, Artificial Sequence
  Description of Artificial Sequence: Synthetic oligonucleotide
  Antisense strand to SEQ ID NO: 1384808
cuugacacaguuuagucua

SEQ ID NO: 1384810 - RNA, 19 nt, Artificial Sequence
  Description of Artificial Sequence: Synthetic oligonucleotide
  Sense strand starting at position 2110 of SEQ ID NO: 1242959
gugucaagcauguauugag

SEQ ID NO: 1384811 - RNA, 19 nt, Artificial Sequence
  Description of Artificial Sequence: Synthetic oligonucleotide
  Antisense strand to SEQ ID NO: 1384810
cucaauacaugcuugacac

SEQ ID NO: 1384812 - RNA, 19 nt, Artificial Sequence
  Description of Artificial Sequence: Synthetic oligonucleotide
  Sense strand starting at position 2166 of SEQ ID NO: 1242959
gaaauauauugugccucag

SEQ ID NO: 1384813 - RNA, 19 nt, Artificial Sequence
  Description of Artificial Sequence: Synthetic oligonucleotide
  Antisense strand to SEQ ID NO: 1384812
cugaggcacaauauauuuc

SEQ ID NO: 1384814 - RNA, 19 nt, Artificial Sequence
  Description of Artificial Sequence: Synthetic oligonucleotide
  Sense strand starting at position 2189 of SEQ ID NO: 1242959
gguagugcaauggauagaa

SEQ ID NO: 1384815 - RNA, 19 nt, Artificial Sequence
  Description of Artificial Sequence: Synthetic oligonucleotide
  Antisense strand to SEQ ID NO: 1384814
uucuauccauugcacuacc

SEQ ID NO: 1384816 - RNA, 19 nt, Artificial Sequence
  Description of Artificial Sequence: Synthetic oligonucleotide
  Sense strand starting at position 2249 of SEQ ID NO: 1242959
aggacaagccuuuggucaa

SEQ ID NO: 1384817 - RNA, 19 nt, Artificial Sequence
  Description of Artificial Sequence: Synthetic oligonucleotide
  Antisense strand to SEQ ID NO: 1384816
uugaccaaaggcuuguccu

SEQ ID NO: 1384818 - RNA, 19 nt, Artificial Sequence
  Description of Artificial Sequence: Synthetic oligonucleotide
  Sense strand starting at position 2329 of SEQ ID NO: 1242959
aggccuauagaguaaggua

SEQ ID NO: 1384819 - RNA, 19 nt, Artificial Sequence
  Description of Artificial Sequence: Synthetic oligonucleotide
  Antisense strand to SEQ ID NO: 1384818
uaccuuacucuauaggccu

SEQ ID NO: 1384820 - RNA, 19 nt, Artificial Sequence
  Description of Artificial Sequence: Synthetic oligonucleotide
  Sense strand starting at position 2342 of SEQ ID NO: 1242959
aagguauuauuccuaggcu

SEQ ID NO: 1384821 - RNA, 19 nt, Artificial Sequence
  Description of Artificial Sequence: Synthetic oligonucleotide
  Antisense strand to SEQ ID NO: 1384820
agccuaggaauaauaccuu

SEQ ID NO: 1384822 - RNA, 19 nt, Artificial Sequence
  Description of Artificial Sequence: Synthetic oligonucleotide
  Sense strand starting at position 2841 of SEQ ID NO: 1242959
gccaacuuacagggauaau

SEQ ID NO: 1384823 - RNA, 19 nt, Artificial Sequence
  Description of Artificial Sequence: Synthetic oligonucleotide
  Antisense strand to SEQ ID NO: 1384822
auuaucccuguaaguuggc

SEQ ID NO: 1384824 - RNA, 19 nt, Artificial Sequence
  Description of Artificial Sequence: Synthetic oligonucleotide
  Sense strand starting at position 3308 of SEQ ID NO: 1242959
aguaacaaauuguuuggaa

SEQ ID NO: 1384825 - RNA, 19 nt, Artificial Sequence
  Description of Artificial Sequence: Synthetic oligonucleotide
  Antisense strand to SEQ ID NO: 1384824
uuccaaacaauuuguuacu

SEQ ID NO: 1384826 - RNA, 19 nt, Artificial Sequence
  Description of Artificial Sequence: Synthetic oligonucleotide
  Sense strand starting at position 3309 of SEQ ID NO: 1242959
guaacaaauuguuuggaac

SEQ ID NO: 1384827 - RNA, 19 nt, Artificial Sequence
  Description of Artificial Sequence: Synthetic oligonucleotide
  Antisense strand to SEQ ID NO: 1384826
guuccaaacaauuuguuac

SEQ ID NO: 1384828 - RNA, 19 nt, Artificial Sequence
  Description of Artificial Sequence: Synthetic oligonucleotide
  Sense strand starting at position 3365 of SEQ ID NO: 1242959
gugacacagugauuacuua

SEQ ID NO: 1384829 - RNA, 19 nt, Artificial Sequence
  Description of Artificial Sequence: Synthetic oligonucleotide
  Antisense strand to SEQ ID NO: 1384828
uaaguaaucacugugucac

SEQ ID NO: 1384830 - RNA, 19 nt, Artificial Sequence
  Description of Artificial Sequence: Synthetic oligonucleotide
  Sense strand starting at position 3843 of SEQ ID NO: 1242959
uuuccucaccaguauguaa

SEQ ID NO: 1384831 - RNA, 19 nt, Artificial Sequence
  Description of Artificial Sequence: Synthetic oligonucleotide
  Antisense strand to SEQ ID NO: 1384830
uuacauacuggugaggaaa

SEQ ID NO: 1384832 - RNA, 19 nt, Artificial Sequence
  Description of Artificial Sequence: Synthetic oligonucleotide
  Sense strand starting at position 3899 of SEQ ID NO: 1242959
gcuguaacucacuaacugu

SEQ ID NO: 1384833 - RNA, 19 nt, Artificial Sequence
  Description of Artificial Sequence: Synthetic oligonucleotide
  Antisense strand to SEQ ID NO: 1384832
acaguuagugaguuacagc

SEQ ID NO: 1384834 - RNA, 19 nt, Artificial Sequence
  Description of Artificial Sequence: Synthetic oligonucleotide
  Sense strand starting at position 3902 of SEQ ID NO: 1242959
guaacucacuaacuguaua

SEQ ID NO: 1384835 - RNA, 19 nt, Artificial Sequence
  Description of Artificial Sequence: Synthetic oligonucleotide
  Antisense strand to SEQ ID NO: 1384834
uauacaguuagugaguuac

SEQ ID NO: 1384836 - RNA, 19 nt, Artificial Sequence
  Description of Artificial Sequence: Synthetic oligonucleotide
  Sense strand starting at position 3916 of SEQ ID NO: 1242959
guauaaauggcauauguga

SEQ ID NO: 1384837 - RNA, 19 nt, Artificial Sequence
  Description of Artificial Sequence: Synthetic oligonucleotide
  Antisense strand to SEQ ID NO: 1384836
ucacauaugccauuuauac

SEQ ID NO: 1384838 - RNA, 19 nt, Artificial Sequence
  Description of Artificial Sequence: Synthetic oligonucleotide
  Sense strand starting at position 3923 of SEQ ID NO: 1242959
uggcauaugugacuauuaa

SEQ ID NO: 1384839 - RNA, 19 nt, Artificial Sequence
  Description of Artificial Sequence: Synthetic oligonucleotide
  Antisense strand to SEQ ID NO: 1384838
uuaauagucacauaugcca

SEQ ID NO: 1384840 - RNA, 19 nt, Artificial Sequence
  Description of Artificial Sequence: Synthetic oligonucleotide
  Sense strand starting at position 476 of SEQ ID NO: 1242960
gcgugcuucggcaggaaca

SEQ ID NO: 1384841 - RNA, 19 nt, Artificial Sequence
  Description of Artificial Sequence: Synthetic oligonucleotide
  Antisense strand to SEQ ID NO: 1384840
uguuccugccgaagcacgc

SEQ ID NO: 1384842 - RNA, 19 nt, Artificial Sequence
  Description of Artificial Sequence: Synthetic oligonucleotide
  Sense strand starting at position 559 of SEQ ID NO: 1242960
gugguuuaauccuuguaca

SEQ ID NO: 1384843 - RNA, 19 nt, Artificial Sequence
  Description of Artificial Sequence: Synthetic oligonucleotide
  Antisense strand to SEQ ID NO: 1384842
uguacaaggauuaaaccac

SEQ ID NO: 1384844 - RNA, 19 nt, Artificial Sequence
  Description of Artificial Sequence: Synthetic oligonucleotide
  Sense strand starting at position 560 of SEQ ID NO: 1242960
ugguuuaauccuuguacau

SEQ ID NO: 1384845 - RNA, 19 nt, Artificial Sequence
  Description of Artificial Sequence: Synthetic oligonucleotide
  Antisense strand to SEQ ID NO: 1384844
auguacaaggauuaaacca

SEQ ID NO: 1384846 - RNA, 19 nt, Artificial Sequence
  Description of Artificial Sequence: Synthetic oligonucleotide
  Sense strand starting at position 575 of SEQ ID NO: 1242960
acauccacucagugaugua

SEQ ID NO: 1384847 - RNA, 19 nt, Artificial Sequence
  Description of Artificial Sequence: Synthetic oligonucleotide
  Antisense strand to SEQ ID NO: 1384846
uacaucacugaguggaugu

SEQ ID NO: 1384848 - RNA, 19 nt, Artificial Sequence
  Description of Artificial Sequence: Synthetic oligonucleotide
  Sense strand starting at position 578 of SEQ ID NO: 1242960
uccacucagugauguaaga

SEQ ID NO: 1384849 - RNA, 19 nt, Artificial Sequence
  Description of Artificial Sequence: Synthetic oligonucleotide
  Antisense strand to SEQ ID NO: 1384848
ucuuacaucacugagugga

SEQ ID NO: 1384850 - RNA, 19 nt, Artificial Sequence
  Description of Artificial Sequence: Synthetic oligonucleotide
  Sense strand starting at position 593 of SEQ ID NO: 1242960
aagaaauaggguugucaac

SEQ ID NO: 1384851 - RNA, 19 nt, Artificial Sequence
  Description of Artificial Sequence: Synthetic oligonucleotide
  Antisense strand to SEQ ID NO: 1384850
guugacaacccuauuucuu

SEQ ID NO: 1384852 - RNA, 19 nt, Artificial Sequence
  Description of Artificial Sequence: Synthetic oligonucleotide
  Sense strand starting at position 679 of SEQ ID NO: 1242960
gguuaccagucuuguaucu

SEQ ID NO: 1384853 - RNA, 19 nt, Artificial Sequence
  Description of Artificial Sequence: Synthetic oligonucleotide
  Antisense strand to SEQ ID NO: 1384852
agauacaagacugguaacc

SEQ ID NO: 1384854 - RNA, 19 nt, Artificial Sequence
  Description of Artificial Sequence: Synthetic oligonucleotide
  Sense strand starting at position 681 of SEQ ID NO: 1242960
uuaccagucuuguaucuga

SEQ ID NO: 1384855 - RNA, 19 nt, Artificial Sequence
  Description of Artificial Sequence: Synthetic oligonucleotide
  Antisense strand to SEQ ID NO: 1384854
ucagauacaagacugguaa

SEQ ID NO: 1384856 - RNA, 19 nt, Artificial Sequence
  Description of Artificial Sequence: Synthetic oligonucleotide
  Sense strand starting at position 694 of SEQ ID NO: 1242960
aucugaucucccuguugca

SEQ ID NO: 1384857 - RNA, 19 nt, Artificial Sequence
  Description of Artificial Sequence: Synthetic oligonucleotide
  Antisense strand to SEQ ID NO: 1384856
ugcaacagggagaucagau

SEQ ID NO: 1384858 - RNA, 19 nt, Artificial Sequence
  Description of Artificial Sequence: Synthetic oligonucleotide
  Sense strand starting at position 697 of SEQ ID NO: 1242960
ugaucucccuguugcauua

SEQ ID NO: 1384859 - RNA, 19 nt, Artificial Sequence
  Description of Artificial Sequence: Synthetic oligonucleotide
  Antisense strand to SEQ ID NO: 1384858
uaaugcaacagggagauca

SEQ ID NO: 1384860 - RNA, 19 nt, Artificial Sequence
  Description of Artificial Sequence: Synthetic oligonucleotide
  Sense strand starting at position 707 of SEQ ID NO: 1242960
guugcauuauucgcauucu

SEQ ID NO: 1384861 - RNA, 19 nt, Artificial Sequence
  Description of Artificial Sequence: Synthetic oligonucleotide
  Antisense strand to SEQ ID NO: 1384860
agaaugcgaauaaugcaac

SEQ ID NO: 1384862 - RNA, 19 nt, Artificial Sequence
  Description of Artificial Sequence: Synthetic oligonucleotide
  Sense strand starting at position 708 of SEQ ID NO: 1242960
uugcauuauucgcauucuu

SEQ ID NO: 1384863 - RNA, 19 nt, Artificial Sequence
  Description of Artificial Sequence: Synthetic oligonucleotide
  Antisense strand to SEQ ID NO: 1384862
aagaaugcgaauaaugcaa

SEQ ID NO: 1384864 - RNA, 19 nt, Artificial Sequence
  Description of Artificial Sequence: Synthetic oligonucleotide
  Sense strand starting at position 1408 of SEQ ID NO: 1242960
aacugaaaucagugcaagu

SEQ ID NO: 1384865 - RNA, 19 nt, Artificial Sequence
  Description of Artificial Sequence: Synthetic oligonucleotide
  Antisense strand to SEQ ID NO: 1384864
acuugcacugauuucaguu

SEQ ID NO: 1384866 - RNA, 19 nt, Artificial Sequence
  Description of Artificial Sequence: Synthetic oligonucleotide
  Sense strand starting at position 1806 of SEQ ID NO: 1242960
ggauaagacucauggacau

SEQ ID NO: 1384867 - RNA, 19 nt, Artificial Sequence
  Description of Artificial Sequence: Synthetic oligonucleotide
  Antisense strand to SEQ ID NO: 1384866
auguccaugagucuuaucc

SEQ ID NO: 1384868 - RNA, 19 nt, Artificial Sequence
  Description of Artificial Sequence: Synthetic oligonucleotide
  Sense strand starting at position 1818 of SEQ ID NO: 1242960
uggacauagcuuuaauuau

SEQ ID NO: 1384869 - RNA, 19 nt, Artificial Sequence
  Description of Artificial Sequence: Synthetic oligonucleotide
  Antisense strand to SEQ ID NO: 1384868
auaauuaaagcuaugucca

SEQ ID NO: 1384870 - RNA, 19 nt, Artificial Sequence
  Description of Artificial Sequence: Synthetic oligonucleotide
  Sense strand starting at position 2440 of SEQ ID NO: 1242960
cgacacauacucgaugcau

SEQ ID NO: 1384871 - RNA, 19 nt, Artificial Sequence
  Description of Artificial Sequence: Synthetic oligonucleotide
  Antisense strand to SEQ ID NO: 1384870
augcaucgaguaugugucg

SEQ ID NO: 1384872 - RNA, 19 nt, Artificial Sequence
  Description of Artificial Sequence: Synthetic oligonucleotide
  Sense strand starting at position 2446 of SEQ ID NO: 1242960
auacucgaugcauagacaa

SEQ ID NO: 1384873 - RNA, 19 nt, Artificial Sequence
  Description of Artificial Sequence: Synthetic oligonucleotide
  Antisense strand to SEQ ID NO: 1384872
uugucuaugcaucgaguau

SEQ ID NO: 1384874 - RNA, 19 nt, Artificial Sequence
  Description of Artificial Sequence: Synthetic oligonucleotide
  Sense strand starting at position 2555 of SEQ ID NO: 1242960
gucccauucucguccucau

SEQ ID NO: 1384875 - RNA, 19 nt, Artificial Sequence
  Description of Artificial Sequence: Synthetic oligonucleotide
  Antisense strand to SEQ ID NO: 1384874
augaggacgagaaugggac

SEQ ID NO: 1384876 - RNA, 19 nt, Artificial Sequence
  Description of Artificial Sequence: Synthetic oligonucleotide
  Sense strand starting at position 2748 of SEQ ID NO: 1242960
ggcccaaauugcuuuccaa

SEQ ID NO: 1384877 - RNA, 19 nt, Artificial Sequence
  Description of Artificial Sequence: Synthetic oligonucleotide
  Antisense strand to SEQ ID NO: 1384876
uuggaaagcaauuugggcc

SEQ ID NO: 1384878 - RNA, 19 nt, Artificial Sequence
  Description of Artificial Sequence: Synthetic oligonucleotide
  Sense strand starting at position 3095 of SEQ ID NO: 1242960
uuauuugaauaggaguacu

SEQ ID NO: 1384879 - RNA, 19 nt, Artificial Sequence
  Description of Artificial Sequence: Synthetic oligonucleotide
  Antisense strand to SEQ ID NO: 1384878
aguacuccuauucaaauaa

SEQ ID NO: 1384880 - RNA, 19 nt, Artificial Sequence
  Description of Artificial Sequence: Synthetic oligonucleotide
  Sense strand starting at position 3174 of SEQ ID NO: 1242960
guuaccaaguuucuugaau

SEQ ID NO: 1384881 - RNA, 19 nt, Artificial Sequence
  Description of Artificial Sequence: Synthetic oligonucleotide
  Antisense strand to SEQ ID NO: 1384880
auucaagaaacuugguaac

SEQ ID NO: 1384882 - RNA, 19 nt, Artificial Sequence
  Description of Artificial Sequence: Synthetic oligonucleotide
  Sense strand starting at position 3188 of SEQ ID NO: 1242960
ugaauauccugccagagua

SEQ ID NO: 1384883 - RNA, 19 nt, Artificial Sequence
  Description of Artificial Sequence: Synthetic oligonucleotide
  Antisense strand to SEQ ID NO: 1384882
uacucuggcaggauauuca

SEQ ID NO: 1384884 - RNA, 19 nt, Artificial Sequence
  Description of Artificial Sequence: Synthetic oligonucleotide
  Sense strand starting at position 3200 of SEQ ID NO: 1242960
cagaguagauaacauguua

SEQ ID NO: 1384885 - RNA, 19 nt, Artificial Sequence
  Description of Artificial Sequence: Synthetic oligonucleotide
  Antisense strand to SEQ ID NO: 1384884
uaacauguuaucuacucug

SEQ ID NO: 1384886 - RNA, 19 nt, Artificial Sequence
  Description of Artificial Sequence: Synthetic oligonucleotide
  Sense strand starting at position 3330 of SEQ ID NO: 1242960
cuguuuaaagugugcaacu

SEQ ID NO: 1384887 - RNA, 19 nt, Artificial Sequence
  Description of Artificial Sequence: Synthetic oligonucleotide
  Antisense strand to SEQ ID NO: 1384886
aguugcacacuuuaaacag

SEQ ID NO: 1384888 - RNA, 19 nt, Artificial Sequence
  Description of Artificial Sequence: Synthetic oligonucleotide
  Sense strand starting at position 3332 of SEQ ID NO: 1242960
guuuaaagugugcaacuca

SEQ ID NO: 1384889 - RNA, 19 nt, Artificial Sequence
  Description of Artificial Sequence: Synthetic oligonucleotide
  Antisense strand to SEQ ID NO: 1384888
ugaguugcacacuuuaaac

SEQ ID NO: 1384890 - RNA, 19 nt, Artificial Sequence
  Description of Artificial Sequence: Synthetic oligonucleotide
  Sense strand starting at position 3347 of SEQ ID NO: 1242960
cucacugguuucuagugua

SEQ ID NO: 1384891 - RNA, 19 nt, Artificial Sequence
  Description of Artificial Sequence: Synthetic oligonucleotide
  Antisense strand to SEQ ID NO: 1384890
uacacuagaaaccagugag

SEQ ID NO: 1384892 - RNA, 19 nt, Artificial Sequence
  Description of Artificial Sequence: Synthetic oligonucleotide
  Sense strand starting at position 3469 of SEQ ID NO: 1242960
gcacuuuaguuggaccaaa

SEQ ID NO: 1384893 - RNA, 19 nt, Artificial Sequence
  Description of Artificial Sequence: Synthetic oligonucleotide
  Antisense strand to SEQ ID NO: 1384892
uuugguccaacuaaagugc

SEQ ID NO: 1384894 - RNA, 19 nt, Artificial Sequence
  Description of Artificial Sequence: Synthetic oligonucleotide
  Sense strand starting at position 3736 of SEQ ID NO: 1242960
ccaugaacccgugaacagu

SEQ ID NO: 1384895 - RNA, 19 nt, Artificial Sequence
  Description of Artificial Sequence: Synthetic oligonucleotide
  Antisense strand to SEQ ID NO: 1384894
acuguucacggguucaugg

SEQ ID NO: 1384896 - RNA, 19 nt, Artificial Sequence
  Description of Artificial Sequence: Synthetic oligonucleotide
  Sense strand starting at position 3821 of SEQ ID NO: 1242960
auuugucuauucgggacau

SEQ ID NO: 1384897 - RNA, 19 nt, Artificial Sequence
  Description of Artificial Sequence: Synthetic oligonucleotide
  Antisense strand to SEQ ID NO: 1384896
augucccgaauagacaaau

SEQ ID NO: 1384898 - RNA, 19 nt, Artificial Sequence
  Description of Artificial Sequence: Synthetic oligonucleotide
  Sense strand starting at position 3822 of SEQ ID NO: 1242960
uuugucuauucgggacauu

SEQ ID NO: 1384899 - RNA, 19 nt, Artificial Sequence
  Description of Artificial Sequence: Synthetic oligonucleotide
  Antisense strand to SEQ ID NO: 1384898
aaugucccgaauagacaaa

SEQ ID NO: 1384900 - RNA, 19 nt, Artificial Sequence
  Description of Artificial Sequence: Synthetic oligonucleotide
  Sense strand starting at position 122 of SEQ ID NO: 1242961
agaagagaagugugcucau

SEQ ID NO: 1384901 - RNA, 19 nt, Artificial Sequence
  Description of Artificial Sequence: Synthetic oligonucleotide
  Antisense strand to SEQ ID NO: 1384900
augagcacacuucucuucu

SEQ ID NO: 1384902 - RNA, 19 nt, Artificial Sequence
  Description of Artificial Sequence: Synthetic oligonucleotide
  Sense strand starting at position 228 of SEQ ID NO: 1242961
gggccuggaaucgacuauu

SEQ ID NO: 1384903 - RNA, 19 nt, Artificial Sequence
  Description of Artificial Sequence: Synthetic oligonucleotide
  Antisense strand to SEQ ID NO: 1384902
aauagucgauuccaggccc

SEQ ID NO: 1384904 - RNA, 19 nt, Artificial Sequence
  Description of Artificial Sequence: Synthetic oligonucleotide
  Sense strand starting at position 231 of SEQ ID NO: 1242961
ccuggaaucgacuauuguu

SEQ ID NO: 1384905 - RNA, 19 nt, Artificial Sequence
  Description of Artificial Sequence: Synthetic oligonucleotide
  Antisense strand to SEQ ID NO: 1384904
aacaauagucgauuccagg

SEQ ID NO: 1384906 - RNA, 19 nt, Artificial Sequence
  Description of Artificial Sequence: Synthetic oligonucleotide
  Sense strand starting at position 238 of SEQ ID NO: 1242961
ucgacuauuguugggacaa

SEQ ID NO: 1384907 - RNA, 19 nt, Artificial Sequence
  Description of Artificial Sequence: Synthetic oligonucleotide
  Antisense strand to SEQ ID NO: 1384906
uugucccaacaauagucga

SEQ ID NO: 1384908 - RNA, 19 nt, Artificial Sequence
  Description of Artificial Sequence: Synthetic oligonucleotide
  Sense strand starting at position 369 of SEQ ID NO: 1242961
agaugaggauucuuuaguu

SEQ ID NO: 1384909 - RNA, 19 nt, Artificial Sequence
  Description of Artificial Sequence: Synthetic oligonucleotide
  Antisense strand to SEQ ID NO: 1384908
aacuaaagaauccucaucu

SEQ ID NO: 1384910 - RNA, 19 nt, Artificial Sequence
  Description of Artificial Sequence: Synthetic oligonucleotide
  Sense strand starting at position 373 of SEQ ID NO: 1242961
gaggauucuuuaguuccau

SEQ ID NO: 1384911 - RNA, 19 nt, Artificial Sequence
  Description of Artificial Sequence: Synthetic oligonucleotide
  Antisense strand to SEQ ID NO: 1384910
auggaacuaaagaauccuc

SEQ ID NO: 1384912 - RNA, 19 nt, Artificial Sequence
  Description of Artificial Sequence: Synthetic oligonucleotide
  Sense strand starting at position 374 of SEQ ID NO: 1242961
aggauucuuuaguuccaua

SEQ ID NO: 1384913 - RNA, 19 nt, Artificial Sequence
  Description of Artificial Sequence: Synthetic oligonucleotide
  Antisense strand to SEQ ID NO: 1384912
uauggaacuaaagaauccu

SEQ ID NO: 1384914 - RNA, 19 nt, Artificial Sequence
  Description of Artificial Sequence: Synthetic oligonucleotide
  Sense strand starting at position 379 of SEQ ID NO: 1242961
ucuuuaguuccauaagcag

SEQ ID NO: 1384915 - RNA, 19 nt, Artificial Sequence
  Description of Artificial Sequence: Synthetic oligonucleotide
  Antisense strand to SEQ ID NO: 1384914
cugcuuauggaacuaaaga

SEQ ID NO: 1384916 - RNA, 19 nt, Artificial Sequence
  Description of Artificial Sequence: Synthetic oligonucleotide
  Sense strand starting at position 413 of SEQ ID NO: 1242961
gggugaaguccugagugaa

SEQ ID NO: 1384917 - RNA, 19 nt, Artificial Sequence
  Description of Artificial Sequence: Synthetic oligonucleotide
  Antisense strand to SEQ ID NO: 1384916
uucacucaggacuucaccc

SEQ ID NO: 1384918 - RNA, 19 nt, Artificial Sequence
  Description of Artificial Sequence: Synthetic oligonucleotide
  Sense strand starting at position 416 of SEQ ID NO: 1242961
ugaaguccugagugaauuc

SEQ ID NO: 1384919 - RNA, 19 nt, Artificial Sequence
  Description of Artificial Sequence: Synthetic oligonucleotide
  Antisense strand to SEQ ID NO: 1384918
gaauucacucaggacuuca

SEQ ID NO: 1384920 - RNA, 19 nt, Artificial Sequence
  Description of Artificial Sequence: Synthetic oligonucleotide
  Sense strand starting at position 491 of SEQ ID NO: 1242961
cagggcuggcuuuaacuaa

SEQ ID NO: 1384921 - RNA, 19 nt, Artificial Sequence
  Description of Artificial Sequence: Synthetic oligonucleotide
  Antisense strand to SEQ ID NO: 1384920
uuaguuaaagccagcccug

SEQ ID NO: 1384922 - RNA, 19 nt, Artificial Sequence
  Description of Artificial Sequence: Synthetic oligonucleotide
  Sense strand starting at position 507 of SEQ ID NO: 1242961
uaaugaaaccuugggucau

SEQ ID NO: 1384923 - RNA, 19 nt, Artificial Sequence
  Description of Artificial Sequence: Synthetic oligonucleotide
  Antisense strand to SEQ ID NO: 1384922
augacccaagguuucauua

SEQ ID NO: 1384924 - RNA, 19 nt, Artificial Sequence
  Description of Artificial Sequence: Synthetic oligonucleotide
  Sense strand starting at position 517 of SEQ ID NO: 1242961
uugggucaucccuagguua

SEQ ID NO: 1384925 - RNA, 19 nt, Artificial Sequence
  Description of Artificial Sequence: Synthetic oligonucleotide
  Antisense strand to SEQ ID NO: 1384924
uaaccuagggaugacccaa

SEQ ID NO: 1384926 - RNA, 19 nt, Artificial Sequence
  Description of Artificial Sequence: Synthetic oligonucleotide
  Sense strand starting at position 528 of SEQ ID NO: 1242961
cuagguuaccaucaagcaa

SEQ ID NO: 1384927 - RNA, 19 nt, Artificial Sequence
  Description of Artificial Sequence: Synthetic oligonucleotide
  Antisense strand to SEQ ID NO: 1384926
uugcuugaugguaaccuag

SEQ ID NO: 1384928 - RNA, 19 nt, Artificial Sequence
  Description of Artificial Sequence: Synthetic oligonucleotide
  Sense strand starting at position 710 of SEQ ID NO: 1242961
aggugauuaagaugcauau

SEQ ID NO: 1384929 - RNA, 19 nt, Artificial Sequence
  Description of Artificial Sequence: Synthetic oligonucleotide
  Antisense strand to SEQ ID NO: 1384928
auaugcaucuuaaucaccu

SEQ ID NO: 1384930 - RNA, 19 nt, Artificial Sequence
  Description of Artificial Sequence: Synthetic oligonucleotide
  Sense strand starting at position 720 of SEQ ID NO: 1242961
gaugcauaugcagaacugu

SEQ ID NO: 1384931 - RNA, 19 nt, Artificial Sequence
  Description of Artificial Sequence: Synthetic oligonucleotide
  Antisense strand to SEQ ID NO: 1384930
acaguucugcauaugcauc

SEQ ID NO: 1384932 - RNA, 19 nt, Artificial Sequence
  Description of Artificial Sequence: Synthetic oligonucleotide
  Sense strand starting at position 1044 of SEQ ID NO: 1242961
gucugacagaccuggguau

SEQ ID NO: 1384933 - RNA, 19 nt, Artificial Sequence
  Description of Artificial Sequence: Synthetic oligonucleotide
  Antisense strand to SEQ ID NO: 1384932
auacccaggucugucagac

SEQ ID NO: 1384934 - RNA, 19 nt, Artificial Sequence
  Description of Artificial Sequence: Synthetic oligonucleotide
  Sense strand starting at position 1045 of SEQ ID NO: 1242961
ucugacagaccuggguaua

SEQ ID NO: 1384935 - RNA, 19 nt, Artificial Sequence
  Description of Artificial Sequence: Synthetic oligonucleotide
  Antisense strand to SEQ ID NO: 1384934
uauacccaggucugucaga

SEQ ID NO: 1384936 - RNA, 19 nt, Artificial Sequence
  Description of Artificial Sequence: Synthetic oligonucleotide
  Sense strand starting at position 1090 of SEQ ID NO: 1242961
ucucacuggcucugaagaa

SEQ ID NO: 1384937 - RNA, 19 nt, Artificial Sequence
  Description of Artificial Sequence: Synthetic oligonucleotide
  Antisense strand to SEQ ID NO: 1384936
uucuucagagccagugaga

SEQ ID NO: 1384938 - RNA, 19 nt, Artificial Sequence
  Description of Artificial Sequence: Synthetic oligonucleotide
  Sense strand starting at position 1147 of SEQ ID NO: 1242961
gagagcuaauggucaaguu

SEQ ID NO: 1384939 - RNA, 19 nt, Artificial Sequence
  Description of Artificial Sequence: Synthetic oligonucleotide
  Antisense strand to SEQ ID NO: 1384938
aacuugaccauuagcucuc

SEQ ID NO: 1384940 - RNA, 19 nt, Artificial Sequence
  Description of Artificial Sequence: Synthetic oligonucleotide
  Sense strand starting at position 1242 of SEQ ID NO: 1242961
gugagauuaguauaguguc

SEQ ID NO: 1384941 - RNA, 19 nt, Artificial Sequence
  Description of Artificial Sequence: Synthetic oligonucleotide
  Antisense strand to SEQ ID NO: 1384940
gacacuauacuaaucucac

SEQ ID NO: 1384942 - RNA, 19 nt, Artificial Sequence
  Description of Artificial Sequence: Synthetic oligonucleotide
  Sense strand starting at position 1250 of SEQ ID NO: 1242961
aguauagugucaccacaga

SEQ ID NO: 1384943 - RNA, 19 nt, Artificial Sequence
  Description of Artificial Sequence: Synthetic oligonucleotide
  Antisense strand to SEQ ID NO: 1384942
ucuguggugacacuauacu

SEQ ID NO: 1384944 - RNA, 19 nt, Artificial Sequence
  Description of Artificial Sequence: Synthetic oligonucleotide
  Sense strand starting at position 1323 of SEQ ID NO: 1242961
ugcauuuaugcaugcagua

SEQ ID NO: 1384945 - RNA, 19 nt, Artificial Sequence
  Description of Artificial Sequence: Synthetic oligonucleotide
  Antisense strand to SEQ ID NO: 1384944
uacugcaugcauaaaugca

SEQ ID NO: 1384946 - RNA, 19 nt, Artificial Sequence
  Description of Artificial Sequence: Synthetic oligonucleotide
  Sense strand starting at position 2037 of SEQ ID NO: 1242961
cugccauaguaacugaaga

SEQ ID NO: 1384947 - RNA, 19 nt, Artificial Sequence
  Description of Artificial Sequence: Synthetic oligonucleotide
  Antisense strand to SEQ ID NO: 1384946
ucuucaguuacuauggcag

SEQ ID NO: 1384948 - RNA, 19 nt, Artificial Sequence
  Description of Artificial Sequence: Synthetic oligonucleotide
  Sense strand starting at position 2060 of SEQ ID NO: 1242961
uagacuaaacugugucaag

SEQ ID NO: 1384949 - RNA, 19 nt, Artificial Sequence
  Description of Artificial Sequence: Synthetic oligonucleotide
  Antisense strand to SEQ ID NO: 1384948
cuugacacaguuuagucua

SEQ ID NO: 1384950 - RNA, 19 nt, Artificial Sequence
  Description of Artificial Sequence: Synthetic oligonucleotide
  Sense strand starting at position 2071 of SEQ ID NO: 1242961
gugucaagcauguauugag

SEQ ID NO: 1384951 - RNA, 19 nt, Artificial Sequence
  Description of Artificial Sequence: Synthetic oligonucleotide
  Antisense strand to SEQ ID NO: 1384950
cucaauacaugcuugacac

SEQ ID NO: 1384952 - RNA, 19 nt, Artificial Sequence
  Description of Artificial Sequence: Synthetic oligonucleotide
  Sense strand starting at position 2127 of SEQ ID NO: 1242961
gaaauauauugugccucag

SEQ ID NO: 1384953 - RNA, 19 nt, Artificial Sequence
  Description of Artificial Sequence: Synthetic oligonucleotide
  Antisense strand to SEQ ID NO: 1384952
cugaggcacaauauauuuc

SEQ ID NO: 1384954 - RNA, 19 nt, Artificial Sequence
  Description of Artificial Sequence: Synthetic oligonucleotide
  Sense strand starting at position 2150 of SEQ ID NO: 1242961
gguagugcaauggauagaa

SEQ ID NO: 1384955 - RNA, 19 nt, Artificial Sequence
  Description of Artificial Sequence: Synthetic oligonucleotide
  Antisense strand to SEQ ID NO: 1384954
uucuauccauugcacuacc

SEQ ID NO: 1384956 - RNA, 19 nt, Artificial Sequence
  Description of Artificial Sequence: Synthetic oligonucleotide
  Sense strand starting at position 2210 of SEQ ID NO: 1242961
aggacaagccuuuggucaa

SEQ ID NO: 1384957 - RNA, 19 nt, Artificial Sequence
  Description of Artificial Sequence: Synthetic oligonucleotide
  Antisense strand to SEQ ID NO: 1384956
uugaccaaaggcuuguccu

SEQ ID NO: 1384958 - RNA, 19 nt, Artificial Sequence
  Description of Artificial Sequence: Synthetic oligonucleotide
  Sense strand starting at position 2290 of SEQ ID NO: 1242961
aggccuauagaguaaggua

SEQ ID NO: 1384959 - RNA, 19 nt, Artificial Sequence
  Description of Artificial Sequence: Synthetic oligonucleotide
  Antisense strand to SEQ ID NO: 1384958
uaccuuacucuauaggccu

SEQ ID NO: 1384960 - RNA, 19 nt, Artificial Sequence
  Description of Artificial Sequence: Synthetic oligonucleotide
  Sense strand starting at position 2303 of SEQ ID NO: 1242961
aagguauuauuccuaggcu

SEQ ID NO: 1384961 - RNA, 19 nt, Artificial Sequence
  Description of Artificial Sequence: Synthetic oligonucleotide
  Antisense strand to SEQ ID NO: 1384960
agccuaggaauaauaccuu

SEQ ID NO: 1384962 - RNA, 19 nt, Artificial Sequence
  Description of Artificial Sequence: Synthetic oligonucleotide
  Sense strand starting at position 2802 of SEQ ID NO: 1242961
gccaacuuacagggauaau

SEQ ID NO: 1384963 - RNA, 19 nt, Artificial Sequence
  Description of Artificial Sequence: Synthetic oligonucleotide
  Antisense strand to SEQ ID NO: 1384962
auuaucccuguaaguuggc

SEQ ID NO: 1384964 - RNA, 19 nt, Artificial Sequence
  Description of Artificial Sequence: Synthetic oligonucleotide
  Sense strand starting at position 3269 of SEQ ID NO: 1242961
aguaacaaauuguuuggaa

SEQ ID NO: 1384965 - RNA, 19 nt, Artificial Sequence
  Description of Artificial Sequence: Synthetic oligonucleotide
  Antisense strand to SEQ ID NO: 1384964
uuccaaacaauuuguuacu

SEQ ID NO: 1384966 - RNA, 19 nt, Artificial Sequence
  Description of Artificial Sequence: Synthetic oligonucleotide
  Sense strand starting at position 3270 of SEQ ID NO: 1242961
guaacaaauuguuuggaac

SEQ ID NO: 1384967 - RNA, 19 nt, Artificial Sequence
  Description of Artificial Sequence: Synthetic oligonucleotide
  Antisense strand to SEQ ID NO: 1384966
guuccaaacaauuuguuac

SEQ ID NO: 1384968 - RNA, 19 nt, Artificial Sequence
  Description of Artificial Sequence: Synthetic oligonucleotide
  Sense strand starting at position 3326 of SEQ ID NO: 1242961
gugacacagugauuacuua

SEQ ID NO: 1384969 - RNA, 19 nt, Artificial Sequence
  Description of Artificial Sequence: Synthetic oligonucleotide
  Antisense strand to SEQ ID NO: 1384968
uaaguaaucacugugucac

SEQ ID NO: 1384970 - RNA, 19 nt, Artificial Sequence
  Description of Artificial Sequence: Synthetic oligonucleotide
  Sense strand starting at position 3804 of SEQ ID NO: 1242961
uuuccucaccaguauguaa

SEQ ID NO: 1384971 - RNA, 19 nt, Artificial Sequence
  Description of Artificial Sequence: Synthetic oligonucleotide
  Antisense strand to SEQ ID NO: 1384970
uuacauacuggugaggaaa

SEQ ID NO: 1384972 - RNA, 19 nt, Artificial Sequence
  Description of Artificial Sequence: Synthetic oligonucleotide
  Sense strand starting at position 3863 of SEQ ID NO: 1242961
guaacucacuaacuguaua

SEQ ID NO: 1384973 - RNA, 19 nt, Artificial Sequence
  Description of Artificial Sequence: Synthetic oligonucleotide
  Antisense strand to SEQ ID NO: 1384972
uauacaguuagugaguuac

SEQ ID NO: 1384974 - RNA, 19 nt, Artificial Sequence
  Description of Artificial Sequence: Synthetic oligonucleotide
  Sense strand starting at position 3877 of SEQ ID NO: 1242961
guauaaauggcauauguga

SEQ ID NO: 1384975 - RNA, 19 nt, Artificial Sequence
  Description of Artificial Sequence: Synthetic oligonucleotide
  Antisense strand to SEQ ID NO: 1384974
ucacauaugccauuuauac

SEQ ID NO: 1384976 - RNA, 19 nt, Artificial Sequence
  Description of Artificial Sequence: Synthetic oligonucleotide
  Sense strand starting at position 3884 of SEQ ID NO: 1242961
uggcauaugugacuauuaa

SEQ ID NO: 1384977 - RNA, 19 nt, Artificial Sequence
  Description of Artificial Sequence: Synthetic oligonucleotide
  Antisense strand to SEQ ID NO: 1384976
uuaauagucacauaugcca

SEQ ID NO: 1384978 - RNA, 19 nt, Artificial Sequence
  Description of Artificial Sequence: Synthetic oligonucleotide
  Sense strand starting at position 3964 of SEQ ID NO: 1242961
ccuccaucugaaugaaagu

SEQ ID NO: 1384979 - RNA, 19 nt, Artificial Sequence
  Description of Artificial Sequence: Synthetic oligonucleotide
  Antisense strand to SEQ ID NO: 1384978
acuuucauucagauggagg

SEQ ID NO: 1384980 - RNA, 19 nt, Artificial Sequence
  Description of Artificial Sequence: Synthetic oligonucleotide
  Sense strand starting at position 129 of SEQ ID NO: 1242962
cgcucugagcacuaguuua

SEQ ID NO: 1384981 - RNA, 19 nt, Artificial Sequence
  Description of Artificial Sequence: Synthetic oligonucleotide
  Antisense strand to SEQ ID NO: 1384980
uaaacuagugcucagagcg

SEQ ID NO: 1384982 - RNA, 19 nt, Artificial Sequence
  Description of Artificial Sequence: Synthetic oligonucleotide
  Sense strand starting at position 143 of SEQ ID NO: 1242962
guuuaaacuccugguccca

SEQ ID NO: 1384983 - RNA, 19 nt, Artificial Sequence
  Description of Artificial Sequence: Synthetic oligonucleotide
  Antisense strand to SEQ ID NO: 1384982
ugggaccaggaguuuaaac

SEQ ID NO: 1384984 - RNA, 19 nt, Artificial Sequence
  Description of Artificial Sequence: Synthetic oligonucleotide
  Sense strand starting at position 187 of SEQ ID NO: 1242962
aucacuguuccauggauga

SEQ ID NO: 1384985 - RNA, 19 nt, Artificial Sequence
  Description of Artificial Sequence: Synthetic oligonucleotide
  Antisense strand to SEQ ID NO: 1384984
ucauccauggaacagugau

SEQ ID NO: 1384986 - RNA, 19 nt, Artificial Sequence
  Description of Artificial Sequence: Synthetic oligonucleotide
  Sense strand starting at position 205 of SEQ ID NO: 1242962
aagggcuguuucuuugaga

SEQ ID NO: 1384987 - RNA, 19 nt, Artificial Sequence
  Description of Artificial Sequence: Synthetic oligonucleotide
  Antisense strand to SEQ ID NO: 1384986
ucucaaagaaacagcccuu

SEQ ID NO: 1384988 - RNA, 19 nt, Artificial Sequence
  Description of Artificial Sequence: Synthetic oligonucleotide
  Sense strand starting at position 206 of SEQ ID NO: 1242962
agggcuguuucuuugagac

SEQ ID NO: 1384989 - RNA, 19 nt, Artificial Sequence
  Description of Artificial Sequence: Synthetic oligonucleotide
  Antisense strand to SEQ ID NO: 1384988
gucucaaagaaacagcccu

SEQ ID NO: 1384990 - RNA, 19 nt, Artificial Sequence
  Description of Artificial Sequence: Synthetic oligonucleotide
  Sense strand starting at position 474 of SEQ ID NO: 1242962
gauuacagccguugaguca

SEQ ID NO: 1384991 - RNA, 19 nt, Artificial Sequence
  Description of Artificial Sequence: Synthetic oligonucleotide
  Antisense strand to SEQ ID NO: 1384990
ugacucaacggcuguaauc

SEQ ID NO: 1384992 - RNA, 19 nt, Artificial Sequence
  Description of Artificial Sequence: Synthetic oligonucleotide
  Sense strand starting at position 506 of SEQ ID NO: 1242962
cggguaauuauuugguuac

SEQ ID NO: 1384993 - RNA, 19 nt, Artificial Sequence
  Description of Artificial Sequence: Synthetic oligonucleotide
  Antisense strand to SEQ ID NO: 1384992
guaaccaaauaauuacccg

SEQ ID NO: 1384994 - RNA, 19 nt, Artificial Sequence
  Description of Artificial Sequence: Synthetic oligonucleotide
  Sense strand starting at position 507 of SEQ ID NO: 1242962
ggguaauuauuugguuaca

SEQ ID NO: 1384995 - RNA, 19 nt, Artificial Sequence
  Description of Artificial Sequence: Synthetic oligonucleotide
  Antisense strand to SEQ ID NO: 1384994
uguaaccaaauaauuaccc

SEQ ID NO: 1384996 - RNA, 19 nt, Artificial Sequence
  Description of Artificial Sequence: Synthetic oligonucleotide
  Sense strand starting at position 519 of SEQ ID NO: 1242962
gguuacaaguauuacugaa

SEQ ID NO: 1384997 - RNA, 19 nt, Artificial Sequence
  Description of Artificial Sequence: Synthetic oligonucleotide
  Antisense strand to SEQ ID NO: 1384996
uucaguaauacuuguaacc

SEQ ID NO: 1384998 - RNA, 19 nt, Artificial Sequence
  Description of Artificial Sequence: Synthetic oligonucleotide
  Sense strand starting at position 969 of SEQ ID NO: 1242962
gcaauauaguauuggucuu

SEQ ID NO: 1384999 - RNA, 19 nt, Artificial Sequence
  Description of Artificial Sequence: Synthetic oligonucleotide
  Antisense strand to SEQ ID NO: 1384998
aagaccaauacuauauugc

SEQ ID NO: 1385000 - RNA, 19 nt, Artificial Sequence
  Description of Artificial Sequence: Synthetic oligonucleotide
  Sense strand starting at position 975 of SEQ ID NO: 1242962
uaguauuggucuuaacagu

SEQ ID NO: 1385001 - RNA, 19 nt, Artificial Sequence
  Description of Artificial Sequence: Synthetic oligonucleotide
  Antisense strand to SEQ ID NO: 1385000
acuguuaagaccaauacua

SEQ ID NO: 1385002 - RNA, 19 nt, Artificial Sequence
  Description of Artificial Sequence: Synthetic oligonucleotide
  Sense strand starting at position 982 of SEQ ID NO: 1242962
ggucuuaacagucauggca

SEQ ID NO: 1385003 - RNA, 19 nt, Artificial Sequence
  Description of Artificial Sequence: Synthetic oligonucleotide
  Antisense strand to SEQ ID NO: 1385002
ugccaugacuguuaagacc

SEQ ID NO: 1385004 - RNA, 19 nt, Artificial Sequence
  Description of Artificial Sequence: Synthetic oligonucleotide
  Sense strand starting at position 984 of SEQ ID NO: 1242962
ucuuaacagucauggcaca

SEQ ID NO: 1385005 - RNA, 19 nt, Artificial Sequence
  Description of Artificial Sequence: Synthetic oligonucleotide
  Antisense strand to SEQ ID NO: 1385004
ugugccaugacuguuaaga

SEQ ID NO: 1385006 - RNA, 19 nt, Artificial Sequence
  Description of Artificial Sequence: Synthetic oligonucleotide
  Sense strand starting at position 989 of SEQ ID NO: 1242962
acagucauggcacacauau

SEQ ID NO: 1385007 - RNA, 19 nt, Artificial Sequence
  Description of Artificial Sequence: Synthetic oligonucleotide
  Antisense strand to SEQ ID NO: 1385006
auaugugugccaugacugu

SEQ ID NO: 1385008 - RNA, 19 nt, Artificial Sequence
  Description of Artificial Sequence: Synthetic oligonucleotide
  Sense strand starting at position 1093 of SEQ ID NO: 1242962
augcaaguuuacugcucaa

SEQ ID NO: 1385009 - RNA, 19 nt, Artificial Sequence
  Description of Artificial Sequence: Synthetic oligonucleotide
  Antisense strand to SEQ ID NO: 1385008
uugagcaguaaacuugcau

SEQ ID NO: 1385010 - RNA, 19 nt, Artificial Sequence
  Description of Artificial Sequence: Synthetic oligonucleotide
  Sense strand starting at position 1096 of SEQ ID NO: 1242962
caaguuuacugcucaagug

SEQ ID NO: 1385011 - RNA, 19 nt, Artificial Sequence
  Description of Artificial Sequence: Synthetic oligonucleotide
  Antisense strand to SEQ ID NO: 1385010
cacuugagcaguaaacuug

SEQ ID NO: 1385012 - RNA, 19 nt, Artificial Sequence
  Description of Artificial Sequence: Synthetic oligonucleotide
  Sense strand starting at position 1207 of SEQ ID NO: 1242962
ugcucaguguuccuggcua

SEQ ID NO: 1385013 - RNA, 19 nt, Artificial Sequence
  Description of Artificial Sequence: Synthetic oligonucleotide
  Antisense strand to SEQ ID NO: 1385012
uagccaggaacacugagca

SEQ ID NO: 1385014 - RNA, 19 nt, Artificial Sequence
  Description of Artificial Sequence: Synthetic oligonucleotide
  Sense strand starting at position 1209 of SEQ ID NO: 1242962
cucaguguuccuggcuauu

SEQ ID NO: 1385015 - RNA, 19 nt, Artificial Sequence
  Description of Artificial Sequence: Synthetic oligonucleotide
  Antisense strand to SEQ ID NO: 1385014
aauagccaggaacacugag

SEQ ID NO: 1385016 - RNA, 19 nt, Artificial Sequence
  Description of Artificial Sequence: Synthetic oligonucleotide
  Sense strand starting at position 1211 of SEQ ID NO: 1242962
caguguuccuggcuauuaa

SEQ ID NO: 1385017 - RNA, 19 nt, Artificial Sequence
  Description of Artificial Sequence: Synthetic oligonucleotide
  Antisense strand to SEQ ID NO: 1385016
uuaauagccaggaacacug

SEQ ID NO: 1385018 - RNA, 19 nt, Artificial Sequence
  Description of Artificial Sequence: Synthetic oligonucleotide
  Sense strand starting at position 1212 of SEQ ID NO: 1242962
aguguuccuggcuauuaaa

SEQ ID NO: 1385019 - RNA, 19 nt, Artificial Sequence
  Description of Artificial Sequence: Synthetic oligonucleotide
  Antisense strand to SEQ ID NO: 1385018
uuuaauagccaggaacacu

SEQ ID NO: 1385020 - RNA, 19 nt, Artificial Sequence
  Description of Artificial Sequence: Synthetic oligonucleotide
  Sense strand starting at position 1221 of SEQ ID NO: 1242962
ggcuauuaaagcugaguca

SEQ ID NO: 1385021 - RNA, 19 nt, Artificial Sequence
  Description of Artificial Sequence: Synthetic oligonucleotide
  Antisense strand to SEQ ID NO: 1385020
ugacucagcuuuaauagcc

SEQ ID NO: 1385022 - RNA, 19 nt, Artificial Sequence
  Description of Artificial Sequence: Synthetic oligonucleotide
  Sense strand starting at position 1228 of SEQ ID NO: 1242962
aaagcugagucaggauauc

SEQ ID NO: 1385023 - RNA, 19 nt, Artificial Sequence
  Description of Artificial Sequence: Synthetic oligonucleotide
  Antisense strand to SEQ ID NO: 1385022
gauauccugacucagcuuu

SEQ ID NO: 1385024 - RNA, 19 nt, Artificial Sequence
  Description of Artificial Sequence: Synthetic oligonucleotide
  Sense strand starting at position 1237 of SEQ ID NO: 1242962
ucaggauaucuucguccca

SEQ ID NO: 1385025 - RNA, 19 nt, Artificial Sequence
  Description of Artificial Sequence: Synthetic oligonucleotide
  Antisense strand to SEQ ID NO: 1385024
ugggacgaagauauccuga

SEQ ID NO: 1385026 - RNA, 19 nt, Artificial Sequence
  Description of Artificial Sequence: Synthetic oligonucleotide
  Sense strand starting at position 1238 of SEQ ID NO: 1242962
caggauaucuucgucccaa

SEQ ID NO: 1385027 - RNA, 19 nt, Artificial Sequence
  Description of Artificial Sequence: Synthetic oligonucleotide
  Antisense strand to SEQ ID NO: 1385026
uugggacgaagauauccug

SEQ ID NO: 1385028 - RNA, 19 nt, Artificial Sequence
  Description of Artificial Sequence: Synthetic oligonucleotide
  Sense strand starting at position 1239 of SEQ ID NO: 1242962
aggauaucuucgucccaau

SEQ ID NO: 1385029 - RNA, 19 nt, Artificial Sequence
  Description of Artificial Sequence: Synthetic oligonucleotide
  Antisense strand to SEQ ID NO: 1385028
auugggacgaagauauccu

SEQ ID NO: 1385030 - RNA, 19 nt, Artificial Sequence
  Description of Artificial Sequence: Synthetic oligonucleotide
  Sense strand starting at position 1292 of SEQ ID NO: 1242962
uccaccuucccaggagaua

SEQ ID NO: 1385031 - RNA, 19 nt, Artificial Sequence
  Description of Artificial Sequence: Synthetic oligonucleotide
  Antisense strand to SEQ ID NO: 1385030
uaucuccugggaaggugga

SEQ ID NO: 1385032 - RNA, 19 nt, Artificial Sequence
  Description of Artificial Sequence: Synthetic oligonucleotide
  Sense strand starting at position 2358 of SEQ ID NO: 1242962
aaacgacaguccuuagauc

SEQ ID NO: 1385033 - RNA, 19 nt, Artificial Sequence
  Description of Artificial Sequence: Synthetic oligonucleotide
  Antisense strand to SEQ ID NO: 1385032
gaucuaaggacugucguuu

SEQ ID NO: 1385034 - RNA, 19 nt, Artificial Sequence
  Description of Artificial Sequence: Synthetic oligonucleotide
  Sense strand starting at position 2359 of SEQ ID NO: 1242962
aacgacaguccuuagauca

SEQ ID NO: 1385035 - RNA, 19 nt, Artificial Sequence
  Description of Artificial Sequence: Synthetic oligonucleotide
  Antisense strand to SEQ ID NO: 1385034
ugaucuaaggacugucguu

SEQ ID NO: 1385036 - RNA, 19 nt, Artificial Sequence
  Description of Artificial Sequence: Synthetic oligonucleotide
  Sense strand starting at position 97 of SEQ ID NO: 1242963
gccagagaguuugcuauuu

SEQ ID NO: 1385037 - RNA, 19 nt, Artificial Sequence
  Description of Artificial Sequence: Synthetic oligonucleotide
  Antisense strand to SEQ ID NO: 1385036
aaauagcaaacucucuggc

SEQ ID NO: 1385038 - RNA, 19 nt, Artificial Sequence
  Description of Artificial Sequence: Synthetic oligonucleotide
  Sense strand starting at position 115 of SEQ ID NO: 1242963
uggaaauuguucccaguga

SEQ ID NO: 1385039 - RNA, 19 nt, Artificial Sequence
  Description of Artificial Sequence: Synthetic oligonucleotide
  Antisense strand to SEQ ID NO: 1385038
ucacugggaacaauuucca

SEQ ID NO: 1385040 - RNA, 19 nt, Artificial Sequence
  Description of Artificial Sequence: Synthetic oligonucleotide
  Sense strand starting at position 124 of SEQ ID NO: 1242963
uucccagugaaccgugaaa

SEQ ID NO: 1385041 - RNA, 19 nt, Artificial Sequence
  Description of Artificial Sequence: Synthetic oligonucleotide
  Antisense strand to SEQ ID NO: 1385040
uuucacgguucacugggaa

SEQ ID NO: 1385042 - RNA, 19 nt, Artificial Sequence
  Description of Artificial Sequence: Synthetic oligonucleotide
  Sense strand starting at position 262 of SEQ ID NO: 1242963
agcccagaggucgagauaa

SEQ ID NO: 1385043 - RNA, 19 nt, Artificial Sequence
  Description of Artificial Sequence: Synthetic oligonucleotide
  Antisense strand to SEQ ID NO: 1385042
uuaucucgaccucugggcu

SEQ ID NO: 1385044 - RNA, 19 nt, Artificial Sequence
  Description of Artificial Sequence: Synthetic oligonucleotide
  Sense strand starting at position 287 of SEQ ID NO: 1242963
ggaauuggguguucucaga

SEQ ID NO: 1385045 - RNA, 19 nt, Artificial Sequence
  Description of Artificial Sequence: Synthetic oligonucleotide
  Antisense strand to SEQ ID NO: 1385044
ucugagaacacccaauucc

SEQ ID NO: 1385046 - RNA, 19 nt, Artificial Sequence
  Description of Artificial Sequence: Synthetic oligonucleotide
  Sense strand starting at position 358 of SEQ ID NO: 1242963
aagacugaccugcgauauc

SEQ ID NO: 1385047 - RNA, 19 nt, Artificial Sequence
  Description of Artificial Sequence: Synthetic oligonucleotide
  Antisense strand to SEQ ID NO: 1385046
gauaucgcaggucagucuu

SEQ ID NO: 1385048 - RNA, 19 nt, Artificial Sequence
  Description of Artificial Sequence: Synthetic oligonucleotide
  Sense strand starting at position 766 of SEQ ID NO: 1242963
ggcugcauucaggaaagua

SEQ ID NO: 1385049 - RNA, 19 nt, Artificial Sequence
  Description of Artificial Sequence: Synthetic oligonucleotide
  Antisense strand to SEQ ID NO: 1385048
uacuuuccugaaugcagcc

SEQ ID NO: 1385050 - RNA, 19 nt, Artificial Sequence
  Description of Artificial Sequence: Synthetic oligonucleotide
  Sense strand starting at position 776 of SEQ ID NO: 1242963
aggaaaguacauuggcaau

SEQ ID NO: 1385051 - RNA, 19 nt, Artificial Sequence
  Description of Artificial Sequence: Synthetic oligonucleotide
  Antisense strand to SEQ ID NO: 1385050
auugccaauguacuuuccu

SEQ ID NO: 1385052 - RNA, 19 nt, Artificial Sequence
  Description of Artificial Sequence: Synthetic oligonucleotide
  Sense strand starting at position 782 of SEQ ID NO: 1242963
guacauuggcaauaauaca

SEQ ID NO: 1385053 - RNA, 19 nt, Artificial Sequence
  Description of Artificial Sequence: Synthetic oligonucleotide
  Antisense strand to SEQ ID NO: 1385052
uguauuauugccaauguac

SEQ ID NO: 1385054 - RNA, 19 nt, Artificial Sequence
  Description of Artificial Sequence: Synthetic oligonucleotide
  Sense strand starting at position 837 of SEQ ID NO: 1242963
cgcaaagauagugguaaua

SEQ ID NO: 1385055 - RNA, 19 nt, Artificial Sequence
  Description of Artificial Sequence: Synthetic oligonucleotide
  Antisense strand to SEQ ID NO: 1385054
uauuaccacuaucuuugcg

SEQ ID NO: 1385056 - RNA, 19 nt, Artificial Sequence
  Description of Artificial Sequence: Synthetic oligonucleotide
  Sense strand starting at position 1513 of SEQ ID NO: 1242963
agaucuaagugccuuaauu

SEQ ID NO: 1385057 - RNA, 19 nt, Artificial Sequence
  Description of Artificial Sequence: Synthetic oligonucleotide
  Antisense strand to SEQ ID NO: 1385056
aauuaaggcacuuagaucu

SEQ ID NO: 1385058 - RNA, 19 nt, Artificial Sequence
  Description of Artificial Sequence: Synthetic oligonucleotide
  Sense strand starting at position 1515 of SEQ ID NO: 1242963
aucuaagugccuuaauuag

SEQ ID NO: 1385059 - RNA, 19 nt, Artificial Sequence
  Description of Artificial Sequence: Synthetic oligonucleotide
  Antisense strand to SEQ ID NO: 1385058
cuaauuaaggcacuuagau

SEQ ID NO: 1385060 - RNA, 19 nt, Artificial Sequence
  Description of Artificial Sequence: Synthetic oligonucleotide
  Sense strand starting at position 1532 of SEQ ID NO: 1242963
agauguaucccagguauua

SEQ ID NO: 1385061 - RNA, 19 nt, Artificial Sequence
  Description of Artificial Sequence: Synthetic oligonucleotide
  Antisense strand to SEQ ID NO: 1385060
uaauaccugggauacaucu

SEQ ID NO: 1385062 - RNA, 19 nt, Artificial Sequence
  Description of Artificial Sequence: Synthetic oligonucleotide
  Sense strand starting at position 1534 of SEQ ID NO: 1242963
auguaucccagguauuagu

SEQ ID NO: 1385063 - RNA, 19 nt, Artificial Sequence
  Description of Artificial Sequence: Synthetic oligonucleotide
  Antisense strand to SEQ ID NO: 1385062
acuaauaccugggauacau

SEQ ID NO: 1385064 - RNA, 19 nt, Artificial Sequence
  Description of Artificial Sequence: Synthetic oligonucleotide
  Sense strand starting at position 1600 of SEQ ID NO: 1242963
cuauuagucuuccuuauug

SEQ ID NO: 1385065 - RNA, 19 nt, Artificial Sequence
  Description of Artificial Sequence: Synthetic oligonucleotide
  Antisense strand to SEQ ID NO: 1385064
caauaaggaagacuaauag

SEQ ID NO: 1385066 - RNA, 19 nt, Artificial Sequence
  Description of Artificial Sequence: Synthetic oligonucleotide
  Sense strand starting at position 1602 of SEQ ID NO: 1242963
auuagucuuccuuauugua

SEQ ID NO: 1385067 - RNA, 19 nt, Artificial Sequence
  Description of Artificial Sequence: Synthetic oligonucleotide
  Antisense strand to SEQ ID NO: 1385066
uacaauaaggaagacuaau

SEQ ID NO: 1385068 - RNA, 19 nt, Artificial Sequence
  Description of Artificial Sequence: Synthetic oligonucleotide
  Sense strand starting at position 1855 of SEQ ID NO: 1242963
ccguuucuuuguucuauuu

SEQ ID NO: 1385069 - RNA, 19 nt, Artificial Sequence
  Description of Artificial Sequence: Synthetic oligonucleotide
  Antisense strand to SEQ ID NO: 1385068
aaauagaacaaagaaacgg

SEQ ID NO: 1385070 - RNA, 19 nt, Artificial Sequence
  Description of Artificial Sequence: Synthetic oligonucleotide
  Sense strand starting at position 1865 of SEQ ID NO: 1242963
guucuauuucugcaucucu

SEQ ID NO: 1385071 - RNA, 19 nt, Artificial Sequence
  Description of Artificial Sequence: Synthetic oligonucleotide
  Antisense strand to SEQ ID NO: 1385070
agagaugcagaaauagaac

SEQ ID NO: 1385072 - RNA, 19 nt, Artificial Sequence
  Description of Artificial Sequence: Synthetic oligonucleotide
  Sense strand starting at position 2069 of SEQ ID NO: 1242963
aaacuuuggcccugguaag

SEQ ID NO: 1385073 - RNA, 19 nt, Artificial Sequence
  Description of Artificial Sequence: Synthetic oligonucleotide
  Antisense strand to SEQ ID NO: 1385072
cuuaccagggccaaaguuu

SEQ ID NO: 1385074 - RNA, 19 nt, Artificial Sequence
  Description of Artificial Sequence: Synthetic oligonucleotide
  Sense strand starting at position 2080 of SEQ ID NO: 1242963
cugguaaggucacuaucuu

SEQ ID NO: 1385075 - RNA, 19 nt, Artificial Sequence
  Description of Artificial Sequence: Synthetic oligonucleotide
  Antisense strand to SEQ ID NO: 1385074
aagauagugaccuuaccag

SEQ ID NO: 1385076 - RNA, 19 nt, Artificial Sequence
  Description of Artificial Sequence: Synthetic oligonucleotide
  Sense strand starting at position 2081 of SEQ ID NO: 1242963
ugguaaggucacuaucuuu

SEQ ID NO: 1385077 - RNA, 19 nt, Artificial Sequence
  Description of Artificial Sequence: Synthetic oligonucleotide
  Antisense strand to SEQ ID NO: 1385076
aaagauagugaccuuacca

SEQ ID NO: 1385078 - RNA, 19 nt, Artificial Sequence
  Description of Artificial Sequence: Synthetic oligonucleotide
  Sense strand starting at position 2287 of SEQ ID NO: 1242963
ucucuuuaucuuggaggau

SEQ ID NO: 1385079 - RNA, 19 nt, Artificial Sequence
  Description of Artificial Sequence: Synthetic oligonucleotide
  Antisense strand to SEQ ID NO: 1385078
auccuccaagauaaagaga

SEQ ID NO: 1385080 - RNA, 19 nt, Artificial Sequence
  Description of Artificial Sequence: Synthetic oligonucleotide
  Sense strand starting at position 2456 of SEQ ID NO: 1242963
gcucuccagccugaaauca

SEQ ID NO: 1385081 - RNA, 19 nt, Artificial Sequence
  Description of Artificial Sequence: Synthetic oligonucleotide
  Antisense strand to SEQ ID NO: 1385080
ugauuucaggcuggagagc

SEQ ID NO: 1385082 - RNA, 19 nt, Artificial Sequence
  Description of Artificial Sequence: Synthetic oligonucleotide
  Sense strand starting at position 2464 of SEQ ID NO: 1242963
gccugaaaucaguaaaugu

SEQ ID NO: 1385083 - RNA, 19 nt, Artificial Sequence
  Description of Artificial Sequence: Synthetic oligonucleotide
  Antisense strand to SEQ ID NO: 1385082
acauuuacugauuucaggc

SEQ ID NO: 1385084 - RNA, 19 nt, Artificial Sequence
  Description of Artificial Sequence: Synthetic oligonucleotide
  Sense strand starting at position 2504 of SEQ ID NO: 1242963
ugcucuuugcaagaaauca

SEQ ID NO: 1385085 - RNA, 19 nt, Artificial Sequence
  Description of Artificial Sequence: Synthetic oligonucleotide
  Antisense strand to SEQ ID NO: 1385084
ugauuucuugcaaagagca

SEQ ID NO: 1385086 - RNA, 19 nt, Artificial Sequence
  Description of Artificial Sequence: Synthetic oligonucleotide
  Sense strand starting at position 2529 of SEQ ID NO: 1242963
uaguuaaagcuauagugua

SEQ ID NO: 1385087 - RNA, 19 nt, Artificial Sequence
  Description of Artificial Sequence: Synthetic oligonucleotide
  Antisense strand to SEQ ID NO: 1385086
uacacuauagcuuuaacua

SEQ ID NO: 1385088 - RNA, 19 nt, Artificial Sequence
  Description of Artificial Sequence: Synthetic oligonucleotide
  Sense strand starting at position 2558 of SEQ ID NO: 1242963
gacuauacucaauggcagu

SEQ ID NO: 1385089 - RNA, 19 nt, Artificial Sequence
  Description of Artificial Sequence: Synthetic oligonucleotide
  Antisense strand to SEQ ID NO: 1385088
acugccauugaguauaguc

SEQ ID NO: 1385090 - RNA, 19 nt, Artificial Sequence
  Description of Artificial Sequence: Synthetic oligonucleotide
  Sense strand starting at position 2596 of SEQ ID NO: 1242963
ucuggugauuagccuaaau

SEQ ID NO: 1385091 - RNA, 19 nt, Artificial Sequence
  Description of Artificial Sequence: Synthetic oligonucleotide
  Antisense strand to SEQ ID NO: 1385090
auuuaggcuaaucaccaga

SEQ ID NO: 1385092 - RNA, 19 nt, Artificial Sequence
  Description of Artificial Sequence: Synthetic oligonucleotide
  Sense strand starting at position 2598 of SEQ ID NO: 1242963
uggugauuagccuaaauag

SEQ ID NO: 1385093 - RNA, 19 nt, Artificial Sequence
  Description of Artificial Sequence: Synthetic oligonucleotide
  Antisense strand to SEQ ID NO: 1385092
cuauuuaggcuaaucacca

SEQ ID NO: 1385094 - RNA, 19 nt, Artificial Sequence
  Description of Artificial Sequence: Synthetic oligonucleotide
  Sense strand starting at position 2731 of SEQ ID NO: 1242963
aaggguuaguuguucuuaa

SEQ ID NO: 1385095 - RNA, 19 nt, Artificial Sequence
  Description of Artificial Sequence: Synthetic oligonucleotide
  Antisense strand to SEQ ID NO: 1385094
uuaagaacaacuaacccuu

SEQ ID NO: 1385096 - RNA, 19 nt, Artificial Sequence
  Description of Artificial Sequence: Synthetic oligonucleotide
  Sense strand starting at position 2732 of SEQ ID NO: 1242963
aggguuaguuguucuuaaa

SEQ ID NO: 1385097 - RNA, 19 nt, Artificial Sequence
  Description of Artificial Sequence: Synthetic oligonucleotide
  Antisense strand to SEQ ID NO: 1385096
uuuaagaacaacuaacccu

SEQ ID NO: 1385098 - RNA, 19 nt, Artificial Sequence
  Description of Artificial Sequence: Synthetic oligonucleotide
  Sense strand starting at position 2745 of SEQ ID NO: 1242963
cuuaaauuagaguguacaa

SEQ ID NO: 1385099 - RNA, 19 nt, Artificial Sequence
  Description of Artificial Sequence: Synthetic oligonucleotide
  Antisense strand to SEQ ID NO: 1385098
uuguacacucuaauuuaag

SEQ ID NO: 1385100 - RNA, 19 nt, Artificial Sequence
  Description of Artificial Sequence: Synthetic oligonucleotide
  Sense strand starting at position 2775 of SEQ ID NO: 1242963
uuggauaaucauggugaca

SEQ ID NO: 1385101 - RNA, 19 nt, Artificial Sequence
  Description of Artificial Sequence: Synthetic oligonucleotide
  Antisense strand to SEQ ID NO: 1385100
ugucaccaugauuauccaa

SEQ ID NO: 1385102 - RNA, 19 nt, Artificial Sequence
  Description of Artificial Sequence: Synthetic oligonucleotide
  Sense strand starting at position 2849 of SEQ ID NO: 1242963
gggucaauacugcauugua

SEQ ID NO: 1385103 - RNA, 19 nt, Artificial Sequence
  Description of Artificial Sequence: Synthetic oligonucleotide
  Antisense strand to SEQ ID NO: 1385102
uacaaugcaguauugaccc

SEQ ID NO: 1385104 - RNA, 19 nt, Artificial Sequence
  Description of Artificial Sequence: Synthetic oligonucleotide
  Sense strand starting at position 2990 of SEQ ID NO: 1242963
ggcagucuucuagagauca

SEQ ID NO: 1385105 - RNA, 19 nt, Artificial Sequence
  Description of Artificial Sequence: Synthetic oligonucleotide
  Antisense strand to SEQ ID NO: 1385104
ugaucucuagaagacugcc

SEQ ID NO: 1385106 - RNA, 19 nt, Artificial Sequence
  Description of Artificial Sequence: Synthetic oligonucleotide
  Sense strand starting at position 3481 of SEQ ID NO: 1242963
cugauaaaggguuguuauc

SEQ ID NO: 1385107 - RNA, 19 nt, Artificial Sequence
  Description of Artificial Sequence: Synthetic oligonucleotide
  Antisense strand to SEQ ID NO: 1385106
gauaacaacccuuuaucag

SEQ ID NO: 1385108 - RNA, 19 nt, Artificial Sequence
  Description of Artificial Sequence: Synthetic oligonucleotide
  Sense strand starting at position 3483 of SEQ ID NO: 1242963
gauaaaggguuguuaucca

SEQ ID NO: 1385109 - RNA, 19 nt, Artificial Sequence
  Description of Artificial Sequence: Synthetic oligonucleotide
  Antisense strand to SEQ ID NO: 1385108
uggauaacaacccuuuauc

SEQ ID NO: 1385110 - RNA, 19 nt, Artificial Sequence
  Description of Artificial Sequence: Synthetic oligonucleotide
  Sense strand starting at position 3488 of SEQ ID NO: 1242963
aggguuguuauccagagca

SEQ ID NO: 1385111 - RNA, 19 nt, Artificial Sequence
  Description of Artificial Sequence: Synthetic oligonucleotide
  Antisense strand to SEQ ID NO: 1385110
ugcucuggauaacaacccu

SEQ ID NO: 1385112 - RNA, 19 nt, Artificial Sequence
  Description of Artificial Sequence: Synthetic oligonucleotide
  Sense strand starting at position 3490 of SEQ ID NO: 1242963
gguuguuauccagagcaua

SEQ ID NO: 1385113 - RNA, 19 nt, Artificial Sequence
  Description of Artificial Sequence: Synthetic oligonucleotide
  Antisense strand to SEQ ID NO: 1385112
uaugcucuggauaacaacc

SEQ ID NO: 1385114 - RNA, 19 nt, Artificial Sequence
  Description of Artificial Sequence: Synthetic oligonucleotide
  Sense strand starting at position 3535 of SEQ ID NO: 1242963
acaauuaaagcaugggcaa

SEQ ID NO: 1385115 - RNA, 19 nt, Artificial Sequence
  Description of Artificial Sequence: Synthetic oligonucleotide
  Antisense strand to SEQ ID NO: 1385114
uugcccaugcuuuaauugu

SEQ ID NO: 1385116 - RNA, 19 nt, Artificial Sequence
  Description of Artificial Sequence: Synthetic oligonucleotide
  Sense strand starting at position 34 of SEQ ID NO: 1242964
uuagcauugggaggacuau

SEQ ID NO: 1385117 - RNA, 19 nt, Artificial Sequence
  Description of Artificial Sequence: Synthetic oligonucleotide
  Antisense strand to SEQ ID NO: 1385116
auaguccucccaaugcuaa

SEQ ID NO: 1385118 - RNA, 19 nt, Artificial Sequence
  Description of Artificial Sequence: Synthetic oligonucleotide
  Sense strand starting at position 89 of SEQ ID NO: 1242964
agccguaugagguaaccau

SEQ ID NO: 1385119 - RNA, 19 nt, Artificial Sequence
  Description of Artificial Sequence: Synthetic oligonucleotide
  Antisense strand to SEQ ID NO: 1385118
augguuaccucauacggcu

SEQ ID NO: 1385120 - RNA, 19 nt, Artificial Sequence
  Description of Artificial Sequence: Synthetic oligonucleotide
  Sense strand starting at position 247 of SEQ ID NO: 1242964
agaguuaccuggccaccau

SEQ ID NO: 1385121 - RNA, 19 nt, Artificial Sequence
  Description of Artificial Sequence: Synthetic oligonucleotide
  Antisense strand to SEQ ID NO: 1385120
augguggccagguaacucu

SEQ ID NO: 1385122 - RNA, 19 nt, Artificial Sequence
  Description of Artificial Sequence: Synthetic oligonucleotide
  Sense strand starting at position 248 of SEQ ID NO: 1242964
gaguuaccuggccaccaua

SEQ ID NO: 1385123 - RNA, 19 nt, Artificial Sequence
  Description of Artificial Sequence: Synthetic oligonucleotide
  Antisense strand to SEQ ID NO: 1385122
uaugguggccagguaacuc

SEQ ID NO: 1385124 - RNA, 19 nt, Artificial Sequence
  Description of Artificial Sequence: Synthetic oligonucleotide
  Sense strand starting at position 329 of SEQ ID NO: 1242964
ggucucgauuccuuacuca

SEQ ID NO: 1385125 - RNA, 19 nt, Artificial Sequence
  Description of Artificial Sequence: Synthetic oligonucleotide
  Antisense strand to SEQ ID NO: 1385124
ugaguaaggaaucgagacc

SEQ ID NO: 1385126 - RNA, 19 nt, Artificial Sequence
  Description of Artificial Sequence: Synthetic oligonucleotide
  Sense strand starting at position 332 of SEQ ID NO: 1242964
cucgauuccuuacucauga

SEQ ID NO: 1385127 - RNA, 19 nt, Artificial Sequence
  Description of Artificial Sequence: Synthetic oligonucleotide
  Antisense strand to SEQ ID NO: 1385126
ucaugaguaaggaaucgag

SEQ ID NO: 1385128 - RNA, 19 nt, Artificial Sequence
  Description of Artificial Sequence: Synthetic oligonucleotide
  Sense strand starting at position 370 of SEQ ID NO: 1242964
ugggaugugucuccucaca

SEQ ID NO: 1385129 - RNA, 19 nt, Artificial Sequence
  Description of Artificial Sequence: Synthetic oligonucleotide
  Antisense strand to SEQ ID NO: 1385128
ugugaggagacacauccca

SEQ ID NO: 1385130 - RNA, 19 nt, Artificial Sequence
  Description of Artificial Sequence: Synthetic oligonucleotide
  Sense strand starting at position 372 of SEQ ID NO: 1242964
ggaugugucuccucacaag

SEQ ID NO: 1385131 - RNA, 19 nt, Artificial Sequence
  Description of Artificial Sequence: Synthetic oligonucleotide
  Antisense strand to SEQ ID NO: 1385130
cuugugaggagacacaucc

SEQ ID NO: 1385132 - RNA, 19 nt, Artificial Sequence
  Description of Artificial Sequence: Synthetic oligonucleotide
  Sense strand starting at position 404 of SEQ ID NO: 1242964
cccuuucccggaggacaau

SEQ ID NO: 1385133 - RNA, 19 nt, Artificial Sequence
  Description of Artificial Sequence: Synthetic oligonucleotide
  Antisense strand to SEQ ID NO: 1385132
auuguccuccgggaaaggg

SEQ ID NO: 1385134 - RNA, 19 nt, Artificial Sequence
  Description of Artificial Sequence: Synthetic oligonucleotide
  Sense strand starting at position 540 of SEQ ID NO: 1242964
aauagagcuccugguaagu

SEQ ID NO: 1385135 - RNA, 19 nt, Artificial Sequence
  Description of Artificial Sequence: Synthetic oligonucleotide
  Antisense strand to SEQ ID NO: 1385134
acuuaccaggagcucuauu

SEQ ID NO: 1385136 - RNA, 19 nt, Artificial Sequence
  Description of Artificial Sequence: Synthetic oligonucleotide
  Sense strand starting at position 752 of SEQ ID NO: 1242964
aggcuauugcgacgggaga

SEQ ID NO: 1385137 - RNA, 19 nt, Artificial Sequence
  Description of Artificial Sequence: Synthetic oligonucleotide
  Antisense strand to SEQ ID NO: 1385136
ucucccgucgcaauagccu

SEQ ID NO: 1385138 - RNA, 19 nt, Artificial Sequence
  Description of Artificial Sequence: Synthetic oligonucleotide
  Sense strand starting at position 796 of SEQ ID NO: 1242964
uguggaaugugggcuguau

SEQ ID NO: 1385139 - RNA, 19 nt, Artificial Sequence
  Description of Artificial Sequence: Synthetic oligonucleotide
  Antisense strand to SEQ ID NO: 1385138
auacagcccacauuccaca

SEQ ID NO: 1385140 - RNA, 19 nt, Artificial Sequence
  Description of Artificial Sequence: Synthetic oligonucleotide
  Sense strand starting at position 827 of SEQ ID NO: 1242964
gcaggaagguuguuuacca

SEQ ID NO: 1385141 - RNA, 19 nt, Artificial Sequence
  Description of Artificial Sequence: Synthetic oligonucleotide
  Antisense strand to SEQ ID NO: 1385140
ugguaaacaaccuuccugc

SEQ ID NO: 1385142 - RNA, 19 nt, Artificial Sequence
  Description of Artificial Sequence: Synthetic oligonucleotide
  Sense strand starting at position 868 of SEQ ID NO: 1242964
aaggaagucuggccuugaa

SEQ ID NO: 1385143 - RNA, 19 nt, Artificial Sequence
  Description of Artificial Sequence: Synthetic oligonucleotide
  Antisense strand to SEQ ID NO: 1385142
uucaaggccagacuuccuu

SEQ ID NO: 1385144 - RNA, 19 nt, Artificial Sequence
  Description of Artificial Sequence: Synthetic oligonucleotide
  Sense strand starting at position 871 of SEQ ID NO: 1242964
gaagucuggccuugaaagc

SEQ ID NO: 1385145 - RNA, 19 nt, Artificial Sequence
  Description of Artificial Sequence: Synthetic oligonucleotide
  Antisense strand to SEQ ID NO: 1385144
gcuuucaaggccagacuuc

SEQ ID NO: 1385146 - RNA, 19 nt, Artificial Sequence
  Description of Artificial Sequence: Synthetic oligonucleotide
  Sense strand starting at position 1059 of SEQ ID NO: 1242964
gagaacuggugucugaaag

SEQ ID NO: 1385147 - RNA, 19 nt, Artificial Sequence
  Description of Artificial Sequence: Synthetic oligonucleotide
  Antisense strand to SEQ ID NO: 1385146
cuuucagacaccaguucuc

SEQ ID NO: 1385148 - RNA, 19 nt, Artificial Sequence
  Description of Artificial Sequence: Synthetic oligonucleotide
  Sense strand starting at position 1124 of SEQ ID NO: 1242964
ucaccaucucgcuaacaga

SEQ ID NO: 1385149 - RNA, 19 nt, Artificial Sequence
  Description of Artificial Sequence: Synthetic oligonucleotide
  Antisense strand to SEQ ID NO: 1385148
ucuguuagcgagaugguga

SEQ ID NO: 1385150 - RNA, 19 nt, Artificial Sequence
  Description of Artificial Sequence: Synthetic oligonucleotide
  Sense strand starting at position 1156 of SEQ ID NO: 1242964
ggcacuauuugcuucuauu

SEQ ID NO: 1385151 - RNA, 19 nt, Artificial Sequence
  Description of Artificial Sequence: Synthetic oligonucleotide
  Antisense strand to SEQ ID NO: 1385150
aauagaagcaaauagugcc

SEQ ID NO: 1385152 - RNA, 19 nt, Artificial Sequence
  Description of Artificial Sequence: Synthetic oligonucleotide
  Sense strand starting at position 1526 of SEQ ID NO: 1242964
agaucuaagugucuuaauu

SEQ ID NO: 1385153 - RNA, 19 nt, Artificial Sequence
  Description of Artificial Sequence: Synthetic oligonucleotide
  Antisense strand to SEQ ID NO: 1385152
aauuaagacacuuagaucu

SEQ ID NO: 1385154 - RNA, 19 nt, Artificial Sequence
  Description of Artificial Sequence: Synthetic oligonucleotide
  Sense strand starting at position 1545 of SEQ ID NO: 1242964
agauguaucccagguacua

SEQ ID NO: 1385155 - RNA, 19 nt, Artificial Sequence
  Description of Artificial Sequence: Synthetic oligonucleotide
  Antisense strand to SEQ ID NO: 1385154
uaguaccugggauacaucu

SEQ ID NO: 1385156 - RNA, 19 nt, Artificial Sequence
  Description of Artificial Sequence: Synthetic oligonucleotide
  Sense strand starting at position 1557 of SEQ ID NO: 1242964
gguacuaguguguauccca

SEQ ID NO: 1385157 - RNA, 19 nt, Artificial Sequence
  Description of Artificial Sequence: Synthetic oligonucleotide
  Antisense strand to SEQ ID NO: 1385156
ugggauacacacuaguacc

SEQ ID NO: 1385158 - RNA, 19 nt, Artificial Sequence
  Description of Artificial Sequence: Synthetic oligonucleotide
  Sense strand starting at position 1566 of SEQ ID NO: 1242964
guguaucccaaguacuagu

SEQ ID NO: 1385159 - RNA, 19 nt, Artificial Sequence
  Description of Artificial Sequence: Synthetic oligonucleotide
  Antisense strand to SEQ ID NO: 1385158
acuaguacuugggauacac

SEQ ID NO: 1385160 - RNA, 19 nt, Artificial Sequence
  Description of Artificial Sequence: Synthetic oligonucleotide
  Sense strand starting at position 1879 of SEQ ID NO: 1242964
guucuauuucugcaucugu

SEQ ID NO: 1385161 - RNA, 19 nt, Artificial Sequence
  Description of Artificial Sequence: Synthetic oligonucleotide
  Antisense strand to SEQ ID NO: 1385160
acagaugcagaaauagaac

SEQ ID NO: 1385162 - RNA, 19 nt, Artificial Sequence
  Description of Artificial Sequence: Synthetic oligonucleotide
  Sense strand starting at position 2094 of SEQ ID NO: 1242964
cugguaaggucucuaucuu

SEQ ID NO: 1385163 - RNA, 19 nt, Artificial Sequence
  Description of Artificial Sequence: Synthetic oligonucleotide
  Antisense strand to SEQ ID NO: 1385162
aagauagagaccuuaccag

SEQ ID NO: 1385164 - RNA, 19 nt, Artificial Sequence
  Description of Artificial Sequence: Synthetic oligonucleotide
  Sense strand starting at position 2095 of SEQ ID NO: 1242964
ugguaaggucucuaucuuu

SEQ ID NO: 1385165 - RNA, 19 nt, Artificial Sequence
  Description of Artificial Sequence: Synthetic oligonucleotide
  Antisense strand to SEQ ID NO: 1385164
aaagauagagaccuuacca

SEQ ID NO: 1385166 - RNA, 19 nt, Artificial Sequence
  Description of Artificial Sequence: Synthetic oligonucleotide
  Sense strand starting at position 2585 of SEQ ID NO: 1242964
uguuaagugccugcuguau

SEQ ID NO: 1385167 - RNA, 19 nt, Artificial Sequence
  Description of Artificial Sequence: Synthetic oligonucleotide
  Antisense strand to SEQ ID NO: 1385166
auacagcaggcacuuaaca

SEQ ID NO: 1385168 - RNA, 19 nt, Artificial Sequence
  Description of Artificial Sequence: Synthetic oligonucleotide
  Sense strand starting at position 2762 of SEQ ID NO: 1242964
gggcuugucagagagcaac

SEQ ID NO: 1385169 - RNA, 19 nt, Artificial Sequence
  Description of Artificial Sequence: Synthetic oligonucleotide
  Antisense strand to SEQ ID NO: 1385168
guugcucucugacaagccc

SEQ ID NO: 1385170 - RNA, 19 nt, Artificial Sequence
  Description of Artificial Sequence: Synthetic oligonucleotide
  Sense strand starting at position 2861 of SEQ ID NO: 1242964
aagagaaugccagagcuuu

SEQ ID NO: 1385171 - RNA, 19 nt, Artificial Sequence
  Description of Artificial Sequence: Synthetic oligonucleotide
  Antisense strand to SEQ ID NO: 1385170
aaagcucuggcauucucuu

SEQ ID NO: 1385172 - RNA, 19 nt, Artificial Sequence
  Description of Artificial Sequence: Synthetic oligonucleotide
  Sense strand starting at position 2954 of SEQ ID NO: 1242964
cuuguucuuccaggaaacu

SEQ ID NO: 1385173 - RNA, 19 nt, Artificial Sequence
  Description of Artificial Sequence: Synthetic oligonucleotide
  Antisense strand to SEQ ID NO: 1385172
aguuuccuggaagaacaag

SEQ ID NO: 1385174 - RNA, 19 nt, Artificial Sequence
  Description of Artificial Sequence: Synthetic oligonucleotide
  Sense strand starting at position 2963 of SEQ ID NO: 1242964
ccaggaaacuuggugcuga

SEQ ID NO: 1385175 - RNA, 19 nt, Artificial Sequence
  Description of Artificial Sequence: Synthetic oligonucleotide
  Antisense strand to SEQ ID NO: 1385174
ucagcaccaaguuuccugg

SEQ ID NO: 1385176 - RNA, 19 nt, Artificial Sequence
  Description of Artificial Sequence: Synthetic oligonucleotide
  Sense strand starting at position 3005 of SEQ ID NO: 1242964
guaagugacuguguucuga

SEQ ID NO: 1385177 - RNA, 19 nt, Artificial Sequence
  Description of Artificial Sequence: Synthetic oligonucleotide
  Antisense strand to SEQ ID NO: 1385176
ucagaacacagucacuuac

SEQ ID NO: 1385178 - RNA, 19 nt, Artificial Sequence
  Description of Artificial Sequence: Synthetic oligonucleotide
  Sense strand starting at position 3007 of SEQ ID NO: 1242964
aagugacuguguucugaga

SEQ ID NO: 1385179 - RNA, 19 nt, Artificial Sequence
  Description of Artificial Sequence: Synthetic oligonucleotide
  Antisense strand to SEQ ID NO: 1385178
ucucagaacacagucacuu

SEQ ID NO: 1385180 - RNA, 19 nt, Artificial Sequence
  Description of Artificial Sequence: Synthetic oligonucleotide
  Sense strand starting at position 3014 of SEQ ID NO: 1242964
uguguucugagaggcauuu

SEQ ID NO: 1385181 - RNA, 19 nt, Artificial Sequence
  Description of Artificial Sequence: Synthetic oligonucleotide
  Antisense strand to SEQ ID NO: 1385180
aaaugccucucagaacaca

SEQ ID NO: 1385182 - RNA, 19 nt, Artificial Sequence
  Description of Artificial Sequence: Synthetic oligonucleotide
  Sense strand starting at position 3035 of SEQ ID NO: 1242964
uuaagaguuugacuguuau

SEQ ID NO: 1385183 - RNA, 19 nt, Artificial Sequence
  Description of Artificial Sequence: Synthetic oligonucleotide
  Antisense strand to SEQ ID NO: 1385182
auaacagucaaacucuuaa

SEQ ID NO: 1385184 - RNA, 19 nt, Artificial Sequence
  Description of Artificial Sequence: Synthetic oligonucleotide
  Sense strand starting at position 3057 of SEQ ID NO: 1242964
ccaguuucuggcuauuacu

SEQ ID NO: 1385185 - RNA, 19 nt, Artificial Sequence
  Description of Artificial Sequence: Synthetic oligonucleotide
  Antisense strand to SEQ ID NO: 1385184
aguaauagccagaaacugg

SEQ ID NO: 1385186 - RNA, 19 nt, Artificial Sequence
  Description of Artificial Sequence: Synthetic oligonucleotide
  Sense strand starting at position 3085 of SEQ ID NO: 1242964
gguucuagaauauaagugu

SEQ ID NO: 1385187 - RNA, 19 nt, Artificial Sequence
  Description of Artificial Sequence: Synthetic oligonucleotide
  Antisense strand to SEQ ID NO: 1385186
acacuuauauucuagaacc

SEQ ID NO: 1385188 - RNA, 19 nt, Artificial Sequence
  Description of Artificial Sequence: Synthetic oligonucleotide
  Sense strand starting at position 3091 of SEQ ID NO: 1242964
agaauauaagugugcaucu

SEQ ID NO: 1385189 - RNA, 19 nt, Artificial Sequence
  Description of Artificial Sequence: Synthetic oligonucleotide
  Antisense strand to SEQ ID NO: 1385188
agaugcacacuuauauucu

SEQ ID NO: 1385190 - RNA, 19 nt, Artificial Sequence
  Description of Artificial Sequence: Synthetic oligonucleotide
  Sense strand starting at position 3092 of SEQ ID NO: 1242964
gaauauaagugugcaucuu

SEQ ID NO: 1385191 - RNA, 19 nt, Artificial Sequence
  Description of Artificial Sequence: Synthetic oligonucleotide
  Antisense strand to SEQ ID NO: 1385190
aagaugcacacuuauauuc

SEQ ID NO: 1385192 - RNA, 19 nt, Artificial Sequence
  Description of Artificial Sequence: Synthetic oligonucleotide
  Sense strand starting at position 3339 of SEQ ID NO: 1242964
cucagaguuccagaaccuu

SEQ ID NO: 1385193 - RNA, 19 nt, Artificial Sequence
  Description of Artificial Sequence: Synthetic oligonucleotide
  Antisense strand to SEQ ID NO: 1385192
aagguucuggaacucugag

SEQ ID NO: 1385194 - RNA, 19 nt, Artificial Sequence
  Description of Artificial Sequence: Synthetic oligonucleotide
  Sense strand starting at position 3510 of SEQ ID NO: 1242964
accagaagguuauugcuga

SEQ ID NO: 1385195 - RNA, 19 nt, Artificial Sequence
  Description of Artificial Sequence: Synthetic oligonucleotide
  Antisense strand to SEQ ID NO: 1385194
ucagcaauaaccuucuggu

SEQ ID NO: 1385196 - RNA, 19 nt, Artificial Sequence
  Description of Artificial Sequence: Synthetic oligonucleotide
  Sense strand starting at position 80 of SEQ ID NO: 1242965
ccaggaguaaccugcaaag

SEQ ID NO: 1385197 - RNA, 19 nt, Artificial Sequence
  Description of Artificial Sequence: Synthetic oligonucleotide
  Antisense strand to SEQ ID NO: 1385196
cuuugcagguuacuccugg

SEQ ID NO: 1385198 - RNA, 19 nt, Artificial Sequence
  Description of Artificial Sequence: Synthetic oligonucleotide
  Sense strand starting at position 82 of SEQ ID NO: 1242965
aggaguaaccugcaaaggu

SEQ ID NO: 1385199 - RNA, 19 nt, Artificial Sequence
  Description of Artificial Sequence: Synthetic oligonucleotide
  Antisense strand to SEQ ID NO: 1385198
accuuugcagguuacuccu

SEQ ID NO: 1385200 - RNA, 19 nt, Artificial Sequence
  Description of Artificial Sequence: Synthetic oligonucleotide
  Sense strand starting at position 219 of SEQ ID NO: 1242965
ugccuaaagcuguagauaa

SEQ ID NO: 1385201 - RNA, 19 nt, Artificial Sequence
  Description of Artificial Sequence: Synthetic oligonucleotide
  Antisense strand to SEQ ID NO: 1385200
uuaucuacagcuuuaggca

SEQ ID NO: 1385202 - RNA, 19 nt, Artificial Sequence
  Description of Artificial Sequence: Synthetic oligonucleotide
  Sense strand starting at position 345 of SEQ ID NO: 1242965
gugagaauucugugaccua

SEQ ID NO: 1385203 - RNA, 19 nt, Artificial Sequence
  Description of Artificial Sequence: Synthetic oligonucleotide
  Antisense strand to SEQ ID NO: 1385202
uaggucacagaauucucac

SEQ ID NO: 1385204 - RNA, 19 nt, Artificial Sequence
  Description of Artificial Sequence: Synthetic oligonucleotide
  Sense strand starting at position 348 of SEQ ID NO: 1242965
agaauucugugaccuaugu

SEQ ID NO: 1385205 - RNA, 19 nt, Artificial Sequence
  Description of Artificial Sequence: Synthetic oligonucleotide
  Antisense strand to SEQ ID NO: 1385204
acauaggucacagaauucu

SEQ ID NO: 1385206 - RNA, 19 nt, Artificial Sequence
  Description of Artificial Sequence: Synthetic oligonucleotide
  Sense strand starting at position 355 of SEQ ID NO: 1242965
ugugaccuauguguuaaca

SEQ ID NO: 1385207 - RNA, 19 nt, Artificial Sequence
  Description of Artificial Sequence: Synthetic oligonucleotide
  Antisense strand to SEQ ID NO: 1385206
uguuaacacauaggucaca

SEQ ID NO: 1385208 - RNA, 19 nt, Artificial Sequence
  Description of Artificial Sequence: Synthetic oligonucleotide
  Sense strand starting at position 642 of SEQ ID NO: 1242965
uuagaagcaucacuuaaag

SEQ ID NO: 1385209 - RNA, 19 nt, Artificial Sequence
  Description of Artificial Sequence: Synthetic oligonucleotide
  Antisense strand to SEQ ID NO: 1385208
cuuuaagugaugcuucuaa

SEQ ID NO: 1385210 - RNA, 19 nt, Artificial Sequence
  Description of Artificial Sequence: Synthetic oligonucleotide
  Sense strand starting at position 735 of SEQ ID NO: 1242965
ugcccauugggauggauga

SEQ ID NO: 1385211 - RNA, 19 nt, Artificial Sequence
  Description of Artificial Sequence: Synthetic oligonucleotide
  Antisense strand to SEQ ID NO: 1385210
ucauccaucccaaugggca

SEQ ID NO: 1385212 - RNA, 19 nt, Artificial Sequence
  Description of Artificial Sequence: Synthetic oligonucleotide
  Sense strand starting at position 893 of SEQ ID NO: 1242965
agcaaauaccuggguuuga

SEQ ID NO: 1385213 - RNA, 19 nt, Artificial Sequence
  Description of Artificial Sequence: Synthetic oligonucleotide
  Antisense strand to SEQ ID NO: 1385212
ucaaacccagguauuugcu

SEQ ID NO: 1385214 - RNA, 19 nt, Artificial Sequence
  Description of Artificial Sequence: Synthetic oligonucleotide
  Sense strand starting at position 897 of SEQ ID NO: 1242965
aauaccuggguuugagauu

SEQ ID NO: 1385215 - RNA, 19 nt, Artificial Sequence
  Description of Artificial Sequence: Synthetic oligonucleotide
  Antisense strand to SEQ ID NO: 1385214
aaucucaaacccagguauu

SEQ ID NO: 1385216 - RNA, 19 nt, Artificial Sequence
  Description of Artificial Sequence: Synthetic oligonucleotide
  Sense strand starting at position 903 of SEQ ID NO: 1242965
uggguuugagauugagacu

SEQ ID NO: 1385217 - RNA, 19 nt, Artificial Sequence
  Description of Artificial Sequence: Synthetic oligonucleotide
  Antisense strand to SEQ ID NO: 1385216
agucucaaucucaaaccca

SEQ ID NO: 1385218 - RNA, 19 nt, Artificial Sequence
  Description of Artificial Sequence: Synthetic oligonucleotide
  Sense strand starting at position 940 of SEQ ID NO: 1242965
acuggagaccucuggcgau

SEQ ID NO: 1385219 - RNA, 19 nt, Artificial Sequence
  Description of Artificial Sequence: Synthetic oligonucleotide
  Antisense strand to SEQ ID NO: 1385218
aucgccagaggucuccagu

SEQ ID NO: 1385220 - RNA, 19 nt, Artificial Sequence
  Description of Artificial Sequence: Synthetic oligonucleotide
  Sense strand starting at position 963 of SEQ ID NO: 1242965
ugucauuuggccugaacuc

SEQ ID NO: 1385221 - RNA, 19 nt, Artificial Sequence
  Description of Artificial Sequence: Synthetic oligonucleotide
  Antisense strand to SEQ ID NO: 1385220
gaguucaggccaaaugaca

SEQ ID NO: 1385222 - RNA, 19 nt, Artificial Sequence
  Description of Artificial Sequence: Synthetic oligonucleotide
  Sense strand starting at position 1186 of SEQ ID NO: 1242965
uuagguuugacuggagaua

SEQ ID NO: 1385223 - RNA, 19 nt, Artificial Sequence
  Description of Artificial Sequence: Synthetic oligonucleotide
  Antisense strand to SEQ ID NO: 1385222
uaucuccagucaaaccuaa

SEQ ID NO: 1385224 - RNA, 19 nt, Artificial Sequence
  Description of Artificial Sequence: Synthetic oligonucleotide
  Sense strand starting at position 1260 of SEQ ID NO: 1242965
gcccgucuagauuaucacu

SEQ ID NO: 1385225 - RNA, 19 nt, Artificial Sequence
  Description of Artificial Sequence: Synthetic oligonucleotide
  Antisense strand to SEQ ID NO: 1385224
agugauaaucuagacgggc

SEQ ID NO: 1385226 - RNA, 19 nt, Artificial Sequence
  Description of Artificial Sequence: Synthetic oligonucleotide
  Sense strand starting at position 1268 of SEQ ID NO: 1242965
agauuaucacugggaaguu

SEQ ID NO: 1385227 - RNA, 19 nt, Artificial Sequence
  Description of Artificial Sequence: Synthetic oligonucleotide
  Antisense strand to SEQ ID NO: 1385226
aacuucccagugauaaucu

SEQ ID NO: 1385228 - RNA, 19 nt, Artificial Sequence
  Description of Artificial Sequence: Synthetic oligonucleotide
  Sense strand starting at position 1278 of SEQ ID NO: 1242965
ugggaaguucuggguaaau

SEQ ID NO: 1385229 - RNA, 19 nt, Artificial Sequence
  Description of Artificial Sequence: Synthetic oligonucleotide
  Antisense strand to SEQ ID NO: 1385228
auuuacccagaacuuccca

SEQ ID NO: 1385230 - RNA, 19 nt, Artificial Sequence
  Description of Artificial Sequence: Synthetic oligonucleotide
  Sense strand starting at position 1280 of SEQ ID NO: 1242965
ggaaguucuggguaaauuc

SEQ ID NO: 1385231 - RNA, 19 nt, Artificial Sequence
  Description of Artificial Sequence: Synthetic oligonucleotide
  Antisense strand to SEQ ID NO: 1385230
gaauuuacccagaacuucc

SEQ ID NO: 1385232 - RNA, 19 nt, Artificial Sequence
  Description of Artificial Sequence: Synthetic oligonucleotide
  Sense strand starting at position 1288 of SEQ ID NO: 1242965
uggguaaauucugcuauag

SEQ ID NO: 1385233 - RNA, 19 nt, Artificial Sequence
  Description of Artificial Sequence: Synthetic oligonucleotide
  Antisense strand to SEQ ID NO: 1385232
cuauagcagaauuuaccca

SEQ ID NO: 1385234 - RNA, 19 nt, Artificial Sequence
  Description of Artificial Sequence: Synthetic oligonucleotide
  Sense strand starting at position 1339 of SEQ ID NO: 1242965
auacaaugaguuggguuaa

SEQ ID NO: 1385235 - RNA, 19 nt, Artificial Sequence
  Description of Artificial Sequence: Synthetic oligonucleotide
  Antisense strand to SEQ ID NO: 1385234
uuaacccaacucauuguau

SEQ ID NO: 1385236 - RNA, 19 nt, Artificial Sequence
  Description of Artificial Sequence: Synthetic oligonucleotide
  Sense strand starting at position 1436 of SEQ ID NO: 1242965
gguccuuaccuguaccaau

SEQ ID NO: 1385237 - RNA, 19 nt, Artificial Sequence
  Description of Artificial Sequence: Synthetic oligonucleotide
  Antisense strand to SEQ ID NO: 1385236
auugguacagguaaggacc

SEQ ID NO: 1385238 - RNA, 19 nt, Artificial Sequence
  Description of Artificial Sequence: Synthetic oligonucleotide
  Sense strand starting at position 2389 of SEQ ID NO: 1242965
cgcugccggcucuauuuaa

SEQ ID NO: 1385239 - RNA, 19 nt, Artificial Sequence
  Description of Artificial Sequence: Synthetic oligonucleotide
  Antisense strand to SEQ ID NO: 1385238
uuaaauagagccggcagcg

SEQ ID NO: 1385240 - RNA, 19 nt, Artificial Sequence
  Description of Artificial Sequence: Synthetic oligonucleotide
  Sense strand starting at position 2990 of SEQ ID NO: 1242965
gagugagauuccgugacua

SEQ ID NO: 1385241 - RNA, 19 nt, Artificial Sequence
  Description of Artificial Sequence: Synthetic oligonucleotide
  Antisense strand to SEQ ID NO: 1385240
uagucacggaaucucacuc

SEQ ID NO: 1385242 - RNA, 19 nt, Artificial Sequence
  Description of Artificial Sequence: Synthetic oligonucleotide
  Sense strand starting at position 2992 of SEQ ID NO: 1242965
gugagauuccgugacuauu

SEQ ID NO: 1385243 - RNA, 19 nt, Artificial Sequence
  Description of Artificial Sequence: Synthetic oligonucleotide
  Antisense strand to SEQ ID NO: 1385242
aauagucacggaaucucac

SEQ ID NO: 1385244 - RNA, 19 nt, Artificial Sequence
  Description of Artificial Sequence: Synthetic oligonucleotide
  Sense strand starting at position 3308 of SEQ ID NO: 1242965
gaacguauccaggagcaau

SEQ ID NO: 1385245 - RNA, 19 nt, Artificial Sequence
  Description of Artificial Sequence: Synthetic oligonucleotide
  Antisense strand to SEQ ID NO: 1385244
auugcuccuggauacguuc

SEQ ID NO: 1385246 - RNA, 19 nt, Artificial Sequence
  Description of Artificial Sequence: Synthetic oligonucleotide
  Sense strand starting at position 3322 of SEQ ID NO: 1242965
gcaauuccacuucgaauga

SEQ ID NO: 1385247 - RNA, 19 nt, Artificial Sequence
  Description of Artificial Sequence: Synthetic oligonucleotide
  Antisense strand to SEQ ID NO: 1385246
ucauucgaaguggaauugc

SEQ ID NO: 1385248 - RNA, 19 nt, Artificial Sequence
  Description of Artificial Sequence: Synthetic oligonucleotide
  Sense strand starting at position 3332 of SEQ ID NO: 1242965
uucgaaugauuccuaagug

SEQ ID NO: 1385249 - RNA, 19 nt, Artificial Sequence
  Description of Artificial Sequence: Synthetic oligonucleotide
  Antisense strand to SEQ ID NO: 1385248
cacuuaggaaucauucgaa

SEQ ID NO: 1385250 - RNA, 19 nt, Artificial Sequence
  Description of Artificial Sequence: Synthetic oligonucleotide
  Sense strand starting at position 3408 of SEQ ID NO: 1242965
ccaguacuucccugaggga

SEQ ID NO: 1385251 - RNA, 19 nt, Artificial Sequence
  Description of Artificial Sequence: Synthetic oligonucleotide
  Antisense strand to SEQ ID NO: 1385250
ucccucagggaaguacugg

SEQ ID NO: 1385252 - RNA, 19 nt, Artificial Sequence
  Description of Artificial Sequence: Synthetic oligonucleotide
  Sense strand starting at position 3442 of SEQ ID NO: 1242965
ggaucagaacccugcauca

SEQ ID NO: 1385253 - RNA, 19 nt, Artificial Sequence
  Description of Artificial Sequence: Synthetic oligonucleotide
  Antisense strand to SEQ ID NO: 1385252
ugaugcaggguucugaucc

SEQ ID NO: 1385254 - RNA, 19 nt, Artificial Sequence
  Description of Artificial Sequence: Synthetic oligonucleotide
  Sense strand starting at position 3468 of SEQ ID NO: 1242965
ccuaaauggccauggcuaa

SEQ ID NO: 1385255 - RNA, 19 nt, Artificial Sequence
  Description of Artificial Sequence: Synthetic oligonucleotide
  Antisense strand to SEQ ID NO: 1385254
uuagccauggccauuuagg

SEQ ID NO: 1385256 - RNA, 19 nt, Artificial Sequence
  Description of Artificial Sequence: Synthetic oligonucleotide
  Sense strand starting at position 3578 of SEQ ID NO: 1242965
gccauagaaugucuagaug

SEQ ID NO: 1385257 - RNA, 19 nt, Artificial Sequence
  Description of Artificial Sequence: Synthetic oligonucleotide
  Antisense strand to SEQ ID NO: 1385256
caucuagacauucuauggc

SEQ ID NO: 1385258 - RNA, 19 nt, Artificial Sequence
  Description of Artificial Sequence: Synthetic oligonucleotide
  Sense strand starting at position 3611 of SEQ ID NO: 1242965
cacccugaucaggguauaa

SEQ ID NO: 1385259 - RNA, 19 nt, Artificial Sequence
  Description of Artificial Sequence: Synthetic oligonucleotide
  Antisense strand to SEQ ID NO: 1385258
uuauacccugaucagggug

SEQ ID NO: 1385260 - RNA, 19 nt, Artificial Sequence
  Description of Artificial Sequence: Synthetic oligonucleotide
  Sense strand starting at position 3622 of SEQ ID NO: 1242965
ggguauaacugacuuccuu

SEQ ID NO: 1385261 - RNA, 19 nt, Artificial Sequence
  Description of Artificial Sequence: Synthetic oligonucleotide
  Antisense strand to SEQ ID NO: 1385260
aaggaagucaguuauaccc

SEQ ID NO: 1385262 - RNA, 19 nt, Artificial Sequence
  Description of Artificial Sequence: Synthetic oligonucleotide
  Sense strand starting at position 3647 of SEQ ID NO: 1242965
gcuguaaacugaucauuag

SEQ ID NO: 1385263 - RNA, 19 nt, Artificial Sequence
  Description of Artificial Sequence: Synthetic oligonucleotide
  Antisense strand to SEQ ID NO: 1385262
cuaaugaucaguuuacagc

SEQ ID NO: 1385264 - RNA, 19 nt, Artificial Sequence
  Description of Artificial Sequence: Synthetic oligonucleotide
  Sense strand starting at position 3650 of SEQ ID NO: 1242965
guaaacugaucauuagguu

SEQ ID NO: 1385265 - RNA, 19 nt, Artificial Sequence
  Description of Artificial Sequence: Synthetic oligonucleotide
  Antisense strand to SEQ ID NO: 1385264
aaccuaaugaucaguuuac

SEQ ID NO: 1385266 - RNA, 19 nt, Artificial Sequence
  Description of Artificial Sequence: Synthetic oligonucleotide
  Sense strand starting at position 3662 of SEQ ID NO: 1242965
uuagguucuguggaucuua

SEQ ID NO: 1385267 - RNA, 19 nt, Artificial Sequence
  Description of Artificial Sequence: Synthetic oligonucleotide
  Antisense strand to SEQ ID NO: 1385266
uaagauccacagaaccuaa

SEQ ID NO: 1385268 - RNA, 19 nt, Artificial Sequence
  Description of Artificial Sequence: Synthetic oligonucleotide
  Sense strand starting at position 3737 of SEQ ID NO: 1242965
ccaauucuacggcagauaa

SEQ ID NO: 1385269 - RNA, 19 nt, Artificial Sequence
  Description of Artificial Sequence: Synthetic oligonucleotide
  Antisense strand to SEQ ID NO: 1385268
uuaucugccguagaauugg

SEQ ID NO: 1385270 - RNA, 19 nt, Artificial Sequence
  Description of Artificial Sequence: Synthetic oligonucleotide
  Sense strand starting at position 3793 of SEQ ID NO: 1242965
uggguuaacugauuaaaua

SEQ ID NO: 1385271 - RNA, 19 nt, Artificial Sequence
  Description of Artificial Sequence: Synthetic oligonucleotide
  Antisense strand to SEQ ID NO: 1385270
uauuuaaucaguuaaccca

SEQ ID NO: 1385272 - RNA, 19 nt, Artificial Sequence
  Description of Artificial Sequence: Synthetic oligonucleotide
  Sense strand starting at position 3939 of SEQ ID NO: 1242965
ucauuuaucuuuggagaua

SEQ ID NO: 1385273 - RNA, 19 nt, Artificial Sequence
  Description of Artificial Sequence: Synthetic oligonucleotide
  Antisense strand to SEQ ID NO: 1385272
uaucuccaaagauaaauga

SEQ ID NO: 1385274 - RNA, 19 nt, Artificial Sequence
  Description of Artificial Sequence: Synthetic oligonucleotide
  Sense strand starting at position 3940 of SEQ ID NO: 1242965
cauuuaucuuuggagauag

SEQ ID NO: 1385275 - RNA, 19 nt, Artificial Sequence
  Description of Artificial Sequence: Synthetic oligonucleotide
  Antisense strand to SEQ ID NO: 1385274
cuaucuccaaagauaaaug

SEQ ID NO: 1385276 - RNA, 19 nt, Artificial Sequence
  Description of Artificial Sequence: Synthetic oligonucleotide
  Sense strand starting at position 5 of SEQ ID NO: 1242966
ugcaccagugccguuuaaa

SEQ ID NO: 1385277 - RNA, 19 nt, Artificial Sequence
  Description of Artificial Sequence: Synthetic oligonucleotide
  Antisense strand to SEQ ID NO: 1385276
uuuaaacggcacuggugca

SEQ ID NO: 1385278 - RNA, 19 nt, Artificial Sequence
  Description of Artificial Sequence: Synthetic oligonucleotide
  Sense strand starting at position 23 of SEQ ID NO: 1242966
aauguuauggcuggcagga

SEQ ID NO: 1385279 - RNA, 19 nt, Artificial Sequence
  Description of Artificial Sequence: Synthetic oligonucleotide
  Antisense strand to SEQ ID NO: 1385278
uccugccagccauaacauu

SEQ ID NO: 1385280 - RNA, 19 nt, Artificial Sequence
  Description of Artificial Sequence: Synthetic oligonucleotide
  Sense strand starting at position 25 of SEQ ID NO: 1242966
uguuauggcuggcaggaaa

SEQ ID NO: 1385281 - RNA, 19 nt, Artificial Sequence
  Description of Artificial Sequence: Synthetic oligonucleotide
  Antisense strand to SEQ ID NO: 1385280
uuuccugccagccauaaca

SEQ ID NO: 1385282 - RNA, 19 nt, Artificial Sequence
  Description of Artificial Sequence: Synthetic oligonucleotide
  Sense strand starting at position 36 of SEQ ID NO: 1242966
gcaggaaagcuggauuauu

SEQ ID NO: 1385283 - RNA, 19 nt, Artificial Sequence
  Description of Artificial Sequence: Synthetic oligonucleotide
  Antisense strand to SEQ ID NO: 1385282
aauaauccagcuuuccugc

SEQ ID NO: 1385284 - RNA, 19 nt, Artificial Sequence
  Description of Artificial Sequence: Synthetic oligonucleotide
  Sense strand starting at position 135 of SEQ ID NO: 1242966
agaugaacaucucacaaga

SEQ ID NO: 1385285 - RNA, 19 nt, Artificial Sequence
  Description of Artificial Sequence: Synthetic oligonucleotide
  Antisense strand to SEQ ID NO: 1385284
ucuugugagauguucaucu

SEQ ID NO: 1385286 - RNA, 19 nt, Artificial Sequence
  Description of Artificial Sequence: Synthetic oligonucleotide
  Sense strand starting at position 159 of SEQ ID NO: 1242966
gcuccaaucuguugcgaag

SEQ ID NO: 1385287 - RNA, 19 nt, Artificial Sequence
  Description of Artificial Sequence: Synthetic oligonucleotide
  Antisense strand to SEQ ID NO: 1385286
cuucgcaacagauuggagc

SEQ ID NO: 1385288 - RNA, 19 nt, Artificial Sequence
  Description of Artificial Sequence: Synthetic oligonucleotide
  Sense strand starting at position 352 of SEQ ID NO: 1242966
gcaugaucuuuguaacugu

SEQ ID NO: 1385289 - RNA, 19 nt, Artificial Sequence
  Description of Artificial Sequence: Synthetic oligonucleotide
  Antisense strand to SEQ ID NO: 1385288
acaguuacaaagaucaugc

SEQ ID NO: 1385290 - RNA, 19 nt, Artificial Sequence
  Description of Artificial Sequence: Synthetic oligonucleotide
  Sense strand starting at position 359 of SEQ ID NO: 1242966
cuuuguaacuguucccuau

SEQ ID NO: 1385291 - RNA, 19 nt, Artificial Sequence
  Description of Artificial Sequence: Synthetic oligonucleotide
  Antisense strand to SEQ ID NO: 1385290
auagggaacaguuacaaag

SEQ ID NO: 1385292 - RNA, 19 nt, Artificial Sequence
  Description of Artificial Sequence: Synthetic oligonucleotide
  Sense strand starting at position 493 of SEQ ID NO: 1242966
cugucucacuccucaaagu

SEQ ID NO: 1385293 - RNA, 19 nt, Artificial Sequence
  Description of Artificial Sequence: Synthetic oligonucleotide
  Antisense strand to SEQ ID NO: 1385292
acuuugaggagugagacag

SEQ ID NO: 1385294 - RNA, 19 nt, Artificial Sequence
  Description of Artificial Sequence: Synthetic oligonucleotide
  Sense strand starting at position 541 of SEQ ID NO: 1242966
gagccugguuucggaaaca

SEQ ID NO: 1385295 - RNA, 19 nt, Artificial Sequence
  Description of Artificial Sequence: Synthetic oligonucleotide
  Antisense strand to SEQ ID NO: 1385294
uguuuccgaaaccaggcuc

SEQ ID NO: 1385296 - RNA, 19 nt, Artificial Sequence
  Description of Artificial Sequence: Synthetic oligonucleotide
  Sense strand starting at position 2029 of SEQ ID NO: 1242966
cuaacuuucugccgggaga

SEQ ID NO: 1385297 - RNA, 19 nt, Artificial Sequence
  Description of Artificial Sequence: Synthetic oligonucleotide
  Antisense strand to SEQ ID NO: 1385296
ucucccggcagaaaguuag

SEQ ID NO: 1385298 - RNA, 19 nt, Artificial Sequence
  Description of Artificial Sequence: Synthetic oligonucleotide
  Sense strand starting at position 2031 of SEQ ID NO: 1242966
aacuuucugccgggagaga

SEQ ID NO: 1385299 - RNA, 19 nt, Artificial Sequence
  Description of Artificial Sequence: Synthetic oligonucleotide
  Antisense strand to SEQ ID NO: 1385298
ucucucccggcagaaaguu

SEQ ID NO: 1385300 - RNA, 19 nt, Artificial Sequence
  Description of Artificial Sequence: Synthetic oligonucleotide
  Sense strand starting at position 2434 of SEQ ID NO: 1242966
ccuucucucgcccgggaua

SEQ ID NO: 1385301 - RNA, 19 nt, Artificial Sequence
  Description of Artificial Sequence: Synthetic oligonucleotide
  Antisense strand to SEQ ID NO: 1385300
uaucccgggcgagagaagg

SEQ ID NO: 1385302 - RNA, 19 nt, Artificial Sequence
  Description of Artificial Sequence: Synthetic oligonucleotide
  Sense strand starting at position 2435 of SEQ ID NO: 1242966
cuucucucgcccgggauau

SEQ ID NO: 1385303 - RNA, 19 nt, Artificial Sequence
  Description of Artificial Sequence: Synthetic oligonucleotide
  Antisense strand to SEQ ID NO: 1385302
auaucccgggcgagagaag

SEQ ID NO: 1385304 - RNA, 19 nt, Artificial Sequence
  Description of Artificial Sequence: Synthetic oligonucleotide
  Sense strand starting at position 2447 of SEQ ID NO: 1242966
gggauauccuccugccuuc

SEQ ID NO: 1385305 - RNA, 19 nt, Artificial Sequence
  Description of Artificial Sequence: Synthetic oligonucleotide
  Antisense strand to SEQ ID NO: 1385304
gaaggcaggaggauauccc

SEQ ID NO: 1385306 - RNA, 19 nt, Artificial Sequence
  Description of Artificial Sequence: Synthetic oligonucleotide
  Sense strand starting at position 2718 of SEQ ID NO: 1242966
gggcauugccacuaacgga

SEQ ID NO: 1385307 - RNA, 19 nt, Artificial Sequence
  Description of Artificial Sequence: Synthetic oligonucleotide
  Antisense strand to SEQ ID NO: 1385306
uccguuaguggcaaugccc

SEQ ID NO: 1385308 - RNA, 19 nt, Artificial Sequence
  Description of Artificial Sequence: Synthetic oligonucleotide
  Sense strand starting at position 2743 of SEQ ID NO: 1242966
gguuuccuggacugaaaua

SEQ ID NO: 1385309 - RNA, 19 nt, Artificial Sequence
  Description of Artificial Sequence: Synthetic oligonucleotide
  Antisense strand to SEQ ID NO: 1385308
uauuucaguccaggaaacc

SEQ ID NO: 1385310 - RNA, 19 nt, Artificial Sequence
  Description of Artificial Sequence: Synthetic oligonucleotide
  Sense strand starting at position 2767 of SEQ ID NO: 1242966
ggaccacugucgcucugaa

SEQ ID NO: 1385311 - RNA, 19 nt, Artificial Sequence
  Description of Artificial Sequence: Synthetic oligonucleotide
  Antisense strand to SEQ ID NO: 1385310
uucagagcgacaguggucc

SEQ ID NO: 1385312 - RNA, 19 nt, Artificial Sequence
  Description of Artificial Sequence: Synthetic oligonucleotide
  Sense strand starting at position 2825 of SEQ ID NO: 1242966
gugcaucggcucgcugaaa

SEQ ID NO: 1385313 - RNA, 19 nt, Artificial Sequence
  Description of Artificial Sequence: Synthetic oligonucleotide
  Antisense strand to SEQ ID NO: 1385312
uuucagcgagccgaugcac

SEQ ID NO: 1385314 - RNA, 19 nt, Artificial Sequence
  Description of Artificial Sequence: Synthetic oligonucleotide
  Sense strand starting at position 2826 of SEQ ID NO: 1242966
ugcaucggcucgcugaaau

SEQ ID NO: 1385315 - RNA, 19 nt, Artificial Sequence
  Description of Artificial Sequence: Synthetic oligonucleotide
  Antisense strand to SEQ ID NO: 1385314
auuucagcgagccgaugca

SEQ ID NO: 1385316 - RNA, 19 nt, Artificial Sequence
  Description of Artificial Sequence: Synthetic oligonucleotide
  Sense strand starting at position 2917 of SEQ ID NO: 1242966
ucagaaggcuuuggaagau

SEQ ID NO: 1385317 - RNA, 19 nt, Artificial Sequence
  Description of Artificial Sequence: Synthetic oligonucleotide
  Antisense strand to SEQ ID NO: 1385316
aucuuccaaagccuucuga

SEQ ID NO: 1385318 - RNA, 19 nt, Artificial Sequence
  Description of Artificial Sequence: Synthetic oligonucleotide
  Sense strand starting at position 3092 of SEQ ID NO: 1242966
ggcucuagugaguaccauu

SEQ ID NO: 1385319 - RNA, 19 nt, Artificial Sequence
  Description of Artificial Sequence: Synthetic oligonucleotide
  Antisense strand to SEQ ID NO: 1385318
aaugguacucacuagagcc

SEQ ID NO: 1385320 - RNA, 19 nt, Artificial Sequence
  Description of Artificial Sequence: Synthetic oligonucleotide
  Sense strand starting at position 3185 of SEQ ID NO: 1242966
uuuguuugaucacguaaua

SEQ ID NO: 1385321 - RNA, 19 nt, Artificial Sequence
  Description of Artificial Sequence: Synthetic oligonucleotide
  Antisense strand to SEQ ID NO: 1385320
uauuacgugaucaaacaaa

SEQ ID NO: 1385322 - RNA, 19 nt, Artificial Sequence
  Description of Artificial Sequence: Synthetic oligonucleotide
  Sense strand starting at position 3190 of SEQ ID NO: 1242966
uugaucacguaauaggaaa

SEQ ID NO: 1385323 - RNA, 19 nt, Artificial Sequence
  Description of Artificial Sequence: Synthetic oligonucleotide
  Antisense strand to SEQ ID NO: 1385322
uuuccuauuacgugaucaa

SEQ ID NO: 1385324 - RNA, 19 nt, Artificial Sequence
  Description of Artificial Sequence: Synthetic oligonucleotide
  Sense strand starting at position 3248 of SEQ ID NO: 1242966
cgagauaccuagugccaaa

SEQ ID NO: 1385325 - RNA, 19 nt, Artificial Sequence
  Description of Artificial Sequence: Synthetic oligonucleotide
  Antisense strand to SEQ ID NO: 1385324
uuuggcacuagguaucucg

SEQ ID NO: 1385326 - RNA, 19 nt, Artificial Sequence
  Description of Artificial Sequence: Synthetic oligonucleotide
  Sense strand starting at position 3445 of SEQ ID NO: 1242966
ucugguguccuguaaauca

SEQ ID NO: 1385327 - RNA, 19 nt, Artificial Sequence
  Description of Artificial Sequence: Synthetic oligonucleotide
  Antisense strand to SEQ ID NO: 1385326
ugauuuacaggacaccaga

SEQ ID NO: 1385328 - RNA, 19 nt, Artificial Sequence
  Description of Artificial Sequence: Synthetic oligonucleotide
  Sense strand starting at position 3455 of SEQ ID NO: 1242966
uguaaaucauucuguguaa

SEQ ID NO: 1385329 - RNA, 19 nt, Artificial Sequence
  Description of Artificial Sequence: Synthetic oligonucleotide
  Antisense strand to SEQ ID NO: 1385328
uuacacagaaugauuuaca

SEQ ID NO: 1385330 - RNA, 19 nt, Artificial Sequence
  Description of Artificial Sequence: Synthetic oligonucleotide
  Sense strand starting at position 3456 of SEQ ID NO: 1242966
guaaaucauucuguguaac

SEQ ID NO: 1385331 - RNA, 19 nt, Artificial Sequence
  Description of Artificial Sequence: Synthetic oligonucleotide
  Antisense strand to SEQ ID NO: 1385330
guuacacagaaugauuuac

SEQ ID NO: 1385332 - RNA, 19 nt, Artificial Sequence
  Description of Artificial Sequence: Synthetic oligonucleotide
  Sense strand starting at position 3467 of SEQ ID NO: 1242966
uguguaacuagggaugcuu

SEQ ID NO: 1385333 - RNA, 19 nt, Artificial Sequence
  Description of Artificial Sequence: Synthetic oligonucleotide
  Antisense strand to SEQ ID NO: 1385332
aagcaucccuaguuacaca

SEQ ID NO: 1385334 - RNA, 19 nt, Artificial Sequence
  Description of Artificial Sequence: Synthetic oligonucleotide
  Sense strand starting at position 3505 of SEQ ID NO: 1242966
gcauuacuguaaugucaau

SEQ ID NO: 1385335 - RNA, 19 nt, Artificial Sequence
  Description of Artificial Sequence: Synthetic oligonucleotide
  Antisense strand to SEQ ID NO: 1385334
auugacauuacaguaaugc

SEQ ID NO: 1385336 - RNA, 19 nt, Artificial Sequence
  Description of Artificial Sequence: Synthetic oligonucleotide
  Sense strand starting at position 3511 of SEQ ID NO: 1242966
cuguaaugucaaugggaag

SEQ ID NO: 1385337 - RNA, 19 nt, Artificial Sequence
  Description of Artificial Sequence: Synthetic oligonucleotide
  Antisense strand to SEQ ID NO: 1385336
cuucccauugacauuacag

SEQ ID NO: 1385338 - RNA, 19 nt, Artificial Sequence
  Description of Artificial Sequence: Synthetic oligonucleotide
  Sense strand starting at position 3591 of SEQ ID NO: 1242966
gauccaagguggucaucua

SEQ ID NO: 1385339 - RNA, 19 nt, Artificial Sequence
  Description of Artificial Sequence: Synthetic oligonucleotide
  Antisense strand to SEQ ID NO: 1385338
uagaugaccaccuuggauc

SEQ ID NO: 1385340 - RNA, 19 nt, Artificial Sequence
  Description of Artificial Sequence: Synthetic oligonucleotide
  Sense strand starting at position 3627 of SEQ ID NO: 1242966
cagauauugccuugucagc

SEQ ID NO: 1385341 - RNA, 19 nt, Artificial Sequence
  Description of Artificial Sequence: Synthetic oligonucleotide
  Antisense strand to SEQ ID NO: 1385340
gcugacaaggcaauaucug

SEQ ID NO: 1385342 - RNA, 19 nt, Artificial Sequence
  Description of Artificial Sequence: Synthetic oligonucleotide
  Sense strand starting at position 3629 of SEQ ID NO: 1242966
gauauugccuugucagcga

SEQ ID NO: 1385343 - RNA, 19 nt, Artificial Sequence
  Description of Artificial Sequence: Synthetic oligonucleotide
  Antisense strand to SEQ ID NO: 1385342
ucgcugacaaggcaauauc

SEQ ID NO: 1385344 - RNA, 19 nt, Artificial Sequence
  Description of Artificial Sequence: Synthetic oligonucleotide
  Sense strand starting at position 3671 of SEQ ID NO: 1242966
gcacuagaugucuggcaua

SEQ ID NO: 1385345 - RNA, 19 nt, Artificial Sequence
  Description of Artificial Sequence: Synthetic oligonucleotide
  Antisense strand to SEQ ID NO: 1385344
uaugccagacaucuagugc

SEQ ID NO: 1385346 - RNA, 19 nt, Artificial Sequence
  Description of Artificial Sequence: Synthetic oligonucleotide
  Sense strand starting at position 3796 of SEQ ID NO: 1242966
cucucaaauuucgaaaggu

SEQ ID NO: 1385347 - RNA, 19 nt, Artificial Sequence
  Description of Artificial Sequence: Synthetic oligonucleotide
  Antisense strand to SEQ ID NO: 1385346
accuuucgaaauuugagag

SEQ ID NO: 1385348 - RNA, 19 nt, Artificial Sequence
  Description of Artificial Sequence: Synthetic oligonucleotide
  Sense strand starting at position 3873 of SEQ ID NO: 1242966
cagugacauuaagaaaugu

SEQ ID NO: 1385349 - RNA, 19 nt, Artificial Sequence
  Description of Artificial Sequence: Synthetic oligonucleotide
  Antisense strand to SEQ ID NO: 1385348
acauuucuuaaugucacug

SEQ ID NO: 1385350 - RNA, 19 nt, Artificial Sequence
  Description of Artificial Sequence: Synthetic oligonucleotide
  Sense strand starting at position 3888 of SEQ ID NO: 1242966
auguaaacuggcugcaaua

SEQ ID NO: 1385351 - RNA, 19 nt, Artificial Sequence
  Description of Artificial Sequence: Synthetic oligonucleotide
  Antisense strand to SEQ ID NO: 1385350
uauugcagccaguuuacau

SEQ ID NO: 1385352 - RNA, 19 nt, Artificial Sequence
  Description of Artificial Sequence: Synthetic oligonucleotide
  Sense strand starting at position 3890 of SEQ ID NO: 1242966
guaaacuggcugcaauagu

SEQ ID NO: 1385353 - RNA, 19 nt, Artificial Sequence
  Description of Artificial Sequence: Synthetic oligonucleotide
  Antisense strand to SEQ ID NO: 1385352
acuauugcagccaguuuac

SEQ ID NO: 1385354 - RNA, 19 nt, Artificial Sequence
  Description of Artificial Sequence: Synthetic oligonucleotide
  Sense strand starting at position 3956 of SEQ ID NO: 1242966
agaggacguuacuguugaa

SEQ ID NO: 1385355 - RNA, 19 nt, Artificial Sequence
  Description of Artificial Sequence: Synthetic oligonucleotide
  Antisense strand to SEQ ID NO: 1385354
uucaacaguaacguccucu

SEQ ID NO: 1385356 - RNA, 19 nt, Artificial Sequence
  Description of Artificial Sequence: Synthetic oligonucleotide
  Sense strand starting at position 33 of SEQ ID NO: 1242967
ucaagaaucuaccagagca

SEQ ID NO: 1385357 - RNA, 19 nt, Artificial Sequence
  Description of Artificial Sequence: Synthetic oligonucleotide
  Antisense strand to SEQ ID NO: 1385356
ugcucugguagauucuuga

SEQ ID NO: 1385358 - RNA, 19 nt, Artificial Sequence
  Description of Artificial Sequence: Synthetic oligonucleotide
  Sense strand starting at position 311 of SEQ ID NO: 1242967
cccagucucuugcugucaa

SEQ ID NO: 1385359 - RNA, 19 nt, Artificial Sequence
  Description of Artificial Sequence: Synthetic oligonucleotide
  Antisense strand to SEQ ID NO: 1385358
uugacagcaagagacuggg

SEQ ID NO: 1385360 - RNA, 19 nt, Artificial Sequence
  Description of Artificial Sequence: Synthetic oligonucleotide
  Sense strand starting at position 312 of SEQ ID NO: 1242967
ccagucucuugcugucaaa

SEQ ID NO: 1385361 - RNA, 19 nt, Artificial Sequence
  Description of Artificial Sequence: Synthetic oligonucleotide
  Antisense strand to SEQ ID NO: 1385360
uuugacagcaagagacugg

SEQ ID NO: 1385362 - RNA, 19 nt, Artificial Sequence
  Description of Artificial Sequence: Synthetic oligonucleotide
  Sense strand starting at position 315 of SEQ ID NO: 1242967
gucucuugcugucaaagcu

SEQ ID NO: 1385363 - RNA, 19 nt, Artificial Sequence
  Description of Artificial Sequence: Synthetic oligonucleotide
  Antisense strand to SEQ ID NO: 1385362
agcuuugacagcaagagac

SEQ ID NO: 1385364 - RNA, 19 nt, Artificial Sequence
  Description of Artificial Sequence: Synthetic oligonucleotide
  Sense strand starting at position 352 of SEQ ID NO: 1242967
cucugaaguguuuacucca

SEQ ID NO: 1385365 - RNA, 19 nt, Artificial Sequence
  Description of Artificial Sequence: Synthetic oligonucleotide
  Antisense strand to SEQ ID NO: 1385364
uggaguaaacacuucagag

SEQ ID NO: 1385366 - RNA, 19 nt, Artificial Sequence
  Description of Artificial Sequence: Synthetic oligonucleotide
  Sense strand starting at position 355 of SEQ ID NO: 1242967
ugaaguguuuacuccaguu

SEQ ID NO: 1385367 - RNA, 19 nt, Artificial Sequence
  Description of Artificial Sequence: Synthetic oligonucleotide
  Antisense strand to SEQ ID NO: 1385366
aacuggaguaaacacuuca

SEQ ID NO: 1385368 - RNA, 19 nt, Artificial Sequence
  Description of Artificial Sequence: Synthetic oligonucleotide
  Sense strand starting at position 1105 of SEQ ID NO: 1242967
aaggguuccugugcgcaga

SEQ ID NO: 1385369 - RNA, 19 nt, Artificial Sequence
  Description of Artificial Sequence: Synthetic oligonucleotide
  Antisense strand to SEQ ID NO: 1385368
ucugcgcacaggaacccuu

SEQ ID NO: 1385370 - RNA, 19 nt, Artificial Sequence
  Description of Artificial Sequence: Synthetic oligonucleotide
  Sense strand starting at position 1384 of SEQ ID NO: 1242967
agggaauccuagccaagua

SEQ ID NO: 1385371 - RNA, 19 nt, Artificial Sequence
  Description of Artificial Sequence: Synthetic oligonucleotide
  Antisense strand to SEQ ID NO: 1385370
uacuuggcuaggauucccu

SEQ ID NO: 1385372 - RNA, 19 nt, Artificial Sequence
  Description of Artificial Sequence: Synthetic oligonucleotide
  Sense strand starting at position 1385 of SEQ ID NO: 1242967
gggaauccuagccaaguau

SEQ ID NO: 1385373 - RNA, 19 nt, Artificial Sequence
  Description of Artificial Sequence: Synthetic oligonucleotide
  Antisense strand to SEQ ID NO: 1385372
auacuuggcuaggauuccc

SEQ ID NO: 1385374 - RNA, 19 nt, Artificial Sequence
  Description of Artificial Sequence: Synthetic oligonucleotide
  Sense strand starting at position 1607 of SEQ ID NO: 1242967
gcucguagcaccugucgaa

SEQ ID NO: 1385375 - RNA, 19 nt, Artificial Sequence
  Description of Artificial Sequence: Synthetic oligonucleotide
  Antisense strand to SEQ ID NO: 1385374
uucgacaggugcuacgagc

SEQ ID NO: 1385376 - RNA, 19 nt, Artificial Sequence
  Description of Artificial Sequence: Synthetic oligonucleotide
  Sense strand starting at position 1610 of SEQ ID NO: 1242967
cguagcaccugucgaagaa

SEQ ID NO: 1385377 - RNA, 19 nt, Artificial Sequence
  Description of Artificial Sequence: Synthetic oligonucleotide
  Antisense strand to SEQ ID NO: 1385376
uucuucgacaggugcuacg

SEQ ID NO: 1385378 - RNA, 19 nt, Artificial Sequence
  Description of Artificial Sequence: Synthetic oligonucleotide
  Sense strand starting at position 2398 of SEQ ID NO: 1242967
ucgggacccucuguuugaa

SEQ ID NO: 1385379 - RNA, 19 nt, Artificial Sequence
  Description of Artificial Sequence: Synthetic oligonucleotide
  Antisense strand to SEQ ID NO: 1385378
uucaaacagagggucccga

SEQ ID NO: 1385380 - RNA, 19 nt, Artificial Sequence
  Description of Artificial Sequence: Synthetic oligonucleotide
  Sense strand starting at position 2400 of SEQ ID NO: 1242967
gggacccucuguuugaaga

SEQ ID NO: 1385381 - RNA, 19 nt, Artificial Sequence
  Description of Artificial Sequence: Synthetic oligonucleotide
  Antisense strand to SEQ ID NO: 1385380
ucuucaaacagaggguccc

SEQ ID NO: 1385382 - RNA, 19 nt, Artificial Sequence
  Description of Artificial Sequence: Synthetic oligonucleotide
  Sense strand starting at position 2861 of SEQ ID NO: 1242967
cagagacaucagugaugca

SEQ ID NO: 1385383 - RNA, 19 nt, Artificial Sequence
  Description of Artificial Sequence: Synthetic oligonucleotide
  Antisense strand to SEQ ID NO: 1385382
ugcaucacugaugucucug

SEQ ID NO: 1385384 - RNA, 19 nt, Artificial Sequence
  Description of Artificial Sequence: Synthetic oligonucleotide
  Sense strand starting at position 2864 of SEQ ID NO: 1242967
agacaucagugaugcauuu

SEQ ID NO: 1385385 - RNA, 19 nt, Artificial Sequence
  Description of Artificial Sequence: Synthetic oligonucleotide
  Antisense strand to SEQ ID NO: 1385384
aaaugcaucacugaugucu

SEQ ID NO: 1385386 - RNA, 19 nt, Artificial Sequence
  Description of Artificial Sequence: Synthetic oligonucleotide
  Sense strand starting at position 3137 of SEQ ID NO: 1242967
aggcaaaggugguaugaga

SEQ ID NO: 1385387 - RNA, 19 nt, Artificial Sequence
  Description of Artificial Sequence: Synthetic oligonucleotide
  Antisense strand to SEQ ID NO: 1385386
ucucauaccaccuuugccu

SEQ ID NO: 1385388 - RNA, 19 nt, Artificial Sequence
  Description of Artificial Sequence: Synthetic oligonucleotide
  Sense strand starting at position 3280 of SEQ ID NO: 1242967
ugggcucugcugcguuaau

SEQ ID NO: 1385389 - RNA, 19 nt, Artificial Sequence
  Description of Artificial Sequence: Synthetic oligonucleotide
  Antisense strand to SEQ ID NO: 1385388
auuaacgcagcagagccca

SEQ ID NO: 1385390 - RNA, 19 nt, Artificial Sequence
  Description of Artificial Sequence: Synthetic oligonucleotide
  Sense strand starting at position 3282 of SEQ ID NO: 1242967
ggcucugcugcguuaauga

SEQ ID NO: 1385391 - RNA, 19 nt, Artificial Sequence
  Description of Artificial Sequence: Synthetic oligonucleotide
  Antisense strand to SEQ ID NO: 1385390
ucauuaacgcagcagagcc

SEQ ID NO: 1385392 - RNA, 19 nt, Artificial Sequence
  Description of Artificial Sequence: Synthetic oligonucleotide
  Sense strand starting at position 3291 of SEQ ID NO: 1242967
gcguuaaugagccguucca

SEQ ID NO: 1385393 - RNA, 19 nt, Artificial Sequence
  Description of Artificial Sequence: Synthetic oligonucleotide
  Antisense strand to SEQ ID NO: 1385392
uggaacggcucauuaacgc

SEQ ID NO: 1385394 - RNA, 19 nt, Artificial Sequence
  Description of Artificial Sequence: Synthetic oligonucleotide
  Sense strand starting at position 3312 of SEQ ID NO: 1242967
ccugauggcaucuggacaa

SEQ ID NO: 1385395 - RNA, 19 nt, Artificial Sequence
  Description of Artificial Sequence: Synthetic oligonucleotide
  Antisense strand to SEQ ID NO: 1385394
uuguccagaugccaucagg

SEQ ID NO: 1385396 - RNA, 19 nt, Artificial Sequence
  Description of Artificial Sequence: Synthetic oligonucleotide
  Sense strand starting at position 3567 of SEQ ID NO: 1242967
uggcuuaugcugggucaca

SEQ ID NO: 1385397 - RNA, 19 nt, Artificial Sequence
  Description of Artificial Sequence: Synthetic oligonucleotide
  Antisense strand to SEQ ID NO: 1385396
ugugacccagcauaagcca

SEQ ID NO: 1385398 - RNA, 19 nt, Artificial Sequence
  Description of Artificial Sequence: Synthetic oligonucleotide
  Sense strand starting at position 3585 of SEQ ID NO: 1242967
aggaaauucuucuucuggu

SEQ ID NO: 1385399 - RNA, 19 nt, Artificial Sequence
  Description of Artificial Sequence: Synthetic oligonucleotide
  Antisense strand to SEQ ID NO: 1385398
accagaagaagaauuuccu

SEQ ID NO: 1385400 - RNA, 19 nt, Artificial Sequence
  Description of Artificial Sequence: Synthetic oligonucleotide
  Sense strand starting at position 3586 of SEQ ID NO: 1242967
ggaaauucuucuucugguc

SEQ ID NO: 1385401 - RNA, 19 nt, Artificial Sequence
  Description of Artificial Sequence: Synthetic oligonucleotide
  Antisense strand to SEQ ID NO: 1385400
gaccagaagaagaauuucc

SEQ ID NO: 1385402 - RNA, 19 nt, Artificial Sequence
  Description of Artificial Sequence: Synthetic oligonucleotide
  Sense strand starting at position 39 of SEQ ID NO: 1242968
cugggaucauggcugggaa

SEQ ID NO: 1385403 - RNA, 19 nt, Artificial Sequence
  Description of Artificial Sequence: Synthetic oligonucleotide
  Antisense strand to SEQ ID NO: 1385402
uucccagccaugaucccag

SEQ ID NO: 1385404 - RNA, 19 nt, Artificial Sequence
  Description of Artificial Sequence: Synthetic oligonucleotide
  Sense strand starting at position 59 of SEQ ID NO: 1242968
ugaucuacagaaugucuga

SEQ ID NO: 1385405 - RNA, 19 nt, Artificial Sequence
  Description of Artificial Sequence: Synthetic oligonucleotide
  Antisense strand to SEQ ID NO: 1385404
ucagacauucuguagauca

SEQ ID NO: 1385406 - RNA, 19 nt, Artificial Sequence
  Description of Artificial Sequence: Synthetic oligonucleotide
  Sense strand starting at position 62 of SEQ ID NO: 1242968
ucuacagaaugucugacua

SEQ ID NO: 1385407 - RNA, 19 nt, Artificial Sequence
  Description of Artificial Sequence: Synthetic oligonucleotide
  Antisense strand to SEQ ID NO: 1385406
uagucagacauucuguaga

SEQ ID NO: 1385408 - RNA, 19 nt, Artificial Sequence
  Description of Artificial Sequence: Synthetic oligonucleotide
  Sense strand starting at position 94 of SEQ ID NO: 1242968
cuuacagguucucucuauu

SEQ ID NO: 1385409 - RNA, 19 nt, Artificial Sequence
  Description of Artificial Sequence: Synthetic oligonucleotide
  Antisense strand to SEQ ID NO: 1385408
aauagagagaaccuguaag

SEQ ID NO: 1385410 - RNA, 19 nt, Artificial Sequence
  Description of Artificial Sequence: Synthetic oligonucleotide
  Sense strand starting at position 97 of SEQ ID NO: 1242968
acagguucucucuauucuu

SEQ ID NO: 1385411 - RNA, 19 nt, Artificial Sequence
  Description of Artificial Sequence: Synthetic oligonucleotide
  Antisense strand to SEQ ID NO: 1385410
aagaauagagagaaccugu

SEQ ID NO: 1385412 - RNA, 19 nt, Artificial Sequence
  Description of Artificial Sequence: Synthetic oligonucleotide
  Sense strand starting at position 593 of SEQ ID NO: 1242968
ucaucaagugcugaaguua

SEQ ID NO: 1385413 - RNA, 19 nt, Artificial Sequence
  Description of Artificial Sequence: Synthetic oligonucleotide
  Antisense strand to SEQ ID NO: 1385412
uaacuucagcacuugauga

SEQ ID NO: 1385414 - RNA, 19 nt, Artificial Sequence
  Description of Artificial Sequence: Synthetic oligonucleotide
  Sense strand starting at position 689 of SEQ ID NO: 1242968
uagggaaacuggucuucca

SEQ ID NO: 1385415 - RNA, 19 nt, Artificial Sequence
  Description of Artificial Sequence: Synthetic oligonucleotide
  Antisense strand to SEQ ID NO: 1385414
uggaagaccaguuucccua

SEQ ID NO: 1385416 - RNA, 19 nt, Artificial Sequence
  Description of Artificial Sequence: Synthetic oligonucleotide
  Sense strand starting at position 692 of SEQ ID NO: 1242968
ggaaacuggucuuccaauu

SEQ ID NO: 1385417 - RNA, 19 nt, Artificial Sequence
  Description of Artificial Sequence: Synthetic oligonucleotide
  Antisense strand to SEQ ID NO: 1385416
aauuggaagaccaguuucc

SEQ ID NO: 1385418 - RNA, 19 nt, Artificial Sequence
  Description of Artificial Sequence: Synthetic oligonucleotide
  Sense strand starting at position 868 of SEQ ID NO: 1242968
aggucaugcugagcaucaa

SEQ ID NO: 1385419 - RNA, 19 nt, Artificial Sequence
  Description of Artificial Sequence: Synthetic oligonucleotide
  Antisense strand to SEQ ID NO: 1385418
uugaugcucagcaugaccu

SEQ ID NO: 1385420 - RNA, 19 nt, Artificial Sequence
  Description of Artificial Sequence: Synthetic oligonucleotide
  Sense strand starting at position 869 of SEQ ID NO: 1242968
ggucaugcugagcaucaaa

SEQ ID NO: 1385421 - RNA, 19 nt, Artificial Sequence
  Description of Artificial Sequence: Synthetic oligonucleotide
  Antisense strand to SEQ ID NO: 1385420
uuugaugcucagcaugacc

SEQ ID NO: 1385422 - RNA, 19 nt, Artificial Sequence
  Description of Artificial Sequence: Synthetic oligonucleotide
  Sense strand starting at position 935 of SEQ ID NO: 1242968
agcuauuaggauugguaga

SEQ ID NO: 1385423 - RNA, 19 nt, Artificial Sequence
  Description of Artificial Sequence: Synthetic oligonucleotide
  Antisense strand to SEQ ID NO: 1385422
ucuaccaauccuaauagcu

SEQ ID NO: 1385424 - RNA, 19 nt, Artificial Sequence
  Description of Artificial Sequence: Synthetic oligonucleotide
  Sense strand starting at position 936 of SEQ ID NO: 1242968
gcuauuaggauugguagac

SEQ ID NO: 1385425 - RNA, 19 nt, Artificial Sequence
  Description of Artificial Sequence: Synthetic oligonucleotide
  Antisense strand to SEQ ID NO: 1385424
gucuaccaauccuaauagc

SEQ ID NO: 1385426 - RNA, 19 nt, Artificial Sequence
  Description of Artificial Sequence: Synthetic oligonucleotide
  Sense strand starting at position 940 of SEQ ID NO: 1242968
uuaggauugguagacguau

SEQ ID NO: 1385427 - RNA, 19 nt, Artificial Sequence
  Description of Artificial Sequence: Synthetic oligonucleotide
  Antisense strand to SEQ ID NO: 1385426
auacgucuaccaauccuaa

SEQ ID NO: 1385428 - RNA, 19 nt, Artificial Sequence
  Description of Artificial Sequence: Synthetic oligonucleotide
  Sense strand starting at position 1002 of SEQ ID NO: 1242968
cggcgcaguccuucucaga

SEQ ID NO: 1385429 - RNA, 19 nt, Artificial Sequence
  Description of Artificial Sequence: Synthetic oligonucleotide
  Antisense strand to SEQ ID NO: 1385428
ucugagaaggacugcgccg

SEQ ID NO: 1385430 - RNA, 19 nt, Artificial Sequence
  Description of Artificial Sequence: Synthetic oligonucleotide
  Sense strand starting at position 1038 of SEQ ID NO: 1242968
gcucaaauucuacaaguga

SEQ ID NO: 1385431 - RNA, 19 nt, Artificial Sequence
  Description of Artificial Sequence: Synthetic oligonucleotide
  Antisense strand to SEQ ID NO: 1385430
ucacuuguagaauuugagc

SEQ ID NO: 1385432 - RNA, 19 nt, Artificial Sequence
  Description of Artificial Sequence: Synthetic oligonucleotide
  Sense strand starting at position 1059 of SEQ ID NO: 1242968
ggcugaagcuagccugaaa

SEQ ID NO: 1385433 - RNA, 19 nt, Artificial Sequence
  Description of Artificial Sequence: Synthetic oligonucleotide
  Antisense strand to SEQ ID NO: 1385432
uuucaggcuagcuucagcc

SEQ ID NO: 1385434 - RNA, 19 nt, Artificial Sequence
  Description of Artificial Sequence: Synthetic oligonucleotide
  Sense strand starting at position 1152 of SEQ ID NO: 1242968
ggauauuucucccaaugau

SEQ ID NO: 1385435 - RNA, 19 nt, Artificial Sequence
  Description of Artificial Sequence: Synthetic oligonucleotide
  Antisense strand to SEQ ID NO: 1385434
aucauugggagaaauaucc

SEQ ID NO: 1385436 - RNA, 19 nt, Artificial Sequence
  Description of Artificial Sequence: Synthetic oligonucleotide
  Sense strand starting at position 1353 of SEQ ID NO: 1242968
gcaagaucuuccuucucug

SEQ ID NO: 1385437 - RNA, 19 nt, Artificial Sequence
  Description of Artificial Sequence: Synthetic oligonucleotide
  Antisense strand to SEQ ID NO: 1385436
cagagaaggaagaucuugc

SEQ ID NO: 1385438 - RNA, 19 nt, Artificial Sequence
  Description of Artificial Sequence: Synthetic oligonucleotide
  Sense strand starting at position 1537 of SEQ ID NO: 1242968
ggcguucgcgacagaugaa

SEQ ID NO: 1385439 - RNA, 19 nt, Artificial Sequence
  Description of Artificial Sequence: Synthetic oligonucleotide
  Antisense strand to SEQ ID NO: 1385438
uucaucugucgcgaacgcc

SEQ ID NO: 1385440 - RNA, 19 nt, Artificial Sequence
  Description of Artificial Sequence: Synthetic oligonucleotide
  Sense strand starting at position 2429 of SEQ ID NO: 1242968
acaggaagcuguccaucau

SEQ ID NO: 1385441 - RNA, 19 nt, Artificial Sequence
  Description of Artificial Sequence: Synthetic oligonucleotide
  Antisense strand to SEQ ID NO: 1385440
augauggacagcuuccugu

SEQ ID NO: 1385442 - RNA, 19 nt, Artificial Sequence
  Description of Artificial Sequence: Synthetic oligonucleotide
  Sense strand starting at position 2578 of SEQ ID NO: 1242968
acagguggucuuuaggauu

SEQ ID NO: 1385443 - RNA, 19 nt, Artificial Sequence
  Description of Artificial Sequence: Synthetic oligonucleotide
  Antisense strand to SEQ ID NO: 1385442
aauccuaaagaccaccugu

SEQ ID NO: 1385444 - RNA, 19 nt, Artificial Sequence
  Description of Artificial Sequence: Synthetic oligonucleotide
  Sense strand starting at position 2615 of SEQ ID NO: 1242968
auaggagaguccuugacug

SEQ ID NO: 1385445 - RNA, 19 nt, Artificial Sequence
  Description of Artificial Sequence: Synthetic oligonucleotide
  Antisense strand to SEQ ID NO: 1385444
cagucaaggacucuccuau

SEQ ID NO: 1385446 - RNA, 19 nt, Artificial Sequence
  Description of Artificial Sequence: Synthetic oligonucleotide
  Sense strand starting at position 2640 of SEQ ID NO: 1242968
uggcauguucuggaaacuu

SEQ ID NO: 1385447 - RNA, 19 nt, Artificial Sequence
  Description of Artificial Sequence: Synthetic oligonucleotide
  Antisense strand to SEQ ID NO: 1385446
aaguuuccagaacaugcca

SEQ ID NO: 1385448 - RNA, 19 nt, Artificial Sequence
  Description of Artificial Sequence: Synthetic oligonucleotide
  Sense strand starting at position 2705 of SEQ ID NO: 1242968
guuugacuuuagcuaggga

SEQ ID NO: 1385449 - RNA, 19 nt, Artificial Sequence
  Description of Artificial Sequence: Synthetic oligonucleotide
  Antisense strand to SEQ ID NO: 1385448
ucccuagcuaaagucaaac

SEQ ID NO: 1385450 - RNA, 19 nt, Artificial Sequence
  Description of Artificial Sequence: Synthetic oligonucleotide
  Sense strand starting at position 3191 of SEQ ID NO: 1242968
uccuuuaacugucugggaa

SEQ ID NO: 1385451 - RNA, 19 nt, Artificial Sequence
  Description of Artificial Sequence: Synthetic oligonucleotide
  Antisense strand to SEQ ID NO: 1385450
uucccagacaguuaaagga

SEQ ID NO: 1385452 - RNA, 19 nt, Artificial Sequence
  Description of Artificial Sequence: Synthetic oligonucleotide
  Sense strand starting at position 3192 of SEQ ID NO: 1242968
ccuuuaacugucugggaau

SEQ ID NO: 1385453 - RNA, 19 nt, Artificial Sequence
  Description of Artificial Sequence: Synthetic oligonucleotide
  Antisense strand to SEQ ID NO: 1385452
auucccagacaguuaaagg

SEQ ID NO: 1385454 - RNA, 19 nt, Artificial Sequence
  Description of Artificial Sequence: Synthetic oligonucleotide
  Sense strand starting at position 3221 of SEQ ID NO: 1242968
aguucucagccucaguuua

SEQ ID NO: 1385455 - RNA, 19 nt, Artificial Sequence
  Description of Artificial Sequence: Synthetic oligonucleotide
  Antisense strand to SEQ ID NO: 1385454
uaaacugaggcugagaacu

SEQ ID NO: 1385456 - RNA, 19 nt, Artificial Sequence
  Description of Artificial Sequence: Synthetic oligonucleotide
  Sense strand starting at position 3292 of SEQ ID NO: 1242968
ccaccagugucucuaacaa

SEQ ID NO: 1385457 - RNA, 19 nt, Artificial Sequence
  Description of Artificial Sequence: Synthetic oligonucleotide
  Antisense strand to SEQ ID NO: 1385456
uuguuagagacacuggugg

SEQ ID NO: 1385458 - RNA, 19 nt, Artificial Sequence
  Description of Artificial Sequence: Synthetic oligonucleotide
  Sense strand starting at position 3326 of SEQ ID NO: 1242968
ggccuugaggcaugagacu

SEQ ID NO: 1385459 - RNA, 19 nt, Artificial Sequence
  Description of Artificial Sequence: Synthetic oligonucleotide
  Antisense strand to SEQ ID NO: 1385458
agucucaugccucaaggcc

SEQ ID NO: 1385460 - RNA, 19 nt, Artificial Sequence
  Description of Artificial Sequence: Synthetic oligonucleotide
  Sense strand starting at position 3420 of SEQ ID NO: 1242968
gagagaucuuccuuucugu

SEQ ID NO: 1385461 - RNA, 19 nt, Artificial Sequence
  Description of Artificial Sequence: Synthetic oligonucleotide
  Antisense strand to SEQ ID NO: 1385460
acagaaaggaagaucucuc

SEQ ID NO: 1385462 - RNA, 19 nt, Artificial Sequence
  Description of Artificial Sequence: Synthetic oligonucleotide
  Sense strand starting at position 3494 of SEQ ID NO: 1242968
gcuuuacccgacuacuuga

SEQ ID NO: 1385463 - RNA, 19 nt, Artificial Sequence
  Description of Artificial Sequence: Synthetic oligonucleotide
  Antisense strand to SEQ ID NO: 1385462
ucaaguagucggguaaagc

SEQ ID NO: 1385464 - RNA, 19 nt, Artificial Sequence
  Description of Artificial Sequence: Synthetic oligonucleotide
  Sense strand starting at position 3497 of SEQ ID NO: 1242968
uuacccgacuacuugaaau

SEQ ID NO: 1385465 - RNA, 19 nt, Artificial Sequence
  Description of Artificial Sequence: Synthetic oligonucleotide
  Antisense strand to SEQ ID NO: 1385464
auuucaaguagucggguaa

SEQ ID NO: 1385466 - RNA, 19 nt, Artificial Sequence
  Description of Artificial Sequence: Synthetic oligonucleotide
  Sense strand starting at position 3533 of SEQ ID NO: 1242968
uuaaguuaauccucagaag

SEQ ID NO: 1385467 - RNA, 19 nt, Artificial Sequence
  Description of Artificial Sequence: Synthetic oligonucleotide
  Antisense strand to SEQ ID NO: 1385466
cuucugaggauuaacuuaa

SEQ ID NO: 1385468 - RNA, 19 nt, Artificial Sequence
  Description of Artificial Sequence: Synthetic oligonucleotide
  Sense strand starting at position 3544 of SEQ ID NO: 1242968
cucagaagacccugugaua

SEQ ID NO: 1385469 - RNA, 19 nt, Artificial Sequence
  Description of Artificial Sequence: Synthetic oligonucleotide
  Antisense strand to SEQ ID NO: 1385468
uaucacagggucuucugag

SEQ ID NO: 1385470 - RNA, 19 nt, Artificial Sequence
  Description of Artificial Sequence: Synthetic oligonucleotide
  Sense strand starting at position 3605 of SEQ ID NO: 1242968
gcguuaagaaacuggaaca

SEQ ID NO: 1385471 - RNA, 19 nt, Artificial Sequence
  Description of Artificial Sequence: Synthetic oligonucleotide
  Antisense strand to SEQ ID NO: 1385470
uguuccaguuucuuaacgc

SEQ ID NO: 1385472 - RNA, 19 nt, Artificial Sequence
  Description of Artificial Sequence: Synthetic oligonucleotide
  Sense strand starting at position 3693 of SEQ ID NO: 1242968
auucuagaauucucugagu

SEQ ID NO: 1385473 - RNA, 19 nt, Artificial Sequence
  Description of Artificial Sequence: Synthetic oligonucleotide
  Antisense strand to SEQ ID NO: 1385472
acucagagaauucuagaau

SEQ ID NO: 1385474 - RNA, 19 nt, Artificial Sequence
  Description of Artificial Sequence: Synthetic oligonucleotide
  Sense strand starting at position 3695 of SEQ ID NO: 1242968
ucuagaauucucugaguuu

SEQ ID NO: 1385475 - RNA, 19 nt, Artificial Sequence
  Description of Artificial Sequence: Synthetic oligonucleotide
  Antisense strand to SEQ ID NO: 1385474
aaacucagagaauucuaga

SEQ ID NO: 1385476 - RNA, 19 nt, Artificial Sequence
  Description of Artificial Sequence: Synthetic oligonucleotide
  Sense strand starting at position 3723 of SEQ ID NO: 1242968
agagcagaguuucucaaga

SEQ ID NO: 1385477 - RNA, 19 nt, Artificial Sequence
  Description of Artificial Sequence: Synthetic oligonucleotide
  Antisense strand to SEQ ID NO: 1385476
ucuugagaaacucugcucu

SEQ ID NO: 1385478 - RNA, 19 nt, Artificial Sequence
  Description of Artificial Sequence: Synthetic oligonucleotide
  Sense strand starting at position 3734 of SEQ ID NO: 1242968
ucucaagagcugcaauacu

SEQ ID NO: 1385479 - RNA, 19 nt, Artificial Sequence
  Description of Artificial Sequence: Synthetic oligonucleotide
  Antisense strand to SEQ ID NO: 1385478
aguauugcagcucuugaga

SEQ ID NO: 1385480 - RNA, 19 nt, Artificial Sequence
  Description of Artificial Sequence: Synthetic oligonucleotide
  Sense strand starting at position 3844 of SEQ ID NO: 1242968
acuagaugccaguaucuca

SEQ ID NO: 1385481 - RNA, 19 nt, Artificial Sequence
  Description of Artificial Sequence: Synthetic oligonucleotide
  Antisense strand to SEQ ID NO: 1385480
ugagauacuggcaucuagu

SEQ ID NO: 1385482 - RNA, 19 nt, Artificial Sequence
  Description of Artificial Sequence: Synthetic oligonucleotide
  Sense strand starting at position 163 of SEQ ID NO: 1242969
ugagguggcucacaaauaa

SEQ ID NO: 1385483 - RNA, 19 nt, Artificial Sequence
  Description of Artificial Sequence: Synthetic oligonucleotide
  Antisense strand to SEQ ID NO: 1385482
uuauuugugagccaccuca

SEQ ID NO: 1385484 - RNA, 19 nt, Artificial Sequence
  Description of Artificial Sequence: Synthetic oligonucleotide
  Sense strand starting at position 413 of SEQ ID NO: 1242969
ucagcagucuggcuucuua

SEQ ID NO: 1385485 - RNA, 19 nt, Artificial Sequence
  Description of Artificial Sequence: Synthetic oligonucleotide
  Antisense strand to SEQ ID NO: 1385484
uaagaagccagacugcuga

SEQ ID NO: 1385486 - RNA, 19 nt, Artificial Sequence
  Description of Artificial Sequence: Synthetic oligonucleotide
  Sense strand starting at position 420 of SEQ ID NO: 1242969
ucuggcuucuuaccugauu

SEQ ID NO: 1385487 - RNA, 19 nt, Artificial Sequence
  Description of Artificial Sequence: Synthetic oligonucleotide
  Antisense strand to SEQ ID NO: 1385486
aaucagguaagaagccaga

SEQ ID NO: 1385488 - RNA, 19 nt, Artificial Sequence
  Description of Artificial Sequence: Synthetic oligonucleotide
  Sense strand starting at position 531 of SEQ ID NO: 1242969
gccuuaagccuuuguccca

SEQ ID NO: 1385489 - RNA, 19 nt, Artificial Sequence
  Description of Artificial Sequence: Synthetic oligonucleotide
  Antisense strand to SEQ ID NO: 1385488
ugggacaaaggcuuaaggc

SEQ ID NO: 1385490 - RNA, 19 nt, Artificial Sequence
  Description of Artificial Sequence: Synthetic oligonucleotide
  Sense strand starting at position 552 of SEQ ID NO: 1242969
uccuuucucugauccgaga

SEQ ID NO: 1385491 - RNA, 19 nt, Artificial Sequence
  Description of Artificial Sequence: Synthetic oligonucleotide
  Antisense strand to SEQ ID NO: 1385490
ucucggaucagagaaagga

SEQ ID NO: 1385492 - RNA, 19 nt, Artificial Sequence
  Description of Artificial Sequence: Synthetic oligonucleotide
  Sense strand starting at position 679 of SEQ ID NO: 1242969
gaccgaggucucugagaag

SEQ ID NO: 1385493 - RNA, 19 nt, Artificial Sequence
  Description of Artificial Sequence: Synthetic oligonucleotide
  Antisense strand to SEQ ID NO: 1385492
cuucucagagaccucgguc

SEQ ID NO: 1385494 - RNA, 19 nt, Artificial Sequence
  Description of Artificial Sequence: Synthetic oligonucleotide
  Sense strand starting at position 682 of SEQ ID NO: 1242969
cgaggucucugagaagcca

SEQ ID NO: 1385495 - RNA, 19 nt, Artificial Sequence
  Description of Artificial Sequence: Synthetic oligonucleotide
  Antisense strand to SEQ ID NO: 1385494
uggcuucucagagaccucg

SEQ ID NO: 1385496 - RNA, 19 nt, Artificial Sequence
  Description of Artificial Sequence: Synthetic oligonucleotide
  Sense strand starting at position 754 of SEQ ID NO: 1242969
uguccaaagccguggguau

SEQ ID NO: 1385497 - RNA, 19 nt, Artificial Sequence
  Description of Artificial Sequence: Synthetic oligonucleotide
  Antisense strand to SEQ ID NO: 1385496
auacccacggcuuuggaca

SEQ ID NO: 1385498 - RNA, 19 nt, Artificial Sequence
  Description of Artificial Sequence: Synthetic oligonucleotide
  Sense strand starting at position 755 of SEQ ID NO: 1242969
guccaaagccguggguauu

SEQ ID NO: 1385499 - RNA, 19 nt, Artificial Sequence
  Description of Artificial Sequence: Synthetic oligonucleotide
  Antisense strand to SEQ ID NO: 1385498
aauacccacggcuuuggac

SEQ ID NO: 1385500 - RNA, 19 nt, Artificial Sequence
  Description of Artificial Sequence: Synthetic oligonucleotide
  Sense strand starting at position 767 of SEQ ID NO: 1242969
ggguauuggcgagagacca

SEQ ID NO: 1385501 - RNA, 19 nt, Artificial Sequence
  Description of Artificial Sequence: Synthetic oligonucleotide
  Antisense strand to SEQ ID NO: 1385500
uggucucucgccaauaccc

SEQ ID NO: 1385502 - RNA, 19 nt, Artificial Sequence
  Description of Artificial Sequence: Synthetic oligonucleotide
  Sense strand starting at position 1019 of SEQ ID NO: 1242969
ggguguaggcuccaaacua

SEQ ID NO: 1385503 - RNA, 19 nt, Artificial Sequence
  Description of Artificial Sequence: Synthetic oligonucleotide
  Antisense strand to SEQ ID NO: 1385502
uaguuuggagccuacaccc

SEQ ID NO: 1385504 - RNA, 19 nt, Artificial Sequence
  Description of Artificial Sequence: Synthetic oligonucleotide
  Sense strand starting at position 1186 of SEQ ID NO: 1242969
ucccucuggcccgaggaau

SEQ ID NO: 1385505 - RNA, 19 nt, Artificial Sequence
  Description of Artificial Sequence: Synthetic oligonucleotide
  Antisense strand to SEQ ID NO: 1385504
auuccucgggccagaggga

SEQ ID NO: 1385506 - RNA, 19 nt, Artificial Sequence
  Description of Artificial Sequence: Synthetic oligonucleotide
  Sense strand starting at position 1206 of SEQ ID NO: 1242969
ggagauggguaucuuaggu

SEQ ID NO: 1385507 - RNA, 19 nt, Artificial Sequence
  Description of Artificial Sequence: Synthetic oligonucleotide
  Antisense strand to SEQ ID NO: 1385506
accuaagauacccaucucc

SEQ ID NO: 1385508 - RNA, 19 nt, Artificial Sequence
  Description of Artificial Sequence: Synthetic oligonucleotide
  Sense strand starting at position 1227 of SEQ ID NO: 1242969
ggaugucaggcagaguuca

SEQ ID NO: 1385509 - RNA, 19 nt, Artificial Sequence
  Description of Artificial Sequence: Synthetic oligonucleotide
  Antisense strand to SEQ ID NO: 1385508
ugaacucugccugacaucc

SEQ ID NO: 1385510 - RNA, 19 nt, Artificial Sequence
  Description of Artificial Sequence: Synthetic oligonucleotide
  Sense strand starting at position 1358 of SEQ ID NO: 1242969
cagucaguuuccuucucga

SEQ ID NO: 1385511 - RNA, 19 nt, Artificial Sequence
  Description of Artificial Sequence: Synthetic oligonucleotide
  Antisense strand to SEQ ID NO: 1385510
ucgagaaggaaacugacug

SEQ ID NO: 1385512 - RNA, 19 nt, Artificial Sequence
  Description of Artificial Sequence: Synthetic oligonucleotide
  Sense strand starting at position 1495 of SEQ ID NO: 1242969
ggagaacucucccacucuu

SEQ ID NO: 1385513 - RNA, 19 nt, Artificial Sequence
  Description of Artificial Sequence: Synthetic oligonucleotide
  Antisense strand to SEQ ID NO: 1385512
aagagugggagaguucucc

SEQ ID NO: 1385514 - RNA, 19 nt, Artificial Sequence
  Description of Artificial Sequence: Synthetic oligonucleotide
  Sense strand starting at position 2184 of SEQ ID NO: 1242969
ggaacaaagucccaaaguu

SEQ ID NO: 1385515 - RNA, 19 nt, Artificial Sequence
  Description of Artificial Sequence: Synthetic oligonucleotide
  Antisense strand to SEQ ID NO: 1385514
aacuuugggacuuuguucc

SEQ ID NO: 1385516 - RNA, 19 nt, Artificial Sequence
  Description of Artificial Sequence: Synthetic oligonucleotide
  Sense strand starting at position 2776 of SEQ ID NO: 1242969
gcaccuaggucucccauua

SEQ ID NO: 1385517 - RNA, 19 nt, Artificial Sequence
  Description of Artificial Sequence: Synthetic oligonucleotide
  Antisense strand to SEQ ID NO: 1385516
uaaugggagaccuaggugc

SEQ ID NO: 1385518 - RNA, 19 nt, Artificial Sequence
  Description of Artificial Sequence: Synthetic oligonucleotide
  Sense strand starting at position 2905 of SEQ ID NO: 1242969
aaauaagugguaugagugu

SEQ ID NO: 1385519 - RNA, 19 nt, Artificial Sequence
  Description of Artificial Sequence: Synthetic oligonucleotide
  Antisense strand to SEQ ID NO: 1385518
acacucauaccacuuauuu

SEQ ID NO: 1385520 - RNA, 19 nt, Artificial Sequence
  Description of Artificial Sequence: Synthetic oligonucleotide
  Sense strand starting at position 2913 of SEQ ID NO: 1242969
gguaugaguguggguggau

SEQ ID NO: 1385521 - RNA, 19 nt, Artificial Sequence
  Description of Artificial Sequence: Synthetic oligonucleotide
  Antisense strand to SEQ ID NO: 1385520
auccacccacacucauacc

SEQ ID NO: 1385522 - RNA, 19 nt, Artificial Sequence
  Description of Artificial Sequence: Synthetic oligonucleotide
  Sense strand starting at position 2946 of SEQ ID NO: 1242969
gugugaaggucuccaugcu

SEQ ID NO: 1385523 - RNA, 19 nt, Artificial Sequence
  Description of Artificial Sequence: Synthetic oligonucleotide
  Antisense strand to SEQ ID NO: 1385522
agcauggagaccuucacac

SEQ ID NO: 1385524 - RNA, 19 nt, Artificial Sequence
  Description of Artificial Sequence: Synthetic oligonucleotide
  Sense strand starting at position 2947 of SEQ ID NO: 1242969
ugugaaggucuccaugcuu

SEQ ID NO: 1385525 - RNA, 19 nt, Artificial Sequence
  Description of Artificial Sequence: Synthetic oligonucleotide
  Antisense strand to SEQ ID NO: 1385524
aagcauggagaccuucaca

SEQ ID NO: 1385526 - RNA, 19 nt, Artificial Sequence
  Description of Artificial Sequence: Synthetic oligonucleotide
  Sense strand starting at position 3079 of SEQ ID NO: 1242969
aggcuugaugcugagagca

SEQ ID NO: 1385527 - RNA, 19 nt, Artificial Sequence
  Description of Artificial Sequence: Synthetic oligonucleotide
  Antisense strand to SEQ ID NO: 1385526
ugcucucagcaucaagccu

SEQ ID NO: 1385528 - RNA, 19 nt, Artificial Sequence
  Description of Artificial Sequence: Synthetic oligonucleotide
  Sense strand starting at position 3100 of SEQ ID NO: 1242969
agguguagcccucgacaga

SEQ ID NO: 1385529 - RNA, 19 nt, Artificial Sequence
  Description of Artificial Sequence: Synthetic oligonucleotide
  Antisense strand to SEQ ID NO: 1385528
ucugucgagggcuacaccu

SEQ ID NO: 1385530 - RNA, 19 nt, Artificial Sequence
  Description of Artificial Sequence: Synthetic oligonucleotide
  Sense strand starting at position 3312 of SEQ ID NO: 1242969
ccuggugagccagggaaau

SEQ ID NO: 1385531 - RNA, 19 nt, Artificial Sequence
  Description of Artificial Sequence: Synthetic oligonucleotide
  Antisense strand to SEQ ID NO: 1385530
auuucccuggcucaccagg

SEQ ID NO: 1385532 - RNA, 19 nt, Artificial Sequence
  Description of Artificial Sequence: Synthetic oligonucleotide
  Sense strand starting at position 3385 of SEQ ID NO: 1242969
accaauuugcccugagcca

SEQ ID NO: 1385533 - RNA, 19 nt, Artificial Sequence
  Description of Artificial Sequence: Synthetic oligonucleotide
  Antisense strand to SEQ ID NO: 1385532
uggcucagggcaaauuggu

SEQ ID NO: 1385534 - RNA, 19 nt, Artificial Sequence
  Description of Artificial Sequence: Synthetic oligonucleotide
  Sense strand starting at position 3522 of SEQ ID NO: 1242969
gugccuguguuuguaagca

SEQ ID NO: 1385535 - RNA, 19 nt, Artificial Sequence
  Description of Artificial Sequence: Synthetic oligonucleotide
  Antisense strand to SEQ ID NO: 1385534
ugcuuacaaacacaggcac

SEQ ID NO: 1385536 - RNA, 19 nt, Artificial Sequence
  Description of Artificial Sequence: Synthetic oligonucleotide
  Sense strand starting at position 3537 of SEQ ID NO: 1242969
agcacuuguguccauggga

SEQ ID NO: 1385537 - RNA, 19 nt, Artificial Sequence
  Description of Artificial Sequence: Synthetic oligonucleotide
  Antisense strand to SEQ ID NO: 1385536
ucccauggacacaagugcu

SEQ ID NO: 1385538 - RNA, 19 nt, Artificial Sequence
  Description of Artificial Sequence: Synthetic oligonucleotide
  Sense strand starting at position 3560 of SEQ ID NO: 1242969
guggcuuguccaggccauu

SEQ ID NO: 1385539 - RNA, 19 nt, Artificial Sequence
  Description of Artificial Sequence: Synthetic oligonucleotide
  Antisense strand to SEQ ID NO: 1385538
aauggccuggacaagccac

SEQ ID NO: 1385540 - RNA, 19 nt, Artificial Sequence
  Description of Artificial Sequence: Synthetic oligonucleotide
  Sense strand starting at position 3571 of SEQ ID NO: 1242969
aggccauuugguuguguca

SEQ ID NO: 1385541 - RNA, 19 nt, Artificial Sequence
  Description of Artificial Sequence: Synthetic oligonucleotide
  Antisense strand to SEQ ID NO: 1385540
ugacacaaccaaauggccu

SEQ ID NO: 1385542 - RNA, 19 nt, Artificial Sequence
  Description of Artificial Sequence: Synthetic oligonucleotide
  Sense strand starting at position 3611 of SEQ ID NO: 1242969
gugugcaagugaguacauu

SEQ ID NO: 1385543 - RNA, 19 nt, Artificial Sequence
  Description of Artificial Sequence: Synthetic oligonucleotide
  Antisense strand to SEQ ID NO: 1385542
aauguacucacuugcacac

SEQ ID NO: 1385544 - RNA, 19 nt, Artificial Sequence
  Description of Artificial Sequence: Synthetic oligonucleotide
  Sense strand starting at position 3619 of SEQ ID NO: 1242969
gugaguacauuugugugca

SEQ ID NO: 1385545 - RNA, 19 nt, Artificial Sequence
  Description of Artificial Sequence: Synthetic oligonucleotide
  Antisense strand to SEQ ID NO: 1385544
ugcacacaaauguacucac

SEQ ID NO: 1385546 - RNA, 19 nt, Artificial Sequence
  Description of Artificial Sequence: Synthetic oligonucleotide
  Sense strand starting at position 3620 of SEQ ID NO: 1242969
ugaguacauuugugugcau

SEQ ID NO: 1385547 - RNA, 19 nt, Artificial Sequence
  Description of Artificial Sequence: Synthetic oligonucleotide
  Antisense strand to SEQ ID NO: 1385546
augcacacaaauguacuca

SEQ ID NO: 1385548 - RNA, 19 nt, Artificial Sequence
  Description of Artificial Sequence: Synthetic oligonucleotide
  Sense strand starting at position 3621 of SEQ ID NO: 1242969
gaguacauuugugugcauu

SEQ ID NO: 1385549 - RNA, 19 nt, Artificial Sequence
  Description of Artificial Sequence: Synthetic oligonucleotide
  Antisense strand to SEQ ID NO: 1385548
aaugcacacaaauguacuc

SEQ ID NO: 1385550 - RNA, 19 nt, Artificial Sequence
  Description of Artificial Sequence: Synthetic oligonucleotide
  Sense strand starting at position 3623 of SEQ ID NO: 1242969
guacauuugugugcauugu

SEQ ID NO: 1385551 - RNA, 19 nt, Artificial Sequence
  Description of Artificial Sequence: Synthetic oligonucleotide
  Antisense strand to SEQ ID NO: 1385550
acaaugcacacaaauguac

SEQ ID NO: 1385552 - RNA, 19 nt, Artificial Sequence
  Description of Artificial Sequence: Synthetic oligonucleotide
  Sense strand starting at position 3650 of SEQ ID NO: 1242969
cugguaacucucuguccuu

SEQ ID NO: 1385553 - RNA, 19 nt, Artificial Sequence
  Description of Artificial Sequence: Synthetic oligonucleotide
  Antisense strand to SEQ ID NO: 1385552
aaggacagagaguuaccag

SEQ ID NO: 1385554 - RNA, 19 nt, Artificial Sequence
  Description of Artificial Sequence: Synthetic oligonucleotide
  Sense strand starting at position 3675 of SEQ ID NO: 1242969
gggucauccugccucuaga

SEQ ID NO: 1385555 - RNA, 19 nt, Artificial Sequence
  Description of Artificial Sequence: Synthetic oligonucleotide
  Antisense strand to SEQ ID NO: 1385554
ucuagaggcaggaugaccc

SEQ ID NO: 1385556 - RNA, 19 nt, Artificial Sequence
  Description of Artificial Sequence: Synthetic oligonucleotide
  Sense strand starting at position 3730 of SEQ ID NO: 1242969
uccuguugcggugaaugua

SEQ ID NO: 1385557 - RNA, 19 nt, Artificial Sequence
  Description of Artificial Sequence: Synthetic oligonucleotide
  Antisense strand to SEQ ID NO: 1385556
uacauucaccgcaacagga

SEQ ID NO: 1385558 - RNA, 19 nt, Artificial Sequence
  Description of Artificial Sequence: Synthetic oligonucleotide
  Sense strand starting at position 3742 of SEQ ID NO: 1242969
gaauguauggcccaggcuu

SEQ ID NO: 1385559 - RNA, 19 nt, Artificial Sequence
  Description of Artificial Sequence: Synthetic oligonucleotide
  Antisense strand to SEQ ID NO: 1385558
aagccugggccauacauuc

SEQ ID NO: 1385560 - RNA, 19 nt, Artificial Sequence
  Description of Artificial Sequence: Synthetic oligonucleotide
  Sense strand starting at position 3807 of SEQ ID NO: 1242969
agagauuggauuggccaga

SEQ ID NO: 1385561 - RNA, 19 nt, Artificial Sequence
  Description of Artificial Sequence: Synthetic oligonucleotide
  Antisense strand to SEQ ID NO: 1385560
ucuggccaauccaaucucu

SEQ ID NO: 1385562 - RNA, 19 nt, Artificial Sequence
  Description of Artificial Sequence: Synthetic oligonucleotide
  Sense strand starting at position 28 of SEQ ID NO: 1242970
auauguagugcucaucuua

SEQ ID NO: 1385563 - RNA, 19 nt, Artificial Sequence
  Description of Artificial Sequence: Synthetic oligonucleotide
  Antisense strand to SEQ ID NO: 1385562
uaagaugagcacuacauau

SEQ ID NO: 1385564 - RNA, 19 nt, Artificial Sequence
  Description of Artificial Sequence: Synthetic oligonucleotide
  Sense strand starting at position 84 of SEQ ID NO: 1242970
agggauuaguccuugagcu

SEQ ID NO: 1385565 - RNA, 19 nt, Artificial Sequence
  Description of Artificial Sequence: Synthetic oligonucleotide
  Antisense strand to SEQ ID NO: 1385564
agcucaaggacuaaucccu

SEQ ID NO: 1385566 - RNA, 19 nt, Artificial Sequence
  Description of Artificial Sequence: Synthetic oligonucleotide
  Sense strand starting at position 86 of SEQ ID NO: 1242970
ggauuaguccuugagcuug

SEQ ID NO: 1385567 - RNA, 19 nt, Artificial Sequence
  Description of Artificial Sequence: Synthetic oligonucleotide
  Antisense strand to SEQ ID NO: 1385566
caagcucaaggacuaaucc

SEQ ID NO: 1385568 - RNA, 19 nt, Artificial Sequence
  Description of Artificial Sequence: Synthetic oligonucleotide
  Sense strand starting at position 100 of SEQ ID NO: 1242970
gcuugaguugccuaauuga

SEQ ID NO: 1385569 - RNA, 19 nt, Artificial Sequence
  Description of Artificial Sequence: Synthetic oligonucleotide
  Antisense strand to SEQ ID NO: 1385568
ucaauuaggcaacucaagc

SEQ ID NO: 1385570 - RNA, 19 nt, Artificial Sequence
  Description of Artificial Sequence: Synthetic oligonucleotide
  Sense strand starting at position 423 of SEQ ID NO: 1242970
gccagacucccagauacau

SEQ ID NO: 1385571 - RNA, 19 nt, Artificial Sequence
  Description of Artificial Sequence: Synthetic oligonucleotide
  Antisense strand to SEQ ID NO: 1385570
auguaucugggagucuggc

SEQ ID NO: 1385572 - RNA, 19 nt, Artificial Sequence
  Description of Artificial Sequence: Synthetic oligonucleotide
  Sense strand starting at position 762 of SEQ ID NO: 1242970
agggcuuucuggguuagga

SEQ ID NO: 1385573 - RNA, 19 nt, Artificial Sequence
  Description of Artificial Sequence: Synthetic oligonucleotide
  Antisense strand to SEQ ID NO: 1385572
uccuaacccagaaagcccu

SEQ ID NO: 1385574 - RNA, 19 nt, Artificial Sequence
  Description of Artificial Sequence: Synthetic oligonucleotide
  Sense strand starting at position 764 of SEQ ID NO: 1242970
ggcuuucuggguuaggaua

SEQ ID NO: 1385575 - RNA, 19 nt, Artificial Sequence
  Description of Artificial Sequence: Synthetic oligonucleotide
  Antisense strand to SEQ ID NO: 1385574
uauccuaacccagaaagcc

SEQ ID NO: 1385576 - RNA, 19 nt, Artificial Sequence
  Description of Artificial Sequence: Synthetic oligonucleotide
  Sense strand starting at position 775 of SEQ ID NO: 1242970
uuaggauaacgcuggauaa

SEQ ID NO: 1385577 - RNA, 19 nt, Artificial Sequence
  Description of Artificial Sequence: Synthetic oligonucleotide
  Antisense strand to SEQ ID NO: 1385576
uuauccagcguuauccuaa

SEQ ID NO: 1385578 - RNA, 19 nt, Artificial Sequence
  Description of Artificial Sequence: Synthetic oligonucleotide
  Sense strand starting at position 776 of SEQ ID NO: 1242970
uaggauaacgcuggauaau

SEQ ID NO: 1385579 - RNA, 19 nt, Artificial Sequence
  Description of Artificial Sequence: Synthetic oligonucleotide
  Antisense strand to SEQ ID NO: 1385578
auuauccagcguuauccua

SEQ ID NO: 1385580 - RNA, 19 nt, Artificial Sequence
  Description of Artificial Sequence: Synthetic oligonucleotide
  Sense strand starting at position 788 of SEQ ID NO: 1242970
ggauaauccuaauuacagc

SEQ ID NO: 1385581 - RNA, 19 nt, Artificial Sequence
  Description of Artificial Sequence: Synthetic oligonucleotide
  Antisense strand to SEQ ID NO: 1385580
gcuguaauuaggauuaucc

SEQ ID NO: 1385582 - RNA, 19 nt, Artificial Sequence
  Description of Artificial Sequence: Synthetic oligonucleotide
  Sense strand starting at position 1135 of SEQ ID NO: 1242970
aguagaacuuggcuuguaa

SEQ ID NO: 1385583 - RNA, 19 nt, Artificial Sequence
  Description of Artificial Sequence: Synthetic oligonucleotide
  Antisense strand to SEQ ID NO: 1385582
uuacaagccaaguucuacu

SEQ ID NO: 1385584 - RNA, 19 nt, Artificial Sequence
  Description of Artificial Sequence: Synthetic oligonucleotide
  Sense strand starting at position 1146 of SEQ ID NO: 1242970
gcuuguaagcguucuugca

SEQ ID NO: 1385585 - RNA, 19 nt, Artificial Sequence
  Description of Artificial Sequence: Synthetic oligonucleotide
  Antisense strand to SEQ ID NO: 1385584
ugcaagaacgcuuacaagc

SEQ ID NO: 1385586 - RNA, 19 nt, Artificial Sequence
  Description of Artificial Sequence: Synthetic oligonucleotide
  Sense strand starting at position 1147 of SEQ ID NO: 1242970
cuuguaagcguucuugcau

SEQ ID NO: 1385587 - RNA, 19 nt, Artificial Sequence
  Description of Artificial Sequence: Synthetic oligonucleotide
  Antisense strand to SEQ ID NO: 1385586
augcaagaacgcuuacaag

SEQ ID NO: 1385588 - RNA, 19 nt, Artificial Sequence
  Description of Artificial Sequence: Synthetic oligonucleotide
  Sense strand starting at position 1159 of SEQ ID NO: 1242970
cuugcauaccuagggaaga

SEQ ID NO: 1385589 - RNA, 19 nt, Artificial Sequence
  Description of Artificial Sequence: Synthetic oligonucleotide
  Antisense strand to SEQ ID NO: 1385588
ucuucccuagguaugcaag

SEQ ID NO: 1385590 - RNA, 19 nt, Artificial Sequence
  Description of Artificial Sequence: Synthetic oligonucleotide
  Sense strand starting at position 1251 of SEQ ID NO: 1242970
ugggacauuccuggguaca

SEQ ID NO: 1385591 - RNA, 19 nt, Artificial Sequence
  Description of Artificial Sequence: Synthetic oligonucleotide
  Antisense strand to SEQ ID NO: 1385590
uguacccaggaauguccca

SEQ ID NO: 1385592 - RNA, 19 nt, Artificial Sequence
  Description of Artificial Sequence: Synthetic oligonucleotide
  Sense strand starting at position 1252 of SEQ ID NO: 1242970
gggacauuccuggguacaa

SEQ ID NO: 1385593 - RNA, 19 nt, Artificial Sequence
  Description of Artificial Sequence: Synthetic oligonucleotide
  Antisense strand to SEQ ID NO: 1385592
uuguacccaggaauguccc

SEQ ID NO: 1385594 - RNA, 19 nt, Artificial Sequence
  Description of Artificial Sequence: Synthetic oligonucleotide
  Sense strand starting at position 1253 of SEQ ID NO: 1242970
ggacauuccuggguacaau

SEQ ID NO: 1385595 - RNA, 19 nt, Artificial Sequence
  Description of Artificial Sequence: Synthetic oligonucleotide
  Antisense strand to SEQ ID NO: 1385594
auuguacccaggaaugucc

SEQ ID NO: 1385596 - RNA, 19 nt, Artificial Sequence
  Description of Artificial Sequence: Synthetic oligonucleotide
  Sense strand starting at position 1985 of SEQ ID NO: 1242970
ucauauucccaguggguaa

SEQ ID NO: 1385597 - RNA, 19 nt, Artificial Sequence
  Description of Artificial Sequence: Synthetic oligonucleotide
  Antisense strand to SEQ ID NO: 1385596
uuacccacugggaauauga

SEQ ID NO: 1385598 - RNA, 19 nt, Artificial Sequence
  Description of Artificial Sequence: Synthetic oligonucleotide
  Sense strand starting at position 2154 of SEQ ID NO: 1242970
agcgaugacuaacuggaua

SEQ ID NO: 1385599 - RNA, 19 nt, Artificial Sequence
  Description of Artificial Sequence: Synthetic oligonucleotide
  Antisense strand to SEQ ID NO: 1385598
uauccaguuagucaucgcu

SEQ ID NO: 1385600 - RNA, 19 nt, Artificial Sequence
  Description of Artificial Sequence: Synthetic oligonucleotide
  Sense strand starting at position 2186 of SEQ ID NO: 1242970
uuugaacugcauggagaau

SEQ ID NO: 1385601 - RNA, 19 nt, Artificial Sequence
  Description of Artificial Sequence: Synthetic oligonucleotide
  Antisense strand to SEQ ID NO: 1385600
auucuccaugcaguucaaa

SEQ ID NO: 1385602 - RNA, 19 nt, Artificial Sequence
  Description of Artificial Sequence: Synthetic oligonucleotide
  Sense strand starting at position 2350 of SEQ ID NO: 1242970
auaggcaaucgaugaaguu

SEQ ID NO: 1385603 - RNA, 19 nt, Artificial Sequence
  Description of Artificial Sequence: Synthetic oligonucleotide
  Antisense strand to SEQ ID NO: 1385602
aacuucaucgauugccuau

SEQ ID NO: 1385604 - RNA, 19 nt, Artificial Sequence
  Description of Artificial Sequence: Synthetic oligonucleotide
  Sense strand starting at position 2351 of SEQ ID NO: 1242970
uaggcaaucgaugaaguuu

SEQ ID NO: 1385605 - RNA, 19 nt, Artificial Sequence
  Description of Artificial Sequence: Synthetic oligonucleotide
  Antisense strand to SEQ ID NO: 1385604
aaacuucaucgauugccua

SEQ ID NO: 1385606 - RNA, 19 nt, Artificial Sequence
  Description of Artificial Sequence: Synthetic oligonucleotide
  Sense strand starting at position 2485 of SEQ ID NO: 1242970
ggaagauauuccuugguag

SEQ ID NO: 1385607 - RNA, 19 nt, Artificial Sequence
  Description of Artificial Sequence: Synthetic oligonucleotide
  Antisense strand to SEQ ID NO: 1385606
cuaccaaggaauaucuucc

SEQ ID NO: 1385608 - RNA, 19 nt, Artificial Sequence
  Description of Artificial Sequence: Synthetic oligonucleotide
  Sense strand starting at position 2486 of SEQ ID NO: 1242970
gaagauauuccuugguaga

SEQ ID NO: 1385609 - RNA, 19 nt, Artificial Sequence
  Description of Artificial Sequence: Synthetic oligonucleotide
  Antisense strand to SEQ ID NO: 1385608
ucuaccaaggaauaucuuc

SEQ ID NO: 1385610 - RNA, 19 nt, Artificial Sequence
  Description of Artificial Sequence: Synthetic oligonucleotide
  Sense strand starting at position 2487 of SEQ ID NO: 1242970
aagauauuccuugguagag

SEQ ID NO: 1385611 - RNA, 19 nt, Artificial Sequence
  Description of Artificial Sequence: Synthetic oligonucleotide
  Antisense strand to SEQ ID NO: 1385610
cucuaccaaggaauaucuu

SEQ ID NO: 1385612 - RNA, 19 nt, Artificial Sequence
  Description of Artificial Sequence: Synthetic oligonucleotide
  Sense strand starting at position 2488 of SEQ ID NO: 1242970
agauauuccuugguagagg

SEQ ID NO: 1385613 - RNA, 19 nt, Artificial Sequence
  Description of Artificial Sequence: Synthetic oligonucleotide
  Antisense strand to SEQ ID NO: 1385612
ccucuaccaaggaauaucu

SEQ ID NO: 1385614 - RNA, 19 nt, Artificial Sequence
  Description of Artificial Sequence: Synthetic oligonucleotide
  Sense strand starting at position 2517 of SEQ ID NO: 1242970
ggucuugccugaguggaaa

SEQ ID NO: 1385615 - RNA, 19 nt, Artificial Sequence
  Description of Artificial Sequence: Synthetic oligonucleotide
  Antisense strand to SEQ ID NO: 1385614
uuuccacucaggcaagacc

SEQ ID NO: 1385616 - RNA, 19 nt, Artificial Sequence
  Description of Artificial Sequence: Synthetic oligonucleotide
  Sense strand starting at position 2610 of SEQ ID NO: 1242970
cuguguauagcugcuuauu

SEQ ID NO: 1385617 - RNA, 19 nt, Artificial Sequence
  Description of Artificial Sequence: Synthetic oligonucleotide
  Antisense strand to SEQ ID NO: 1385616
aauaagcagcuauacacag

SEQ ID NO: 1385618 - RNA, 19 nt, Artificial Sequence
  Description of Artificial Sequence: Synthetic oligonucleotide
  Sense strand starting at position 2622 of SEQ ID NO: 1242970
gcuuauuuguucuuucucu

SEQ ID NO: 1385619 - RNA, 19 nt, Artificial Sequence
  Description of Artificial Sequence: Synthetic oligonucleotide
  Antisense strand to SEQ ID NO: 1385618
agagaaagaacaaauaagc

SEQ ID NO: 1385620 - RNA, 19 nt, Artificial Sequence
  Description of Artificial Sequence: Synthetic oligonucleotide
  Sense strand starting at position 2710 of SEQ ID NO: 1242970
ccuuaugaaguugauucua

SEQ ID NO: 1385621 - RNA, 19 nt, Artificial Sequence
  Description of Artificial Sequence: Synthetic oligonucleotide
  Antisense strand to SEQ ID NO: 1385620
uagaaucaacuucauaagg

SEQ ID NO: 1385622 - RNA, 19 nt, Artificial Sequence
  Description of Artificial Sequence: Synthetic oligonucleotide
  Sense strand starting at position 2712 of SEQ ID NO: 1242970
uuaugaaguugauucuagu

SEQ ID NO: 1385623 - RNA, 19 nt, Artificial Sequence
  Description of Artificial Sequence: Synthetic oligonucleotide
  Antisense strand to SEQ ID NO: 1385622
acuagaaucaacuucauaa

SEQ ID NO: 1385624 - RNA, 19 nt, Artificial Sequence
  Description of Artificial Sequence: Synthetic oligonucleotide
  Sense strand starting at position 2774 of SEQ ID NO: 1242970
guaagagacuuagucaaga

SEQ ID NO: 1385625 - RNA, 19 nt, Artificial Sequence
  Description of Artificial Sequence: Synthetic oligonucleotide
  Antisense strand to SEQ ID NO: 1385624
ucuugacuaagucucuuac

SEQ ID NO: 1385626 - RNA, 19 nt, Artificial Sequence
  Description of Artificial Sequence: Synthetic oligonucleotide
  Sense strand starting at position 3144 of SEQ ID NO: 1242970
gggaggcaagguugugaua

SEQ ID NO: 1385627 - RNA, 19 nt, Artificial Sequence
  Description of Artificial Sequence: Synthetic oligonucleotide
  Antisense strand to SEQ ID NO: 1385626
uaucacaaccuugccuccc

SEQ ID NO: 1385628 - RNA, 19 nt, Artificial Sequence
  Description of Artificial Sequence: Synthetic oligonucleotide
  Sense strand starting at position 3157 of SEQ ID NO: 1242970
gugauaaaggcuggacuuu

SEQ ID NO: 1385629 - RNA, 19 nt, Artificial Sequence
  Description of Artificial Sequence: Synthetic oligonucleotide
  Antisense strand to SEQ ID NO: 1385628
aaaguccagccuuuaucac

SEQ ID NO: 1385630 - RNA, 19 nt, Artificial Sequence
  Description of Artificial Sequence: Synthetic oligonucleotide
  Sense strand starting at position 3322 of SEQ ID NO: 1242970
ucauauccugccuggaaca

SEQ ID NO: 1385631 - RNA, 19 nt, Artificial Sequence
  Description of Artificial Sequence: Synthetic oligonucleotide
  Antisense strand to SEQ ID NO: 1385630
uguuccaggcaggauauga

SEQ ID NO: 1385632 - RNA, 19 nt, Artificial Sequence
  Description of Artificial Sequence: Synthetic oligonucleotide
  Sense strand starting at position 3401 of SEQ ID NO: 1242970
auaagaggaagucguguaa

SEQ ID NO: 1385633 - RNA, 19 nt, Artificial Sequence
  Description of Artificial Sequence: Synthetic oligonucleotide
  Antisense strand to SEQ ID NO: 1385632
uuacacgacuuccucuuau

SEQ ID NO: 1385634 - RNA, 19 nt, Artificial Sequence
  Description of Artificial Sequence: Synthetic oligonucleotide
  Sense strand starting at position 3424 of SEQ ID NO: 1242970
aaguguccaguggaguaua

SEQ ID NO: 1385635 - RNA, 19 nt, Artificial Sequence
  Description of Artificial Sequence: Synthetic oligonucleotide
  Antisense strand to SEQ ID NO: 1385634
uauacuccacuggacacuu

SEQ ID NO: 1385636 - RNA, 19 nt, Artificial Sequence
  Description of Artificial Sequence: Synthetic oligonucleotide
  Sense strand starting at position 3435 of SEQ ID NO: 1242970
ggaguauagacuugucuca

SEQ ID NO: 1385637 - RNA, 19 nt, Artificial Sequence
  Description of Artificial Sequence: Synthetic oligonucleotide
  Antisense strand to SEQ ID NO: 1385636
ugagacaagucuauacucc

SEQ ID NO: 1385638 - RNA, 19 nt, Artificial Sequence
  Description of Artificial Sequence: Synthetic oligonucleotide
  Sense strand starting at position 3437 of SEQ ID NO: 1242970
aguauagacuugucucaaa

SEQ ID NO: 1385639 - RNA, 19 nt, Artificial Sequence
  Description of Artificial Sequence: Synthetic oligonucleotide
  Antisense strand to SEQ ID NO: 1385638
uuugagacaagucuauacu

SEQ ID NO: 1385640 - RNA, 19 nt, Artificial Sequence
  Description of Artificial Sequence: Synthetic oligonucleotide
  Sense strand starting at position 3458 of SEQ ID NO: 1242970
acgugcuggaguuaaauga

SEQ ID NO: 1385641 - RNA, 19 nt, Artificial Sequence
  Description of Artificial Sequence: Synthetic oligonucleotide
  Antisense strand to SEQ ID NO: 1385640
ucauuuaacuccagcacgu

SEQ ID NO: 1385642 - RNA, 19 nt, Artificial Sequence
  Description of Artificial Sequence: Synthetic oligonucleotide
  Sense strand starting at position 32 of SEQ ID NO: 1242971
gcaggcuguggagacauaa

SEQ ID NO: 1385643 - RNA, 19 nt, Artificial Sequence
  Description of Artificial Sequence: Synthetic oligonucleotide
  Antisense strand to SEQ ID NO: 1385642
uuaugucuccacagccugc

SEQ ID NO: 1385644 - RNA, 19 nt, Artificial Sequence
  Description of Artificial Sequence: Synthetic oligonucleotide
  Sense strand starting at position 615 of SEQ ID NO: 1242971
acucaaugcugagggaaau

SEQ ID NO: 1385645 - RNA, 19 nt, Artificial Sequence
  Description of Artificial Sequence: Synthetic oligonucleotide
  Antisense strand to SEQ ID NO: 1385644
auuucccucagcauugagu

SEQ ID NO: 1385646 - RNA, 19 nt, Artificial Sequence
  Description of Artificial Sequence: Synthetic oligonucleotide
  Sense strand starting at position 1230 of SEQ ID NO: 1242971
ucacguucccaaugugacu

SEQ ID NO: 1385647 - RNA, 19 nt, Artificial Sequence
  Description of Artificial Sequence: Synthetic oligonucleotide
  Antisense strand to SEQ ID NO: 1385646
agucacauugggaacguga

SEQ ID NO: 1385648 - RNA, 19 nt, Artificial Sequence
  Description of Artificial Sequence: Synthetic oligonucleotide
  Sense strand starting at position 2264 of SEQ ID NO: 1242971
ugcagcugugauuguagga

SEQ ID NO: 1385649 - RNA, 19 nt, Artificial Sequence
  Description of Artificial Sequence: Synthetic oligonucleotide
  Antisense strand to SEQ ID NO: 1385648
uccuacaaucacagcugca

SEQ ID NO: 1385650 - RNA, 19 nt, Artificial Sequence
  Description of Artificial Sequence: Synthetic oligonucleotide
  Sense strand starting at position 3578 of SEQ ID NO: 1242971
augcgauggucagggaaga

SEQ ID NO: 1385651 - RNA, 19 nt, Artificial Sequence
  Description of Artificial Sequence: Synthetic oligonucleotide
  Antisense strand to SEQ ID NO: 1385650
ucuucccugaccaucgcau

SEQ ID NO: 1385652 - RNA, 19 nt, Artificial Sequence
  Description of Artificial Sequence: Synthetic oligonucleotide
  Sense strand starting at position 3798 of SEQ ID NO: 1242971
ggaaaucugcacuggguaa

SEQ ID NO: 1385653 - RNA, 19 nt, Artificial Sequence
  Description of Artificial Sequence: Synthetic oligonucleotide
  Antisense strand to SEQ ID NO: 1385652
uuacccagugcagauuucc

SEQ ID NO: 1385654 - RNA, 19 nt, Artificial Sequence
  Description of Artificial Sequence: Synthetic oligonucleotide
  Sense strand starting at position 3800 of SEQ ID NO: 1242971
aaaucugcacuggguaaga

SEQ ID NO: 1385655 - RNA, 19 nt, Artificial Sequence
  Description of Artificial Sequence: Synthetic oligonucleotide
  Antisense strand to SEQ ID NO: 1385654
ucuuacccagugcagauuu

SEQ ID NO: 1385656 - RNA, 19 nt, Artificial Sequence
  Description of Artificial Sequence: Synthetic oligonucleotide
  Sense strand starting at position 3823 of SEQ ID NO: 1242971
cacugacuccuucgagcau

SEQ ID NO: 1385657 - RNA, 19 nt, Artificial Sequence
  Description of Artificial Sequence: Synthetic oligonucleotide
  Antisense strand to SEQ ID NO: 1385656
augcucgaaggagucagug

SEQ ID NO: 1385658 - RNA, 19 nt, Artificial Sequence
  Description of Artificial Sequence: Synthetic oligonucleotide
  Sense strand starting at position 3836 of SEQ ID NO: 1242971
gagcaucugccuggucaca

SEQ ID NO: 1385659 - RNA, 19 nt, Artificial Sequence
  Description of Artificial Sequence: Synthetic oligonucleotide
  Antisense strand to SEQ ID NO: 1385658
ugugaccaggcagaugcuc

SEQ ID NO: 1385660 - RNA, 19 nt, Artificial Sequence
  Description of Artificial Sequence: Synthetic oligonucleotide
  Sense strand starting at position 3838 of SEQ ID NO: 1242971
gcaucugccuggucacagu

SEQ ID NO: 1385661 - RNA, 19 nt, Artificial Sequence
  Description of Artificial Sequence: Synthetic oligonucleotide
  Antisense strand to SEQ ID NO: 1385660
acugugaccaggcagaugc

SEQ ID NO: 1385662 - RNA, 19 nt, Artificial Sequence
  Description of Artificial Sequence: Synthetic oligonucleotide
  Sense strand starting at position 37 of SEQ ID NO: 1242972
ugugguguuauccacacaa

SEQ ID NO: 1385663 - RNA, 19 nt, Artificial Sequence
  Description of Artificial Sequence: Synthetic oligonucleotide
  Antisense strand to SEQ ID NO: 1385662
uuguguggauaacaccaca

SEQ ID NO: 1385664 - RNA, 19 nt, Artificial Sequence
  Description of Artificial Sequence: Synthetic oligonucleotide
  Sense strand starting at position 39 of SEQ ID NO: 1242972
ugguguuauccacacaaag

SEQ ID NO: 1385665 - RNA, 19 nt, Artificial Sequence
  Description of Artificial Sequence: Synthetic oligonucleotide
  Antisense strand to SEQ ID NO: 1385664
cuuuguguggauaacacca

SEQ ID NO: 1385666 - RNA, 19 nt, Artificial Sequence
  Description of Artificial Sequence: Synthetic oligonucleotide
  Sense strand starting at position 175 of SEQ ID NO: 1242972
uuuccacuuguaugaaaug

SEQ ID NO: 1385667 - RNA, 19 nt, Artificial Sequence
  Description of Artificial Sequence: Synthetic oligonucleotide
  Antisense strand to SEQ ID NO: 1385666
cauuucauacaaguggaaa

SEQ ID NO: 1385668 - RNA, 19 nt, Artificial Sequence
  Description of Artificial Sequence: Synthetic oligonucleotide
  Sense strand starting at position 292 of SEQ ID NO: 1242972
uuuguaggugauuaaaugu

SEQ ID NO: 1385669 - RNA, 19 nt, Artificial Sequence
  Description of Artificial Sequence: Synthetic oligonucleotide
  Antisense strand to SEQ ID NO: 1385668
acauuuaaucaccuacaaa

SEQ ID NO: 1385670 - RNA, 19 nt, Artificial Sequence
  Description of Artificial Sequence: Synthetic oligonucleotide
  Sense strand starting at position 313 of SEQ ID NO: 1242972
uggaauuaguuacugguga

SEQ ID NO: 1385671 - RNA, 19 nt, Artificial Sequence
  Description of Artificial Sequence: Synthetic oligonucleotide
  Antisense strand to SEQ ID NO: 1385670
ucaccaguaacuaauucca

SEQ ID NO: 1385672 - RNA, 19 nt, Artificial Sequence
  Description of Artificial Sequence: Synthetic oligonucleotide
  Sense strand starting at position 315 of SEQ ID NO: 1242972
gaauuaguuacuggugaug

SEQ ID NO: 1385673 - RNA, 19 nt, Artificial Sequence
  Description of Artificial Sequence: Synthetic oligonucleotide
  Antisense strand to SEQ ID NO: 1385672
caucaccaguaacuaauuc

SEQ ID NO: 1385674 - RNA, 19 nt, Artificial Sequence
  Description of Artificial Sequence: Synthetic oligonucleotide
  Sense strand starting at position 340 of SEQ ID NO: 1242972
uagcauugugacuauagca

SEQ ID NO: 1385675 - RNA, 19 nt, Artificial Sequence
  Description of Artificial Sequence: Synthetic oligonucleotide
  Antisense strand to SEQ ID NO: 1385674
ugcuauagucacaaugcua

SEQ ID NO: 1385676 - RNA, 19 nt, Artificial Sequence
  Description of Artificial Sequence: Synthetic oligonucleotide
  Sense strand starting at position 404 of SEQ ID NO: 1242972
uuaugucaugcguaaguca

SEQ ID NO: 1385677 - RNA, 19 nt, Artificial Sequence
  Description of Artificial Sequence: Synthetic oligonucleotide
  Antisense strand to SEQ ID NO: 1385676
ugacuuacgcaugacauaa

SEQ ID NO: 1385678 - RNA, 19 nt, Artificial Sequence
  Description of Artificial Sequence: Synthetic oligonucleotide
  Sense strand starting at position 407 of SEQ ID NO: 1242972
ugucaugcguaagucauuu

SEQ ID NO: 1385679 - RNA, 19 nt, Artificial Sequence
  Description of Artificial Sequence: Synthetic oligonucleotide
  Antisense strand to SEQ ID NO: 1385678
aaaugacuuacgcaugaca

SEQ ID NO: 1385680 - RNA, 19 nt, Artificial Sequence
  Description of Artificial Sequence: Synthetic oligonucleotide
  Sense strand starting at position 411 of SEQ ID NO: 1242972
augcguaagucauuucgau

SEQ ID NO: 1385681 - RNA, 19 nt, Artificial Sequence
  Description of Artificial Sequence: Synthetic oligonucleotide
  Antisense strand to SEQ ID NO: 1385680
aucgaaaugacuuacgcau

SEQ ID NO: 1385682 - RNA, 19 nt, Artificial Sequence
  Description of Artificial Sequence: Synthetic oligonucleotide
  Sense strand starting at position 475 of SEQ ID NO: 1242972
ucuguugcccuagaauauu

SEQ ID NO: 1385683 - RNA, 19 nt, Artificial Sequence
  Description of Artificial Sequence: Synthetic oligonucleotide
  Antisense strand to SEQ ID NO: 1385682
aauauucuagggcaacaga

SEQ ID NO: 1385684 - RNA, 19 nt, Artificial Sequence
  Description of Artificial Sequence: Synthetic oligonucleotide
  Sense strand starting at position 489 of SEQ ID NO: 1242972
auauuccagcagugauuaa

SEQ ID NO: 1385685 - RNA, 19 nt, Artificial Sequence
  Description of Artificial Sequence: Synthetic oligonucleotide
  Antisense strand to SEQ ID NO: 1385684
uuaaucacugcuggaauau

SEQ ID NO: 1385686 - RNA, 19 nt, Artificial Sequence
  Description of Artificial Sequence: Synthetic oligonucleotide
  Sense strand starting at position 806 of SEQ ID NO: 1242972
gagcgagauugucugaauc

SEQ ID NO: 1385687 - RNA, 19 nt, Artificial Sequence
  Description of Artificial Sequence: Synthetic oligonucleotide
  Antisense strand to SEQ ID NO: 1385686
gauucagacaaucucgcuc

SEQ ID NO: 1385688 - RNA, 19 nt, Artificial Sequence
  Description of Artificial Sequence: Synthetic oligonucleotide
  Sense strand starting at position 898 of SEQ ID NO: 1242972
uccuguggcggucagagua

SEQ ID NO: 1385689 - RNA, 19 nt, Artificial Sequence
  Description of Artificial Sequence: Synthetic oligonucleotide
  Antisense strand to SEQ ID NO: 1385688
uacucugaccgccacagga

SEQ ID NO: 1385690 - RNA, 19 nt, Artificial Sequence
  Description of Artificial Sequence: Synthetic oligonucleotide
  Sense strand starting at position 1011 of SEQ ID NO: 1242972
gacucucccguuuauagau

SEQ ID NO: 1385691 - RNA, 19 nt, Artificial Sequence
  Description of Artificial Sequence: Synthetic oligonucleotide
  Antisense strand to SEQ ID NO: 1385690
aucuauaaacgggagaguc

SEQ ID NO: 1385692 - RNA, 19 nt, Artificial Sequence
  Description of Artificial Sequence: Synthetic oligonucleotide
  Sense strand starting at position 1041 of SEQ ID NO: 1242972
gucuuauagauguaaaguc

SEQ ID NO: 1385693 - RNA, 19 nt, Artificial Sequence
  Description of Artificial Sequence: Synthetic oligonucleotide
  Antisense strand to SEQ ID NO: 1385692
gacuuuacaucuauaagac

SEQ ID NO: 1385694 - RNA, 19 nt, Artificial Sequence
  Description of Artificial Sequence: Synthetic oligonucleotide
  Sense strand starting at position 1097 of SEQ ID NO: 1242972
ugcaauucagauggaggua

SEQ ID NO: 1385695 - RNA, 19 nt, Artificial Sequence
  Description of Artificial Sequence: Synthetic oligonucleotide
  Antisense strand to SEQ ID NO: 1385694
uaccuccaucugaauugca

SEQ ID NO: 1385696 - RNA, 19 nt, Artificial Sequence
  Description of Artificial Sequence: Synthetic oligonucleotide
  Sense strand starting at position 1171 of SEQ ID NO: 1242972
cgcagucaccuguacacau

SEQ ID NO: 1385697 - RNA, 19 nt, Artificial Sequence
  Description of Artificial Sequence: Synthetic oligonucleotide
  Antisense strand to SEQ ID NO: 1385696
auguguacaggugacugcg

SEQ ID NO: 1385698 - RNA, 19 nt, Artificial Sequence
  Description of Artificial Sequence: Synthetic oligonucleotide
  Sense strand starting at position 1334 of SEQ ID NO: 1242972
cucggaaauccuggcugaa

SEQ ID NO: 1385699 - RNA, 19 nt, Artificial Sequence
  Description of Artificial Sequence: Synthetic oligonucleotide
  Antisense strand to SEQ ID NO: 1385698
uucagccaggauuuccgag

SEQ ID NO: 1385700 - RNA, 19 nt, Artificial Sequence
  Description of Artificial Sequence: Synthetic oligonucleotide
  Sense strand starting at position 1892 of SEQ ID NO: 1242972
ccggcaaagucuuccaaac

SEQ ID NO: 1385701 - RNA, 19 nt, Artificial Sequence
  Description of Artificial Sequence: Synthetic oligonucleotide
  Antisense strand to SEQ ID NO: 1385700
guuuggaagacuuugccgg

SEQ ID NO: 1385702 - RNA, 19 nt, Artificial Sequence
  Description of Artificial Sequence: Synthetic oligonucleotide
  Sense strand starting at position 2579 of SEQ ID NO: 1242972
cagauaacccucggcuagu

SEQ ID NO: 1385703 - RNA, 19 nt, Artificial Sequence
  Description of Artificial Sequence: Synthetic oligonucleotide
  Antisense strand to SEQ ID NO: 1385702
acuagccgaggguuaucug

SEQ ID NO: 1385704 - RNA, 19 nt, Artificial Sequence
  Description of Artificial Sequence: Synthetic oligonucleotide
  Sense strand starting at position 2589 of SEQ ID NO: 1242972
ucggcuagucagugacaga

SEQ ID NO: 1385705 - RNA, 19 nt, Artificial Sequence
  Description of Artificial Sequence: Synthetic oligonucleotide
  Antisense strand to SEQ ID NO: 1385704
ucugucacugacuagccga

SEQ ID NO: 1385706 - RNA, 19 nt, Artificial Sequence
  Description of Artificial Sequence: Synthetic oligonucleotide
  Sense strand starting at position 2590 of SEQ ID NO: 1242972
cggcuagucagugacagaa

SEQ ID NO: 1385707 - RNA, 19 nt, Artificial Sequence
  Description of Artificial Sequence: Synthetic oligonucleotide
  Antisense strand to SEQ ID NO: 1385706
uucugucacugacuagccg

SEQ ID NO: 1385708 - RNA, 19 nt, Artificial Sequence
  Description of Artificial Sequence: Synthetic oligonucleotide
  Sense strand starting at position 3021 of SEQ ID NO: 1242972
cuuuaaaugugucccuuua

SEQ ID NO: 1385709 - RNA, 19 nt, Artificial Sequence
  Description of Artificial Sequence: Synthetic oligonucleotide
  Antisense strand to SEQ ID NO: 1385708
uaaagggacacauuuaaag

SEQ ID NO: 1385710 - RNA, 19 nt, Artificial Sequence
  Description of Artificial Sequence: Synthetic oligonucleotide
  Sense strand starting at position 3023 of SEQ ID NO: 1242972
uuaaaugugucccuuuauu

SEQ ID NO: 1385711 - RNA, 19 nt, Artificial Sequence
  Description of Artificial Sequence: Synthetic oligonucleotide
  Antisense strand to SEQ ID NO: 1385710
aauaaagggacacauuuaa

SEQ ID NO: 1385712 - RNA, 19 nt, Artificial Sequence
  Description of Artificial Sequence: Synthetic oligonucleotide
  Sense strand starting at position 3040 of SEQ ID NO: 1242972
uugcuaucacuauguaaga

SEQ ID NO: 1385713 - RNA, 19 nt, Artificial Sequence
  Description of Artificial Sequence: Synthetic oligonucleotide
  Antisense strand to SEQ ID NO: 1385712
ucuuacauagugauagcaa

SEQ ID NO: 1385714 - RNA, 19 nt, Artificial Sequence
  Description of Artificial Sequence: Synthetic oligonucleotide
  Sense strand starting at position 3041 of SEQ ID NO: 1242972
ugcuaucacuauguaagau

SEQ ID NO: 1385715 - RNA, 19 nt, Artificial Sequence
  Description of Artificial Sequence: Synthetic oligonucleotide
  Antisense strand to SEQ ID NO: 1385714
aucuuacauagugauagca

SEQ ID NO: 1385716 - RNA, 19 nt, Artificial Sequence
  Description of Artificial Sequence: Synthetic oligonucleotide
  Sense strand starting at position 3064 of SEQ ID NO: 1242972
ggcuuucucucccuccaga

SEQ ID NO: 1385717 - RNA, 19 nt, Artificial Sequence
  Description of Artificial Sequence: Synthetic oligonucleotide
  Antisense strand to SEQ ID NO: 1385716
ucuggagggagagaaagcc

SEQ ID NO: 1385718 - RNA, 19 nt, Artificial Sequence
  Description of Artificial Sequence: Synthetic oligonucleotide
  Sense strand starting at position 3160 of SEQ ID NO: 1242972
gaaugaagacuugguucug

SEQ ID NO: 1385719 - RNA, 19 nt, Artificial Sequence
  Description of Artificial Sequence: Synthetic oligonucleotide
  Antisense strand to SEQ ID NO: 1385718
cagaaccaagucuucauuc

SEQ ID NO: 1385720 - RNA, 19 nt, Artificial Sequence
  Description of Artificial Sequence: Synthetic oligonucleotide
  Sense strand starting at position 3649 of SEQ ID NO: 1242972
cuugauuuguguuccaguu

SEQ ID NO: 1385721 - RNA, 19 nt, Artificial Sequence
  Description of Artificial Sequence: Synthetic oligonucleotide
  Antisense strand to SEQ ID NO: 1385720
aacuggaacacaaaucaag

SEQ ID NO: 1385722 - RNA, 19 nt, Artificial Sequence
  Description of Artificial Sequence: Synthetic oligonucleotide
  Sense strand starting at position 3698 of SEQ ID NO: 1242972
auuuguguuccaggcaaca

SEQ ID NO: 1385723 - RNA, 19 nt, Artificial Sequence
  Description of Artificial Sequence: Synthetic oligonucleotide
  Antisense strand to SEQ ID NO: 1385722
uguugccuggaacacaaau

SEQ ID NO: 1385724 - RNA, 19 nt, Artificial Sequence
  Description of Artificial Sequence: Synthetic oligonucleotide
  Sense strand starting at position 3729 of SEQ ID NO: 1242972
gcaucaacuguccagauga

SEQ ID NO: 1385725 - RNA, 19 nt, Artificial Sequence
  Description of Artificial Sequence: Synthetic oligonucleotide
  Antisense strand to SEQ ID NO: 1385724
ucaucuggacaguugaugc

SEQ ID NO: 1385726 - RNA, 19 nt, Artificial Sequence
  Description of Artificial Sequence: Synthetic oligonucleotide
  Sense strand starting at position 3740 of SEQ ID NO: 1242972
ccagaugaaccuuguauga

SEQ ID NO: 1385727 - RNA, 19 nt, Artificial Sequence
  Description of Artificial Sequence: Synthetic oligonucleotide
  Antisense strand to SEQ ID NO: 1385726
ucauacaagguucaucugg

SEQ ID NO: 1385728 - RNA, 19 nt, Artificial Sequence
  Description of Artificial Sequence: Synthetic oligonucleotide
  Sense strand starting at position 3774 of SEQ ID NO: 1242972
uggcauuacucaguggaaa

SEQ ID NO: 1385729 - RNA, 19 nt, Artificial Sequence
  Description of Artificial Sequence: Synthetic oligonucleotide
  Antisense strand to SEQ ID NO: 1385728
uuuccacugaguaaugcca

SEQ ID NO: 1385730 - RNA, 19 nt, Artificial Sequence
  Description of Artificial Sequence: Synthetic oligonucleotide
  Sense strand starting at position 3775 of SEQ ID NO: 1242972
ggcauuacucaguggaaag

SEQ ID NO: 1385731 - RNA, 19 nt, Artificial Sequence
  Description of Artificial Sequence: Synthetic oligonucleotide
  Antisense strand to SEQ ID NO: 1385730
cuuuccacugaguaaugcc

SEQ ID NO: 1385732 - RNA, 19 nt, Artificial Sequence
  Description of Artificial Sequence: Synthetic oligonucleotide
  Sense strand starting at position 3776 of SEQ ID NO: 1242972
gcauuacucaguggaaaga

SEQ ID NO: 1385733 - RNA, 19 nt, Artificial Sequence
  Description of Artificial Sequence: Synthetic oligonucleotide
  Antisense strand to SEQ ID NO: 1385732
ucuuuccacugaguaaugc

SEQ ID NO: 1385734 - RNA, 19 nt, Artificial Sequence
  Description of Artificial Sequence: Synthetic oligonucleotide
  Sense strand starting at position 3786 of SEQ ID NO: 1242972
guggaaagacacuggucuu

SEQ ID NO: 1385735 - RNA, 19 nt, Artificial Sequence
  Description of Artificial Sequence: Synthetic oligonucleotide
  Antisense strand to SEQ ID NO: 1385734
aagaccagugucuuuccac

SEQ ID NO: 1385736 - RNA, 19 nt, Artificial Sequence
  Description of Artificial Sequence: Synthetic oligonucleotide
  Sense strand starting at position 3901 of SEQ ID NO: 1242972
aucuguaagcuggaauaau

SEQ ID NO: 1385737 - RNA, 19 nt, Artificial Sequence
  Description of Artificial Sequence: Synthetic oligonucleotide
  Antisense strand to SEQ ID NO: 1385736
auuauuccagcuuacagau

SEQ ID NO: 1385738 - RNA, 19 nt, Artificial Sequence
  Description of Artificial Sequence: Synthetic oligonucleotide
  Sense strand starting at position 3910 of SEQ ID NO: 1242972
cuggaauaauuauacagga

SEQ ID NO: 1385739 - RNA, 19 nt, Artificial Sequence
  Description of Artificial Sequence: Synthetic oligonucleotide
  Antisense strand to SEQ ID NO: 1385738
uccuguauaauuauuccag

SEQ ID NO: 1385740 - RNA, 19 nt, Artificial Sequence
  Description of Artificial Sequence: Synthetic oligonucleotide
  Sense strand starting at position 3962 of SEQ ID NO: 1242972
cauauagugggccauuauu

SEQ ID NO: 1385741 - RNA, 19 nt, Artificial Sequence
  Description of Artificial Sequence: Synthetic oligonucleotide
  Antisense strand to SEQ ID NO: 1385740
aauaauggcccacuauaug

SEQ ID NO: 1385742 - RNA, 19 nt, Artificial Sequence
  Description of Artificial Sequence: Synthetic oligonucleotide
  Sense strand starting at position 90 of SEQ ID NO: 1242973
auacucaguucucagaaag

SEQ ID NO: 1385743 - RNA, 19 nt, Artificial Sequence
  Description of Artificial Sequence: Synthetic oligonucleotide
  Antisense strand to SEQ ID NO: 1385742
cuuucugagaacugaguau

SEQ ID NO: 1385744 - RNA, 19 nt, Artificial Sequence
  Description of Artificial Sequence: Synthetic oligonucleotide
  Sense strand starting at position 215 of SEQ ID NO: 1242973
acuaaauggccucgaaggu

SEQ ID NO: 1385745 - RNA, 19 nt, Artificial Sequence
  Description of Artificial Sequence: Synthetic oligonucleotide
  Antisense strand to SEQ ID NO: 1385744
accuucgaggccauuuagu

SEQ ID NO: 1385746 - RNA, 19 nt, Artificial Sequence
  Description of Artificial Sequence: Synthetic oligonucleotide
  Sense strand starting at position 319 of SEQ ID NO: 1242973
ggugaacuucucugaaugg

SEQ ID NO: 1385747 - RNA, 19 nt, Artificial Sequence
  Description of Artificial Sequence: Synthetic oligonucleotide
  Antisense strand to SEQ ID NO: 1385746
ccauucagagaaguucacc

SEQ ID NO: 1385748 - RNA, 19 nt, Artificial Sequence
  Description of Artificial Sequence: Synthetic oligonucleotide
  Sense strand starting at position 382 of SEQ ID NO: 1242973
gggcauggguguucacuga

SEQ ID NO: 1385749 - RNA, 19 nt, Artificial Sequence
  Description of Artificial Sequence: Synthetic oligonucleotide
  Antisense strand to SEQ ID NO: 1385748
ucagugaacacccaugccc

SEQ ID NO: 1385750 - RNA, 19 nt, Artificial Sequence
  Description of Artificial Sequence: Synthetic oligonucleotide
  Sense strand starting at position 937 of SEQ ID NO: 1242973
gggcaaguccuagaaggua

SEQ ID NO: 1385751 - RNA, 19 nt, Artificial Sequence
  Description of Artificial Sequence: Synthetic oligonucleotide
  Antisense strand to SEQ ID NO: 1385750
uaccuucuaggacuugccc

SEQ ID NO: 1385752 - RNA, 19 nt, Artificial Sequence
  Description of Artificial Sequence: Synthetic oligonucleotide
  Sense strand starting at position 1048 of SEQ ID NO: 1242973
agucauuccaaggguguga

SEQ ID NO: 1385753 - RNA, 19 nt, Artificial Sequence
  Description of Artificial Sequence: Synthetic oligonucleotide
  Antisense strand to SEQ ID NO: 1385752
ucacacccuuggaaugacu

SEQ ID NO: 1385754 - RNA, 19 nt, Artificial Sequence
  Description of Artificial Sequence: Synthetic oligonucleotide
  Sense strand starting at position 1088 of SEQ ID NO: 1242973
gcagcugugucguccagag

SEQ ID NO: 1385755 - RNA, 19 nt, Artificial Sequence
  Description of Artificial Sequence: Synthetic oligonucleotide
  Antisense strand to SEQ ID NO: 1385754
cucuggacgacacagcugc

SEQ ID NO: 1385756 - RNA, 19 nt, Artificial Sequence
  Description of Artificial Sequence: Synthetic oligonucleotide
  Sense strand starting at position 1100 of SEQ ID NO: 1242973
uccagaggcucuugaggaa

SEQ ID NO: 1385757 - RNA, 19 nt, Artificial Sequence
  Description of Artificial Sequence: Synthetic oligonucleotide
  Antisense strand to SEQ ID NO: 1385756
uuccucaagagccucugga

SEQ ID NO: 1385758 - RNA, 19 nt, Artificial Sequence
  Description of Artificial Sequence: Synthetic oligonucleotide
  Sense strand starting at position 1192 of SEQ ID NO: 1242973
ccuuuaauaggacgcagaa

SEQ ID NO: 1385759 - RNA, 19 nt, Artificial Sequence
  Description of Artificial Sequence: Synthetic oligonucleotide
  Antisense strand to SEQ ID NO: 1385758
uucugcguccuauuaaagg

SEQ ID NO: 1385760 - RNA, 19 nt, Artificial Sequence
  Description of Artificial Sequence: Synthetic oligonucleotide
  Sense strand starting at position 1205 of SEQ ID NO: 1242973
gcagaaacacugcaggauu

SEQ ID NO: 1385761 - RNA, 19 nt, Artificial Sequence
  Description of Artificial Sequence: Synthetic oligonucleotide
  Antisense strand to SEQ ID NO: 1385760
aauccugcaguguuucugc

SEQ ID NO: 1385762 - RNA, 19 nt, Artificial Sequence
  Description of Artificial Sequence: Synthetic oligonucleotide
  Sense strand starting at position 2542 of SEQ ID NO: 1242973
ggguuagagccgugcagaa

SEQ ID NO: 1385763 - RNA, 19 nt, Artificial Sequence
  Description of Artificial Sequence: Synthetic oligonucleotide
  Antisense strand to SEQ ID NO: 1385762
uucugcacggcucuaaccc

SEQ ID NO: 1385764 - RNA, 19 nt, Artificial Sequence
  Description of Artificial Sequence: Synthetic oligonucleotide
  Sense strand starting at position 2716 of SEQ ID NO: 1242973
agaagauuucaguggcguc

SEQ ID NO: 1385765 - RNA, 19 nt, Artificial Sequence
  Description of Artificial Sequence: Synthetic oligonucleotide
  Antisense strand to SEQ ID NO: 1385764
gacgccacugaaaucuucu

SEQ ID NO: 1385766 - RNA, 19 nt, Artificial Sequence
  Description of Artificial Sequence: Synthetic oligonucleotide
  Sense strand starting at position 2796 of SEQ ID NO: 1242973
gcugucucuaaggagucuu

SEQ ID NO: 1385767 - RNA, 19 nt, Artificial Sequence
  Description of Artificial Sequence: Synthetic oligonucleotide
  Antisense strand to SEQ ID NO: 1385766
aagacuccuuagagacagc

SEQ ID NO: 1385768 - RNA, 19 nt, Artificial Sequence
  Description of Artificial Sequence: Synthetic oligonucleotide
  Sense strand starting at position 2873 of SEQ ID NO: 1242973
acccgugggaagugauuaa

SEQ ID NO: 1385769 - RNA, 19 nt, Artificial Sequence
  Description of Artificial Sequence: Synthetic oligonucleotide
  Antisense strand to SEQ ID NO: 1385768
uuaaucacuucccacgggu

SEQ ID NO: 1385770 - RNA, 19 nt, Artificial Sequence
  Description of Artificial Sequence: Synthetic oligonucleotide
  Sense strand starting at position 2877 of SEQ ID NO: 1242973
gugggaagugauuaagucu

SEQ ID NO: 1385771 - RNA, 19 nt, Artificial Sequence
  Description of Artificial Sequence: Synthetic oligonucleotide
  Antisense strand to SEQ ID NO: 1385770
agacuuaaucacuucccac

SEQ ID NO: 1385772 - RNA, 19 nt, Artificial Sequence
  Description of Artificial Sequence: Synthetic oligonucleotide
  Sense strand starting at position 2880 of SEQ ID NO: 1242973
ggaagugauuaagucucuu

SEQ ID NO: 1385773 - RNA, 19 nt, Artificial Sequence
  Description of Artificial Sequence: Synthetic oligonucleotide
  Antisense strand to SEQ ID NO: 1385772
aagagacuuaaucacuucc

SEQ ID NO: 1385774 - RNA, 19 nt, Artificial Sequence
  Description of Artificial Sequence: Synthetic oligonucleotide
  Sense strand starting at position 2926 of SEQ ID NO: 1242973
agguaaugauaauaccuau

SEQ ID NO: 1385775 - RNA, 19 nt, Artificial Sequence
  Description of Artificial Sequence: Synthetic oligonucleotide
  Antisense strand to SEQ ID NO: 1385774
auagguauuaucauuaccu

SEQ ID NO: 1385776 - RNA, 19 nt, Artificial Sequence
  Description of Artificial Sequence: Synthetic oligonucleotide
  Sense strand starting at position 3001 of SEQ ID NO: 1242973
aaacaaugguugguauaua

SEQ ID NO: 1385777 - RNA, 19 nt, Artificial Sequence
  Description of Artificial Sequence: Synthetic oligonucleotide
  Antisense strand to SEQ ID NO: 1385776
uauauaccaaccauuguuu

SEQ ID NO: 1385778 - RNA, 19 nt, Artificial Sequence
  Description of Artificial Sequence: Synthetic oligonucleotide
  Sense strand starting at position 3012 of SEQ ID NO: 1242973
gguauauacuaggcaguca

SEQ ID NO: 1385779 - RNA, 19 nt, Artificial Sequence
  Description of Artificial Sequence: Synthetic oligonucleotide
  Antisense strand to SEQ ID NO: 1385778
ugacugccuaguauauacc

SEQ ID NO: 1385780 - RNA, 19 nt, Artificial Sequence
  Description of Artificial Sequence: Synthetic oligonucleotide
  Sense strand starting at position 3025 of SEQ ID NO: 1242973
cagucaauacgucagcaau

SEQ ID NO: 1385781 - RNA, 19 nt, Artificial Sequence
  Description of Artificial Sequence: Synthetic oligonucleotide
  Antisense strand to SEQ ID NO: 1385780
auugcugacguauugacug

SEQ ID NO: 1385782 - RNA, 19 nt, Artificial Sequence
  Description of Artificial Sequence: Synthetic oligonucleotide
  Sense strand starting at position 3027 of SEQ ID NO: 1242973
gucaauacgucagcaauua

SEQ ID NO: 1385783 - RNA, 19 nt, Artificial Sequence
  Description of Artificial Sequence: Synthetic oligonucleotide
  Antisense strand to SEQ ID NO: 1385782
uaauugcugacguauugac

SEQ ID NO: 1385784 - RNA, 19 nt, Artificial Sequence
  Description of Artificial Sequence: Synthetic oligonucleotide
  Sense strand starting at position 3028 of SEQ ID NO: 1242973
ucaauacgucagcaauuau

SEQ ID NO: 1385785 - RNA, 19 nt, Artificial Sequence
  Description of Artificial Sequence: Synthetic oligonucleotide
  Antisense strand to SEQ ID NO: 1385784
auaauugcugacguauuga

SEQ ID NO: 1385786 - RNA, 19 nt, Artificial Sequence
  Description of Artificial Sequence: Synthetic oligonucleotide
  Sense strand starting at position 3059 of SEQ ID NO: 1242973
gagauaaacuguuacucug

SEQ ID NO: 1385787 - RNA, 19 nt, Artificial Sequence
  Description of Artificial Sequence: Synthetic oligonucleotide
  Antisense strand to SEQ ID NO: 1385786
cagaguaacaguuuaucuc

SEQ ID NO: 1385788 - RNA, 19 nt, Artificial Sequence
  Description of Artificial Sequence: Synthetic oligonucleotide
  Sense strand starting at position 3436 of SEQ ID NO: 1242973
ggagcaggcucaccugauu

SEQ ID NO: 1385789 - RNA, 19 nt, Artificial Sequence
  Description of Artificial Sequence: Synthetic oligonucleotide
  Antisense strand to SEQ ID NO: 1385788
aaucaggugagccugcucc

SEQ ID NO: 1385790 - RNA, 19 nt, Artificial Sequence
  Description of Artificial Sequence: Synthetic oligonucleotide
  Sense strand starting at position 3708 of SEQ ID NO: 1242973
cgagcuuagguguacaaau

SEQ ID NO: 1385791 - RNA, 19 nt, Artificial Sequence
  Description of Artificial Sequence: Synthetic oligonucleotide
  Antisense strand to SEQ ID NO: 1385790
auuuguacaccuaagcucg

SEQ ID NO: 1385792 - RNA, 19 nt, Artificial Sequence
  Description of Artificial Sequence: Synthetic oligonucleotide
  Sense strand starting at position 3725 of SEQ ID NO: 1242973
augcuuguggccugaggaa

SEQ ID NO: 1385793 - RNA, 19 nt, Artificial Sequence
  Description of Artificial Sequence: Synthetic oligonucleotide
  Antisense strand to SEQ ID NO: 1385792
uuccucaggccacaagcau

SEQ ID NO: 1385794 - RNA, 19 nt, Artificial Sequence
  Description of Artificial Sequence: Synthetic oligonucleotide
  Sense strand starting at position 3824 of SEQ ID NO: 1242973
aaaucaggcucuccggaaa

SEQ ID NO: 1385795 - RNA, 19 nt, Artificial Sequence
  Description of Artificial Sequence: Synthetic oligonucleotide
  Antisense strand to SEQ ID NO: 1385794
uuuccggagagccugauuu

SEQ ID NO: 1385796 - RNA, 19 nt, Artificial Sequence
  Description of Artificial Sequence: Synthetic oligonucleotide
  Sense strand starting at position 197 of SEQ ID NO: 1242974
acgauagacugaguuaaga

SEQ ID NO: 1385797 - RNA, 19 nt, Artificial Sequence
  Description of Artificial Sequence: Synthetic oligonucleotide
  Antisense strand to SEQ ID NO: 1385796
ucuuaacucagucuaucgu

SEQ ID NO: 1385798 - RNA, 19 nt, Artificial Sequence
  Description of Artificial Sequence: Synthetic oligonucleotide
  Sense strand starting at position 721 of SEQ ID NO: 1242974
caaauaccuguaugggaau

SEQ ID NO: 1385799 - RNA, 19 nt, Artificial Sequence
  Description of Artificial Sequence: Synthetic oligonucleotide
  Antisense strand to SEQ ID NO: 1385798
auucccauacagguauuug

SEQ ID NO: 1385800 - RNA, 19 nt, Artificial Sequence
  Description of Artificial Sequence: Synthetic oligonucleotide
  Sense strand starting at position 733 of SEQ ID NO: 1242974
ugggaauauuuauaacagu

SEQ ID NO: 1385801 - RNA, 19 nt, Artificial Sequence
  Description of Artificial Sequence: Synthetic oligonucleotide
  Antisense strand to SEQ ID NO: 1385800
acuguuauaaauauuccca

SEQ ID NO: 1385802 - RNA, 19 nt, Artificial Sequence
  Description of Artificial Sequence: Synthetic oligonucleotide
  Sense strand starting at position 892 of SEQ ID NO: 1242974
gcaauaugcuaaguauaac

SEQ ID NO: 1385803 - RNA, 19 nt, Artificial Sequence
  Description of Artificial Sequence: Synthetic oligonucleotide
  Antisense strand to SEQ ID NO: 1385802
guuauacuuagcauauugc

SEQ ID NO: 1385804 - RNA, 19 nt, Artificial Sequence
  Description of Artificial Sequence: Synthetic oligonucleotide
  Sense strand starting at position 1028 of SEQ ID NO: 1242974
cauugacuacaaugaggua

SEQ ID NO: 1385805 - RNA, 19 nt, Artificial Sequence
  Description of Artificial Sequence: Synthetic oligonucleotide
  Antisense strand to SEQ ID NO: 1385804
uaccucauuguagucaaug

SEQ ID NO: 1385806 - RNA, 19 nt, Artificial Sequence
  Description of Artificial Sequence: Synthetic oligonucleotide
  Sense strand starting at position 1092 of SEQ ID NO: 1242974
gcaguaaguacaugauaug

SEQ ID NO: 1385807 - RNA, 19 nt, Artificial Sequence
  Description of Artificial Sequence: Synthetic oligonucleotide
  Antisense strand to SEQ ID NO: 1385806
cauaucauguacuuacugc

SEQ ID NO: 1385808 - RNA, 19 nt, Artificial Sequence
  Description of Artificial Sequence: Synthetic oligonucleotide
  Sense strand starting at position 1410 of SEQ ID NO: 1242974
uguaauuagccucagauau

SEQ ID NO: 1385809 - RNA, 19 nt, Artificial Sequence
  Description of Artificial Sequence: Synthetic oligonucleotide
  Antisense strand to SEQ ID NO: 1385808
auaucugaggcuaauuaca

SEQ ID NO: 1385810 - RNA, 19 nt, Artificial Sequence
  Description of Artificial Sequence: Synthetic oligonucleotide
  Sense strand starting at position 1433 of SEQ ID NO: 1242974
uuauuagcagaaugauaac

SEQ ID NO: 1385811 - RNA, 19 nt, Artificial Sequence
  Description of Artificial Sequence: Synthetic oligonucleotide
  Antisense strand to SEQ ID NO: 1385810
guuaucauucugcuaauaa

SEQ ID NO: 1385812 - RNA, 19 nt, Artificial Sequence
  Description of Artificial Sequence: Synthetic oligonucleotide
  Sense strand starting at position 1541 of SEQ ID NO: 1242974
cgggaaaugauucguccaa

SEQ ID NO: 1385813 - RNA, 19 nt, Artificial Sequence
  Description of Artificial Sequence: Synthetic oligonucleotide
  Antisense strand to SEQ ID NO: 1385812
uuggacgaaucauuucccg

SEQ ID NO: 1385814 - RNA, 19 nt, Artificial Sequence
  Description of Artificial Sequence: Synthetic oligonucleotide
  Sense strand starting at position 1542 of SEQ ID NO: 1242974
gggaaaugauucguccaag

SEQ ID NO: 1385815 - RNA, 19 nt, Artificial Sequence
  Description of Artificial Sequence: Synthetic oligonucleotide
  Antisense strand to SEQ ID NO: 1385814
cuuggacgaaucauuuccc

SEQ ID NO: 1385816 - RNA, 19 nt, Artificial Sequence
  Description of Artificial Sequence: Synthetic oligonucleotide
  Sense strand starting at position 1670 of SEQ ID NO: 1242974
cuuucaugggagugagaag

SEQ ID NO: 1385817 - RNA, 19 nt, Artificial Sequence
  Description of Artificial Sequence: Synthetic oligonucleotide
  Antisense strand to SEQ ID NO: 1385816
cuucucacucccaugaaag

SEQ ID NO: 1385818 - RNA, 19 nt, Artificial Sequence
  Description of Artificial Sequence: Synthetic oligonucleotide
  Sense strand starting at position 2092 of SEQ ID NO: 1242974
gaauuugguuuccaaggau

SEQ ID NO: 1385819 - RNA, 19 nt, Artificial Sequence
  Description of Artificial Sequence: Synthetic oligonucleotide
  Antisense strand to SEQ ID NO: 1385818
auccuuggaaaccaaauuc

SEQ ID NO: 1385820 - RNA, 19 nt, Artificial Sequence
  Description of Artificial Sequence: Synthetic oligonucleotide
  Sense strand starting at position 2095 of SEQ ID NO: 1242974
uuugguuuccaaggauucu

SEQ ID NO: 1385821 - RNA, 19 nt, Artificial Sequence
  Description of Artificial Sequence: Synthetic oligonucleotide
  Antisense strand to SEQ ID NO: 1385820
agaauccuuggaaaccaaa

SEQ ID NO: 1385822 - RNA, 19 nt, Artificial Sequence
  Description of Artificial Sequence: Synthetic oligonucleotide
  Sense strand starting at position 2149 of SEQ ID NO: 1242974
aggccuaguucuuuaaaga

SEQ ID NO: 1385823 - RNA, 19 nt, Artificial Sequence
  Description of Artificial Sequence: Synthetic oligonucleotide
  Antisense strand to SEQ ID NO: 1385822
ucuuuaaagaacuaggccu

SEQ ID NO: 1385824 - RNA, 19 nt, Artificial Sequence
  Description of Artificial Sequence: Synthetic oligonucleotide
  Sense strand starting at position 2150 of SEQ ID NO: 1242974
ggccuaguucuuuaaagau

SEQ ID NO: 1385825 - RNA, 19 nt, Artificial Sequence
  Description of Artificial Sequence: Synthetic oligonucleotide
  Antisense strand to SEQ ID NO: 1385824
aucuuuaaagaacuaggcc

SEQ ID NO: 1385826 - RNA, 19 nt, Artificial Sequence
  Description of Artificial Sequence: Synthetic oligonucleotide
  Sense strand starting at position 2317 of SEQ ID NO: 1242974
ggccauuuacccggucaga

SEQ ID NO: 1385827 - RNA, 19 nt, Artificial Sequence
  Description of Artificial Sequence: Synthetic oligonucleotide
  Antisense strand to SEQ ID NO: 1385826
ucugaccggguaaauggcc

SEQ ID NO: 1385828 - RNA, 19 nt, Artificial Sequence
  Description of Artificial Sequence: Synthetic oligonucleotide
  Sense strand starting at position 2337 of SEQ ID NO: 1242974
gguccauagcuguagauuc

SEQ ID NO: 1385829 - RNA, 19 nt, Artificial Sequence
  Description of Artificial Sequence: Synthetic oligonucleotide
  Antisense strand to SEQ ID NO: 1385828
gaaucuacagcuauggacc

SEQ ID NO: 1385830 - RNA, 19 nt, Artificial Sequence
  Description of Artificial Sequence: Synthetic oligonucleotide
  Sense strand starting at position 2457 of SEQ ID NO: 1242974
agacaaauagagugugguu

SEQ ID NO: 1385831 - RNA, 19 nt, Artificial Sequence
  Description of Artificial Sequence: Synthetic oligonucleotide
  Antisense strand to SEQ ID NO: 1385830
aaccacacucuauuugucu

SEQ ID NO: 1385832 - RNA, 19 nt, Artificial Sequence
  Description of Artificial Sequence: Synthetic oligonucleotide
  Sense strand starting at position 2582 of SEQ ID NO: 1242974
ucacuaauugugggucaua

SEQ ID NO: 1385833 - RNA, 19 nt, Artificial Sequence
  Description of Artificial Sequence: Synthetic oligonucleotide
  Antisense strand to SEQ ID NO: 1385832
uaugacccacaauuaguga

SEQ ID NO: 1385834 - RNA, 19 nt, Artificial Sequence
  Description of Artificial Sequence: Synthetic oligonucleotide
  Sense strand starting at position 2583 of SEQ ID NO: 1242974
cacuaauugugggucauau

SEQ ID NO: 1385835 - RNA, 19 nt, Artificial Sequence
  Description of Artificial Sequence: Synthetic oligonucleotide
  Antisense strand to SEQ ID NO: 1385834
auaugacccacaauuagug

SEQ ID NO: 1385836 - RNA, 19 nt, Artificial Sequence
  Description of Artificial Sequence: Synthetic oligonucleotide
  Sense strand starting at position 2585 of SEQ ID NO: 1242974
cuaauugugggucauauau

SEQ ID NO: 1385837 - RNA, 19 nt, Artificial Sequence
  Description of Artificial Sequence: Synthetic oligonucleotide
  Antisense strand to SEQ ID NO: 1385836
auauaugacccacaauuag

SEQ ID NO: 1385838 - RNA, 19 nt, Artificial Sequence
  Description of Artificial Sequence: Synthetic oligonucleotide
  Sense strand starting at position 2598 of SEQ ID NO: 1242974
auauauuugucauagggac

SEQ ID NO: 1385839 - RNA, 19 nt, Artificial Sequence
  Description of Artificial Sequence: Synthetic oligonucleotide
  Antisense strand to SEQ ID NO: 1385838
gucccuaugacaaauauau

SEQ ID NO: 1385840 - RNA, 19 nt, Artificial Sequence
  Description of Artificial Sequence: Synthetic oligonucleotide
  Sense strand starting at position 2714 of SEQ ID NO: 1242974
ugugauaggaagugucaag

SEQ ID NO: 1385841 - RNA, 19 nt, Artificial Sequence
  Description of Artificial Sequence: Synthetic oligonucleotide
  Antisense strand to SEQ ID NO: 1385840
cuugacacuuccuaucaca

SEQ ID NO: 1385842 - RNA, 19 nt, Artificial Sequence
  Description of Artificial Sequence: Synthetic oligonucleotide
  Sense strand starting at position 2721 of SEQ ID NO: 1242974
ggaagugucaagggugaug

SEQ ID NO: 1385843 - RNA, 19 nt, Artificial Sequence
  Description of Artificial Sequence: Synthetic oligonucleotide
  Antisense strand to SEQ ID NO: 1385842
caucacccuugacacuucc

SEQ ID NO: 1385844 - RNA, 19 nt, Artificial Sequence
  Description of Artificial Sequence: Synthetic oligonucleotide
  Sense strand starting at position 2732 of SEQ ID NO: 1242974
gggugaugagcccaguaga

SEQ ID NO: 1385845 - RNA, 19 nt, Artificial Sequence
  Description of Artificial Sequence: Synthetic oligonucleotide
  Antisense strand to SEQ ID NO: 1385844
ucuacugggcucaucaccc

SEQ ID NO: 1385846 - RNA, 19 nt, Artificial Sequence
  Description of Artificial Sequence: Synthetic oligonucleotide
  Sense strand starting at position 2761 of SEQ ID NO: 1242974
gggagggugucuuugagga

SEQ ID NO: 1385847 - RNA, 19 nt, Artificial Sequence
  Description of Artificial Sequence: Synthetic oligonucleotide
  Antisense strand to SEQ ID NO: 1385846
uccucaaagacacccuccc

SEQ ID NO: 1385848 - RNA, 19 nt, Artificial Sequence
  Description of Artificial Sequence: Synthetic oligonucleotide
  Sense strand starting at position 2768 of SEQ ID NO: 1242974
ugucuuugaggagacaguu

SEQ ID NO: 1385849 - RNA, 19 nt, Artificial Sequence
  Description of Artificial Sequence: Synthetic oligonucleotide
  Antisense strand to SEQ ID NO: 1385848
aacugucuccucaaagaca

SEQ ID NO: 1385850 - RNA, 19 nt, Artificial Sequence
  Description of Artificial Sequence: Synthetic oligonucleotide
  Sense strand starting at position 2787 of SEQ ID NO: 1242974
gcguuugagcugagacaug

SEQ ID NO: 1385851 - RNA, 19 nt, Artificial Sequence
  Description of Artificial Sequence: Synthetic oligonucleotide
  Antisense strand to SEQ ID NO: 1385850
caugucucagcucaaacgc

SEQ ID NO: 1385852 - RNA, 19 nt, Artificial Sequence
  Description of Artificial Sequence: Synthetic oligonucleotide
  Sense strand starting at position 3142 of SEQ ID NO: 1242974
uggcguggacacuaaauaa

SEQ ID NO: 1385853 - RNA, 19 nt, Artificial Sequence
  Description of Artificial Sequence: Synthetic oligonucleotide
  Antisense strand to SEQ ID NO: 1385852
uuauuuaguguccacgcca

SEQ ID NO: 1385854 - RNA, 19 nt, Artificial Sequence
  Description of Artificial Sequence: Synthetic oligonucleotide
  Sense strand starting at position 3166 of SEQ ID NO: 1242974
uguugauugcaugaaucua

SEQ ID NO: 1385855 - RNA, 19 nt, Artificial Sequence
  Description of Artificial Sequence: Synthetic oligonucleotide
  Antisense strand to SEQ ID NO: 1385854
uagauucaugcaaucaaca

SEQ ID NO: 1385856 - RNA, 19 nt, Artificial Sequence
  Description of Artificial Sequence: Synthetic oligonucleotide
  Sense strand starting at position 3205 of SEQ ID NO: 1242974
ugugguugacugggagaua

SEQ ID NO: 1385857 - RNA, 19 nt, Artificial Sequence
  Description of Artificial Sequence: Synthetic oligonucleotide
  Antisense strand to SEQ ID NO: 1385856
uaucucccagucaaccaca

SEQ ID NO: 1385858 - RNA, 19 nt, Artificial Sequence
  Description of Artificial Sequence: Synthetic oligonucleotide
  Sense strand starting at position 3262 of SEQ ID NO: 1242974
accuuaaaugcuuguggaa

SEQ ID NO: 1385859 - RNA, 19 nt, Artificial Sequence
  Description of Artificial Sequence: Synthetic oligonucleotide
  Antisense strand to SEQ ID NO: 1385858
uuccacaagcauuuaaggu

SEQ ID NO: 1385860 - RNA, 19 nt, Artificial Sequence
  Description of Artificial Sequence: Synthetic oligonucleotide
  Sense strand starting at position 3315 of SEQ ID NO: 1242974
gcgugcagaauugaaugau

SEQ ID NO: 1385861 - RNA, 19 nt, Artificial Sequence
  Description of Artificial Sequence: Synthetic oligonucleotide
  Antisense strand to SEQ ID NO: 1385860
aucauucaauucugcacgc

SEQ ID NO: 1385862 - RNA, 19 nt, Artificial Sequence
  Description of Artificial Sequence: Synthetic oligonucleotide
  Sense strand starting at position 3325 of SEQ ID NO: 1242974
uugaaugauuuagacugua

SEQ ID NO: 1385863 - RNA, 19 nt, Artificial Sequence
  Description of Artificial Sequence: Synthetic oligonucleotide
  Antisense strand to SEQ ID NO: 1385862
uacagucuaaaucauucaa

SEQ ID NO: 1385864 - RNA, 19 nt, Artificial Sequence
  Description of Artificial Sequence: Synthetic oligonucleotide
  Sense strand starting at position 3363 of SEQ ID NO: 1242974
gaaggauucccuugguaau

SEQ ID NO: 1385865 - RNA, 19 nt, Artificial Sequence
  Description of Artificial Sequence: Synthetic oligonucleotide
  Antisense strand to SEQ ID NO: 1385864
auuaccaagggaauccuuc

SEQ ID NO: 1385866 - RNA, 19 nt, Artificial Sequence
  Description of Artificial Sequence: Synthetic oligonucleotide
  Sense strand starting at position 3364 of SEQ ID NO: 1242974
aaggauucccuugguaaug

SEQ ID NO: 1385867 - RNA, 19 nt, Artificial Sequence
  Description of Artificial Sequence: Synthetic oligonucleotide
  Antisense strand to SEQ ID NO: 1385866
cauuaccaagggaauccuu

SEQ ID NO: 1385868 - RNA, 19 nt, Artificial Sequence
  Description of Artificial Sequence: Synthetic oligonucleotide
  Sense strand starting at position 3365 of SEQ ID NO: 1242974
aggauucccuugguaaugu

SEQ ID NO: 1385869 - RNA, 19 nt, Artificial Sequence
  Description of Artificial Sequence: Synthetic oligonucleotide
  Antisense strand to SEQ ID NO: 1385868
acauuaccaagggaauccu

SEQ ID NO: 1385870 - RNA, 19 nt, Artificial Sequence
  Description of Artificial Sequence: Synthetic oligonucleotide
  Sense strand starting at position 3513 of SEQ ID NO: 1242974
guacuacugcuccacuaca

SEQ ID NO: 1385871 - RNA, 19 nt, Artificial Sequence
  Description of Artificial Sequence: Synthetic oligonucleotide
  Antisense strand to SEQ ID NO: 1385870
uguaguggagcaguaguac

SEQ ID NO: 1385872 - RNA, 19 nt, Artificial Sequence
  Description of Artificial Sequence: Synthetic oligonucleotide
  Sense strand starting at position 3531 of SEQ ID NO: 1242974
aguugccucucaucauuua

SEQ ID NO: 1385873 - RNA, 19 nt, Artificial Sequence
  Description of Artificial Sequence: Synthetic oligonucleotide
  Antisense strand to SEQ ID NO: 1385872
uaaaugaugagaggcaacu

SEQ ID NO: 1385874 - RNA, 19 nt, Artificial Sequence
  Description of Artificial Sequence: Synthetic oligonucleotide
  Sense strand starting at position 3899 of SEQ ID NO: 1242974
uugguagaggcaugauaaa

SEQ ID NO: 1385875 - RNA, 19 nt, Artificial Sequence
  Description of Artificial Sequence: Synthetic oligonucleotide
  Antisense strand to SEQ ID NO: 1385874
uuuaucaugccucuaccaa

SEQ ID NO: 1385876 - RNA, 19 nt, Artificial Sequence
  Description of Artificial Sequence: Synthetic oligonucleotide
  Sense strand starting at position 150 of SEQ ID NO: 1242975
gcgguuugaugcaacacga

SEQ ID NO: 1385877 - RNA, 19 nt, Artificial Sequence
  Description of Artificial Sequence: Synthetic oligonucleotide
  Antisense strand to SEQ ID NO: 1385876
ucguguugcaucaaaccgc

SEQ ID NO: 1385878 - RNA, 19 nt, Artificial Sequence
  Description of Artificial Sequence: Synthetic oligonucleotide
  Sense strand starting at position 307 of SEQ ID NO: 1242975
accggaaucagccgcgauu

SEQ ID NO: 1385879 - RNA, 19 nt, Artificial Sequence
  Description of Artificial Sequence: Synthetic oligonucleotide
  Antisense strand to SEQ ID NO: 1385878
aaucgcggcugauuccggu

SEQ ID NO: 1385880 - RNA, 19 nt, Artificial Sequence
  Description of Artificial Sequence: Synthetic oligonucleotide
  Sense strand starting at position 732 of SEQ ID NO: 1242975
cagguuauuccgcucugca

SEQ ID NO: 1385881 - RNA, 19 nt, Artificial Sequence
  Description of Artificial Sequence: Synthetic oligonucleotide
  Antisense strand to SEQ ID NO: 1385880
ugcagagcggaauaaccug

SEQ ID NO: 1385882 - RNA, 19 nt, Artificial Sequence
  Description of Artificial Sequence: Synthetic oligonucleotide
  Sense strand starting at position 735 of SEQ ID NO: 1242975
guuauuccgcucugcaaga

SEQ ID NO: 1385883 - RNA, 19 nt, Artificial Sequence
  Description of Artificial Sequence: Synthetic oligonucleotide
  Antisense strand to SEQ ID NO: 1385882
ucuugcagagcggaauaac

SEQ ID NO: 1385884 - RNA, 19 nt, Artificial Sequence
  Description of Artificial Sequence: Synthetic oligonucleotide
  Sense strand starting at position 981 of SEQ ID NO: 1242975
ggucaagcguuucugggaa

SEQ ID NO: 1385885 - RNA, 19 nt, Artificial Sequence
  Description of Artificial Sequence: Synthetic oligonucleotide
  Antisense strand to SEQ ID NO: 1385884
uucccagaaacgcuugacc

SEQ ID NO: 1385886 - RNA, 19 nt, Artificial Sequence
  Description of Artificial Sequence: Synthetic oligonucleotide
  Sense strand starting at position 1013 of SEQ ID NO: 1242975
ggcaguguccugagguguu

SEQ ID NO: 1385887 - RNA, 19 nt, Artificial Sequence
  Description of Artificial Sequence: Synthetic oligonucleotide
  Antisense strand to SEQ ID NO: 1385886
aacaccucaggacacugcc

SEQ ID NO: 1385888 - RNA, 19 nt, Artificial Sequence
  Description of Artificial Sequence: Synthetic oligonucleotide
  Sense strand starting at position 1023 of SEQ ID NO: 1242975
ugagguguugggugacuga

SEQ ID NO: 1385889 - RNA, 19 nt, Artificial Sequence
  Description of Artificial Sequence: Synthetic oligonucleotide
  Antisense strand to SEQ ID NO: 1385888
ucagucacccaacaccuca

SEQ ID NO: 1385890 - RNA, 19 nt, Artificial Sequence
  Description of Artificial Sequence: Synthetic oligonucleotide
  Sense strand starting at position 1756 of SEQ ID NO: 1242975
ucugcuuucuugcuaugaa

SEQ ID NO: 1385891 - RNA, 19 nt, Artificial Sequence
  Description of Artificial Sequence: Synthetic oligonucleotide
  Antisense strand to SEQ ID NO: 1385890
uucauagcaagaaagcaga

SEQ ID NO: 1385892 - RNA, 19 nt, Artificial Sequence
  Description of Artificial Sequence: Synthetic oligonucleotide
  Sense strand starting at position 1759 of SEQ ID NO: 1242975
gcuuucuugcuaugaagaa

SEQ ID NO: 1385893 - RNA, 19 nt, Artificial Sequence
  Description of Artificial Sequence: Synthetic oligonucleotide
  Antisense strand to SEQ ID NO: 1385892
uucuucauagcaagaaagc

SEQ ID NO: 1385894 - RNA, 19 nt, Artificial Sequence
  Description of Artificial Sequence: Synthetic oligonucleotide
  Sense strand starting at position 1941 of SEQ ID NO: 1242975
ucacguauccgucaacacu

SEQ ID NO: 1385895 - RNA, 19 nt, Artificial Sequence
  Description of Artificial Sequence: Synthetic oligonucleotide
  Antisense strand to SEQ ID NO: 1385894
aguguugacggauacguga

SEQ ID NO: 1385896 - RNA, 19 nt, Artificial Sequence
  Description of Artificial Sequence: Synthetic oligonucleotide
  Sense strand starting at position 2842 of SEQ ID NO: 1242975
cgguccuuucaguggcgaa

SEQ ID NO: 1385897 - RNA, 19 nt, Artificial Sequence
  Description of Artificial Sequence: Synthetic oligonucleotide
  Antisense strand to SEQ ID NO: 1385896
uucgccacugaaaggaccg

SEQ ID NO: 1385898 - RNA, 19 nt, Artificial Sequence
  Description of Artificial Sequence: Synthetic oligonucleotide
  Sense strand starting at position 3019 of SEQ ID NO: 1242975
ggguuuagguuucuugagu

SEQ ID NO: 1385899 - RNA, 19 nt, Artificial Sequence
  Description of Artificial Sequence: Synthetic oligonucleotide
  Antisense strand to SEQ ID NO: 1385898
acucaagaaaccuaaaccc

SEQ ID NO: 1385900 - RNA, 19 nt, Artificial Sequence
  Description of Artificial Sequence: Synthetic oligonucleotide
  Sense strand starting at position 3020 of SEQ ID NO: 1242975
gguuuagguuucuugagug

SEQ ID NO: 1385901 - RNA, 19 nt, Artificial Sequence
  Description of Artificial Sequence: Synthetic oligonucleotide
  Antisense strand to SEQ ID NO: 1385900
cacucaagaaaccuaaacc

SEQ ID NO: 1385902 - RNA, 19 nt, Artificial Sequence
  Description of Artificial Sequence: Synthetic oligonucleotide
  Sense strand starting at position 3024 of SEQ ID NO: 1242975
uagguuucuugaguggaaa

SEQ ID NO: 1385903 - RNA, 19 nt, Artificial Sequence
  Description of Artificial Sequence: Synthetic oligonucleotide
  Antisense strand to SEQ ID NO: 1385902
uuuccacucaagaaaccua

SEQ ID NO: 1385904 - RNA, 19 nt, Artificial Sequence
  Description of Artificial Sequence: Synthetic oligonucleotide
  Sense strand starting at position 3025 of SEQ ID NO: 1242975
agguuucuugaguggaaag

SEQ ID NO: 1385905 - RNA, 19 nt, Artificial Sequence
  Description of Artificial Sequence: Synthetic oligonucleotide
  Antisense strand to SEQ ID NO: 1385904
cuuuccacucaagaaaccu

SEQ ID NO: 1385906 - RNA, 19 nt, Artificial Sequence
  Description of Artificial Sequence: Synthetic oligonucleotide
  Sense strand starting at position 3026 of SEQ ID NO: 1242975
gguuucuugaguggaaaga

SEQ ID NO: 1385907 - RNA, 19 nt, Artificial Sequence
  Description of Artificial Sequence: Synthetic oligonucleotide
  Antisense strand to SEQ ID NO: 1385906
ucuuuccacucaagaaacc

SEQ ID NO: 1385908 - RNA, 19 nt, Artificial Sequence
  Description of Artificial Sequence: Synthetic oligonucleotide
  Sense strand starting at position 3065 of SEQ ID NO: 1242975
ugggaagucuugccacgaa

SEQ ID NO: 1385909 - RNA, 19 nt, Artificial Sequence
  Description of Artificial Sequence: Synthetic oligonucleotide
  Antisense strand to SEQ ID NO: 1385908
uucguggcaagacuuccca

SEQ ID NO: 1385910 - RNA, 19 nt, Artificial Sequence
  Description of Artificial Sequence: Synthetic oligonucleotide
  Sense strand starting at position 3068 of SEQ ID NO: 1242975
gaagucuugccacgaaauc

SEQ ID NO: 1385911 - RNA, 19 nt, Artificial Sequence
  Description of Artificial Sequence: Synthetic oligonucleotide
  Antisense strand to SEQ ID NO: 1385910
gauuucguggcaagacuuc

SEQ ID NO: 1385912 - RNA, 19 nt, Artificial Sequence
  Description of Artificial Sequence: Synthetic oligonucleotide
  Sense strand starting at position 3078 of SEQ ID NO: 1242975
cacgaaaucccuuaaguug

SEQ ID NO: 1385913 - RNA, 19 nt, Artificial Sequence
  Description of Artificial Sequence: Synthetic oligonucleotide
  Antisense strand to SEQ ID NO: 1385912
caacuuaagggauuucgug

SEQ ID NO: 1385914 - RNA, 19 nt, Artificial Sequence
  Description of Artificial Sequence: Synthetic oligonucleotide
  Sense strand starting at position 3146 of SEQ ID NO: 1242975
cuagcaugaacucgagauu

SEQ ID NO: 1385915 - RNA, 19 nt, Artificial Sequence
  Description of Artificial Sequence: Synthetic oligonucleotide
  Antisense strand to SEQ ID NO: 1385914
aaucucgaguucaugcuag

SEQ ID NO: 1385916 - RNA, 19 nt, Artificial Sequence
  Description of Artificial Sequence: Synthetic oligonucleotide
  Sense strand starting at position 3205 of SEQ ID NO: 1242975
uugugugaucugcaccuca

SEQ ID NO: 1385917 - RNA, 19 nt, Artificial Sequence
  Description of Artificial Sequence: Synthetic oligonucleotide
  Antisense strand to SEQ ID NO: 1385916
ugaggugcagaucacacaa

SEQ ID NO: 1385918 - RNA, 19 nt, Artificial Sequence
  Description of Artificial Sequence: Synthetic oligonucleotide
  Sense strand starting at position 3257 of SEQ ID NO: 1242975
ucccgaucucucggaaaga

SEQ ID NO: 1385919 - RNA, 19 nt, Artificial Sequence
  Description of Artificial Sequence: Synthetic oligonucleotide
  Antisense strand to SEQ ID NO: 1385918
ucuuuccgagagaucggga

SEQ ID NO: 1385920 - RNA, 19 nt, Artificial Sequence
  Description of Artificial Sequence: Synthetic oligonucleotide
  Sense strand starting at position 3258 of SEQ ID NO: 1242975
cccgaucucucggaaagag

SEQ ID NO: 1385921 - RNA, 19 nt, Artificial Sequence
  Description of Artificial Sequence: Synthetic oligonucleotide
  Antisense strand to SEQ ID NO: 1385920
cucuuuccgagagaucggg

SEQ ID NO: 1385922 - RNA, 19 nt, Artificial Sequence
  Description of Artificial Sequence: Synthetic oligonucleotide
  Sense strand starting at position 3294 of SEQ ID NO: 1242975
ccuguauuucgugguuggu

SEQ ID NO: 1385923 - RNA, 19 nt, Artificial Sequence
  Description of Artificial Sequence: Synthetic oligonucleotide
  Antisense strand to SEQ ID NO: 1385922
accaaccacgaaauacagg

SEQ ID NO: 1385924 - RNA, 19 nt, Artificial Sequence
  Description of Artificial Sequence: Synthetic oligonucleotide
  Sense strand starting at position 3324 of SEQ ID NO: 1242975
gaucguguguuccuuugaa

SEQ ID NO: 1385925 - RNA, 19 nt, Artificial Sequence
  Description of Artificial Sequence: Synthetic oligonucleotide
  Antisense strand to SEQ ID NO: 1385924
uucaaaggaacacacgauc

SEQ ID NO: 1385926 - RNA, 19 nt, Artificial Sequence
  Description of Artificial Sequence: Synthetic oligonucleotide
  Sense strand starting at position 3326 of SEQ ID NO: 1242975
ucguguguuccuuugaagu

SEQ ID NO: 1385927 - RNA, 19 nt, Artificial Sequence
  Description of Artificial Sequence: Synthetic oligonucleotide
  Antisense strand to SEQ ID NO: 1385926
acuucaaaggaacacacga

SEQ ID NO: 1385928 - RNA, 19 nt, Artificial Sequence
  Description of Artificial Sequence: Synthetic oligonucleotide
  Sense strand starting at position 3385 of SEQ ID NO: 1242975
ucaguaucugcugaggaau

SEQ ID NO: 1385929 - RNA, 19 nt, Artificial Sequence
  Description of Artificial Sequence: Synthetic oligonucleotide
  Antisense strand to SEQ ID NO: 1385928
auuccucagcagauacuga

SEQ ID NO: 1385930 - RNA, 19 nt, Artificial Sequence
  Description of Artificial Sequence: Synthetic oligonucleotide
  Sense strand starting at position 3387 of SEQ ID NO: 1242975
aguaucugcugaggaaucu

SEQ ID NO: 1385931 - RNA, 19 nt, Artificial Sequence
  Description of Artificial Sequence: Synthetic oligonucleotide
  Antisense strand to SEQ ID NO: 1385930
agauuccucagcagauacu

SEQ ID NO: 1385932 - RNA, 19 nt, Artificial Sequence
  Description of Artificial Sequence: Synthetic oligonucleotide
  Sense strand starting at position 3388 of SEQ ID NO: 1242975
guaucugcugaggaaucua

SEQ ID NO: 1385933 - RNA, 19 nt, Artificial Sequence
  Description of Artificial Sequence: Synthetic oligonucleotide
  Antisense strand to SEQ ID NO: 1385932
uagauuccucagcagauac

SEQ ID NO: 1385934 - RNA, 19 nt, Artificial Sequence
  Description of Artificial Sequence: Synthetic oligonucleotide
  Sense strand starting at position 3475 of SEQ ID NO: 1242975
guaccugauugucugaguu

SEQ ID NO: 1385935 - RNA, 19 nt, Artificial Sequence
  Description of Artificial Sequence: Synthetic oligonucleotide
  Antisense strand to SEQ ID NO: 1385934
aacucagacaaucagguac

SEQ ID NO: 1385936 - RNA, 19 nt, Artificial Sequence
  Description of Artificial Sequence: Synthetic oligonucleotide
  Sense strand starting at position 3477 of SEQ ID NO: 1242975
accugauugucugaguuua

SEQ ID NO: 1385937 - RNA, 19 nt, Artificial Sequence
  Description of Artificial Sequence: Synthetic oligonucleotide
  Antisense strand to SEQ ID NO: 1385936
uaaacucagacaaucaggu

SEQ ID NO: 1385938 - RNA, 19 nt, Artificial Sequence
  Description of Artificial Sequence: Synthetic oligonucleotide
  Sense strand starting at position 3479 of SEQ ID NO: 1242975
cugauugucugaguuuauu

SEQ ID NO: 1385939 - RNA, 19 nt, Artificial Sequence
  Description of Artificial Sequence: Synthetic oligonucleotide
  Antisense strand to SEQ ID NO: 1385938
aauaaacucagacaaucag

SEQ ID NO: 1385940 - RNA, 19 nt, Artificial Sequence
  Description of Artificial Sequence: Synthetic oligonucleotide
  Sense strand starting at position 3540 of SEQ ID NO: 1242975
ugcacuuuguuguugacau

SEQ ID NO: 1385941 - RNA, 19 nt, Artificial Sequence
  Description of Artificial Sequence: Synthetic oligonucleotide
  Antisense strand to SEQ ID NO: 1385940
augucaacaacaaagugca

SEQ ID NO: 1385942 - RNA, 19 nt, Artificial Sequence
  Description of Artificial Sequence: Synthetic oligonucleotide
  Sense strand starting at position 3598 of SEQ ID NO: 1242975
uauuaauuguugccaagag

SEQ ID NO: 1385943 - RNA, 19 nt, Artificial Sequence
  Description of Artificial Sequence: Synthetic oligonucleotide
  Antisense strand to SEQ ID NO: 1385942
cucuuggcaacaauuaaua

SEQ ID NO: 1385944 - RNA, 19 nt, Artificial Sequence
  Description of Artificial Sequence: Synthetic oligonucleotide
  Sense strand starting at position 3599 of SEQ ID NO: 1242975
auuaauuguugccaagagu

SEQ ID NO: 1385945 - RNA, 19 nt, Artificial Sequence
  Description of Artificial Sequence: Synthetic oligonucleotide
  Antisense strand to SEQ ID NO: 1385944
acucuuggcaacaauuaau

SEQ ID NO: 1385946 - RNA, 19 nt, Artificial Sequence
  Description of Artificial Sequence: Synthetic oligonucleotide
  Sense strand starting at position 3659 of SEQ ID NO: 1242975
ggacauaacugggcuguca

SEQ ID NO: 1385947 - RNA, 19 nt, Artificial Sequence
  Description of Artificial Sequence: Synthetic oligonucleotide
  Antisense strand to SEQ ID NO: 1385946
ugacagcccaguuaugucc

SEQ ID NO: 1385948 - RNA, 19 nt, Artificial Sequence
  Description of Artificial Sequence: Synthetic oligonucleotide
  Sense strand starting at position 3780 of SEQ ID NO: 1242975
gaagaagauucccagagac

SEQ ID NO: 1385949 - RNA, 19 nt, Artificial Sequence
  Description of Artificial Sequence: Synthetic oligonucleotide
  Antisense strand to SEQ ID NO: 1385948
gucucugggaaucuucuuc

SEQ ID NO: 1385950 - RNA, 19 nt, Artificial Sequence
  Description of Artificial Sequence: Synthetic oligonucleotide
  Sense strand starting at position 3800 of SEQ ID NO: 1242975
cggagcugauuauucuuua

SEQ ID NO: 1385951 - RNA, 19 nt, Artificial Sequence
  Description of Artificial Sequence: Synthetic oligonucleotide
  Antisense strand to SEQ ID NO: 1385950
uaaagaauaaucagcuccg

SEQ ID NO: 1385952 - RNA, 19 nt, Artificial Sequence
  Description of Artificial Sequence: Synthetic oligonucleotide
  Sense strand starting at position 3801 of SEQ ID NO: 1242975
ggagcugauuauucuuuau

SEQ ID NO: 1385953 - RNA, 19 nt, Artificial Sequence
  Description of Artificial Sequence: Synthetic oligonucleotide
  Antisense strand to SEQ ID NO: 1385952
auaaagaauaaucagcucc

SEQ ID NO: 1385954 - RNA, 19 nt, Artificial Sequence
  Description of Artificial Sequence: Synthetic oligonucleotide
  Sense strand starting at position 3805 of SEQ ID NO: 1242975
cugauuauucuuuaugugu

SEQ ID NO: 1385955 - RNA, 19 nt, Artificial Sequence
  Description of Artificial Sequence: Synthetic oligonucleotide
  Antisense strand to SEQ ID NO: 1385954
acacauaaagaauaaucag

SEQ ID NO: 1385956 - RNA, 19 nt, Artificial Sequence
  Description of Artificial Sequence: Synthetic oligonucleotide
  Sense strand starting at position 141 of SEQ ID NO: 1242976
ggcuauuccagccgagguu

SEQ ID NO: 1385957 - RNA, 19 nt, Artificial Sequence
  Description of Artificial Sequence: Synthetic oligonucleotide
  Antisense strand to SEQ ID NO: 1385956
aaccucggcuggaauagcc

SEQ ID NO: 1385958 - RNA, 19 nt, Artificial Sequence
  Description of Artificial Sequence: Synthetic oligonucleotide
  Sense strand starting at position 486 of SEQ ID NO: 1242976
gcgugagguuccuggagcu

SEQ ID NO: 1385959 - RNA, 19 nt, Artificial Sequence
  Description of Artificial Sequence: Synthetic oligonucleotide
  Antisense strand to SEQ ID NO: 1385958
agcuccaggaaccucacgc

SEQ ID NO: 1385960 - RNA, 19 nt, Artificial Sequence
  Description of Artificial Sequence: Synthetic oligonucleotide
  Sense strand starting at position 703 of SEQ ID NO: 1242976
gagggcucugcccgaguga

SEQ ID NO: 1385961 - RNA, 19 nt, Artificial Sequence
  Description of Artificial Sequence: Synthetic oligonucleotide
  Antisense strand to SEQ ID NO: 1385960
ucacucgggcagagcccuc

SEQ ID NO: 1385962 - RNA, 19 nt, Artificial Sequence
  Description of Artificial Sequence: Synthetic oligonucleotide
  Sense strand starting at position 714 of SEQ ID NO: 1242976
ccgagugagccugauacca

SEQ ID NO: 1385963 - RNA, 19 nt, Artificial Sequence
  Description of Artificial Sequence: Synthetic oligonucleotide
  Antisense strand to SEQ ID NO: 1385962
ugguaucaggcucacucgg

SEQ ID NO: 1385964 - RNA, 19 nt, Artificial Sequence
  Description of Artificial Sequence: Synthetic oligonucleotide
  Sense strand starting at position 1391 of SEQ ID NO: 1242976
guggaauugcugggauggu

SEQ ID NO: 1385965 - RNA, 19 nt, Artificial Sequence
  Description of Artificial Sequence: Synthetic oligonucleotide
  Antisense strand to SEQ ID NO: 1385964
accaucccagcaauuccac

SEQ ID NO: 1385966 - RNA, 19 nt, Artificial Sequence
  Description of Artificial Sequence: Synthetic oligonucleotide
  Sense strand starting at position 2681 of SEQ ID NO: 1242976
ggucuugugccucagacaa

SEQ ID NO: 1385967 - RNA, 19 nt, Artificial Sequence
  Description of Artificial Sequence: Synthetic oligonucleotide
  Antisense strand to SEQ ID NO: 1385966
uugucugaggcacaagacc

SEQ ID NO: 1385968 - RNA, 19 nt, Artificial Sequence
  Description of Artificial Sequence: Synthetic oligonucleotide
  Sense strand starting at position 3155 of SEQ ID NO: 1242976
gucuucccuuuaucgagaa

SEQ ID NO: 1385969 - RNA, 19 nt, Artificial Sequence
  Description of Artificial Sequence: Synthetic oligonucleotide
  Antisense strand to SEQ ID NO: 1385968
uucucgauaaagggaagac

SEQ ID NO: 1385970 - RNA, 19 nt, Artificial Sequence
  Description of Artificial Sequence: Synthetic oligonucleotide
  Sense strand starting at position 3156 of SEQ ID NO: 1242976
ucuucccuuuaucgagaau

SEQ ID NO: 1385971 - RNA, 19 nt, Artificial Sequence
  Description of Artificial Sequence: Synthetic oligonucleotide
  Antisense strand to SEQ ID NO: 1385970
auucucgauaaagggaaga

SEQ ID NO: 1385972 - RNA, 19 nt, Artificial Sequence
  Description of Artificial Sequence: Synthetic oligonucleotide
  Sense strand starting at position 3159 of SEQ ID NO: 1242976
ucccuuuaucgagaauuga

SEQ ID NO: 1385973 - RNA, 19 nt, Artificial Sequence
  Description of Artificial Sequence: Synthetic oligonucleotide
  Antisense strand to SEQ ID NO: 1385972
ucaauucucgauaaaggga

SEQ ID NO: 1385974 - RNA, 19 nt, Artificial Sequence
  Description of Artificial Sequence: Synthetic oligonucleotide
  Sense strand starting at position 3196 of SEQ ID NO: 1242976
cucggcuccucuucugaga

SEQ ID NO: 1385975 - RNA, 19 nt, Artificial Sequence
  Description of Artificial Sequence: Synthetic oligonucleotide
  Antisense strand to SEQ ID NO: 1385974
ucucagaagaggagccgag

SEQ ID NO: 1385976 - RNA, 19 nt, Artificial Sequence
  Description of Artificial Sequence: Synthetic oligonucleotide
  Sense strand starting at position 3198 of SEQ ID NO: 1242976
cggcuccucuucugagaaa

SEQ ID NO: 1385977 - RNA, 19 nt, Artificial Sequence
  Description of Artificial Sequence: Synthetic oligonucleotide
  Antisense strand to SEQ ID NO: 1385976
uuucucagaagaggagccg

SEQ ID NO: 1385978 - RNA, 19 nt, Artificial Sequence
  Description of Artificial Sequence: Synthetic oligonucleotide
  Sense strand starting at position 3199 of SEQ ID NO: 1242976
ggcuccucuucugagaaau

SEQ ID NO: 1385979 - RNA, 19 nt, Artificial Sequence
  Description of Artificial Sequence: Synthetic oligonucleotide
  Antisense strand to SEQ ID NO: 1385978
auuucucagaagaggagcc

SEQ ID NO: 1385980 - RNA, 19 nt, Artificial Sequence
  Description of Artificial Sequence: Synthetic oligonucleotide
  Sense strand starting at position 3262 of SEQ ID NO: 1242976
uccguuuacucagcagaaa

SEQ ID NO: 1385981 - RNA, 19 nt, Artificial Sequence
  Description of Artificial Sequence: Synthetic oligonucleotide
  Antisense strand to SEQ ID NO: 1385980
uuucugcugaguaaacgga

SEQ ID NO: 1385982 - RNA, 19 nt, Artificial Sequence
  Description of Artificial Sequence: Synthetic oligonucleotide
  Sense strand starting at position 3418 of SEQ ID NO: 1242976
gggagaaucugucccuguu

SEQ ID NO: 1385983 - RNA, 19 nt, Artificial Sequence
  Description of Artificial Sequence: Synthetic oligonucleotide
  Antisense strand to SEQ ID NO: 1385982
aacagggacagauucuccc

SEQ ID NO: 1385984 - RNA, 19 nt, Artificial Sequence
  Description of Artificial Sequence: Synthetic oligonucleotide
  Sense strand starting at position 3420 of SEQ ID NO: 1242976
gagaaucugucccuguucu

SEQ ID NO: 1385985 - RNA, 19 nt, Artificial Sequence
  Description of Artificial Sequence: Synthetic oligonucleotide
  Antisense strand to SEQ ID NO: 1385984
agaacagggacagauucuc

SEQ ID NO: 1385986 - RNA, 19 nt, Artificial Sequence
  Description of Artificial Sequence: Synthetic oligonucleotide
  Sense strand starting at position 3519 of SEQ ID NO: 1242976
cucuuugauuccuguggua

SEQ ID NO: 1385987 - RNA, 19 nt, Artificial Sequence
  Description of Artificial Sequence: Synthetic oligonucleotide
  Antisense strand to SEQ ID NO: 1385986
uaccacaggaaucaaagag

SEQ ID NO: 1385988 - RNA, 19 nt, Artificial Sequence
  Description of Artificial Sequence: Synthetic oligonucleotide
  Sense strand starting at position 3521 of SEQ ID NO: 1242976
cuuugauuccugugguaac

SEQ ID NO: 1385989 - RNA, 19 nt, Artificial Sequence
  Description of Artificial Sequence: Synthetic oligonucleotide
  Antisense strand to SEQ ID NO: 1385988
guuaccacaggaaucaaag

SEQ ID NO: 1385990 - RNA, 19 nt, Artificial Sequence
  Description of Artificial Sequence: Synthetic oligonucleotide
  Sense strand starting at position 3702 of SEQ ID NO: 1242976
ccuggcuuucuguaggaca

SEQ ID NO: 1385991 - RNA, 19 nt, Artificial Sequence
  Description of Artificial Sequence: Synthetic oligonucleotide
  Antisense strand to SEQ ID NO: 1385990
uguccuacagaaagccagg

SEQ ID NO: 1385992 - RNA, 19 nt, Artificial Sequence
  Description of Artificial Sequence: Synthetic oligonucleotide
  Sense strand starting at position 3747 of SEQ ID NO: 1242976
uaggucacguccuggaaua

SEQ ID NO: 1385993 - RNA, 19 nt, Artificial Sequence
  Description of Artificial Sequence: Synthetic oligonucleotide
  Antisense strand to SEQ ID NO: 1385992
uauuccaggacgugaccua

SEQ ID NO: 1385994 - RNA, 19 nt, Artificial Sequence
  Description of Artificial Sequence: Synthetic oligonucleotide
  Sense strand starting at position 3749 of SEQ ID NO: 1242976
ggucacguccuggaauaca

SEQ ID NO: 1385995 - RNA, 19 nt, Artificial Sequence
  Description of Artificial Sequence: Synthetic oligonucleotide
  Antisense strand to SEQ ID NO: 1385994
uguauuccaggacgugacc

SEQ ID NO: 1385996 - RNA, 19 nt, Artificial Sequence
  Description of Artificial Sequence: Synthetic oligonucleotide
  Sense strand starting at position 3969 of SEQ ID NO: 1242976
cuaguuagcuggcugauuu

SEQ ID NO: 1385997 - RNA, 19 nt, Artificial Sequence
  Description of Artificial Sequence: Synthetic oligonucleotide
  Antisense strand to SEQ ID NO: 1385996
aaaucagccagcuaacuag

SEQ ID NO: 1385998 - RNA, 19 nt, Artificial Sequence
  Description of Artificial Sequence: Synthetic oligonucleotide
  Sense strand starting at position 16 of SEQ ID NO: 1242977
uuguaaugauuuccucugu

SEQ ID NO: 1385999 - RNA, 19 nt, Artificial Sequence
  Description of Artificial Sequence: Synthetic oligonucleotide
  Antisense strand to SEQ ID NO: 1385998
acagaggaaaucauuacaa

SEQ ID NO: 1386000 - RNA, 19 nt, Artificial Sequence
  Description of Artificial Sequence: Synthetic oligonucleotide
  Sense strand starting at position 160 of SEQ ID NO: 1242977
ccucauauucuaggaauug

SEQ ID NO: 1386001 - RNA, 19 nt, Artificial Sequence
  Description of Artificial Sequence: Synthetic oligonucleotide
  Antisense strand to SEQ ID NO: 1386000
caauuccuagaauaugagg

SEQ ID NO: 1386002 - RNA, 19 nt, Artificial Sequence
  Description of Artificial Sequence: Synthetic oligonucleotide
  Sense strand starting at position 626 of SEQ ID NO: 1242977
ucuaucuaguaaguaagaa

SEQ ID NO: 1386003 - RNA, 19 nt, Artificial Sequence
  Description of Artificial Sequence: Synthetic oligonucleotide
  Antisense strand to SEQ ID NO: 1386002
uucuuacuuacuagauaga

SEQ ID NO: 1386004 - RNA, 19 nt, Artificial Sequence
  Description of Artificial Sequence: Synthetic oligonucleotide
  Sense strand starting at position 638 of SEQ ID NO: 1242977
guaagaaguaaguaaaugu

SEQ ID NO: 1386005 - RNA, 19 nt, Artificial Sequence
  Description of Artificial Sequence: Synthetic oligonucleotide
  Antisense strand to SEQ ID NO: 1386004
acauuuacuuacuucuuac

SEQ ID NO: 1386006 - RNA, 19 nt, Artificial Sequence
  Description of Artificial Sequence: Synthetic oligonucleotide
  Sense strand starting at position 1333 of SEQ ID NO: 1242977
ccaaauugugugggcaaau

SEQ ID NO: 1386007 - RNA, 19 nt, Artificial Sequence
  Description of Artificial Sequence: Synthetic oligonucleotide
  Antisense strand to SEQ ID NO: 1386006
auuugcccacacaauuugg

SEQ ID NO: 1386008 - RNA, 19 nt, Artificial Sequence
  Description of Artificial Sequence: Synthetic oligonucleotide
  Sense strand starting at position 1334 of SEQ ID NO: 1242977
caaauugugugggcaaauc

SEQ ID NO: 1386009 - RNA, 19 nt, Artificial Sequence
  Description of Artificial Sequence: Synthetic oligonucleotide
  Antisense strand to SEQ ID NO: 1386008
gauuugcccacacaauuug

SEQ ID NO: 1386010 - RNA, 19 nt, Artificial Sequence
  Description of Artificial Sequence: Synthetic oligonucleotide
  Sense strand starting at position 1432 of SEQ ID NO: 1242977
auacuaugggauggcuauu

SEQ ID NO: 1386011 - RNA, 19 nt, Artificial Sequence
  Description of Artificial Sequence: Synthetic oligonucleotide
  Antisense strand to SEQ ID NO: 1386010
aauagccaucccauaguau

SEQ ID NO: 1386012 - RNA, 19 nt, Artificial Sequence
  Description of Artificial Sequence: Synthetic oligonucleotide
  Sense strand starting at position 1444 of SEQ ID NO: 1242977
ggcuauuggagucauggca

SEQ ID NO: 1386013 - RNA, 19 nt, Artificial Sequence
  Description of Artificial Sequence: Synthetic oligonucleotide
  Antisense strand to SEQ ID NO: 1386012
ugccaugacuccaauagcc

SEQ ID NO: 1386014 - RNA, 19 nt, Artificial Sequence
  Description of Artificial Sequence: Synthetic oligonucleotide
  Sense strand starting at position 1540 of SEQ ID NO: 1242977
uuucuaugugcagaucaag

SEQ ID NO: 1386015 - RNA, 19 nt, Artificial Sequence
  Description of Artificial Sequence: Synthetic oligonucleotide
  Antisense strand to SEQ ID NO: 1386014
cuugaucugcacauagaaa

SEQ ID NO: 1386016 - RNA, 19 nt, Artificial Sequence
  Description of Artificial Sequence: Synthetic oligonucleotide
  Sense strand starting at position 1543 of SEQ ID NO: 1242977
cuaugugcagaucaaguuu

SEQ ID NO: 1386017 - RNA, 19 nt, Artificial Sequence
  Description of Artificial Sequence: Synthetic oligonucleotide
  Antisense strand to SEQ ID NO: 1386016
aaacuugaucugcacauag

SEQ ID NO: 1386018 - RNA, 19 nt, Artificial Sequence
  Description of Artificial Sequence: Synthetic oligonucleotide
  Sense strand starting at position 1549 of SEQ ID NO: 1242977
gcagaucaaguuuguauga

SEQ ID NO: 1386019 - RNA, 19 nt, Artificial Sequence
  Description of Artificial Sequence: Synthetic oligonucleotide
  Antisense strand to SEQ ID NO: 1386018
ucauacaaacuugaucugc

SEQ ID NO: 1386020 - RNA, 19 nt, Artificial Sequence
  Description of Artificial Sequence: Synthetic oligonucleotide
  Sense strand starting at position 1550 of SEQ ID NO: 1242977
cagaucaaguuuguaugau

SEQ ID NO: 1386021 - RNA, 19 nt, Artificial Sequence
  Description of Artificial Sequence: Synthetic oligonucleotide
  Antisense strand to SEQ ID NO: 1386020
aucauacaaacuugaucug

SEQ ID NO: 1386022 - RNA, 19 nt, Artificial Sequence
  Description of Artificial Sequence: Synthetic oligonucleotide
  Sense strand starting at position 1613 of SEQ ID NO: 1242977
ucaacccuuuggucagauu

SEQ ID NO: 1386023 - RNA, 19 nt, Artificial Sequence
  Description of Artificial Sequence: Synthetic oligonucleotide
  Antisense strand to SEQ ID NO: 1386022
aaucugaccaaaggguuga

SEQ ID NO: 1386024 - RNA, 19 nt, Artificial Sequence
  Description of Artificial Sequence: Synthetic oligonucleotide
  Sense strand starting at position 1621 of SEQ ID NO: 1242977
uuggucagauugucuccaa

SEQ ID NO: 1386025 - RNA, 19 nt, Artificial Sequence
  Description of Artificial Sequence: Synthetic oligonucleotide
  Antisense strand to SEQ ID NO: 1386024
uuggagacaaucugaccaa

SEQ ID NO: 1386026 - RNA, 19 nt, Artificial Sequence
  Description of Artificial Sequence: Synthetic oligonucleotide
  Sense strand starting at position 1622 of SEQ ID NO: 1242977
uggucagauugucuccaau

SEQ ID NO: 1386027 - RNA, 19 nt, Artificial Sequence
  Description of Artificial Sequence: Synthetic oligonucleotide
  Antisense strand to SEQ ID NO: 1386026
auuggagacaaucugacca

SEQ ID NO: 1386028 - RNA, 19 nt, Artificial Sequence
  Description of Artificial Sequence: Synthetic oligonucleotide
  Sense strand starting at position 1624 of SEQ ID NO: 1242977
gucagauugucuccaauua

SEQ ID NO: 1386029 - RNA, 19 nt, Artificial Sequence
  Description of Artificial Sequence: Synthetic oligonucleotide
  Antisense strand to SEQ ID NO: 1386028
uaauuggagacaaucugac

SEQ ID NO: 1386030 - RNA, 19 nt, Artificial Sequence
  Description of Artificial Sequence: Synthetic oligonucleotide
  Sense strand starting at position 1625 of SEQ ID NO: 1242977
ucagauugucuccaauuag

SEQ ID NO: 1386031 - RNA, 19 nt, Artificial Sequence
  Description of Artificial Sequence: Synthetic oligonucleotide
  Antisense strand to SEQ ID NO: 1386030
cuaauuggagacaaucuga

SEQ ID NO: 1386032 - RNA, 19 nt, Artificial Sequence
  Description of Artificial Sequence: Synthetic oligonucleotide
  Sense strand starting at position 1878 of SEQ ID NO: 1242977
gaaugagauugguuugcag

SEQ ID NO: 1386033 - RNA, 19 nt, Artificial Sequence
  Description of Artificial Sequence: Synthetic oligonucleotide
  Antisense strand to SEQ ID NO: 1386032
cugcaaaccaaucucauuc

SEQ ID NO: 1386034 - RNA, 19 nt, Artificial Sequence
  Description of Artificial Sequence: Synthetic oligonucleotide
  Sense strand starting at position 1880 of SEQ ID NO: 1242977
augagauugguuugcagau

SEQ ID NO: 1386035 - RNA, 19 nt, Artificial Sequence
  Description of Artificial Sequence: Synthetic oligonucleotide
  Antisense strand to SEQ ID NO: 1386034
aucugcaaaccaaucucau

SEQ ID NO: 1386036 - RNA, 19 nt, Artificial Sequence
  Description of Artificial Sequence: Synthetic oligonucleotide
  Sense strand starting at position 1881 of SEQ ID NO: 1242977
ugagauugguuugcagaug

SEQ ID NO: 1386037 - RNA, 19 nt, Artificial Sequence
  Description of Artificial Sequence: Synthetic oligonucleotide
  Antisense strand to SEQ ID NO: 1386036
caucugcaaaccaaucuca

SEQ ID NO: 1386038 - RNA, 19 nt, Artificial Sequence
  Description of Artificial Sequence: Synthetic oligonucleotide
  Sense strand starting at position 1971 of SEQ ID NO: 1242977
aaggaaaguuggcuuucuu

SEQ ID NO: 1386039 - RNA, 19 nt, Artificial Sequence
  Description of Artificial Sequence: Synthetic oligonucleotide
  Antisense strand to SEQ ID NO: 1386038
aagaaagccaacuuuccuu

SEQ ID NO: 1386040 - RNA, 19 nt, Artificial Sequence
  Description of Artificial Sequence: Synthetic oligonucleotide
  Sense strand starting at position 2054 of SEQ ID NO: 1242977
uuugaaauugugcaaggau

SEQ ID NO: 1386041 - RNA, 19 nt, Artificial Sequence
  Description of Artificial Sequence: Synthetic oligonucleotide
  Antisense strand to SEQ ID NO: 1386040
auccuugcacaauuucaaa

SEQ ID NO: 1386042 - RNA, 19 nt, Artificial Sequence
  Description of Artificial Sequence: Synthetic oligonucleotide
  Sense strand starting at position 2105 of SEQ ID NO: 1242977
ggagcacauuuagaaaugu

SEQ ID NO: 1386043 - RNA, 19 nt, Artificial Sequence
  Description of Artificial Sequence: Synthetic oligonucleotide
  Antisense strand to SEQ ID NO: 1386042
acauuucuaaaugugcucc

SEQ ID NO: 1386044 - RNA, 19 nt, Artificial Sequence
  Description of Artificial Sequence: Synthetic oligonucleotide
  Sense strand starting at position 2113 of SEQ ID NO: 1242977
uuuagaaaugugcauaucu

SEQ ID NO: 1386045 - RNA, 19 nt, Artificial Sequence
  Description of Artificial Sequence: Synthetic oligonucleotide
  Antisense strand to SEQ ID NO: 1386044
agauaugcacauuucuaaa

SEQ ID NO: 1386046 - RNA, 19 nt, Artificial Sequence
  Description of Artificial Sequence: Synthetic oligonucleotide
  Sense strand starting at position 2218 of SEQ ID NO: 1242977
gaaggaguauuguuugaca

SEQ ID NO: 1386047 - RNA, 19 nt, Artificial Sequence
  Description of Artificial Sequence: Synthetic oligonucleotide
  Antisense strand to SEQ ID NO: 1386046
ugucaaacaauacuccuuc

SEQ ID NO: 1386048 - RNA, 19 nt, Artificial Sequence
  Description of Artificial Sequence: Synthetic oligonucleotide
  Sense strand starting at position 2220 of SEQ ID NO: 1242977
aggaguauuguuugacaaa

SEQ ID NO: 1386049 - RNA, 19 nt, Artificial Sequence
  Description of Artificial Sequence: Synthetic oligonucleotide
  Antisense strand to SEQ ID NO: 1386048
uuugucaaacaauacuccu

SEQ ID NO: 1386050 - RNA, 19 nt, Artificial Sequence
  Description of Artificial Sequence: Synthetic oligonucleotide
  Sense strand starting at position 2233 of SEQ ID NO: 1242977
gacaaauaauucguacuug

SEQ ID NO: 1386051 - RNA, 19 nt, Artificial Sequence
  Description of Artificial Sequence: Synthetic oligonucleotide
  Antisense strand to SEQ ID NO: 1386050
caaguacgaauuauuuguc

SEQ ID NO: 1386052 - RNA, 19 nt, Artificial Sequence
  Description of Artificial Sequence: Synthetic oligonucleotide
  Sense strand starting at position 2237 of SEQ ID NO: 1242977
aauaauucguacuuggauu

SEQ ID NO: 1386053 - RNA, 19 nt, Artificial Sequence
  Description of Artificial Sequence: Synthetic oligonucleotide
  Antisense strand to SEQ ID NO: 1386052
aauccaaguacgaauuauu

SEQ ID NO: 1386054 - RNA, 19 nt, Artificial Sequence
  Description of Artificial Sequence: Synthetic oligonucleotide
  Sense strand starting at position 2310 of SEQ ID NO: 1242977
ccaguaacugcugggaaca

SEQ ID NO: 1386055 - RNA, 19 nt, Artificial Sequence
  Description of Artificial Sequence: Synthetic oligonucleotide
  Antisense strand to SEQ ID NO: 1386054
uguucccagcaguuacugg

SEQ ID NO: 1386056 - RNA, 19 nt, Artificial Sequence
  Description of Artificial Sequence: Synthetic oligonucleotide
  Sense strand starting at position 2347 of SEQ ID NO: 1242977
aguggcuuuguguagagau

SEQ ID NO: 1386057 - RNA, 19 nt, Artificial Sequence
  Description of Artificial Sequence: Synthetic oligonucleotide
  Antisense strand to SEQ ID NO: 1386056
aucucuacacaaagccacu

SEQ ID NO: 1386058 - RNA, 19 nt, Artificial Sequence
  Description of Artificial Sequence: Synthetic oligonucleotide
  Sense strand starting at position 2349 of SEQ ID NO: 1242977
uggcuuuguguagagauga

SEQ ID NO: 1386059 - RNA, 19 nt, Artificial Sequence
  Description of Artificial Sequence: Synthetic oligonucleotide
  Antisense strand to SEQ ID NO: 1386058
ucaucucuacacaaagcca

SEQ ID NO: 1386060 - RNA, 19 nt, Artificial Sequence
  Description of Artificial Sequence: Synthetic oligonucleotide
  Sense strand starting at position 2794 of SEQ ID NO: 1242977
aagggucuucuuuguaaag

SEQ ID NO: 1386061 - RNA, 19 nt, Artificial Sequence
  Description of Artificial Sequence: Synthetic oligonucleotide
  Antisense strand to SEQ ID NO: 1386060
cuuuacaaagaagacccuu

SEQ ID NO: 1386062 - RNA, 19 nt, Artificial Sequence
  Description of Artificial Sequence: Synthetic oligonucleotide
  Sense strand starting at position 3312 of SEQ ID NO: 1242977
uuggcaucugcucaugaua

SEQ ID NO: 1386063 - RNA, 19 nt, Artificial Sequence
  Description of Artificial Sequence: Synthetic oligonucleotide
  Antisense strand to SEQ ID NO: 1386062
uaucaugagcagaugccaa

SEQ ID NO: 1386064 - RNA, 19 nt, Artificial Sequence
  Description of Artificial Sequence: Synthetic oligonucleotide
  Sense strand starting at position 3315 of SEQ ID NO: 1242977
gcaucugcucaugauauau

SEQ ID NO: 1386065 - RNA, 19 nt, Artificial Sequence
  Description of Artificial Sequence: Synthetic oligonucleotide
  Antisense strand to SEQ ID NO: 1386064
auauaucaugagcagaugc

SEQ ID NO: 1386066 - RNA, 19 nt, Artificial Sequence
  Description of Artificial Sequence: Synthetic oligonucleotide
  Sense strand starting at position 3344 of SEQ ID NO: 1242977
acagaaaguuauucucagu

SEQ ID NO: 1386067 - RNA, 19 nt, Artificial Sequence
  Description of Artificial Sequence: Synthetic oligonucleotide
  Antisense strand to SEQ ID NO: 1386066
acugagaauaacuuucugu

SEQ ID NO: 1386068 - RNA, 19 nt, Artificial Sequence
  Description of Artificial Sequence: Synthetic oligonucleotide
  Sense strand starting at position 3698 of SEQ ID NO: 1242977
ucaacagauguauguaguu

SEQ ID NO: 1386069 - RNA, 19 nt, Artificial Sequence
  Description of Artificial Sequence: Synthetic oligonucleotide
  Antisense strand to SEQ ID NO: 1386068
aacuacauacaucuguuga

SEQ ID NO: 1386070 - RNA, 19 nt, Artificial Sequence
  Description of Artificial Sequence: Synthetic oligonucleotide
  Sense strand starting at position 3855 of SEQ ID NO: 1242977
ugcucauagguuuggaaau

SEQ ID NO: 1386071 - RNA, 19 nt, Artificial Sequence
  Description of Artificial Sequence: Synthetic oligonucleotide
  Antisense strand to SEQ ID NO: 1386070
auuuccaaaccuaugagca

SEQ ID NO: 1386072 - RNA, 19 nt, Artificial Sequence
  Description of Artificial Sequence: Synthetic oligonucleotide
  Sense strand starting at position 3947 of SEQ ID NO: 1242977
gguccuggagcuuaauguu

SEQ ID NO: 1386073 - RNA, 19 nt, Artificial Sequence
  Description of Artificial Sequence: Synthetic oligonucleotide
  Antisense strand to SEQ ID NO: 1386072
aacauuaagcuccaggacc

SEQ ID NO: 1386074 - RNA, 19 nt, Artificial Sequence
  Description of Artificial Sequence: Synthetic oligonucleotide
  Sense strand starting at position 3953 of SEQ ID NO: 1242977
ggagcuuaauguuuaugaa

SEQ ID NO: 1386075 - RNA, 19 nt, Artificial Sequence
  Description of Artificial Sequence: Synthetic oligonucleotide
  Antisense strand to SEQ ID NO: 1386074
uucauaaacauuaagcucc

SEQ ID NO: 1386076 - RNA, 19 nt, Artificial Sequence
  Description of Artificial Sequence: Synthetic oligonucleotide
  Sense strand starting at position 3954 of SEQ ID NO: 1242977
gagcuuaauguuuaugaaa

SEQ ID NO: 1386077 - RNA, 19 nt, Artificial Sequence
  Description of Artificial Sequence: Synthetic oligonucleotide
  Antisense strand to SEQ ID NO: 1386076
uuucauaaacauuaagcuc

SEQ ID NO: 1386078 - RNA, 19 nt, Artificial Sequence
  Description of Artificial Sequence: Synthetic oligonucleotide
  Sense strand starting at position 28 of SEQ ID NO: 1242978
guagaccuuucuggaagga

SEQ ID NO: 1386079 - RNA, 19 nt, Artificial Sequence
  Description of Artificial Sequence: Synthetic oligonucleotide
  Antisense strand to SEQ ID NO: 1386078
uccuuccagaaaggucuac

SEQ ID NO: 1386080 - RNA, 19 nt, Artificial Sequence
  Description of Artificial Sequence: Synthetic oligonucleotide
  Sense strand starting at position 91 of SEQ ID NO: 1242978
gggagaaugucgcauugaa

SEQ ID NO: 1386081 - RNA, 19 nt, Artificial Sequence
  Description of Artificial Sequence: Synthetic oligonucleotide
  Antisense strand to SEQ ID NO: 1386080
uucaaugcgacauucuccc

SEQ ID NO: 1386082 - RNA, 19 nt, Artificial Sequence
  Description of Artificial Sequence: Synthetic oligonucleotide
  Sense strand starting at position 798 of SEQ ID NO: 1242978
cagugagucucuggcccua

SEQ ID NO: 1386083 - RNA, 19 nt, Artificial Sequence
  Description of Artificial Sequence: Synthetic oligonucleotide
  Antisense strand to SEQ ID NO: 1386082
uagggccagagacucacug

SEQ ID NO: 1386084 - RNA, 19 nt, Artificial Sequence
  Description of Artificial Sequence: Synthetic oligonucleotide
  Sense strand starting at position 858 of SEQ ID NO: 1242978
ccguguacucaggauagga

SEQ ID NO: 1386085 - RNA, 19 nt, Artificial Sequence
  Description of Artificial Sequence: Synthetic oligonucleotide
  Antisense strand to SEQ ID NO: 1386084
uccuauccugaguacacgg

SEQ ID NO: 1386086 - RNA, 19 nt, Artificial Sequence
  Description of Artificial Sequence: Synthetic oligonucleotide
  Sense strand starting at position 923 of SEQ ID NO: 1242978
gcucacauguggugguaau

SEQ ID NO: 1386087 - RNA, 19 nt, Artificial Sequence
  Description of Artificial Sequence: Synthetic oligonucleotide
  Antisense strand to SEQ ID NO: 1386086
auuaccaccacaugugagc

SEQ ID NO: 1386088 - RNA, 19 nt, Artificial Sequence
  Description of Artificial Sequence: Synthetic oligonucleotide
  Sense strand starting at position 1043 of SEQ ID NO: 1242978
aggugacgggcccagaauu

SEQ ID NO: 1386089 - RNA, 19 nt, Artificial Sequence
  Description of Artificial Sequence: Synthetic oligonucleotide
  Antisense strand to SEQ ID NO: 1386088
aauucugggcccgucaccu

SEQ ID NO: 1386090 - RNA, 19 nt, Artificial Sequence
  Description of Artificial Sequence: Synthetic oligonucleotide
  Sense strand starting at position 1176 of SEQ ID NO: 1242978
gcccacuugacaggugaga

SEQ ID NO: 1386091 - RNA, 19 nt, Artificial Sequence
  Description of Artificial Sequence: Synthetic oligonucleotide
  Antisense strand to SEQ ID NO: 1386090
ucucaccugucaagugggc

SEQ ID NO: 1386092 - RNA, 19 nt, Artificial Sequence
  Description of Artificial Sequence: Synthetic oligonucleotide
  Sense strand starting at position 1178 of SEQ ID NO: 1242978
ccacuugacaggugagaac

SEQ ID NO: 1386093 - RNA, 19 nt, Artificial Sequence
  Description of Artificial Sequence: Synthetic oligonucleotide
  Antisense strand to SEQ ID NO: 1386092
guucucaccugucaagugg

SEQ ID NO: 1386094 - RNA, 19 nt, Artificial Sequence
  Description of Artificial Sequence: Synthetic oligonucleotide
  Sense strand starting at position 1686 of SEQ ID NO: 1242978
cuuguucccagcggaaaga

SEQ ID NO: 1386095 - RNA, 19 nt, Artificial Sequence
  Description of Artificial Sequence: Synthetic oligonucleotide
  Antisense strand to SEQ ID NO: 1386094
ucuuuccgcugggaacaag

SEQ ID NO: 1386096 - RNA, 19 nt, Artificial Sequence
  Description of Artificial Sequence: Synthetic oligonucleotide
  Sense strand starting at position 2035 of SEQ ID NO: 1242978
ggcagcagccgcucuuaua

SEQ ID NO: 1386097 - RNA, 19 nt, Artificial Sequence
  Description of Artificial Sequence: Synthetic oligonucleotide
  Antisense strand to SEQ ID NO: 1386096
uauaagagcggcugcugcc

SEQ ID NO: 1386098 - RNA, 19 nt, Artificial Sequence
  Description of Artificial Sequence: Synthetic oligonucleotide
  Sense strand starting at position 2071 of SEQ ID NO: 1242978
gggaaauuccggcaccacu

SEQ ID NO: 1386099 - RNA, 19 nt, Artificial Sequence
  Description of Artificial Sequence: Synthetic oligonucleotide
  Antisense strand to SEQ ID NO: 1386098
aguggugccggaauuuccc

SEQ ID NO: 1386100 - RNA, 19 nt, Artificial Sequence
  Description of Artificial Sequence: Synthetic oligonucleotide
  Sense strand starting at position 2255 of SEQ ID NO: 1242978
ggugcugccuugucugaca

SEQ ID NO: 1386101 - RNA, 19 nt, Artificial Sequence
  Description of Artificial Sequence: Synthetic oligonucleotide
  Antisense strand to SEQ ID NO: 1386100
ugucagacaaggcagcacc

SEQ ID NO: 1386102 - RNA, 19 nt, Artificial Sequence
  Description of Artificial Sequence: Synthetic oligonucleotide
  Sense strand starting at position 2257 of SEQ ID NO: 1242978
ugcugccuugucugacauu

SEQ ID NO: 1386103 - RNA, 19 nt, Artificial Sequence
  Description of Artificial Sequence: Synthetic oligonucleotide
  Antisense strand to SEQ ID NO: 1386102
aaugucagacaaggcagca

SEQ ID NO: 1386104 - RNA, 19 nt, Artificial Sequence
  Description of Artificial Sequence: Synthetic oligonucleotide
  Sense strand starting at position 2329 of SEQ ID NO: 1242978
gggaaauggugcuguccca

SEQ ID NO: 1386105 - RNA, 19 nt, Artificial Sequence
  Description of Artificial Sequence: Synthetic oligonucleotide
  Antisense strand to SEQ ID NO: 1386104
ugggacagcaccauuuccc

SEQ ID NO: 1386106 - RNA, 19 nt, Artificial Sequence
  Description of Artificial Sequence: Synthetic oligonucleotide
  Sense strand starting at position 2593 of SEQ ID NO: 1242978
gaggguuucugcuugcgua

SEQ ID NO: 1386107 - RNA, 19 nt, Artificial Sequence
  Description of Artificial Sequence: Synthetic oligonucleotide
  Antisense strand to SEQ ID NO: 1386106
uacgcaagcagaaacccuc

SEQ ID NO: 1386108 - RNA, 19 nt, Artificial Sequence
  Description of Artificial Sequence: Synthetic oligonucleotide
  Sense strand starting at position 2594 of SEQ ID NO: 1242978
aggguuucugcuugcguau

SEQ ID NO: 1386109 - RNA, 19 nt, Artificial Sequence
  Description of Artificial Sequence: Synthetic oligonucleotide
  Antisense strand to SEQ ID NO: 1386108
auacgcaagcagaaacccu

SEQ ID NO: 1386110 - RNA, 19 nt, Artificial Sequence
  Description of Artificial Sequence: Synthetic oligonucleotide
  Sense strand starting at position 2790 of SEQ ID NO: 1242978
ugggagaggucccggagau

SEQ ID NO: 1386111 - RNA, 19 nt, Artificial Sequence
  Description of Artificial Sequence: Synthetic oligonucleotide
  Antisense strand to SEQ ID NO: 1386110
aucuccgggaccucuccca

SEQ ID NO: 1386112 - RNA, 19 nt, Artificial Sequence
  Description of Artificial Sequence: Synthetic oligonucleotide
  Sense strand starting at position 2791 of SEQ ID NO: 1242978
gggagaggucccggagaug

SEQ ID NO: 1386113 - RNA, 19 nt, Artificial Sequence
  Description of Artificial Sequence: Synthetic oligonucleotide
  Antisense strand to SEQ ID NO: 1386112
caucuccgggaccucuccc

SEQ ID NO: 1386114 - RNA, 19 nt, Artificial Sequence
  Description of Artificial Sequence: Synthetic oligonucleotide
  Sense strand starting at position 2839 of SEQ ID NO: 1242978
uuggguuucuguguuguuu

SEQ ID NO: 1386115 - RNA, 19 nt, Artificial Sequence
  Description of Artificial Sequence: Synthetic oligonucleotide
  Antisense strand to SEQ ID NO: 1386114
aaacaacacagaaacccaa

SEQ ID NO: 1386116 - RNA, 19 nt, Artificial Sequence
  Description of Artificial Sequence: Synthetic oligonucleotide
  Sense strand starting at position 3203 of SEQ ID NO: 1242978
gucugaguuggagguguga

SEQ ID NO: 1386117 - RNA, 19 nt, Artificial Sequence
  Description of Artificial Sequence: Synthetic oligonucleotide
  Antisense strand to SEQ ID NO: 1386116
ucacaccuccaacucagac

SEQ ID NO: 1386118 - RNA, 19 nt, Artificial Sequence
  Description of Artificial Sequence: Synthetic oligonucleotide
  Sense strand starting at position 3226 of SEQ ID NO: 1242978
ugaggugugaggugugaau

SEQ ID NO: 1386119 - RNA, 19 nt, Artificial Sequence
  Description of Artificial Sequence: Synthetic oligonucleotide
  Antisense strand to SEQ ID NO: 1386118
auucacaccucacaccuca

SEQ ID NO: 1386120 - RNA, 19 nt, Artificial Sequence
  Description of Artificial Sequence: Synthetic oligonucleotide
  Sense strand starting at position 3228 of SEQ ID NO: 1242978
aggugugaggugugaauga

SEQ ID NO: 1386121 - RNA, 19 nt, Artificial Sequence
  Description of Artificial Sequence: Synthetic oligonucleotide
  Antisense strand to SEQ ID NO: 1386120
ucauucacaccucacaccu

SEQ ID NO: 1386122 - RNA, 19 nt, Artificial Sequence
  Description of Artificial Sequence: Synthetic oligonucleotide
  Sense strand starting at position 3368 of SEQ ID NO: 1242978
gcuggaggugccuuuguuu

SEQ ID NO: 1386123 - RNA, 19 nt, Artificial Sequence
  Description of Artificial Sequence: Synthetic oligonucleotide
  Antisense strand to SEQ ID NO: 1386122
aaacaaaggcaccuccagc

SEQ ID NO: 1386124 - RNA, 19 nt, Artificial Sequence
  Description of Artificial Sequence: Synthetic oligonucleotide
  Sense strand starting at position 3408 of SEQ ID NO: 1242978
gccagaacuugggaagguu

SEQ ID NO: 1386125 - RNA, 19 nt, Artificial Sequence
  Description of Artificial Sequence: Synthetic oligonucleotide
  Antisense strand to SEQ ID NO: 1386124
aaccuucccaaguucuggc

SEQ ID NO: 1386126 - RNA, 19 nt, Artificial Sequence
  Description of Artificial Sequence: Synthetic oligonucleotide
  Sense strand starting at position 3456 of SEQ ID NO: 1242978
ggaggguuguccuggaguc

SEQ ID NO: 1386127 - RNA, 19 nt, Artificial Sequence
  Description of Artificial Sequence: Synthetic oligonucleotide
  Antisense strand to SEQ ID NO: 1386126
gacuccaggacaacccucc

SEQ ID NO: 1386128 - RNA, 19 nt, Artificial Sequence
  Description of Artificial Sequence: Synthetic oligonucleotide
  Sense strand starting at position 3598 of SEQ ID NO: 1242978
agauguguuccacggaggu

SEQ ID NO: 1386129 - RNA, 19 nt, Artificial Sequence
  Description of Artificial Sequence: Synthetic oligonucleotide
  Antisense strand to SEQ ID NO: 1386128
accuccguggaacacaucu

SEQ ID NO: 1386130 - RNA, 19 nt, Artificial Sequence
  Description of Artificial Sequence: Synthetic oligonucleotide
  Sense strand starting at position 3611 of SEQ ID NO: 1242978
ggagguguccucuaagcug

SEQ ID NO: 1386131 - RNA, 19 nt, Artificial Sequence
  Description of Artificial Sequence: Synthetic oligonucleotide
  Antisense strand to SEQ ID NO: 1386130
cagcuuagaggacaccucc

SEQ ID NO: 1386132 - RNA, 19 nt, Artificial Sequence
  Description of Artificial Sequence: Synthetic oligonucleotide
  Sense strand starting at position 3614 of SEQ ID NO: 1242978
gguguccucuaagcugaaa

SEQ ID NO: 1386133 - RNA, 19 nt, Artificial Sequence
  Description of Artificial Sequence: Synthetic oligonucleotide
  Antisense strand to SEQ ID NO: 1386132
uuucagcuuagaggacacc

SEQ ID NO: 1386134 - RNA, 19 nt, Artificial Sequence
  Description of Artificial Sequence: Synthetic oligonucleotide
  Sense strand starting at position 3786 of SEQ ID NO: 1242978
guuaacagucugggaggaa

SEQ ID NO: 1386135 - RNA, 19 nt, Artificial Sequence
  Description of Artificial Sequence: Synthetic oligonucleotide
  Antisense strand to SEQ ID NO: 1386134
uuccucccagacuguuaac

SEQ ID NO: 1386136 - RNA, 19 nt, Artificial Sequence
  Description of Artificial Sequence: Synthetic oligonucleotide
  Sense strand starting at position 3787 of SEQ ID NO: 1242978
uuaacagucugggaggaau

SEQ ID NO: 1386137 - RNA, 19 nt, Artificial Sequence
  Description of Artificial Sequence: Synthetic oligonucleotide
  Antisense strand to SEQ ID NO: 1386136
auuccucccagacuguuaa

SEQ ID NO: 1386138 - RNA, 19 nt, Artificial Sequence
  Description of Artificial Sequence: Synthetic oligonucleotide
  Sense strand starting at position 3899 of SEQ ID NO: 1242978
ucacuauccgugcugguuu

SEQ ID NO: 1386139 - RNA, 19 nt, Artificial Sequence
  Description of Artificial Sequence: Synthetic oligonucleotide
  Antisense strand to SEQ ID NO: 1386138
aaaccagcacggauaguga

SEQ ID NO: 1386140 - RNA, 19 nt, Artificial Sequence
  Description of Artificial Sequence: Synthetic oligonucleotide
  Sense strand starting at position 3965 of SEQ ID NO: 1242978
ggagaaguuuauuccacga

SEQ ID NO: 1386141 - RNA, 19 nt, Artificial Sequence
  Description of Artificial Sequence: Synthetic oligonucleotide
  Antisense strand to SEQ ID NO: 1386140
ucguggaauaaacuucucc

SEQ ID NO: 1386142 - RNA, 19 nt, Artificial Sequence
  Description of Artificial Sequence: Synthetic oligonucleotide
  Sense strand starting at position 326 of SEQ ID NO: 1242979
auuggcuucuuacugaaua

SEQ ID NO: 1386143 - RNA, 19 nt, Artificial Sequence
  Description of Artificial Sequence: Synthetic oligonucleotide
  Antisense strand to SEQ ID NO: 1386142
uauucaguaagaagccaau

SEQ ID NO: 1386144 - RNA, 19 nt, Artificial Sequence
  Description of Artificial Sequence: Synthetic oligonucleotide
  Sense strand starting at position 376 of SEQ ID NO: 1242979
acugcugaauacuuaagau

SEQ ID NO: 1386145 - RNA, 19 nt, Artificial Sequence
  Description of Artificial Sequence: Synthetic oligonucleotide
  Antisense strand to SEQ ID NO: 1386144
aucuuaaguauucagcagu

SEQ ID NO: 1386146 - RNA, 19 nt, Artificial Sequence
  Description of Artificial Sequence: Synthetic oligonucleotide
  Sense strand starting at position 391 of SEQ ID NO: 1242979
agauaagguuagcccaaua

SEQ ID NO: 1386147 - RNA, 19 nt, Artificial Sequence
  Description of Artificial Sequence: Synthetic oligonucleotide
  Antisense strand to SEQ ID NO: 1386146
uauugggcuaaccuuaucu

SEQ ID NO: 1386148 - RNA, 19 nt, Artificial Sequence
  Description of Artificial Sequence: Synthetic oligonucleotide
  Sense strand starting at position 540 of SEQ ID NO: 1242979
ggagcagagugaguuuauc

SEQ ID NO: 1386149 - RNA, 19 nt, Artificial Sequence
  Description of Artificial Sequence: Synthetic oligonucleotide
  Antisense strand to SEQ ID NO: 1386148
gauaaacucacucugcucc

SEQ ID NO: 1386150 - RNA, 19 nt, Artificial Sequence
  Description of Artificial Sequence: Synthetic oligonucleotide
  Sense strand starting at position 546 of SEQ ID NO: 1242979
gagugaguuuauccagaaa

SEQ ID NO: 1386151 - RNA, 19 nt, Artificial Sequence
  Description of Artificial Sequence: Synthetic oligonucleotide
  Antisense strand to SEQ ID NO: 1386150
uuucuggauaaacucacuc

SEQ ID NO: 1386152 - RNA, 19 nt, Artificial Sequence
  Description of Artificial Sequence: Synthetic oligonucleotide
  Sense strand starting at position 654 of SEQ ID NO: 1242979
cucugugucuguuugagga

SEQ ID NO: 1386153 - RNA, 19 nt, Artificial Sequence
  Description of Artificial Sequence: Synthetic oligonucleotide
  Antisense strand to SEQ ID NO: 1386152
uccucaaacagacacagag

SEQ ID NO: 1386154 - RNA, 19 nt, Artificial Sequence
  Description of Artificial Sequence: Synthetic oligonucleotide
  Sense strand starting at position 799 of SEQ ID NO: 1242979
aggcauggcuuucuccaga

SEQ ID NO: 1386155 - RNA, 19 nt, Artificial Sequence
  Description of Artificial Sequence: Synthetic oligonucleotide
  Antisense strand to SEQ ID NO: 1386154
ucuggagaaagccaugccu

SEQ ID NO: 1386156 - RNA, 19 nt, Artificial Sequence
  Description of Artificial Sequence: Synthetic oligonucleotide
  Sense strand starting at position 1012 of SEQ ID NO: 1242979
cucucugagccuuguaaag

SEQ ID NO: 1386157 - RNA, 19 nt, Artificial Sequence
  Description of Artificial Sequence: Synthetic oligonucleotide
  Antisense strand to SEQ ID NO: 1386156
cuuuacaaggcucagagag

SEQ ID NO: 1386158 - RNA, 19 nt, Artificial Sequence
  Description of Artificial Sequence: Synthetic oligonucleotide
  Sense strand starting at position 1047 of SEQ ID NO: 1242979
ugcuuccaggcuugugaga

SEQ ID NO: 1386159 - RNA, 19 nt, Artificial Sequence
  Description of Artificial Sequence: Synthetic oligonucleotide
  Antisense strand to SEQ ID NO: 1386158
ucucacaagccuggaagca

SEQ ID NO: 1386160 - RNA, 19 nt, Artificial Sequence
  Description of Artificial Sequence: Synthetic oligonucleotide
  Sense strand starting at position 1060 of SEQ ID NO: 1242979
gugagaauucaaggaggug

SEQ ID NO: 1386161 - RNA, 19 nt, Artificial Sequence
  Description of Artificial Sequence: Synthetic oligonucleotide
  Antisense strand to SEQ ID NO: 1386160
caccuccuugaauucucac

SEQ ID NO: 1386162 - RNA, 19 nt, Artificial Sequence
  Description of Artificial Sequence: Synthetic oligonucleotide
  Sense strand starting at position 1131 of SEQ ID NO: 1242979
gcuguaauugauggagaag

SEQ ID NO: 1386163 - RNA, 19 nt, Artificial Sequence
  Description of Artificial Sequence: Synthetic oligonucleotide
  Antisense strand to SEQ ID NO: 1386162
cuucuccaucaauuacagc

SEQ ID NO: 1386164 - RNA, 19 nt, Artificial Sequence
  Description of Artificial Sequence: Synthetic oligonucleotide
  Sense strand starting at position 1224 of SEQ ID NO: 1242979
uuggccauauuuguauauu

SEQ ID NO: 1386165 - RNA, 19 nt, Artificial Sequence
  Description of Artificial Sequence: Synthetic oligonucleotide
  Antisense strand to SEQ ID NO: 1386164
aauauacaaauauggccaa

SEQ ID NO: 1386166 - RNA, 19 nt, Artificial Sequence
  Description of Artificial Sequence: Synthetic oligonucleotide
  Sense strand starting at position 1241 of SEQ ID NO: 1242979
uugugugcacuguuguuua

SEQ ID NO: 1386167 - RNA, 19 nt, Artificial Sequence
  Description of Artificial Sequence: Synthetic oligonucleotide
  Antisense strand to SEQ ID NO: 1386166
uaaacaacagugcacacaa

SEQ ID NO: 1386168 - RNA, 19 nt, Artificial Sequence
  Description of Artificial Sequence: Synthetic oligonucleotide
  Sense strand starting at position 1244 of SEQ ID NO: 1242979
ugugcacuguuguuuauuu

SEQ ID NO: 1386169 - RNA, 19 nt, Artificial Sequence
  Description of Artificial Sequence: Synthetic oligonucleotide
  Antisense strand to SEQ ID NO: 1386168
aaauaaacaacagugcaca

SEQ ID NO: 1386170 - RNA, 19 nt, Artificial Sequence
  Description of Artificial Sequence: Synthetic oligonucleotide
  Sense strand starting at position 1396 of SEQ ID NO: 1242979
auaugaauccugugugauu

SEQ ID NO: 1386171 - RNA, 19 nt, Artificial Sequence
  Description of Artificial Sequence: Synthetic oligonucleotide
  Antisense strand to SEQ ID NO: 1386170
aaucacacaggauucauau

SEQ ID NO: 1386172 - RNA, 19 nt, Artificial Sequence
  Description of Artificial Sequence: Synthetic oligonucleotide
  Sense strand starting at position 1397 of SEQ ID NO: 1242979
uaugaauccugugugauuc

SEQ ID NO: 1386173 - RNA, 19 nt, Artificial Sequence
  Description of Artificial Sequence: Synthetic oligonucleotide
  Antisense strand to SEQ ID NO: 1386172
gaaucacacaggauucaua

SEQ ID NO: 1386174 - RNA, 19 nt, Artificial Sequence
  Description of Artificial Sequence: Synthetic oligonucleotide
  Sense strand starting at position 1435 of SEQ ID NO: 1242979
guuaucacacuuugaagau

SEQ ID NO: 1386175 - RNA, 19 nt, Artificial Sequence
  Description of Artificial Sequence: Synthetic oligonucleotide
  Antisense strand to SEQ ID NO: 1386174
aucuucaaagugugauaac

SEQ ID NO: 1386176 - RNA, 19 nt, Artificial Sequence
  Description of Artificial Sequence: Synthetic oligonucleotide
  Sense strand starting at position 1436 of SEQ ID NO: 1242979
uuaucacacuuugaagaug

SEQ ID NO: 1386177 - RNA, 19 nt, Artificial Sequence
  Description of Artificial Sequence: Synthetic oligonucleotide
  Antisense strand to SEQ ID NO: 1386176
caucuucaaagugugauaa

SEQ ID NO: 1386178 - RNA, 19 nt, Artificial Sequence
  Description of Artificial Sequence: Synthetic oligonucleotide
  Sense strand starting at position 1556 of SEQ ID NO: 1242979
ccgucacucccugaugguu

SEQ ID NO: 1386179 - RNA, 19 nt, Artificial Sequence
  Description of Artificial Sequence: Synthetic oligonucleotide
  Antisense strand to SEQ ID NO: 1386178
aaccaucagggagugacgg

SEQ ID NO: 1386180 - RNA, 19 nt, Artificial Sequence
  Description of Artificial Sequence: Synthetic oligonucleotide
  Sense strand starting at position 2001 of SEQ ID NO: 1242979
gugguuugccugaggcuga

SEQ ID NO: 1386181 - RNA, 19 nt, Artificial Sequence
  Description of Artificial Sequence: Synthetic oligonucleotide
  Antisense strand to SEQ ID NO: 1386180
ucagccucaggcaaaccac

SEQ ID NO: 1386182 - RNA, 19 nt, Artificial Sequence
  Description of Artificial Sequence: Synthetic oligonucleotide
  Sense strand starting at position 2081 of SEQ ID NO: 1242979
ucugucugaccacagugau

SEQ ID NO: 1386183 - RNA, 19 nt, Artificial Sequence
  Description of Artificial Sequence: Synthetic oligonucleotide
  Antisense strand to SEQ ID NO: 1386182
aucacuguggucagacaga

SEQ ID NO: 1386184 - RNA, 19 nt, Artificial Sequence
  Description of Artificial Sequence: Synthetic oligonucleotide
  Sense strand starting at position 2093 of SEQ ID NO: 1242979
cagugauugcaucagggau

SEQ ID NO: 1386185 - RNA, 19 nt, Artificial Sequence
  Description of Artificial Sequence: Synthetic oligonucleotide
  Antisense strand to SEQ ID NO: 1386184
aucccugaugcaaucacug

SEQ ID NO: 1386186 - RNA, 19 nt, Artificial Sequence
  Description of Artificial Sequence: Synthetic oligonucleotide
  Sense strand starting at position 2386 of SEQ ID NO: 1242979
guugaauucuauuucuguc

SEQ ID NO: 1386187 - RNA, 19 nt, Artificial Sequence
  Description of Artificial Sequence: Synthetic oligonucleotide
  Antisense strand to SEQ ID NO: 1386186
gacagaaauagaauucaac

SEQ ID NO: 1386188 - RNA, 19 nt, Artificial Sequence
  Description of Artificial Sequence: Synthetic oligonucleotide
  Sense strand starting at position 2402 of SEQ ID NO: 1242979
gucacuugccaccaaagau

SEQ ID NO: 1386189 - RNA, 19 nt, Artificial Sequence
  Description of Artificial Sequence: Synthetic oligonucleotide
  Antisense strand to SEQ ID NO: 1386188
aucuuugguggcaagugac

SEQ ID NO: 1386190 - RNA, 19 nt, Artificial Sequence
  Description of Artificial Sequence: Synthetic oligonucleotide
  Sense strand starting at position 2520 of SEQ ID NO: 1242979
aguuaccaucucugaaaug

SEQ ID NO: 1386191 - RNA, 19 nt, Artificial Sequence
  Description of Artificial Sequence: Synthetic oligonucleotide
  Antisense strand to SEQ ID NO: 1386190
cauuucagagaugguaacu

SEQ ID NO: 1386192 - RNA, 19 nt, Artificial Sequence
  Description of Artificial Sequence: Synthetic oligonucleotide
  Sense strand starting at position 2541 of SEQ ID NO: 1242979
gacaauagugcucacugca

SEQ ID NO: 1386193 - RNA, 19 nt, Artificial Sequence
  Description of Artificial Sequence: Synthetic oligonucleotide
  Antisense strand to SEQ ID NO: 1386192
ugcagugagcacuauuguc

SEQ ID NO: 1386194 - RNA, 19 nt, Artificial Sequence
  Description of Artificial Sequence: Synthetic oligonucleotide
  Sense strand starting at position 2582 of SEQ ID NO: 1242979
ugagaaagcagauguggua

SEQ ID NO: 1386195 - RNA, 19 nt, Artificial Sequence
  Description of Artificial Sequence: Synthetic oligonucleotide
  Antisense strand to SEQ ID NO: 1386194
uaccacaucugcuuucuca

SEQ ID NO: 1386196 - RNA, 19 nt, Artificial Sequence
  Description of Artificial Sequence: Synthetic oligonucleotide
  Sense strand starting at position 2614 of SEQ ID NO: 1242979
ugugaagugcuguaccagu

SEQ ID NO: 1386197 - RNA, 19 nt, Artificial Sequence
  Description of Artificial Sequence: Synthetic oligonucleotide
  Antisense strand to SEQ ID NO: 1386196
acugguacagcacuucaca

SEQ ID NO: 1386198 - RNA, 19 nt, Artificial Sequence
  Description of Artificial Sequence: Synthetic oligonucleotide
  Sense strand starting at position 2655 of SEQ ID NO: 1242979
ggcugacugcccugaauua

SEQ ID NO: 1386199 - RNA, 19 nt, Artificial Sequence
  Description of Artificial Sequence: Synthetic oligonucleotide
  Antisense strand to SEQ ID NO: 1386198
uaauucagggcagucagcc

SEQ ID NO: 1386200 - RNA, 19 nt, Artificial Sequence
  Description of Artificial Sequence: Synthetic oligonucleotide
  Sense strand starting at position 2840 of SEQ ID NO: 1242979
agccuauugcguuugaggu

SEQ ID NO: 1386201 - RNA, 19 nt, Artificial Sequence
  Description of Artificial Sequence: Synthetic oligonucleotide
  Antisense strand to SEQ ID NO: 1386200
accucaaacgcaauaggcu

SEQ ID NO: 1386202 - RNA, 19 nt, Artificial Sequence
  Description of Artificial Sequence: Synthetic oligonucleotide
  Sense strand starting at position 3147 of SEQ ID NO: 1242979
cucauaggucuuugggaga

SEQ ID NO: 1386203 - RNA, 19 nt, Artificial Sequence
  Description of Artificial Sequence: Synthetic oligonucleotide
  Antisense strand to SEQ ID NO: 1386202
ucucccaaagaccuaugag

SEQ ID NO: 1386204 - RNA, 19 nt, Artificial Sequence
  Description of Artificial Sequence: Synthetic oligonucleotide
  Sense strand starting at position 3150 of SEQ ID NO: 1242979
auaggucuuugggagaauu

SEQ ID NO: 1386205 - RNA, 19 nt, Artificial Sequence
  Description of Artificial Sequence: Synthetic oligonucleotide
  Antisense strand to SEQ ID NO: 1386204
aauucucccaaagaccuau

SEQ ID NO: 1386206 - RNA, 19 nt, Artificial Sequence
  Description of Artificial Sequence: Synthetic oligonucleotide
  Sense strand starting at position 3207 of SEQ ID NO: 1242979
uggcauauagcagauauua

SEQ ID NO: 1386207 - RNA, 19 nt, Artificial Sequence
  Description of Artificial Sequence: Synthetic oligonucleotide
  Antisense strand to SEQ ID NO: 1386206
uaauaucugcuauaugcca

SEQ ID NO: 1386208 - RNA, 19 nt, Artificial Sequence
  Description of Artificial Sequence: Synthetic oligonucleotide
  Sense strand starting at position 3365 of SEQ ID NO: 1242979
ggagaugugguuugucuuu

SEQ ID NO: 1386209 - RNA, 19 nt, Artificial Sequence
  Description of Artificial Sequence: Synthetic oligonucleotide
  Antisense strand to SEQ ID NO: 1386208
aaagacaaaccacaucucc

SEQ ID NO: 1386210 - RNA, 19 nt, Artificial Sequence
  Description of Artificial Sequence: Synthetic oligonucleotide
  Sense strand starting at position 3372 of SEQ ID NO: 1242979
ugguuugucuuuguuuaaa

SEQ ID NO: 1386211 - RNA, 19 nt, Artificial Sequence
  Description of Artificial Sequence: Synthetic oligonucleotide
  Antisense strand to SEQ ID NO: 1386210
uuuaaacaaagacaaacca

SEQ ID NO: 1386212 - RNA, 19 nt, Artificial Sequence
  Description of Artificial Sequence: Synthetic oligonucleotide
  Sense strand starting at position 3674 of SEQ ID NO: 1242979
gcaagacacucugucucaa

SEQ ID NO: 1386213 - RNA, 19 nt, Artificial Sequence
  Description of Artificial Sequence: Synthetic oligonucleotide
  Antisense strand to SEQ ID NO: 1386212
uugagacagagugucuugc

SEQ ID NO: 1386214 - RNA, 19 nt, Artificial Sequence
  Description of Artificial Sequence: Synthetic oligonucleotide
  Sense strand starting at position 3722 of SEQ ID NO: 1242979
gagaguaguguuuaagaug

SEQ ID NO: 1386215 - RNA, 19 nt, Artificial Sequence
  Description of Artificial Sequence: Synthetic oligonucleotide
  Antisense strand to SEQ ID NO: 1386214
caucuuaaacacuacucuc

SEQ ID NO: 1386216 - RNA, 19 nt, Artificial Sequence
  Description of Artificial Sequence: Synthetic oligonucleotide
  Sense strand starting at position 3727 of SEQ ID NO: 1242979
uaguguuuaagaugcgaua

SEQ ID NO: 1386217 - RNA, 19 nt, Artificial Sequence
  Description of Artificial Sequence: Synthetic oligonucleotide
  Antisense strand to SEQ ID NO: 1386216
uaucgcaucuuaaacacua

SEQ ID NO: 1386218 - RNA, 19 nt, Artificial Sequence
  Description of Artificial Sequence: Synthetic oligonucleotide
  Sense strand starting at position 3822 of SEQ ID NO: 1242979
agggauauuuaacacuguu

SEQ ID NO: 1386219 - RNA, 19 nt, Artificial Sequence
  Description of Artificial Sequence: Synthetic oligonucleotide
  Antisense strand to SEQ ID NO: 1386218
aacaguguuaaauaucccu

SEQ ID NO: 1386220 - RNA, 19 nt, Artificial Sequence
  Description of Artificial Sequence: Synthetic oligonucleotide
  Sense strand starting at position 3851 of SEQ ID NO: 1242979
ugcucacuucugggaaaca

SEQ ID NO: 1386221 - RNA, 19 nt, Artificial Sequence
  Description of Artificial Sequence: Synthetic oligonucleotide
  Antisense strand to SEQ ID NO: 1386220
uguuucccagaagugagca

SEQ ID NO: 1386222 - RNA, 19 nt, Artificial Sequence
  Description of Artificial Sequence: Synthetic oligonucleotide
  Sense strand starting at position 120 of SEQ ID NO: 1242980
auguuauucuaucuagcag

SEQ ID NO: 1386223 - RNA, 19 nt, Artificial Sequence
  Description of Artificial Sequence: Synthetic oligonucleotide
  Antisense strand to SEQ ID NO: 1386222
cugcuagauagaauaacau

SEQ ID NO: 1386224 - RNA, 19 nt, Artificial Sequence
  Description of Artificial Sequence: Synthetic oligonucleotide
  Sense strand starting at position 181 of SEQ ID NO: 1242980
augucaucuggucacaguu

SEQ ID NO: 1386225 - RNA, 19 nt, Artificial Sequence
  Description of Artificial Sequence: Synthetic oligonucleotide
  Antisense strand to SEQ ID NO: 1386224
aacugugaccagaugacau

SEQ ID NO: 1386226 - RNA, 19 nt, Artificial Sequence
  Description of Artificial Sequence: Synthetic oligonucleotide
  Sense strand starting at position 298 of SEQ ID NO: 1242980
cgcuuaagugccuacaaca

SEQ ID NO: 1386227 - RNA, 19 nt, Artificial Sequence
  Description of Artificial Sequence: Synthetic oligonucleotide
  Antisense strand to SEQ ID NO: 1386226
uguuguaggcacuuaagcg

SEQ ID NO: 1386228 - RNA, 19 nt, Artificial Sequence
  Description of Artificial Sequence: Synthetic oligonucleotide
  Sense strand starting at position 579 of SEQ ID NO: 1242980
auggcuucucaaggcuaga

SEQ ID NO: 1386229 - RNA, 19 nt, Artificial Sequence
  Description of Artificial Sequence: Synthetic oligonucleotide
  Antisense strand to SEQ ID NO: 1386228
ucuagccuugagaagccau

SEQ ID NO: 1386230 - RNA, 19 nt, Artificial Sequence
  Description of Artificial Sequence: Synthetic oligonucleotide
  Sense strand starting at position 600 of SEQ ID NO: 1242980
cagagagacuugcccaagu

SEQ ID NO: 1386231 - RNA, 19 nt, Artificial Sequence
  Description of Artificial Sequence: Synthetic oligonucleotide
  Antisense strand to SEQ ID NO: 1386230
acuugggcaagucucucug

SEQ ID NO: 1386232 - RNA, 19 nt, Artificial Sequence
  Description of Artificial Sequence: Synthetic oligonucleotide
  Sense strand starting at position 791 of SEQ ID NO: 1242980
gacgucauuccugcggcaa

SEQ ID NO: 1386233 - RNA, 19 nt, Artificial Sequence
  Description of Artificial Sequence: Synthetic oligonucleotide
  Antisense strand to SEQ ID NO: 1386232
uugccgcaggaaugacguc

SEQ ID NO: 1386234 - RNA, 19 nt, Artificial Sequence
  Description of Artificial Sequence: Synthetic oligonucleotide
  Sense strand starting at position 842 of SEQ ID NO: 1242980
ccaggaauguucuuccuuu

SEQ ID NO: 1386235 - RNA, 19 nt, Artificial Sequence
  Description of Artificial Sequence: Synthetic oligonucleotide
  Antisense strand to SEQ ID NO: 1386234
aaaggaagaacauuccugg

SEQ ID NO: 1386236 - RNA, 19 nt, Artificial Sequence
  Description of Artificial Sequence: Synthetic oligonucleotide
  Sense strand starting at position 1122 of SEQ ID NO: 1242980
ggguggaaucaagguggua

SEQ ID NO: 1386237 - RNA, 19 nt, Artificial Sequence
  Description of Artificial Sequence: Synthetic oligonucleotide
  Antisense strand to SEQ ID NO: 1386236
uaccaccuugauuccaccc

SEQ ID NO: 1386238 - RNA, 19 nt, Artificial Sequence
  Description of Artificial Sequence: Synthetic oligonucleotide
  Sense strand starting at position 1124 of SEQ ID NO: 1242980
guggaaucaaggugguaag

SEQ ID NO: 1386239 - RNA, 19 nt, Artificial Sequence
  Description of Artificial Sequence: Synthetic oligonucleotide
  Antisense strand to SEQ ID NO: 1386238
cuuaccaccuugauuccac

SEQ ID NO: 1386240 - RNA, 19 nt, Artificial Sequence
  Description of Artificial Sequence: Synthetic oligonucleotide
  Sense strand starting at position 1125 of SEQ ID NO: 1242980
uggaaucaaggugguaaga

SEQ ID NO: 1386241 - RNA, 19 nt, Artificial Sequence
  Description of Artificial Sequence: Synthetic oligonucleotide
  Antisense strand to SEQ ID NO: 1386240
ucuuaccaccuugauucca

SEQ ID NO: 1386242 - RNA, 19 nt, Artificial Sequence
  Description of Artificial Sequence: Synthetic oligonucleotide
  Sense strand starting at position 1213 of SEQ ID NO: 1242980
cccagaaucgggugauuga

SEQ ID NO: 1386243 - RNA, 19 nt, Artificial Sequence
  Description of Artificial Sequence: Synthetic oligonucleotide
  Antisense strand to SEQ ID NO: 1386242
ucaaucacccgauucuggg

SEQ ID NO: 1386244 - RNA, 19 nt, Artificial Sequence
  Description of Artificial Sequence: Synthetic oligonucleotide
  Sense strand starting at position 1216 of SEQ ID NO: 1242980
agaaucgggugauugacau

SEQ ID NO: 1386245 - RNA, 19 nt, Artificial Sequence
  Description of Artificial Sequence: Synthetic oligonucleotide
  Antisense strand to SEQ ID NO: 1386244
augucaaucacccgauucu

SEQ ID NO: 1386246 - RNA, 19 nt, Artificial Sequence
  Description of Artificial Sequence: Synthetic oligonucleotide
  Sense strand starting at position 1222 of SEQ ID NO: 1242980
gggugauugacauguuaug

SEQ ID NO: 1386247 - RNA, 19 nt, Artificial Sequence
  Description of Artificial Sequence: Synthetic oligonucleotide
  Antisense strand to SEQ ID NO: 1386246
cauaacaugucaaucaccc

SEQ ID NO: 1386248 - RNA, 19 nt, Artificial Sequence
  Description of Artificial Sequence: Synthetic oligonucleotide
  Sense strand starting at position 1236 of SEQ ID NO: 1242980
uuauguuuggcuugaaacu

SEQ ID NO: 1386249 - RNA, 19 nt, Artificial Sequence
  Description of Artificial Sequence: Synthetic oligonucleotide
  Antisense strand to SEQ ID NO: 1386248
aguuucaagccaaacauaa

SEQ ID NO: 1386250 - RNA, 19 nt, Artificial Sequence
  Description of Artificial Sequence: Synthetic oligonucleotide
  Sense strand starting at position 1380 of SEQ ID NO: 1242980
ccagccucacugcaugaau

SEQ ID NO: 1386251 - RNA, 19 nt, Artificial Sequence
  Description of Artificial Sequence: Synthetic oligonucleotide
  Antisense strand to SEQ ID NO: 1386250
auucaugcagugaggcugg

SEQ ID NO: 1386252 - RNA, 19 nt, Artificial Sequence
  Description of Artificial Sequence: Synthetic oligonucleotide
  Sense strand starting at position 1383 of SEQ ID NO: 1242980
gccucacugcaugaaucuu

SEQ ID NO: 1386253 - RNA, 19 nt, Artificial Sequence
  Description of Artificial Sequence: Synthetic oligonucleotide
  Antisense strand to SEQ ID NO: 1386252
aagauucaugcagugaggc

SEQ ID NO: 1386254 - RNA, 19 nt, Artificial Sequence
  Description of Artificial Sequence: Synthetic oligonucleotide
  Sense strand starting at position 2120 of SEQ ID NO: 1242980
aaaggucaccugcaaguaa

SEQ ID NO: 1386255 - RNA, 19 nt, Artificial Sequence
  Description of Artificial Sequence: Synthetic oligonucleotide
  Antisense strand to SEQ ID NO: 1386254
uuacuugcaggugaccuuu

SEQ ID NO: 1386256 - RNA, 19 nt, Artificial Sequence
  Description of Artificial Sequence: Synthetic oligonucleotide
  Sense strand starting at position 2156 of SEQ ID NO: 1242980
gggugacacuucccucuua

SEQ ID NO: 1386257 - RNA, 19 nt, Artificial Sequence
  Description of Artificial Sequence: Synthetic oligonucleotide
  Antisense strand to SEQ ID NO: 1386256
uaagagggaagugucaccc

SEQ ID NO: 1386258 - RNA, 19 nt, Artificial Sequence
  Description of Artificial Sequence: Synthetic oligonucleotide
  Sense strand starting at position 2169 of SEQ ID NO: 1242980
cucuuagggaccugugaca

SEQ ID NO: 1386259 - RNA, 19 nt, Artificial Sequence
  Description of Artificial Sequence: Synthetic oligonucleotide
  Antisense strand to SEQ ID NO: 1386258
ugucacaggucccuaagag

SEQ ID NO: 1386260 - RNA, 19 nt, Artificial Sequence
  Description of Artificial Sequence: Synthetic oligonucleotide
  Sense strand starting at position 2207 of SEQ ID NO: 1242980
agucauaacccaugaggca

SEQ ID NO: 1386261 - RNA, 19 nt, Artificial Sequence
  Description of Artificial Sequence: Synthetic oligonucleotide
  Antisense strand to SEQ ID NO: 1386260
ugccucauggguuaugacu

SEQ ID NO: 1386262 - RNA, 19 nt, Artificial Sequence
  Description of Artificial Sequence: Synthetic oligonucleotide
  Sense strand starting at position 2271 of SEQ ID NO: 1242980
aggccagaggugugaagau

SEQ ID NO: 1386263 - RNA, 19 nt, Artificial Sequence
  Description of Artificial Sequence: Synthetic oligonucleotide
  Antisense strand to SEQ ID NO: 1386262
aucuucacaccucuggccu

SEQ ID NO: 1386264 - RNA, 19 nt, Artificial Sequence
  Description of Artificial Sequence: Synthetic oligonucleotide
  Sense strand starting at position 2613 of SEQ ID NO: 1242980
ggcaccuagcuaugaggaa

SEQ ID NO: 1386265 - RNA, 19 nt, Artificial Sequence
  Description of Artificial Sequence: Synthetic oligonucleotide
  Antisense strand to SEQ ID NO: 1386264
uuccucauagcuaggugcc

SEQ ID NO: 1386266 - RNA, 19 nt, Artificial Sequence
  Description of Artificial Sequence: Synthetic oligonucleotide
  Sense strand starting at position 2781 of SEQ ID NO: 1242980
aagcuuaaugccuagugca

SEQ ID NO: 1386267 - RNA, 19 nt, Artificial Sequence
  Description of Artificial Sequence: Synthetic oligonucleotide
  Antisense strand to SEQ ID NO: 1386266
ugcacuaggcauuaagcuu

SEQ ID NO: 1386268 - RNA, 19 nt, Artificial Sequence
  Description of Artificial Sequence: Synthetic oligonucleotide
  Sense strand starting at position 2783 of SEQ ID NO: 1242980
gcuuaaugccuagugcagu

SEQ ID NO: 1386269 - RNA, 19 nt, Artificial Sequence
  Description of Artificial Sequence: Synthetic oligonucleotide
  Antisense strand to SEQ ID NO: 1386268
acugcacuaggcauuaagc

SEQ ID NO: 1386270 - RNA, 19 nt, Artificial Sequence
  Description of Artificial Sequence: Synthetic oligonucleotide
  Sense strand starting at position 2923 of SEQ ID NO: 1242980
gugugaggcagacaagauu

SEQ ID NO: 1386271 - RNA, 19 nt, Artificial Sequence
  Description of Artificial Sequence: Synthetic oligonucleotide
  Antisense strand to SEQ ID NO: 1386270
aaucuugucugccucacac

SEQ ID NO: 1386272 - RNA, 19 nt, Artificial Sequence
  Description of Artificial Sequence: Synthetic oligonucleotide
  Sense strand starting at position 2932 of SEQ ID NO: 1242980
agacaagauuagucccauu

SEQ ID NO: 1386273 - RNA, 19 nt, Artificial Sequence
  Description of Artificial Sequence: Synthetic oligonucleotide
  Antisense strand to SEQ ID NO: 1386272
aaugggacuaaucuugucu

SEQ ID NO: 1386274 - RNA, 19 nt, Artificial Sequence
  Description of Artificial Sequence: Synthetic oligonucleotide
  Sense strand starting at position 3029 of SEQ ID NO: 1242980
ggguguguuugauuccuaa

SEQ ID NO: 1386275 - RNA, 19 nt, Artificial Sequence
  Description of Artificial Sequence: Synthetic oligonucleotide
  Antisense strand to SEQ ID NO: 1386274
uuaggaaucaaacacaccc

SEQ ID NO: 1386276 - RNA, 19 nt, Artificial Sequence
  Description of Artificial Sequence: Synthetic oligonucleotide
  Sense strand starting at position 3049 of SEQ ID NO: 1242980
cuuauaccaggcugugaaa

SEQ ID NO: 1386277 - RNA, 19 nt, Artificial Sequence
  Description of Artificial Sequence: Synthetic oligonucleotide
  Antisense strand to SEQ ID NO: 1386276
uuucacagccugguauaag

SEQ ID NO: 1386278 - RNA, 19 nt, Artificial Sequence
  Description of Artificial Sequence: Synthetic oligonucleotide
  Sense strand starting at position 3073 of SEQ ID NO: 1242980
gccauaccaggaugaaaug

SEQ ID NO: 1386279 - RNA, 19 nt, Artificial Sequence
  Description of Artificial Sequence: Synthetic oligonucleotide
  Antisense strand to SEQ ID NO: 1386278
cauuucauccugguauggc

SEQ ID NO: 1386280 - RNA, 19 nt, Artificial Sequence
  Description of Artificial Sequence: Synthetic oligonucleotide
  Sense strand starting at position 3170 of SEQ ID NO: 1242980
ugggaaucaacuugcuguu

SEQ ID NO: 1386281 - RNA, 19 nt, Artificial Sequence
  Description of Artificial Sequence: Synthetic oligonucleotide
  Antisense strand to SEQ ID NO: 1386280
aacagcaaguugauuccca

SEQ ID NO: 1386282 - RNA, 19 nt, Artificial Sequence
  Description of Artificial Sequence: Synthetic oligonucleotide
  Sense strand starting at position 3172 of SEQ ID NO: 1242980
ggaaucaacuugcuguuga

SEQ ID NO: 1386283 - RNA, 19 nt, Artificial Sequence
  Description of Artificial Sequence: Synthetic oligonucleotide
  Antisense strand to SEQ ID NO: 1386282
ucaacagcaaguugauucc

SEQ ID NO: 1386284 - RNA, 19 nt, Artificial Sequence
  Description of Artificial Sequence: Synthetic oligonucleotide
  Sense strand starting at position 3186 of SEQ ID NO: 1242980
guugacuuucgugaccacu

SEQ ID NO: 1386285 - RNA, 19 nt, Artificial Sequence
  Description of Artificial Sequence: Synthetic oligonucleotide
  Antisense strand to SEQ ID NO: 1386284
aguggucacgaaagucaac

SEQ ID NO: 1386286 - RNA, 19 nt, Artificial Sequence
  Description of Artificial Sequence: Synthetic oligonucleotide
  Sense strand starting at position 3194 of SEQ ID NO: 1242980
ucgugaccacuccagagaa

SEQ ID NO: 1386287 - RNA, 19 nt, Artificial Sequence
  Description of Artificial Sequence: Synthetic oligonucleotide
  Antisense strand to SEQ ID NO: 1386286
uucucuggaguggucacga

SEQ ID NO: 1386288 - RNA, 19 nt, Artificial Sequence
  Description of Artificial Sequence: Synthetic oligonucleotide
  Sense strand starting at position 3289 of SEQ ID NO: 1242980
ugugguugauuugagggau

SEQ ID NO: 1386289 - RNA, 19 nt, Artificial Sequence
  Description of Artificial Sequence: Synthetic oligonucleotide
  Antisense strand to SEQ ID NO: 1386288
aucccucaaaucaaccaca

SEQ ID NO: 1386290 - RNA, 19 nt, Artificial Sequence
  Description of Artificial Sequence: Synthetic oligonucleotide
  Sense strand starting at position 3290 of SEQ ID NO: 1242980
gugguugauuugagggauc

SEQ ID NO: 1386291 - RNA, 19 nt, Artificial Sequence
  Description of Artificial Sequence: Synthetic oligonucleotide
  Antisense strand to SEQ ID NO: 1386290
gaucccucaaaucaaccac

SEQ ID NO: 1386292 - RNA, 19 nt, Artificial Sequence
  Description of Artificial Sequence: Synthetic oligonucleotide
  Sense strand starting at position 3334 of SEQ ID NO: 1242980
uaccgaagugugucguguu

SEQ ID NO: 1386293 - RNA, 19 nt, Artificial Sequence
  Description of Artificial Sequence: Synthetic oligonucleotide
  Antisense strand to SEQ ID NO: 1386292
aacacgacacacuucggua

SEQ ID NO: 1386294 - RNA, 19 nt, Artificial Sequence
  Description of Artificial Sequence: Synthetic oligonucleotide
  Sense strand starting at position 3348 of SEQ ID NO: 1242980
guguucucuggagaacgaa

SEQ ID NO: 1386295 - RNA, 19 nt, Artificial Sequence
  Description of Artificial Sequence: Synthetic oligonucleotide
  Antisense strand to SEQ ID NO: 1386294
uucguucuccagagaacac

SEQ ID NO: 1386296 - RNA, 19 nt, Artificial Sequence
  Description of Artificial Sequence: Synthetic oligonucleotide
  Sense strand starting at position 3412 of SEQ ID NO: 1242980
gggugaauucucugauaac

SEQ ID NO: 1386297 - RNA, 19 nt, Artificial Sequence
  Description of Artificial Sequence: Synthetic oligonucleotide
  Antisense strand to SEQ ID NO: 1386296
guuaucagagaauucaccc

SEQ ID NO: 1386298 - RNA, 19 nt, Artificial Sequence
  Description of Artificial Sequence: Synthetic oligonucleotide
  Sense strand starting at position 3442 of SEQ ID NO: 1242980
uuuguagugguugaaagau

SEQ ID NO: 1386299 - RNA, 19 nt, Artificial Sequence
  Description of Artificial Sequence: Synthetic oligonucleotide
  Antisense strand to SEQ ID NO: 1386298
aucuuucaaccacuacaaa

SEQ ID NO: 1386300 - RNA, 19 nt, Artificial Sequence
  Description of Artificial Sequence: Synthetic oligonucleotide
  Sense strand starting at position 3891 of SEQ ID NO: 1242980
ucuagaagauaguuaucau

SEQ ID NO: 1386301 - RNA, 19 nt, Artificial Sequence
  Description of Artificial Sequence: Synthetic oligonucleotide
  Antisense strand to SEQ ID NO: 1386300
augauaacuaucuucuaga

SEQ ID NO: 1386302 - RNA, 19 nt, Artificial Sequence
  Description of Artificial Sequence: Synthetic oligonucleotide
  Sense strand starting at position 129 of SEQ ID NO: 1242981
gccucagugcuauuguucu

SEQ ID NO: 1386303 - RNA, 19 nt, Artificial Sequence
  Description of Artificial Sequence: Synthetic oligonucleotide
  Antisense strand to SEQ ID NO: 1386302
agaacaauagcacugaggc

SEQ ID NO: 1386304 - RNA, 19 nt, Artificial Sequence
  Description of Artificial Sequence: Synthetic oligonucleotide
  Sense strand starting at position 405 of SEQ ID NO: 1242981
ggcucuauuccagggaguc

SEQ ID NO: 1386305 - RNA, 19 nt, Artificial Sequence
  Description of Artificial Sequence: Synthetic oligonucleotide
  Antisense strand to SEQ ID NO: 1386304
gacucccuggaauagagcc

SEQ ID NO: 1386306 - RNA, 19 nt, Artificial Sequence
  Description of Artificial Sequence: Synthetic oligonucleotide
  Sense strand starting at position 427 of SEQ ID NO: 1242981
aggacagguuuguccaguu

SEQ ID NO: 1386307 - RNA, 19 nt, Artificial Sequence
  Description of Artificial Sequence: Synthetic oligonucleotide
  Antisense strand to SEQ ID NO: 1386306
aacuggacaaaccuguccu

SEQ ID NO: 1386308 - RNA, 19 nt, Artificial Sequence
  Description of Artificial Sequence: Synthetic oligonucleotide
  Sense strand starting at position 791 of SEQ ID NO: 1242981
gcugaauuccgagugugcu

SEQ ID NO: 1386309 - RNA, 19 nt, Artificial Sequence
  Description of Artificial Sequence: Synthetic oligonucleotide
  Antisense strand to SEQ ID NO: 1386308
agcacacucggaauucagc

SEQ ID NO: 1386310 - RNA, 19 nt, Artificial Sequence
  Description of Artificial Sequence: Synthetic oligonucleotide
  Sense strand starting at position 792 of SEQ ID NO: 1242981
cugaauuccgagugugcuu

SEQ ID NO: 1386311 - RNA, 19 nt, Artificial Sequence
  Description of Artificial Sequence: Synthetic oligonucleotide
  Antisense strand to SEQ ID NO: 1386310
aagcacacucggaauucag

SEQ ID NO: 1386312 - RNA, 19 nt, Artificial Sequence
  Description of Artificial Sequence: Synthetic oligonucleotide
  Sense strand starting at position 797 of SEQ ID NO: 1242981
uuccgagugugcuuccuga

SEQ ID NO: 1386313 - RNA, 19 nt, Artificial Sequence
  Description of Artificial Sequence: Synthetic oligonucleotide
  Antisense strand to SEQ ID NO: 1386312
ucaggaagcacacucggaa

SEQ ID NO: 1386314 - RNA, 19 nt, Artificial Sequence
  Description of Artificial Sequence: Synthetic oligonucleotide
  Sense strand starting at position 858 of SEQ ID NO: 1242981
ggaagagggcagcauucau

SEQ ID NO: 1386315 - RNA, 19 nt, Artificial Sequence
  Description of Artificial Sequence: Synthetic oligonucleotide
  Antisense strand to SEQ ID NO: 1386314
augaaugcugcccucuucc

SEQ ID NO: 1386316 - RNA, 19 nt, Artificial Sequence
  Description of Artificial Sequence: Synthetic oligonucleotide
  Sense strand starting at position 895 of SEQ ID NO: 1242981
gaggaaaucuagcaagcac

SEQ ID NO: 1386317 - RNA, 19 nt, Artificial Sequence
  Description of Artificial Sequence: Synthetic oligonucleotide
  Antisense strand to SEQ ID NO: 1386316
gugcuugcuagauuuccuc

SEQ ID NO: 1386318 - RNA, 19 nt, Artificial Sequence
  Description of Artificial Sequence: Synthetic oligonucleotide
  Sense strand starting at position 910 of SEQ ID NO: 1242981
gcacaagaguuacacaauu

SEQ ID NO: 1386319 - RNA, 19 nt, Artificial Sequence
  Description of Artificial Sequence: Synthetic oligonucleotide
  Antisense strand to SEQ ID NO: 1386318
aauuguguaacucuugugc

SEQ ID NO: 1386320 - RNA, 19 nt, Artificial Sequence
  Description of Artificial Sequence: Synthetic oligonucleotide
  Sense strand starting at position 1023 of SEQ ID NO: 1242981
gggcucugcucuucgaaau

SEQ ID NO: 1386321 - RNA, 19 nt, Artificial Sequence
  Description of Artificial Sequence: Synthetic oligonucleotide
  Antisense strand to SEQ ID NO: 1386320
auuucgaagagcagagccc

SEQ ID NO: 1386322 - RNA, 19 nt, Artificial Sequence
  Description of Artificial Sequence: Synthetic oligonucleotide
  Sense strand starting at position 1024 of SEQ ID NO: 1242981
ggcucugcucuucgaaaug

SEQ ID NO: 1386323 - RNA, 19 nt, Artificial Sequence
  Description of Artificial Sequence: Synthetic oligonucleotide
  Antisense strand to SEQ ID NO: 1386322
cauuucgaagagcagagcc

SEQ ID NO: 1386324 - RNA, 19 nt, Artificial Sequence
  Description of Artificial Sequence: Synthetic oligonucleotide
  Sense strand starting at position 1121 of SEQ ID NO: 1242981
aacguaagaucucuggcau

SEQ ID NO: 1386325 - RNA, 19 nt, Artificial Sequence
  Description of Artificial Sequence: Synthetic oligonucleotide
  Antisense strand to SEQ ID NO: 1386324
augccagagaucuuacguu

SEQ ID NO: 1386326 - RNA, 19 nt, Artificial Sequence
  Description of Artificial Sequence: Synthetic oligonucleotide
  Sense strand starting at position 1122 of SEQ ID NO: 1242981
acguaagaucucuggcauu

SEQ ID NO: 1386327 - RNA, 19 nt, Artificial Sequence
  Description of Artificial Sequence: Synthetic oligonucleotide
  Antisense strand to SEQ ID NO: 1386326
aaugccagagaucuuacgu

SEQ ID NO: 1386328 - RNA, 19 nt, Artificial Sequence
  Description of Artificial Sequence: Synthetic oligonucleotide
  Sense strand starting at position 1172 of SEQ ID NO: 1242981
cucugacauccuggagacu

SEQ ID NO: 1386329 - RNA, 19 nt, Artificial Sequence
  Description of Artificial Sequence: Synthetic oligonucleotide
  Antisense strand to SEQ ID NO: 1386328
agucuccaggaugucagag

SEQ ID NO: 1386330 - RNA, 19 nt, Artificial Sequence
  Description of Artificial Sequence: Synthetic oligonucleotide
  Sense strand starting at position 1536 of SEQ ID NO: 1242981
cugacaucuuggucccagu

SEQ ID NO: 1386331 - RNA, 19 nt, Artificial Sequence
  Description of Artificial Sequence: Synthetic oligonucleotide
  Antisense strand to SEQ ID NO: 1386330
acugggaccaagaugucag

SEQ ID NO: 1386332 - RNA, 19 nt, Artificial Sequence
  Description of Artificial Sequence: Synthetic oligonucleotide
  Sense strand starting at position 1621 of SEQ ID NO: 1242981
gcuguuuggcuucugcuua

SEQ ID NO: 1386333 - RNA, 19 nt, Artificial Sequence
  Description of Artificial Sequence: Synthetic oligonucleotide
  Antisense strand to SEQ ID NO: 1386332
uaagcagaagccaaacagc

SEQ ID NO: 1386334 - RNA, 19 nt, Artificial Sequence
  Description of Artificial Sequence: Synthetic oligonucleotide
  Sense strand starting at position 1668 of SEQ ID NO: 1242981
uagaccugguccuugucaa

SEQ ID NO: 1386335 - RNA, 19 nt, Artificial Sequence
  Description of Artificial Sequence: Synthetic oligonucleotide
  Antisense strand to SEQ ID NO: 1386334
uugacaaggaccaggucua

SEQ ID NO: 1386336 - RNA, 19 nt, Artificial Sequence
  Description of Artificial Sequence: Synthetic oligonucleotide
  Sense strand starting at position 1669 of SEQ ID NO: 1242981
agaccugguccuugucaaa

SEQ ID NO: 1386337 - RNA, 19 nt, Artificial Sequence
  Description of Artificial Sequence: Synthetic oligonucleotide
  Antisense strand to SEQ ID NO: 1386336
uuugacaaggaccaggucu

SEQ ID NO: 1386338 - RNA, 19 nt, Artificial Sequence
  Description of Artificial Sequence: Synthetic oligonucleotide
  Sense strand starting at position 1681 of SEQ ID NO: 1242981
ugucaaauugcugguccaa

SEQ ID NO: 1386339 - RNA, 19 nt, Artificial Sequence
  Description of Artificial Sequence: Synthetic oligonucleotide
  Antisense strand to SEQ ID NO: 1386338
uuggaccagcaauuugaca

SEQ ID NO: 1386340 - RNA, 19 nt, Artificial Sequence
  Description of Artificial Sequence: Synthetic oligonucleotide
  Sense strand starting at position 1892 of SEQ ID NO: 1242981
cguccauucucugcccaaa

SEQ ID NO: 1386341 - RNA, 19 nt, Artificial Sequence
  Description of Artificial Sequence: Synthetic oligonucleotide
  Antisense strand to SEQ ID NO: 1386340
uuugggcagagaauggacg

SEQ ID NO: 1386342 - RNA, 19 nt, Artificial Sequence
  Description of Artificial Sequence: Synthetic oligonucleotide
  Sense strand starting at position 2204 of SEQ ID NO: 1242981
gcuccagacucacugcuaa

SEQ ID NO: 1386343 - RNA, 19 nt, Artificial Sequence
  Description of Artificial Sequence: Synthetic oligonucleotide
  Antisense strand to SEQ ID NO: 1386342
uuagcagugagucuggagc

SEQ ID NO: 1386344 - RNA, 19 nt, Artificial Sequence
  Description of Artificial Sequence: Synthetic oligonucleotide
  Sense strand starting at position 2346 of SEQ ID NO: 1242981
ggucuacuguccuuccaaa

SEQ ID NO: 1386345 - RNA, 19 nt, Artificial Sequence
  Description of Artificial Sequence: Synthetic oligonucleotide
  Antisense strand to SEQ ID NO: 1386344
uuuggaaggacaguagacc

SEQ ID NO: 1386346 - RNA, 19 nt, Artificial Sequence
  Description of Artificial Sequence: Synthetic oligonucleotide
  Sense strand starting at position 2414 of SEQ ID NO: 1242981
ugagucaucugacucccuu

SEQ ID NO: 1386347 - RNA, 19 nt, Artificial Sequence
  Description of Artificial Sequence: Synthetic oligonucleotide
  Antisense strand to SEQ ID NO: 1386346
aagggagucagaugacuca

SEQ ID NO: 1386348 - RNA, 19 nt, Artificial Sequence
  Description of Artificial Sequence: Synthetic oligonucleotide
  Sense strand starting at position 2420 of SEQ ID NO: 1242981
aucugacucccuuaugguu

SEQ ID NO: 1386349 - RNA, 19 nt, Artificial Sequence
  Description of Artificial Sequence: Synthetic oligonucleotide
  Antisense strand to SEQ ID NO: 1386348
aaccauaagggagucagau

SEQ ID NO: 1386350 - RNA, 19 nt, Artificial Sequence
  Description of Artificial Sequence: Synthetic oligonucleotide
  Sense strand starting at position 2427 of SEQ ID NO: 1242981
ucccuuaugguuuaccaga

SEQ ID NO: 1386351 - RNA, 19 nt, Artificial Sequence
  Description of Artificial Sequence: Synthetic oligonucleotide
  Antisense strand to SEQ ID NO: 1386350
ucugguaaaccauaaggga

SEQ ID NO: 1386352 - RNA, 19 nt, Artificial Sequence
  Description of Artificial Sequence: Synthetic oligonucleotide
  Sense strand starting at position 2434 of SEQ ID NO: 1242981
ugguuuaccagauggcuga

SEQ ID NO: 1386353 - RNA, 19 nt, Artificial Sequence
  Description of Artificial Sequence: Synthetic oligonucleotide
  Antisense strand to SEQ ID NO: 1386352
ucagccaucugguaaacca

SEQ ID NO: 1386354 - RNA, 19 nt, Artificial Sequence
  Description of Artificial Sequence: Synthetic oligonucleotide
  Sense strand starting at position 2544 of SEQ ID NO: 1242981
uggagcucaguuuguaacu

SEQ ID NO: 1386355 - RNA, 19 nt, Artificial Sequence
  Description of Artificial Sequence: Synthetic oligonucleotide
  Antisense strand to SEQ ID NO: 1386354
aguuacaaacugagcucca

SEQ ID NO: 1386356 - RNA, 19 nt, Artificial Sequence
  Description of Artificial Sequence: Synthetic oligonucleotide
  Sense strand starting at position 2545 of SEQ ID NO: 1242981
ggagcucaguuuguaacua

SEQ ID NO: 1386357 - RNA, 19 nt, Artificial Sequence
  Description of Artificial Sequence: Synthetic oligonucleotide
  Antisense strand to SEQ ID NO: 1386356
uaguuacaaacugagcucc

SEQ ID NO: 1386358 - RNA, 19 nt, Artificial Sequence
  Description of Artificial Sequence: Synthetic oligonucleotide
  Sense strand starting at position 2563 of SEQ ID NO: 1242981
agggucagggcuggauaaa

SEQ ID NO: 1386359 - RNA, 19 nt, Artificial Sequence
  Description of Artificial Sequence: Synthetic oligonucleotide
  Antisense strand to SEQ ID NO: 1386358
uuuauccagcccugacccu

SEQ ID NO: 1386360 - RNA, 19 nt, Artificial Sequence
  Description of Artificial Sequence: Synthetic oligonucleotide
  Sense strand starting at position 2649 of SEQ ID NO: 1242981
ucuuuaaccugagucagau

SEQ ID NO: 1386361 - RNA, 19 nt, Artificial Sequence
  Description of Artificial Sequence: Synthetic oligonucleotide
  Antisense strand to SEQ ID NO: 1386360
aucugacucagguuaaaga

SEQ ID NO: 1386362 - RNA, 19 nt, Artificial Sequence
  Description of Artificial Sequence: Synthetic oligonucleotide
  Sense strand starting at position 2653 of SEQ ID NO: 1242981
uaaccugagucagauauag

SEQ ID NO: 1386363 - RNA, 19 nt, Artificial Sequence
  Description of Artificial Sequence: Synthetic oligonucleotide
  Antisense strand to SEQ ID NO: 1386362
cuauaucugacucagguua

SEQ ID NO: 1386364 - RNA, 19 nt, Artificial Sequence
  Description of Artificial Sequence: Synthetic oligonucleotide
  Sense strand starting at position 2810 of SEQ ID NO: 1242981
aggguugggucuagagcuu

SEQ ID NO: 1386365 - RNA, 19 nt, Artificial Sequence
  Description of Artificial Sequence: Synthetic oligonucleotide
  Antisense strand to SEQ ID NO: 1386364
aagcucuagacccaacccu

SEQ ID NO: 1386366 - RNA, 19 nt, Artificial Sequence
  Description of Artificial Sequence: Synthetic oligonucleotide
  Sense strand starting at position 2817 of SEQ ID NO: 1242981
ggucuagagcuuggucuuu

SEQ ID NO: 1386367 - RNA, 19 nt, Artificial Sequence
  Description of Artificial Sequence: Synthetic oligonucleotide
  Antisense strand to SEQ ID NO: 1386366
aaagaccaagcucuagacc

SEQ ID NO: 1386368 - RNA, 19 nt, Artificial Sequence
  Description of Artificial Sequence: Synthetic oligonucleotide
  Sense strand starting at position 2823 of SEQ ID NO: 1242981
gagcuuggucuuuggccaa

SEQ ID NO: 1386369 - RNA, 19 nt, Artificial Sequence
  Description of Artificial Sequence: Synthetic oligonucleotide
  Antisense strand to SEQ ID NO: 1386368
uuggccaaagaccaagcuc

SEQ ID NO: 1386370 - RNA, 19 nt, Artificial Sequence
  Description of Artificial Sequence: Synthetic oligonucleotide
  Sense strand starting at position 2934 of SEQ ID NO: 1242981
ccaggcuugaguugaguga

SEQ ID NO: 1386371 - RNA, 19 nt, Artificial Sequence
  Description of Artificial Sequence: Synthetic oligonucleotide
  Antisense strand to SEQ ID NO: 1386370
ucacucaacucaagccugg

SEQ ID NO: 1386372 - RNA, 19 nt, Artificial Sequence
  Description of Artificial Sequence: Synthetic oligonucleotide
  Sense strand starting at position 2938 of SEQ ID NO: 1242981
gcuugaguugagugagguc

SEQ ID NO: 1386373 - RNA, 19 nt, Artificial Sequence
  Description of Artificial Sequence: Synthetic oligonucleotide
  Antisense strand to SEQ ID NO: 1386372
gaccucacucaacucaagc

SEQ ID NO: 1386374 - RNA, 19 nt, Artificial Sequence
  Description of Artificial Sequence: Synthetic oligonucleotide
  Sense strand starting at position 2980 of SEQ ID NO: 1242981
aagaauaaucuugguguuu

SEQ ID NO: 1386375 - RNA, 19 nt, Artificial Sequence
  Description of Artificial Sequence: Synthetic oligonucleotide
  Antisense strand to SEQ ID NO: 1386374
aaacaccaagauuauucuu

SEQ ID NO: 1386376 - RNA, 19 nt, Artificial Sequence
  Description of Artificial Sequence: Synthetic oligonucleotide
  Sense strand starting at position 2993 of SEQ ID NO: 1242981
guguuucugcucuguagag

SEQ ID NO: 1386377 - RNA, 19 nt, Artificial Sequence
  Description of Artificial Sequence: Synthetic oligonucleotide
  Antisense strand to SEQ ID NO: 1386376
cucuacagagcagaaacac

SEQ ID NO: 1386378 - RNA, 19 nt, Artificial Sequence
  Description of Artificial Sequence: Synthetic oligonucleotide
  Sense strand starting at position 3180 of SEQ ID NO: 1242981
gggucccuggugugagaua

SEQ ID NO: 1386379 - RNA, 19 nt, Artificial Sequence
  Description of Artificial Sequence: Synthetic oligonucleotide
  Antisense strand to SEQ ID NO: 1386378
uaucucacaccagggaccc

SEQ ID NO: 1386380 - RNA, 19 nt, Artificial Sequence
  Description of Artificial Sequence: Synthetic oligonucleotide
  Sense strand starting at position 3366 of SEQ ID NO: 1242981
cccuguuuccucugcagca

SEQ ID NO: 1386381 - RNA, 19 nt, Artificial Sequence
  Description of Artificial Sequence: Synthetic oligonucleotide
  Antisense strand to SEQ ID NO: 1386380
ugcugcagaggaaacaggg

SEQ ID NO: 1386382 - RNA, 19 nt, Artificial Sequence
  Description of Artificial Sequence: Synthetic oligonucleotide
  Sense strand starting at position 117 of SEQ ID NO: 1242982
agggcuguccucgaaacga

SEQ ID NO: 1386383 - RNA, 19 nt, Artificial Sequence
  Description of Artificial Sequence: Synthetic oligonucleotide
  Antisense strand to SEQ ID NO: 1386382
ucguuucgaggacagcccu

SEQ ID NO: 1386384 - RNA, 19 nt, Artificial Sequence
  Description of Artificial Sequence: Synthetic oligonucleotide
  Sense strand starting at position 499 of SEQ ID NO: 1242982
ccacuauggucccagguga

SEQ ID NO: 1386385 - RNA, 19 nt, Artificial Sequence
  Description of Artificial Sequence: Synthetic oligonucleotide
  Antisense strand to SEQ ID NO: 1386384
ucaccugggaccauagugg

SEQ ID NO: 1386386 - RNA, 19 nt, Artificial Sequence
  Description of Artificial Sequence: Synthetic oligonucleotide
  Sense strand starting at position 514 of SEQ ID NO: 1242982
gugagaguuggccaaggaa

SEQ ID NO: 1386387 - RNA, 19 nt, Artificial Sequence
  Description of Artificial Sequence: Synthetic oligonucleotide
  Antisense strand to SEQ ID NO: 1386386
uuccuuggccaacucucac

SEQ ID NO: 1386388 - RNA, 19 nt, Artificial Sequence
  Description of Artificial Sequence: Synthetic oligonucleotide
  Sense strand starting at position 537 of SEQ ID NO: 1242982
uguuuagggacaugacaau

SEQ ID NO: 1386389 - RNA, 19 nt, Artificial Sequence
  Description of Artificial Sequence: Synthetic oligonucleotide
  Antisense strand to SEQ ID NO: 1386388
auugucaugucccuaaaca

SEQ ID NO: 1386390 - RNA, 19 nt, Artificial Sequence
  Description of Artificial Sequence: Synthetic oligonucleotide
  Sense strand starting at position 547 of SEQ ID NO: 1242982
caugacaauugagaaggua

SEQ ID NO: 1386391 - RNA, 19 nt, Artificial Sequence
  Description of Artificial Sequence: Synthetic oligonucleotide
  Antisense strand to SEQ ID NO: 1386390
uaccuucucaauugucaug

SEQ ID NO: 1386392 - RNA, 19 nt, Artificial Sequence
  Description of Artificial Sequence: Synthetic oligonucleotide
  Sense strand starting at position 571 of SEQ ID NO: 1242982
agccauuccucucugauga

SEQ ID NO: 1386393 - RNA, 19 nt, Artificial Sequence
  Description of Artificial Sequence: Synthetic oligonucleotide
  Antisense strand to SEQ ID NO: 1386392
ucaucagagaggaauggcu

SEQ ID NO: 1386394 - RNA, 19 nt, Artificial Sequence
  Description of Artificial Sequence: Synthetic oligonucleotide
  Sense strand starting at position 572 of SEQ ID NO: 1242982
gccauuccucucugaugag

SEQ ID NO: 1386395 - RNA, 19 nt, Artificial Sequence
  Description of Artificial Sequence: Synthetic oligonucleotide
  Antisense strand to SEQ ID NO: 1386394
cucaucagagaggaauggc

SEQ ID NO: 1386396 - RNA, 19 nt, Artificial Sequence
  Description of Artificial Sequence: Synthetic oligonucleotide
  Sense strand starting at position 581 of SEQ ID NO: 1242982
cucugaugagcugauuaau

SEQ ID NO: 1386397 - RNA, 19 nt, Artificial Sequence
  Description of Artificial Sequence: Synthetic oligonucleotide
  Antisense strand to SEQ ID NO: 1386396
auuaaucagcucaucagag

SEQ ID NO: 1386398 - RNA, 19 nt, Artificial Sequence
  Description of Artificial Sequence: Synthetic oligonucleotide
  Sense strand starting at position 676 of SEQ ID NO: 1242982
ggccauuccugccugcaga

SEQ ID NO: 1386399 - RNA, 19 nt, Artificial Sequence
  Description of Artificial Sequence: Synthetic oligonucleotide
  Antisense strand to SEQ ID NO: 1386398
ucugcaggcaggaauggcc

SEQ ID NO: 1386400 - RNA, 19 nt, Artificial Sequence
  Description of Artificial Sequence: Synthetic oligonucleotide
  Sense strand starting at position 794 of SEQ ID NO: 1242982
ccacuauagaguggugaca

SEQ ID NO: 1386401 - RNA, 19 nt, Artificial Sequence
  Description of Artificial Sequence: Synthetic oligonucleotide
  Antisense strand to SEQ ID NO: 1386400
ugucaccacucuauagugg

SEQ ID NO: 1386402 - RNA, 19 nt, Artificial Sequence
  Description of Artificial Sequence: Synthetic oligonucleotide
  Sense strand starting at position 956 of SEQ ID NO: 1242982
ccauguguccuccggguca

SEQ ID NO: 1386403 - RNA, 19 nt, Artificial Sequence
  Description of Artificial Sequence: Synthetic oligonucleotide
  Antisense strand to SEQ ID NO: 1386402
ugacccggaggacacaugg

SEQ ID NO: 1386404 - RNA, 19 nt, Artificial Sequence
  Description of Artificial Sequence: Synthetic oligonucleotide
  Sense strand starting at position 1012 of SEQ ID NO: 1242982
ccuauugucacaggccgaa

SEQ ID NO: 1386405 - RNA, 19 nt, Artificial Sequence
  Description of Artificial Sequence: Synthetic oligonucleotide
  Antisense strand to SEQ ID NO: 1386404
uucggccugugacaauagg

SEQ ID NO: 1386406 - RNA, 19 nt, Artificial Sequence
  Description of Artificial Sequence: Synthetic oligonucleotide
  Sense strand starting at position 1179 of SEQ ID NO: 1242982
agagaagcauucuccgagu

SEQ ID NO: 1386407 - RNA, 19 nt, Artificial Sequence
  Description of Artificial Sequence: Synthetic oligonucleotide
  Antisense strand to SEQ ID NO: 1386406
acucggagaaugcuucucu

SEQ ID NO: 1386408 - RNA, 19 nt, Artificial Sequence
  Description of Artificial Sequence: Synthetic oligonucleotide
  Sense strand starting at position 1184 of SEQ ID NO: 1242982
agcauucuccgagucguuu

SEQ ID NO: 1386409 - RNA, 19 nt, Artificial Sequence
  Description of Artificial Sequence: Synthetic oligonucleotide
  Antisense strand to SEQ ID NO: 1386408
aaacgacucggagaaugcu

SEQ ID NO: 1386410 - RNA, 19 nt, Artificial Sequence
  Description of Artificial Sequence: Synthetic oligonucleotide
  Sense strand starting at position 1379 of SEQ ID NO: 1242982
cugacugagcccugacaca

SEQ ID NO: 1386411 - RNA, 19 nt, Artificial Sequence
  Description of Artificial Sequence: Synthetic oligonucleotide
  Antisense strand to SEQ ID NO: 1386410
ugugucagggcucagucag

SEQ ID NO: 1386412 - RNA, 19 nt, Artificial Sequence
  Description of Artificial Sequence: Synthetic oligonucleotide
  Sense strand starting at position 1397 of SEQ ID NO: 1242982
acaggcaccucgggaaaua

SEQ ID NO: 1386413 - RNA, 19 nt, Artificial Sequence
  Description of Artificial Sequence: Synthetic oligonucleotide
  Antisense strand to SEQ ID NO: 1386412
uauuucccgaggugccugu

SEQ ID NO: 1386414 - RNA, 19 nt, Artificial Sequence
  Description of Artificial Sequence: Synthetic oligonucleotide
  Sense strand starting at position 1557 of SEQ ID NO: 1242982
aagaaagugucucagagaa

SEQ ID NO: 1386415 - RNA, 19 nt, Artificial Sequence
  Description of Artificial Sequence: Synthetic oligonucleotide
  Antisense strand to SEQ ID NO: 1386414
uucucugagacacuuucuu

SEQ ID NO: 1386416 - RNA, 19 nt, Artificial Sequence
  Description of Artificial Sequence: Synthetic oligonucleotide
  Sense strand starting at position 1559 of SEQ ID NO: 1242982
gaaagugucucagagaagc

SEQ ID NO: 1386417 - RNA, 19 nt, Artificial Sequence
  Description of Artificial Sequence: Synthetic oligonucleotide
  Antisense strand to SEQ ID NO: 1386416
gcuucucugagacacuuuc

SEQ ID NO: 1386418 - RNA, 19 nt, Artificial Sequence
  Description of Artificial Sequence: Synthetic oligonucleotide
  Sense strand starting at position 1749 of SEQ ID NO: 1242982
ccuugcugagugcgugaaa

SEQ ID NO: 1386419 - RNA, 19 nt, Artificial Sequence
  Description of Artificial Sequence: Synthetic oligonucleotide
  Antisense strand to SEQ ID NO: 1386418
uuucacgcacucagcaagg

SEQ ID NO: 1386420 - RNA, 19 nt, Artificial Sequence
  Description of Artificial Sequence: Synthetic oligonucleotide
  Sense strand starting at position 2204 of SEQ ID NO: 1242982
uguagaucuaccuguggga

SEQ ID NO: 1386421 - RNA, 19 nt, Artificial Sequence
  Description of Artificial Sequence: Synthetic oligonucleotide
  Antisense strand to SEQ ID NO: 1386420
ucccacagguagaucuaca

SEQ ID NO: 1386422 - RNA, 19 nt, Artificial Sequence
  Description of Artificial Sequence: Synthetic oligonucleotide
  Sense strand starting at position 2206 of SEQ ID NO: 1242982
uagaucuaccugugggaca

SEQ ID NO: 1386423 - RNA, 19 nt, Artificial Sequence
  Description of Artificial Sequence: Synthetic oligonucleotide
  Antisense strand to SEQ ID NO: 1386422
ugucccacagguagaucua

SEQ ID NO: 1386424 - RNA, 19 nt, Artificial Sequence
  Description of Artificial Sequence: Synthetic oligonucleotide
  Sense strand starting at position 2207 of SEQ ID NO: 1242982
agaucuaccugugggacaa

SEQ ID NO: 1386425 - RNA, 19 nt, Artificial Sequence
  Description of Artificial Sequence: Synthetic oligonucleotide
  Antisense strand to SEQ ID NO: 1386424
uugucccacagguagaucu

SEQ ID NO: 1386426 - RNA, 19 nt, Artificial Sequence
  Description of Artificial Sequence: Synthetic oligonucleotide
  Sense strand starting at position 3070 of SEQ ID NO: 1242982
accucauuguaccuuaagu

SEQ ID NO: 1386427 - RNA, 19 nt, Artificial Sequence
  Description of Artificial Sequence: Synthetic oligonucleotide
  Antisense strand to SEQ ID NO: 1386426
acuuaagguacaaugaggu

SEQ ID NO: 1386428 - RNA, 19 nt, Artificial Sequence
  Description of Artificial Sequence: Synthetic oligonucleotide
  Sense strand starting at position 3227 of SEQ ID NO: 1242982
gagaaaucuucccuugggu

SEQ ID NO: 1386429 - RNA, 19 nt, Artificial Sequence
  Description of Artificial Sequence: Synthetic oligonucleotide
  Antisense strand to SEQ ID NO: 1386428
acccaagggaagauuucuc

SEQ ID NO: 1386430 - RNA, 19 nt, Artificial Sequence
  Description of Artificial Sequence: Synthetic oligonucleotide
  Sense strand starting at position 3230 of SEQ ID NO: 1242982
aaaucuucccuugggugaa

SEQ ID NO: 1386431 - RNA, 19 nt, Artificial Sequence
  Description of Artificial Sequence: Synthetic oligonucleotide
  Antisense strand to SEQ ID NO: 1386430
uucacccaagggaagauuu

SEQ ID NO: 1386432 - RNA, 19 nt, Artificial Sequence
  Description of Artificial Sequence: Synthetic oligonucleotide
  Sense strand starting at position 3326 of SEQ ID NO: 1242982
uccagaucuuucccugagu

SEQ ID NO: 1386433 - RNA, 19 nt, Artificial Sequence
  Description of Artificial Sequence: Synthetic oligonucleotide
  Antisense strand to SEQ ID NO: 1386432
acucagggaaagaucugga

SEQ ID NO: 1386434 - RNA, 19 nt, Artificial Sequence
  Description of Artificial Sequence: Synthetic oligonucleotide
  Sense strand starting at position 3327 of SEQ ID NO: 1242982
ccagaucuuucccugagua

SEQ ID NO: 1386435 - RNA, 19 nt, Artificial Sequence
  Description of Artificial Sequence: Synthetic oligonucleotide
  Antisense strand to SEQ ID NO: 1386434
uacucagggaaagaucugg

SEQ ID NO: 1386436 - RNA, 19 nt, Artificial Sequence
  Description of Artificial Sequence: Synthetic oligonucleotide
  Sense strand starting at position 3329 of SEQ ID NO: 1242982
agaucuuucccugaguauc

SEQ ID NO: 1386437 - RNA, 19 nt, Artificial Sequence
  Description of Artificial Sequence: Synthetic oligonucleotide
  Antisense strand to SEQ ID NO: 1386436
gauacucagggaaagaucu

SEQ ID NO: 1386438 - RNA, 19 nt, Artificial Sequence
  Description of Artificial Sequence: Synthetic oligonucleotide
  Sense strand starting at position 3337 of SEQ ID NO: 1242982
cccugaguauccucugaau

SEQ ID NO: 1386439 - RNA, 19 nt, Artificial Sequence
  Description of Artificial Sequence: Synthetic oligonucleotide
  Antisense strand to SEQ ID NO: 1386438
auucagaggauacucaggg

SEQ ID NO: 1386440 - RNA, 19 nt, Artificial Sequence
  Description of Artificial Sequence: Synthetic oligonucleotide
  Sense strand starting at position 3339 of SEQ ID NO: 1242982
cugaguauccucugaauug

SEQ ID NO: 1386441 - RNA, 19 nt, Artificial Sequence
  Description of Artificial Sequence: Synthetic oligonucleotide
  Antisense strand to SEQ ID NO: 1386440
caauucagaggauacucag

SEQ ID NO: 1386442 - RNA, 19 nt, Artificial Sequence
  Description of Artificial Sequence: Synthetic oligonucleotide
  Sense strand starting at position 3349 of SEQ ID NO: 1242982
ucugaauuguagugggaga

SEQ ID NO: 1386443 - RNA, 19 nt, Artificial Sequence
  Description of Artificial Sequence: Synthetic oligonucleotide
  Antisense strand to SEQ ID NO: 1386442
ucucccacuacaauucaga

SEQ ID NO: 1386444 - RNA, 19 nt, Artificial Sequence
  Description of Artificial Sequence: Synthetic oligonucleotide
  Sense strand starting at position 3351 of SEQ ID NO: 1242982
ugaauuguagugggagaca

SEQ ID NO: 1386445 - RNA, 19 nt, Artificial Sequence
  Description of Artificial Sequence: Synthetic oligonucleotide
  Antisense strand to SEQ ID NO: 1386444
ugucucccacuacaauuca

SEQ ID NO: 1386446 - RNA, 19 nt, Artificial Sequence
  Description of Artificial Sequence: Synthetic oligonucleotide
  Sense strand starting at position 3459 of SEQ ID NO: 1242982
gaagacaucuugggaucca

SEQ ID NO: 1386447 - RNA, 19 nt, Artificial Sequence
  Description of Artificial Sequence: Synthetic oligonucleotide
  Antisense strand to SEQ ID NO: 1386446
uggaucccaagaugucuuc

SEQ ID NO: 1386448 - RNA, 19 nt, Artificial Sequence
  Description of Artificial Sequence: Synthetic oligonucleotide
  Sense strand starting at position 3504 of SEQ ID NO: 1242982
uagcuuuauggugaugcaa

SEQ ID NO: 1386449 - RNA, 19 nt, Artificial Sequence
  Description of Artificial Sequence: Synthetic oligonucleotide
  Antisense strand to SEQ ID NO: 1386448
uugcaucaccauaaagcua

SEQ ID NO: 1386450 - RNA, 19 nt, Artificial Sequence
  Description of Artificial Sequence: Synthetic oligonucleotide
  Sense strand starting at position 3543 of SEQ ID NO: 1242982
cucauugagcuguacaauu

SEQ ID NO: 1386451 - RNA, 19 nt, Artificial Sequence
  Description of Artificial Sequence: Synthetic oligonucleotide
  Antisense strand to SEQ ID NO: 1386450
aauuguacagcucaaugag

SEQ ID NO: 1386452 - RNA, 19 nt, Artificial Sequence
  Description of Artificial Sequence: Synthetic oligonucleotide
  Sense strand starting at position 3567 of SEQ ID NO: 1242982
cacagaacugugcagcuau

SEQ ID NO: 1386453 - RNA, 19 nt, Artificial Sequence
  Description of Artificial Sequence: Synthetic oligonucleotide
  Antisense strand to SEQ ID NO: 1386452
auagcugcacaguucugug

SEQ ID NO: 1386454 - RNA, 19 nt, Artificial Sequence
  Description of Artificial Sequence: Synthetic oligonucleotide
  Sense strand starting at position 3632 of SEQ ID NO: 1242982
cugcccuucugagacauca

SEQ ID NO: 1386455 - RNA, 19 nt, Artificial Sequence
  Description of Artificial Sequence: Synthetic oligonucleotide
  Antisense strand to SEQ ID NO: 1386454
ugaugucucagaagggcag

SEQ ID NO: 1386456 - RNA, 19 nt, Artificial Sequence
  Description of Artificial Sequence: Synthetic oligonucleotide
  Sense strand starting at position 3640 of SEQ ID NO: 1242982
cugagacaucacugccagu

SEQ ID NO: 1386457 - RNA, 19 nt, Artificial Sequence
  Description of Artificial Sequence: Synthetic oligonucleotide
  Antisense strand to SEQ ID NO: 1386456
acuggcagugaugucucag

SEQ ID NO: 1386458 - RNA, 19 nt, Artificial Sequence
  Description of Artificial Sequence: Synthetic oligonucleotide
  Sense strand starting at position 3710 of SEQ ID NO: 1242982
cuuagagucucgcucuguu

SEQ ID NO: 1386459 - RNA, 19 nt, Artificial Sequence
  Description of Artificial Sequence: Synthetic oligonucleotide
  Antisense strand to SEQ ID NO: 1386458
aacagagcgagacucuaag

SEQ ID NO: 1386460 - RNA, 19 nt, Artificial Sequence
  Description of Artificial Sequence: Synthetic oligonucleotide
  Sense strand starting at position 3885 of SEQ ID NO: 1242982
ucaccauguugaugaagga

SEQ ID NO: 1386461 - RNA, 19 nt, Artificial Sequence
  Description of Artificial Sequence: Synthetic oligonucleotide
  Antisense strand to SEQ ID NO: 1386460
uccuucaucaacaugguga

SEQ ID NO: 1386462 - RNA, 19 nt, Artificial Sequence
  Description of Artificial Sequence: Synthetic oligonucleotide
  Sense strand starting at position 178 of SEQ ID NO: 1242983
caguguccucagugucaca

SEQ ID NO: 1386463 - RNA, 19 nt, Artificial Sequence
  Description of Artificial Sequence: Synthetic oligonucleotide
  Antisense strand to SEQ ID NO: 1386462
ugugacacugaggacacug

SEQ ID NO: 1386464 - RNA, 19 nt, Artificial Sequence
  Description of Artificial Sequence: Synthetic oligonucleotide
  Sense strand starting at position 290 of SEQ ID NO: 1242983
cggaaauaacggugacacu

SEQ ID NO: 1386465 - RNA, 19 nt, Artificial Sequence
  Description of Artificial Sequence: Synthetic oligonucleotide
  Antisense strand to SEQ ID NO: 1386464
agugucaccguuauuuccg

SEQ ID NO: 1386466 - RNA, 19 nt, Artificial Sequence
  Description of Artificial Sequence: Synthetic oligonucleotide
  Sense strand starting at position 467 of SEQ ID NO: 1242983
agggcuguccucgaaacga

SEQ ID NO: 1386467 - RNA, 19 nt, Artificial Sequence
  Description of Artificial Sequence: Synthetic oligonucleotide
  Antisense strand to SEQ ID NO: 1386466
ucguuucgaggacagcccu

SEQ ID NO: 1386468 - RNA, 19 nt, Artificial Sequence
  Description of Artificial Sequence: Synthetic oligonucleotide
  Sense strand starting at position 849 of SEQ ID NO: 1242983
ccacuauggucccagguga

SEQ ID NO: 1386469 - RNA, 19 nt, Artificial Sequence
  Description of Artificial Sequence: Synthetic oligonucleotide
  Antisense strand to SEQ ID NO: 1386468
ucaccugggaccauagugg

SEQ ID NO: 1386470 - RNA, 19 nt, Artificial Sequence
  Description of Artificial Sequence: Synthetic oligonucleotide
  Sense strand starting at position 864 of SEQ ID NO: 1242983
gugagaguuggccaaggaa

SEQ ID NO: 1386471 - RNA, 19 nt, Artificial Sequence
  Description of Artificial Sequence: Synthetic oligonucleotide
  Antisense strand to SEQ ID NO: 1386470
uuccuuggccaacucucac

SEQ ID NO: 1386472 - RNA, 19 nt, Artificial Sequence
  Description of Artificial Sequence: Synthetic oligonucleotide
  Sense strand starting at position 887 of SEQ ID NO: 1242983
uguuuagggacaugacaau

SEQ ID NO: 1386473 - RNA, 19 nt, Artificial Sequence
  Description of Artificial Sequence: Synthetic oligonucleotide
  Antisense strand to SEQ ID NO: 1386472
auugucaugucccuaaaca

SEQ ID NO: 1386474 - RNA, 19 nt, Artificial Sequence
  Description of Artificial Sequence: Synthetic oligonucleotide
  Sense strand starting at position 897 of SEQ ID NO: 1242983
caugacaauugagaaggua

SEQ ID NO: 1386475 - RNA, 19 nt, Artificial Sequence
  Description of Artificial Sequence: Synthetic oligonucleotide
  Antisense strand to SEQ ID NO: 1386474
uaccuucucaauugucaug

SEQ ID NO: 1386476 - RNA, 19 nt, Artificial Sequence
  Description of Artificial Sequence: Synthetic oligonucleotide
  Sense strand starting at position 921 of SEQ ID NO: 1242983
agccauuccucucugauga

SEQ ID NO: 1386477 - RNA, 19 nt, Artificial Sequence
  Description of Artificial Sequence: Synthetic oligonucleotide
  Antisense strand to SEQ ID NO: 1386476
ucaucagagaggaauggcu

SEQ ID NO: 1386478 - RNA, 19 nt, Artificial Sequence
  Description of Artificial Sequence: Synthetic oligonucleotide
  Sense strand starting at position 922 of SEQ ID NO: 1242983
gccauuccucucugaugag

SEQ ID NO: 1386479 - RNA, 19 nt, Artificial Sequence
  Description of Artificial Sequence: Synthetic oligonucleotide
  Antisense strand to SEQ ID NO: 1386478
cucaucagagaggaauggc

SEQ ID NO: 1386480 - RNA, 19 nt, Artificial Sequence
  Description of Artificial Sequence: Synthetic oligonucleotide
  Sense strand starting at position 931 of SEQ ID NO: 1242983
cucugaugagcugauuaau

SEQ ID NO: 1386481 - RNA, 19 nt, Artificial Sequence
  Description of Artificial Sequence: Synthetic oligonucleotide
  Antisense strand to SEQ ID NO: 1386480
auuaaucagcucaucagag

SEQ ID NO: 1386482 - RNA, 19 nt, Artificial Sequence
  Description of Artificial Sequence: Synthetic oligonucleotide
  Sense strand starting at position 1026 of SEQ ID NO: 1242983
ggccauuccugccugcaga

SEQ ID NO: 1386483 - RNA, 19 nt, Artificial Sequence
  Description of Artificial Sequence: Synthetic oligonucleotide
  Antisense strand to SEQ ID NO: 1386482
ucugcaggcaggaauggcc

SEQ ID NO: 1386484 - RNA, 19 nt, Artificial Sequence
  Description of Artificial Sequence: Synthetic oligonucleotide
  Sense strand starting at position 1144 of SEQ ID NO: 1242983
ccacuauagaguggugaca

SEQ ID NO: 1386485 - RNA, 19 nt, Artificial Sequence
  Description of Artificial Sequence: Synthetic oligonucleotide
  Antisense strand to SEQ ID NO: 1386484
ugucaccacucuauagugg

SEQ ID NO: 1386486 - RNA, 19 nt, Artificial Sequence
  Description of Artificial Sequence: Synthetic oligonucleotide
  Sense strand starting at position 1306 of SEQ ID NO: 1242983
ccauguguccuccggguca

SEQ ID NO: 1386487 - RNA, 19 nt, Artificial Sequence
  Description of Artificial Sequence: Synthetic oligonucleotide
  Antisense strand to SEQ ID NO: 1386486
ugacccggaggacacaugg

SEQ ID NO: 1386488 - RNA, 19 nt, Artificial Sequence
  Description of Artificial Sequence: Synthetic oligonucleotide
  Sense strand starting at position 1362 of SEQ ID NO: 1242983
ccuauugucacaggccgaa

SEQ ID NO: 1386489 - RNA, 19 nt, Artificial Sequence
  Description of Artificial Sequence: Synthetic oligonucleotide
  Antisense strand to SEQ ID NO: 1386488
uucggccugugacaauagg

SEQ ID NO: 1386490 - RNA, 19 nt, Artificial Sequence
  Description of Artificial Sequence: Synthetic oligonucleotide
  Sense strand starting at position 1529 of SEQ ID NO: 1242983
agagaagcauucuccgagu

SEQ ID NO: 1386491 - RNA, 19 nt, Artificial Sequence
  Description of Artificial Sequence: Synthetic oligonucleotide
  Antisense strand to SEQ ID NO: 1386490
acucggagaaugcuucucu

SEQ ID NO: 1386492 - RNA, 19 nt, Artificial Sequence
  Description of Artificial Sequence: Synthetic oligonucleotide
  Sense strand starting at position 1534 of SEQ ID NO: 1242983
agcauucuccgagucguuu

SEQ ID NO: 1386493 - RNA, 19 nt, Artificial Sequence
  Description of Artificial Sequence: Synthetic oligonucleotide
  Antisense strand to SEQ ID NO: 1386492
aaacgacucggagaaugcu

SEQ ID NO: 1386494 - RNA, 19 nt, Artificial Sequence
  Description of Artificial Sequence: Synthetic oligonucleotide
  Sense strand starting at position 1729 of SEQ ID NO: 1242983
cugacugagcccugacaca

SEQ ID NO: 1386495 - RNA, 19 nt, Artificial Sequence
  Description of Artificial Sequence: Synthetic oligonucleotide
  Antisense strand to SEQ ID NO: 1386494
ugugucagggcucagucag

SEQ ID NO: 1386496 - RNA, 19 nt, Artificial Sequence
  Description of Artificial Sequence: Synthetic oligonucleotide
  Sense strand starting at position 1747 of SEQ ID NO: 1242983
acaggcaccucgggaaaua

SEQ ID NO: 1386497 - RNA, 19 nt, Artificial Sequence
  Description of Artificial Sequence: Synthetic oligonucleotide
  Antisense strand to SEQ ID NO: 1386496
uauuucccgaggugccugu

SEQ ID NO: 1386498 - RNA, 19 nt, Artificial Sequence
  Description of Artificial Sequence: Synthetic oligonucleotide
  Sense strand starting at position 1907 of SEQ ID NO: 1242983
aagaaagugucucagagaa

SEQ ID NO: 1386499 - RNA, 19 nt, Artificial Sequence
  Description of Artificial Sequence: Synthetic oligonucleotide
  Antisense strand to SEQ ID NO: 1386498
uucucugagacacuuucuu

SEQ ID NO: 1386500 - RNA, 19 nt, Artificial Sequence
  Description of Artificial Sequence: Synthetic oligonucleotide
  Sense strand starting at position 1909 of SEQ ID NO: 1242983
gaaagugucucagagaagc

SEQ ID NO: 1386501 - RNA, 19 nt, Artificial Sequence
  Description of Artificial Sequence: Synthetic oligonucleotide
  Antisense strand to SEQ ID NO: 1386500
gcuucucugagacacuuuc

SEQ ID NO: 1386502 - RNA, 19 nt, Artificial Sequence
  Description of Artificial Sequence: Synthetic oligonucleotide
  Sense strand starting at position 2099 of SEQ ID NO: 1242983
ccuugcugagugcgugaaa

SEQ ID NO: 1386503 - RNA, 19 nt, Artificial Sequence
  Description of Artificial Sequence: Synthetic oligonucleotide
  Antisense strand to SEQ ID NO: 1386502
uuucacgcacucagcaagg

SEQ ID NO: 1386504 - RNA, 19 nt, Artificial Sequence
  Description of Artificial Sequence: Synthetic oligonucleotide
  Sense strand starting at position 2554 of SEQ ID NO: 1242983
uguagaucuaccuguggga

SEQ ID NO: 1386505 - RNA, 19 nt, Artificial Sequence
  Description of Artificial Sequence: Synthetic oligonucleotide
  Antisense strand to SEQ ID NO: 1386504
ucccacagguagaucuaca

SEQ ID NO: 1386506 - RNA, 19 nt, Artificial Sequence
  Description of Artificial Sequence: Synthetic oligonucleotide
  Sense strand starting at position 2556 of SEQ ID NO: 1242983
uagaucuaccugugggaca

SEQ ID NO: 1386507 - RNA, 19 nt, Artificial Sequence
  Description of Artificial Sequence: Synthetic oligonucleotide
  Antisense strand to SEQ ID NO: 1386506
ugucccacagguagaucua

SEQ ID NO: 1386508 - RNA, 19 nt, Artificial Sequence
  Description of Artificial Sequence: Synthetic oligonucleotide
  Sense strand starting at position 2557 of SEQ ID NO: 1242983
agaucuaccugugggacaa

SEQ ID NO: 1386509 - RNA, 19 nt, Artificial Sequence
  Description of Artificial Sequence: Synthetic oligonucleotide
  Antisense strand to SEQ ID NO: 1386508
uugucccacagguagaucu

SEQ ID NO: 1386510 - RNA, 19 nt, Artificial Sequence
  Description of Artificial Sequence: Synthetic oligonucleotide
  Sense strand starting at position 3420 of SEQ ID NO: 1242983
accucauuguaccuuaagu

SEQ ID NO: 1386511 - RNA, 19 nt, Artificial Sequence
  Description of Artificial Sequence: Synthetic oligonucleotide
  Antisense strand to SEQ ID NO: 1386510
acuuaagguacaaugaggu

SEQ ID NO: 1386512 - RNA, 19 nt, Artificial Sequence
  Description of Artificial Sequence: Synthetic oligonucleotide
  Sense strand starting at position 3577 of SEQ ID NO: 1242983
gagaaaucuucccuugggu

SEQ ID NO: 1386513 - RNA, 19 nt, Artificial Sequence
  Description of Artificial Sequence: Synthetic oligonucleotide
  Antisense strand to SEQ ID NO: 1386512
acccaagggaagauuucuc

SEQ ID NO: 1386514 - RNA, 19 nt, Artificial Sequence
  Description of Artificial Sequence: Synthetic oligonucleotide
  Sense strand starting at position 3580 of SEQ ID NO: 1242983
aaaucuucccuugggugaa

SEQ ID NO: 1386515 - RNA, 19 nt, Artificial Sequence
  Description of Artificial Sequence: Synthetic oligonucleotide
  Antisense strand to SEQ ID NO: 1386514
uucacccaagggaagauuu

SEQ ID NO: 1386516 - RNA, 19 nt, Artificial Sequence
  Description of Artificial Sequence: Synthetic oligonucleotide
  Sense strand starting at position 3676 of SEQ ID NO: 1242983
uccagaucuuucccugagu

SEQ ID NO: 1386517 - RNA, 19 nt, Artificial Sequence
  Description of Artificial Sequence: Synthetic oligonucleotide
  Antisense strand to SEQ ID NO: 1386516
acucagggaaagaucugga

SEQ ID NO: 1386518 - RNA, 19 nt, Artificial Sequence
  Description of Artificial Sequence: Synthetic oligonucleotide
  Sense strand starting at position 3677 of SEQ ID NO: 1242983
ccagaucuuucccugagua

SEQ ID NO: 1386519 - RNA, 19 nt, Artificial Sequence
  Description of Artificial Sequence: Synthetic oligonucleotide
  Antisense strand to SEQ ID NO: 1386518
uacucagggaaagaucugg

SEQ ID NO: 1386520 - RNA, 19 nt, Artificial Sequence
  Description of Artificial Sequence: Synthetic oligonucleotide
  Sense strand starting at position 3679 of SEQ ID NO: 1242983
agaucuuucccugaguauc

SEQ ID NO: 1386521 - RNA, 19 nt, Artificial Sequence
  Description of Artificial Sequence: Synthetic oligonucleotide
  Antisense strand to SEQ ID NO: 1386520
gauacucagggaaagaucu

SEQ ID NO: 1386522 - RNA, 19 nt, Artificial Sequence
  Description of Artificial Sequence: Synthetic oligonucleotide
  Sense strand starting at position 3687 of SEQ ID NO: 1242983
cccugaguauccucugaau

SEQ ID NO: 1386523 - RNA, 19 nt, Artificial Sequence
  Description of Artificial Sequence: Synthetic oligonucleotide
  Antisense strand to SEQ ID NO: 1386522
auucagaggauacucaggg

SEQ ID NO: 1386524 - RNA, 19 nt, Artificial Sequence
  Description of Artificial Sequence: Synthetic oligonucleotide
  Sense strand starting at position 3689 of SEQ ID NO: 1242983
cugaguauccucugaauug

SEQ ID NO: 1386525 - RNA, 19 nt, Artificial Sequence
  Description of Artificial Sequence: Synthetic oligonucleotide
  Antisense strand to SEQ ID NO: 1386524
caauucagaggauacucag

SEQ ID NO: 1386526 - RNA, 19 nt, Artificial Sequence
  Description of Artificial Sequence: Synthetic oligonucleotide
  Sense strand starting at position 3690 of SEQ ID NO: 1242983
ugaguauccucugaauugu

SEQ ID NO: 1386527 - RNA, 19 nt, Artificial Sequence
  Description of Artificial Sequence: Synthetic oligonucleotide
  Antisense strand to SEQ ID NO: 1386526
acaauucagaggauacuca

SEQ ID NO: 1386528 - RNA, 19 nt, Artificial Sequence
  Description of Artificial Sequence: Synthetic oligonucleotide
  Sense strand starting at position 3699 of SEQ ID NO: 1242983
ucugaauuguagugggaga

SEQ ID NO: 1386529 - RNA, 19 nt, Artificial Sequence
  Description of Artificial Sequence: Synthetic oligonucleotide
  Antisense strand to SEQ ID NO: 1386528
ucucccacuacaauucaga

SEQ ID NO: 1386530 - RNA, 19 nt, Artificial Sequence
  Description of Artificial Sequence: Synthetic oligonucleotide
  Sense strand starting at position 3701 of SEQ ID NO: 1242983
ugaauuguagugggagaca

SEQ ID NO: 1386531 - RNA, 19 nt, Artificial Sequence
  Description of Artificial Sequence: Synthetic oligonucleotide
  Antisense strand to SEQ ID NO: 1386530
ugucucccacuacaauuca

SEQ ID NO: 1386532 - RNA, 19 nt, Artificial Sequence
  Description of Artificial Sequence: Synthetic oligonucleotide
  Sense strand starting at position 3809 of SEQ ID NO: 1242983
gaagacaucuugggaucca

SEQ ID NO: 1386533 - RNA, 19 nt, Artificial Sequence
  Description of Artificial Sequence: Synthetic oligonucleotide
  Antisense strand to SEQ ID NO: 1386532
uggaucccaagaugucuuc

SEQ ID NO: 1386534 - RNA, 19 nt, Artificial Sequence
  Description of Artificial Sequence: Synthetic oligonucleotide
  Sense strand starting at position 3854 of SEQ ID NO: 1242983
uagcuuuauggugaugcaa

SEQ ID NO: 1386535 - RNA, 19 nt, Artificial Sequence
  Description of Artificial Sequence: Synthetic oligonucleotide
  Antisense strand to SEQ ID NO: 1386534
uugcaucaccauaaagcua

SEQ ID NO: 1386536 - RNA, 19 nt, Artificial Sequence
  Description of Artificial Sequence: Synthetic oligonucleotide
  Sense strand starting at position 3893 of SEQ ID NO: 1242983
cucauugagcuguacaauu

SEQ ID NO: 1386537 - RNA, 19 nt, Artificial Sequence
  Description of Artificial Sequence: Synthetic oligonucleotide
  Antisense strand to SEQ ID NO: 1386536
aauuguacagcucaaugag

SEQ ID NO: 1386538 - RNA, 19 nt, Artificial Sequence
  Description of Artificial Sequence: Synthetic oligonucleotide
  Sense strand starting at position 3917 of SEQ ID NO: 1242983
cacagaacugugcagcuau

SEQ ID NO: 1386539 - RNA, 19 nt, Artificial Sequence
  Description of Artificial Sequence: Synthetic oligonucleotide
  Antisense strand to SEQ ID NO: 1386538
auagcugcacaguucugug

SEQ ID NO: 1386540 - RNA, 19 nt, Artificial Sequence
  Description of Artificial Sequence: Synthetic oligonucleotide
  Sense strand starting at position 3982 of SEQ ID NO: 1242983
cugcccuucugagacauca

SEQ ID NO: 1386541 - RNA, 19 nt, Artificial Sequence
  Description of Artificial Sequence: Synthetic oligonucleotide
  Antisense strand to SEQ ID NO: 1386540
ugaugucucagaagggcag

SEQ ID NO: 1386542 - RNA, 19 nt, Artificial Sequence
  Description of Artificial Sequence: Synthetic oligonucleotide
  Sense strand starting at position 154 of SEQ ID NO: 1242984
caguguccucagugucaca

SEQ ID NO: 1386543 - RNA, 19 nt, Artificial Sequence
  Description of Artificial Sequence: Synthetic oligonucleotide
  Antisense strand to SEQ ID NO: 1386542
ugugacacugaggacacug

SEQ ID NO: 1386544 - RNA, 19 nt, Artificial Sequence
  Description of Artificial Sequence: Synthetic oligonucleotide
  Sense strand starting at position 266 of SEQ ID NO: 1242984
cggaaauaacggugacacu

SEQ ID NO: 1386545 - RNA, 19 nt, Artificial Sequence
  Description of Artificial Sequence: Synthetic oligonucleotide
  Antisense strand to SEQ ID NO: 1386544
agugucaccguuauuuccg

SEQ ID NO: 1386546 - RNA, 19 nt, Artificial Sequence
  Description of Artificial Sequence: Synthetic oligonucleotide
  Sense strand starting at position 443 of SEQ ID NO: 1242984
agggcuguccucgaaacga

SEQ ID NO: 1386547 - RNA, 19 nt, Artificial Sequence
  Description of Artificial Sequence: Synthetic oligonucleotide
  Antisense strand to SEQ ID NO: 1386546
ucguuucgaggacagcccu

SEQ ID NO: 1386548 - RNA, 19 nt, Artificial Sequence
  Description of Artificial Sequence: Synthetic oligonucleotide
  Sense strand starting at position 825 of SEQ ID NO: 1242984
ccacuauggucccagguga

SEQ ID NO: 1386549 - RNA, 19 nt, Artificial Sequence
  Description of Artificial Sequence: Synthetic oligonucleotide
  Antisense strand to SEQ ID NO: 1386548
ucaccugggaccauagugg

SEQ ID NO: 1386550 - RNA, 19 nt, Artificial Sequence
  Description of Artificial Sequence: Synthetic oligonucleotide
  Sense strand starting at position 840 of SEQ ID NO: 1242984
gugagaguuggccaaggaa

SEQ ID NO: 1386551 - RNA, 19 nt, Artificial Sequence
  Description of Artificial Sequence: Synthetic oligonucleotide
  Antisense strand to SEQ ID NO: 1386550
uuccuuggccaacucucac

SEQ ID NO: 1386552 - RNA, 19 nt, Artificial Sequence
  Description of Artificial Sequence: Synthetic oligonucleotide
  Sense strand starting at position 863 of SEQ ID NO: 1242984
uguuuagggacaugacaau

SEQ ID NO: 1386553 - RNA, 19 nt, Artificial Sequence
  Description of Artificial Sequence: Synthetic oligonucleotide
  Antisense strand to SEQ ID NO: 1386552
auugucaugucccuaaaca

SEQ ID NO: 1386554 - RNA, 19 nt, Artificial Sequence
  Description of Artificial Sequence: Synthetic oligonucleotide
  Sense strand starting at position 873 of SEQ ID NO: 1242984
caugacaauugagaaggua

SEQ ID NO: 1386555 - RNA, 19 nt, Artificial Sequence
  Description of Artificial Sequence: Synthetic oligonucleotide
  Antisense strand to SEQ ID NO: 1386554
uaccuucucaauugucaug

SEQ ID NO: 1386556 - RNA, 19 nt, Artificial Sequence
  Description of Artificial Sequence: Synthetic oligonucleotide
  Sense strand starting at position 897 of SEQ ID NO: 1242984
agccauuccucucugauga

SEQ ID NO: 1386557 - RNA, 19 nt, Artificial Sequence
  Description of Artificial Sequence: Synthetic oligonucleotide
  Antisense strand to SEQ ID NO: 1386556
ucaucagagaggaauggcu

SEQ ID NO: 1386558 - RNA, 19 nt, Artificial Sequence
  Description of Artificial Sequence: Synthetic oligonucleotide
  Sense strand starting at position 898 of SEQ ID NO: 1242984
gccauuccucucugaugag

SEQ ID NO: 1386559 - RNA, 19 nt, Artificial Sequence
  Description of Artificial Sequence: Synthetic oligonucleotide
  Antisense strand to SEQ ID NO: 1386558
cucaucagagaggaauggc

SEQ ID NO: 1386560 - RNA, 19 nt, Artificial Sequence
  Description of Artificial Sequence: Synthetic oligonucleotide
  Sense strand starting at position 907 of SEQ ID NO: 1242984
cucugaugagcugauuaau

SEQ ID NO: 1386561 - RNA, 19 nt, Artificial Sequence
  Description of Artificial Sequence: Synthetic oligonucleotide
  Antisense strand to SEQ ID NO: 1386560
auuaaucagcucaucagag

SEQ ID NO: 1386562 - RNA, 19 nt, Artificial Sequence
  Description of Artificial Sequence: Synthetic oligonucleotide
  Sense strand starting at position 1002 of SEQ ID NO: 1242984
ggccauuccugccugcaga

SEQ ID NO: 1386563 - RNA, 19 nt, Artificial Sequence
  Description of Artificial Sequence: Synthetic oligonucleotide
  Antisense strand to SEQ ID NO: 1386562
ucugcaggcaggaauggcc

SEQ ID NO: 1386564 - RNA, 19 nt, Artificial Sequence
  Description of Artificial Sequence: Synthetic oligonucleotide
  Sense strand starting at position 1120 of SEQ ID NO: 1242984
ccacuauagaguggugaca

SEQ ID NO: 1386565 - RNA, 19 nt, Artificial Sequence
  Description of Artificial Sequence: Synthetic oligonucleotide
  Antisense strand to SEQ ID NO: 1386564
ugucaccacucuauagugg

SEQ ID NO: 1386566 - RNA, 19 nt, Artificial Sequence
  Description of Artificial Sequence: Synthetic oligonucleotide
  Sense strand starting at position 1282 of SEQ ID NO: 1242984
ccauguguccuccggguca

SEQ ID NO: 1386567 - RNA, 19 nt, Artificial Sequence
  Description of Artificial Sequence: Synthetic oligonucleotide
  Antisense strand to SEQ ID NO: 1386566
ugacccggaggacacaugg

SEQ ID NO: 1386568 - RNA, 19 nt, Artificial Sequence
  Description of Artificial Sequence: Synthetic oligonucleotide
  Sense strand starting at position 1338 of SEQ ID NO: 1242984
ccuauugucacaggccgaa

SEQ ID NO: 1386569 - RNA, 19 nt, Artificial Sequence
  Description of Artificial Sequence: Synthetic oligonucleotide
  Antisense strand to SEQ ID NO: 1386568
uucggccugugacaauagg

SEQ ID NO: 1386570 - RNA, 19 nt, Artificial Sequence
  Description of Artificial Sequence: Synthetic oligonucleotide
  Sense strand starting at position 1505 of SEQ ID NO: 1242984
agagaagcauucuccgagu

SEQ ID NO: 1386571 - RNA, 19 nt, Artificial Sequence
  Description of Artificial Sequence: Synthetic oligonucleotide
  Antisense strand to SEQ ID NO: 1386570
acucggagaaugcuucucu

SEQ ID NO: 1386572 - RNA, 19 nt, Artificial Sequence
  Description of Artificial Sequence: Synthetic oligonucleotide
  Sense strand starting at position 1510 of SEQ ID NO: 1242984
agcauucuccgagucguuu

SEQ ID NO: 1386573 - RNA, 19 nt, Artificial Sequence
  Description of Artificial Sequence: Synthetic oligonucleotide
  Antisense strand to SEQ ID NO: 1386572
aaacgacucggagaaugcu

SEQ ID NO: 1386574 - RNA, 19 nt, Artificial Sequence
  Description of Artificial Sequence: Synthetic oligonucleotide
  Sense strand starting at position 1705 of SEQ ID NO: 1242984
cugacugagcccugacaca

SEQ ID NO: 1386575 - RNA, 19 nt, Artificial Sequence
  Description of Artificial Sequence: Synthetic oligonucleotide
  Antisense strand to SEQ ID NO: 1386574
ugugucagggcucagucag

SEQ ID NO: 1386576 - RNA, 19 nt, Artificial Sequence
  Description of Artificial Sequence: Synthetic oligonucleotide
  Sense strand starting at position 1723 of SEQ ID NO: 1242984
acaggcaccucgggaaaua

SEQ ID NO: 1386577 - RNA, 19 nt, Artificial Sequence
  Description of Artificial Sequence: Synthetic oligonucleotide
  Antisense strand to SEQ ID NO: 1386576
uauuucccgaggugccugu

SEQ ID NO: 1386578 - RNA, 19 nt, Artificial Sequence
  Description of Artificial Sequence: Synthetic oligonucleotide
  Sense strand starting at position 1883 of SEQ ID NO: 1242984
aagaaagugucucagagaa

SEQ ID NO: 1386579 - RNA, 19 nt, Artificial Sequence
  Description of Artificial Sequence: Synthetic oligonucleotide
  Antisense strand to SEQ ID NO: 1386578
uucucugagacacuuucuu

SEQ ID NO: 1386580 - RNA, 19 nt, Artificial Sequence
  Description of Artificial Sequence: Synthetic oligonucleotide
  Sense strand starting at position 1885 of SEQ ID NO: 1242984
gaaagugucucagagaagc

SEQ ID NO: 1386581 - RNA, 19 nt, Artificial Sequence
  Description of Artificial Sequence: Synthetic oligonucleotide
  Antisense strand to SEQ ID NO: 1386580
gcuucucugagacacuuuc

SEQ ID NO: 1386582 - RNA, 19 nt, Artificial Sequence
  Description of Artificial Sequence: Synthetic oligonucleotide
  Sense strand starting at position 2075 of SEQ ID NO: 1242984
ccuugcugagugcgugaaa

SEQ ID NO: 1386583 - RNA, 19 nt, Artificial Sequence
  Description of Artificial Sequence: Synthetic oligonucleotide
  Antisense strand to SEQ ID NO: 1386582
uuucacgcacucagcaagg

SEQ ID NO: 1386584 - RNA, 19 nt, Artificial Sequence
  Description of Artificial Sequence: Synthetic oligonucleotide
  Sense strand starting at position 2530 of SEQ ID NO: 1242984
uguagaucuaccuguggga

SEQ ID NO: 1386585 - RNA, 19 nt, Artificial Sequence
  Description of Artificial Sequence: Synthetic oligonucleotide
  Antisense strand to SEQ ID NO: 1386584
ucccacagguagaucuaca

SEQ ID NO: 1386586 - RNA, 19 nt, Artificial Sequence
  Description of Artificial Sequence: Synthetic oligonucleotide
  Sense strand starting at position 2532 of SEQ ID NO: 1242984
uagaucuaccugugggaca

SEQ ID NO: 1386587 - RNA, 19 nt, Artificial Sequence
  Description of Artificial Sequence: Synthetic oligonucleotide
  Antisense strand to SEQ ID NO: 1386586
ugucccacagguagaucua

SEQ ID NO: 1386588 - RNA, 19 nt, Artificial Sequence
  Description of Artificial Sequence: Synthetic oligonucleotide
  Sense strand starting at position 2533 of SEQ ID NO: 1242984
agaucuaccugugggacaa

SEQ ID NO: 1386589 - RNA, 19 nt, Artificial Sequence
  Description of Artificial Sequence: Synthetic oligonucleotide
  Antisense strand to SEQ ID NO: 1386588
uugucccacagguagaucu

SEQ ID NO: 1386590 - RNA, 19 nt, Artificial Sequence
  Description of Artificial Sequence: Synthetic oligonucleotide
  Sense strand starting at position 3396 of SEQ ID NO: 1242984
accucauuguaccuuaagu

SEQ ID NO: 1386591 - RNA, 19 nt, Artificial Sequence
  Description of Artificial Sequence: Synthetic oligonucleotide
  Antisense strand to SEQ ID NO: 1386590
acuuaagguacaaugaggu

SEQ ID NO: 1386592 - RNA, 19 nt, Artificial Sequence
  Description of Artificial Sequence: Synthetic oligonucleotide
  Sense strand starting at position 3553 of SEQ ID NO: 1242984
gagaaaucuucccuugggu

SEQ ID NO: 1386593 - RNA, 19 nt, Artificial Sequence
  Description of Artificial Sequence: Synthetic oligonucleotide
  Antisense strand to SEQ ID NO: 1386592
acccaagggaagauuucuc

SEQ ID NO: 1386594 - RNA, 19 nt, Artificial Sequence
  Description of Artificial Sequence: Synthetic oligonucleotide
  Sense strand starting at position 3556 of SEQ ID NO: 1242984
aaaucuucccuugggugaa

SEQ ID NO: 1386595 - RNA, 19 nt, Artificial Sequence
  Description of Artificial Sequence: Synthetic oligonucleotide
  Antisense strand to SEQ ID NO: 1386594
uucacccaagggaagauuu

SEQ ID NO: 1386596 - RNA, 19 nt, Artificial Sequence
  Description of Artificial Sequence: Synthetic oligonucleotide
  Sense strand starting at position 3652 of SEQ ID NO: 1242984
uccagaucuuucccugagu

SEQ ID NO: 1386597 - RNA, 19 nt, Artificial Sequence
  Description of Artificial Sequence: Synthetic oligonucleotide
  Antisense strand to SEQ ID NO: 1386596
acucagggaaagaucugga

SEQ ID NO: 1386598 - RNA, 19 nt, Artificial Sequence
  Description of Artificial Sequence: Synthetic oligonucleotide
  Sense strand starting at position 3653 of SEQ ID NO: 1242984
ccagaucuuucccugagua

SEQ ID NO: 1386599 - RNA, 19 nt, Artificial Sequence
  Description of Artificial Sequence: Synthetic oligonucleotide
  Antisense strand to SEQ ID NO: 1386598
uacucagggaaagaucugg

SEQ ID NO: 1386600 - RNA, 19 nt, Artificial Sequence
  Description of Artificial Sequence: Synthetic oligonucleotide
  Sense strand starting at position 3655 of SEQ ID NO: 1242984
agaucuuucccugaguauc

SEQ ID NO: 1386601 - RNA, 19 nt, Artificial Sequence
  Description of Artificial Sequence: Synthetic oligonucleotide
  Antisense strand to SEQ ID NO: 1386600
gauacucagggaaagaucu

SEQ ID NO: 1386602 - RNA, 19 nt, Artificial Sequence
  Description of Artificial Sequence: Synthetic oligonucleotide
  Sense strand starting at position 3663 of SEQ ID NO: 1242984
cccugaguauccucugaau

SEQ ID NO: 1386603 - RNA, 19 nt, Artificial Sequence
  Description of Artificial Sequence: Synthetic oligonucleotide
  Antisense strand to SEQ ID NO: 1386602
auucagaggauacucaggg

SEQ ID NO: 1386604 - RNA, 19 nt, Artificial Sequence
  Description of Artificial Sequence: Synthetic oligonucleotide
  Sense strand starting at position 3665 of SEQ ID NO: 1242984
cugaguauccucugaauug

SEQ ID NO: 1386605 - RNA, 19 nt, Artificial Sequence
  Description of Artificial Sequence: Synthetic oligonucleotide
  Antisense strand to SEQ ID NO: 1386604
caauucagaggauacucag

SEQ ID NO: 1386606 - RNA, 19 nt, Artificial Sequence
  Description of Artificial Sequence: Synthetic oligonucleotide
  Sense strand starting at position 3675 of SEQ ID NO: 1242984
ucugaauuguagugggaga

SEQ ID NO: 1386607 - RNA, 19 nt, Artificial Sequence
  Description of Artificial Sequence: Synthetic oligonucleotide
  Antisense strand to SEQ ID NO: 1386606
ucucccacuacaauucaga

SEQ ID NO: 1386608 - RNA, 19 nt, Artificial Sequence
  Description of Artificial Sequence: Synthetic oligonucleotide
  Sense strand starting at position 3677 of SEQ ID NO: 1242984
ugaauuguagugggagaca

SEQ ID NO: 1386609 - RNA, 19 nt, Artificial Sequence
  Description of Artificial Sequence: Synthetic oligonucleotide
  Antisense strand to SEQ ID NO: 1386608
ugucucccacuacaauuca

SEQ ID NO: 1386610 - RNA, 19 nt, Artificial Sequence
  Description of Artificial Sequence: Synthetic oligonucleotide
  Sense strand starting at position 3785 of SEQ ID NO: 1242984
gaagacaucuugggaucca

SEQ ID NO: 1386611 - RNA, 19 nt, Artificial Sequence
  Description of Artificial Sequence: Synthetic oligonucleotide
  Antisense strand to SEQ ID NO: 1386610
uggaucccaagaugucuuc

SEQ ID NO: 1386612 - RNA, 19 nt, Artificial Sequence
  Description of Artificial Sequence: Synthetic oligonucleotide
  Sense strand starting at position 3830 of SEQ ID NO: 1242984
uagcuuuauggugaugcaa

SEQ ID NO: 1386613 - RNA, 19 nt, Artificial Sequence
  Description of Artificial Sequence: Synthetic oligonucleotide
  Antisense strand to SEQ ID NO: 1386612
uugcaucaccauaaagcua

SEQ ID NO: 1386614 - RNA, 19 nt, Artificial Sequence
  Description of Artificial Sequence: Synthetic oligonucleotide
  Sense strand starting at position 3869 of SEQ ID NO: 1242984
cucauugagcuguacaauu

SEQ ID NO: 1386615 - RNA, 19 nt, Artificial Sequence
  Description of Artificial Sequence: Synthetic oligonucleotide
  Antisense strand to SEQ ID NO: 1386614
aauuguacagcucaaugag

SEQ ID NO: 1386616 - RNA, 19 nt, Artificial Sequence
  Description of Artificial Sequence: Synthetic oligonucleotide
  Sense strand starting at position 3893 of SEQ ID NO: 1242984
cacagaacugugcagcuau

SEQ ID NO: 1386617 - RNA, 19 nt, Artificial Sequence
  Description of Artificial Sequence: Synthetic oligonucleotide
  Antisense strand to SEQ ID NO: 1386616
auagcugcacaguucugug

SEQ ID NO: 1386618 - RNA, 19 nt, Artificial Sequence
  Description of Artificial Sequence: Synthetic oligonucleotide
  Sense strand starting at position 3958 of SEQ ID NO: 1242984
cugcccuucugagacauca

SEQ ID NO: 1386619 - RNA, 19 nt, Artificial Sequence
  Description of Artificial Sequence: Synthetic oligonucleotide
  Antisense strand to SEQ ID NO: 1386618
ugaugucucagaagggcag

SEQ ID NO: 1386620 - RNA, 19 nt, Artificial Sequence
  Description of Artificial Sequence: Synthetic oligonucleotide
  Sense strand starting at position 3966 of SEQ ID NO: 1242984
cugagacaucacugccagu

SEQ ID NO: 1386621 - RNA, 19 nt, Artificial Sequence
  Description of Artificial Sequence: Synthetic oligonucleotide
  Antisense strand to SEQ ID NO: 1386620
acuggcagugaugucucag

SEQ ID NO: 1386622 - RNA, 19 nt, Artificial Sequence
  Description of Artificial Sequence: Synthetic oligonucleotide
  Sense strand starting at position 127 of SEQ ID NO: 1242985
caguguccucagugucaca

SEQ ID NO: 1386623 - RNA, 19 nt, Artificial Sequence
  Description of Artificial Sequence: Synthetic oligonucleotide
  Antisense strand to SEQ ID NO: 1386622
ugugacacugaggacacug

SEQ ID NO: 1386624 - RNA, 19 nt, Artificial Sequence
  Description of Artificial Sequence: Synthetic oligonucleotide
  Sense strand starting at position 239 of SEQ ID NO: 1242985
cggaaauaacggugacacu

SEQ ID NO: 1386625 - RNA, 19 nt, Artificial Sequence
  Description of Artificial Sequence: Synthetic oligonucleotide
  Antisense strand to SEQ ID NO: 1386624
agugucaccguuauuuccg

SEQ ID NO: 1386626 - RNA, 19 nt, Artificial Sequence
  Description of Artificial Sequence: Synthetic oligonucleotide
  Sense strand starting at position 416 of SEQ ID NO: 1242985
agggcuguccucgaaacga

SEQ ID NO: 1386627 - RNA, 19 nt, Artificial Sequence
  Description of Artificial Sequence: Synthetic oligonucleotide
  Antisense strand to SEQ ID NO: 1386626
ucguuucgaggacagcccu

SEQ ID NO: 1386628 - RNA, 19 nt, Artificial Sequence
  Description of Artificial Sequence: Synthetic oligonucleotide
  Sense strand starting at position 798 of SEQ ID NO: 1242985
ccacuauggucccagguga

SEQ ID NO: 1386629 - RNA, 19 nt, Artificial Sequence
  Description of Artificial Sequence: Synthetic oligonucleotide
  Antisense strand to SEQ ID NO: 1386628
ucaccugggaccauagugg

SEQ ID NO: 1386630 - RNA, 19 nt, Artificial Sequence
  Description of Artificial Sequence: Synthetic oligonucleotide
  Sense strand starting at position 813 of SEQ ID NO: 1242985
gugagaguuggccaaggaa

SEQ ID NO: 1386631 - RNA, 19 nt, Artificial Sequence
  Description of Artificial Sequence: Synthetic oligonucleotide
  Antisense strand to SEQ ID NO: 1386630
uuccuuggccaacucucac

SEQ ID NO: 1386632 - RNA, 19 nt, Artificial Sequence
  Description of Artificial Sequence: Synthetic oligonucleotide
  Sense strand starting at position 836 of SEQ ID NO: 1242985
uguuuagggacaugacaau

SEQ ID NO: 1386633 - RNA, 19 nt, Artificial Sequence
  Description of Artificial Sequence: Synthetic oligonucleotide
  Antisense strand to SEQ ID NO: 1386632
auugucaugucccuaaaca

SEQ ID NO: 1386634 - RNA, 19 nt, Artificial Sequence
  Description of Artificial Sequence: Synthetic oligonucleotide
  Sense strand starting at position 846 of SEQ ID NO: 1242985
caugacaauugagaaggua

SEQ ID NO: 1386635 - RNA, 19 nt, Artificial Sequence
  Description of Artificial Sequence: Synthetic oligonucleotide
  Antisense strand to SEQ ID NO: 1386634
uaccuucucaauugucaug

SEQ ID NO: 1386636 - RNA, 19 nt, Artificial Sequence
  Description of Artificial Sequence: Synthetic oligonucleotide
  Sense strand starting at position 870 of SEQ ID NO: 1242985
agccauuccucucugauga

SEQ ID NO: 1386637 - RNA, 19 nt, Artificial Sequence
  Description of Artificial Sequence: Synthetic oligonucleotide
  Antisense strand to SEQ ID NO: 1386636
ucaucagagaggaauggcu

SEQ ID NO: 1386638 - RNA, 19 nt, Artificial Sequence
  Description of Artificial Sequence: Synthetic oligonucleotide
  Sense strand starting at position 871 of SEQ ID NO: 1242985
gccauuccucucugaugag

SEQ ID NO: 1386639 - RNA, 19 nt, Artificial Sequence
  Description of Artificial Sequence: Synthetic oligonucleotide
  Antisense strand to SEQ ID NO: 1386638
cucaucagagaggaauggc

SEQ ID NO: 1386640 - RNA, 19 nt, Artificial Sequence
  Description of Artificial Sequence: Synthetic oligonucleotide
  Sense strand starting at position 880 of SEQ ID NO: 1242985
cucugaugagcugauuaau

SEQ ID NO: 1386641 - RNA, 19 nt, Artificial Sequence
  Description of Artificial Sequence: Synthetic oligonucleotide
  Antisense strand to SEQ ID NO: 1386640
auuaaucagcucaucagag

SEQ ID NO: 1386642 - RNA, 19 nt, Artificial Sequence
  Description of Artificial Sequence: Synthetic oligonucleotide
  Sense strand starting at position 975 of SEQ ID NO: 1242985
ggccauuccugccugcaga

SEQ ID NO: 1386643 - RNA, 19 nt, Artificial Sequence
  Description of Artificial Sequence: Synthetic oligonucleotide
  Antisense strand to SEQ ID NO: 1386642
ucugcaggcaggaauggcc

SEQ ID NO: 1386644 - RNA, 19 nt, Artificial Sequence
  Description of Artificial Sequence: Synthetic oligonucleotide
  Sense strand starting at position 1093 of SEQ ID NO: 1242985
ccacuauagaguggugaca

SEQ ID NO: 1386645 - RNA, 19 nt, Artificial Sequence
  Description of Artificial Sequence: Synthetic oligonucleotide
  Antisense strand to SEQ ID NO: 1386644
ugucaccacucuauagugg

SEQ ID NO: 1386646 - RNA, 19 nt, Artificial Sequence
  Description of Artificial Sequence: Synthetic oligonucleotide
  Sense strand starting at position 1255 of SEQ ID NO: 1242985
ccauguguccuccggguca

SEQ ID NO: 1386647 - RNA, 19 nt, Artificial Sequence
  Description of Artificial Sequence: Synthetic oligonucleotide
  Antisense strand to SEQ ID NO: 1386646
ugacccggaggacacaugg

SEQ ID NO: 1386648 - RNA, 19 nt, Artificial Sequence
  Description of Artificial Sequence: Synthetic oligonucleotide
  Sense strand starting at position 1311 of SEQ ID NO: 1242985
ccuauugucacaggccgaa

SEQ ID NO: 1386649 - RNA, 19 nt, Artificial Sequence
  Description of Artificial Sequence: Synthetic oligonucleotide
  Antisense strand to SEQ ID NO: 1386648
uucggccugugacaauagg

SEQ ID NO: 1386650 - RNA, 19 nt, Artificial Sequence
  Description of Artificial Sequence: Synthetic oligonucleotide
  Sense strand starting at position 1478 of SEQ ID NO: 1242985
agagaagcauucuccgagu

SEQ ID NO: 1386651 - RNA, 19 nt, Artificial Sequence
  Description of Artificial Sequence: Synthetic oligonucleotide
  Antisense strand to SEQ ID NO: 1386650
acucggagaaugcuucucu

SEQ ID NO: 1386652 - RNA, 19 nt, Artificial Sequence
  Description of Artificial Sequence: Synthetic oligonucleotide
  Sense strand starting at position 1483 of SEQ ID NO: 1242985
agcauucuccgagucguuu

SEQ ID NO: 1386653 - RNA, 19 nt, Artificial Sequence
  Description of Artificial Sequence: Synthetic oligonucleotide
  Antisense strand to SEQ ID NO: 1386652
aaacgacucggagaaugcu

SEQ ID NO: 1386654 - RNA, 19 nt, Artificial Sequence
  Description of Artificial Sequence: Synthetic oligonucleotide
  Sense strand starting at position 1678 of SEQ ID NO: 1242985
cugacugagcccugacaca

SEQ ID NO: 1386655 - RNA, 19 nt, Artificial Sequence
  Description of Artificial Sequence: Synthetic oligonucleotide
  Antisense strand to SEQ ID NO: 1386654
ugugucagggcucagucag

SEQ ID NO: 1386656 - RNA, 19 nt, Artificial Sequence
  Description of Artificial Sequence: Synthetic oligonucleotide
  Sense strand starting at position 1696 of SEQ ID NO: 1242985
acaggcaccucgggaaaua

SEQ ID NO: 1386657 - RNA, 19 nt, Artificial Sequence
  Description of Artificial Sequence: Synthetic oligonucleotide
  Antisense strand to SEQ ID NO: 1386656
uauuucccgaggugccugu

SEQ ID NO: 1386658 - RNA, 19 nt, Artificial Sequence
  Description of Artificial Sequence: Synthetic oligonucleotide
  Sense strand starting at position 1856 of SEQ ID NO: 1242985
aagaaagugucucagagaa

SEQ ID NO: 1386659 - RNA, 19 nt, Artificial Sequence
  Description of Artificial Sequence: Synthetic oligonucleotide
  Antisense strand to SEQ ID NO: 1386658
uucucugagacacuuucuu

SEQ ID NO: 1386660 - RNA, 19 nt, Artificial Sequence
  Description of Artificial Sequence: Synthetic oligonucleotide
  Sense strand starting at position 1858 of SEQ ID NO: 1242985
gaaagugucucagagaagc

SEQ ID NO: 1386661 - RNA, 19 nt, Artificial Sequence
  Description of Artificial Sequence: Synthetic oligonucleotide
  Antisense strand to SEQ ID NO: 1386660
gcuucucugagacacuuuc

SEQ ID NO: 1386662 - RNA, 19 nt, Artificial Sequence
  Description of Artificial Sequence: Synthetic oligonucleotide
  Sense strand starting at position 2048 of SEQ ID NO: 1242985
ccuugcugagugcgugaaa

SEQ ID NO: 1386663 - RNA, 19 nt, Artificial Sequence
  Description of Artificial Sequence: Synthetic oligonucleotide
  Antisense strand to SEQ ID NO: 1386662
uuucacgcacucagcaagg

SEQ ID NO: 1386664 - RNA, 19 nt, Artificial Sequence
  Description of Artificial Sequence: Synthetic oligonucleotide
  Sense strand starting at position 2503 of SEQ ID NO: 1242985
uguagaucuaccuguggga

SEQ ID NO: 1386665 - RNA, 19 nt, Artificial Sequence
  Description of Artificial Sequence: Synthetic oligonucleotide
  Antisense strand to SEQ ID NO: 1386664
ucccacagguagaucuaca

SEQ ID NO: 1386666 - RNA, 19 nt, Artificial Sequence
  Description of Artificial Sequence: Synthetic oligonucleotide
  Sense strand starting at position 2505 of SEQ ID NO: 1242985
uagaucuaccugugggaca

SEQ ID NO: 1386667 - RNA, 19 nt, Artificial Sequence
  Description of Artificial Sequence: Synthetic oligonucleotide
  Antisense strand to SEQ ID NO: 1386666
ugucccacagguagaucua

SEQ ID NO: 1386668 - RNA, 19 nt, Artificial Sequence
  Description of Artificial Sequence: Synthetic oligonucleotide
  Sense strand starting at position 2506 of SEQ ID NO: 1242985
agaucuaccugugggacaa

SEQ ID NO: 1386669 - RNA, 19 nt, Artificial Sequence
  Description of Artificial Sequence: Synthetic oligonucleotide
  Antisense strand to SEQ ID NO: 1386668
uugucccacagguagaucu

SEQ ID NO: 1386670 - RNA, 19 nt, Artificial Sequence
  Description of Artificial Sequence: Synthetic oligonucleotide
  Sense strand starting at position 3369 of SEQ ID NO: 1242985
accucauuguaccuuaagu

SEQ ID NO: 1386671 - RNA, 19 nt, Artificial Sequence
  Description of Artificial Sequence: Synthetic oligonucleotide
  Antisense strand to SEQ ID NO: 1386670
acuuaagguacaaugaggu

SEQ ID NO: 1386672 - RNA, 19 nt, Artificial Sequence
  Description of Artificial Sequence: Synthetic oligonucleotide
  Sense strand starting at position 3526 of SEQ ID NO: 1242985
gagaaaucuucccuugggu

SEQ ID NO: 1386673 - RNA, 19 nt, Artificial Sequence
  Description of Artificial Sequence: Synthetic oligonucleotide
  Antisense strand to SEQ ID NO: 1386672
acccaagggaagauuucuc

SEQ ID NO: 1386674 - RNA, 19 nt, Artificial Sequence
  Description of Artificial Sequence: Synthetic oligonucleotide
  Sense strand starting at position 3529 of SEQ ID NO: 1242985
aaaucuucccuugggugaa

SEQ ID NO: 1386675 - RNA, 19 nt, Artificial Sequence
  Description of Artificial Sequence: Synthetic oligonucleotide
  Antisense strand to SEQ ID NO: 1386674
uucacccaagggaagauuu

SEQ ID NO: 1386676 - RNA, 19 nt, Artificial Sequence
  Description of Artificial Sequence: Synthetic oligonucleotide
  Sense strand starting at position 3625 of SEQ ID NO: 1242985
uccagaucuuucccugagu

SEQ ID NO: 1386677 - RNA, 19 nt, Artificial Sequence
  Description of Artificial Sequence: Synthetic oligonucleotide
  Antisense strand to SEQ ID NO: 1386676
acucagggaaagaucugga

SEQ ID NO: 1386678 - RNA, 19 nt, Artificial Sequence
  Description of Artificial Sequence: Synthetic oligonucleotide
  Sense strand starting at position 3626 of SEQ ID NO: 1242985
ccagaucuuucccugagua

SEQ ID NO: 1386679 - RNA, 19 nt, Artificial Sequence
  Description of Artificial Sequence: Synthetic oligonucleotide
  Antisense strand to SEQ ID NO: 1386678
uacucagggaaagaucugg

SEQ ID NO: 1386680 - RNA, 19 nt, Artificial Sequence
  Description of Artificial Sequence: Synthetic oligonucleotide
  Sense strand starting at position 3628 of SEQ ID NO: 1242985
agaucuuucccugaguauc

SEQ ID NO: 1386681 - RNA, 19 nt, Artificial Sequence
  Description of Artificial Sequence: Synthetic oligonucleotide
  Antisense strand to SEQ ID NO: 1386680
gauacucagggaaagaucu

SEQ ID NO: 1386682 - RNA, 19 nt, Artificial Sequence
  Description of Artificial Sequence: Synthetic oligonucleotide
  Sense strand starting at position 3636 of SEQ ID NO: 1242985
cccugaguauccucugaau

SEQ ID NO: 1386683 - RNA, 19 nt, Artificial Sequence
  Description of Artificial Sequence: Synthetic oligonucleotide
  Antisense strand to SEQ ID NO: 1386682
auucagaggauacucaggg

SEQ ID NO: 1386684 - RNA, 19 nt, Artificial Sequence
  Description of Artificial Sequence: Synthetic oligonucleotide
  Sense strand starting at position 3638 of SEQ ID NO: 1242985
cugaguauccucugaauug

SEQ ID NO: 1386685 - RNA, 19 nt, Artificial Sequence
  Description of Artificial Sequence: Synthetic oligonucleotide
  Antisense strand to SEQ ID NO: 1386684
caauucagaggauacucag

SEQ ID NO: 1386686 - RNA, 19 nt, Artificial Sequence
  Description of Artificial Sequence: Synthetic oligonucleotide
  Sense strand starting at position 3648 of SEQ ID NO: 1242985
ucugaauuguagugggaga

SEQ ID NO: 1386687 - RNA, 19 nt, Artificial Sequence
  Description of Artificial Sequence: Synthetic oligonucleotide
  Antisense strand to SEQ ID NO: 1386686
ucucccacuacaauucaga

SEQ ID NO: 1386688 - RNA, 19 nt, Artificial Sequence
  Description of Artificial Sequence: Synthetic oligonucleotide
  Sense strand starting at position 3650 of SEQ ID NO: 1242985
ugaauuguagugggagaca

SEQ ID NO: 1386689 - RNA, 19 nt, Artificial Sequence
  Description of Artificial Sequence: Synthetic oligonucleotide
  Antisense strand to SEQ ID NO: 1386688
ugucucccacuacaauuca

SEQ ID NO: 1386690 - RNA, 19 nt, Artificial Sequence
  Description of Artificial Sequence: Synthetic oligonucleotide
  Sense strand starting at position 3758 of SEQ ID NO: 1242985
gaagacaucuugggaucca

SEQ ID NO: 1386691 - RNA, 19 nt, Artificial Sequence
  Description of Artificial Sequence: Synthetic oligonucleotide
  Antisense strand to SEQ ID NO: 1386690
uggaucccaagaugucuuc

SEQ ID NO: 1386692 - RNA, 19 nt, Artificial Sequence
  Description of Artificial Sequence: Synthetic oligonucleotide
  Sense strand starting at position 3803 of SEQ ID NO: 1242985
uagcuuuauggugaugcaa

SEQ ID NO: 1386693 - RNA, 19 nt, Artificial Sequence
  Description of Artificial Sequence: Synthetic oligonucleotide
  Antisense strand to SEQ ID NO: 1386692
uugcaucaccauaaagcua

SEQ ID NO: 1386694 - RNA, 19 nt, Artificial Sequence
  Description of Artificial Sequence: Synthetic oligonucleotide
  Sense strand starting at position 3842 of SEQ ID NO: 1242985
cucauugagcuguacaauu

SEQ ID NO: 1386695 - RNA, 19 nt, Artificial Sequence
  Description of Artificial Sequence: Synthetic oligonucleotide
  Antisense strand to SEQ ID NO: 1386694
aauuguacagcucaaugag

SEQ ID NO: 1386696 - RNA, 19 nt, Artificial Sequence
  Description of Artificial Sequence: Synthetic oligonucleotide
  Sense strand starting at position 3866 of SEQ ID NO: 1242985
cacagaacugugcagcuau

SEQ ID NO: 1386697 - RNA, 19 nt, Artificial Sequence
  Description of Artificial Sequence: Synthetic oligonucleotide
  Antisense strand to SEQ ID NO: 1386696
auagcugcacaguucugug

SEQ ID NO: 1386698 - RNA, 19 nt, Artificial Sequence
  Description of Artificial Sequence: Synthetic oligonucleotide
  Sense strand starting at position 3931 of SEQ ID NO: 1242985
cugcccuucugagacauca

SEQ ID NO: 1386699 - RNA, 19 nt, Artificial Sequence
  Description of Artificial Sequence: Synthetic oligonucleotide
  Antisense strand to SEQ ID NO: 1386698
ugaugucucagaagggcag

SEQ ID NO: 1386700 - RNA, 19 nt, Artificial Sequence
  Description of Artificial Sequence: Synthetic oligonucleotide
  Sense strand starting at position 3939 of SEQ ID NO: 1242985
cugagacaucacugccagu

SEQ ID NO: 1386701 - RNA, 19 nt, Artificial Sequence
  Description of Artificial Sequence: Synthetic oligonucleotide
  Antisense strand to SEQ ID NO: 1386700
acuggcagugaugucucag

SEQ ID NO: 1386702 - RNA, 19 nt, Artificial Sequence
  Description of Artificial Sequence: Synthetic oligonucleotide
  Sense strand starting at position 38 of SEQ ID NO: 1242986
caagcauuugcccacggua

SEQ ID NO: 1386703 - RNA, 19 nt, Artificial Sequence
  Description of Artificial Sequence: Synthetic oligonucleotide
  Antisense strand to SEQ ID NO: 1386702
uaccgugggcaaaugcuug

SEQ ID NO: 1386704 - RNA, 19 nt, Artificial Sequence
  Description of Artificial Sequence: Synthetic oligonucleotide
  Sense strand starting at position 300 of SEQ ID NO: 1242986
caguguccucagugucaca

SEQ ID NO: 1386705 - RNA, 19 nt, Artificial Sequence
  Description of Artificial Sequence: Synthetic oligonucleotide
  Antisense strand to SEQ ID NO: 1386704
ugugacacugaggacacug

SEQ ID NO: 1386706 - RNA, 19 nt, Artificial Sequence
  Description of Artificial Sequence: Synthetic oligonucleotide
  Sense strand starting at position 412 of SEQ ID NO: 1242986
cggaaauaacggugacacu

SEQ ID NO: 1386707 - RNA, 19 nt, Artificial Sequence
  Description of Artificial Sequence: Synthetic oligonucleotide
  Antisense strand to SEQ ID NO: 1386706
agugucaccguuauuuccg

SEQ ID NO: 1386708 - RNA, 19 nt, Artificial Sequence
  Description of Artificial Sequence: Synthetic oligonucleotide
  Sense strand starting at position 589 of SEQ ID NO: 1242986
agggcuguccucgaaacga

SEQ ID NO: 1386709 - RNA, 19 nt, Artificial Sequence
  Description of Artificial Sequence: Synthetic oligonucleotide
  Antisense strand to SEQ ID NO: 1386708
ucguuucgaggacagcccu

SEQ ID NO: 1386710 - RNA, 19 nt, Artificial Sequence
  Description of Artificial Sequence: Synthetic oligonucleotide
  Sense strand starting at position 971 of SEQ ID NO: 1242986
ccacuauggucccagguga

SEQ ID NO: 1386711 - RNA, 19 nt, Artificial Sequence
  Description of Artificial Sequence: Synthetic oligonucleotide
  Antisense strand to SEQ ID NO: 1386710
ucaccugggaccauagugg

SEQ ID NO: 1386712 - RNA, 19 nt, Artificial Sequence
  Description of Artificial Sequence: Synthetic oligonucleotide
  Sense strand starting at position 986 of SEQ ID NO: 1242986
gugagaguuggccaaggaa

SEQ ID NO: 1386713 - RNA, 19 nt, Artificial Sequence
  Description of Artificial Sequence: Synthetic oligonucleotide
  Antisense strand to SEQ ID NO: 1386712
uuccuuggccaacucucac

SEQ ID NO: 1386714 - RNA, 19 nt, Artificial Sequence
  Description of Artificial Sequence: Synthetic oligonucleotide
  Sense strand starting at position 1009 of SEQ ID NO: 1242986
uguuuagggacaugacaau

SEQ ID NO: 1386715 - RNA, 19 nt, Artificial Sequence
  Description of Artificial Sequence: Synthetic oligonucleotide
  Antisense strand to SEQ ID NO: 1386714
auugucaugucccuaaaca

SEQ ID NO: 1386716 - RNA, 19 nt, Artificial Sequence
  Description of Artificial Sequence: Synthetic oligonucleotide
  Sense strand starting at position 1019 of SEQ ID NO: 1242986
caugacaauugagaaggua

SEQ ID NO: 1386717 - RNA, 19 nt, Artificial Sequence
  Description of Artificial Sequence: Synthetic oligonucleotide
  Antisense strand to SEQ ID NO: 1386716
uaccuucucaauugucaug

SEQ ID NO: 1386718 - RNA, 19 nt, Artificial Sequence
  Description of Artificial Sequence: Synthetic oligonucleotide
  Sense strand starting at position 1043 of SEQ ID NO: 1242986
agccauuccucucugauga

SEQ ID NO: 1386719 - RNA, 19 nt, Artificial Sequence
  Description of Artificial Sequence: Synthetic oligonucleotide
  Antisense strand to SEQ ID NO: 1386718
ucaucagagaggaauggcu

SEQ ID NO: 1386720 - RNA, 19 nt, Artificial Sequence
  Description of Artificial Sequence: Synthetic oligonucleotide
  Sense strand starting at position 1044 of SEQ ID NO: 1242986
gccauuccucucugaugag

SEQ ID NO: 1386721 - RNA, 19 nt, Artificial Sequence
  Description of Artificial Sequence: Synthetic oligonucleotide
  Antisense strand to SEQ ID NO: 1386720
cucaucagagaggaauggc

SEQ ID NO: 1386722 - RNA, 19 nt, Artificial Sequence
  Description of Artificial Sequence: Synthetic oligonucleotide
  Sense strand starting at position 1053 of SEQ ID NO: 1242986
cucugaugagcugauuaau

SEQ ID NO: 1386723 - RNA, 19 nt, Artificial Sequence
  Description of Artificial Sequence: Synthetic oligonucleotide
  Antisense strand to SEQ ID NO: 1386722
auuaaucagcucaucagag

SEQ ID NO: 1386724 - RNA, 19 nt, Artificial Sequence
  Description of Artificial Sequence: Synthetic oligonucleotide
  Sense strand starting at position 1148 of SEQ ID NO: 1242986
ggccauuccugccugcaga

SEQ ID NO: 1386725 - RNA, 19 nt, Artificial Sequence
  Description of Artificial Sequence: Synthetic oligonucleotide
  Antisense strand to SEQ ID NO: 1386724
ucugcaggcaggaauggcc

SEQ ID NO: 1386726 - RNA, 19 nt, Artificial Sequence
  Description of Artificial Sequence: Synthetic oligonucleotide
  Sense strand starting at position 1266 of SEQ ID NO: 1242986
ccacuauagaguggugaca

SEQ ID NO: 1386727 - RNA, 19 nt, Artificial Sequence
  Description of Artificial Sequence: Synthetic oligonucleotide
  Antisense strand to SEQ ID NO: 1386726
ugucaccacucuauagugg

SEQ ID NO: 1386728 - RNA, 19 nt, Artificial Sequence
  Description of Artificial Sequence: Synthetic oligonucleotide
  Sense strand starting at position 1268 of SEQ ID NO: 1242986
acuauagaguggugacagu

SEQ ID NO: 1386729 - RNA, 19 nt, Artificial Sequence
  Description of Artificial Sequence: Synthetic oligonucleotide
  Antisense strand to SEQ ID NO: 1386728
acugucaccacucuauagu

SEQ ID NO: 1386730 - RNA, 19 nt, Artificial Sequence
  Description of Artificial Sequence: Synthetic oligonucleotide
  Sense strand starting at position 1428 of SEQ ID NO: 1242986
ccauguguccuccggguca

SEQ ID NO: 1386731 - RNA, 19 nt, Artificial Sequence
  Description of Artificial Sequence: Synthetic oligonucleotide
  Antisense strand to SEQ ID NO: 1386730
ugacccggaggacacaugg

SEQ ID NO: 1386732 - RNA, 19 nt, Artificial Sequence
  Description of Artificial Sequence: Synthetic oligonucleotide
  Sense strand starting at position 1484 of SEQ ID NO: 1242986
ccuauugucacaggccgaa

SEQ ID NO: 1386733 - RNA, 19 nt, Artificial Sequence
  Description of Artificial Sequence: Synthetic oligonucleotide
  Antisense strand to SEQ ID NO: 1386732
uucggccugugacaauagg

SEQ ID NO: 1386734 - RNA, 19 nt, Artificial Sequence
  Description of Artificial Sequence: Synthetic oligonucleotide
  Sense strand starting at position 1651 of SEQ ID NO: 1242986
agagaagcauucuccgagu

SEQ ID NO: 1386735 - RNA, 19 nt, Artificial Sequence
  Description of Artificial Sequence: Synthetic oligonucleotide
  Antisense strand to SEQ ID NO: 1386734
acucggagaaugcuucucu

SEQ ID NO: 1386736 - RNA, 19 nt, Artificial Sequence
  Description of Artificial Sequence: Synthetic oligonucleotide
  Sense strand starting at position 1656 of SEQ ID NO: 1242986
agcauucuccgagucguuu

SEQ ID NO: 1386737 - RNA, 19 nt, Artificial Sequence
  Description of Artificial Sequence: Synthetic oligonucleotide
  Antisense strand to SEQ ID NO: 1386736
aaacgacucggagaaugcu

SEQ ID NO: 1386738 - RNA, 19 nt, Artificial Sequence
  Description of Artificial Sequence: Synthetic oligonucleotide
  Sense strand starting at position 1665 of SEQ ID NO: 1242986
cgagucguuuccagcagag

SEQ ID NO: 1386739 - RNA, 19 nt, Artificial Sequence
  Description of Artificial Sequence: Synthetic oligonucleotide
  Antisense strand to SEQ ID NO: 1386738
cucugcuggaaacgacucg

SEQ ID NO: 1386740 - RNA, 19 nt, Artificial Sequence
  Description of Artificial Sequence: Synthetic oligonucleotide
  Sense strand starting at position 1851 of SEQ ID NO: 1242986
cugacugagcccugacaca

SEQ ID NO: 1386741 - RNA, 19 nt, Artificial Sequence
  Description of Artificial Sequence: Synthetic oligonucleotide
  Antisense strand to SEQ ID NO: 1386740
ugugucagggcucagucag

SEQ ID NO: 1386742 - RNA, 19 nt, Artificial Sequence
  Description of Artificial Sequence: Synthetic oligonucleotide
  Sense strand starting at position 1869 of SEQ ID NO: 1242986
acaggcaccucgggaaaua

SEQ ID NO: 1386743 - RNA, 19 nt, Artificial Sequence
  Description of Artificial Sequence: Synthetic oligonucleotide
  Antisense strand to SEQ ID NO: 1386742
uauuucccgaggugccugu

SEQ ID NO: 1386744 - RNA, 19 nt, Artificial Sequence
  Description of Artificial Sequence: Synthetic oligonucleotide
  Sense strand starting at position 2029 of SEQ ID NO: 1242986
aagaaagugucucagagaa

SEQ ID NO: 1386745 - RNA, 19 nt, Artificial Sequence
  Description of Artificial Sequence: Synthetic oligonucleotide
  Antisense strand to SEQ ID NO: 1386744
uucucugagacacuuucuu

SEQ ID NO: 1386746 - RNA, 19 nt, Artificial Sequence
  Description of Artificial Sequence: Synthetic oligonucleotide
  Sense strand starting at position 2031 of SEQ ID NO: 1242986
gaaagugucucagagaagc

SEQ ID NO: 1386747 - RNA, 19 nt, Artificial Sequence
  Description of Artificial Sequence: Synthetic oligonucleotide
  Antisense strand to SEQ ID NO: 1386746
gcuucucugagacacuuuc

SEQ ID NO: 1386748 - RNA, 19 nt, Artificial Sequence
  Description of Artificial Sequence: Synthetic oligonucleotide
  Sense strand starting at position 2221 of SEQ ID NO: 1242986
ccuugcugagugcgugaaa

SEQ ID NO: 1386749 - RNA, 19 nt, Artificial Sequence
  Description of Artificial Sequence: Synthetic oligonucleotide
  Antisense strand to SEQ ID NO: 1386748
uuucacgcacucagcaagg

SEQ ID NO: 1386750 - RNA, 19 nt, Artificial Sequence
  Description of Artificial Sequence: Synthetic oligonucleotide
  Sense strand starting at position 2676 of SEQ ID NO: 1242986
uguagaucuaccuguggga

SEQ ID NO: 1386751 - RNA, 19 nt, Artificial Sequence
  Description of Artificial Sequence: Synthetic oligonucleotide
  Antisense strand to SEQ ID NO: 1386750
ucccacagguagaucuaca

SEQ ID NO: 1386752 - RNA, 19 nt, Artificial Sequence
  Description of Artificial Sequence: Synthetic oligonucleotide
  Sense strand starting at position 2678 of SEQ ID NO: 1242986
uagaucuaccugugggaca

SEQ ID NO: 1386753 - RNA, 19 nt, Artificial Sequence
  Description of Artificial Sequence: Synthetic oligonucleotide
  Antisense strand to SEQ ID NO: 1386752
ugucccacagguagaucua

SEQ ID NO: 1386754 - RNA, 19 nt, Artificial Sequence
  Description of Artificial Sequence: Synthetic oligonucleotide
  Sense strand starting at position 2679 of SEQ ID NO: 1242986
agaucuaccugugggacaa

SEQ ID NO: 1386755 - RNA, 19 nt, Artificial Sequence
  Description of Artificial Sequence: Synthetic oligonucleotide
  Antisense strand to SEQ ID NO: 1386754
uugucccacagguagaucu

SEQ ID NO: 1386756 - RNA, 19 nt, Artificial Sequence
  Description of Artificial Sequence: Synthetic oligonucleotide
  Sense strand starting at position 3542 of SEQ ID NO: 1242986
accucauuguaccuuaagu

SEQ ID NO: 1386757 - RNA, 19 nt, Artificial Sequence
  Description of Artificial Sequence: Synthetic oligonucleotide
  Antisense strand to SEQ ID NO: 1386756
acuuaagguacaaugaggu

SEQ ID NO: 1386758 - RNA, 19 nt, Artificial Sequence
  Description of Artificial Sequence: Synthetic oligonucleotide
  Sense strand starting at position 3699 of SEQ ID NO: 1242986
gagaaaucuucccuugggu

SEQ ID NO: 1386759 - RNA, 19 nt, Artificial Sequence
  Description of Artificial Sequence: Synthetic oligonucleotide
  Antisense strand to SEQ ID NO: 1386758
acccaagggaagauuucuc

SEQ ID NO: 1386760 - RNA, 19 nt, Artificial Sequence
  Description of Artificial Sequence: Synthetic oligonucleotide
  Sense strand starting at position 3702 of SEQ ID NO: 1242986
aaaucuucccuugggugaa

SEQ ID NO: 1386761 - RNA, 19 nt, Artificial Sequence
  Description of Artificial Sequence: Synthetic oligonucleotide
  Antisense strand to SEQ ID NO: 1386760
uucacccaagggaagauuu

SEQ ID NO: 1386762 - RNA, 19 nt, Artificial Sequence
  Description of Artificial Sequence: Synthetic oligonucleotide
  Sense strand starting at position 3798 of SEQ ID NO: 1242986
uccagaucuuucccugagu

SEQ ID NO: 1386763 - RNA, 19 nt, Artificial Sequence
  Description of Artificial Sequence: Synthetic oligonucleotide
  Antisense strand to SEQ ID NO: 1386762
acucagggaaagaucugga

SEQ ID NO: 1386764 - RNA, 19 nt, Artificial Sequence
  Description of Artificial Sequence: Synthetic oligonucleotide
  Sense strand starting at position 3799 of SEQ ID NO: 1242986
ccagaucuuucccugagua

SEQ ID NO: 1386765 - RNA, 19 nt, Artificial Sequence
  Description of Artificial Sequence: Synthetic oligonucleotide
  Antisense strand to SEQ ID NO: 1386764
uacucagggaaagaucugg

SEQ ID NO: 1386766 - RNA, 19 nt, Artificial Sequence
  Description of Artificial Sequence: Synthetic oligonucleotide
  Sense strand starting at position 3801 of SEQ ID NO: 1242986
agaucuuucccugaguauc

SEQ ID NO: 1386767 - RNA, 19 nt, Artificial Sequence
  Description of Artificial Sequence: Synthetic oligonucleotide
  Antisense strand to SEQ ID NO: 1386766
gauacucagggaaagaucu

SEQ ID NO: 1386768 - RNA, 19 nt, Artificial Sequence
  Description of Artificial Sequence: Synthetic oligonucleotide
  Sense strand starting at position 3809 of SEQ ID NO: 1242986
cccugaguauccucugaau

SEQ ID NO: 1386769 - RNA, 19 nt, Artificial Sequence
  Description of Artificial Sequence: Synthetic oligonucleotide
  Antisense strand to SEQ ID NO: 1386768
auucagaggauacucaggg

SEQ ID NO: 1386770 - RNA, 19 nt, Artificial Sequence
  Description of Artificial Sequence: Synthetic oligonucleotide
  Sense strand starting at position 3811 of SEQ ID NO: 1242986
cugaguauccucugaauug

SEQ ID NO: 1386771 - RNA, 19 nt, Artificial Sequence
  Description of Artificial Sequence: Synthetic oligonucleotide
  Antisense strand to SEQ ID NO: 1386770
caauucagaggauacucag

SEQ ID NO: 1386772 - RNA, 19 nt, Artificial Sequence
  Description of Artificial Sequence: Synthetic oligonucleotide
  Sense strand starting at position 3812 of SEQ ID NO: 1242986
ugaguauccucugaauugu

SEQ ID NO: 1386773 - RNA, 19 nt, Artificial Sequence
  Description of Artificial Sequence: Synthetic oligonucleotide
  Antisense strand to SEQ ID NO: 1386772
acaauucagaggauacuca

SEQ ID NO: 1386774 - RNA, 19 nt, Artificial Sequence
  Description of Artificial Sequence: Synthetic oligonucleotide
  Sense strand starting at position 3821 of SEQ ID NO: 1242986
ucugaauuguagugggaga

SEQ ID NO: 1386775 - RNA, 19 nt, Artificial Sequence
  Description of Artificial Sequence: Synthetic oligonucleotide
  Antisense strand to SEQ ID NO: 1386774
ucucccacuacaauucaga

SEQ ID NO: 1386776 - RNA, 19 nt, Artificial Sequence
  Description of Artificial Sequence: Synthetic oligonucleotide
  Sense strand starting at position 3823 of SEQ ID NO: 1242986
ugaauuguagugggagaca

SEQ ID NO: 1386777 - RNA, 19 nt, Artificial Sequence
  Description of Artificial Sequence: Synthetic oligonucleotide
  Antisense strand to SEQ ID NO: 1386776
ugucucccacuacaauuca

SEQ ID NO: 1386778 - RNA, 19 nt, Artificial Sequence
  Description of Artificial Sequence: Synthetic oligonucleotide
  Sense strand starting at position 3931 of SEQ ID NO: 1242986
gaagacaucuugggaucca

SEQ ID NO: 1386779 - RNA, 19 nt, Artificial Sequence
  Description of Artificial Sequence: Synthetic oligonucleotide
  Antisense strand to SEQ ID NO: 1386778
uggaucccaagaugucuuc

SEQ ID NO: 1386780 - RNA, 19 nt, Artificial Sequence
  Description of Artificial Sequence: Synthetic oligonucleotide
  Sense strand starting at position 3976 of SEQ ID NO: 1242986
uagcuuuauggugaugcaa

SEQ ID NO: 1386781 - RNA, 19 nt, Artificial Sequence
  Description of Artificial Sequence: Synthetic oligonucleotide
  Antisense strand to SEQ ID NO: 1386780
uugcaucaccauaaagcua

SEQ ID NO: 1386782 - RNA, 19 nt, Artificial Sequence
  Description of Artificial Sequence: Synthetic oligonucleotide
  Sense strand starting at position 161 of SEQ ID NO: 1242987
ggaaguucauggucaggca

SEQ ID NO: 1386783 - RNA, 19 nt, Artificial Sequence
  Description of Artificial Sequence: Synthetic oligonucleotide
  Antisense strand to SEQ ID NO: 1386782
ugccugaccaugaacuucc

SEQ ID NO: 1386784 - RNA, 19 nt, Artificial Sequence
  Description of Artificial Sequence: Synthetic oligonucleotide
  Sense strand starting at position 306 of SEQ ID NO: 1242987
ccaccauggcccuggaaau

SEQ ID NO: 1386785 - RNA, 19 nt, Artificial Sequence
  Description of Artificial Sequence: Synthetic oligonucleotide
  Antisense strand to SEQ ID NO: 1386784
auuuccagggccauggugg

SEQ ID NO: 1386786 - RNA, 19 nt, Artificial Sequence
  Description of Artificial Sequence: Synthetic oligonucleotide
  Sense strand starting at position 316 of SEQ ID NO: 1242987
ccuggaaauuaguaaauua

SEQ ID NO: 1386787 - RNA, 19 nt, Artificial Sequence
  Description of Artificial Sequence: Synthetic oligonucleotide
  Antisense strand to SEQ ID NO: 1386786
uaauuuacuaauuuccagg

SEQ ID NO: 1386788 - RNA, 19 nt, Artificial Sequence
  Description of Artificial Sequence: Synthetic oligonucleotide
  Sense strand starting at position 324 of SEQ ID NO: 1242987
uuaguaaauuagucccgua

SEQ ID NO: 1386789 - RNA, 19 nt, Artificial Sequence
  Description of Artificial Sequence: Synthetic oligonucleotide
  Antisense strand to SEQ ID NO: 1386788
uacgggacuaauuuacuaa

SEQ ID NO: 1386790 - RNA, 19 nt, Artificial Sequence
  Description of Artificial Sequence: Synthetic oligonucleotide
  Sense strand starting at position 339 of SEQ ID NO: 1242987
cguaauucucaugagugag

SEQ ID NO: 1386791 - RNA, 19 nt, Artificial Sequence
  Description of Artificial Sequence: Synthetic oligonucleotide
  Antisense strand to SEQ ID NO: 1386790
cucacucaugagaauuacg

SEQ ID NO: 1386792 - RNA, 19 nt, Artificial Sequence
  Description of Artificial Sequence: Synthetic oligonucleotide
  Sense strand starting at position 401 of SEQ ID NO: 1242987
gcccuuggcccagaguauu

SEQ ID NO: 1386793 - RNA, 19 nt, Artificial Sequence
  Description of Artificial Sequence: Synthetic oligonucleotide
  Antisense strand to SEQ ID NO: 1386792
aauacucugggccaagggc

SEQ ID NO: 1386794 - RNA, 19 nt, Artificial Sequence
  Description of Artificial Sequence: Synthetic oligonucleotide
  Sense strand starting at position 502 of SEQ ID NO: 1242987
uccacagaguuguccagaa

SEQ ID NO: 1386795 - RNA, 19 nt, Artificial Sequence
  Description of Artificial Sequence: Synthetic oligonucleotide
  Antisense strand to SEQ ID NO: 1386794
uucuggacaacucugugga

SEQ ID NO: 1386796 - RNA, 19 nt, Artificial Sequence
  Description of Artificial Sequence: Synthetic oligonucleotide
  Sense strand starting at position 590 of SEQ ID NO: 1242987
cagggaugggucuguuaac

SEQ ID NO: 1386797 - RNA, 19 nt, Artificial Sequence
  Description of Artificial Sequence: Synthetic oligonucleotide
  Antisense strand to SEQ ID NO: 1386796
guuaacagacccaucccug

SEQ ID NO: 1386798 - RNA, 19 nt, Artificial Sequence
  Description of Artificial Sequence: Synthetic oligonucleotide
  Sense strand starting at position 591 of SEQ ID NO: 1242987
agggaugggucuguuaacu

SEQ ID NO: 1386799 - RNA, 19 nt, Artificial Sequence
  Description of Artificial Sequence: Synthetic oligonucleotide
  Antisense strand to SEQ ID NO: 1386798
aguuaacagacccaucccu

SEQ ID NO: 1386800 - RNA, 19 nt, Artificial Sequence
  Description of Artificial Sequence: Synthetic oligonucleotide
  Sense strand starting at position 599 of SEQ ID NO: 1242987
gucuguuaacuuggugaau

SEQ ID NO: 1386801 - RNA, 19 nt, Artificial Sequence
  Description of Artificial Sequence: Synthetic oligonucleotide
  Antisense strand to SEQ ID NO: 1386800
auucaccaaguuaacagac

SEQ ID NO: 1386802 - RNA, 19 nt, Artificial Sequence
  Description of Artificial Sequence: Synthetic oligonucleotide
  Sense strand starting at position 600 of SEQ ID NO: 1242987
ucuguuaacuuggugaaua

SEQ ID NO: 1386803 - RNA, 19 nt, Artificial Sequence
  Description of Artificial Sequence: Synthetic oligonucleotide
  Antisense strand to SEQ ID NO: 1386802
uauucaccaaguuaacaga

SEQ ID NO: 1386804 - RNA, 19 nt, Artificial Sequence
  Description of Artificial Sequence: Synthetic oligonucleotide
  Sense strand starting at position 642 of SEQ ID NO: 1242987
cuaguuaguugguuuaugu

SEQ ID NO: 1386805 - RNA, 19 nt, Artificial Sequence
  Description of Artificial Sequence: Synthetic oligonucleotide
  Antisense strand to SEQ ID NO: 1386804
acauaaaccaacuaacuag

SEQ ID NO: 1386806 - RNA, 19 nt, Artificial Sequence
  Description of Artificial Sequence: Synthetic oligonucleotide
  Sense strand starting at position 649 of SEQ ID NO: 1242987
guugguuuaugugcauuua

SEQ ID NO: 1386807 - RNA, 19 nt, Artificial Sequence
  Description of Artificial Sequence: Synthetic oligonucleotide
  Antisense strand to SEQ ID NO: 1386806
uaaaugcacauaaaccaac

SEQ ID NO: 1386808 - RNA, 19 nt, Artificial Sequence
  Description of Artificial Sequence: Synthetic oligonucleotide
  Sense strand starting at position 903 of SEQ ID NO: 1242987
gaugcagugaccugagaug

SEQ ID NO: 1386809 - RNA, 19 nt, Artificial Sequence
  Description of Artificial Sequence: Synthetic oligonucleotide
  Antisense strand to SEQ ID NO: 1386808
caucucaggucacugcauc

SEQ ID NO: 1386810 - RNA, 19 nt, Artificial Sequence
  Description of Artificial Sequence: Synthetic oligonucleotide
  Sense strand starting at position 1021 of SEQ ID NO: 1242987
aucccaccugcaugagaaa

SEQ ID NO: 1386811 - RNA, 19 nt, Artificial Sequence
  Description of Artificial Sequence: Synthetic oligonucleotide
  Antisense strand to SEQ ID NO: 1386810
uuucucaugcaggugggau

SEQ ID NO: 1386812 - RNA, 19 nt, Artificial Sequence
  Description of Artificial Sequence: Synthetic oligonucleotide
  Sense strand starting at position 1513 of SEQ ID NO: 1242987
ccaaccauuugagaaugua

SEQ ID NO: 1386813 - RNA, 19 nt, Artificial Sequence
  Description of Artificial Sequence: Synthetic oligonucleotide
  Antisense strand to SEQ ID NO: 1386812
uacauucucaaaugguugg

SEQ ID NO: 1386814 - RNA, 19 nt, Artificial Sequence
  Description of Artificial Sequence: Synthetic oligonucleotide
  Sense strand starting at position 1525 of SEQ ID NO: 1242987
gaauguagguuugucaauu

SEQ ID NO: 1386815 - RNA, 19 nt, Artificial Sequence
  Description of Artificial Sequence: Synthetic oligonucleotide
  Antisense strand to SEQ ID NO: 1386814
aauugacaaaccuacauuc

SEQ ID NO: 1386816 - RNA, 19 nt, Artificial Sequence
  Description of Artificial Sequence: Synthetic oligonucleotide
  Sense strand starting at position 1568 of SEQ ID NO: 1242987
agagaagugacuugcuuua

SEQ ID NO: 1386817 - RNA, 19 nt, Artificial Sequence
  Description of Artificial Sequence: Synthetic oligonucleotide
  Antisense strand to SEQ ID NO: 1386816
uaaagcaagucacuucucu

SEQ ID NO: 1386818 - RNA, 19 nt, Artificial Sequence
  Description of Artificial Sequence: Synthetic oligonucleotide
  Sense strand starting at position 1570 of SEQ ID NO: 1242987
agaagugacuugcuuuaug

SEQ ID NO: 1386819 - RNA, 19 nt, Artificial Sequence
  Description of Artificial Sequence: Synthetic oligonucleotide
  Antisense strand to SEQ ID NO: 1386818
cauaaagcaagucacuucu

SEQ ID NO: 1386820 - RNA, 19 nt, Artificial Sequence
  Description of Artificial Sequence: Synthetic oligonucleotide
  Sense strand starting at position 1573 of SEQ ID NO: 1242987
agugacuugcuuuaugguu

SEQ ID NO: 1386821 - RNA, 19 nt, Artificial Sequence
  Description of Artificial Sequence: Synthetic oligonucleotide
  Antisense strand to SEQ ID NO: 1386820
aaccauaaagcaagucacu

SEQ ID NO: 1386822 - RNA, 19 nt, Artificial Sequence
  Description of Artificial Sequence: Synthetic oligonucleotide
  Sense strand starting at position 1653 of SEQ ID NO: 1242987
gcagacaguucugcugaga

SEQ ID NO: 1386823 - RNA, 19 nt, Artificial Sequence
  Description of Artificial Sequence: Synthetic oligonucleotide
  Antisense strand to SEQ ID NO: 1386822
ucucagcagaacugucugc

SEQ ID NO: 1386824 - RNA, 19 nt, Artificial Sequence
  Description of Artificial Sequence: Synthetic oligonucleotide
  Sense strand starting at position 1656 of SEQ ID NO: 1242987
gacaguucugcugagauau

SEQ ID NO: 1386825 - RNA, 19 nt, Artificial Sequence
  Description of Artificial Sequence: Synthetic oligonucleotide
  Antisense strand to SEQ ID NO: 1386824
auaucucagcagaacuguc

SEQ ID NO: 1386826 - RNA, 19 nt, Artificial Sequence
  Description of Artificial Sequence: Synthetic oligonucleotide
  Sense strand starting at position 1670 of SEQ ID NO: 1242987
gauauacuucucugaggca

SEQ ID NO: 1386827 - RNA, 19 nt, Artificial Sequence
  Description of Artificial Sequence: Synthetic oligonucleotide
  Antisense strand to SEQ ID NO: 1386826
ugccucagagaaguauauc

SEQ ID NO: 1386828 - RNA, 19 nt, Artificial Sequence
  Description of Artificial Sequence: Synthetic oligonucleotide
  Sense strand starting at position 1708 of SEQ ID NO: 1242987
ugggacugucuuugucaag

SEQ ID NO: 1386829 - RNA, 19 nt, Artificial Sequence
  Description of Artificial Sequence: Synthetic oligonucleotide
  Antisense strand to SEQ ID NO: 1386828
cuugacaaagacaguccca

SEQ ID NO: 1386830 - RNA, 19 nt, Artificial Sequence
  Description of Artificial Sequence: Synthetic oligonucleotide
  Sense strand starting at position 1709 of SEQ ID NO: 1242987
gggacugucuuugucaagu

SEQ ID NO: 1386831 - RNA, 19 nt, Artificial Sequence
  Description of Artificial Sequence: Synthetic oligonucleotide
  Antisense strand to SEQ ID NO: 1386830
acuugacaaagacaguccc

SEQ ID NO: 1386832 - RNA, 19 nt, Artificial Sequence
  Description of Artificial Sequence: Synthetic oligonucleotide
  Sense strand starting at position 2086 of SEQ ID NO: 1242987
ugccuuggacugugaagua

SEQ ID NO: 1386833 - RNA, 19 nt, Artificial Sequence
  Description of Artificial Sequence: Synthetic oligonucleotide
  Antisense strand to SEQ ID NO: 1386832
uacuucacaguccaaggca

SEQ ID NO: 1386834 - RNA, 19 nt, Artificial Sequence
  Description of Artificial Sequence: Synthetic oligonucleotide
  Sense strand starting at position 2208 of SEQ ID NO: 1242987
ggcagcuuggacuguucua

SEQ ID NO: 1386835 - RNA, 19 nt, Artificial Sequence
  Description of Artificial Sequence: Synthetic oligonucleotide
  Antisense strand to SEQ ID NO: 1386834
uagaacaguccaagcugcc

SEQ ID NO: 1386836 - RNA, 19 nt, Artificial Sequence
  Description of Artificial Sequence: Synthetic oligonucleotide
  Sense strand starting at position 2251 of SEQ ID NO: 1242987
gaacacucggccuagacaa

SEQ ID NO: 1386837 - RNA, 19 nt, Artificial Sequence
  Description of Artificial Sequence: Synthetic oligonucleotide
  Antisense strand to SEQ ID NO: 1386836
uugucuaggccgaguguuc

SEQ ID NO: 1386838 - RNA, 19 nt, Artificial Sequence
  Description of Artificial Sequence: Synthetic oligonucleotide
  Sense strand starting at position 2359 of SEQ ID NO: 1242987
cucucuugaggccaagagu

SEQ ID NO: 1386839 - RNA, 19 nt, Artificial Sequence
  Description of Artificial Sequence: Synthetic oligonucleotide
  Antisense strand to SEQ ID NO: 1386838
acucuuggccucaagagag

SEQ ID NO: 1386840 - RNA, 19 nt, Artificial Sequence
  Description of Artificial Sequence: Synthetic oligonucleotide
  Sense strand starting at position 2485 of SEQ ID NO: 1242987
gagugaugugguggugacu

SEQ ID NO: 1386841 - RNA, 19 nt, Artificial Sequence
  Description of Artificial Sequence: Synthetic oligonucleotide
  Antisense strand to SEQ ID NO: 1386840
agucaccaccacaucacuc

SEQ ID NO: 1386842 - RNA, 19 nt, Artificial Sequence
  Description of Artificial Sequence: Synthetic oligonucleotide
  Sense strand starting at position 2543 of SEQ ID NO: 1242987
ggguccauuagguggaaga

SEQ ID NO: 1386843 - RNA, 19 nt, Artificial Sequence
  Description of Artificial Sequence: Synthetic oligonucleotide
  Antisense strand to SEQ ID NO: 1386842
ucuuccaccuaauggaccc

SEQ ID NO: 1386844 - RNA, 19 nt, Artificial Sequence
  Description of Artificial Sequence: Synthetic oligonucleotide
  Sense strand starting at position 2544 of SEQ ID NO: 1242987
gguccauuagguggaagaa

SEQ ID NO: 1386845 - RNA, 19 nt, Artificial Sequence
  Description of Artificial Sequence: Synthetic oligonucleotide
  Antisense strand to SEQ ID NO: 1386844
uucuuccaccuaauggacc

SEQ ID NO: 1386846 - RNA, 19 nt, Artificial Sequence
  Description of Artificial Sequence: Synthetic oligonucleotide
  Sense strand starting at position 3043 of SEQ ID NO: 1242987
acagacgucucccuauguu

SEQ ID NO: 1386847 - RNA, 19 nt, Artificial Sequence
  Description of Artificial Sequence: Synthetic oligonucleotide
  Antisense strand to SEQ ID NO: 1386846
aacauagggagacgucugu

SEQ ID NO: 1386848 - RNA, 19 nt, Artificial Sequence
  Description of Artificial Sequence: Synthetic oligonucleotide
  Sense strand starting at position 3150 of SEQ ID NO: 1242987
ccuggccuuggguaagauu

SEQ ID NO: 1386849 - RNA, 19 nt, Artificial Sequence
  Description of Artificial Sequence: Synthetic oligonucleotide
  Antisense strand to SEQ ID NO: 1386848
aaucuuacccaaggccagg

SEQ ID NO: 1386850 - RNA, 19 nt, Artificial Sequence
  Description of Artificial Sequence: Synthetic oligonucleotide
  Sense strand starting at position 3284 of SEQ ID NO: 1242987
agcucaugccuguaguuau

SEQ ID NO: 1386851 - RNA, 19 nt, Artificial Sequence
  Description of Artificial Sequence: Synthetic oligonucleotide
  Antisense strand to SEQ ID NO: 1386850
auaacuacaggcaugagcu

SEQ ID NO: 1386852 - RNA, 19 nt, Artificial Sequence
  Description of Artificial Sequence: Synthetic oligonucleotide
  Sense strand starting at position 3356 of SEQ ID NO: 1242987
ugcacuaagcuaugaccaa

SEQ ID NO: 1386853 - RNA, 19 nt, Artificial Sequence
  Description of Artificial Sequence: Synthetic oligonucleotide
  Antisense strand to SEQ ID NO: 1386852
uuggucauagcuuagugca

SEQ ID NO: 1386854 - RNA, 19 nt, Artificial Sequence
  Description of Artificial Sequence: Synthetic oligonucleotide
  Sense strand starting at position 3538 of SEQ ID NO: 1242987
aggaccuguccugguguaa

SEQ ID NO: 1386855 - RNA, 19 nt, Artificial Sequence
  Description of Artificial Sequence: Synthetic oligonucleotide
  Antisense strand to SEQ ID NO: 1386854
uuacaccaggacagguccu

SEQ ID NO: 1386856 - RNA, 19 nt, Artificial Sequence
  Description of Artificial Sequence: Synthetic oligonucleotide
  Sense strand starting at position 3696 of SEQ ID NO: 1242987
auagcaggcuuccugauuu

SEQ ID NO: 1386857 - RNA, 19 nt, Artificial Sequence
  Description of Artificial Sequence: Synthetic oligonucleotide
  Antisense strand to SEQ ID NO: 1386856
aaaucaggaagccugcuau

SEQ ID NO: 1386858 - RNA, 19 nt, Artificial Sequence
  Description of Artificial Sequence: Synthetic oligonucleotide
  Sense strand starting at position 3764 of SEQ ID NO: 1242987
ggagaacggcuguguucaa

SEQ ID NO: 1386859 - RNA, 19 nt, Artificial Sequence
  Description of Artificial Sequence: Synthetic oligonucleotide
  Antisense strand to SEQ ID NO: 1386858
uugaacacagccguucucc

SEQ ID NO: 1386860 - RNA, 19 nt, Artificial Sequence
  Description of Artificial Sequence: Synthetic oligonucleotide
  Sense strand starting at position 3831 of SEQ ID NO: 1242987
agcacagaauccuggauuu

SEQ ID NO: 1386861 - RNA, 19 nt, Artificial Sequence
  Description of Artificial Sequence: Synthetic oligonucleotide
  Antisense strand to SEQ ID NO: 1386860
aaauccaggauucugugcu

SEQ ID NO: 1386862 - RNA, 19 nt, Artificial Sequence
  Description of Artificial Sequence: Synthetic oligonucleotide
  Sense strand starting at position 788 of SEQ ID NO: 1242988
ccugacuucucacgaacuu

SEQ ID NO: 1386863 - RNA, 19 nt, Artificial Sequence
  Description of Artificial Sequence: Synthetic oligonucleotide
  Antisense strand to SEQ ID NO: 1386862
aaguucgugagaagucagg

SEQ ID NO: 1386864 - RNA, 19 nt, Artificial Sequence
  Description of Artificial Sequence: Synthetic oligonucleotide
  Sense strand starting at position 789 of SEQ ID NO: 1242988
cugacuucucacgaacuua

SEQ ID NO: 1386865 - RNA, 19 nt, Artificial Sequence
  Description of Artificial Sequence: Synthetic oligonucleotide
  Antisense strand to SEQ ID NO: 1386864
uaaguucgugagaagucag

SEQ ID NO: 1386866 - RNA, 19 nt, Artificial Sequence
  Description of Artificial Sequence: Synthetic oligonucleotide
  Sense strand starting at position 1253 of SEQ ID NO: 1242988
ggcuuauaguuucguucag

SEQ ID NO: 1386867 - RNA, 19 nt, Artificial Sequence
  Description of Artificial Sequence: Synthetic oligonucleotide
  Antisense strand to SEQ ID NO: 1386866
cugaacgaaacuauaagcc

SEQ ID NO: 1386868 - RNA, 19 nt, Artificial Sequence
  Description of Artificial Sequence: Synthetic oligonucleotide
  Sense strand starting at position 1254 of SEQ ID NO: 1242988
gcuuauaguuucguucagu

SEQ ID NO: 1386869 - RNA, 19 nt, Artificial Sequence
  Description of Artificial Sequence: Synthetic oligonucleotide
  Antisense strand to SEQ ID NO: 1386868
acugaacgaaacuauaagc

SEQ ID NO: 1386870 - RNA, 19 nt, Artificial Sequence
  Description of Artificial Sequence: Synthetic oligonucleotide
  Sense strand starting at position 1255 of SEQ ID NO: 1242988
cuuauaguuucguucagug

SEQ ID NO: 1386871 - RNA, 19 nt, Artificial Sequence
  Description of Artificial Sequence: Synthetic oligonucleotide
  Antisense strand to SEQ ID NO: 1386870
cacugaacgaaacuauaag

SEQ ID NO: 1386872 - RNA, 19 nt, Artificial Sequence
  Description of Artificial Sequence: Synthetic oligonucleotide
  Sense strand starting at position 1423 of SEQ ID NO: 1242988
augacuuguuuggcugcaa

SEQ ID NO: 1386873 - RNA, 19 nt, Artificial Sequence
  Description of Artificial Sequence: Synthetic oligonucleotide
  Antisense strand to SEQ ID NO: 1386872
uugcagccaaacaagucau

SEQ ID NO: 1386874 - RNA, 19 nt, Artificial Sequence
  Description of Artificial Sequence: Synthetic oligonucleotide
  Sense strand starting at position 2020 of SEQ ID NO: 1242988
guaaguccgucgccuuaau

SEQ ID NO: 1386875 - RNA, 19 nt, Artificial Sequence
  Description of Artificial Sequence: Synthetic oligonucleotide
  Antisense strand to SEQ ID NO: 1386874
auuaaggcgacggacuuac

SEQ ID NO: 1386876 - RNA, 19 nt, Artificial Sequence
  Description of Artificial Sequence: Synthetic oligonucleotide
  Sense strand starting at position 2158 of SEQ ID NO: 1242988
ggugccaacuuagaugaua

SEQ ID NO: 1386877 - RNA, 19 nt, Artificial Sequence
  Description of Artificial Sequence: Synthetic oligonucleotide
  Antisense strand to SEQ ID NO: 1386876
uaucaucuaaguuggcacc

SEQ ID NO: 1386878 - RNA, 19 nt, Artificial Sequence
  Description of Artificial Sequence: Synthetic oligonucleotide
  Sense strand starting at position 2935 of SEQ ID NO: 1242988
ugcugcucguguccgauua

SEQ ID NO: 1386879 - RNA, 19 nt, Artificial Sequence
  Description of Artificial Sequence: Synthetic oligonucleotide
  Antisense strand to SEQ ID NO: 1386878
uaaucggacacgagcagca

SEQ ID NO: 1386880 - RNA, 19 nt, Artificial Sequence
  Description of Artificial Sequence: Synthetic oligonucleotide
  Sense strand starting at position 2936 of SEQ ID NO: 1242988
gcugcucguguccgauuaa

SEQ ID NO: 1386881 - RNA, 19 nt, Artificial Sequence
  Description of Artificial Sequence: Synthetic oligonucleotide
  Antisense strand to SEQ ID NO: 1386880
uuaaucggacacgagcagc

SEQ ID NO: 1386882 - RNA, 19 nt, Artificial Sequence
  Description of Artificial Sequence: Synthetic oligonucleotide
  Sense strand starting at position 2937 of SEQ ID NO: 1242988
cugcucguguccgauuaau

SEQ ID NO: 1386883 - RNA, 19 nt, Artificial Sequence
  Description of Artificial Sequence: Synthetic oligonucleotide
  Antisense strand to SEQ ID NO: 1386882
auuaaucggacacgagcag

SEQ ID NO: 1386884 - RNA, 19 nt, Artificial Sequence
  Description of Artificial Sequence: Synthetic oligonucleotide
  Sense strand starting at position 2939 of SEQ ID NO: 1242988
gcucguguccgauuaaucc

SEQ ID NO: 1386885 - RNA, 19 nt, Artificial Sequence
  Description of Artificial Sequence: Synthetic oligonucleotide
  Antisense strand to SEQ ID NO: 1386884
ggauuaaucggacacgagc

SEQ ID NO: 1386886 - RNA, 19 nt, Artificial Sequence
  Description of Artificial Sequence: Synthetic oligonucleotide
  Sense strand starting at position 3002 of SEQ ID NO: 1242988
uaugguuaguguggucaga

SEQ ID NO: 1386887 - RNA, 19 nt, Artificial Sequence
  Description of Artificial Sequence: Synthetic oligonucleotide
  Antisense strand to SEQ ID NO: 1386886
ucugaccacacuaaccaua

SEQ ID NO: 1386888 - RNA, 19 nt, Artificial Sequence
  Description of Artificial Sequence: Synthetic oligonucleotide
  Sense strand starting at position 3095 of SEQ ID NO: 1242988
gcccucaugucugcauaca

SEQ ID NO: 1386889 - RNA, 19 nt, Artificial Sequence
  Description of Artificial Sequence: Synthetic oligonucleotide
  Antisense strand to SEQ ID NO: 1386888
uguaugcagacaugagggc

SEQ ID NO: 1386890 - RNA, 19 nt, Artificial Sequence
  Description of Artificial Sequence: Synthetic oligonucleotide
  Sense strand starting at position 382 of SEQ ID NO: 1242989
cccagugaccuuugaagag

SEQ ID NO: 1386891 - RNA, 19 nt, Artificial Sequence
  Description of Artificial Sequence: Synthetic oligonucleotide
  Antisense strand to SEQ ID NO: 1386890
cucuucaaaggucacuggg

SEQ ID NO: 1386892 - RNA, 19 nt, Artificial Sequence
  Description of Artificial Sequence: Synthetic oligonucleotide
  Sense strand starting at position 461 of SEQ ID NO: 1242989
acgucugucuuccugcaga

SEQ ID NO: 1386893 - RNA, 19 nt, Artificial Sequence
  Description of Artificial Sequence: Synthetic oligonucleotide
  Antisense strand to SEQ ID NO: 1386892
ucugcaggaagacagacgu

SEQ ID NO: 1386894 - RNA, 19 nt, Artificial Sequence
  Description of Artificial Sequence: Synthetic oligonucleotide
  Sense strand starting at position 543 of SEQ ID NO: 1242989
augagugcuagugagugaa

SEQ ID NO: 1386895 - RNA, 19 nt, Artificial Sequence
  Description of Artificial Sequence: Synthetic oligonucleotide
  Antisense strand to SEQ ID NO: 1386894
uucacucacuagcacucau

SEQ ID NO: 1386896 - RNA, 19 nt, Artificial Sequence
  Description of Artificial Sequence: Synthetic oligonucleotide
  Sense strand starting at position 546 of SEQ ID NO: 1242989
agugcuagugagugaauga

SEQ ID NO: 1386897 - RNA, 19 nt, Artificial Sequence
  Description of Artificial Sequence: Synthetic oligonucleotide
  Antisense strand to SEQ ID NO: 1386896
ucauucacucacuagcacu

SEQ ID NO: 1386898 - RNA, 19 nt, Artificial Sequence
  Description of Artificial Sequence: Synthetic oligonucleotide
  Sense strand starting at position 557 of SEQ ID NO: 1242989
gugaaugaguggcuuagca

SEQ ID NO: 1386899 - RNA, 19 nt, Artificial Sequence
  Description of Artificial Sequence: Synthetic oligonucleotide
  Antisense strand to SEQ ID NO: 1386898
ugcuaagccacucauucac

SEQ ID NO: 1386900 - RNA, 19 nt, Artificial Sequence
  Description of Artificial Sequence: Synthetic oligonucleotide
  Sense strand starting at position 601 of SEQ ID NO: 1242989
cuagccgaguucuaagaaa

SEQ ID NO: 1386901 - RNA, 19 nt, Artificial Sequence
  Description of Artificial Sequence: Synthetic oligonucleotide
  Antisense strand to SEQ ID NO: 1386900
uuucuuagaacucggcuag

SEQ ID NO: 1386902 - RNA, 19 nt, Artificial Sequence
  Description of Artificial Sequence: Synthetic oligonucleotide
  Sense strand starting at position 689 of SEQ ID NO: 1242989
cccauuggacuuugggauu

SEQ ID NO: 1386903 - RNA, 19 nt, Artificial Sequence
  Description of Artificial Sequence: Synthetic oligonucleotide
  Antisense strand to SEQ ID NO: 1386902
aaucccaaaguccaauggg

SEQ ID NO: 1386904 - RNA, 19 nt, Artificial Sequence
  Description of Artificial Sequence: Synthetic oligonucleotide
  Sense strand starting at position 895 of SEQ ID NO: 1242989
cuugcuuaagucuaagaaa

SEQ ID NO: 1386905 - RNA, 19 nt, Artificial Sequence
  Description of Artificial Sequence: Synthetic oligonucleotide
  Antisense strand to SEQ ID NO: 1386904
uuucuuagacuuaagcaag

SEQ ID NO: 1386906 - RNA, 19 nt, Artificial Sequence
  Description of Artificial Sequence: Synthetic oligonucleotide
  Sense strand starting at position 898 of SEQ ID NO: 1242989
gcuuaagucuaagaaaucc

SEQ ID NO: 1386907 - RNA, 19 nt, Artificial Sequence
  Description of Artificial Sequence: Synthetic oligonucleotide
  Antisense strand to SEQ ID NO: 1386906
ggauuucuuagacuuaagc

SEQ ID NO: 1386908 - RNA, 19 nt, Artificial Sequence
  Description of Artificial Sequence: Synthetic oligonucleotide
  Sense strand starting at position 1070 of SEQ ID NO: 1242989
aucagauuccuggguuuac

SEQ ID NO: 1386909 - RNA, 19 nt, Artificial Sequence
  Description of Artificial Sequence: Synthetic oligonucleotide
  Antisense strand to SEQ ID NO: 1386908
guaaacccaggaaucugau

SEQ ID NO: 1386910 - RNA, 19 nt, Artificial Sequence
  Description of Artificial Sequence: Synthetic oligonucleotide
  Sense strand starting at position 1071 of SEQ ID NO: 1242989
ucagauuccuggguuuacu

SEQ ID NO: 1386911 - RNA, 19 nt, Artificial Sequence
  Description of Artificial Sequence: Synthetic oligonucleotide
  Antisense strand to SEQ ID NO: 1386910
aguaaacccaggaaucuga

SEQ ID NO: 1386912 - RNA, 19 nt, Artificial Sequence
  Description of Artificial Sequence: Synthetic oligonucleotide
  Sense strand starting at position 1132 of SEQ ID NO: 1242989
agcaaaucucccggagauu

SEQ ID NO: 1386913 - RNA, 19 nt, Artificial Sequence
  Description of Artificial Sequence: Synthetic oligonucleotide
  Antisense strand to SEQ ID NO: 1386912
aaucuccgggagauuugcu

SEQ ID NO: 1386914 - RNA, 19 nt, Artificial Sequence
  Description of Artificial Sequence: Synthetic oligonucleotide
  Sense strand starting at position 1133 of SEQ ID NO: 1242989
gcaaaucucccggagauuc

SEQ ID NO: 1386915 - RNA, 19 nt, Artificial Sequence
  Description of Artificial Sequence: Synthetic oligonucleotide
  Antisense strand to SEQ ID NO: 1386914
gaaucuccgggagauuugc

SEQ ID NO: 1386916 - RNA, 19 nt, Artificial Sequence
  Description of Artificial Sequence: Synthetic oligonucleotide
  Sense strand starting at position 1143 of SEQ ID NO: 1242989
cggagauucugguuauugu

SEQ ID NO: 1386917 - RNA, 19 nt, Artificial Sequence
  Description of Artificial Sequence: Synthetic oligonucleotide
  Antisense strand to SEQ ID NO: 1386916
acaauaaccagaaucuccg

SEQ ID NO: 1386918 - RNA, 19 nt, Artificial Sequence
  Description of Artificial Sequence: Synthetic oligonucleotide
  Sense strand starting at position 1144 of SEQ ID NO: 1242989
ggagauucugguuauugug

SEQ ID NO: 1386919 - RNA, 19 nt, Artificial Sequence
  Description of Artificial Sequence: Synthetic oligonucleotide
  Antisense strand to SEQ ID NO: 1386918
cacaauaaccagaaucucc

SEQ ID NO: 1386920 - RNA, 19 nt, Artificial Sequence
  Description of Artificial Sequence: Synthetic oligonucleotide
  Sense strand starting at position 1164 of SEQ ID NO: 1242989
gggcuccucaaacgugauu

SEQ ID NO: 1386921 - RNA, 19 nt, Artificial Sequence
  Description of Artificial Sequence: Synthetic oligonucleotide
  Antisense strand to SEQ ID NO: 1386920
aaucacguuugaggagccc

SEQ ID NO: 1386922 - RNA, 19 nt, Artificial Sequence
  Description of Artificial Sequence: Synthetic oligonucleotide
  Sense strand starting at position 1166 of SEQ ID NO: 1242989
gcuccucaaacgugauuga

SEQ ID NO: 1386923 - RNA, 19 nt, Artificial Sequence
  Description of Artificial Sequence: Synthetic oligonucleotide
  Antisense strand to SEQ ID NO: 1386922
ucaaucacguuugaggagc

SEQ ID NO: 1386924 - RNA, 19 nt, Artificial Sequence
  Description of Artificial Sequence: Synthetic oligonucleotide
  Sense strand starting at position 1170 of SEQ ID NO: 1242989
cucaaacgugauugagaga

SEQ ID NO: 1386925 - RNA, 19 nt, Artificial Sequence
  Description of Artificial Sequence: Synthetic oligonucleotide
  Antisense strand to SEQ ID NO: 1386924
ucucucaaucacguuugag

SEQ ID NO: 1386926 - RNA, 19 nt, Artificial Sequence
  Description of Artificial Sequence: Synthetic oligonucleotide
  Sense strand starting at position 1300 of SEQ ID NO: 1242989
gugaccucaucuguacaau

SEQ ID NO: 1386927 - RNA, 19 nt, Artificial Sequence
  Description of Artificial Sequence: Synthetic oligonucleotide
  Antisense strand to SEQ ID NO: 1386926
auuguacagaugaggucac

SEQ ID NO: 1386928 - RNA, 19 nt, Artificial Sequence
  Description of Artificial Sequence: Synthetic oligonucleotide
  Sense strand starting at position 1301 of SEQ ID NO: 1242989
ugaccucaucuguacaaug

SEQ ID NO: 1386929 - RNA, 19 nt, Artificial Sequence
  Description of Artificial Sequence: Synthetic oligonucleotide
  Antisense strand to SEQ ID NO: 1386928
cauuguacagaugagguca

SEQ ID NO: 1386930 - RNA, 19 nt, Artificial Sequence
  Description of Artificial Sequence: Synthetic oligonucleotide
  Sense strand starting at position 1312 of SEQ ID NO: 1242989
guacaauguccaugacgca

SEQ ID NO: 1386931 - RNA, 19 nt, Artificial Sequence
  Description of Artificial Sequence: Synthetic oligonucleotide
  Antisense strand to SEQ ID NO: 1386930
ugcgucauggacauuguac

SEQ ID NO: 1386932 - RNA, 19 nt, Artificial Sequence
  Description of Artificial Sequence: Synthetic oligonucleotide
  Sense strand starting at position 1346 of SEQ ID NO: 1242989
agaaguuagugggagguuu

SEQ ID NO: 1386933 - RNA, 19 nt, Artificial Sequence
  Description of Artificial Sequence: Synthetic oligonucleotide
  Antisense strand to SEQ ID NO: 1386932
aaaccucccacuaacuucu

SEQ ID NO: 1386934 - RNA, 19 nt, Artificial Sequence
  Description of Artificial Sequence: Synthetic oligonucleotide
  Sense strand starting at position 1394 of SEQ ID NO: 1242989
ccagucaaugaucgcgauu

SEQ ID NO: 1386935 - RNA, 19 nt, Artificial Sequence
  Description of Artificial Sequence: Synthetic oligonucleotide
  Antisense strand to SEQ ID NO: 1386934
aaucgcgaucauugacugg

SEQ ID NO: 1386936 - RNA, 19 nt, Artificial Sequence
  Description of Artificial Sequence: Synthetic oligonucleotide
  Sense strand starting at position 1397 of SEQ ID NO: 1242989
gucaaugaucgcgauuauu

SEQ ID NO: 1386937 - RNA, 19 nt, Artificial Sequence
  Description of Artificial Sequence: Synthetic oligonucleotide
  Antisense strand to SEQ ID NO: 1386936
aauaaucgcgaucauugac

SEQ ID NO: 1386938 - RNA, 19 nt, Artificial Sequence
  Description of Artificial Sequence: Synthetic oligonucleotide
  Sense strand starting at position 2230 of SEQ ID NO: 1242989
cggagaacucugcagugga

SEQ ID NO: 1386939 - RNA, 19 nt, Artificial Sequence
  Description of Artificial Sequence: Synthetic oligonucleotide
  Antisense strand to SEQ ID NO: 1386938
uccacugcagaguucuccg

SEQ ID NO: 1386940 - RNA, 19 nt, Artificial Sequence
  Description of Artificial Sequence: Synthetic oligonucleotide
  Sense strand starting at position 2397 of SEQ ID NO: 1242989
ccggcuuccaagugagagu

SEQ ID NO: 1386941 - RNA, 19 nt, Artificial Sequence
  Description of Artificial Sequence: Synthetic oligonucleotide
  Antisense strand to SEQ ID NO: 1386940
acucucacuuggaagccgg

SEQ ID NO: 1386942 - RNA, 19 nt, Artificial Sequence
  Description of Artificial Sequence: Synthetic oligonucleotide
  Sense strand starting at position 2406 of SEQ ID NO: 1242989
aagugagagugguugcaca

SEQ ID NO: 1386943 - RNA, 19 nt, Artificial Sequence
  Description of Artificial Sequence: Synthetic oligonucleotide
  Antisense strand to SEQ ID NO: 1386942
ugugcaaccacucucacuu

SEQ ID NO: 1386944 - RNA, 19 nt, Artificial Sequence
  Description of Artificial Sequence: Synthetic oligonucleotide
  Sense strand starting at position 2457 of SEQ ID NO: 1242989
cagccacauuuggauagua

SEQ ID NO: 1386945 - RNA, 19 nt, Artificial Sequence
  Description of Artificial Sequence: Synthetic oligonucleotide
  Antisense strand to SEQ ID NO: 1386944
uacuauccaaauguggcug

SEQ ID NO: 1386946 - RNA, 19 nt, Artificial Sequence
  Description of Artificial Sequence: Synthetic oligonucleotide
  Sense strand starting at position 2500 of SEQ ID NO: 1242989
guacaaucugucgggcacu

SEQ ID NO: 1386947 - RNA, 19 nt, Artificial Sequence
  Description of Artificial Sequence: Synthetic oligonucleotide
  Antisense strand to SEQ ID NO: 1386946
agugcccgacagauuguac

SEQ ID NO: 1386948 - RNA, 19 nt, Artificial Sequence
  Description of Artificial Sequence: Synthetic oligonucleotide
  Sense strand starting at position 2552 of SEQ ID NO: 1242989
ccuauaagggagugauacu

SEQ ID NO: 1386949 - RNA, 19 nt, Artificial Sequence
  Description of Artificial Sequence: Synthetic oligonucleotide
  Antisense strand to SEQ ID NO: 1386948
aguaucacucccuuauagg

SEQ ID NO: 1386950 - RNA, 19 nt, Artificial Sequence
  Description of Artificial Sequence: Synthetic oligonucleotide
  Sense strand starting at position 2563 of SEQ ID NO: 1242989
gugauacuaucaccgguuu

SEQ ID NO: 1386951 - RNA, 19 nt, Artificial Sequence
  Description of Artificial Sequence: Synthetic oligonucleotide
  Antisense strand to SEQ ID NO: 1386950
aaaccggugauaguaucac

SEQ ID NO: 1386952 - RNA, 19 nt, Artificial Sequence
  Description of Artificial Sequence: Synthetic oligonucleotide
  Sense strand starting at position 2600 of SEQ ID NO: 1242989
ggcacagaguccuuaagaa

SEQ ID NO: 1386953 - RNA, 19 nt, Artificial Sequence
  Description of Artificial Sequence: Synthetic oligonucleotide
  Antisense strand to SEQ ID NO: 1386952
uucuuaaggacucugugcc

SEQ ID NO: 1386954 - RNA, 19 nt, Artificial Sequence
  Description of Artificial Sequence: Synthetic oligonucleotide
  Sense strand starting at position 2796 of SEQ ID NO: 1242989
cagaaucacucugcaggua

SEQ ID NO: 1386955 - RNA, 19 nt, Artificial Sequence
  Description of Artificial Sequence: Synthetic oligonucleotide
  Antisense strand to SEQ ID NO: 1386954
uaccugcagagugauucug

SEQ ID NO: 1386956 - RNA, 19 nt, Artificial Sequence
  Description of Artificial Sequence: Synthetic oligonucleotide
  Sense strand starting at position 2797 of SEQ ID NO: 1242989
agaaucacucugcagguaa

SEQ ID NO: 1386957 - RNA, 19 nt, Artificial Sequence
  Description of Artificial Sequence: Synthetic oligonucleotide
  Antisense strand to SEQ ID NO: 1386956
uuaccugcagagugauucu

SEQ ID NO: 1386958 - RNA, 19 nt, Artificial Sequence
  Description of Artificial Sequence: Synthetic oligonucleotide
  Sense strand starting at position 3050 of SEQ ID NO: 1242989
gggaagacuuguguaggga

SEQ ID NO: 1386959 - RNA, 19 nt, Artificial Sequence
  Description of Artificial Sequence: Synthetic oligonucleotide
  Antisense strand to SEQ ID NO: 1386958
ucccuacacaagucuuccc

SEQ ID NO: 1386960 - RNA, 19 nt, Artificial Sequence
  Description of Artificial Sequence: Synthetic oligonucleotide
  Sense strand starting at position 3185 of SEQ ID NO: 1242989
gggagauauuuggacucac

SEQ ID NO: 1386961 - RNA, 19 nt, Artificial Sequence
  Description of Artificial Sequence: Synthetic oligonucleotide
  Antisense strand to SEQ ID NO: 1386960
gugaguccaaauaucuccc

SEQ ID NO: 1386962 - RNA, 19 nt, Artificial Sequence
  Description of Artificial Sequence: Synthetic oligonucleotide
  Sense strand starting at position 3700 of SEQ ID NO: 1242989
gguccuacugugugucuaa

SEQ ID NO: 1386963 - RNA, 19 nt, Artificial Sequence
  Description of Artificial Sequence: Synthetic oligonucleotide
  Antisense strand to SEQ ID NO: 1386962
uuagacacacaguaggacc

SEQ ID NO: 1386964 - RNA, 19 nt, Artificial Sequence
  Description of Artificial Sequence: Synthetic oligonucleotide
  Sense strand starting at position 3710 of SEQ ID NO: 1242989
ugugucuaaccuugugaca

SEQ ID NO: 1386965 - RNA, 19 nt, Artificial Sequence
  Description of Artificial Sequence: Synthetic oligonucleotide
  Antisense strand to SEQ ID NO: 1386964
ugucacaagguuagacaca

SEQ ID NO: 1386966 - RNA, 19 nt, Artificial Sequence
  Description of Artificial Sequence: Synthetic oligonucleotide
  Sense strand starting at position 3892 of SEQ ID NO: 1242989
cugaccagugccugaauca

SEQ ID NO: 1386967 - RNA, 19 nt, Artificial Sequence
  Description of Artificial Sequence: Synthetic oligonucleotide
  Antisense strand to SEQ ID NO: 1386966
ugauucaggcacuggucag

SEQ ID NO: 1386968 - RNA, 19 nt, Artificial Sequence
  Description of Artificial Sequence: Synthetic oligonucleotide
  Sense strand starting at position 3893 of SEQ ID NO: 1242989
ugaccagugccugaaucaa

SEQ ID NO: 1386969 - RNA, 19 nt, Artificial Sequence
  Description of Artificial Sequence: Synthetic oligonucleotide
  Antisense strand to SEQ ID NO: 1386968
uugauucaggcacugguca

SEQ ID NO: 1386970 - RNA, 19 nt, Artificial Sequence
  Description of Artificial Sequence: Synthetic oligonucleotide
  Sense strand starting at position 211 of SEQ ID NO: 1242990
aagggauccuccugguucu

SEQ ID NO: 1386971 - RNA, 19 nt, Artificial Sequence
  Description of Artificial Sequence: Synthetic oligonucleotide
  Antisense strand to SEQ ID NO: 1386970
agaaccaggaggaucccuu

SEQ ID NO: 1386972 - RNA, 19 nt, Artificial Sequence
  Description of Artificial Sequence: Synthetic oligonucleotide
  Sense strand starting at position 353 of SEQ ID NO: 1242990
aaaugucacucugugaaag

SEQ ID NO: 1386973 - RNA, 19 nt, Artificial Sequence
  Description of Artificial Sequence: Synthetic oligonucleotide
  Antisense strand to SEQ ID NO: 1386972
cuuucacagagugacauuu

SEQ ID NO: 1386974 - RNA, 19 nt, Artificial Sequence
  Description of Artificial Sequence: Synthetic oligonucleotide
  Sense strand starting at position 372 of SEQ ID NO: 1242990
gccuuucuugaguacucca

SEQ ID NO: 1386975 - RNA, 19 nt, Artificial Sequence
  Description of Artificial Sequence: Synthetic oligonucleotide
  Antisense strand to SEQ ID NO: 1386974
uggaguacucaagaaaggc

SEQ ID NO: 1386976 - RNA, 19 nt, Artificial Sequence
  Description of Artificial Sequence: Synthetic oligonucleotide
  Sense strand starting at position 410 of SEQ ID NO: 1242990
cugcuuguguggucugcaa

SEQ ID NO: 1386977 - RNA, 19 nt, Artificial Sequence
  Description of Artificial Sequence: Synthetic oligonucleotide
  Antisense strand to SEQ ID NO: 1386976
uugcagaccacacaagcag

SEQ ID NO: 1386978 - RNA, 19 nt, Artificial Sequence
  Description of Artificial Sequence: Synthetic oligonucleotide
  Sense strand starting at position 414 of SEQ ID NO: 1242990
uuguguggucugcaagcua

SEQ ID NO: 1386979 - RNA, 19 nt, Artificial Sequence
  Description of Artificial Sequence: Synthetic oligonucleotide
  Antisense strand to SEQ ID NO: 1386978
uagcuugcagaccacacaa

SEQ ID NO: 1386980 - RNA, 19 nt, Artificial Sequence
  Description of Artificial Sequence: Synthetic oligonucleotide
  Sense strand starting at position 920 of SEQ ID NO: 1242990
caaagauuguauguugcaa

SEQ ID NO: 1386981 - RNA, 19 nt, Artificial Sequence
  Description of Artificial Sequence: Synthetic oligonucleotide
  Antisense strand to SEQ ID NO: 1386980
uugcaacauacaaucuuug

SEQ ID NO: 1386982 - RNA, 19 nt, Artificial Sequence
  Description of Artificial Sequence: Synthetic oligonucleotide
  Sense strand starting at position 956 of SEQ ID NO: 1242990
uggcccuuugcagaaacaa

SEQ ID NO: 1386983 - RNA, 19 nt, Artificial Sequence
  Description of Artificial Sequence: Synthetic oligonucleotide
  Antisense strand to SEQ ID NO: 1386982
uuguuucugcaaagggcca

SEQ ID NO: 1386984 - RNA, 19 nt, Artificial Sequence
  Description of Artificial Sequence: Synthetic oligonucleotide
  Sense strand starting at position 1185 of SEQ ID NO: 1242990
ucaguaagugccugaauga

SEQ ID NO: 1386985 - RNA, 19 nt, Artificial Sequence
  Description of Artificial Sequence: Synthetic oligonucleotide
  Antisense strand to SEQ ID NO: 1386984
ucauucaggcacuuacuga

SEQ ID NO: 1386986 - RNA, 19 nt, Artificial Sequence
  Description of Artificial Sequence: Synthetic oligonucleotide
  Sense strand starting at position 1186 of SEQ ID NO: 1242990
caguaagugccugaaugaa

SEQ ID NO: 1386987 - RNA, 19 nt, Artificial Sequence
  Description of Artificial Sequence: Synthetic oligonucleotide
  Antisense strand to SEQ ID NO: 1386986
uucauucaggcacuuacug

SEQ ID NO: 1386988 - RNA, 19 nt, Artificial Sequence
  Description of Artificial Sequence: Synthetic oligonucleotide
  Sense strand starting at position 1289 of SEQ ID NO: 1242990
ccaggaagcuugcuaagua

SEQ ID NO: 1386989 - RNA, 19 nt, Artificial Sequence
  Description of Artificial Sequence: Synthetic oligonucleotide
  Antisense strand to SEQ ID NO: 1386988
uacuuagcaagcuuccugg

SEQ ID NO: 1386990 - RNA, 19 nt, Artificial Sequence
  Description of Artificial Sequence: Synthetic oligonucleotide
  Sense strand starting at position 1341 of SEQ ID NO: 1242990
ccuugcucacccgaagagu

SEQ ID NO: 1386991 - RNA, 19 nt, Artificial Sequence
  Description of Artificial Sequence: Synthetic oligonucleotide
  Antisense strand to SEQ ID NO: 1386990
acucuucgggugagcaagg

SEQ ID NO: 1386992 - RNA, 19 nt, Artificial Sequence
  Description of Artificial Sequence: Synthetic oligonucleotide
  Sense strand starting at position 1744 of SEQ ID NO: 1242990
acuuuacaccuggguaaac

SEQ ID NO: 1386993 - RNA, 19 nt, Artificial Sequence
  Description of Artificial Sequence: Synthetic oligonucleotide
  Antisense strand to SEQ ID NO: 1386992
guuuacccagguguaaagu

SEQ ID NO: 1386994 - RNA, 19 nt, Artificial Sequence
  Description of Artificial Sequence: Synthetic oligonucleotide
  Sense strand starting at position 1754 of SEQ ID NO: 1242990
uggguaaacugagaucuug

SEQ ID NO: 1386995 - RNA, 19 nt, Artificial Sequence
  Description of Artificial Sequence: Synthetic oligonucleotide
  Antisense strand to SEQ ID NO: 1386994
caagaucucaguuuaccca

SEQ ID NO: 1386996 - RNA, 19 nt, Artificial Sequence
  Description of Artificial Sequence: Synthetic oligonucleotide
  Sense strand starting at position 1809 of SEQ ID NO: 1242990
gcagcacucacguagauga

SEQ ID NO: 1386997 - RNA, 19 nt, Artificial Sequence
  Description of Artificial Sequence: Synthetic oligonucleotide
  Antisense strand to SEQ ID NO: 1386996
ucaucuacgugagugcugc

SEQ ID NO: 1386998 - RNA, 19 nt, Artificial Sequence
  Description of Artificial Sequence: Synthetic oligonucleotide
  Sense strand starting at position 1996 of SEQ ID NO: 1242990
ggcugugccgucaggacua

SEQ ID NO: 1386999 - RNA, 19 nt, Artificial Sequence
  Description of Artificial Sequence: Synthetic oligonucleotide
  Antisense strand to SEQ ID NO: 1386998
uaguccugacggcacagcc

SEQ ID NO: 1387000 - RNA, 19 nt, Artificial Sequence
  Description of Artificial Sequence: Synthetic oligonucleotide
  Sense strand starting at position 2161 of SEQ ID NO: 1242990
cgccguuccugacucuaau

SEQ ID NO: 1387001 - RNA, 19 nt, Artificial Sequence
  Description of Artificial Sequence: Synthetic oligonucleotide
  Antisense strand to SEQ ID NO: 1387000
auuagagucaggaacggcg

SEQ ID NO: 1387002 - RNA, 19 nt, Artificial Sequence
  Description of Artificial Sequence: Synthetic oligonucleotide
  Sense strand starting at position 2164 of SEQ ID NO: 1242990
cguuccugacucuaaugua

SEQ ID NO: 1387003 - RNA, 19 nt, Artificial Sequence
  Description of Artificial Sequence: Synthetic oligonucleotide
  Antisense strand to SEQ ID NO: 1387002
uacauuagagucaggaacg

SEQ ID NO: 1387004 - RNA, 19 nt, Artificial Sequence
  Description of Artificial Sequence: Synthetic oligonucleotide
  Sense strand starting at position 2225 of SEQ ID NO: 1242990
cucaucugcucgcgaggau

SEQ ID NO: 1387005 - RNA, 19 nt, Artificial Sequence
  Description of Artificial Sequence: Synthetic oligonucleotide
  Antisense strand to SEQ ID NO: 1387004
auccucgcgagcagaugag

SEQ ID NO: 1387006 - RNA, 19 nt, Artificial Sequence
  Description of Artificial Sequence: Synthetic oligonucleotide
  Sense strand starting at position 2250 of SEQ ID NO: 1242990
ucucuucugccuugcgaaa

SEQ ID NO: 1387007 - RNA, 19 nt, Artificial Sequence
  Description of Artificial Sequence: Synthetic oligonucleotide
  Antisense strand to SEQ ID NO: 1387006
uuucgcaaggcagaagaga

SEQ ID NO: 1387008 - RNA, 19 nt, Artificial Sequence
  Description of Artificial Sequence: Synthetic oligonucleotide
  Sense strand starting at position 2252 of SEQ ID NO: 1242990
ucuucugccuugcgaaaua

SEQ ID NO: 1387009 - RNA, 19 nt, Artificial Sequence
  Description of Artificial Sequence: Synthetic oligonucleotide
  Antisense strand to SEQ ID NO: 1387008
uauuucgcaaggcagaaga

SEQ ID NO: 1387010 - RNA, 19 nt, Artificial Sequence
  Description of Artificial Sequence: Synthetic oligonucleotide
  Sense strand starting at position 2288 of SEQ ID NO: 1242990
gcccgugaccagugagaaa

SEQ ID NO: 1387011 - RNA, 19 nt, Artificial Sequence
  Description of Artificial Sequence: Synthetic oligonucleotide
  Antisense strand to SEQ ID NO: 1387010
uuucucacuggucacgggc

SEQ ID NO: 1387012 - RNA, 19 nt, Artificial Sequence
  Description of Artificial Sequence: Synthetic oligonucleotide
  Sense strand starting at position 2352 of SEQ ID NO: 1242990
ccgaauugguuucuaacga

SEQ ID NO: 1387013 - RNA, 19 nt, Artificial Sequence
  Description of Artificial Sequence: Synthetic oligonucleotide
  Antisense strand to SEQ ID NO: 1387012
ucguuagaaaccaauucgg

SEQ ID NO: 1387014 - RNA, 19 nt, Artificial Sequence
  Description of Artificial Sequence: Synthetic oligonucleotide
  Sense strand starting at position 2353 of SEQ ID NO: 1242990
cgaauugguuucuaacgag

SEQ ID NO: 1387015 - RNA, 19 nt, Artificial Sequence
  Description of Artificial Sequence: Synthetic oligonucleotide
  Antisense strand to SEQ ID NO: 1387014
cucguuagaaaccaauucg

SEQ ID NO: 1387016 - RNA, 19 nt, Artificial Sequence
  Description of Artificial Sequence: Synthetic oligonucleotide
  Sense strand starting at position 2356 of SEQ ID NO: 1242990
auugguuucuaacgagaac

SEQ ID NO: 1387017 - RNA, 19 nt, Artificial Sequence
  Description of Artificial Sequence: Synthetic oligonucleotide
  Antisense strand to SEQ ID NO: 1387016
guucucguuagaaaccaau

SEQ ID NO: 1387018 - RNA, 19 nt, Artificial Sequence
  Description of Artificial Sequence: Synthetic oligonucleotide
  Sense strand starting at position 2357 of SEQ ID NO: 1242990
uugguuucuaacgagaacu

SEQ ID NO: 1387019 - RNA, 19 nt, Artificial Sequence
  Description of Artificial Sequence: Synthetic oligonucleotide
  Antisense strand to SEQ ID NO: 1387018
aguucucguuagaaaccaa

SEQ ID NO: 1387020 - RNA, 19 nt, Artificial Sequence
  Description of Artificial Sequence: Synthetic oligonucleotide
  Sense strand starting at position 2359 of SEQ ID NO: 1242990
gguuucuaacgagaacuuu

SEQ ID NO: 1387021 - RNA, 19 nt, Artificial Sequence
  Description of Artificial Sequence: Synthetic oligonucleotide
  Antisense strand to SEQ ID NO: 1387020
aaaguucucguuagaaacc

SEQ ID NO: 1387022 - RNA, 19 nt, Artificial Sequence
  Description of Artificial Sequence: Synthetic oligonucleotide
  Sense strand starting at position 2438 of SEQ ID NO: 1242990
acaagucucgucuggcaaa

SEQ ID NO: 1387023 - RNA, 19 nt, Artificial Sequence
  Description of Artificial Sequence: Synthetic oligonucleotide
  Antisense strand to SEQ ID NO: 1387022
uuugccagacgagacuugu

SEQ ID NO: 1387024 - RNA, 19 nt, Artificial Sequence
  Description of Artificial Sequence: Synthetic oligonucleotide
  Sense strand starting at position 2441 of SEQ ID NO: 1242990
agucucgucuggcaaaguu

SEQ ID NO: 1387025 - RNA, 19 nt, Artificial Sequence
  Description of Artificial Sequence: Synthetic oligonucleotide
  Antisense strand to SEQ ID NO: 1387024
aacuuugccagacgagacu

SEQ ID NO: 1387026 - RNA, 19 nt, Artificial Sequence
  Description of Artificial Sequence: Synthetic oligonucleotide
  Sense strand starting at position 3003 of SEQ ID NO: 1242990
gccgcuuccagggaagaca

SEQ ID NO: 1387027 - RNA, 19 nt, Artificial Sequence
  Description of Artificial Sequence: Synthetic oligonucleotide
  Antisense strand to SEQ ID NO: 1387026
ugucuucccuggaagcggc

SEQ ID NO: 1387028 - RNA, 19 nt, Artificial Sequence
  Description of Artificial Sequence: Synthetic oligonucleotide
  Sense strand starting at position 3096 of SEQ ID NO: 1242990
aauucagagucggguuagu

SEQ ID NO: 1387029 - RNA, 19 nt, Artificial Sequence
  Description of Artificial Sequence: Synthetic oligonucleotide
  Antisense strand to SEQ ID NO: 1387028
acuaacccgacucugaauu

SEQ ID NO: 1387030 - RNA, 19 nt, Artificial Sequence
  Description of Artificial Sequence: Synthetic oligonucleotide
  Sense strand starting at position 3582 of SEQ ID NO: 1242990
gaagaaaccugugguaaag

SEQ ID NO: 1387031 - RNA, 19 nt, Artificial Sequence
  Description of Artificial Sequence: Synthetic oligonucleotide
  Antisense strand to SEQ ID NO: 1387030
cuuuaccacagguuucuuc

SEQ ID NO: 1387032 - RNA, 19 nt, Artificial Sequence
  Description of Artificial Sequence: Synthetic oligonucleotide
  Sense strand starting at position 3584 of SEQ ID NO: 1242990
agaaaccugugguaaagaa

SEQ ID NO: 1387033 - RNA, 19 nt, Artificial Sequence
  Description of Artificial Sequence: Synthetic oligonucleotide
  Antisense strand to SEQ ID NO: 1387032
uucuuuaccacagguuucu

SEQ ID NO: 1387034 - RNA, 19 nt, Artificial Sequence
  Description of Artificial Sequence: Synthetic oligonucleotide
  Sense strand starting at position 3752 of SEQ ID NO: 1242990
aggagauccuagcccagaa

SEQ ID NO: 1387035 - RNA, 19 nt, Artificial Sequence
  Description of Artificial Sequence: Synthetic oligonucleotide
  Antisense strand to SEQ ID NO: 1387034
uucugggcuaggaucuccu

SEQ ID NO: 1387036 - RNA, 19 nt, Artificial Sequence
  Description of Artificial Sequence: Synthetic oligonucleotide
  Sense strand starting at position 3851 of SEQ ID NO: 1242990
ggagcaauggccggagaaa

SEQ ID NO: 1387037 - RNA, 19 nt, Artificial Sequence
  Description of Artificial Sequence: Synthetic oligonucleotide
  Antisense strand to SEQ ID NO: 1387036
uuucuccggccauugcucc

SEQ ID NO: 1387038 - RNA, 19 nt, Artificial Sequence
  Description of Artificial Sequence: Synthetic oligonucleotide
  Sense strand starting at position 3852 of SEQ ID NO: 1242990
gagcaauggccggagaaag

SEQ ID NO: 1387039 - RNA, 19 nt, Artificial Sequence
  Description of Artificial Sequence: Synthetic oligonucleotide
  Antisense strand to SEQ ID NO: 1387038
cuuucuccggccauugcuc

SEQ ID NO: 1387040 - RNA, 19 nt, Artificial Sequence
  Description of Artificial Sequence: Synthetic oligonucleotide
  Sense strand starting at position 752 of SEQ ID NO: 1242991
caaggcugucccuggaauu

SEQ ID NO: 1387041 - RNA, 19 nt, Artificial Sequence
  Description of Artificial Sequence: Synthetic oligonucleotide
  Antisense strand to SEQ ID NO: 1387040
aauuccagggacagccuug

SEQ ID NO: 1387042 - RNA, 19 nt, Artificial Sequence
  Description of Artificial Sequence: Synthetic oligonucleotide
  Sense strand starting at position 783 of SEQ ID NO: 1242991
uggagaaagcguuugcguu

SEQ ID NO: 1387043 - RNA, 19 nt, Artificial Sequence
  Description of Artificial Sequence: Synthetic oligonucleotide
  Antisense strand to SEQ ID NO: 1387042
aacgcaaacgcuuucucca

SEQ ID NO: 1387044 - RNA, 19 nt, Artificial Sequence
  Description of Artificial Sequence: Synthetic oligonucleotide
  Sense strand starting at position 806 of SEQ ID NO: 1242991
ggagaugcacuguaacguu

SEQ ID NO: 1387045 - RNA, 19 nt, Artificial Sequence
  Description of Artificial Sequence: Synthetic oligonucleotide
  Antisense strand to SEQ ID NO: 1387044
aacguuacagugcaucucc

SEQ ID NO: 1387046 - RNA, 19 nt, Artificial Sequence
  Description of Artificial Sequence: Synthetic oligonucleotide
  Sense strand starting at position 949 of SEQ ID NO: 1242991
gguggauucuuuguucuua

SEQ ID NO: 1387047 - RNA, 19 nt, Artificial Sequence
  Description of Artificial Sequence: Synthetic oligonucleotide
  Antisense strand to SEQ ID NO: 1387046
uaagaacaaagaauccacc

SEQ ID NO: 1387048 - RNA, 19 nt, Artificial Sequence
  Description of Artificial Sequence: Synthetic oligonucleotide
  Sense strand starting at position 950 of SEQ ID NO: 1242991
guggauucuuuguucuuac

SEQ ID NO: 1387049 - RNA, 19 nt, Artificial Sequence
  Description of Artificial Sequence: Synthetic oligonucleotide
  Antisense strand to SEQ ID NO: 1387048
guaagaacaaagaauccac

SEQ ID NO: 1387050 - RNA, 19 nt, Artificial Sequence
  Description of Artificial Sequence: Synthetic oligonucleotide
  Sense strand starting at position 959 of SEQ ID NO: 1242991
uuguucuuaccagaucucu

SEQ ID NO: 1387051 - RNA, 19 nt, Artificial Sequence
  Description of Artificial Sequence: Synthetic oligonucleotide
  Antisense strand to SEQ ID NO: 1387050
agagaucugguaagaacaa

SEQ ID NO: 1387052 - RNA, 19 nt, Artificial Sequence
  Description of Artificial Sequence: Synthetic oligonucleotide
  Sense strand starting at position 967 of SEQ ID NO: 1242991
accagaucucuuggccacu

SEQ ID NO: 1387053 - RNA, 19 nt, Artificial Sequence
  Description of Artificial Sequence: Synthetic oligonucleotide
  Antisense strand to SEQ ID NO: 1387052
aguggccaagagaucuggu

SEQ ID NO: 1387054 - RNA, 19 nt, Artificial Sequence
  Description of Artificial Sequence: Synthetic oligonucleotide
  Sense strand starting at position 1271 of SEQ ID NO: 1242991
uguguauacuaucuaugag

SEQ ID NO: 1387055 - RNA, 19 nt, Artificial Sequence
  Description of Artificial Sequence: Synthetic oligonucleotide
  Antisense strand to SEQ ID NO: 1387054
cucauagauaguauacaca

SEQ ID NO: 1387056 - RNA, 19 nt, Artificial Sequence
  Description of Artificial Sequence: Synthetic oligonucleotide
  Sense strand starting at position 1611 of SEQ ID NO: 1242991
gcaguaaacgauuaccaac

SEQ ID NO: 1387057 - RNA, 19 nt, Artificial Sequence
  Description of Artificial Sequence: Synthetic oligonucleotide
  Antisense strand to SEQ ID NO: 1387056
guugguaaucguuuacugc

SEQ ID NO: 1387058 - RNA, 19 nt, Artificial Sequence
  Description of Artificial Sequence: Synthetic oligonucleotide
  Sense strand starting at position 1911 of SEQ ID NO: 1242991
ucaccuguccagugaacau

SEQ ID NO: 1387059 - RNA, 19 nt, Artificial Sequence
  Description of Artificial Sequence: Synthetic oligonucleotide
  Antisense strand to SEQ ID NO: 1387058
auguucacuggacagguga

SEQ ID NO: 1387060 - RNA, 19 nt, Artificial Sequence
  Description of Artificial Sequence: Synthetic oligonucleotide
  Sense strand starting at position 2102 of SEQ ID NO: 1242991
ucaccuguaucauuguauu

SEQ ID NO: 1387061 - RNA, 19 nt, Artificial Sequence
  Description of Artificial Sequence: Synthetic oligonucleotide
  Antisense strand to SEQ ID NO: 1387060
aauacaaugauacagguga

SEQ ID NO: 1387062 - RNA, 19 nt, Artificial Sequence
  Description of Artificial Sequence: Synthetic oligonucleotide
  Sense strand starting at position 2287 of SEQ ID NO: 1242991
gacagcaaugaaugaguau

SEQ ID NO: 1387063 - RNA, 19 nt, Artificial Sequence
  Description of Artificial Sequence: Synthetic oligonucleotide
  Antisense strand to SEQ ID NO: 1387062
auacucauucauugcuguc

SEQ ID NO: 1387064 - RNA, 19 nt, Artificial Sequence
  Description of Artificial Sequence: Synthetic oligonucleotide
  Sense strand starting at position 2290 of SEQ ID NO: 1242991
agcaaugaaugaguauagu

SEQ ID NO: 1387065 - RNA, 19 nt, Artificial Sequence
  Description of Artificial Sequence: Synthetic oligonucleotide
  Antisense strand to SEQ ID NO: 1387064
acuauacucauucauugcu

SEQ ID NO: 1387066 - RNA, 19 nt, Artificial Sequence
  Description of Artificial Sequence: Synthetic oligonucleotide
  Sense strand starting at position 2299 of SEQ ID NO: 1242991
ugaguauaguuauucccuu

SEQ ID NO: 1387067 - RNA, 19 nt, Artificial Sequence
  Description of Artificial Sequence: Synthetic oligonucleotide
  Antisense strand to SEQ ID NO: 1387066
aagggaauaacuauacuca

SEQ ID NO: 1387068 - RNA, 19 nt, Artificial Sequence
  Description of Artificial Sequence: Synthetic oligonucleotide
  Sense strand starting at position 2333 of SEQ ID NO: 1242991
ccuggaguggguuaugaau

SEQ ID NO: 1387069 - RNA, 19 nt, Artificial Sequence
  Description of Artificial Sequence: Synthetic oligonucleotide
  Antisense strand to SEQ ID NO: 1387068
auucauaacccacuccagg

SEQ ID NO: 1387070 - RNA, 19 nt, Artificial Sequence
  Description of Artificial Sequence: Synthetic oligonucleotide
  Sense strand starting at position 2339 of SEQ ID NO: 1242991
guggguuaugaaugaacuu

SEQ ID NO: 1387071 - RNA, 19 nt, Artificial Sequence
  Description of Artificial Sequence: Synthetic oligonucleotide
  Antisense strand to SEQ ID NO: 1387070
aaguucauucauaacccac

SEQ ID NO: 1387072 - RNA, 19 nt, Artificial Sequence
  Description of Artificial Sequence: Synthetic oligonucleotide
  Sense strand starting at position 2352 of SEQ ID NO: 1242991
gaacuugaccuguagcuca

SEQ ID NO: 1387073 - RNA, 19 nt, Artificial Sequence
  Description of Artificial Sequence: Synthetic oligonucleotide
  Antisense strand to SEQ ID NO: 1387072
ugagcuacaggucaaguuc

SEQ ID NO: 1387074 - RNA, 19 nt, Artificial Sequence
  Description of Artificial Sequence: Synthetic oligonucleotide
  Sense strand starting at position 2625 of SEQ ID NO: 1242991
aggugcuuccacgauaucu

SEQ ID NO: 1387075 - RNA, 19 nt, Artificial Sequence
  Description of Artificial Sequence: Synthetic oligonucleotide
  Antisense strand to SEQ ID NO: 1387074
agauaucguggaagcaccu

SEQ ID NO: 1387076 - RNA, 19 nt, Artificial Sequence
  Description of Artificial Sequence: Synthetic oligonucleotide
  Sense strand starting at position 2627 of SEQ ID NO: 1242991
gugcuuccacgauaucugu

SEQ ID NO: 1387077 - RNA, 19 nt, Artificial Sequence
  Description of Artificial Sequence: Synthetic oligonucleotide
  Antisense strand to SEQ ID NO: 1387076
acagauaucguggaagcac

SEQ ID NO: 1387078 - RNA, 19 nt, Artificial Sequence
  Description of Artificial Sequence: Synthetic oligonucleotide
  Sense strand starting at position 2634 of SEQ ID NO: 1242991
cacgauaucuguccaagac

SEQ ID NO: 1387079 - RNA, 19 nt, Artificial Sequence
  Description of Artificial Sequence: Synthetic oligonucleotide
  Antisense strand to SEQ ID NO: 1387078
gucuuggacagauaucgug

SEQ ID NO: 1387080 - RNA, 19 nt, Artificial Sequence
  Description of Artificial Sequence: Synthetic oligonucleotide
  Sense strand starting at position 2635 of SEQ ID NO: 1242991
acgauaucuguccaagaca

SEQ ID NO: 1387081 - RNA, 19 nt, Artificial Sequence
  Description of Artificial Sequence: Synthetic oligonucleotide
  Antisense strand to SEQ ID NO: 1387080
ugucuuggacagauaucgu

SEQ ID NO: 1387082 - RNA, 19 nt, Artificial Sequence
  Description of Artificial Sequence: Synthetic oligonucleotide
  Sense strand starting at position 2665 of SEQ ID NO: 1242991
cucaguacugugcaucauu

SEQ ID NO: 1387083 - RNA, 19 nt, Artificial Sequence
  Description of Artificial Sequence: Synthetic oligonucleotide
  Antisense strand to SEQ ID NO: 1387082
aaugaugcacaguacugag

SEQ ID NO: 1387084 - RNA, 19 nt, Artificial Sequence
  Description of Artificial Sequence: Synthetic oligonucleotide
  Sense strand starting at position 2676 of SEQ ID NO: 1242991
gcaucauugugacucauuc

SEQ ID NO: 1387085 - RNA, 19 nt, Artificial Sequence
  Description of Artificial Sequence: Synthetic oligonucleotide
  Antisense strand to SEQ ID NO: 1387084
gaaugagucacaaugaugc

SEQ ID NO: 1387086 - RNA, 19 nt, Artificial Sequence
  Description of Artificial Sequence: Synthetic oligonucleotide
  Sense strand starting at position 3058 of SEQ ID NO: 1242991
gggaauuaacaguguacca

SEQ ID NO: 1387087 - RNA, 19 nt, Artificial Sequence
  Description of Artificial Sequence: Synthetic oligonucleotide
  Antisense strand to SEQ ID NO: 1387086
ugguacacuguuaauuccc

SEQ ID NO: 1387088 - RNA, 19 nt, Artificial Sequence
  Description of Artificial Sequence: Synthetic oligonucleotide
  Sense strand starting at position 3076 of SEQ ID NO: 1242991
aagcccuuuccauggguua

SEQ ID NO: 1387089 - RNA, 19 nt, Artificial Sequence
  Description of Artificial Sequence: Synthetic oligonucleotide
  Antisense strand to SEQ ID NO: 1387088
uaacccauggaaagggcuu

SEQ ID NO: 1387090 - RNA, 19 nt, Artificial Sequence
  Description of Artificial Sequence: Synthetic oligonucleotide
  Sense strand starting at position 3077 of SEQ ID NO: 1242991
agcccuuuccauggguuau

SEQ ID NO: 1387091 - RNA, 19 nt, Artificial Sequence
  Description of Artificial Sequence: Synthetic oligonucleotide
  Antisense strand to SEQ ID NO: 1387090
auaacccauggaaagggcu

SEQ ID NO: 1387092 - RNA, 19 nt, Artificial Sequence
  Description of Artificial Sequence: Synthetic oligonucleotide
  Sense strand starting at position 3122 of SEQ ID NO: 1242991
ugaggagggagguguuaua

SEQ ID NO: 1387093 - RNA, 19 nt, Artificial Sequence
  Description of Artificial Sequence: Synthetic oligonucleotide
  Antisense strand to SEQ ID NO: 1387092
uauaacaccucccuccuca

SEQ ID NO: 1387094 - RNA, 19 nt, Artificial Sequence
  Description of Artificial Sequence: Synthetic oligonucleotide
  Sense strand starting at position 3187 of SEQ ID NO: 1242991
ugauuuacuuaaggugaga

SEQ ID NO: 1387095 - RNA, 19 nt, Artificial Sequence
  Description of Artificial Sequence: Synthetic oligonucleotide
  Antisense strand to SEQ ID NO: 1387094
ucucaccuuaaguaaauca

SEQ ID NO: 1387096 - RNA, 19 nt, Artificial Sequence
  Description of Artificial Sequence: Synthetic oligonucleotide
  Sense strand starting at position 3209 of SEQ ID NO: 1242991
gcauuuagguuugaaccua

SEQ ID NO: 1387097 - RNA, 19 nt, Artificial Sequence
  Description of Artificial Sequence: Synthetic oligonucleotide
  Antisense strand to SEQ ID NO: 1387096
uagguucaaaccuaaaugc

SEQ ID NO: 1387098 - RNA, 19 nt, Artificial Sequence
  Description of Artificial Sequence: Synthetic oligonucleotide
  Sense strand starting at position 3348 of SEQ ID NO: 1242991
cuuggcaaugcuuaguaga

SEQ ID NO: 1387099 - RNA, 19 nt, Artificial Sequence
  Description of Artificial Sequence: Synthetic oligonucleotide
  Antisense strand to SEQ ID NO: 1387098
ucuacuaagcauugccaag

SEQ ID NO: 1387100 - RNA, 19 nt, Artificial Sequence
  Description of Artificial Sequence: Synthetic oligonucleotide
  Sense strand starting at position 3350 of SEQ ID NO: 1242991
uggcaaugcuuaguagaau

SEQ ID NO: 1387101 - RNA, 19 nt, Artificial Sequence
  Description of Artificial Sequence: Synthetic oligonucleotide
  Antisense strand to SEQ ID NO: 1387100
auucuacuaagcauugcca

SEQ ID NO: 1387102 - RNA, 19 nt, Artificial Sequence
  Description of Artificial Sequence: Synthetic oligonucleotide
  Sense strand starting at position 3378 of SEQ ID NO: 1242991
gauggcuugguaugggaua

SEQ ID NO: 1387103 - RNA, 19 nt, Artificial Sequence
  Description of Artificial Sequence: Synthetic oligonucleotide
  Antisense strand to SEQ ID NO: 1387102
uaucccauaccaagccauc

SEQ ID NO: 1387104 - RNA, 19 nt, Artificial Sequence
  Description of Artificial Sequence: Synthetic oligonucleotide
  Sense strand starting at position 3497 of SEQ ID NO: 1242991
gagacucgauacucaguuu

SEQ ID NO: 1387105 - RNA, 19 nt, Artificial Sequence
  Description of Artificial Sequence: Synthetic oligonucleotide
  Antisense strand to SEQ ID NO: 1387104
aaacugaguaucgagucuc

SEQ ID NO: 1387106 - RNA, 19 nt, Artificial Sequence
  Description of Artificial Sequence: Synthetic oligonucleotide
  Sense strand starting at position 3523 of SEQ ID NO: 1242991
ugaugauuacuuugcugau

SEQ ID NO: 1387107 - RNA, 19 nt, Artificial Sequence
  Description of Artificial Sequence: Synthetic oligonucleotide
  Antisense strand to SEQ ID NO: 1387106
aucagcaaaguaaucauca

SEQ ID NO: 1387108 - RNA, 19 nt, Artificial Sequence
  Description of Artificial Sequence: Synthetic oligonucleotide
  Sense strand starting at position 3524 of SEQ ID NO: 1242991
gaugauuacuuugcugaug

SEQ ID NO: 1387109 - RNA, 19 nt, Artificial Sequence
  Description of Artificial Sequence: Synthetic oligonucleotide
  Antisense strand to SEQ ID NO: 1387108
caucagcaaaguaaucauc

SEQ ID NO: 1387110 - RNA, 19 nt, Artificial Sequence
  Description of Artificial Sequence: Synthetic oligonucleotide
  Sense strand starting at position 3527 of SEQ ID NO: 1242991
gauuacuuugcugauguuu

SEQ ID NO: 1387111 - RNA, 19 nt, Artificial Sequence
  Description of Artificial Sequence: Synthetic oligonucleotide
  Antisense strand to SEQ ID NO: 1387110
aaacaucagcaaaguaauc

SEQ ID NO: 1387112 - RNA, 19 nt, Artificial Sequence
  Description of Artificial Sequence: Synthetic oligonucleotide
  Sense strand starting at position 3535 of SEQ ID NO: 1242991
ugcugauguuucuccuuua

SEQ ID NO: 1387113 - RNA, 19 nt, Artificial Sequence
  Description of Artificial Sequence: Synthetic oligonucleotide
  Antisense strand to SEQ ID NO: 1387112
uaaaggagaaacaucagca

SEQ ID NO: 1387114 - RNA, 19 nt, Artificial Sequence
  Description of Artificial Sequence: Synthetic oligonucleotide
  Sense strand starting at position 3536 of SEQ ID NO: 1242991
gcugauguuucuccuuuaa

SEQ ID NO: 1387115 - RNA, 19 nt, Artificial Sequence
  Description of Artificial Sequence: Synthetic oligonucleotide
  Antisense strand to SEQ ID NO: 1387114
uuaaaggagaaacaucagc

SEQ ID NO: 1387116 - RNA, 19 nt, Artificial Sequence
  Description of Artificial Sequence: Synthetic oligonucleotide
  Sense strand starting at position 3538 of SEQ ID NO: 1242991
ugauguuucuccuuuaaga

SEQ ID NO: 1387117 - RNA, 19 nt, Artificial Sequence
  Description of Artificial Sequence: Synthetic oligonucleotide
  Antisense strand to SEQ ID NO: 1387116
ucuuaaaggagaaacauca

SEQ ID NO: 1387118 - RNA, 19 nt, Artificial Sequence
  Description of Artificial Sequence: Synthetic oligonucleotide
  Sense strand starting at position 3771 of SEQ ID NO: 1242991
agaagucaccucuagccau

SEQ ID NO: 1387119 - RNA, 19 nt, Artificial Sequence
  Description of Artificial Sequence: Synthetic oligonucleotide
  Antisense strand to SEQ ID NO: 1387118
auggcuagaggugacuucu

SEQ ID NO: 1387120 - RNA, 19 nt, Artificial Sequence
  Description of Artificial Sequence: Synthetic oligonucleotide
  Sense strand starting at position 108 of SEQ ID NO: 1242992
uuucuccuagauugaggaa

SEQ ID NO: 1387121 - RNA, 19 nt, Artificial Sequence
  Description of Artificial Sequence: Synthetic oligonucleotide
  Antisense strand to SEQ ID NO: 1387120
uuccucaaucuaggagaaa

SEQ ID NO: 1387122 - RNA, 19 nt, Artificial Sequence
  Description of Artificial Sequence: Synthetic oligonucleotide
  Sense strand starting at position 348 of SEQ ID NO: 1242992
gacaacuaucuuggugauu

SEQ ID NO: 1387123 - RNA, 19 nt, Artificial Sequence
  Description of Artificial Sequence: Synthetic oligonucleotide
  Antisense strand to SEQ ID NO: 1387122
aaucaccaagauaguuguc

SEQ ID NO: 1387124 - RNA, 19 nt, Artificial Sequence
  Description of Artificial Sequence: Synthetic oligonucleotide
  Sense strand starting at position 357 of SEQ ID NO: 1242992
cuuggugauuuacaggaaa

SEQ ID NO: 1387125 - RNA, 19 nt, Artificial Sequence
  Description of Artificial Sequence: Synthetic oligonucleotide
  Antisense strand to SEQ ID NO: 1387124
uuuccuguaaaucaccaag

SEQ ID NO: 1387126 - RNA, 19 nt, Artificial Sequence
  Description of Artificial Sequence: Synthetic oligonucleotide
  Sense strand starting at position 461 of SEQ ID NO: 1242992
cucuuuauuuaagagagga

SEQ ID NO: 1387127 - RNA, 19 nt, Artificial Sequence
  Description of Artificial Sequence: Synthetic oligonucleotide
  Antisense strand to SEQ ID NO: 1387126
uccucucuuaaauaaagag

SEQ ID NO: 1387128 - RNA, 19 nt, Artificial Sequence
  Description of Artificial Sequence: Synthetic oligonucleotide
  Sense strand starting at position 607 of SEQ ID NO: 1242992
guuacaagaucucugcaca

SEQ ID NO: 1387129 - RNA, 19 nt, Artificial Sequence
  Description of Artificial Sequence: Synthetic oligonucleotide
  Antisense strand to SEQ ID NO: 1387128
ugugcagagaucuuguaac

SEQ ID NO: 1387130 - RNA, 19 nt, Artificial Sequence
  Description of Artificial Sequence: Synthetic oligonucleotide
  Sense strand starting at position 610 of SEQ ID NO: 1242992
acaagaucucugcacaugu

SEQ ID NO: 1387131 - RNA, 19 nt, Artificial Sequence
  Description of Artificial Sequence: Synthetic oligonucleotide
  Antisense strand to SEQ ID NO: 1387130
acaugugcagagaucuugu

SEQ ID NO: 1387132 - RNA, 19 nt, Artificial Sequence
  Description of Artificial Sequence: Synthetic oligonucleotide
  Sense strand starting at position 651 of SEQ ID NO: 1242992
cguggucuccuccaagauu

SEQ ID NO: 1387133 - RNA, 19 nt, Artificial Sequence
  Description of Artificial Sequence: Synthetic oligonucleotide
  Antisense strand to SEQ ID NO: 1387132
aaucuuggaggagaccacg

SEQ ID NO: 1387134 - RNA, 19 nt, Artificial Sequence
  Description of Artificial Sequence: Synthetic oligonucleotide
  Sense strand starting at position 654 of SEQ ID NO: 1242992
ggucuccuccaagauucua

SEQ ID NO: 1387135 - RNA, 19 nt, Artificial Sequence
  Description of Artificial Sequence: Synthetic oligonucleotide
  Antisense strand to SEQ ID NO: 1387134
uagaaucuuggaggagacc

SEQ ID NO: 1387136 - RNA, 19 nt, Artificial Sequence
  Description of Artificial Sequence: Synthetic oligonucleotide
  Sense strand starting at position 849 of SEQ ID NO: 1242992
ccuagaaauguauacagca

SEQ ID NO: 1387137 - RNA, 19 nt, Artificial Sequence
  Description of Artificial Sequence: Synthetic oligonucleotide
  Antisense strand to SEQ ID NO: 1387136
ugcuguauacauuucuagg

SEQ ID NO: 1387138 - RNA, 19 nt, Artificial Sequence
  Description of Artificial Sequence: Synthetic oligonucleotide
  Sense strand starting at position 1067 of SEQ ID NO: 1242992
uccucaagugacugaauca

SEQ ID NO: 1387139 - RNA, 19 nt, Artificial Sequence
  Description of Artificial Sequence: Synthetic oligonucleotide
  Antisense strand to SEQ ID NO: 1387138
ugauucagucacuugagga

SEQ ID NO: 1387140 - RNA, 19 nt, Artificial Sequence
  Description of Artificial Sequence: Synthetic oligonucleotide
  Sense strand starting at position 1263 of SEQ ID NO: 1242992
cacagcucuggguaaguaa

SEQ ID NO: 1387141 - RNA, 19 nt, Artificial Sequence
  Description of Artificial Sequence: Synthetic oligonucleotide
  Antisense strand to SEQ ID NO: 1387140
uuacuuacccagagcugug

SEQ ID NO: 1387142 - RNA, 19 nt, Artificial Sequence
  Description of Artificial Sequence: Synthetic oligonucleotide
  Sense strand starting at position 1293 of SEQ ID NO: 1242992
uuaggaaagucuguccuau

SEQ ID NO: 1387143 - RNA, 19 nt, Artificial Sequence
  Description of Artificial Sequence: Synthetic oligonucleotide
  Antisense strand to SEQ ID NO: 1387142
auaggacagacuuuccuaa

SEQ ID NO: 1387144 - RNA, 19 nt, Artificial Sequence
  Description of Artificial Sequence: Synthetic oligonucleotide
  Sense strand starting at position 1295 of SEQ ID NO: 1242992
aggaaagucuguccuaugu

SEQ ID NO: 1387145 - RNA, 19 nt, Artificial Sequence
  Description of Artificial Sequence: Synthetic oligonucleotide
  Antisense strand to SEQ ID NO: 1387144
acauaggacagacuuuccu

SEQ ID NO: 1387146 - RNA, 19 nt, Artificial Sequence
  Description of Artificial Sequence: Synthetic oligonucleotide
  Sense strand starting at position 1571 of SEQ ID NO: 1242992
auuauuccacgugguagaa

SEQ ID NO: 1387147 - RNA, 19 nt, Artificial Sequence
  Description of Artificial Sequence: Synthetic oligonucleotide
  Antisense strand to SEQ ID NO: 1387146
uucuaccacguggaauaau

SEQ ID NO: 1387148 - RNA, 19 nt, Artificial Sequence
  Description of Artificial Sequence: Synthetic oligonucleotide
  Sense strand starting at position 1772 of SEQ ID NO: 1242992
ggacuuagguggcuggaaa

SEQ ID NO: 1387149 - RNA, 19 nt, Artificial Sequence
  Description of Artificial Sequence: Synthetic oligonucleotide
  Antisense strand to SEQ ID NO: 1387148
uuuccagccaccuaagucc

SEQ ID NO: 1387150 - RNA, 19 nt, Artificial Sequence
  Description of Artificial Sequence: Synthetic oligonucleotide
  Sense strand starting at position 2081 of SEQ ID NO: 1242992
cgaccaauagcgucagcuu

SEQ ID NO: 1387151 - RNA, 19 nt, Artificial Sequence
  Description of Artificial Sequence: Synthetic oligonucleotide
  Antisense strand to SEQ ID NO: 1387150
aagcugacgcuauuggucg

SEQ ID NO: 1387152 - RNA, 19 nt, Artificial Sequence
  Description of Artificial Sequence: Synthetic oligonucleotide
  Sense strand starting at position 2119 of SEQ ID NO: 1242992
cuucgaagugcucugcuuu

SEQ ID NO: 1387153 - RNA, 19 nt, Artificial Sequence
  Description of Artificial Sequence: Synthetic oligonucleotide
  Antisense strand to SEQ ID NO: 1387152
aaagcagagcacuucgaag

SEQ ID NO: 1387154 - RNA, 19 nt, Artificial Sequence
  Description of Artificial Sequence: Synthetic oligonucleotide
  Sense strand starting at position 2130 of SEQ ID NO: 1242992
ucugcuuuccgagaaauca

SEQ ID NO: 1387155 - RNA, 19 nt, Artificial Sequence
  Description of Artificial Sequence: Synthetic oligonucleotide
  Antisense strand to SEQ ID NO: 1387154
ugauuucucggaaagcaga

SEQ ID NO: 1387156 - RNA, 19 nt, Artificial Sequence
  Description of Artificial Sequence: Synthetic oligonucleotide
  Sense strand starting at position 2465 of SEQ ID NO: 1242992
gcuggauauugggcaguga

SEQ ID NO: 1387157 - RNA, 19 nt, Artificial Sequence
  Description of Artificial Sequence: Synthetic oligonucleotide
  Antisense strand to SEQ ID NO: 1387156
ucacugcccaauauccagc

SEQ ID NO: 1387158 - RNA, 19 nt, Artificial Sequence
  Description of Artificial Sequence: Synthetic oligonucleotide
  Sense strand starting at position 2466 of SEQ ID NO: 1242992
cuggauauugggcagugau

SEQ ID NO: 1387159 - RNA, 19 nt, Artificial Sequence
  Description of Artificial Sequence: Synthetic oligonucleotide
  Antisense strand to SEQ ID NO: 1387158
aucacugcccaauauccag

SEQ ID NO: 1387160 - RNA, 19 nt, Artificial Sequence
  Description of Artificial Sequence: Synthetic oligonucleotide
  Sense strand starting at position 2877 of SEQ ID NO: 1242992
aagcguuuccgcguucuau

SEQ ID NO: 1387161 - RNA, 19 nt, Artificial Sequence
  Description of Artificial Sequence: Synthetic oligonucleotide
  Antisense strand to SEQ ID NO: 1387160
auagaacgcggaaacgcuu

SEQ ID NO: 1387162 - RNA, 19 nt, Artificial Sequence
  Description of Artificial Sequence: Synthetic oligonucleotide
  Sense strand starting at position 2943 of SEQ ID NO: 1242992
uuuauugcccaguagagaa

SEQ ID NO: 1387163 - RNA, 19 nt, Artificial Sequence
  Description of Artificial Sequence: Synthetic oligonucleotide
  Antisense strand to SEQ ID NO: 1387162
uucucuacugggcaauaaa

SEQ ID NO: 1387164 - RNA, 19 nt, Artificial Sequence
  Description of Artificial Sequence: Synthetic oligonucleotide
  Sense strand starting at position 3120 of SEQ ID NO: 1242992
uuguaauguauugauggau

SEQ ID NO: 1387165 - RNA, 19 nt, Artificial Sequence
  Description of Artificial Sequence: Synthetic oligonucleotide
  Antisense strand to SEQ ID NO: 1387164
auccaucaauacauuacaa

SEQ ID NO: 1387166 - RNA, 19 nt, Artificial Sequence
  Description of Artificial Sequence: Synthetic oligonucleotide
  Sense strand starting at position 3170 of SEQ ID NO: 1242992
uagacaucacuugguauga

SEQ ID NO: 1387167 - RNA, 19 nt, Artificial Sequence
  Description of Artificial Sequence: Synthetic oligonucleotide
  Antisense strand to SEQ ID NO: 1387166
ucauaccaagugaugucua

SEQ ID NO: 1387168 - RNA, 19 nt, Artificial Sequence
  Description of Artificial Sequence: Synthetic oligonucleotide
  Sense strand starting at position 3171 of SEQ ID NO: 1242992
agacaucacuugguaugaa

SEQ ID NO: 1387169 - RNA, 19 nt, Artificial Sequence
  Description of Artificial Sequence: Synthetic oligonucleotide
  Antisense strand to SEQ ID NO: 1387168
uucauaccaagugaugucu

SEQ ID NO: 1387170 - RNA, 19 nt, Artificial Sequence
  Description of Artificial Sequence: Synthetic oligonucleotide
  Sense strand starting at position 3181 of SEQ ID NO: 1242992
ugguaugaauucccuaaug

SEQ ID NO: 1387171 - RNA, 19 nt, Artificial Sequence
  Description of Artificial Sequence: Synthetic oligonucleotide
  Antisense strand to SEQ ID NO: 1387170
cauuagggaauucauacca

SEQ ID NO: 1387172 - RNA, 19 nt, Artificial Sequence
  Description of Artificial Sequence: Synthetic oligonucleotide
  Sense strand starting at position 3183 of SEQ ID NO: 1242992
guaugaauucccuaaugcc

SEQ ID NO: 1387173 - RNA, 19 nt, Artificial Sequence
  Description of Artificial Sequence: Synthetic oligonucleotide
  Antisense strand to SEQ ID NO: 1387172
ggcauuagggaauucauac

SEQ ID NO: 1387174 - RNA, 19 nt, Artificial Sequence
  Description of Artificial Sequence: Synthetic oligonucleotide
  Sense strand starting at position 3231 of SEQ ID NO: 1242992
aagugaguuccgcaacauc

SEQ ID NO: 1387175 - RNA, 19 nt, Artificial Sequence
  Description of Artificial Sequence: Synthetic oligonucleotide
  Antisense strand to SEQ ID NO: 1387174
gauguugcggaacucacuu

SEQ ID NO: 1387176 - RNA, 19 nt, Artificial Sequence
  Description of Artificial Sequence: Synthetic oligonucleotide
  Sense strand starting at position 3234 of SEQ ID NO: 1242992
ugaguuccgcaacaucaaa

SEQ ID NO: 1387177 - RNA, 19 nt, Artificial Sequence
  Description of Artificial Sequence: Synthetic oligonucleotide
  Antisense strand to SEQ ID NO: 1387176
uuugauguugcggaacuca

SEQ ID NO: 1387178 - RNA, 19 nt, Artificial Sequence
  Description of Artificial Sequence: Synthetic oligonucleotide
  Sense strand starting at position 3403 of SEQ ID NO: 1242992
guauauguuuacucucaua

SEQ ID NO: 1387179 - RNA, 19 nt, Artificial Sequence
  Description of Artificial Sequence: Synthetic oligonucleotide
  Antisense strand to SEQ ID NO: 1387178
uaugagaguaaacauauac

SEQ ID NO: 1387180 - RNA, 19 nt, Artificial Sequence
  Description of Artificial Sequence: Synthetic oligonucleotide
  Sense strand starting at position 3438 of SEQ ID NO: 1242992
gcccuaagccuacacagau

SEQ ID NO: 1387181 - RNA, 19 nt, Artificial Sequence
  Description of Artificial Sequence: Synthetic oligonucleotide
  Antisense strand to SEQ ID NO: 1387180
aucuguguaggcuuagggc

SEQ ID NO: 1387182 - RNA, 19 nt, Artificial Sequence
  Description of Artificial Sequence: Synthetic oligonucleotide
  Sense strand starting at position 3470 of SEQ ID NO: 1242992
cugucugcugcacaaagau

SEQ ID NO: 1387183 - RNA, 19 nt, Artificial Sequence
  Description of Artificial Sequence: Synthetic oligonucleotide
  Antisense strand to SEQ ID NO: 1387182
aucuuugugcagcagacag

SEQ ID NO: 1387184 - RNA, 19 nt, Artificial Sequence
  Description of Artificial Sequence: Synthetic oligonucleotide
  Sense strand starting at position 3585 of SEQ ID NO: 1242992
aggugucacuauguacauu

SEQ ID NO: 1387185 - RNA, 19 nt, Artificial Sequence
  Description of Artificial Sequence: Synthetic oligonucleotide
  Antisense strand to SEQ ID NO: 1387184
aauguacauagugacaccu

SEQ ID NO: 1387186 - RNA, 19 nt, Artificial Sequence
  Description of Artificial Sequence: Synthetic oligonucleotide
  Sense strand starting at position 3586 of SEQ ID NO: 1242992
ggugucacuauguacauua

SEQ ID NO: 1387187 - RNA, 19 nt, Artificial Sequence
  Description of Artificial Sequence: Synthetic oligonucleotide
  Antisense strand to SEQ ID NO: 1387186
uaauguacauagugacacc

SEQ ID NO: 1387188 - RNA, 19 nt, Artificial Sequence
  Description of Artificial Sequence: Synthetic oligonucleotide
  Sense strand starting at position 3605 of SEQ ID NO: 1242992
caggaacuggcuugcauua

SEQ ID NO: 1387189 - RNA, 19 nt, Artificial Sequence
  Description of Artificial Sequence: Synthetic oligonucleotide
  Antisense strand to SEQ ID NO: 1387188
uaaugcaagccaguuccug

SEQ ID NO: 1387190 - RNA, 19 nt, Artificial Sequence
  Description of Artificial Sequence: Synthetic oligonucleotide
  Sense strand starting at position 3688 of SEQ ID NO: 1242992
accagauguguuuaguucu

SEQ ID NO: 1387191 - RNA, 19 nt, Artificial Sequence
  Description of Artificial Sequence: Synthetic oligonucleotide
  Antisense strand to SEQ ID NO: 1387190
agaacuaaacacaucuggu

SEQ ID NO: 1387192 - RNA, 19 nt, Artificial Sequence
  Description of Artificial Sequence: Synthetic oligonucleotide
  Sense strand starting at position 3718 of SEQ ID NO: 1242992
auggguauuuaugaggcaa

SEQ ID NO: 1387193 - RNA, 19 nt, Artificial Sequence
  Description of Artificial Sequence: Synthetic oligonucleotide
  Antisense strand to SEQ ID NO: 1387192
uugccucauaaauacccau

SEQ ID NO: 1387194 - RNA, 19 nt, Artificial Sequence
  Description of Artificial Sequence: Synthetic oligonucleotide
  Sense strand starting at position 3738 of SEQ ID NO: 1242992
uacuaugugcuagauauag

SEQ ID NO: 1387195 - RNA, 19 nt, Artificial Sequence
  Description of Artificial Sequence: Synthetic oligonucleotide
  Antisense strand to SEQ ID NO: 1387194
cuauaucuagcacauagua

SEQ ID NO: 1387196 - RNA, 19 nt, Artificial Sequence
  Description of Artificial Sequence: Synthetic oligonucleotide
  Sense strand starting at position 3740 of SEQ ID NO: 1242992
cuaugugcuagauauagug

SEQ ID NO: 1387197 - RNA, 19 nt, Artificial Sequence
  Description of Artificial Sequence: Synthetic oligonucleotide
  Antisense strand to SEQ ID NO: 1387196
cacuauaucuagcacauag

SEQ ID NO: 1387198 - RNA, 19 nt, Artificial Sequence
  Description of Artificial Sequence: Synthetic oligonucleotide
  Sense strand starting at position 3791 of SEQ ID NO: 1242992
ugucucaaucuuugagaca

SEQ ID NO: 1387199 - RNA, 19 nt, Artificial Sequence
  Description of Artificial Sequence: Synthetic oligonucleotide
  Antisense strand to SEQ ID NO: 1387198
ugucucaaagauugagaca

SEQ ID NO: 1387200 - RNA, 19 nt, Artificial Sequence
  Description of Artificial Sequence: Synthetic oligonucleotide
  Sense strand starting at position 527 of SEQ ID NO: 1242993
gcuaucuuccgagucgcua

SEQ ID NO: 1387201 - RNA, 19 nt, Artificial Sequence
  Description of Artificial Sequence: Synthetic oligonucleotide
  Antisense strand to SEQ ID NO: 1387200
uagcgacucggaagauagc

SEQ ID NO: 1387202 - RNA, 19 nt, Artificial Sequence
  Description of Artificial Sequence: Synthetic oligonucleotide
  Sense strand starting at position 631 of SEQ ID NO: 1242993
cgccgucuaaguucuccaa

SEQ ID NO: 1387203 - RNA, 19 nt, Artificial Sequence
  Description of Artificial Sequence: Synthetic oligonucleotide
  Antisense strand to SEQ ID NO: 1387202
uuggagaacuuagacggcg

SEQ ID NO: 1387204 - RNA, 19 nt, Artificial Sequence
  Description of Artificial Sequence: Synthetic oligonucleotide
  Sense strand starting at position 633 of SEQ ID NO: 1242993
ccgucuaaguucuccaaau

SEQ ID NO: 1387205 - RNA, 19 nt, Artificial Sequence
  Description of Artificial Sequence: Synthetic oligonucleotide
  Antisense strand to SEQ ID NO: 1387204
auuuggagaacuuagacgg

SEQ ID NO: 1387206 - RNA, 19 nt, Artificial Sequence
  Description of Artificial Sequence: Synthetic oligonucleotide
  Sense strand starting at position 634 of SEQ ID NO: 1242993
cgucuaaguucuccaaauc

SEQ ID NO: 1387207 - RNA, 19 nt, Artificial Sequence
  Description of Artificial Sequence: Synthetic oligonucleotide
  Antisense strand to SEQ ID NO: 1387206
gauuuggagaacuuagacg

SEQ ID NO: 1387208 - RNA, 19 nt, Artificial Sequence
  Description of Artificial Sequence: Synthetic oligonucleotide
  Sense strand starting at position 832 of SEQ ID NO: 1242993
gcgcccaagucaucuuauu

SEQ ID NO: 1387209 - RNA, 19 nt, Artificial Sequence
  Description of Artificial Sequence: Synthetic oligonucleotide
  Antisense strand to SEQ ID NO: 1387208
aauaagaugacuugggcgc

SEQ ID NO: 1387210 - RNA, 19 nt, Artificial Sequence
  Description of Artificial Sequence: Synthetic oligonucleotide
  Sense strand starting at position 1721 of SEQ ID NO: 1242993
cgcguucgccuauugaucu

SEQ ID NO: 1387211 - RNA, 19 nt, Artificial Sequence
  Description of Artificial Sequence: Synthetic oligonucleotide
  Antisense strand to SEQ ID NO: 1387210
agaucaauaggcgaacgcg

SEQ ID NO: 1387212 - RNA, 19 nt, Artificial Sequence
  Description of Artificial Sequence: Synthetic oligonucleotide
  Sense strand starting at position 1795 of SEQ ID NO: 1242993
cgaacagauuggcggagau

SEQ ID NO: 1387213 - RNA, 19 nt, Artificial Sequence
  Description of Artificial Sequence: Synthetic oligonucleotide
  Antisense strand to SEQ ID NO: 1387212
aucuccgccaaucuguucg

SEQ ID NO: 1387214 - RNA, 19 nt, Artificial Sequence
  Description of Artificial Sequence: Synthetic oligonucleotide
  Sense strand starting at position 1824 of SEQ ID NO: 1242993
ccgggcucugauugacauu

SEQ ID NO: 1387215 - RNA, 19 nt, Artificial Sequence
  Description of Artificial Sequence: Synthetic oligonucleotide
  Antisense strand to SEQ ID NO: 1387214
aaugucaaucagagcccgg

SEQ ID NO: 1387216 - RNA, 19 nt, Artificial Sequence
  Description of Artificial Sequence: Synthetic oligonucleotide
  Sense strand starting at position 2073 of SEQ ID NO: 1242993
ugcccuggacgcuaugaaa

SEQ ID NO: 1387217 - RNA, 19 nt, Artificial Sequence
  Description of Artificial Sequence: Synthetic oligonucleotide
  Antisense strand to SEQ ID NO: 1387216
uuucauagcguccagggca

SEQ ID NO: 1387218 - RNA, 19 nt, Artificial Sequence
  Description of Artificial Sequence: Synthetic oligonucleotide
  Sense strand starting at position 2780 of SEQ ID NO: 1242993
gggagugcguccuaacaga

SEQ ID NO: 1387219 - RNA, 19 nt, Artificial Sequence
  Description of Artificial Sequence: Synthetic oligonucleotide
  Antisense strand to SEQ ID NO: 1387218
ucuguuaggacgcacuccc

SEQ ID NO: 1387220 - RNA, 19 nt, Artificial Sequence
  Description of Artificial Sequence: Synthetic oligonucleotide
  Sense strand starting at position 2862 of SEQ ID NO: 1242993
cccagagauuagccacuua

SEQ ID NO: 1387221 - RNA, 19 nt, Artificial Sequence
  Description of Artificial Sequence: Synthetic oligonucleotide
  Antisense strand to SEQ ID NO: 1387220
uaaguggcuaaucucuggg

SEQ ID NO: 1387222 - RNA, 19 nt, Artificial Sequence
  Description of Artificial Sequence: Synthetic oligonucleotide
  Sense strand starting at position 2898 of SEQ ID NO: 1242993
gugugcgaaucccuuacua

SEQ ID NO: 1387223 - RNA, 19 nt, Artificial Sequence
  Description of Artificial Sequence: Synthetic oligonucleotide
  Antisense strand to SEQ ID NO: 1387222
uaguaagggauucgcacac

SEQ ID NO: 1387224 - RNA, 19 nt, Artificial Sequence
  Description of Artificial Sequence: Synthetic oligonucleotide
  Sense strand starting at position 2900 of SEQ ID NO: 1242993
gugcgaaucccuuacuaaa

SEQ ID NO: 1387225 - RNA, 19 nt, Artificial Sequence
  Description of Artificial Sequence: Synthetic oligonucleotide
  Antisense strand to SEQ ID NO: 1387224
uuuaguaagggauucgcac

SEQ ID NO: 1387226 - RNA, 19 nt, Artificial Sequence
  Description of Artificial Sequence: Synthetic oligonucleotide
  Sense strand starting at position 2983 of SEQ ID NO: 1242993
gccacaaaucggugaagca

SEQ ID NO: 1387227 - RNA, 19 nt, Artificial Sequence
  Description of Artificial Sequence: Synthetic oligonucleotide
  Antisense strand to SEQ ID NO: 1387226
ugcuucaccgauuuguggc

SEQ ID NO: 1387228 - RNA, 19 nt, Artificial Sequence
  Description of Artificial Sequence: Synthetic oligonucleotide
  Sense strand starting at position 3072 of SEQ ID NO: 1242993
uggagagcucuucgagaag

SEQ ID NO: 1387229 - RNA, 19 nt, Artificial Sequence
  Description of Artificial Sequence: Synthetic oligonucleotide
  Antisense strand to SEQ ID NO: 1387228
cuucucgaagagcucucca

SEQ ID NO: 1387230 - RNA, 19 nt, Artificial Sequence
  Description of Artificial Sequence: Synthetic oligonucleotide
  Sense strand starting at position 3075 of SEQ ID NO: 1242993
agagcucuucgagaaguuu

SEQ ID NO: 1387231 - RNA, 19 nt, Artificial Sequence
  Description of Artificial Sequence: Synthetic oligonucleotide
  Antisense strand to SEQ ID NO: 1387230
aaacuucucgaagagcucu

SEQ ID NO: 1387232 - RNA, 19 nt, Artificial Sequence
  Description of Artificial Sequence: Synthetic oligonucleotide
  Sense strand starting at position 3083 of SEQ ID NO: 1242993
ucgagaaguuucuguauug

SEQ ID NO: 1387233 - RNA, 19 nt, Artificial Sequence
  Description of Artificial Sequence: Synthetic oligonucleotide
  Antisense strand to SEQ ID NO: 1387232
caauacagaaacuucucga

SEQ ID NO: 1387234 - RNA, 19 nt, Artificial Sequence
  Description of Artificial Sequence: Synthetic oligonucleotide
  Sense strand starting at position 3227 of SEQ ID NO: 1242993
uugguuuaaugaugggaua

SEQ ID NO: 1387235 - RNA, 19 nt, Artificial Sequence
  Description of Artificial Sequence: Synthetic oligonucleotide
  Antisense strand to SEQ ID NO: 1387234
uaucccaucauuaaaccaa

SEQ ID NO: 1387236 - RNA, 19 nt, Artificial Sequence
  Description of Artificial Sequence: Synthetic oligonucleotide
  Sense strand starting at position 3228 of SEQ ID NO: 1242993
ugguuuaaugaugggauau

SEQ ID NO: 1387237 - RNA, 19 nt, Artificial Sequence
  Description of Artificial Sequence: Synthetic oligonucleotide
  Antisense strand to SEQ ID NO: 1387236
auaucccaucauuaaacca

SEQ ID NO: 1387238 - RNA, 19 nt, Artificial Sequence
  Description of Artificial Sequence: Synthetic oligonucleotide
  Sense strand starting at position 3229 of SEQ ID NO: 1242993
gguuuaaugaugggauauu

SEQ ID NO: 1387239 - RNA, 19 nt, Artificial Sequence
  Description of Artificial Sequence: Synthetic oligonucleotide
  Antisense strand to SEQ ID NO: 1387238
aauaucccaucauuaaacc

SEQ ID NO: 1387240 - RNA, 19 nt, Artificial Sequence
  Description of Artificial Sequence: Synthetic oligonucleotide
  Sense strand starting at position 3230 of SEQ ID NO: 1242993
guuuaaugaugggauauuu

SEQ ID NO: 1387241 - RNA, 19 nt, Artificial Sequence
  Description of Artificial Sequence: Synthetic oligonucleotide
  Antisense strand to SEQ ID NO: 1387240
aaauaucccaucauuaaac

SEQ ID NO: 1387242 - RNA, 19 nt, Artificial Sequence
  Description of Artificial Sequence: Synthetic oligonucleotide
  Sense strand starting at position 3239 of SEQ ID NO: 1242993
ugggauauuuccuaaauca

SEQ ID NO: 1387243 - RNA, 19 nt, Artificial Sequence
  Description of Artificial Sequence: Synthetic oligonucleotide
  Antisense strand to SEQ ID NO: 1387242
ugauuuaggaaauauccca

SEQ ID NO: 1387244 - RNA, 19 nt, Artificial Sequence
  Description of Artificial Sequence: Synthetic oligonucleotide
  Sense strand starting at position 3307 of SEQ ID NO: 1242993
agucgauagcggcauugaa

SEQ ID NO: 1387245 - RNA, 19 nt, Artificial Sequence
  Description of Artificial Sequence: Synthetic oligonucleotide
  Antisense strand to SEQ ID NO: 1387244
uucaaugccgcuaucgacu

SEQ ID NO: 1387246 - RNA, 19 nt, Artificial Sequence
  Description of Artificial Sequence: Synthetic oligonucleotide
  Sense strand starting at position 3561 of SEQ ID NO: 1242993
ccggcugucucugaucaca

SEQ ID NO: 1387247 - RNA, 19 nt, Artificial Sequence
  Description of Artificial Sequence: Synthetic oligonucleotide
  Antisense strand to SEQ ID NO: 1387246
ugugaucagagacagccgg

SEQ ID NO: 1387248 - RNA, 19 nt, Artificial Sequence
  Description of Artificial Sequence: Synthetic oligonucleotide
  Sense strand starting at position 3589 of SEQ ID NO: 1242993
agcccagcucuggaaugaa

SEQ ID NO: 1387249 - RNA, 19 nt, Artificial Sequence
  Description of Artificial Sequence: Synthetic oligonucleotide
  Antisense strand to SEQ ID NO: 1387248
uucauuccagagcugggcu

SEQ ID NO: 1387250 - RNA, 19 nt, Artificial Sequence
  Description of Artificial Sequence: Synthetic oligonucleotide
  Sense strand starting at position 3834 of SEQ ID NO: 1242993
cagacugcaucugaguagu

SEQ ID NO: 1387251 - RNA, 19 nt, Artificial Sequence
  Description of Artificial Sequence: Synthetic oligonucleotide
  Antisense strand to SEQ ID NO: 1387250
acuacucagaugcagucug

SEQ ID NO: 1387252 - RNA, 19 nt, Artificial Sequence
  Description of Artificial Sequence: Synthetic oligonucleotide
  Sense strand starting at position 3836 of SEQ ID NO: 1242993
gacugcaucugaguaguuu

SEQ ID NO: 1387253 - RNA, 19 nt, Artificial Sequence
  Description of Artificial Sequence: Synthetic oligonucleotide
  Antisense strand to SEQ ID NO: 1387252
aaacuacucagaugcaguc

SEQ ID NO: 1387254 - RNA, 19 nt, Artificial Sequence
  Description of Artificial Sequence: Synthetic oligonucleotide
  Sense strand starting at position 3844 of SEQ ID NO: 1242993
cugaguaguuucccuauca

SEQ ID NO: 1387255 - RNA, 19 nt, Artificial Sequence
  Description of Artificial Sequence: Synthetic oligonucleotide
  Antisense strand to SEQ ID NO: 1387254
ugauagggaaacuacucag

SEQ ID NO: 1387256 - RNA, 19 nt, Artificial Sequence
  Description of Artificial Sequence: Synthetic oligonucleotide
  Sense strand starting at position 3845 of SEQ ID NO: 1242993
ugaguaguuucccuaucac

SEQ ID NO: 1387257 - RNA, 19 nt, Artificial Sequence
  Description of Artificial Sequence: Synthetic oligonucleotide
  Antisense strand to SEQ ID NO: 1387256
gugauagggaaacuacuca

SEQ ID NO: 1387258 - RNA, 19 nt, Artificial Sequence
  Description of Artificial Sequence: Synthetic oligonucleotide
  Sense strand starting at position 3941 of SEQ ID NO: 1242993
gccgcccuggcuuugaaau

SEQ ID NO: 1387259 - RNA, 19 nt, Artificial Sequence
  Description of Artificial Sequence: Synthetic oligonucleotide
  Antisense strand to SEQ ID NO: 1387258
auuucaaagccagggcggc

SEQ ID NO: 1387260 - RNA, 19 nt, Artificial Sequence
  Description of Artificial Sequence: Synthetic oligonucleotide
  Sense strand starting at position 3942 of SEQ ID NO: 1242993
ccgcccuggcuuugaaaua

SEQ ID NO: 1387261 - RNA, 19 nt, Artificial Sequence
  Description of Artificial Sequence: Synthetic oligonucleotide
  Antisense strand to SEQ ID NO: 1387260
uauuucaaagccagggcgg

SEQ ID NO: 1387262 - RNA, 19 nt, Artificial Sequence
  Description of Artificial Sequence: Synthetic oligonucleotide
  Sense strand starting at position 3943 of SEQ ID NO: 1242993
cgcccuggcuuugaaauau

SEQ ID NO: 1387263 - RNA, 19 nt, Artificial Sequence
  Description of Artificial Sequence: Synthetic oligonucleotide
  Antisense strand to SEQ ID NO: 1387262
auauuucaaagccagggcg

SEQ ID NO: 1387264 - RNA, 19 nt, Artificial Sequence
  Description of Artificial Sequence: Synthetic oligonucleotide
  Sense strand starting at position 3952 of SEQ ID NO: 1242993
uuugaaauaucucuucgac

SEQ ID NO: 1387265 - RNA, 19 nt, Artificial Sequence
  Description of Artificial Sequence: Synthetic oligonucleotide
  Antisense strand to SEQ ID NO: 1387264
gucgaagagauauuucaaa

SEQ ID NO: 1387266 - RNA, 19 nt, Artificial Sequence
  Description of Artificial Sequence: Synthetic oligonucleotide
  Sense strand starting at position 3973 of SEQ ID NO: 1242993
cugauuucguuucccguua

SEQ ID NO: 1387267 - RNA, 19 nt, Artificial Sequence
  Description of Artificial Sequence: Synthetic oligonucleotide
  Antisense strand to SEQ ID NO: 1387266
uaacgggaaacgaaaucag

SEQ ID NO: 1387268 - RNA, 19 nt, Artificial Sequence
  Description of Artificial Sequence: Synthetic oligonucleotide
  Sense strand starting at position 3974 of SEQ ID NO: 1242993
ugauuucguuucccguuaa

SEQ ID NO: 1387269 - RNA, 19 nt, Artificial Sequence
  Description of Artificial Sequence: Synthetic oligonucleotide
  Antisense strand to SEQ ID NO: 1387268
uuaacgggaaacgaaauca

SEQ ID NO: 1387270 - RNA, 19 nt, Artificial Sequence
  Description of Artificial Sequence: Synthetic oligonucleotide
  Sense strand starting at position 3975 of SEQ ID NO: 1242993
gauuucguuucccguuaaa

SEQ ID NO: 1387271 - RNA, 19 nt, Artificial Sequence
  Description of Artificial Sequence: Synthetic oligonucleotide
  Antisense strand to SEQ ID NO: 1387270
uuuaacgggaaacgaaauc

SEQ ID NO: 1387272 - RNA, 19 nt, Artificial Sequence
  Description of Artificial Sequence: Synthetic oligonucleotide
  Sense strand starting at position 3978 of SEQ ID NO: 1242993
uucguuucccguuaaaccu

SEQ ID NO: 1387273 - RNA, 19 nt, Artificial Sequence
  Description of Artificial Sequence: Synthetic oligonucleotide
  Antisense strand to SEQ ID NO: 1387272
agguuuaacgggaaacgaa

SEQ ID NO: 1387274 - RNA, 19 nt, Artificial Sequence
  Description of Artificial Sequence: Synthetic oligonucleotide
  Sense strand starting at position 894 of SEQ ID NO: 1242994
gaccucaauuucuggguca

SEQ ID NO: 1387275 - RNA, 19 nt, Artificial Sequence
  Description of Artificial Sequence: Synthetic oligonucleotide
  Antisense strand to SEQ ID NO: 1387274
ugacccagaaauugagguc

SEQ ID NO: 1387276 - RNA, 19 nt, Artificial Sequence
  Description of Artificial Sequence: Synthetic oligonucleotide
  Sense strand starting at position 1292 of SEQ ID NO: 1242994
ucggauugcgaagauagga

SEQ ID NO: 1387277 - RNA, 19 nt, Artificial Sequence
  Description of Artificial Sequence: Synthetic oligonucleotide
  Antisense strand to SEQ ID NO: 1387276
uccuaucuucgcaauccga

SEQ ID NO: 1387278 - RNA, 19 nt, Artificial Sequence
  Description of Artificial Sequence: Synthetic oligonucleotide
  Sense strand starting at position 1302 of SEQ ID NO: 1242994
aagauaggauuacggauuu

SEQ ID NO: 1387279 - RNA, 19 nt, Artificial Sequence
  Description of Artificial Sequence: Synthetic oligonucleotide
  Antisense strand to SEQ ID NO: 1387278
aaauccguaauccuaucuu

SEQ ID NO: 1387280 - RNA, 19 nt, Artificial Sequence
  Description of Artificial Sequence: Synthetic oligonucleotide
  Sense strand starting at position 1376 of SEQ ID NO: 1242994
gcacgcuucugcucaaauu

SEQ ID NO: 1387281 - RNA, 19 nt, Artificial Sequence
  Description of Artificial Sequence: Synthetic oligonucleotide
  Antisense strand to SEQ ID NO: 1387280
aauuugagcagaagcgugc

SEQ ID NO: 1387282 - RNA, 19 nt, Artificial Sequence
  Description of Artificial Sequence: Synthetic oligonucleotide
  Sense strand starting at position 1385 of SEQ ID NO: 1242994
ugcucaaauuucgagucua

SEQ ID NO: 1387283 - RNA, 19 nt, Artificial Sequence
  Description of Artificial Sequence: Synthetic oligonucleotide
  Antisense strand to SEQ ID NO: 1387282
uagacucgaaauuugagca

SEQ ID NO: 1387284 - RNA, 19 nt, Artificial Sequence
  Description of Artificial Sequence: Synthetic oligonucleotide
  Sense strand starting at position 1466 of SEQ ID NO: 1242994
ggagcuuacguuuacacca

SEQ ID NO: 1387285 - RNA, 19 nt, Artificial Sequence
  Description of Artificial Sequence: Synthetic oligonucleotide
  Antisense strand to SEQ ID NO: 1387284
ugguguaaacguaagcucc

SEQ ID NO: 1387286 - RNA, 19 nt, Artificial Sequence
  Description of Artificial Sequence: Synthetic oligonucleotide
  Sense strand starting at position 1611 of SEQ ID NO: 1242994
gagacaaucgcccaaguuu

SEQ ID NO: 1387287 - RNA, 19 nt, Artificial Sequence
  Description of Artificial Sequence: Synthetic oligonucleotide
  Antisense strand to SEQ ID NO: 1387286
aaacuugggcgauugucuc

SEQ ID NO: 1387288 - RNA, 19 nt, Artificial Sequence
  Description of Artificial Sequence: Synthetic oligonucleotide
  Sense strand starting at position 1733 of SEQ ID NO: 1242994
cgcggaucccgcucacuua

SEQ ID NO: 1387289 - RNA, 19 nt, Artificial Sequence
  Description of Artificial Sequence: Synthetic oligonucleotide
  Antisense strand to SEQ ID NO: 1387288
uaagugagcgggauccgcg

SEQ ID NO: 1387290 - RNA, 19 nt, Artificial Sequence
  Description of Artificial Sequence: Synthetic oligonucleotide
  Sense strand starting at position 2326 of SEQ ID NO: 1242994
ccaagaugcuaaguuggaa

SEQ ID NO: 1387291 - RNA, 19 nt, Artificial Sequence
  Description of Artificial Sequence: Synthetic oligonucleotide
  Antisense strand to SEQ ID NO: 1387290
uuccaacuuagcaucuugg

SEQ ID NO: 1387292 - RNA, 19 nt, Artificial Sequence
  Description of Artificial Sequence: Synthetic oligonucleotide
  Sense strand starting at position 2329 of SEQ ID NO: 1242994
agaugcuaaguuggaaauu

SEQ ID NO: 1387293 - RNA, 19 nt, Artificial Sequence
  Description of Artificial Sequence: Synthetic oligonucleotide
  Antisense strand to SEQ ID NO: 1387292
aauuuccaacuuagcaucu

SEQ ID NO: 1387294 - RNA, 19 nt, Artificial Sequence
  Description of Artificial Sequence: Synthetic oligonucleotide
  Sense strand starting at position 2338 of SEQ ID NO: 1242994
guuggaaauugaggauucu

SEQ ID NO: 1387295 - RNA, 19 nt, Artificial Sequence
  Description of Artificial Sequence: Synthetic oligonucleotide
  Antisense strand to SEQ ID NO: 1387294
agaauccucaauuuccaac

SEQ ID NO: 1387296 - RNA, 19 nt, Artificial Sequence
  Description of Artificial Sequence: Synthetic oligonucleotide
  Sense strand starting at position 2668 of SEQ ID NO: 1242994
gccgaucucuuccaacuuu

SEQ ID NO: 1387297 - RNA, 19 nt, Artificial Sequence
  Description of Artificial Sequence: Synthetic oligonucleotide
  Antisense strand to SEQ ID NO: 1387296
aaaguuggaagagaucggc

SEQ ID NO: 1387298 - RNA, 19 nt, Artificial Sequence
  Description of Artificial Sequence: Synthetic oligonucleotide
  Sense strand starting at position 2792 of SEQ ID NO: 1242994
acaguagaucgcggacuua

SEQ ID NO: 1387299 - RNA, 19 nt, Artificial Sequence
  Description of Artificial Sequence: Synthetic oligonucleotide
  Antisense strand to SEQ ID NO: 1387298
uaaguccgcgaucuacugu

SEQ ID NO: 1387300 - RNA, 19 nt, Artificial Sequence
  Description of Artificial Sequence: Synthetic oligonucleotide
  Sense strand starting at position 2909 of SEQ ID NO: 1242994
ggagauccggaaugaaagu

SEQ ID NO: 1387301 - RNA, 19 nt, Artificial Sequence
  Description of Artificial Sequence: Synthetic oligonucleotide
  Antisense strand to SEQ ID NO: 1387300
acuuucauuccggaucucc

SEQ ID NO: 1387302 - RNA, 19 nt, Artificial Sequence
  Description of Artificial Sequence: Synthetic oligonucleotide
  Sense strand starting at position 3092 of SEQ ID NO: 1242994
gacacugguuccuggaacu

SEQ ID NO: 1387303 - RNA, 19 nt, Artificial Sequence
  Description of Artificial Sequence: Synthetic oligonucleotide
  Antisense strand to SEQ ID NO: 1387302
aguuccaggaaccaguguc

SEQ ID NO: 1387304 - RNA, 19 nt, Artificial Sequence
  Description of Artificial Sequence: Synthetic oligonucleotide
  Sense strand starting at position 3472 of SEQ ID NO: 1242994
cggccacacaguuagaaua

SEQ ID NO: 1387305 - RNA, 19 nt, Artificial Sequence
  Description of Artificial Sequence: Synthetic oligonucleotide
  Antisense strand to SEQ ID NO: 1387304
uauucuaacuguguggccg

SEQ ID NO: 1387306 - RNA, 19 nt, Artificial Sequence
  Description of Artificial Sequence: Synthetic oligonucleotide
  Sense strand starting at position 3546 of SEQ ID NO: 1242994
acucgaacucugggacaga

SEQ ID NO: 1387307 - RNA, 19 nt, Artificial Sequence
  Description of Artificial Sequence: Synthetic oligonucleotide
  Antisense strand to SEQ ID NO: 1387306
ucugucccagaguucgagu

SEQ ID NO: 1387308 - RNA, 19 nt, Artificial Sequence
  Description of Artificial Sequence: Synthetic oligonucleotide
  Sense strand starting at position 3631 of SEQ ID NO: 1242994
ucgggaacuucgcauaaug

SEQ ID NO: 1387309 - RNA, 19 nt, Artificial Sequence
  Description of Artificial Sequence: Synthetic oligonucleotide
  Antisense strand to SEQ ID NO: 1387308
cauuaugcgaaguucccga

SEQ ID NO: 1387310 - RNA, 19 nt, Artificial Sequence
  Description of Artificial Sequence: Synthetic oligonucleotide
  Sense strand starting at position 3663 of SEQ ID NO: 1242994
gccgaagcauaacuauaua

SEQ ID NO: 1387311 - RNA, 19 nt, Artificial Sequence
  Description of Artificial Sequence: Synthetic oligonucleotide
  Antisense strand to SEQ ID NO: 1387310
uauauaguuaugcuucggc

SEQ ID NO: 1387312 - RNA, 19 nt, Artificial Sequence
  Description of Artificial Sequence: Synthetic oligonucleotide
  Sense strand starting at position 3679 of SEQ ID NO: 1242994
auacaaaguuucucgcauu

SEQ ID NO: 1387313 - RNA, 19 nt, Artificial Sequence
  Description of Artificial Sequence: Synthetic oligonucleotide
  Antisense strand to SEQ ID NO: 1387312
aaugcgagaaacuuuguau

SEQ ID NO: 1387314 - RNA, 19 nt, Artificial Sequence
  Description of Artificial Sequence: Synthetic oligonucleotide
  Sense strand starting at position 3682 of SEQ ID NO: 1242994
caaaguuucucgcauugac

SEQ ID NO: 1387315 - RNA, 19 nt, Artificial Sequence
  Description of Artificial Sequence: Synthetic oligonucleotide
  Antisense strand to SEQ ID NO: 1387314
gucaaugcgagaaacuuug

SEQ ID NO: 1387316 - RNA, 19 nt, Artificial Sequence
  Description of Artificial Sequence: Synthetic oligonucleotide
  Sense strand starting at position 3685 of SEQ ID NO: 1242994
aguuucucgcauugacuuu

SEQ ID NO: 1387317 - RNA, 19 nt, Artificial Sequence
  Description of Artificial Sequence: Synthetic oligonucleotide
  Antisense strand to SEQ ID NO: 1387316
aaagucaaugcgagaaacu

SEQ ID NO: 1387318 - RNA, 19 nt, Artificial Sequence
  Description of Artificial Sequence: Synthetic oligonucleotide
  Sense strand starting at position 3696 of SEQ ID NO: 1242994
uugacuuugacgggcgaga

SEQ ID NO: 1387319 - RNA, 19 nt, Artificial Sequence
  Description of Artificial Sequence: Synthetic oligonucleotide
  Antisense strand to SEQ ID NO: 1387318
ucucgcccgucaaagucaa

SEQ ID NO: 1387320 - RNA, 19 nt, Artificial Sequence
  Description of Artificial Sequence: Synthetic oligonucleotide
  Sense strand starting at position 3716 of SEQ ID NO: 1242994
guacuuuauuucgcgaucu

SEQ ID NO: 1387321 - RNA, 19 nt, Artificial Sequence
  Description of Artificial Sequence: Synthetic oligonucleotide
  Antisense strand to SEQ ID NO: 1387320
agaucgcgaaauaaaguac

SEQ ID NO: 1387322 - RNA, 19 nt, Artificial Sequence
  Description of Artificial Sequence: Synthetic oligonucleotide
  Sense strand starting at position 3717 of SEQ ID NO: 1242994
uacuuuauuucgcgaucuc

SEQ ID NO: 1387323 - RNA, 19 nt, Artificial Sequence
  Description of Artificial Sequence: Synthetic oligonucleotide
  Antisense strand to SEQ ID NO: 1387322
gagaucgcgaaauaaagua

SEQ ID NO: 1387324 - RNA, 19 nt, Artificial Sequence
  Description of Artificial Sequence: Synthetic oligonucleotide
  Sense strand starting at position 3718 of SEQ ID NO: 1242994
acuuuauuucgcgaucuca

SEQ ID NO: 1387325 - RNA, 19 nt, Artificial Sequence
  Description of Artificial Sequence: Synthetic oligonucleotide
  Antisense strand to SEQ ID NO: 1387324
ugagaucgcgaaauaaagu

SEQ ID NO: 1387326 - RNA, 19 nt, Artificial Sequence
  Description of Artificial Sequence: Synthetic oligonucleotide
  Sense strand starting at position 3845 of SEQ ID NO: 1242994
gccugagcgguucagacua

SEQ ID NO: 1387327 - RNA, 19 nt, Artificial Sequence
  Description of Artificial Sequence: Synthetic oligonucleotide
  Antisense strand to SEQ ID NO: 1387326
uagucugaaccgcucaggc

SEQ ID NO: 1387328 - RNA, 19 nt, Artificial Sequence
  Description of Artificial Sequence: Synthetic oligonucleotide
  Sense strand starting at position 3857 of SEQ ID NO: 1242994
cagacuacauucuccgaga

SEQ ID NO: 1387329 - RNA, 19 nt, Artificial Sequence
  Description of Artificial Sequence: Synthetic oligonucleotide
  Antisense strand to SEQ ID NO: 1387328
ucucggagaauguagucug

SEQ ID NO: 1387330 - RNA, 19 nt, Artificial Sequence
  Description of Artificial Sequence: Synthetic oligonucleotide
  Sense strand starting at position 321 of SEQ ID NO: 1242995
aucagauaaucagauugcu

SEQ ID NO: 1387331 - RNA, 19 nt, Artificial Sequence
  Description of Artificial Sequence: Synthetic oligonucleotide
  Antisense strand to SEQ ID NO: 1387330
agcaaucugauuaucugau

SEQ ID NO: 1387332 - RNA, 19 nt, Artificial Sequence
  Description of Artificial Sequence: Synthetic oligonucleotide
  Sense strand starting at position 588 of SEQ ID NO: 1242995
ggccuuagagaccauuauu

SEQ ID NO: 1387333 - RNA, 19 nt, Artificial Sequence
  Description of Artificial Sequence: Synthetic oligonucleotide
  Antisense strand to SEQ ID NO: 1387332
aauaauggucucuaaggcc

SEQ ID NO: 1387334 - RNA, 19 nt, Artificial Sequence
  Description of Artificial Sequence: Synthetic oligonucleotide
  Sense strand starting at position 626 of SEQ ID NO: 1242995
cauucuauagauugggagu

SEQ ID NO: 1387335 - RNA, 19 nt, Artificial Sequence
  Description of Artificial Sequence: Synthetic oligonucleotide
  Antisense strand to SEQ ID NO: 1387334
acucccaaucuauagaaug

SEQ ID NO: 1387336 - RNA, 19 nt, Artificial Sequence
  Description of Artificial Sequence: Synthetic oligonucleotide
  Sense strand starting at position 658 of SEQ ID NO: 1242995
gagugugagacuugucuaa

SEQ ID NO: 1387337 - RNA, 19 nt, Artificial Sequence
  Description of Artificial Sequence: Synthetic oligonucleotide
  Antisense strand to SEQ ID NO: 1387336
uuagacaagucucacacuc

SEQ ID NO: 1387338 - RNA, 19 nt, Artificial Sequence
  Description of Artificial Sequence: Synthetic oligonucleotide
  Sense strand starting at position 662 of SEQ ID NO: 1242995
gugagacuugucuaagauc

SEQ ID NO: 1387339 - RNA, 19 nt, Artificial Sequence
  Description of Artificial Sequence: Synthetic oligonucleotide
  Antisense strand to SEQ ID NO: 1387338
gaucuuagacaagucucac

SEQ ID NO: 1387340 - RNA, 19 nt, Artificial Sequence
  Description of Artificial Sequence: Synthetic oligonucleotide
  Sense strand starting at position 665 of SEQ ID NO: 1242995
agacuugucuaagaucaca

SEQ ID NO: 1387341 - RNA, 19 nt, Artificial Sequence
  Description of Artificial Sequence: Synthetic oligonucleotide
  Antisense strand to SEQ ID NO: 1387340
ugugaucuuagacaagucu

SEQ ID NO: 1387342 - RNA, 19 nt, Artificial Sequence
  Description of Artificial Sequence: Synthetic oligonucleotide
  Sense strand starting at position 773 of SEQ ID NO: 1242995
cgcagaacuuucccaggaa

SEQ ID NO: 1387343 - RNA, 19 nt, Artificial Sequence
  Description of Artificial Sequence: Synthetic oligonucleotide
  Antisense strand to SEQ ID NO: 1387342
uuccugggaaaguucugcg

SEQ ID NO: 1387344 - RNA, 19 nt, Artificial Sequence
  Description of Artificial Sequence: Synthetic oligonucleotide
  Sense strand starting at position 774 of SEQ ID NO: 1242995
gcagaacuuucccaggaaa

SEQ ID NO: 1387345 - RNA, 19 nt, Artificial Sequence
  Description of Artificial Sequence: Synthetic oligonucleotide
  Antisense strand to SEQ ID NO: 1387344
uuuccugggaaaguucugc

SEQ ID NO: 1387346 - RNA, 19 nt, Artificial Sequence
  Description of Artificial Sequence: Synthetic oligonucleotide
  Sense strand starting at position 785 of SEQ ID NO: 1242995
ccaggaaacccuugucauu

SEQ ID NO: 1387347 - RNA, 19 nt, Artificial Sequence
  Description of Artificial Sequence: Synthetic oligonucleotide
  Antisense strand to SEQ ID NO: 1387346
aaugacaaggguuuccugg

SEQ ID NO: 1387348 - RNA, 19 nt, Artificial Sequence
  Description of Artificial Sequence: Synthetic oligonucleotide
  Sense strand starting at position 810 of SEQ ID NO: 1242995
cauccacuuugguuuggaa

SEQ ID NO: 1387349 - RNA, 19 nt, Artificial Sequence
  Description of Artificial Sequence: Synthetic oligonucleotide
  Antisense strand to SEQ ID NO: 1387348
uuccaaaccaaaguggaug

SEQ ID NO: 1387350 - RNA, 19 nt, Artificial Sequence
  Description of Artificial Sequence: Synthetic oligonucleotide
  Sense strand starting at position 874 of SEQ ID NO: 1242995
gagaauagccgaggucaac

SEQ ID NO: 1387351 - RNA, 19 nt, Artificial Sequence
  Description of Artificial Sequence: Synthetic oligonucleotide
  Antisense strand to SEQ ID NO: 1387350
guugaccucggcuauucuc

SEQ ID NO: 1387352 - RNA, 19 nt, Artificial Sequence
  Description of Artificial Sequence: Synthetic oligonucleotide
  Sense strand starting at position 899 of SEQ ID NO: 1242995
acaacaauauggugagaug

SEQ ID NO: 1387353 - RNA, 19 nt, Artificial Sequence
  Description of Artificial Sequence: Synthetic oligonucleotide
  Antisense strand to SEQ ID NO: 1387352
caucucaccauauuguugu

SEQ ID NO: 1387354 - RNA, 19 nt, Artificial Sequence
  Description of Artificial Sequence: Synthetic oligonucleotide
  Sense strand starting at position 921 of SEQ ID NO: 1242995
agcguuguagccuacaagu

SEQ ID NO: 1387355 - RNA, 19 nt, Artificial Sequence
  Description of Artificial Sequence: Synthetic oligonucleotide
  Antisense strand to SEQ ID NO: 1387354
acuuguaggcuacaacgcu

SEQ ID NO: 1387356 - RNA, 19 nt, Artificial Sequence
  Description of Artificial Sequence: Synthetic oligonucleotide
  Sense strand starting at position 1152 of SEQ ID NO: 1242995
cugggagaucccugugauc

SEQ ID NO: 1387357 - RNA, 19 nt, Artificial Sequence
  Description of Artificial Sequence: Synthetic oligonucleotide
  Antisense strand to SEQ ID NO: 1387356
gaucacagggaucucccag

SEQ ID NO: 1387358 - RNA, 19 nt, Artificial Sequence
  Description of Artificial Sequence: Synthetic oligonucleotide
  Sense strand starting at position 1192 of SEQ ID NO: 1242995
uggucagagugcucauguu

SEQ ID NO: 1387359 - RNA, 19 nt, Artificial Sequence
  Description of Artificial Sequence: Synthetic oligonucleotide
  Antisense strand to SEQ ID NO: 1387358
aacaugagcacucugacca

SEQ ID NO: 1387360 - RNA, 19 nt, Artificial Sequence
  Description of Artificial Sequence: Synthetic oligonucleotide
  Sense strand starting at position 1245 of SEQ ID NO: 1242995
gugaaacguucucauuuag

SEQ ID NO: 1387361 - RNA, 19 nt, Artificial Sequence
  Description of Artificial Sequence: Synthetic oligonucleotide
  Antisense strand to SEQ ID NO: 1387360
cuaaaugagaacguuucac

SEQ ID NO: 1387362 - RNA, 19 nt, Artificial Sequence
  Description of Artificial Sequence: Synthetic oligonucleotide
  Sense strand starting at position 2072 of SEQ ID NO: 1242995
cuccaaauuacccgggaga

SEQ ID NO: 1387363 - RNA, 19 nt, Artificial Sequence
  Description of Artificial Sequence: Synthetic oligonucleotide
  Antisense strand to SEQ ID NO: 1387362
ucucccggguaauuuggag

SEQ ID NO: 1387364 - RNA, 19 nt, Artificial Sequence
  Description of Artificial Sequence: Synthetic oligonucleotide
  Sense strand starting at position 2073 of SEQ ID NO: 1242995
uccaaauuacccgggagaa

SEQ ID NO: 1387365 - RNA, 19 nt, Artificial Sequence
  Description of Artificial Sequence: Synthetic oligonucleotide
  Antisense strand to SEQ ID NO: 1387364
uucucccggguaauuugga

SEQ ID NO: 1387366 - RNA, 19 nt, Artificial Sequence
  Description of Artificial Sequence: Synthetic oligonucleotide
  Sense strand starting at position 2271 of SEQ ID NO: 1242995
gagacaggagucugaguga

SEQ ID NO: 1387367 - RNA, 19 nt, Artificial Sequence
  Description of Artificial Sequence: Synthetic oligonucleotide
  Antisense strand to SEQ ID NO: 1387366
ucacucagacuccugucuc

SEQ ID NO: 1387368 - RNA, 19 nt, Artificial Sequence
  Description of Artificial Sequence: Synthetic oligonucleotide
  Sense strand starting at position 2274 of SEQ ID NO: 1242995
acaggagucugagugaaca

SEQ ID NO: 1387369 - RNA, 19 nt, Artificial Sequence
  Description of Artificial Sequence: Synthetic oligonucleotide
  Antisense strand to SEQ ID NO: 1387368
uguucacucagacuccugu

SEQ ID NO: 1387370 - RNA, 19 nt, Artificial Sequence
  Description of Artificial Sequence: Synthetic oligonucleotide
  Sense strand starting at position 2616 of SEQ ID NO: 1242995
gcugccugguccucgagua

SEQ ID NO: 1387371 - RNA, 19 nt, Artificial Sequence
  Description of Artificial Sequence: Synthetic oligonucleotide
  Antisense strand to SEQ ID NO: 1387370
uacucgaggaccaggcagc

SEQ ID NO: 1387372 - RNA, 19 nt, Artificial Sequence
  Description of Artificial Sequence: Synthetic oligonucleotide
  Sense strand starting at position 2674 of SEQ ID NO: 1242995
cucagauuccgucgggaaa

SEQ ID NO: 1387373 - RNA, 19 nt, Artificial Sequence
  Description of Artificial Sequence: Synthetic oligonucleotide
  Antisense strand to SEQ ID NO: 1387372
uuucccgacggaaucugag

SEQ ID NO: 1387374 - RNA, 19 nt, Artificial Sequence
  Description of Artificial Sequence: Synthetic oligonucleotide
  Sense strand starting at position 2675 of SEQ ID NO: 1242995
ucagauuccgucgggaaac

SEQ ID NO: 1387375 - RNA, 19 nt, Artificial Sequence
  Description of Artificial Sequence: Synthetic oligonucleotide
  Antisense strand to SEQ ID NO: 1387374
guuucccgacggaaucuga

SEQ ID NO: 1387376 - RNA, 19 nt, Artificial Sequence
  Description of Artificial Sequence: Synthetic oligonucleotide
  Sense strand starting at position 2719 of SEQ ID NO: 1242995
gcaggcugcuugcuaagau

SEQ ID NO: 1387377 - RNA, 19 nt, Artificial Sequence
  Description of Artificial Sequence: Synthetic oligonucleotide
  Antisense strand to SEQ ID NO: 1387376
aucuuagcaagcagccugc

SEQ ID NO: 1387378 - RNA, 19 nt, Artificial Sequence
  Description of Artificial Sequence: Synthetic oligonucleotide
  Sense strand starting at position 2731 of SEQ ID NO: 1242995
cuaagaucccugggcaucu

SEQ ID NO: 1387379 - RNA, 19 nt, Artificial Sequence
  Description of Artificial Sequence: Synthetic oligonucleotide
  Antisense strand to SEQ ID NO: 1387378
agaugcccagggaucuuag

SEQ ID NO: 1387380 - RNA, 19 nt, Artificial Sequence
  Description of Artificial Sequence: Synthetic oligonucleotide
  Sense strand starting at position 3088 of SEQ ID NO: 1242995
ccaauuugcgagcacggua

SEQ ID NO: 1387381 - RNA, 19 nt, Artificial Sequence
  Description of Artificial Sequence: Synthetic oligonucleotide
  Antisense strand to SEQ ID NO: 1387380
uaccgugcucgcaaauugg

SEQ ID NO: 1387382 - RNA, 19 nt, Artificial Sequence
  Description of Artificial Sequence: Synthetic oligonucleotide
  Sense strand starting at position 3229 of SEQ ID NO: 1242995
gcaggaauccagugggauu

SEQ ID NO: 1387383 - RNA, 19 nt, Artificial Sequence
  Description of Artificial Sequence: Synthetic oligonucleotide
  Antisense strand to SEQ ID NO: 1387382
aaucccacuggauuccugc

SEQ ID NO: 1387384 - RNA, 19 nt, Artificial Sequence
  Description of Artificial Sequence: Synthetic oligonucleotide
  Sense strand starting at position 3423 of SEQ ID NO: 1242995
gccuguggcccagaagaua

SEQ ID NO: 1387385 - RNA, 19 nt, Artificial Sequence
  Description of Artificial Sequence: Synthetic oligonucleotide
  Antisense strand to SEQ ID NO: 1387384
uaucuucugggccacaggc

SEQ ID NO: 1387386 - RNA, 19 nt, Artificial Sequence
  Description of Artificial Sequence: Synthetic oligonucleotide
  Sense strand starting at position 3536 of SEQ ID NO: 1242995
ugaucucuuuagcaugaca

SEQ ID NO: 1387387 - RNA, 19 nt, Artificial Sequence
  Description of Artificial Sequence: Synthetic oligonucleotide
  Antisense strand to SEQ ID NO: 1387386
ugucaugcuaaagagauca

SEQ ID NO: 1387388 - RNA, 19 nt, Artificial Sequence
  Description of Artificial Sequence: Synthetic oligonucleotide
  Sense strand starting at position 3594 of SEQ ID NO: 1242995
cagaaugcucaaggagcuu

SEQ ID NO: 1387389 - RNA, 19 nt, Artificial Sequence
  Description of Artificial Sequence: Synthetic oligonucleotide
  Antisense strand to SEQ ID NO: 1387388
aagcuccuugagcauucug

SEQ ID NO: 1387390 - RNA, 19 nt, Artificial Sequence
  Description of Artificial Sequence: Synthetic oligonucleotide
  Sense strand starting at position 3636 of SEQ ID NO: 1242995
ugcuuaagagauuguuaac

SEQ ID NO: 1387391 - RNA, 19 nt, Artificial Sequence
  Description of Artificial Sequence: Synthetic oligonucleotide
  Antisense strand to SEQ ID NO: 1387390
guuaacaaucucuuaagca

SEQ ID NO: 1387392 - RNA, 19 nt, Artificial Sequence
  Description of Artificial Sequence: Synthetic oligonucleotide
  Sense strand starting at position 3639 of SEQ ID NO: 1242995
uuaagagauuguuaacaug

SEQ ID NO: 1387393 - RNA, 19 nt, Artificial Sequence
  Description of Artificial Sequence: Synthetic oligonucleotide
  Antisense strand to SEQ ID NO: 1387392
cauguuaacaaucucuuaa

SEQ ID NO: 1387394 - RNA, 19 nt, Artificial Sequence
  Description of Artificial Sequence: Synthetic oligonucleotide
  Sense strand starting at position 3712 of SEQ ID NO: 1242995
ugcuguuaccuuggagaaa

SEQ ID NO: 1387395 - RNA, 19 nt, Artificial Sequence
  Description of Artificial Sequence: Synthetic oligonucleotide
  Antisense strand to SEQ ID NO: 1387394
uuucuccaagguaacagca

SEQ ID NO: 1387396 - RNA, 19 nt, Artificial Sequence
  Description of Artificial Sequence: Synthetic oligonucleotide
  Sense strand starting at position 3713 of SEQ ID NO: 1242995
gcuguuaccuuggagaaac

SEQ ID NO: 1387397 - RNA, 19 nt, Artificial Sequence
  Description of Artificial Sequence: Synthetic oligonucleotide
  Antisense strand to SEQ ID NO: 1387396
guuucuccaagguaacagc

SEQ ID NO: 1387398 - RNA, 19 nt, Artificial Sequence
  Description of Artificial Sequence: Synthetic oligonucleotide
  Sense strand starting at position 3734 of SEQ ID NO: 1242995
ugcguucauccagggaaac

SEQ ID NO: 1387399 - RNA, 19 nt, Artificial Sequence
  Description of Artificial Sequence: Synthetic oligonucleotide
  Antisense strand to SEQ ID NO: 1387398
guuucccuggaugaacgca

SEQ ID NO: 1387400 - RNA, 19 nt, Artificial Sequence
  Description of Artificial Sequence: Synthetic oligonucleotide
  Sense strand starting at position 3735 of SEQ ID NO: 1242995
gcguucauccagggaaacu

SEQ ID NO: 1387401 - RNA, 19 nt, Artificial Sequence
  Description of Artificial Sequence: Synthetic oligonucleotide
  Antisense strand to SEQ ID NO: 1387400
aguuucccuggaugaacgc

SEQ ID NO: 1387402 - RNA, 19 nt, Artificial Sequence
  Description of Artificial Sequence: Synthetic oligonucleotide
  Sense strand starting at position 3784 of SEQ ID NO: 1242995
cagauugacuuagugauaa

SEQ ID NO: 1387403 - RNA, 19 nt, Artificial Sequence
  Description of Artificial Sequence: Synthetic oligonucleotide
  Antisense strand to SEQ ID NO: 1387402
uuaucacuaagucaaucug

SEQ ID NO: 1387404 - RNA, 19 nt, Artificial Sequence
  Description of Artificial Sequence: Synthetic oligonucleotide
  Sense strand starting at position 3874 of SEQ ID NO: 1242995
uggauacaucuaugcuauu

SEQ ID NO: 1387405 - RNA, 19 nt, Artificial Sequence
  Description of Artificial Sequence: Synthetic oligonucleotide
  Antisense strand to SEQ ID NO: 1387404
aauagcauagauguaucca

SEQ ID NO: 1387406 - RNA, 19 nt, Artificial Sequence
  Description of Artificial Sequence: Synthetic oligonucleotide
  Sense strand starting at position 3899 of SEQ ID NO: 1242995
aaguaagaauuggagagua

SEQ ID NO: 1387407 - RNA, 19 nt, Artificial Sequence
  Description of Artificial Sequence: Synthetic oligonucleotide
  Antisense strand to SEQ ID NO: 1387406
uacucuccaauucuuacuu

SEQ ID NO: 1387408 - RNA, 19 nt, Artificial Sequence
  Description of Artificial Sequence: Synthetic oligonucleotide
  Sense strand starting at position 3978 of SEQ ID NO: 1242995
gagggaagguaugucaauu

SEQ ID NO: 1387409 - RNA, 19 nt, Artificial Sequence
  Description of Artificial Sequence: Synthetic oligonucleotide
  Antisense strand to SEQ ID NO: 1387408
aauugacauaccuucccuc

SEQ ID NO: 1387410 - RNA, 19 nt, Artificial Sequence
  Description of Artificial Sequence: Synthetic oligonucleotide
  Sense strand starting at position 55 of SEQ ID NO: 1242996
ucuggagcuccugauaauu

SEQ ID NO: 1387411 - RNA, 19 nt, Artificial Sequence
  Description of Artificial Sequence: Synthetic oligonucleotide
  Antisense strand to SEQ ID NO: 1387410
aauuaucaggagcuccaga

SEQ ID NO: 1387412 - RNA, 19 nt, Artificial Sequence
  Description of Artificial Sequence: Synthetic oligonucleotide
  Sense strand starting at position 57 of SEQ ID NO: 1242996
uggagcuccugauaauuua

SEQ ID NO: 1387413 - RNA, 19 nt, Artificial Sequence
  Description of Artificial Sequence: Synthetic oligonucleotide
  Antisense strand to SEQ ID NO: 1387412
uaaauuaucaggagcucca

SEQ ID NO: 1387414 - RNA, 19 nt, Artificial Sequence
  Description of Artificial Sequence: Synthetic oligonucleotide
  Sense strand starting at position 336 of SEQ ID NO: 1242996
uguagugucagcuacuacu

SEQ ID NO: 1387415 - RNA, 19 nt, Artificial Sequence
  Description of Artificial Sequence: Synthetic oligonucleotide
  Antisense strand to SEQ ID NO: 1387414
aguaguagcugacacuaca

SEQ ID NO: 1387416 - RNA, 19 nt, Artificial Sequence
  Description of Artificial Sequence: Synthetic oligonucleotide
  Sense strand starting at position 540 of SEQ ID NO: 1242996
cucuguccuccagacugaa

SEQ ID NO: 1387417 - RNA, 19 nt, Artificial Sequence
  Description of Artificial Sequence: Synthetic oligonucleotide
  Antisense strand to SEQ ID NO: 1387416
uucagucuggaggacagag

SEQ ID NO: 1387418 - RNA, 19 nt, Artificial Sequence
  Description of Artificial Sequence: Synthetic oligonucleotide
  Sense strand starting at position 835 of SEQ ID NO: 1242996
cccagaaguucugaggaag

SEQ ID NO: 1387419 - RNA, 19 nt, Artificial Sequence
  Description of Artificial Sequence: Synthetic oligonucleotide
  Antisense strand to SEQ ID NO: 1387418
cuuccucagaacuucuggg

SEQ ID NO: 1387420 - RNA, 19 nt, Artificial Sequence
  Description of Artificial Sequence: Synthetic oligonucleotide
  Sense strand starting at position 866 of SEQ ID NO: 1242996
aaacuauuggcuuguaggu

SEQ ID NO: 1387421 - RNA, 19 nt, Artificial Sequence
  Description of Artificial Sequence: Synthetic oligonucleotide
  Antisense strand to SEQ ID NO: 1387420
accuacaagccaauaguuu

SEQ ID NO: 1387422 - RNA, 19 nt, Artificial Sequence
  Description of Artificial Sequence: Synthetic oligonucleotide
  Sense strand starting at position 895 of SEQ ID NO: 1242996
aaaggcuucuacugggaaa

SEQ ID NO: 1387423 - RNA, 19 nt, Artificial Sequence
  Description of Artificial Sequence: Synthetic oligonucleotide
  Antisense strand to SEQ ID NO: 1387422
uuucccaguagaagccuuu

SEQ ID NO: 1387424 - RNA, 19 nt, Artificial Sequence
  Description of Artificial Sequence: Synthetic oligonucleotide
  Sense strand starting at position 898 of SEQ ID NO: 1242996
ggcuucuacugggaaagga

SEQ ID NO: 1387425 - RNA, 19 nt, Artificial Sequence
  Description of Artificial Sequence: Synthetic oligonucleotide
  Antisense strand to SEQ ID NO: 1387424
uccuuucccaguagaagcc

SEQ ID NO: 1387426 - RNA, 19 nt, Artificial Sequence
  Description of Artificial Sequence: Synthetic oligonucleotide
  Sense strand starting at position 993 of SEQ ID NO: 1242996
caagauuaggcaugaguug

SEQ ID NO: 1387427 - RNA, 19 nt, Artificial Sequence
  Description of Artificial Sequence: Synthetic oligonucleotide
  Antisense strand to SEQ ID NO: 1387426
caacucaugccuaaucuug

SEQ ID NO: 1387428 - RNA, 19 nt, Artificial Sequence
  Description of Artificial Sequence: Synthetic oligonucleotide
  Sense strand starting at position 1002 of SEQ ID NO: 1242996
gcaugaguugaucguguuu

SEQ ID NO: 1387429 - RNA, 19 nt, Artificial Sequence
  Description of Artificial Sequence: Synthetic oligonucleotide
  Antisense strand to SEQ ID NO: 1387428
aaacacgaucaacucaugc

SEQ ID NO: 1387430 - RNA, 19 nt, Artificial Sequence
  Description of Artificial Sequence: Synthetic oligonucleotide
  Sense strand starting at position 1008 of SEQ ID NO: 1242996
guugaucguguuugaagcu

SEQ ID NO: 1387431 - RNA, 19 nt, Artificial Sequence
  Description of Artificial Sequence: Synthetic oligonucleotide
  Antisense strand to SEQ ID NO: 1387430
agcuucaaacacgaucaac

SEQ ID NO: 1387432 - RNA, 19 nt, Artificial Sequence
  Description of Artificial Sequence: Synthetic oligonucleotide
  Sense strand starting at position 1014 of SEQ ID NO: 1242996
cguguuugaagcuggauga

SEQ ID NO: 1387433 - RNA, 19 nt, Artificial Sequence
  Description of Artificial Sequence: Synthetic oligonucleotide
  Antisense strand to SEQ ID NO: 1387432
ucauccagcuucaaacacg

SEQ ID NO: 1387434 - RNA, 19 nt, Artificial Sequence
  Description of Artificial Sequence: Synthetic oligonucleotide
  Sense strand starting at position 1021 of SEQ ID NO: 1242996
gaagcuggaugagagaauu

SEQ ID NO: 1387435 - RNA, 19 nt, Artificial Sequence
  Description of Artificial Sequence: Synthetic oligonucleotide
  Antisense strand to SEQ ID NO: 1387434
aauucucucauccagcuuc

SEQ ID NO: 1387436 - RNA, 19 nt, Artificial Sequence
  Description of Artificial Sequence: Synthetic oligonucleotide
  Sense strand starting at position 1046 of SEQ ID NO: 1242996
acuccugucugcuugaaau

SEQ ID NO: 1387437 - RNA, 19 nt, Artificial Sequence
  Description of Artificial Sequence: Synthetic oligonucleotide
  Antisense strand to SEQ ID NO: 1387436
auuucaagcagacaggagu

SEQ ID NO: 1387438 - RNA, 19 nt, Artificial Sequence
  Description of Artificial Sequence: Synthetic oligonucleotide
  Sense strand starting at position 1140 of SEQ ID NO: 1242996
uuaaguuuacuacgacaga

SEQ ID NO: 1387439 - RNA, 19 nt, Artificial Sequence
  Description of Artificial Sequence: Synthetic oligonucleotide
  Antisense strand to SEQ ID NO: 1387438
ucugucguaguaaacuuaa

SEQ ID NO: 1387440 - RNA, 19 nt, Artificial Sequence
  Description of Artificial Sequence: Synthetic oligonucleotide
  Sense strand starting at position 1212 of SEQ ID NO: 1242996
uuaugcuguugaguuccaa

SEQ ID NO: 1387441 - RNA, 19 nt, Artificial Sequence
  Description of Artificial Sequence: Synthetic oligonucleotide
  Antisense strand to SEQ ID NO: 1387440
uuggaacucaacagcauaa

SEQ ID NO: 1387442 - RNA, 19 nt, Artificial Sequence
  Description of Artificial Sequence: Synthetic oligonucleotide
  Sense strand starting at position 1317 of SEQ ID NO: 1242996
cacgcagggauccgagaaa

SEQ ID NO: 1387443 - RNA, 19 nt, Artificial Sequence
  Description of Artificial Sequence: Synthetic oligonucleotide
  Antisense strand to SEQ ID NO: 1387442
uuucucggaucccugcgug

SEQ ID NO: 1387444 - RNA, 19 nt, Artificial Sequence
  Description of Artificial Sequence: Synthetic oligonucleotide
  Sense strand starting at position 1361 of SEQ ID NO: 1242996
agcgaaagaaauuguaauu

SEQ ID NO: 1387445 - RNA, 19 nt, Artificial Sequence
  Description of Artificial Sequence: Synthetic oligonucleotide
  Antisense strand to SEQ ID NO: 1387444
aauuacaauuucuuucgcu

SEQ ID NO: 1387446 - RNA, 19 nt, Artificial Sequence
  Description of Artificial Sequence: Synthetic oligonucleotide
  Sense strand starting at position 1512 of SEQ ID NO: 1242996
gaagucucuccgggccaga

SEQ ID NO: 1387447 - RNA, 19 nt, Artificial Sequence
  Description of Artificial Sequence: Synthetic oligonucleotide
  Antisense strand to SEQ ID NO: 1387446
ucuggcccggagagacuuc

SEQ ID NO: 1387448 - RNA, 19 nt, Artificial Sequence
  Description of Artificial Sequence: Synthetic oligonucleotide
  Sense strand starting at position 1804 of SEQ ID NO: 1242996
guuugaaucccgggcccua

SEQ ID NO: 1387449 - RNA, 19 nt, Artificial Sequence
  Description of Artificial Sequence: Synthetic oligonucleotide
  Antisense strand to SEQ ID NO: 1387448
uagggcccgggauucaaac

SEQ ID NO: 1387450 - RNA, 19 nt, Artificial Sequence
  Description of Artificial Sequence: Synthetic oligonucleotide
  Sense strand starting at position 1829 of SEQ ID NO: 1242996
acuagagaccgcuaaauca

SEQ ID NO: 1387451 - RNA, 19 nt, Artificial Sequence
  Description of Artificial Sequence: Synthetic oligonucleotide
  Antisense strand to SEQ ID NO: 1387450
ugauuuagcggucucuagu

SEQ ID NO: 1387452 - RNA, 19 nt, Artificial Sequence
  Description of Artificial Sequence: Synthetic oligonucleotide
  Sense strand starting at position 2040 of SEQ ID NO: 1242996
cagggauuggcugcgcgau

SEQ ID NO: 1387453 - RNA, 19 nt, Artificial Sequence
  Description of Artificial Sequence: Synthetic oligonucleotide
  Antisense strand to SEQ ID NO: 1387452
aucgcgcagccaaucccug

SEQ ID NO: 1387454 - RNA, 19 nt, Artificial Sequence
  Description of Artificial Sequence: Synthetic oligonucleotide
  Sense strand starting at position 2296 of SEQ ID NO: 1242996
gguuccggauucuuccaua

SEQ ID NO: 1387455 - RNA, 19 nt, Artificial Sequence
  Description of Artificial Sequence: Synthetic oligonucleotide
  Antisense strand to SEQ ID NO: 1387454
uauggaagaauccggaacc

SEQ ID NO: 1387456 - RNA, 19 nt, Artificial Sequence
  Description of Artificial Sequence: Synthetic oligonucleotide
  Sense strand starting at position 2345 of SEQ ID NO: 1242996
gggaguugcucccuaagau

SEQ ID NO: 1387457 - RNA, 19 nt, Artificial Sequence
  Description of Artificial Sequence: Synthetic oligonucleotide
  Antisense strand to SEQ ID NO: 1387456
aucuuagggagcaacuccc

SEQ ID NO: 1387458 - RNA, 19 nt, Artificial Sequence
  Description of Artificial Sequence: Synthetic oligonucleotide
  Sense strand starting at position 2346 of SEQ ID NO: 1242996
ggaguugcucccuaagauc

SEQ ID NO: 1387459 - RNA, 19 nt, Artificial Sequence
  Description of Artificial Sequence: Synthetic oligonucleotide
  Antisense strand to SEQ ID NO: 1387458
gaucuuagggagcaacucc

SEQ ID NO: 1387460 - RNA, 19 nt, Artificial Sequence
  Description of Artificial Sequence: Synthetic oligonucleotide
  Sense strand starting at position 2424 of SEQ ID NO: 1242996
cugcguaucccugacucuu

SEQ ID NO: 1387461 - RNA, 19 nt, Artificial Sequence
  Description of Artificial Sequence: Synthetic oligonucleotide
  Antisense strand to SEQ ID NO: 1387460
aagagucagggauacgcag

SEQ ID NO: 1387462 - RNA, 19 nt, Artificial Sequence
  Description of Artificial Sequence: Synthetic oligonucleotide
  Sense strand starting at position 2536 of SEQ ID NO: 1242996
gucugugugguauaauuca

SEQ ID NO: 1387463 - RNA, 19 nt, Artificial Sequence
  Description of Artificial Sequence: Synthetic oligonucleotide
  Antisense strand to SEQ ID NO: 1387462
ugaauuauaccacacagac

SEQ ID NO: 1387464 - RNA, 19 nt, Artificial Sequence
  Description of Artificial Sequence: Synthetic oligonucleotide
  Sense strand starting at position 2543 of SEQ ID NO: 1242996
ugguauaauucaguagugu

SEQ ID NO: 1387465 - RNA, 19 nt, Artificial Sequence
  Description of Artificial Sequence: Synthetic oligonucleotide
  Antisense strand to SEQ ID NO: 1387464
acacuacugaauuauacca

SEQ ID NO: 1387466 - RNA, 19 nt, Artificial Sequence
  Description of Artificial Sequence: Synthetic oligonucleotide
  Sense strand starting at position 2544 of SEQ ID NO: 1242996
gguauaauucaguaguguu

SEQ ID NO: 1387467 - RNA, 19 nt, Artificial Sequence
  Description of Artificial Sequence: Synthetic oligonucleotide
  Antisense strand to SEQ ID NO: 1387466
aacacuacugaauuauacc

SEQ ID NO: 1387468 - RNA, 19 nt, Artificial Sequence
  Description of Artificial Sequence: Synthetic oligonucleotide
  Sense strand starting at position 2554 of SEQ ID NO: 1242996
aguaguguuuccucagcac

SEQ ID NO: 1387469 - RNA, 19 nt, Artificial Sequence
  Description of Artificial Sequence: Synthetic oligonucleotide
  Antisense strand to SEQ ID NO: 1387468
gugcugaggaaacacuacu

SEQ ID NO: 1387470 - RNA, 19 nt, Artificial Sequence
  Description of Artificial Sequence: Synthetic oligonucleotide
  Sense strand starting at position 2558 of SEQ ID NO: 1242996
guguuuccucagcaccaca

SEQ ID NO: 1387471 - RNA, 19 nt, Artificial Sequence
  Description of Artificial Sequence: Synthetic oligonucleotide
  Antisense strand to SEQ ID NO: 1387470
uguggugcugaggaaacac

SEQ ID NO: 1387472 - RNA, 19 nt, Artificial Sequence
  Description of Artificial Sequence: Synthetic oligonucleotide
  Sense strand starting at position 2580 of SEQ ID NO: 1242996
ucuggcgauuucccuaauu

SEQ ID NO: 1387473 - RNA, 19 nt, Artificial Sequence
  Description of Artificial Sequence: Synthetic oligonucleotide
  Antisense strand to SEQ ID NO: 1387472
aauuagggaaaucgccaga

SEQ ID NO: 1387474 - RNA, 19 nt, Artificial Sequence
  Description of Artificial Sequence: Synthetic oligonucleotide
  Sense strand starting at position 2592 of SEQ ID NO: 1242996
ccuaauuuaucucgguauu

SEQ ID NO: 1387475 - RNA, 19 nt, Artificial Sequence
  Description of Artificial Sequence: Synthetic oligonucleotide
  Antisense strand to SEQ ID NO: 1387474
aauaccgagauaaauuagg

SEQ ID NO: 1387476 - RNA, 19 nt, Artificial Sequence
  Description of Artificial Sequence: Synthetic oligonucleotide
  Sense strand starting at position 2593 of SEQ ID NO: 1242996
cuaauuuaucucgguauuc

SEQ ID NO: 1387477 - RNA, 19 nt, Artificial Sequence
  Description of Artificial Sequence: Synthetic oligonucleotide
  Antisense strand to SEQ ID NO: 1387476
gaauaccgagauaaauuag

SEQ ID NO: 1387478 - RNA, 19 nt, Artificial Sequence
  Description of Artificial Sequence: Synthetic oligonucleotide
  Sense strand starting at position 3009 of SEQ ID NO: 1242996
ucaccugaagucgguaauu

SEQ ID NO: 1387479 - RNA, 19 nt, Artificial Sequence
  Description of Artificial Sequence: Synthetic oligonucleotide
  Antisense strand to SEQ ID NO: 1387478
aauuaccgacuucagguga

SEQ ID NO: 1387480 - RNA, 19 nt, Artificial Sequence
  Description of Artificial Sequence: Synthetic oligonucleotide
  Sense strand starting at position 3136 of SEQ ID NO: 1242996
aucgcuugauucucgaguu

SEQ ID NO: 1387481 - RNA, 19 nt, Artificial Sequence
  Description of Artificial Sequence: Synthetic oligonucleotide
  Antisense strand to SEQ ID NO: 1387480
aacucgagaaucaagcgau

SEQ ID NO: 1387482 - RNA, 19 nt, Artificial Sequence
  Description of Artificial Sequence: Synthetic oligonucleotide
  Sense strand starting at position 3322 of SEQ ID NO: 1242996
ggagcuagcccuuaucaua

SEQ ID NO: 1387483 - RNA, 19 nt, Artificial Sequence
  Description of Artificial Sequence: Synthetic oligonucleotide
  Antisense strand to SEQ ID NO: 1387482
uaugauaagggcuagcucc

SEQ ID NO: 1387484 - RNA, 19 nt, Artificial Sequence
  Description of Artificial Sequence: Synthetic oligonucleotide
  Sense strand starting at position 3341 of SEQ ID NO: 1242996
agauguugaugugaauuua

SEQ ID NO: 1387485 - RNA, 19 nt, Artificial Sequence
  Description of Artificial Sequence: Synthetic oligonucleotide
  Antisense strand to SEQ ID NO: 1387484
uaaauucacaucaacaucu

SEQ ID NO: 1387486 - RNA, 19 nt, Artificial Sequence
  Description of Artificial Sequence: Synthetic oligonucleotide
  Sense strand starting at position 3373 of SEQ ID NO: 1242996
uuuauaaacguuugcaaca

SEQ ID NO: 1387487 - RNA, 19 nt, Artificial Sequence
  Description of Artificial Sequence: Synthetic oligonucleotide
  Antisense strand to SEQ ID NO: 1387486
uguugcaaacguuuauaaa

SEQ ID NO: 1387488 - RNA, 19 nt, Artificial Sequence
  Description of Artificial Sequence: Synthetic oligonucleotide
  Sense strand starting at position 3374 of SEQ ID NO: 1242996
uuauaaacguuugcaacau

SEQ ID NO: 1387489 - RNA, 19 nt, Artificial Sequence
  Description of Artificial Sequence: Synthetic oligonucleotide
  Antisense strand to SEQ ID NO: 1387488
auguugcaaacguuuauaa

SEQ ID NO: 1387490 - RNA, 19 nt, Artificial Sequence
  Description of Artificial Sequence: Synthetic oligonucleotide
  Sense strand starting at position 53 of SEQ ID NO: 1242997
cuuuaaguuuacuacgaca

SEQ ID NO: 1387491 - RNA, 19 nt, Artificial Sequence
  Description of Artificial Sequence: Synthetic oligonucleotide
  Antisense strand to SEQ ID NO: 1387490
ugucguaguaaacuuaaag

SEQ ID NO: 1387492 - RNA, 19 nt, Artificial Sequence
  Description of Artificial Sequence: Synthetic oligonucleotide
  Sense strand starting at position 55 of SEQ ID NO: 1242997
uuaaguuuacuacgacaga

SEQ ID NO: 1387493 - RNA, 19 nt, Artificial Sequence
  Description of Artificial Sequence: Synthetic oligonucleotide
  Antisense strand to SEQ ID NO: 1387492
ucugucguaguaaacuuaa

SEQ ID NO: 1387494 - RNA, 19 nt, Artificial Sequence
  Description of Artificial Sequence: Synthetic oligonucleotide
  Sense strand starting at position 124 of SEQ ID NO: 1242997
aguuuaugcuguugaguuc

SEQ ID NO: 1387495 - RNA, 19 nt, Artificial Sequence
  Description of Artificial Sequence: Synthetic oligonucleotide
  Antisense strand to SEQ ID NO: 1387494
gaacucaacagcauaaacu

SEQ ID NO: 1387496 - RNA, 19 nt, Artificial Sequence
  Description of Artificial Sequence: Synthetic oligonucleotide
  Sense strand starting at position 127 of SEQ ID NO: 1242997
uuaugcuguugaguuccaa

SEQ ID NO: 1387497 - RNA, 19 nt, Artificial Sequence
  Description of Artificial Sequence: Synthetic oligonucleotide
  Antisense strand to SEQ ID NO: 1387496
uuggaacucaacagcauaa

SEQ ID NO: 1387498 - RNA, 19 nt, Artificial Sequence
  Description of Artificial Sequence: Synthetic oligonucleotide
  Sense strand starting at position 232 of SEQ ID NO: 1242997
cacgcagggauccgagaaa

SEQ ID NO: 1387499 - RNA, 19 nt, Artificial Sequence
  Description of Artificial Sequence: Synthetic oligonucleotide
  Antisense strand to SEQ ID NO: 1387498
uuucucggaucccugcgug

SEQ ID NO: 1387500 - RNA, 19 nt, Artificial Sequence
  Description of Artificial Sequence: Synthetic oligonucleotide
  Sense strand starting at position 276 of SEQ ID NO: 1242997
agcgaaagaaauuguaauu

SEQ ID NO: 1387501 - RNA, 19 nt, Artificial Sequence
  Description of Artificial Sequence: Synthetic oligonucleotide
  Antisense strand to SEQ ID NO: 1387500
aauuacaauuucuuucgcu

SEQ ID NO: 1387502 - RNA, 19 nt, Artificial Sequence
  Description of Artificial Sequence: Synthetic oligonucleotide
  Sense strand starting at position 427 of SEQ ID NO: 1242997
gaagucucuccgggccaga

SEQ ID NO: 1387503 - RNA, 19 nt, Artificial Sequence
  Description of Artificial Sequence: Synthetic oligonucleotide
  Antisense strand to SEQ ID NO: 1387502
ucuggcccggagagacuuc

SEQ ID NO: 1387504 - RNA, 19 nt, Artificial Sequence
  Description of Artificial Sequence: Synthetic oligonucleotide
  Sense strand starting at position 719 of SEQ ID NO: 1242997
guuugaaucccgggcccua

SEQ ID NO: 1387505 - RNA, 19 nt, Artificial Sequence
  Description of Artificial Sequence: Synthetic oligonucleotide
  Antisense strand to SEQ ID NO: 1387504
uagggcccgggauucaaac

SEQ ID NO: 1387506 - RNA, 19 nt, Artificial Sequence
  Description of Artificial Sequence: Synthetic oligonucleotide
  Sense strand starting at position 744 of SEQ ID NO: 1242997
acuagagaccgcuaaauca

SEQ ID NO: 1387507 - RNA, 19 nt, Artificial Sequence
  Description of Artificial Sequence: Synthetic oligonucleotide
  Antisense strand to SEQ ID NO: 1387506
ugauuuagcggucucuagu

SEQ ID NO: 1387508 - RNA, 19 nt, Artificial Sequence
  Description of Artificial Sequence: Synthetic oligonucleotide
  Sense strand starting at position 955 of SEQ ID NO: 1242997
cagggauuggcugcgcgau

SEQ ID NO: 1387509 - RNA, 19 nt, Artificial Sequence
  Description of Artificial Sequence: Synthetic oligonucleotide
  Antisense strand to SEQ ID NO: 1387508
aucgcgcagccaaucccug

SEQ ID NO: 1387510 - RNA, 19 nt, Artificial Sequence
  Description of Artificial Sequence: Synthetic oligonucleotide
  Sense strand starting at position 1211 of SEQ ID NO: 1242997
gguuccggauucuuccaua

SEQ ID NO: 1387511 - RNA, 19 nt, Artificial Sequence
  Description of Artificial Sequence: Synthetic oligonucleotide
  Antisense strand to SEQ ID NO: 1387510
uauggaagaauccggaacc

SEQ ID NO: 1387512 - RNA, 19 nt, Artificial Sequence
  Description of Artificial Sequence: Synthetic oligonucleotide
  Sense strand starting at position 1260 of SEQ ID NO: 1242997
gggaguugcucccuaagau

SEQ ID NO: 1387513 - RNA, 19 nt, Artificial Sequence
  Description of Artificial Sequence: Synthetic oligonucleotide
  Antisense strand to SEQ ID NO: 1387512
aucuuagggagcaacuccc

SEQ ID NO: 1387514 - RNA, 19 nt, Artificial Sequence
  Description of Artificial Sequence: Synthetic oligonucleotide
  Sense strand starting at position 1261 of SEQ ID NO: 1242997
ggaguugcucccuaagauc

SEQ ID NO: 1387515 - RNA, 19 nt, Artificial Sequence
  Description of Artificial Sequence: Synthetic oligonucleotide
  Antisense strand to SEQ ID NO: 1387514
gaucuuagggagcaacucc

SEQ ID NO: 1387516 - RNA, 19 nt, Artificial Sequence
  Description of Artificial Sequence: Synthetic oligonucleotide
  Sense strand starting at position 1339 of SEQ ID NO: 1242997
cugcguaucccugacucuu

SEQ ID NO: 1387517 - RNA, 19 nt, Artificial Sequence
  Description of Artificial Sequence: Synthetic oligonucleotide
  Antisense strand to SEQ ID NO: 1387516
aagagucagggauacgcag

SEQ ID NO: 1387518 - RNA, 19 nt, Artificial Sequence
  Description of Artificial Sequence: Synthetic oligonucleotide
  Sense strand starting at position 1447 of SEQ ID NO: 1242997
uccggucugugugguauaa

SEQ ID NO: 1387519 - RNA, 19 nt, Artificial Sequence
  Description of Artificial Sequence: Synthetic oligonucleotide
  Antisense strand to SEQ ID NO: 1387518
uuauaccacacagaccgga

SEQ ID NO: 1387520 - RNA, 19 nt, Artificial Sequence
  Description of Artificial Sequence: Synthetic oligonucleotide
  Sense strand starting at position 1449 of SEQ ID NO: 1242997
cggucugugugguauaauu

SEQ ID NO: 1387521 - RNA, 19 nt, Artificial Sequence
  Description of Artificial Sequence: Synthetic oligonucleotide
  Antisense strand to SEQ ID NO: 1387520
aauuauaccacacagaccg

SEQ ID NO: 1387522 - RNA, 19 nt, Artificial Sequence
  Description of Artificial Sequence: Synthetic oligonucleotide
  Sense strand starting at position 1451 of SEQ ID NO: 1242997
gucugugugguauaauuca

SEQ ID NO: 1387523 - RNA, 19 nt, Artificial Sequence
  Description of Artificial Sequence: Synthetic oligonucleotide
  Antisense strand to SEQ ID NO: 1387522
ugaauuauaccacacagac

SEQ ID NO: 1387524 - RNA, 19 nt, Artificial Sequence
  Description of Artificial Sequence: Synthetic oligonucleotide
  Sense strand starting at position 1458 of SEQ ID NO: 1242997
ugguauaauucaguagugu

SEQ ID NO: 1387525 - RNA, 19 nt, Artificial Sequence
  Description of Artificial Sequence: Synthetic oligonucleotide
  Antisense strand to SEQ ID NO: 1387524
acacuacugaauuauacca

SEQ ID NO: 1387526 - RNA, 19 nt, Artificial Sequence
  Description of Artificial Sequence: Synthetic oligonucleotide
  Sense strand starting at position 1459 of SEQ ID NO: 1242997
gguauaauucaguaguguu

SEQ ID NO: 1387527 - RNA, 19 nt, Artificial Sequence
  Description of Artificial Sequence: Synthetic oligonucleotide
  Antisense strand to SEQ ID NO: 1387526
aacacuacugaauuauacc

SEQ ID NO: 1387528 - RNA, 19 nt, Artificial Sequence
  Description of Artificial Sequence: Synthetic oligonucleotide
  Sense strand starting at position 1469 of SEQ ID NO: 1242997
aguaguguuuccucagcac

SEQ ID NO: 1387529 - RNA, 19 nt, Artificial Sequence
  Description of Artificial Sequence: Synthetic oligonucleotide
  Antisense strand to SEQ ID NO: 1387528
gugcugaggaaacacuacu

SEQ ID NO: 1387530 - RNA, 19 nt, Artificial Sequence
  Description of Artificial Sequence: Synthetic oligonucleotide
  Sense strand starting at position 1473 of SEQ ID NO: 1242997
guguuuccucagcaccaca

SEQ ID NO: 1387531 - RNA, 19 nt, Artificial Sequence
  Description of Artificial Sequence: Synthetic oligonucleotide
  Antisense strand to SEQ ID NO: 1387530
uguggugcugaggaaacac

SEQ ID NO: 1387532 - RNA, 19 nt, Artificial Sequence
  Description of Artificial Sequence: Synthetic oligonucleotide
  Sense strand starting at position 1486 of SEQ ID NO: 1242997
accacagucucuggcgauu

SEQ ID NO: 1387533 - RNA, 19 nt, Artificial Sequence
  Description of Artificial Sequence: Synthetic oligonucleotide
  Antisense strand to SEQ ID NO: 1387532
aaucgccagagacuguggu

SEQ ID NO: 1387534 - RNA, 19 nt, Artificial Sequence
  Description of Artificial Sequence: Synthetic oligonucleotide
  Sense strand starting at position 1495 of SEQ ID NO: 1242997
ucuggcgauuucccuaauu

SEQ ID NO: 1387535 - RNA, 19 nt, Artificial Sequence
  Description of Artificial Sequence: Synthetic oligonucleotide
  Antisense strand to SEQ ID NO: 1387534
aauuagggaaaucgccaga

SEQ ID NO: 1387536 - RNA, 19 nt, Artificial Sequence
  Description of Artificial Sequence: Synthetic oligonucleotide
  Sense strand starting at position 1507 of SEQ ID NO: 1242997
ccuaauuuaucucgguauu

SEQ ID NO: 1387537 - RNA, 19 nt, Artificial Sequence
  Description of Artificial Sequence: Synthetic oligonucleotide
  Antisense strand to SEQ ID NO: 1387536
aauaccgagauaaauuagg

SEQ ID NO: 1387538 - RNA, 19 nt, Artificial Sequence
  Description of Artificial Sequence: Synthetic oligonucleotide
  Sense strand starting at position 1508 of SEQ ID NO: 1242997
cuaauuuaucucgguauuc

SEQ ID NO: 1387539 - RNA, 19 nt, Artificial Sequence
  Description of Artificial Sequence: Synthetic oligonucleotide
  Antisense strand to SEQ ID NO: 1387538
gaauaccgagauaaauuag

SEQ ID NO: 1387540 - RNA, 19 nt, Artificial Sequence
  Description of Artificial Sequence: Synthetic oligonucleotide
  Sense strand starting at position 1733 of SEQ ID NO: 1242997
gugagcacuuguggucuca

SEQ ID NO: 1387541 - RNA, 19 nt, Artificial Sequence
  Description of Artificial Sequence: Synthetic oligonucleotide
  Antisense strand to SEQ ID NO: 1387540
ugagaccacaagugcucac

SEQ ID NO: 1387542 - RNA, 19 nt, Artificial Sequence
  Description of Artificial Sequence: Synthetic oligonucleotide
  Sense strand starting at position 1924 of SEQ ID NO: 1242997
ucaccugaagucgguaauu

SEQ ID NO: 1387543 - RNA, 19 nt, Artificial Sequence
  Description of Artificial Sequence: Synthetic oligonucleotide
  Antisense strand to SEQ ID NO: 1387542
aauuaccgacuucagguga

SEQ ID NO: 1387544 - RNA, 19 nt, Artificial Sequence
  Description of Artificial Sequence: Synthetic oligonucleotide
  Sense strand starting at position 2051 of SEQ ID NO: 1242997
aucgcuugauucucgaguu

SEQ ID NO: 1387545 - RNA, 19 nt, Artificial Sequence
  Description of Artificial Sequence: Synthetic oligonucleotide
  Antisense strand to SEQ ID NO: 1387544
aacucgagaaucaagcgau

SEQ ID NO: 1387546 - RNA, 19 nt, Artificial Sequence
  Description of Artificial Sequence: Synthetic oligonucleotide
  Sense strand starting at position 2052 of SEQ ID NO: 1242997
ucgcuugauucucgaguua

SEQ ID NO: 1387547 - RNA, 19 nt, Artificial Sequence
  Description of Artificial Sequence: Synthetic oligonucleotide
  Antisense strand to SEQ ID NO: 1387546
uaacucgagaaucaagcga

SEQ ID NO: 1387548 - RNA, 19 nt, Artificial Sequence
  Description of Artificial Sequence: Synthetic oligonucleotide
  Sense strand starting at position 2237 of SEQ ID NO: 1242997
ggagcuagcccuuaucaua

SEQ ID NO: 1387549 - RNA, 19 nt, Artificial Sequence
  Description of Artificial Sequence: Synthetic oligonucleotide
  Antisense strand to SEQ ID NO: 1387548
uaugauaagggcuagcucc

SEQ ID NO: 1387550 - RNA, 19 nt, Artificial Sequence
  Description of Artificial Sequence: Synthetic oligonucleotide
  Sense strand starting at position 2240 of SEQ ID NO: 1242997
gcuagcccuuaucauaaga

SEQ ID NO: 1387551 - RNA, 19 nt, Artificial Sequence
  Description of Artificial Sequence: Synthetic oligonucleotide
  Antisense strand to SEQ ID NO: 1387550
ucuuaugauaagggcuagc

SEQ ID NO: 1387552 - RNA, 19 nt, Artificial Sequence
  Description of Artificial Sequence: Synthetic oligonucleotide
  Sense strand starting at position 2253 of SEQ ID NO: 1242997
auaagauguugaugugaau

SEQ ID NO: 1387553 - RNA, 19 nt, Artificial Sequence
  Description of Artificial Sequence: Synthetic oligonucleotide
  Antisense strand to SEQ ID NO: 1387552
auucacaucaacaucuuau

SEQ ID NO: 1387554 - RNA, 19 nt, Artificial Sequence
  Description of Artificial Sequence: Synthetic oligonucleotide
  Sense strand starting at position 2256 of SEQ ID NO: 1242997
agauguugaugugaauuua

SEQ ID NO: 1387555 - RNA, 19 nt, Artificial Sequence
  Description of Artificial Sequence: Synthetic oligonucleotide
  Antisense strand to SEQ ID NO: 1387554
uaaauucacaucaacaucu

SEQ ID NO: 1387556 - RNA, 19 nt, Artificial Sequence
  Description of Artificial Sequence: Synthetic oligonucleotide
  Sense strand starting at position 2280 of SEQ ID NO: 1242997
acuguaucuuuauaaacgu

SEQ ID NO: 1387557 - RNA, 19 nt, Artificial Sequence
  Description of Artificial Sequence: Synthetic oligonucleotide
  Antisense strand to SEQ ID NO: 1387556
acguuuauaaagauacagu

SEQ ID NO: 1387558 - RNA, 19 nt, Artificial Sequence
  Description of Artificial Sequence: Synthetic oligonucleotide
  Sense strand starting at position 2288 of SEQ ID NO: 1242997
uuuauaaacguuugcaaca

SEQ ID NO: 1387559 - RNA, 19 nt, Artificial Sequence
  Description of Artificial Sequence: Synthetic oligonucleotide
  Antisense strand to SEQ ID NO: 1387558
uguugcaaacguuuauaaa

SEQ ID NO: 1387560 - RNA, 19 nt, Artificial Sequence
  Description of Artificial Sequence: Synthetic oligonucleotide
  Sense strand starting at position 2289 of SEQ ID NO: 1242997
uuauaaacguuugcaacau

SEQ ID NO: 1387561 - RNA, 19 nt, Artificial Sequence
  Description of Artificial Sequence: Synthetic oligonucleotide
  Antisense strand to SEQ ID NO: 1387560
auguugcaaacguuuauaa

SEQ ID NO: 1387562 - RNA, 19 nt, Artificial Sequence
  Description of Artificial Sequence: Synthetic oligonucleotide
  Sense strand starting at position 9 of SEQ ID NO: 1242998
ccuuuacuuuggguuuaaa

SEQ ID NO: 1387563 - RNA, 19 nt, Artificial Sequence
  Description of Artificial Sequence: Synthetic oligonucleotide
  Antisense strand to SEQ ID NO: 1387562
uuuaaacccaaaguaaagg

SEQ ID NO: 1387564 - RNA, 19 nt, Artificial Sequence
  Description of Artificial Sequence: Synthetic oligonucleotide
  Sense strand starting at position 117 of SEQ ID NO: 1242998
gauaucuaaucagugguua

SEQ ID NO: 1387565 - RNA, 19 nt, Artificial Sequence
  Description of Artificial Sequence: Synthetic oligonucleotide
  Antisense strand to SEQ ID NO: 1387564
uaaccacugauuagauauc

SEQ ID NO: 1387566 - RNA, 19 nt, Artificial Sequence
  Description of Artificial Sequence: Synthetic oligonucleotide
  Sense strand starting at position 118 of SEQ ID NO: 1242998
auaucuaaucagugguuac

SEQ ID NO: 1387567 - RNA, 19 nt, Artificial Sequence
  Description of Artificial Sequence: Synthetic oligonucleotide
  Antisense strand to SEQ ID NO: 1387566
guaaccacugauuagauau

SEQ ID NO: 1387568 - RNA, 19 nt, Artificial Sequence
  Description of Artificial Sequence: Synthetic oligonucleotide
  Sense strand starting at position 121 of SEQ ID NO: 1242998
ucuaaucagugguuacaag

SEQ ID NO: 1387569 - RNA, 19 nt, Artificial Sequence
  Description of Artificial Sequence: Synthetic oligonucleotide
  Antisense strand to SEQ ID NO: 1387568
cuuguaaccacugauuaga

SEQ ID NO: 1387570 - RNA, 19 nt, Artificial Sequence
  Description of Artificial Sequence: Synthetic oligonucleotide
  Sense strand starting at position 148 of SEQ ID NO: 1242998
ugggcacuguucucaacaa

SEQ ID NO: 1387571 - RNA, 19 nt, Artificial Sequence
  Description of Artificial Sequence: Synthetic oligonucleotide
  Antisense strand to SEQ ID NO: 1387570
uuguugagaacagugccca

SEQ ID NO: 1387572 - RNA, 19 nt, Artificial Sequence
  Description of Artificial Sequence: Synthetic oligonucleotide
  Sense strand starting at position 214 of SEQ ID NO: 1242998
ccacuaguccaauggagau

SEQ ID NO: 1387573 - RNA, 19 nt, Artificial Sequence
  Description of Artificial Sequence: Synthetic oligonucleotide
  Antisense strand to SEQ ID NO: 1387572
aucuccauuggacuagugg

SEQ ID NO: 1387574 - RNA, 19 nt, Artificial Sequence
  Description of Artificial Sequence: Synthetic oligonucleotide
  Sense strand starting at position 220 of SEQ ID NO: 1242998
guccaauggagaugccuaa

SEQ ID NO: 1387575 - RNA, 19 nt, Artificial Sequence
  Description of Artificial Sequence: Synthetic oligonucleotide
  Antisense strand to SEQ ID NO: 1387574
uuaggcaucuccauuggac

SEQ ID NO: 1387576 - RNA, 19 nt, Artificial Sequence
  Description of Artificial Sequence: Synthetic oligonucleotide
  Sense strand starting at position 329 of SEQ ID NO: 1242998
guggauucugcgaggaguc

SEQ ID NO: 1387577 - RNA, 19 nt, Artificial Sequence
  Description of Artificial Sequence: Synthetic oligonucleotide
  Antisense strand to SEQ ID NO: 1387576
gacuccucgcagaauccac

SEQ ID NO: 1387578 - RNA, 19 nt, Artificial Sequence
  Description of Artificial Sequence: Synthetic oligonucleotide
  Sense strand starting at position 342 of SEQ ID NO: 1242998
ggagucagauugguugacu

SEQ ID NO: 1387579 - RNA, 19 nt, Artificial Sequence
  Description of Artificial Sequence: Synthetic oligonucleotide
  Antisense strand to SEQ ID NO: 1387578
agucaaccaaucugacucc

SEQ ID NO: 1387580 - RNA, 19 nt, Artificial Sequence
  Description of Artificial Sequence: Synthetic oligonucleotide
  Sense strand starting at position 343 of SEQ ID NO: 1242998
gagucagauugguugacuu

SEQ ID NO: 1387581 - RNA, 19 nt, Artificial Sequence
  Description of Artificial Sequence: Synthetic oligonucleotide
  Antisense strand to SEQ ID NO: 1387580
aagucaaccaaucugacuc

SEQ ID NO: 1387582 - RNA, 19 nt, Artificial Sequence
  Description of Artificial Sequence: Synthetic oligonucleotide
  Sense strand starting at position 345 of SEQ ID NO: 1242998
gucagauugguugacuuaa

SEQ ID NO: 1387583 - RNA, 19 nt, Artificial Sequence
  Description of Artificial Sequence: Synthetic oligonucleotide
  Antisense strand to SEQ ID NO: 1387582
uuaagucaaccaaucugac

SEQ ID NO: 1387584 - RNA, 19 nt, Artificial Sequence
  Description of Artificial Sequence: Synthetic oligonucleotide
  Sense strand starting at position 488 of SEQ ID NO: 1242998
agggacucccauuguagau

SEQ ID NO: 1387585 - RNA, 19 nt, Artificial Sequence
  Description of Artificial Sequence: Synthetic oligonucleotide
  Antisense strand to SEQ ID NO: 1387584
aucuacaaugggagucccu

SEQ ID NO: 1387586 - RNA, 19 nt, Artificial Sequence
  Description of Artificial Sequence: Synthetic oligonucleotide
  Sense strand starting at position 524 of SEQ ID NO: 1242998
uuaagcaugugagcacaaa

SEQ ID NO: 1387587 - RNA, 19 nt, Artificial Sequence
  Description of Artificial Sequence: Synthetic oligonucleotide
  Antisense strand to SEQ ID NO: 1387586
uuugugcucacaugcuuaa

SEQ ID NO: 1387588 - RNA, 19 nt, Artificial Sequence
  Description of Artificial Sequence: Synthetic oligonucleotide
  Sense strand starting at position 612 of SEQ ID NO: 1242998
auuagcacucauugagaca

SEQ ID NO: 1387589 - RNA, 19 nt, Artificial Sequence
  Description of Artificial Sequence: Synthetic oligonucleotide
  Antisense strand to SEQ ID NO: 1387588
ugucucaaugagugcuaau

SEQ ID NO: 1387590 - RNA, 19 nt, Artificial Sequence
  Description of Artificial Sequence: Synthetic oligonucleotide
  Sense strand starting at position 868 of SEQ ID NO: 1242998
agcauugaucuuuaagcag

SEQ ID NO: 1387591 - RNA, 19 nt, Artificial Sequence
  Description of Artificial Sequence: Synthetic oligonucleotide
  Antisense strand to SEQ ID NO: 1387590
cugcuuaaagaucaaugcu

SEQ ID NO: 1387592 - RNA, 19 nt, Artificial Sequence
  Description of Artificial Sequence: Synthetic oligonucleotide
  Sense strand starting at position 894 of SEQ ID NO: 1242998
uucuguagguacucaagaa

SEQ ID NO: 1387593 - RNA, 19 nt, Artificial Sequence
  Description of Artificial Sequence: Synthetic oligonucleotide
  Antisense strand to SEQ ID NO: 1387592
uucuugaguaccuacagaa

SEQ ID NO: 1387594 - RNA, 19 nt, Artificial Sequence
  Description of Artificial Sequence: Synthetic oligonucleotide
  Sense strand starting at position 963 of SEQ ID NO: 1242998
uaguuuaacgauugucaaa

SEQ ID NO: 1387595 - RNA, 19 nt, Artificial Sequence
  Description of Artificial Sequence: Synthetic oligonucleotide
  Antisense strand to SEQ ID NO: 1387594
uuugacaaucguuaaacua

SEQ ID NO: 1387596 - RNA, 19 nt, Artificial Sequence
  Description of Artificial Sequence: Synthetic oligonucleotide
  Sense strand starting at position 1015 of SEQ ID NO: 1242998
aguagacauuuggaacacu

SEQ ID NO: 1387597 - RNA, 19 nt, Artificial Sequence
  Description of Artificial Sequence: Synthetic oligonucleotide
  Antisense strand to SEQ ID NO: 1387596
aguguuccaaaugucuacu

SEQ ID NO: 1387598 - RNA, 19 nt, Artificial Sequence
  Description of Artificial Sequence: Synthetic oligonucleotide
  Sense strand starting at position 1105 of SEQ ID NO: 1242998
gagacugcuuucccaagga

SEQ ID NO: 1387599 - RNA, 19 nt, Artificial Sequence
  Description of Artificial Sequence: Synthetic oligonucleotide
  Antisense strand to SEQ ID NO: 1387598
uccuugggaaagcagucuc

SEQ ID NO: 1387600 - RNA, 19 nt, Artificial Sequence
  Description of Artificial Sequence: Synthetic oligonucleotide
  Sense strand starting at position 1118 of SEQ ID NO: 1242998
caaggaggcauuggguuua

SEQ ID NO: 1387601 - RNA, 19 nt, Artificial Sequence
  Description of Artificial Sequence: Synthetic oligonucleotide
  Antisense strand to SEQ ID NO: 1387600
uaaacccaaugccuccuug

SEQ ID NO: 1387602 - RNA, 19 nt, Artificial Sequence
  Description of Artificial Sequence: Synthetic oligonucleotide
  Sense strand starting at position 1123 of SEQ ID NO: 1242998
aggcauuggguuuaucagu

SEQ ID NO: 1387603 - RNA, 19 nt, Artificial Sequence
  Description of Artificial Sequence: Synthetic oligonucleotide
  Antisense strand to SEQ ID NO: 1387602
acugauaaacccaaugccu

SEQ ID NO: 1387604 - RNA, 19 nt, Artificial Sequence
  Description of Artificial Sequence: Synthetic oligonucleotide
  Sense strand starting at position 1158 of SEQ ID NO: 1242998
uugugugagcuguuuagug

SEQ ID NO: 1387605 - RNA, 19 nt, Artificial Sequence
  Description of Artificial Sequence: Synthetic oligonucleotide
  Antisense strand to SEQ ID NO: 1387604
cacuaaacagcucacacaa

SEQ ID NO: 1387606 - RNA, 19 nt, Artificial Sequence
  Description of Artificial Sequence: Synthetic oligonucleotide
  Sense strand starting at position 1213 of SEQ ID NO: 1242998
aguuguggccuugacaaag

SEQ ID NO: 1387607 - RNA, 19 nt, Artificial Sequence
  Description of Artificial Sequence: Synthetic oligonucleotide
  Antisense strand to SEQ ID NO: 1387606
cuuugucaaggccacaacu

SEQ ID NO: 1387608 - RNA, 19 nt, Artificial Sequence
  Description of Artificial Sequence: Synthetic oligonucleotide
  Sense strand starting at position 1586 of SEQ ID NO: 1242998
agcuguuaagaaugcuaaa

SEQ ID NO: 1387609 - RNA, 19 nt, Artificial Sequence
  Description of Artificial Sequence: Synthetic oligonucleotide
  Antisense strand to SEQ ID NO: 1387608
uuuagcauucuuaacagcu

SEQ ID NO: 1387610 - RNA, 19 nt, Artificial Sequence
  Description of Artificial Sequence: Synthetic oligonucleotide
  Sense strand starting at position 2429 of SEQ ID NO: 1242998
ccgaguuccuccuuagaaa

SEQ ID NO: 1387611 - RNA, 19 nt, Artificial Sequence
  Description of Artificial Sequence: Synthetic oligonucleotide
  Antisense strand to SEQ ID NO: 1387610
uuucuaaggaggaacucgg

SEQ ID NO: 1387612 - RNA, 19 nt, Artificial Sequence
  Description of Artificial Sequence: Synthetic oligonucleotide
  Sense strand starting at position 2430 of SEQ ID NO: 1242998
cgaguuccuccuuagaaag

SEQ ID NO: 1387613 - RNA, 19 nt, Artificial Sequence
  Description of Artificial Sequence: Synthetic oligonucleotide
  Antisense strand to SEQ ID NO: 1387612
cuuucuaaggaggaacucg

SEQ ID NO: 1387614 - RNA, 19 nt, Artificial Sequence
  Description of Artificial Sequence: Synthetic oligonucleotide
  Sense strand starting at position 2623 of SEQ ID NO: 1242998
cggcacauuccugggaaag

SEQ ID NO: 1387615 - RNA, 19 nt, Artificial Sequence
  Description of Artificial Sequence: Synthetic oligonucleotide
  Antisense strand to SEQ ID NO: 1387614
cuuucccaggaaugugccg

SEQ ID NO: 1387616 - RNA, 19 nt, Artificial Sequence
  Description of Artificial Sequence: Synthetic oligonucleotide
  Sense strand starting at position 2624 of SEQ ID NO: 1242998
ggcacauuccugggaaagg

SEQ ID NO: 1387617 - RNA, 19 nt, Artificial Sequence
  Description of Artificial Sequence: Synthetic oligonucleotide
  Antisense strand to SEQ ID NO: 1387616
ccuuucccaggaaugugcc

SEQ ID NO: 1387618 - RNA, 19 nt, Artificial Sequence
  Description of Artificial Sequence: Synthetic oligonucleotide
  Sense strand starting at position 2702 of SEQ ID NO: 1242998
gcuuaaucagaccaaguca

SEQ ID NO: 1387619 - RNA, 19 nt, Artificial Sequence
  Description of Artificial Sequence: Synthetic oligonucleotide
  Antisense strand to SEQ ID NO: 1387618
ugacuuggucugauuaagc

SEQ ID NO: 1387620 - RNA, 19 nt, Artificial Sequence
  Description of Artificial Sequence: Synthetic oligonucleotide
  Sense strand starting at position 2717 of SEQ ID NO: 1242998
gucagauguaacuacgauc

SEQ ID NO: 1387621 - RNA, 19 nt, Artificial Sequence
  Description of Artificial Sequence: Synthetic oligonucleotide
  Antisense strand to SEQ ID NO: 1387620
gaucguaguuacaucugac

SEQ ID NO: 1387622 - RNA, 19 nt, Artificial Sequence
  Description of Artificial Sequence: Synthetic oligonucleotide
  Sense strand starting at position 2854 of SEQ ID NO: 1242998
gccucagauauugaagagu

SEQ ID NO: 1387623 - RNA, 19 nt, Artificial Sequence
  Description of Artificial Sequence: Synthetic oligonucleotide
  Antisense strand to SEQ ID NO: 1387622
acucuucaauaucugaggc

SEQ ID NO: 1387624 - RNA, 19 nt, Artificial Sequence
  Description of Artificial Sequence: Synthetic oligonucleotide
  Sense strand starting at position 3054 of SEQ ID NO: 1242998
ccugguuggcuggauauaa

SEQ ID NO: 1387625 - RNA, 19 nt, Artificial Sequence
  Description of Artificial Sequence: Synthetic oligonucleotide
  Antisense strand to SEQ ID NO: 1387624
uuauauccagccaaccagg

SEQ ID NO: 1387626 - RNA, 19 nt, Artificial Sequence
  Description of Artificial Sequence: Synthetic oligonucleotide
  Sense strand starting at position 3159 of SEQ ID NO: 1242998
gaugaagugucauuauugg

SEQ ID NO: 1387627 - RNA, 19 nt, Artificial Sequence
  Description of Artificial Sequence: Synthetic oligonucleotide
  Antisense strand to SEQ ID NO: 1387626
ccaauaaugacacuucauc

SEQ ID NO: 1387628 - RNA, 19 nt, Artificial Sequence
  Description of Artificial Sequence: Synthetic oligonucleotide
  Sense strand starting at position 3602 of SEQ ID NO: 1242998
cuuaguugucuguugugca

SEQ ID NO: 1387629 - RNA, 19 nt, Artificial Sequence
  Description of Artificial Sequence: Synthetic oligonucleotide
  Antisense strand to SEQ ID NO: 1387628
ugcacaacagacaacuaag

SEQ ID NO: 1387630 - RNA, 19 nt, Artificial Sequence
  Description of Artificial Sequence: Synthetic oligonucleotide
  Sense strand starting at position 3738 of SEQ ID NO: 1242998
uauacuuaggguuauagua

SEQ ID NO: 1387631 - RNA, 19 nt, Artificial Sequence
  Description of Artificial Sequence: Synthetic oligonucleotide
  Antisense strand to SEQ ID NO: 1387630
uacuauaacccuaaguaua

SEQ ID NO: 1387632 - RNA, 19 nt, Artificial Sequence
  Description of Artificial Sequence: Synthetic oligonucleotide
  Sense strand starting at position 3894 of SEQ ID NO: 1242998
aauacugaguuggcuacua

SEQ ID NO: 1387633 - RNA, 19 nt, Artificial Sequence
  Description of Artificial Sequence: Synthetic oligonucleotide
  Antisense strand to SEQ ID NO: 1387632
uaguagccaacucaguauu

SEQ ID NO: 1387634 - RNA, 19 nt, Artificial Sequence
  Description of Artificial Sequence: Synthetic oligonucleotide
  Sense strand starting at position 3896 of SEQ ID NO: 1242998
uacugaguuggcuacuaac

SEQ ID NO: 1387635 - RNA, 19 nt, Artificial Sequence
  Description of Artificial Sequence: Synthetic oligonucleotide
  Antisense strand to SEQ ID NO: 1387634
guuaguagccaacucagua

SEQ ID NO: 1387636 - RNA, 19 nt, Artificial Sequence
  Description of Artificial Sequence: Synthetic oligonucleotide
  Sense strand starting at position 3917 of SEQ ID NO: 1242998
uguggcuaucuggauauaa

SEQ ID NO: 1387637 - RNA, 19 nt, Artificial Sequence
  Description of Artificial Sequence: Synthetic oligonucleotide
  Antisense strand to SEQ ID NO: 1387636
uuauauccagauagccaca

SEQ ID NO: 1387638 - RNA, 19 nt, Artificial Sequence
  Description of Artificial Sequence: Synthetic oligonucleotide
  Sense strand starting at position 3946 of SEQ ID NO: 1242998
uggauugguuaugucugaa

SEQ ID NO: 1387639 - RNA, 19 nt, Artificial Sequence
  Description of Artificial Sequence: Synthetic oligonucleotide
  Antisense strand to SEQ ID NO: 1387638
uucagacauaaccaaucca

SEQ ID NO: 1387640 - RNA, 19 nt, Artificial Sequence
  Description of Artificial Sequence: Synthetic oligonucleotide
  Sense strand starting at position 3949 of SEQ ID NO: 1242998
auugguuaugucugaacaa

SEQ ID NO: 1387641 - RNA, 19 nt, Artificial Sequence
  Description of Artificial Sequence: Synthetic oligonucleotide
  Antisense strand to SEQ ID NO: 1387640
uuguucagacauaaccaau

SEQ ID NO: 1387642 - RNA, 19 nt, Artificial Sequence
  Description of Artificial Sequence: Synthetic oligonucleotide
  Sense strand starting at position 489 of SEQ ID NO: 1242999
aucgcuugaacccgaguaa

SEQ ID NO: 1387643 - RNA, 19 nt, Artificial Sequence
  Description of Artificial Sequence: Synthetic oligonucleotide
  Antisense strand to SEQ ID NO: 1387642
uuacucggguucaagcgau

SEQ ID NO: 1387644 - RNA, 19 nt, Artificial Sequence
  Description of Artificial Sequence: Synthetic oligonucleotide
  Sense strand starting at position 710 of SEQ ID NO: 1242999
aucuguacccuccaguaga

SEQ ID NO: 1387645 - RNA, 19 nt, Artificial Sequence
  Description of Artificial Sequence: Synthetic oligonucleotide
  Antisense strand to SEQ ID NO: 1387644
ucuacuggaggguacagau

SEQ ID NO: 1387646 - RNA, 19 nt, Artificial Sequence
  Description of Artificial Sequence: Synthetic oligonucleotide
  Sense strand starting at position 713 of SEQ ID NO: 1242999
uguacccuccaguagaaua

SEQ ID NO: 1387647 - RNA, 19 nt, Artificial Sequence
  Description of Artificial Sequence: Synthetic oligonucleotide
  Antisense strand to SEQ ID NO: 1387646
uauucuacuggaggguaca

SEQ ID NO: 1387648 - RNA, 19 nt, Artificial Sequence
  Description of Artificial Sequence: Synthetic oligonucleotide
  Sense strand starting at position 749 of SEQ ID NO: 1242999
ggaaguucuuucguggagu

SEQ ID NO: 1387649 - RNA, 19 nt, Artificial Sequence
  Description of Artificial Sequence: Synthetic oligonucleotide
  Antisense strand to SEQ ID NO: 1387648
acuccacgaaagaacuucc

SEQ ID NO: 1387650 - RNA, 19 nt, Artificial Sequence
  Description of Artificial Sequence: Synthetic oligonucleotide
  Sense strand starting at position 750 of SEQ ID NO: 1242999
gaaguucuuucguggagua

SEQ ID NO: 1387651 - RNA, 19 nt, Artificial Sequence
  Description of Artificial Sequence: Synthetic oligonucleotide
  Antisense strand to SEQ ID NO: 1387650
uacuccacgaaagaacuuc

SEQ ID NO: 1387652 - RNA, 19 nt, Artificial Sequence
  Description of Artificial Sequence: Synthetic oligonucleotide
  Sense strand starting at position 751 of SEQ ID NO: 1242999
aaguucuuucguggaguac

SEQ ID NO: 1387653 - RNA, 19 nt, Artificial Sequence
  Description of Artificial Sequence: Synthetic oligonucleotide
  Antisense strand to SEQ ID NO: 1387652
guacuccacgaaagaacuu

SEQ ID NO: 1387654 - RNA, 19 nt, Artificial Sequence
  Description of Artificial Sequence: Synthetic oligonucleotide
  Sense strand starting at position 752 of SEQ ID NO: 1242999
aguucuuucguggaguacu

SEQ ID NO: 1387655 - RNA, 19 nt, Artificial Sequence
  Description of Artificial Sequence: Synthetic oligonucleotide
  Antisense strand to SEQ ID NO: 1387654
aguacuccacgaaagaacu

SEQ ID NO: 1387656 - RNA, 19 nt, Artificial Sequence
  Description of Artificial Sequence: Synthetic oligonucleotide
  Sense strand starting at position 755 of SEQ ID NO: 1242999
ucuuucguggaguacuaua

SEQ ID NO: 1387657 - RNA, 19 nt, Artificial Sequence
  Description of Artificial Sequence: Synthetic oligonucleotide
  Antisense strand to SEQ ID NO: 1387656
uauaguacuccacgaaaga

SEQ ID NO: 1387658 - RNA, 19 nt, Artificial Sequence
  Description of Artificial Sequence: Synthetic oligonucleotide
  Sense strand starting at position 760 of SEQ ID NO: 1242999
cguggaguacuauauccuu

SEQ ID NO: 1387659 - RNA, 19 nt, Artificial Sequence
  Description of Artificial Sequence: Synthetic oligonucleotide
  Antisense strand to SEQ ID NO: 1387658
aaggauauaguacuccacg

SEQ ID NO: 1387660 - RNA, 19 nt, Artificial Sequence
  Description of Artificial Sequence: Synthetic oligonucleotide
  Sense strand starting at position 815 of SEQ ID NO: 1242999
cggagaguauuuguugagu

SEQ ID NO: 1387661 - RNA, 19 nt, Artificial Sequence
  Description of Artificial Sequence: Synthetic oligonucleotide
  Antisense strand to SEQ ID NO: 1387660
acucaacaaauacucuccg

SEQ ID NO: 1387662 - RNA, 19 nt, Artificial Sequence
  Description of Artificial Sequence: Synthetic oligonucleotide
  Sense strand starting at position 817 of SEQ ID NO: 1242999
gagaguauuuguugaguua

SEQ ID NO: 1387663 - RNA, 19 nt, Artificial Sequence
  Description of Artificial Sequence: Synthetic oligonucleotide
  Antisense strand to SEQ ID NO: 1387662
uaacucaacaaauacucuc

SEQ ID NO: 1387664 - RNA, 19 nt, Artificial Sequence
  Description of Artificial Sequence: Synthetic oligonucleotide
  Sense strand starting at position 820 of SEQ ID NO: 1242999
aguauuuguugaguuauuc

SEQ ID NO: 1387665 - RNA, 19 nt, Artificial Sequence
  Description of Artificial Sequence: Synthetic oligonucleotide
  Antisense strand to SEQ ID NO: 1387664
gaauaacucaacaaauacu

SEQ ID NO: 1387666 - RNA, 19 nt, Artificial Sequence
  Description of Artificial Sequence: Synthetic oligonucleotide
  Sense strand starting at position 828 of SEQ ID NO: 1242999
uugaguuauucugcucuaa

SEQ ID NO: 1387667 - RNA, 19 nt, Artificial Sequence
  Description of Artificial Sequence: Synthetic oligonucleotide
  Antisense strand to SEQ ID NO: 1387666
uuagagcagaauaacucaa

SEQ ID NO: 1387668 - RNA, 19 nt, Artificial Sequence
  Description of Artificial Sequence: Synthetic oligonucleotide
  Sense strand starting at position 847 of SEQ ID NO: 1242999
uuggaugcagacugaaauu

SEQ ID NO: 1387669 - RNA, 19 nt, Artificial Sequence
  Description of Artificial Sequence: Synthetic oligonucleotide
  Antisense strand to SEQ ID NO: 1387668
aauuucagucugcauccaa

SEQ ID NO: 1387670 - RNA, 19 nt, Artificial Sequence
  Description of Artificial Sequence: Synthetic oligonucleotide
  Sense strand starting at position 875 of SEQ ID NO: 1242999
gaaguaguguaaucugaug

SEQ ID NO: 1387671 - RNA, 19 nt, Artificial Sequence
  Description of Artificial Sequence: Synthetic oligonucleotide
  Antisense strand to SEQ ID NO: 1387670
caucagauuacacuacuuc

SEQ ID NO: 1387672 - RNA, 19 nt, Artificial Sequence
  Description of Artificial Sequence: Synthetic oligonucleotide
  Sense strand starting at position 877 of SEQ ID NO: 1242999
aguaguguaaucugaugcu

SEQ ID NO: 1387673 - RNA, 19 nt, Artificial Sequence
  Description of Artificial Sequence: Synthetic oligonucleotide
  Antisense strand to SEQ ID NO: 1387672
agcaucagauuacacuacu

SEQ ID NO: 1387674 - RNA, 19 nt, Artificial Sequence
  Description of Artificial Sequence: Synthetic oligonucleotide
  Sense strand starting at position 1007 of SEQ ID NO: 1242999
auccuaucagucuguccaa

SEQ ID NO: 1387675 - RNA, 19 nt, Artificial Sequence
  Description of Artificial Sequence: Synthetic oligonucleotide
  Antisense strand to SEQ ID NO: 1387674
uuggacagacugauaggau

SEQ ID NO: 1387676 - RNA, 19 nt, Artificial Sequence
  Description of Artificial Sequence: Synthetic oligonucleotide
  Sense strand starting at position 1014 of SEQ ID NO: 1242999
cagucuguccaagggcaaa

SEQ ID NO: 1387677 - RNA, 19 nt, Artificial Sequence
  Description of Artificial Sequence: Synthetic oligonucleotide
  Antisense strand to SEQ ID NO: 1387676
uuugcccuuggacagacug

SEQ ID NO: 1387678 - RNA, 19 nt, Artificial Sequence
  Description of Artificial Sequence: Synthetic oligonucleotide
  Sense strand starting at position 1079 of SEQ ID NO: 1242999
gaacgcuaaucccaguguu

SEQ ID NO: 1387679 - RNA, 19 nt, Artificial Sequence
  Description of Artificial Sequence: Synthetic oligonucleotide
  Antisense strand to SEQ ID NO: 1387678
aacacugggauuagcguuc

SEQ ID NO: 1387680 - RNA, 19 nt, Artificial Sequence
  Description of Artificial Sequence: Synthetic oligonucleotide
  Sense strand starting at position 1246 of SEQ ID NO: 1242999
ccgugaggcuucucaucca

SEQ ID NO: 1387681 - RNA, 19 nt, Artificial Sequence
  Description of Artificial Sequence: Synthetic oligonucleotide
  Antisense strand to SEQ ID NO: 1387680
uggaugagaagccucacgg

SEQ ID NO: 1387682 - RNA, 19 nt, Artificial Sequence
  Description of Artificial Sequence: Synthetic oligonucleotide
  Sense strand starting at position 1249 of SEQ ID NO: 1242999
ugaggcuucucauccacau

SEQ ID NO: 1387683 - RNA, 19 nt, Artificial Sequence
  Description of Artificial Sequence: Synthetic oligonucleotide
  Antisense strand to SEQ ID NO: 1387682
auguggaugagaagccuca

SEQ ID NO: 1387684 - RNA, 19 nt, Artificial Sequence
  Description of Artificial Sequence: Synthetic oligonucleotide
  Sense strand starting at position 1406 of SEQ ID NO: 1242999
gcuuguucugaaugccacu

SEQ ID NO: 1387685 - RNA, 19 nt, Artificial Sequence
  Description of Artificial Sequence: Synthetic oligonucleotide
  Antisense strand to SEQ ID NO: 1387684
aguggcauucagaacaagc

SEQ ID NO: 1387686 - RNA, 19 nt, Artificial Sequence
  Description of Artificial Sequence: Synthetic oligonucleotide
  Sense strand starting at position 2077 of SEQ ID NO: 1242999
cccaguguuucuccucuuu

SEQ ID NO: 1387687 - RNA, 19 nt, Artificial Sequence
  Description of Artificial Sequence: Synthetic oligonucleotide
  Antisense strand to SEQ ID NO: 1387686
aaagaggagaaacacuggg

SEQ ID NO: 1387688 - RNA, 19 nt, Artificial Sequence
  Description of Artificial Sequence: Synthetic oligonucleotide
  Sense strand starting at position 2092 of SEQ ID NO: 1242999
cuuugaccacgaggagaau

SEQ ID NO: 1387689 - RNA, 19 nt, Artificial Sequence
  Description of Artificial Sequence: Synthetic oligonucleotide
  Antisense strand to SEQ ID NO: 1387688
auucuccucguggucaaag

SEQ ID NO: 1387690 - RNA, 19 nt, Artificial Sequence
  Description of Artificial Sequence: Synthetic oligonucleotide
  Sense strand starting at position 2676 of SEQ ID NO: 1242999
aagaguuugcggugaacug

SEQ ID NO: 1387691 - RNA, 19 nt, Artificial Sequence
  Description of Artificial Sequence: Synthetic oligonucleotide
  Antisense strand to SEQ ID NO: 1387690
caguucaccgcaaacucuu

SEQ ID NO: 1387692 - RNA, 19 nt, Artificial Sequence
  Description of Artificial Sequence: Synthetic oligonucleotide
  Sense strand starting at position 2677 of SEQ ID NO: 1242999
agaguuugcggugaacuga

SEQ ID NO: 1387693 - RNA, 19 nt, Artificial Sequence
  Description of Artificial Sequence: Synthetic oligonucleotide
  Antisense strand to SEQ ID NO: 1387692
ucaguucaccgcaaacucu

SEQ ID NO: 1387694 - RNA, 19 nt, Artificial Sequence
  Description of Artificial Sequence: Synthetic oligonucleotide
  Sense strand starting at position 2914 of SEQ ID NO: 1242999
uuuccuuucuuguagacau

SEQ ID NO: 1387695 - RNA, 19 nt, Artificial Sequence
  Description of Artificial Sequence: Synthetic oligonucleotide
  Antisense strand to SEQ ID NO: 1387694
augucuacaagaaaggaaa

SEQ ID NO: 1387696 - RNA, 19 nt, Artificial Sequence
  Description of Artificial Sequence: Synthetic oligonucleotide
  Sense strand starting at position 3037 of SEQ ID NO: 1242999
cuggcaguugucugauuuc

SEQ ID NO: 1387697 - RNA, 19 nt, Artificial Sequence
  Description of Artificial Sequence: Synthetic oligonucleotide
  Antisense strand to SEQ ID NO: 1387696
gaaaucagacaacugccag

SEQ ID NO: 1387698 - RNA, 19 nt, Artificial Sequence
  Description of Artificial Sequence: Synthetic oligonucleotide
  Sense strand starting at position 3043 of SEQ ID NO: 1242999
guugucugauuucuaguaa

SEQ ID NO: 1387699 - RNA, 19 nt, Artificial Sequence
  Description of Artificial Sequence: Synthetic oligonucleotide
  Antisense strand to SEQ ID NO: 1387698
uuacuagaaaucagacaac

SEQ ID NO: 1387700 - RNA, 19 nt, Artificial Sequence
  Description of Artificial Sequence: Synthetic oligonucleotide
  Sense strand starting at position 3044 of SEQ ID NO: 1242999
uugucugauuucuaguaac

SEQ ID NO: 1387701 - RNA, 19 nt, Artificial Sequence
  Description of Artificial Sequence: Synthetic oligonucleotide
  Antisense strand to SEQ ID NO: 1387700
guuacuagaaaucagacaa

SEQ ID NO: 1387702 - RNA, 19 nt, Artificial Sequence
  Description of Artificial Sequence: Synthetic oligonucleotide
  Sense strand starting at position 3047 of SEQ ID NO: 1242999
ucugauuucuaguaacugu

SEQ ID NO: 1387703 - RNA, 19 nt, Artificial Sequence
  Description of Artificial Sequence: Synthetic oligonucleotide
  Antisense strand to SEQ ID NO: 1387702
acaguuacuagaaaucaga

SEQ ID NO: 1387704 - RNA, 19 nt, Artificial Sequence
  Description of Artificial Sequence: Synthetic oligonucleotide
  Sense strand starting at position 3072 of SEQ ID NO: 1242999
uugguaggugcguaauuca

SEQ ID NO: 1387705 - RNA, 19 nt, Artificial Sequence
  Description of Artificial Sequence: Synthetic oligonucleotide
  Antisense strand to SEQ ID NO: 1387704
ugaauuacgcaccuaccaa

SEQ ID NO: 1387706 - RNA, 19 nt, Artificial Sequence
  Description of Artificial Sequence: Synthetic oligonucleotide
  Sense strand starting at position 3075 of SEQ ID NO: 1242999
guaggugcguaauucagau

SEQ ID NO: 1387707 - RNA, 19 nt, Artificial Sequence
  Description of Artificial Sequence: Synthetic oligonucleotide
  Antisense strand to SEQ ID NO: 1387706
aucugaauuacgcaccuac

SEQ ID NO: 1387708 - RNA, 19 nt, Artificial Sequence
  Description of Artificial Sequence: Synthetic oligonucleotide
  Sense strand starting at position 3079 of SEQ ID NO: 1242999
gugcguaauucagaugauu

SEQ ID NO: 1387709 - RNA, 19 nt, Artificial Sequence
  Description of Artificial Sequence: Synthetic oligonucleotide
  Antisense strand to SEQ ID NO: 1387708
aaucaucugaauuacgcac

SEQ ID NO: 1387710 - RNA, 19 nt, Artificial Sequence
  Description of Artificial Sequence: Synthetic oligonucleotide
  Sense strand starting at position 3505 of SEQ ID NO: 1242999
augaacagucuuuguugua

SEQ ID NO: 1387711 - RNA, 19 nt, Artificial Sequence
  Description of Artificial Sequence: Synthetic oligonucleotide
  Antisense strand to SEQ ID NO: 1387710
uacaacaaagacuguucau

SEQ ID NO: 1387712 - RNA, 19 nt, Artificial Sequence
  Description of Artificial Sequence: Synthetic oligonucleotide
  Sense strand starting at position 3506 of SEQ ID NO: 1242999
ugaacagucuuuguuguau

SEQ ID NO: 1387713 - RNA, 19 nt, Artificial Sequence
  Description of Artificial Sequence: Synthetic oligonucleotide
  Antisense strand to SEQ ID NO: 1387712
auacaacaaagacuguuca

SEQ ID NO: 1387714 - RNA, 19 nt, Artificial Sequence
  Description of Artificial Sequence: Synthetic oligonucleotide
  Sense strand starting at position 3510 of SEQ ID NO: 1242999
cagucuuuguuguauucuu

SEQ ID NO: 1387715 - RNA, 19 nt, Artificial Sequence
  Description of Artificial Sequence: Synthetic oligonucleotide
  Antisense strand to SEQ ID NO: 1387714
aagaauacaacaaagacug

SEQ ID NO: 1387716 - RNA, 19 nt, Artificial Sequence
  Description of Artificial Sequence: Synthetic oligonucleotide
  Sense strand starting at position 3515 of SEQ ID NO: 1242999
uuuguuguauucuuagagu

SEQ ID NO: 1387717 - RNA, 19 nt, Artificial Sequence
  Description of Artificial Sequence: Synthetic oligonucleotide
  Antisense strand to SEQ ID NO: 1387716
acucuaagaauacaacaaa

SEQ ID NO: 1387718 - RNA, 19 nt, Artificial Sequence
  Description of Artificial Sequence: Synthetic oligonucleotide
  Sense strand starting at position 3518 of SEQ ID NO: 1242999
guuguauucuuagaguaag

SEQ ID NO: 1387719 - RNA, 19 nt, Artificial Sequence
  Description of Artificial Sequence: Synthetic oligonucleotide
  Antisense strand to SEQ ID NO: 1387718
cuuacucuaagaauacaac

SEQ ID NO: 1387720 - RNA, 19 nt, Artificial Sequence
  Description of Artificial Sequence: Synthetic oligonucleotide
  Sense strand starting at position 3521 of SEQ ID NO: 1242999
guauucuuagaguaagucu

SEQ ID NO: 1387721 - RNA, 19 nt, Artificial Sequence
  Description of Artificial Sequence: Synthetic oligonucleotide
  Antisense strand to SEQ ID NO: 1387720
agacuuacucuaagaauac

SEQ ID NO: 1387722 - RNA, 19 nt, Artificial Sequence
  Description of Artificial Sequence: Synthetic oligonucleotide
  Sense strand starting at position 536 of SEQ ID NO: 1243000
aucacuugugcccgagagu

SEQ ID NO: 1387723 - RNA, 19 nt, Artificial Sequence
  Description of Artificial Sequence: Synthetic oligonucleotide
  Antisense strand to SEQ ID NO: 1387722
acucucgggcacaagugau

SEQ ID NO: 1387724 - RNA, 19 nt, Artificial Sequence
  Description of Artificial Sequence: Synthetic oligonucleotide
  Sense strand starting at position 537 of SEQ ID NO: 1243000
ucacuugugcccgagaguu

SEQ ID NO: 1387725 - RNA, 19 nt, Artificial Sequence
  Description of Artificial Sequence: Synthetic oligonucleotide
  Antisense strand to SEQ ID NO: 1387724
aacucucgggcacaaguga

SEQ ID NO: 1387726 - RNA, 19 nt, Artificial Sequence
  Description of Artificial Sequence: Synthetic oligonucleotide
  Sense strand starting at position 772 of SEQ ID NO: 1243000
uagggucuugucuagaguu

SEQ ID NO: 1387727 - RNA, 19 nt, Artificial Sequence
  Description of Artificial Sequence: Synthetic oligonucleotide
  Antisense strand to SEQ ID NO: 1387726
aacucuagacaagacccua

SEQ ID NO: 1387728 - RNA, 19 nt, Artificial Sequence
  Description of Artificial Sequence: Synthetic oligonucleotide
  Sense strand starting at position 792 of SEQ ID NO: 1243000
uguggccuuuccugggauu

SEQ ID NO: 1387729 - RNA, 19 nt, Artificial Sequence
  Description of Artificial Sequence: Synthetic oligonucleotide
  Antisense strand to SEQ ID NO: 1387728
aaucccaggaaaggccaca

SEQ ID NO: 1387730 - RNA, 19 nt, Artificial Sequence
  Description of Artificial Sequence: Synthetic oligonucleotide
  Sense strand starting at position 794 of SEQ ID NO: 1243000
uggccuuuccugggauuga

SEQ ID NO: 1387731 - RNA, 19 nt, Artificial Sequence
  Description of Artificial Sequence: Synthetic oligonucleotide
  Antisense strand to SEQ ID NO: 1387730
ucaaucccaggaaaggcca

SEQ ID NO: 1387732 - RNA, 19 nt, Artificial Sequence
  Description of Artificial Sequence: Synthetic oligonucleotide
  Sense strand starting at position 795 of SEQ ID NO: 1243000
ggccuuuccugggauugag

SEQ ID NO: 1387733 - RNA, 19 nt, Artificial Sequence
  Description of Artificial Sequence: Synthetic oligonucleotide
  Antisense strand to SEQ ID NO: 1387732
cucaaucccaggaaaggcc

SEQ ID NO: 1387734 - RNA, 19 nt, Artificial Sequence
  Description of Artificial Sequence: Synthetic oligonucleotide
  Sense strand starting at position 798 of SEQ ID NO: 1243000
cuuuccugggauugagaau

SEQ ID NO: 1387735 - RNA, 19 nt, Artificial Sequence
  Description of Artificial Sequence: Synthetic oligonucleotide
  Antisense strand to SEQ ID NO: 1387734
auucucaaucccaggaaag

SEQ ID NO: 1387736 - RNA, 19 nt, Artificial Sequence
  Description of Artificial Sequence: Synthetic oligonucleotide
  Sense strand starting at position 810 of SEQ ID NO: 1243000
ugagaauaauaggugcuga

SEQ ID NO: 1387737 - RNA, 19 nt, Artificial Sequence
  Description of Artificial Sequence: Synthetic oligonucleotide
  Antisense strand to SEQ ID NO: 1387736
ucagcaccuauuauucuca

SEQ ID NO: 1387738 - RNA, 19 nt, Artificial Sequence
  Description of Artificial Sequence: Synthetic oligonucleotide
  Sense strand starting at position 927 of SEQ ID NO: 1243000
acuugauguaguggagguu

SEQ ID NO: 1387739 - RNA, 19 nt, Artificial Sequence
  Description of Artificial Sequence: Synthetic oligonucleotide
  Antisense strand to SEQ ID NO: 1387738
aaccuccacuacaucaagu

SEQ ID NO: 1387740 - RNA, 19 nt, Artificial Sequence
  Description of Artificial Sequence: Synthetic oligonucleotide
  Sense strand starting at position 1475 of SEQ ID NO: 1243000
uuugauggcacgugaaugu

SEQ ID NO: 1387741 - RNA, 19 nt, Artificial Sequence
  Description of Artificial Sequence: Synthetic oligonucleotide
  Antisense strand to SEQ ID NO: 1387740
acauucacgugccaucaaa

SEQ ID NO: 1387742 - RNA, 19 nt, Artificial Sequence
  Description of Artificial Sequence: Synthetic oligonucleotide
  Sense strand starting at position 1484 of SEQ ID NO: 1243000
acgugaaugugacucugau

SEQ ID NO: 1387743 - RNA, 19 nt, Artificial Sequence
  Description of Artificial Sequence: Synthetic oligonucleotide
  Antisense strand to SEQ ID NO: 1387742
aucagagucacauucacgu

SEQ ID NO: 1387744 - RNA, 19 nt, Artificial Sequence
  Description of Artificial Sequence: Synthetic oligonucleotide
  Sense strand starting at position 1490 of SEQ ID NO: 1243000
augugacucugaugcaguu

SEQ ID NO: 1387745 - RNA, 19 nt, Artificial Sequence
  Description of Artificial Sequence: Synthetic oligonucleotide
  Antisense strand to SEQ ID NO: 1387744
aacugcaucagagucacau

SEQ ID NO: 1387746 - RNA, 19 nt, Artificial Sequence
  Description of Artificial Sequence: Synthetic oligonucleotide
  Sense strand starting at position 1565 of SEQ ID NO: 1243000
ggaggugauguccaaccuu

SEQ ID NO: 1387747 - RNA, 19 nt, Artificial Sequence
  Description of Artificial Sequence: Synthetic oligonucleotide
  Antisense strand to SEQ ID NO: 1387746
aagguuggacaucaccucc

SEQ ID NO: 1387748 - RNA, 19 nt, Artificial Sequence
  Description of Artificial Sequence: Synthetic oligonucleotide
  Sense strand starting at position 1806 of SEQ ID NO: 1243000
gccucagcuccucauaaga

SEQ ID NO: 1387749 - RNA, 19 nt, Artificial Sequence
  Description of Artificial Sequence: Synthetic oligonucleotide
  Antisense strand to SEQ ID NO: 1387748
ucuuaugaggagcugaggc

SEQ ID NO: 1387750 - RNA, 19 nt, Artificial Sequence
  Description of Artificial Sequence: Synthetic oligonucleotide
  Sense strand starting at position 1808 of SEQ ID NO: 1243000
cucagcuccucauaagagu

SEQ ID NO: 1387751 - RNA, 19 nt, Artificial Sequence
  Description of Artificial Sequence: Synthetic oligonucleotide
  Antisense strand to SEQ ID NO: 1387750
acucuuaugaggagcugag

SEQ ID NO: 1387752 - RNA, 19 nt, Artificial Sequence
  Description of Artificial Sequence: Synthetic oligonucleotide
  Sense strand starting at position 1815 of SEQ ID NO: 1243000
ccucauaagagugguugga

SEQ ID NO: 1387753 - RNA, 19 nt, Artificial Sequence
  Description of Artificial Sequence: Synthetic oligonucleotide
  Antisense strand to SEQ ID NO: 1387752
uccaaccacucuuaugagg

SEQ ID NO: 1387754 - RNA, 19 nt, Artificial Sequence
  Description of Artificial Sequence: Synthetic oligonucleotide
  Sense strand starting at position 2085 of SEQ ID NO: 1243000
gggcgugguuaauuaugga

SEQ ID NO: 1387755 - RNA, 19 nt, Artificial Sequence
  Description of Artificial Sequence: Synthetic oligonucleotide
  Antisense strand to SEQ ID NO: 1387754
uccauaauuaaccacgccc

SEQ ID NO: 1387756 - RNA, 19 nt, Artificial Sequence
  Description of Artificial Sequence: Synthetic oligonucleotide
  Sense strand starting at position 2088 of SEQ ID NO: 1243000
cgugguuaauuauggaaca

SEQ ID NO: 1387757 - RNA, 19 nt, Artificial Sequence
  Description of Artificial Sequence: Synthetic oligonucleotide
  Antisense strand to SEQ ID NO: 1387756
uguuccauaauuaaccacg

SEQ ID NO: 1387758 - RNA, 19 nt, Artificial Sequence
  Description of Artificial Sequence: Synthetic oligonucleotide
  Sense strand starting at position 2302 of SEQ ID NO: 1243000
gaggucuuggcauguggau

SEQ ID NO: 1387759 - RNA, 19 nt, Artificial Sequence
  Description of Artificial Sequence: Synthetic oligonucleotide
  Antisense strand to SEQ ID NO: 1387758
auccacaugccaagaccuc

SEQ ID NO: 1387760 - RNA, 19 nt, Artificial Sequence
  Description of Artificial Sequence: Synthetic oligonucleotide
  Sense strand starting at position 2412 of SEQ ID NO: 1243000
auaauaaagucaugccaug

SEQ ID NO: 1387761 - RNA, 19 nt, Artificial Sequence
  Description of Artificial Sequence: Synthetic oligonucleotide
  Antisense strand to SEQ ID NO: 1387760
cauggcaugacuuuauuau

SEQ ID NO: 1387762 - RNA, 19 nt, Artificial Sequence
  Description of Artificial Sequence: Synthetic oligonucleotide
  Sense strand starting at position 2417 of SEQ ID NO: 1243000
aaagucaugccaugggcua

SEQ ID NO: 1387763 - RNA, 19 nt, Artificial Sequence
  Description of Artificial Sequence: Synthetic oligonucleotide
  Antisense strand to SEQ ID NO: 1387762
uagcccauggcaugacuuu

SEQ ID NO: 1387764 - RNA, 19 nt, Artificial Sequence
  Description of Artificial Sequence: Synthetic oligonucleotide
  Sense strand starting at position 2431 of SEQ ID NO: 1243000
ggcuacuacucagcaagaa

SEQ ID NO: 1387765 - RNA, 19 nt, Artificial Sequence
  Description of Artificial Sequence: Synthetic oligonucleotide
  Antisense strand to SEQ ID NO: 1387764
uucuugcugaguaguagcc

SEQ ID NO: 1387766 - RNA, 19 nt, Artificial Sequence
  Description of Artificial Sequence: Synthetic oligonucleotide
  Sense strand starting at position 2432 of SEQ ID NO: 1243000
gcuacuacucagcaagaaa

SEQ ID NO: 1387767 - RNA, 19 nt, Artificial Sequence
  Description of Artificial Sequence: Synthetic oligonucleotide
  Antisense strand to SEQ ID NO: 1387766
uuucuugcugaguaguagc

SEQ ID NO: 1387768 - RNA, 19 nt, Artificial Sequence
  Description of Artificial Sequence: Synthetic oligonucleotide
  Sense strand starting at position 2593 of SEQ ID NO: 1243000
acugcaguucuguacaaca

SEQ ID NO: 1387769 - RNA, 19 nt, Artificial Sequence
  Description of Artificial Sequence: Synthetic oligonucleotide
  Antisense strand to SEQ ID NO: 1387768
uguuguacagaacugcagu

SEQ ID NO: 1387770 - RNA, 19 nt, Artificial Sequence
  Description of Artificial Sequence: Synthetic oligonucleotide
  Sense strand starting at position 2595 of SEQ ID NO: 1243000
ugcaguucuguacaacaau

SEQ ID NO: 1387771 - RNA, 19 nt, Artificial Sequence
  Description of Artificial Sequence: Synthetic oligonucleotide
  Antisense strand to SEQ ID NO: 1387770
auuguuguacagaacugca

SEQ ID NO: 1387772 - RNA, 19 nt, Artificial Sequence
  Description of Artificial Sequence: Synthetic oligonucleotide
  Sense strand starting at position 2726 of SEQ ID NO: 1243000
ucagaagagugguugucua

SEQ ID NO: 1387773 - RNA, 19 nt, Artificial Sequence
  Description of Artificial Sequence: Synthetic oligonucleotide
  Antisense strand to SEQ ID NO: 1387772
uagacaaccacucuucuga

SEQ ID NO: 1387774 - RNA, 19 nt, Artificial Sequence
  Description of Artificial Sequence: Synthetic oligonucleotide
  Sense strand starting at position 2730 of SEQ ID NO: 1243000
aagagugguugucuauggu

SEQ ID NO: 1387775 - RNA, 19 nt, Artificial Sequence
  Description of Artificial Sequence: Synthetic oligonucleotide
  Antisense strand to SEQ ID NO: 1387774
accauagacaaccacucuu

SEQ ID NO: 1387776 - RNA, 19 nt, Artificial Sequence
  Description of Artificial Sequence: Synthetic oligonucleotide
  Sense strand starting at position 2879 of SEQ ID NO: 1243000
cccagucacugggauuacu

SEQ ID NO: 1387777 - RNA, 19 nt, Artificial Sequence
  Description of Artificial Sequence: Synthetic oligonucleotide
  Antisense strand to SEQ ID NO: 1387776
aguaaucccagugacuggg

SEQ ID NO: 1387778 - RNA, 19 nt, Artificial Sequence
  Description of Artificial Sequence: Synthetic oligonucleotide
  Sense strand starting at position 2943 of SEQ ID NO: 1243000
acgagaucgcacuauguug

SEQ ID NO: 1387779 - RNA, 19 nt, Artificial Sequence
  Description of Artificial Sequence: Synthetic oligonucleotide
  Antisense strand to SEQ ID NO: 1387778
caacauagugcgaucucgu

SEQ ID NO: 1387780 - RNA, 19 nt, Artificial Sequence
  Description of Artificial Sequence: Synthetic oligonucleotide
  Sense strand starting at position 3058 of SEQ ID NO: 1243000
gaaccuuuagcauguguua

SEQ ID NO: 1387781 - RNA, 19 nt, Artificial Sequence
  Description of Artificial Sequence: Synthetic oligonucleotide
  Antisense strand to SEQ ID NO: 1387780
uaacacaugcuaaagguuc

SEQ ID NO: 1387782 - RNA, 19 nt, Artificial Sequence
  Description of Artificial Sequence: Synthetic oligonucleotide
  Sense strand starting at position 3061 of SEQ ID NO: 1243000
ccuuuagcauguguuaaau

SEQ ID NO: 1387783 - RNA, 19 nt, Artificial Sequence
  Description of Artificial Sequence: Synthetic oligonucleotide
  Antisense strand to SEQ ID NO: 1387782
auuuaacacaugcuaaagg

SEQ ID NO: 1387784 - RNA, 19 nt, Artificial Sequence
  Description of Artificial Sequence: Synthetic oligonucleotide
  Sense strand starting at position 3128 of SEQ ID NO: 1243000
aagauaaaugagugguugu

SEQ ID NO: 1387785 - RNA, 19 nt, Artificial Sequence
  Description of Artificial Sequence: Synthetic oligonucleotide
  Antisense strand to SEQ ID NO: 1387784
acaaccacucauuuaucuu

SEQ ID NO: 1387786 - RNA, 19 nt, Artificial Sequence
  Description of Artificial Sequence: Synthetic oligonucleotide
  Sense strand starting at position 3129 of SEQ ID NO: 1243000
agauaaaugagugguuguu

SEQ ID NO: 1387787 - RNA, 19 nt, Artificial Sequence
  Description of Artificial Sequence: Synthetic oligonucleotide
  Antisense strand to SEQ ID NO: 1387786
aacaaccacucauuuaucu

SEQ ID NO: 1387788 - RNA, 19 nt, Artificial Sequence
  Description of Artificial Sequence: Synthetic oligonucleotide
  Sense strand starting at position 3131 of SEQ ID NO: 1243000
auaaaugagugguuguuau

SEQ ID NO: 1387789 - RNA, 19 nt, Artificial Sequence
  Description of Artificial Sequence: Synthetic oligonucleotide
  Antisense strand to SEQ ID NO: 1387788
auaacaaccacucauuuau

SEQ ID NO: 1387790 - RNA, 19 nt, Artificial Sequence
  Description of Artificial Sequence: Synthetic oligonucleotide
  Sense strand starting at position 3135 of SEQ ID NO: 1243000
augagugguuguuauuuau

SEQ ID NO: 1387791 - RNA, 19 nt, Artificial Sequence
  Description of Artificial Sequence: Synthetic oligonucleotide
  Antisense strand to SEQ ID NO: 1387790
auaaauaacaaccacucau

SEQ ID NO: 1387792 - RNA, 19 nt, Artificial Sequence
  Description of Artificial Sequence: Synthetic oligonucleotide
  Sense strand starting at position 3573 of SEQ ID NO: 1243000
ggaauauacuuugaagguu

SEQ ID NO: 1387793 - RNA, 19 nt, Artificial Sequence
  Description of Artificial Sequence: Synthetic oligonucleotide
  Antisense strand to SEQ ID NO: 1387792
aaccuucaaaguauauucc

SEQ ID NO: 1387794 - RNA, 19 nt, Artificial Sequence
  Description of Artificial Sequence: Synthetic oligonucleotide
  Sense strand starting at position 3718 of SEQ ID NO: 1243000
gguguauagcuugagguca

SEQ ID NO: 1387795 - RNA, 19 nt, Artificial Sequence
  Description of Artificial Sequence: Synthetic oligonucleotide
  Antisense strand to SEQ ID NO: 1387794
ugaccucaagcuauacacc

SEQ ID NO: 1387796 - RNA, 19 nt, Artificial Sequence
  Description of Artificial Sequence: Synthetic oligonucleotide
  Sense strand starting at position 15 of SEQ ID NO: 1243001
ggcgguggcguaucuaaga

SEQ ID NO: 1387797 - RNA, 19 nt, Artificial Sequence
  Description of Artificial Sequence: Synthetic oligonucleotide
  Antisense strand to SEQ ID NO: 1387796
ucuuagauacgccaccgcc

SEQ ID NO: 1387798 - RNA, 19 nt, Artificial Sequence
  Description of Artificial Sequence: Synthetic oligonucleotide
  Sense strand starting at position 20 of SEQ ID NO: 1243001
uggcguaucuaagaagggu

SEQ ID NO: 1387799 - RNA, 19 nt, Artificial Sequence
  Description of Artificial Sequence: Synthetic oligonucleotide
  Antisense strand to SEQ ID NO: 1387798
acccuucuuagauacgcca

SEQ ID NO: 1387800 - RNA, 19 nt, Artificial Sequence
  Description of Artificial Sequence: Synthetic oligonucleotide
  Sense strand starting at position 107 of SEQ ID NO: 1243001
ugggcaaugcgaaguguuu

SEQ ID NO: 1387801 - RNA, 19 nt, Artificial Sequence
  Description of Artificial Sequence: Synthetic oligonucleotide
  Antisense strand to SEQ ID NO: 1387800
aaacacuucgcauugccca

SEQ ID NO: 1387802 - RNA, 19 nt, Artificial Sequence
  Description of Artificial Sequence: Synthetic oligonucleotide
  Sense strand starting at position 199 of SEQ ID NO: 1243001
cacuccugucucugaggau

SEQ ID NO: 1387803 - RNA, 19 nt, Artificial Sequence
  Description of Artificial Sequence: Synthetic oligonucleotide
  Antisense strand to SEQ ID NO: 1387802
auccucagagacaggagug

SEQ ID NO: 1387804 - RNA, 19 nt, Artificial Sequence
  Description of Artificial Sequence: Synthetic oligonucleotide
  Sense strand starting at position 200 of SEQ ID NO: 1243001
acuccugucucugaggauu

SEQ ID NO: 1387805 - RNA, 19 nt, Artificial Sequence
  Description of Artificial Sequence: Synthetic oligonucleotide
  Antisense strand to SEQ ID NO: 1387804
aauccucagagacaggagu

SEQ ID NO: 1387806 - RNA, 19 nt, Artificial Sequence
  Description of Artificial Sequence: Synthetic oligonucleotide
  Sense strand starting at position 598 of SEQ ID NO: 1243001
ggcguugacuucugggaau

SEQ ID NO: 1387807 - RNA, 19 nt, Artificial Sequence
  Description of Artificial Sequence: Synthetic oligonucleotide
  Antisense strand to SEQ ID NO: 1387806
auucccagaagucaacgcc

SEQ ID NO: 1387808 - RNA, 19 nt, Artificial Sequence
  Description of Artificial Sequence: Synthetic oligonucleotide
  Sense strand starting at position 600 of SEQ ID NO: 1243001
cguugacuucugggaauau

SEQ ID NO: 1387809 - RNA, 19 nt, Artificial Sequence
  Description of Artificial Sequence: Synthetic oligonucleotide
  Antisense strand to SEQ ID NO: 1387808
auauucccagaagucaacg

SEQ ID NO: 1387810 - RNA, 19 nt, Artificial Sequence
  Description of Artificial Sequence: Synthetic oligonucleotide
  Sense strand starting at position 601 of SEQ ID NO: 1243001
guugacuucugggaauaug

SEQ ID NO: 1387811 - RNA, 19 nt, Artificial Sequence
  Description of Artificial Sequence: Synthetic oligonucleotide
  Antisense strand to SEQ ID NO: 1387810
cauauucccagaagucaac

SEQ ID NO: 1387812 - RNA, 19 nt, Artificial Sequence
  Description of Artificial Sequence: Synthetic oligonucleotide
  Sense strand starting at position 686 of SEQ ID NO: 1243001
ccguuuggccucucugcaa

SEQ ID NO: 1387813 - RNA, 19 nt, Artificial Sequence
  Description of Artificial Sequence: Synthetic oligonucleotide
  Antisense strand to SEQ ID NO: 1387812
uugcagagaggccaaacgg

SEQ ID NO: 1387814 - RNA, 19 nt, Artificial Sequence
  Description of Artificial Sequence: Synthetic oligonucleotide
  Sense strand starting at position 1043 of SEQ ID NO: 1243001
uggaguuuaguucagagca

SEQ ID NO: 1387815 - RNA, 19 nt, Artificial Sequence
  Description of Artificial Sequence: Synthetic oligonucleotide
  Antisense strand to SEQ ID NO: 1387814
ugcucugaacuaaacucca

SEQ ID NO: 1387816 - RNA, 19 nt, Artificial Sequence
  Description of Artificial Sequence: Synthetic oligonucleotide
  Sense strand starting at position 1296 of SEQ ID NO: 1243001
ucugccucaugggaugaaa

SEQ ID NO: 1387817 - RNA, 19 nt, Artificial Sequence
  Description of Artificial Sequence: Synthetic oligonucleotide
  Antisense strand to SEQ ID NO: 1387816
uuucaucccaugaggcaga

SEQ ID NO: 1387818 - RNA, 19 nt, Artificial Sequence
  Description of Artificial Sequence: Synthetic oligonucleotide
  Sense strand starting at position 1419 of SEQ ID NO: 1243001
uggccagucugucuuaaau

SEQ ID NO: 1387819 - RNA, 19 nt, Artificial Sequence
  Description of Artificial Sequence: Synthetic oligonucleotide
  Antisense strand to SEQ ID NO: 1387818
auuuaagacagacuggcca

SEQ ID NO: 1387820 - RNA, 19 nt, Artificial Sequence
  Description of Artificial Sequence: Synthetic oligonucleotide
  Sense strand starting at position 1421 of SEQ ID NO: 1243001
gccagucugucuuaaauuc

SEQ ID NO: 1387821 - RNA, 19 nt, Artificial Sequence
  Description of Artificial Sequence: Synthetic oligonucleotide
  Antisense strand to SEQ ID NO: 1387820
gaauuuaagacagacuggc

SEQ ID NO: 1387822 - RNA, 19 nt, Artificial Sequence
  Description of Artificial Sequence: Synthetic oligonucleotide
  Sense strand starting at position 1711 of SEQ ID NO: 1243001
caguuucucuggucacaga

SEQ ID NO: 1387823 - RNA, 19 nt, Artificial Sequence
  Description of Artificial Sequence: Synthetic oligonucleotide
  Antisense strand to SEQ ID NO: 1387822
ucugugaccagagaaacug

SEQ ID NO: 1387824 - RNA, 19 nt, Artificial Sequence
  Description of Artificial Sequence: Synthetic oligonucleotide
  Sense strand starting at position 2036 of SEQ ID NO: 1243001
gaggaaguguaagcaaguu

SEQ ID NO: 1387825 - RNA, 19 nt, Artificial Sequence
  Description of Artificial Sequence: Synthetic oligonucleotide
  Antisense strand to SEQ ID NO: 1387824
aacuugcuuacacuuccuc

SEQ ID NO: 1387826 - RNA, 19 nt, Artificial Sequence
  Description of Artificial Sequence: Synthetic oligonucleotide
  Sense strand starting at position 2044 of SEQ ID NO: 1243001
guaagcaaguuagagacau

SEQ ID NO: 1387827 - RNA, 19 nt, Artificial Sequence
  Description of Artificial Sequence: Synthetic oligonucleotide
  Antisense strand to SEQ ID NO: 1387826
augucucuaacuugcuuac

SEQ ID NO: 1387828 - RNA, 19 nt, Artificial Sequence
  Description of Artificial Sequence: Synthetic oligonucleotide
  Sense strand starting at position 2055 of SEQ ID NO: 1243001
agagacauuuccugugccu

SEQ ID NO: 1387829 - RNA, 19 nt, Artificial Sequence
  Description of Artificial Sequence: Synthetic oligonucleotide
  Antisense strand to SEQ ID NO: 1387828
aggcacaggaaaugucucu

SEQ ID NO: 1387830 - RNA, 19 nt, Artificial Sequence
  Description of Artificial Sequence: Synthetic oligonucleotide
  Sense strand starting at position 2102 of SEQ ID NO: 1243001
gacagcaugucagggagau

SEQ ID NO: 1387831 - RNA, 19 nt, Artificial Sequence
  Description of Artificial Sequence: Synthetic oligonucleotide
  Antisense strand to SEQ ID NO: 1387830
aucucccugacaugcuguc

SEQ ID NO: 1387832 - RNA, 19 nt, Artificial Sequence
  Description of Artificial Sequence: Synthetic oligonucleotide
  Sense strand starting at position 2135 of SEQ ID NO: 1243001
cugucaugguuucucacua

SEQ ID NO: 1387833 - RNA, 19 nt, Artificial Sequence
  Description of Artificial Sequence: Synthetic oligonucleotide
  Antisense strand to SEQ ID NO: 1387832
uagugagaaaccaugacag

SEQ ID NO: 1387834 - RNA, 19 nt, Artificial Sequence
  Description of Artificial Sequence: Synthetic oligonucleotide
  Sense strand starting at position 2136 of SEQ ID NO: 1243001
ugucaugguuucucacuaa

SEQ ID NO: 1387835 - RNA, 19 nt, Artificial Sequence
  Description of Artificial Sequence: Synthetic oligonucleotide
  Antisense strand to SEQ ID NO: 1387834
uuagugagaaaccaugaca

SEQ ID NO: 1387836 - RNA, 19 nt, Artificial Sequence
  Description of Artificial Sequence: Synthetic oligonucleotide
  Sense strand starting at position 2161 of SEQ ID NO: 1243001
aacuaagggcucuguaaag

SEQ ID NO: 1387837 - RNA, 19 nt, Artificial Sequence
  Description of Artificial Sequence: Synthetic oligonucleotide
  Antisense strand to SEQ ID NO: 1387836
cuuuacagagcccuuaguu

SEQ ID NO: 1387838 - RNA, 19 nt, Artificial Sequence
  Description of Artificial Sequence: Synthetic oligonucleotide
  Sense strand starting at position 2170 of SEQ ID NO: 1243001
cucuguaaagcucagcaga

SEQ ID NO: 1387839 - RNA, 19 nt, Artificial Sequence
  Description of Artificial Sequence: Synthetic oligonucleotide
  Antisense strand to SEQ ID NO: 1387838
ucugcugagcuuuacagag

SEQ ID NO: 1387840 - RNA, 19 nt, Artificial Sequence
  Description of Artificial Sequence: Synthetic oligonucleotide
  Sense strand starting at position 2280 of SEQ ID NO: 1243001
gugagagcuuucucuggac

SEQ ID NO: 1387841 - RNA, 19 nt, Artificial Sequence
  Description of Artificial Sequence: Synthetic oligonucleotide
  Antisense strand to SEQ ID NO: 1387840
guccagagaaagcucucac

SEQ ID NO: 1387842 - RNA, 19 nt, Artificial Sequence
  Description of Artificial Sequence: Synthetic oligonucleotide
  Sense strand starting at position 2282 of SEQ ID NO: 1243001
gagagcuuucucuggaccu

SEQ ID NO: 1387843 - RNA, 19 nt, Artificial Sequence
  Description of Artificial Sequence: Synthetic oligonucleotide
  Antisense strand to SEQ ID NO: 1387842
agguccagagaaagcucuc

SEQ ID NO: 1387844 - RNA, 19 nt, Artificial Sequence
  Description of Artificial Sequence: Synthetic oligonucleotide
  Sense strand starting at position 2283 of SEQ ID NO: 1243001
agagcuuucucuggaccuu

SEQ ID NO: 1387845 - RNA, 19 nt, Artificial Sequence
  Description of Artificial Sequence: Synthetic oligonucleotide
  Antisense strand to SEQ ID NO: 1387844
aagguccagagaaagcucu

SEQ ID NO: 1387846 - RNA, 19 nt, Artificial Sequence
  Description of Artificial Sequence: Synthetic oligonucleotide
  Sense strand starting at position 2289 of SEQ ID NO: 1243001
uucucuggaccuugaaaga

SEQ ID NO: 1387847 - RNA, 19 nt, Artificial Sequence
  Description of Artificial Sequence: Synthetic oligonucleotide
  Antisense strand to SEQ ID NO: 1387846
ucuuucaagguccagagaa

SEQ ID NO: 1387848 - RNA, 19 nt, Artificial Sequence
  Description of Artificial Sequence: Synthetic oligonucleotide
  Sense strand starting at position 2412 of SEQ ID NO: 1243001
uggcucacuggcuguaauu

SEQ ID NO: 1387849 - RNA, 19 nt, Artificial Sequence
  Description of Artificial Sequence: Synthetic oligonucleotide
  Antisense strand to SEQ ID NO: 1387848
aauuacagccagugagcca

SEQ ID NO: 1387850 - RNA, 19 nt, Artificial Sequence
  Description of Artificial Sequence: Synthetic oligonucleotide
  Sense strand starting at position 2460 of SEQ ID NO: 1243001
guaagagcaucucuugaag

SEQ ID NO: 1387851 - RNA, 19 nt, Artificial Sequence
  Description of Artificial Sequence: Synthetic oligonucleotide
  Antisense strand to SEQ ID NO: 1387850
cuucaagagaugcucuuac

SEQ ID NO: 1387852 - RNA, 19 nt, Artificial Sequence
  Description of Artificial Sequence: Synthetic oligonucleotide
  Sense strand starting at position 2508 of SEQ ID NO: 1243001
agugaaacuuugucuuuaa

SEQ ID NO: 1387853 - RNA, 19 nt, Artificial Sequence
  Description of Artificial Sequence: Synthetic oligonucleotide
  Antisense strand to SEQ ID NO: 1387852
uuaaagacaaaguuucacu

SEQ ID NO: 1387854 - RNA, 19 nt, Artificial Sequence
  Description of Artificial Sequence: Synthetic oligonucleotide
  Sense strand starting at position 2509 of SEQ ID NO: 1243001
gugaaacuuugucuuuaaa

SEQ ID NO: 1387855 - RNA, 19 nt, Artificial Sequence
  Description of Artificial Sequence: Synthetic oligonucleotide
  Antisense strand to SEQ ID NO: 1387854
uuuaaagacaaaguuucac

SEQ ID NO: 1387856 - RNA, 19 nt, Artificial Sequence
  Description of Artificial Sequence: Synthetic oligonucleotide
  Sense strand starting at position 2574 of SEQ ID NO: 1243001
gggauuuguuuccagaaua

SEQ ID NO: 1387857 - RNA, 19 nt, Artificial Sequence
  Description of Artificial Sequence: Synthetic oligonucleotide
  Antisense strand to SEQ ID NO: 1387856
uauucuggaaacaaauccc

SEQ ID NO: 1387858 - RNA, 19 nt, Artificial Sequence
  Description of Artificial Sequence: Synthetic oligonucleotide
  Sense strand starting at position 3015 of SEQ ID NO: 1243001
cugguugugcuccauuagu

SEQ ID NO: 1387859 - RNA, 19 nt, Artificial Sequence
  Description of Artificial Sequence: Synthetic oligonucleotide
  Antisense strand to SEQ ID NO: 1387858
acuaauggagcacaaccag

SEQ ID NO: 1387860 - RNA, 19 nt, Artificial Sequence
  Description of Artificial Sequence: Synthetic oligonucleotide
  Sense strand starting at position 3509 of SEQ ID NO: 1243001
accuacuuugaugguuaga

SEQ ID NO: 1387861 - RNA, 19 nt, Artificial Sequence
  Description of Artificial Sequence: Synthetic oligonucleotide
  Antisense strand to SEQ ID NO: 1387860
ucuaaccaucaaaguaggu

SEQ ID NO: 1387862 - RNA, 19 nt, Artificial Sequence
  Description of Artificial Sequence: Synthetic oligonucleotide
  Sense strand starting at position 3511 of SEQ ID NO: 1243001
cuacuuugaugguuagagu

SEQ ID NO: 1387863 - RNA, 19 nt, Artificial Sequence
  Description of Artificial Sequence: Synthetic oligonucleotide
  Antisense strand to SEQ ID NO: 1387862
acucuaaccaucaaaguag

SEQ ID NO: 1387864 - RNA, 19 nt, Artificial Sequence
  Description of Artificial Sequence: Synthetic oligonucleotide
  Sense strand starting at position 3512 of SEQ ID NO: 1243001
uacuuugaugguuagaguu

SEQ ID NO: 1387865 - RNA, 19 nt, Artificial Sequence
  Description of Artificial Sequence: Synthetic oligonucleotide
  Antisense strand to SEQ ID NO: 1387864
aacucuaaccaucaaagua

SEQ ID NO: 1387866 - RNA, 19 nt, Artificial Sequence
  Description of Artificial Sequence: Synthetic oligonucleotide
  Sense strand starting at position 3514 of SEQ ID NO: 1243001
cuuugaugguuagaguuua

SEQ ID NO: 1387867 - RNA, 19 nt, Artificial Sequence
  Description of Artificial Sequence: Synthetic oligonucleotide
  Antisense strand to SEQ ID NO: 1387866
uaaacucuaaccaucaaag

SEQ ID NO: 1387868 - RNA, 19 nt, Artificial Sequence
  Description of Artificial Sequence: Synthetic oligonucleotide
  Sense strand starting at position 3519 of SEQ ID NO: 1243001
augguuagaguuuaaagca

SEQ ID NO: 1387869 - RNA, 19 nt, Artificial Sequence
  Description of Artificial Sequence: Synthetic oligonucleotide
  Antisense strand to SEQ ID NO: 1387868
ugcuuuaaacucuaaccau

SEQ ID NO: 1387870 - RNA, 19 nt, Artificial Sequence
  Description of Artificial Sequence: Synthetic oligonucleotide
  Sense strand starting at position 3552 of SEQ ID NO: 1243001
uagugaagaugugaagaaa

SEQ ID NO: 1387871 - RNA, 19 nt, Artificial Sequence
  Description of Artificial Sequence: Synthetic oligonucleotide
  Antisense strand to SEQ ID NO: 1387870
uuucuucacaucuucacua

SEQ ID NO: 1387872 - RNA, 19 nt, Artificial Sequence
  Description of Artificial Sequence: Synthetic oligonucleotide
  Sense strand starting at position 3582 of SEQ ID NO: 1243001
gugcacauugcuggcagaa

SEQ ID NO: 1387873 - RNA, 19 nt, Artificial Sequence
  Description of Artificial Sequence: Synthetic oligonucleotide
  Antisense strand to SEQ ID NO: 1387872
uucugccagcaaugugcac

SEQ ID NO: 1387874 - RNA, 19 nt, Artificial Sequence
  Description of Artificial Sequence: Synthetic oligonucleotide
  Sense strand starting at position 3584 of SEQ ID NO: 1243001
gcacauugcuggcagaaau

SEQ ID NO: 1387875 - RNA, 19 nt, Artificial Sequence
  Description of Artificial Sequence: Synthetic oligonucleotide
  Antisense strand to SEQ ID NO: 1387874
auuucugccagcaaugugc

SEQ ID NO: 1387876 - RNA, 19 nt, Artificial Sequence
  Description of Artificial Sequence: Synthetic oligonucleotide
  Sense strand starting at position 115 of SEQ ID NO: 1243002
uauguaagucuuggagaga

SEQ ID NO: 1387877 - RNA, 19 nt, Artificial Sequence
  Description of Artificial Sequence: Synthetic oligonucleotide
  Antisense strand to SEQ ID NO: 1387876
ucucuccaagacuuacaua

SEQ ID NO: 1387878 - RNA, 19 nt, Artificial Sequence
  Description of Artificial Sequence: Synthetic oligonucleotide
  Sense strand starting at position 116 of SEQ ID NO: 1243002
auguaagucuuggagagaa

SEQ ID NO: 1387879 - RNA, 19 nt, Artificial Sequence
  Description of Artificial Sequence: Synthetic oligonucleotide
  Antisense strand to SEQ ID NO: 1387878
uucucuccaagacuuacau

SEQ ID NO: 1387880 - RNA, 19 nt, Artificial Sequence
  Description of Artificial Sequence: Synthetic oligonucleotide
  Sense strand starting at position 371 of SEQ ID NO: 1243002
ucacuugagcccugauugu

SEQ ID NO: 1387881 - RNA, 19 nt, Artificial Sequence
  Description of Artificial Sequence: Synthetic oligonucleotide
  Antisense strand to SEQ ID NO: 1387880
acaaucagggcucaaguga

SEQ ID NO: 1387882 - RNA, 19 nt, Artificial Sequence
  Description of Artificial Sequence: Synthetic oligonucleotide
  Sense strand starting at position 904 of SEQ ID NO: 1243002
acagccagauaguaaauuu

SEQ ID NO: 1387883 - RNA, 19 nt, Artificial Sequence
  Description of Artificial Sequence: Synthetic oligonucleotide
  Antisense strand to SEQ ID NO: 1387882
aaauuuacuaucuggcugu

SEQ ID NO: 1387884 - RNA, 19 nt, Artificial Sequence
  Description of Artificial Sequence: Synthetic oligonucleotide
  Sense strand starting at position 936 of SEQ ID NO: 1243002
ccaagaggcugauagaaua

SEQ ID NO: 1387885 - RNA, 19 nt, Artificial Sequence
  Description of Artificial Sequence: Synthetic oligonucleotide
  Antisense strand to SEQ ID NO: 1387884
uauucuaucagccucuugg

SEQ ID NO: 1387886 - RNA, 19 nt, Artificial Sequence
  Description of Artificial Sequence: Synthetic oligonucleotide
  Sense strand starting at position 943 of SEQ ID NO: 1243002
gcugauagaauauguugua

SEQ ID NO: 1387887 - RNA, 19 nt, Artificial Sequence
  Description of Artificial Sequence: Synthetic oligonucleotide
  Antisense strand to SEQ ID NO: 1387886
uacaacauauucuaucagc

SEQ ID NO: 1387888 - RNA, 19 nt, Artificial Sequence
  Description of Artificial Sequence: Synthetic oligonucleotide
  Sense strand starting at position 946 of SEQ ID NO: 1243002
gauagaauauguuguacaa

SEQ ID NO: 1387889 - RNA, 19 nt, Artificial Sequence
  Description of Artificial Sequence: Synthetic oligonucleotide
  Antisense strand to SEQ ID NO: 1387888
uuguacaacauauucuauc

SEQ ID NO: 1387890 - RNA, 19 nt, Artificial Sequence
  Description of Artificial Sequence: Synthetic oligonucleotide
  Sense strand starting at position 948 of SEQ ID NO: 1243002
uagaauauguuguacaagu

SEQ ID NO: 1387891 - RNA, 19 nt, Artificial Sequence
  Description of Artificial Sequence: Synthetic oligonucleotide
  Antisense strand to SEQ ID NO: 1387890
acuuguacaacauauucua

SEQ ID NO: 1387892 - RNA, 19 nt, Artificial Sequence
  Description of Artificial Sequence: Synthetic oligonucleotide
  Sense strand starting at position 1047 of SEQ ID NO: 1243002
guuuguaauacggguuuac

SEQ ID NO: 1387893 - RNA, 19 nt, Artificial Sequence
  Description of Artificial Sequence: Synthetic oligonucleotide
  Antisense strand to SEQ ID NO: 1387892
guaaacccguauuacaaac

SEQ ID NO: 1387894 - RNA, 19 nt, Artificial Sequence
  Description of Artificial Sequence: Synthetic oligonucleotide
  Sense strand starting at position 1051 of SEQ ID NO: 1243002
guaauacggguuuacaaau

SEQ ID NO: 1387895 - RNA, 19 nt, Artificial Sequence
  Description of Artificial Sequence: Synthetic oligonucleotide
  Antisense strand to SEQ ID NO: 1387894
auuuguaaacccguauuac

SEQ ID NO: 1387896 - RNA, 19 nt, Artificial Sequence
  Description of Artificial Sequence: Synthetic oligonucleotide
  Sense strand starting at position 1057 of SEQ ID NO: 1243002
cggguuuacaaaugagaca

SEQ ID NO: 1387897 - RNA, 19 nt, Artificial Sequence
  Description of Artificial Sequence: Synthetic oligonucleotide
  Antisense strand to SEQ ID NO: 1387896
ugucucauuuguaaacccg

SEQ ID NO: 1387898 - RNA, 19 nt, Artificial Sequence
  Description of Artificial Sequence: Synthetic oligonucleotide
  Sense strand starting at position 1060 of SEQ ID NO: 1243002
guuuacaaaugagacaaau

SEQ ID NO: 1387899 - RNA, 19 nt, Artificial Sequence
  Description of Artificial Sequence: Synthetic oligonucleotide
  Antisense strand to SEQ ID NO: 1387898
auuugucucauuuguaaac

SEQ ID NO: 1387900 - RNA, 19 nt, Artificial Sequence
  Description of Artificial Sequence: Synthetic oligonucleotide
  Sense strand starting at position 1092 of SEQ ID NO: 1243002
gguggugcucccuaucauc

SEQ ID NO: 1387901 - RNA, 19 nt, Artificial Sequence
  Description of Artificial Sequence: Synthetic oligonucleotide
  Antisense strand to SEQ ID NO: 1387900
gaugauagggagcaccacc

SEQ ID NO: 1387902 - RNA, 19 nt, Artificial Sequence
  Description of Artificial Sequence: Synthetic oligonucleotide
  Sense strand starting at position 1095 of SEQ ID NO: 1243002
ggugcucccuaucaucaaa

SEQ ID NO: 1387903 - RNA, 19 nt, Artificial Sequence
  Description of Artificial Sequence: Synthetic oligonucleotide
  Antisense strand to SEQ ID NO: 1387902
uuugaugauagggagcacc

SEQ ID NO: 1387904 - RNA, 19 nt, Artificial Sequence
  Description of Artificial Sequence: Synthetic oligonucleotide
  Sense strand starting at position 1202 of SEQ ID NO: 1243002
gcugacuccugaccuaaga

SEQ ID NO: 1387905 - RNA, 19 nt, Artificial Sequence
  Description of Artificial Sequence: Synthetic oligonucleotide
  Antisense strand to SEQ ID NO: 1387904
ucuuaggucaggagucagc

SEQ ID NO: 1387906 - RNA, 19 nt, Artificial Sequence
  Description of Artificial Sequence: Synthetic oligonucleotide
  Sense strand starting at position 1297 of SEQ ID NO: 1243002
cggugucacaacgaugauu

SEQ ID NO: 1387907 - RNA, 19 nt, Artificial Sequence
  Description of Artificial Sequence: Synthetic oligonucleotide
  Antisense strand to SEQ ID NO: 1387906
aaucaucguugugacaccg

SEQ ID NO: 1387908 - RNA, 19 nt, Artificial Sequence
  Description of Artificial Sequence: Synthetic oligonucleotide
  Sense strand starting at position 1618 of SEQ ID NO: 1243002
cgucuccucaugugugaag

SEQ ID NO: 1387909 - RNA, 19 nt, Artificial Sequence
  Description of Artificial Sequence: Synthetic oligonucleotide
  Antisense strand to SEQ ID NO: 1387908
cuucacacaugaggagacg

SEQ ID NO: 1387910 - RNA, 19 nt, Artificial Sequence
  Description of Artificial Sequence: Synthetic oligonucleotide
  Sense strand starting at position 1620 of SEQ ID NO: 1243002
ucuccucaugugugaagca

SEQ ID NO: 1387911 - RNA, 19 nt, Artificial Sequence
  Description of Artificial Sequence: Synthetic oligonucleotide
  Antisense strand to SEQ ID NO: 1387910
ugcuucacacaugaggaga

SEQ ID NO: 1387912 - RNA, 19 nt, Artificial Sequence
  Description of Artificial Sequence: Synthetic oligonucleotide
  Sense strand starting at position 1656 of SEQ ID NO: 1243002
ccuugcacaguccaugaau

SEQ ID NO: 1387913 - RNA, 19 nt, Artificial Sequence
  Description of Artificial Sequence: Synthetic oligonucleotide
  Antisense strand to SEQ ID NO: 1387912
auucauggacugugcaagg

SEQ ID NO: 1387914 - RNA, 19 nt, Artificial Sequence
  Description of Artificial Sequence: Synthetic oligonucleotide
  Sense strand starting at position 1658 of SEQ ID NO: 1243002
uugcacaguccaugaaugu

SEQ ID NO: 1387915 - RNA, 19 nt, Artificial Sequence
  Description of Artificial Sequence: Synthetic oligonucleotide
  Antisense strand to SEQ ID NO: 1387914
acauucauggacugugcaa

SEQ ID NO: 1387916 - RNA, 19 nt, Artificial Sequence
  Description of Artificial Sequence: Synthetic oligonucleotide
  Sense strand starting at position 1664 of SEQ ID NO: 1243002
aguccaugaauguggucau

SEQ ID NO: 1387917 - RNA, 19 nt, Artificial Sequence
  Description of Artificial Sequence: Synthetic oligonucleotide
  Antisense strand to SEQ ID NO: 1387916
augaccacauucauggacu

SEQ ID NO: 1387918 - RNA, 19 nt, Artificial Sequence
  Description of Artificial Sequence: Synthetic oligonucleotide
  Sense strand starting at position 1804 of SEQ ID NO: 1243002
gcccucuauuuaugacaga

SEQ ID NO: 1387919 - RNA, 19 nt, Artificial Sequence
  Description of Artificial Sequence: Synthetic oligonucleotide
  Antisense strand to SEQ ID NO: 1387918
ucugucauaaauagagggc

SEQ ID NO: 1387920 - RNA, 19 nt, Artificial Sequence
  Description of Artificial Sequence: Synthetic oligonucleotide
  Sense strand starting at position 1868 of SEQ ID NO: 1243002
ccaugcaccuguuaacaga

SEQ ID NO: 1387921 - RNA, 19 nt, Artificial Sequence
  Description of Artificial Sequence: Synthetic oligonucleotide
  Antisense strand to SEQ ID NO: 1387920
ucuguuaacaggugcaugg

SEQ ID NO: 1387922 - RNA, 19 nt, Artificial Sequence
  Description of Artificial Sequence: Synthetic oligonucleotide
  Sense strand starting at position 2015 of SEQ ID NO: 1243002
gcagaagucuaucagagau

SEQ ID NO: 1387923 - RNA, 19 nt, Artificial Sequence
  Description of Artificial Sequence: Synthetic oligonucleotide
  Antisense strand to SEQ ID NO: 1387922
aucucugauagacuucugc

SEQ ID NO: 1387924 - RNA, 19 nt, Artificial Sequence
  Description of Artificial Sequence: Synthetic oligonucleotide
  Sense strand starting at position 2170 of SEQ ID NO: 1243002
ugccauuugucacccacuu

SEQ ID NO: 1387925 - RNA, 19 nt, Artificial Sequence
  Description of Artificial Sequence: Synthetic oligonucleotide
  Antisense strand to SEQ ID NO: 1387924
aagugggugacaaauggca

SEQ ID NO: 1387926 - RNA, 19 nt, Artificial Sequence
  Description of Artificial Sequence: Synthetic oligonucleotide
  Sense strand starting at position 2244 of SEQ ID NO: 1243002
uggaauucguguucuaaac

SEQ ID NO: 1387927 - RNA, 19 nt, Artificial Sequence
  Description of Artificial Sequence: Synthetic oligonucleotide
  Antisense strand to SEQ ID NO: 1387926
guuuagaacacgaauucca

SEQ ID NO: 1387928 - RNA, 19 nt, Artificial Sequence
  Description of Artificial Sequence: Synthetic oligonucleotide
  Sense strand starting at position 2246 of SEQ ID NO: 1243002
gaauucguguucuaaacau

SEQ ID NO: 1387929 - RNA, 19 nt, Artificial Sequence
  Description of Artificial Sequence: Synthetic oligonucleotide
  Antisense strand to SEQ ID NO: 1387928
auguuuagaacacgaauuc

SEQ ID NO: 1387930 - RNA, 19 nt, Artificial Sequence
  Description of Artificial Sequence: Synthetic oligonucleotide
  Sense strand starting at position 2664 of SEQ ID NO: 1243002
ugcaaugagccucaauaau

SEQ ID NO: 1387931 - RNA, 19 nt, Artificial Sequence
  Description of Artificial Sequence: Synthetic oligonucleotide
  Antisense strand to SEQ ID NO: 1387930
auuauugaggcucauugca

SEQ ID NO: 1387932 - RNA, 19 nt, Artificial Sequence
  Description of Artificial Sequence: Synthetic oligonucleotide
  Sense strand starting at position 3134 of SEQ ID NO: 1243002
aagaucuugcuauguuguu

SEQ ID NO: 1387933 - RNA, 19 nt, Artificial Sequence
  Description of Artificial Sequence: Synthetic oligonucleotide
  Antisense strand to SEQ ID NO: 1387932
aacaacauagcaagaucuu

SEQ ID NO: 1387934 - RNA, 19 nt, Artificial Sequence
  Description of Artificial Sequence: Synthetic oligonucleotide
  Sense strand starting at position 3331 of SEQ ID NO: 1243002
auaguuaagaaguguaguc

SEQ ID NO: 1387935 - RNA, 19 nt, Artificial Sequence
  Description of Artificial Sequence: Synthetic oligonucleotide
  Antisense strand to SEQ ID NO: 1387934
gacuacacuucuuaacuau

SEQ ID NO: 1387936 - RNA, 19 nt, Artificial Sequence
  Description of Artificial Sequence: Synthetic oligonucleotide
  Sense strand starting at position 3333 of SEQ ID NO: 1243002
aguuaagaaguguagucaa

SEQ ID NO: 1387937 - RNA, 19 nt, Artificial Sequence
  Description of Artificial Sequence: Synthetic oligonucleotide
  Antisense strand to SEQ ID NO: 1387936
uugacuacacuucuuaacu

SEQ ID NO: 1387938 - RNA, 19 nt, Artificial Sequence
  Description of Artificial Sequence: Synthetic oligonucleotide
  Sense strand starting at position 3430 of SEQ ID NO: 1243002
cucacuugaggucagcaau

SEQ ID NO: 1387939 - RNA, 19 nt, Artificial Sequence
  Description of Artificial Sequence: Synthetic oligonucleotide
  Antisense strand to SEQ ID NO: 1387938
auugcugaccucaagugag

SEQ ID NO: 1387940 - RNA, 19 nt, Artificial Sequence
  Description of Artificial Sequence: Synthetic oligonucleotide
  Sense strand starting at position 3433 of SEQ ID NO: 1243002
acuugaggucagcaauuga

SEQ ID NO: 1387941 - RNA, 19 nt, Artificial Sequence
  Description of Artificial Sequence: Synthetic oligonucleotide
  Antisense strand to SEQ ID NO: 1387940
ucaauugcugaccucaagu

SEQ ID NO: 1387942 - RNA, 19 nt, Artificial Sequence
  Description of Artificial Sequence: Synthetic oligonucleotide
  Sense strand starting at position 3701 of SEQ ID NO: 1243002
gcagcauuauuguuaauau

SEQ ID NO: 1387943 - RNA, 19 nt, Artificial Sequence
  Description of Artificial Sequence: Synthetic oligonucleotide
  Antisense strand to SEQ ID NO: 1387942
auauuaacaauaaugcugc

SEQ ID NO: 1387944 - RNA, 19 nt, Artificial Sequence
  Description of Artificial Sequence: Synthetic oligonucleotide
  Sense strand starting at position 3777 of SEQ ID NO: 1243002
ugugauauauccuuacccu

SEQ ID NO: 1387945 - RNA, 19 nt, Artificial Sequence
  Description of Artificial Sequence: Synthetic oligonucleotide
  Antisense strand to SEQ ID NO: 1387944
aggguaaggauauaucaca

SEQ ID NO: 1387946 - RNA, 19 nt, Artificial Sequence
  Description of Artificial Sequence: Synthetic oligonucleotide
  Sense strand starting at position 3778 of SEQ ID NO: 1243002
gugauauauccuuacccuc

SEQ ID NO: 1387947 - RNA, 19 nt, Artificial Sequence
  Description of Artificial Sequence: Synthetic oligonucleotide
  Antisense strand to SEQ ID NO: 1387946
gaggguaaggauauaucac

SEQ ID NO: 1387948 - RNA, 19 nt, Artificial Sequence
  Description of Artificial Sequence: Synthetic oligonucleotide
  Sense strand starting at position 3880 of SEQ ID NO: 1243002
accuuuaugugaccgccaa

SEQ ID NO: 1387949 - RNA, 19 nt, Artificial Sequence
  Description of Artificial Sequence: Synthetic oligonucleotide
  Antisense strand to SEQ ID NO: 1387948
uuggcggucacauaaaggu

SEQ ID NO: 1387950 - RNA, 19 nt, Artificial Sequence
  Description of Artificial Sequence: Synthetic oligonucleotide
  Sense strand starting at position 3881 of SEQ ID NO: 1243002
ccuuuaugugaccgccaau

SEQ ID NO: 1387951 - RNA, 19 nt, Artificial Sequence
  Description of Artificial Sequence: Synthetic oligonucleotide
  Antisense strand to SEQ ID NO: 1387950
auuggcggucacauaaagg

SEQ ID NO: 1387952 - RNA, 19 nt, Artificial Sequence
  Description of Artificial Sequence: Synthetic oligonucleotide
  Sense strand starting at position 3887 of SEQ ID NO: 1243002
ugugaccgccaaugugauu

SEQ ID NO: 1387953 - RNA, 19 nt, Artificial Sequence
  Description of Artificial Sequence: Synthetic oligonucleotide
  Antisense strand to SEQ ID NO: 1387952
aaucacauuggcggucaca

SEQ ID NO: 1387954 - RNA, 19 nt, Artificial Sequence
  Description of Artificial Sequence: Synthetic oligonucleotide
  Sense strand starting at position 3892 of SEQ ID NO: 1243002
ccgccaaugugauucucaa

SEQ ID NO: 1387955 - RNA, 19 nt, Artificial Sequence
  Description of Artificial Sequence: Synthetic oligonucleotide
  Antisense strand to SEQ ID NO: 1387954
uugagaaucacauuggcgg

SEQ ID NO: 1387956 - RNA, 19 nt, Artificial Sequence
  Description of Artificial Sequence: Synthetic oligonucleotide
  Sense strand starting at position 112 of SEQ ID NO: 1243003
gacagauaugugcaugguc

SEQ ID NO: 1387957 - RNA, 19 nt, Artificial Sequence
  Description of Artificial Sequence: Synthetic oligonucleotide
  Antisense strand to SEQ ID NO: 1387956
gaccaugcacauaucuguc

SEQ ID NO: 1387958 - RNA, 19 nt, Artificial Sequence
  Description of Artificial Sequence: Synthetic oligonucleotide
  Sense strand starting at position 114 of SEQ ID NO: 1243003
cagauaugugcauggucac

SEQ ID NO: 1387959 - RNA, 19 nt, Artificial Sequence
  Description of Artificial Sequence: Synthetic oligonucleotide
  Antisense strand to SEQ ID NO: 1387958
gugaccaugcacauaucug

SEQ ID NO: 1387960 - RNA, 19 nt, Artificial Sequence
  Description of Artificial Sequence: Synthetic oligonucleotide
  Sense strand starting at position 115 of SEQ ID NO: 1243003
agauaugugcauggucacu

SEQ ID NO: 1387961 - RNA, 19 nt, Artificial Sequence
  Description of Artificial Sequence: Synthetic oligonucleotide
  Antisense strand to SEQ ID NO: 1387960
agugaccaugcacauaucu

SEQ ID NO: 1387962 - RNA, 19 nt, Artificial Sequence
  Description of Artificial Sequence: Synthetic oligonucleotide
  Sense strand starting at position 197 of SEQ ID NO: 1243003
gaggucugacggugaagga

SEQ ID NO: 1387963 - RNA, 19 nt, Artificial Sequence
  Description of Artificial Sequence: Synthetic oligonucleotide
  Antisense strand to SEQ ID NO: 1387962
uccuucaccgucagaccuc

SEQ ID NO: 1387964 - RNA, 19 nt, Artificial Sequence
  Description of Artificial Sequence: Synthetic oligonucleotide
  Sense strand starting at position 607 of SEQ ID NO: 1243003
ccucaucugcaagauggau

SEQ ID NO: 1387965 - RNA, 19 nt, Artificial Sequence
  Description of Artificial Sequence: Synthetic oligonucleotide
  Antisense strand to SEQ ID NO: 1387964
auccaucuugcagaugagg

SEQ ID NO: 1387966 - RNA, 19 nt, Artificial Sequence
  Description of Artificial Sequence: Synthetic oligonucleotide
  Sense strand starting at position 691 of SEQ ID NO: 1243003
agaaauauuuguugagucu

SEQ ID NO: 1387967 - RNA, 19 nt, Artificial Sequence
  Description of Artificial Sequence: Synthetic oligonucleotide
  Antisense strand to SEQ ID NO: 1387966
agacucaacaaauauuucu

SEQ ID NO: 1387968 - RNA, 19 nt, Artificial Sequence
  Description of Artificial Sequence: Synthetic oligonucleotide
  Sense strand starting at position 861 of SEQ ID NO: 1243003
caaauaaguguuuguugca

SEQ ID NO: 1387969 - RNA, 19 nt, Artificial Sequence
  Description of Artificial Sequence: Synthetic oligonucleotide
  Antisense strand to SEQ ID NO: 1387968
ugcaacaaacacuuauuug

SEQ ID NO: 1387970 - RNA, 19 nt, Artificial Sequence
  Description of Artificial Sequence: Synthetic oligonucleotide
  Sense strand starting at position 897 of SEQ ID NO: 1243003
caggcugucguguggacua

SEQ ID NO: 1387971 - RNA, 19 nt, Artificial Sequence
  Description of Artificial Sequence: Synthetic oligonucleotide
  Antisense strand to SEQ ID NO: 1387970
uaguccacacgacagccug

SEQ ID NO: 1387972 - RNA, 19 nt, Artificial Sequence
  Description of Artificial Sequence: Synthetic oligonucleotide
  Sense strand starting at position 899 of SEQ ID NO: 1243003
ggcugucguguggacuaaa

SEQ ID NO: 1387973 - RNA, 19 nt, Artificial Sequence
  Description of Artificial Sequence: Synthetic oligonucleotide
  Antisense strand to SEQ ID NO: 1387972
uuuaguccacacgacagcc

SEQ ID NO: 1387974 - RNA, 19 nt, Artificial Sequence
  Description of Artificial Sequence: Synthetic oligonucleotide
  Sense strand starting at position 902 of SEQ ID NO: 1243003
ugucguguggacuaaauca

SEQ ID NO: 1387975 - RNA, 19 nt, Artificial Sequence
  Description of Artificial Sequence: Synthetic oligonucleotide
  Antisense strand to SEQ ID NO: 1387974
ugauuuaguccacacgaca

SEQ ID NO: 1387976 - RNA, 19 nt, Artificial Sequence
  Description of Artificial Sequence: Synthetic oligonucleotide
  Sense strand starting at position 947 of SEQ ID NO: 1243003
ugcacuuacugcucuguaa

SEQ ID NO: 1387977 - RNA, 19 nt, Artificial Sequence
  Description of Artificial Sequence: Synthetic oligonucleotide
  Antisense strand to SEQ ID NO: 1387976
uuacagagcaguaagugca

SEQ ID NO: 1387978 - RNA, 19 nt, Artificial Sequence
  Description of Artificial Sequence: Synthetic oligonucleotide
  Sense strand starting at position 950 of SEQ ID NO: 1243003
acuuacugcucuguaaaug

SEQ ID NO: 1387979 - RNA, 19 nt, Artificial Sequence
  Description of Artificial Sequence: Synthetic oligonucleotide
  Antisense strand to SEQ ID NO: 1387978
cauuuacagagcaguaagu

SEQ ID NO: 1387980 - RNA, 19 nt, Artificial Sequence
  Description of Artificial Sequence: Synthetic oligonucleotide
  Sense strand starting at position 951 of SEQ ID NO: 1243003
cuuacugcucuguaaaugu

SEQ ID NO: 1387981 - RNA, 19 nt, Artificial Sequence
  Description of Artificial Sequence: Synthetic oligonucleotide
  Antisense strand to SEQ ID NO: 1387980
acauuuacagagcaguaag

SEQ ID NO: 1387982 - RNA, 19 nt, Artificial Sequence
  Description of Artificial Sequence: Synthetic oligonucleotide
  Sense strand starting at position 960 of SEQ ID NO: 1243003
cuguaaauguuagcuguga

SEQ ID NO: 1387983 - RNA, 19 nt, Artificial Sequence
  Description of Artificial Sequence: Synthetic oligonucleotide
  Antisense strand to SEQ ID NO: 1387982
ucacagcuaacauuuacag

SEQ ID NO: 1387984 - RNA, 19 nt, Artificial Sequence
  Description of Artificial Sequence: Synthetic oligonucleotide
  Sense strand starting at position 962 of SEQ ID NO: 1243003
guaaauguuagcugugaga

SEQ ID NO: 1387985 - RNA, 19 nt, Artificial Sequence
  Description of Artificial Sequence: Synthetic oligonucleotide
  Antisense strand to SEQ ID NO: 1387984
ucucacagcuaacauuuac

SEQ ID NO: 1387986 - RNA, 19 nt, Artificial Sequence
  Description of Artificial Sequence: Synthetic oligonucleotide
  Sense strand starting at position 1038 of SEQ ID NO: 1243003
agaggagaguuugcaaaua

SEQ ID NO: 1387987 - RNA, 19 nt, Artificial Sequence
  Description of Artificial Sequence: Synthetic oligonucleotide
  Antisense strand to SEQ ID NO: 1387986
uauuugcaaacucuccucu

SEQ ID NO: 1387988 - RNA, 19 nt, Artificial Sequence
  Description of Artificial Sequence: Synthetic oligonucleotide
  Sense strand starting at position 1270 of SEQ ID NO: 1243003
ggagaagggucuuccuucu

SEQ ID NO: 1387989 - RNA, 19 nt, Artificial Sequence
  Description of Artificial Sequence: Synthetic oligonucleotide
  Antisense strand to SEQ ID NO: 1387988
agaaggaagacccuucucc

SEQ ID NO: 1387990 - RNA, 19 nt, Artificial Sequence
  Description of Artificial Sequence: Synthetic oligonucleotide
  Sense strand starting at position 1428 of SEQ ID NO: 1243003
ccacuaucgaguugcaguu

SEQ ID NO: 1387991 - RNA, 19 nt, Artificial Sequence
  Description of Artificial Sequence: Synthetic oligonucleotide
  Antisense strand to SEQ ID NO: 1387990
aacugcaacucgauagugg

SEQ ID NO: 1387992 - RNA, 19 nt, Artificial Sequence
  Description of Artificial Sequence: Synthetic oligonucleotide
  Sense strand starting at position 1984 of SEQ ID NO: 1243003
gaagaagauugucagcaug

SEQ ID NO: 1387993 - RNA, 19 nt, Artificial Sequence
  Description of Artificial Sequence: Synthetic oligonucleotide
  Antisense strand to SEQ ID NO: 1387992
caugcugacaaucuucuuc

SEQ ID NO: 1387994 - RNA, 19 nt, Artificial Sequence
  Description of Artificial Sequence: Synthetic oligonucleotide
  Sense strand starting at position 1986 of SEQ ID NO: 1243003
agaagauugucagcaugag

SEQ ID NO: 1387995 - RNA, 19 nt, Artificial Sequence
  Description of Artificial Sequence: Synthetic oligonucleotide
  Antisense strand to SEQ ID NO: 1387994
cucaugcugacaaucuucu

SEQ ID NO: 1387996 - RNA, 19 nt, Artificial Sequence
  Description of Artificial Sequence: Synthetic oligonucleotide
  Sense strand starting at position 1987 of SEQ ID NO: 1243003
gaagauugucagcaugagu

SEQ ID NO: 1387997 - RNA, 19 nt, Artificial Sequence
  Description of Artificial Sequence: Synthetic oligonucleotide
  Antisense strand to SEQ ID NO: 1387996
acucaugcugacaaucuuc

SEQ ID NO: 1387998 - RNA, 19 nt, Artificial Sequence
  Description of Artificial Sequence: Synthetic oligonucleotide
  Sense strand starting at position 2080 of SEQ ID NO: 1243003
gagucacucucaucagaug

SEQ ID NO: 1387999 - RNA, 19 nt, Artificial Sequence
  Description of Artificial Sequence: Synthetic oligonucleotide
  Antisense strand to SEQ ID NO: 1387998
caucugaugagagugacuc

SEQ ID NO: 1388000 - RNA, 19 nt, Artificial Sequence
  Description of Artificial Sequence: Synthetic oligonucleotide
  Sense strand starting at position 2091 of SEQ ID NO: 1243003
aucagaugacuuggcuuga

SEQ ID NO: 1388001 - RNA, 19 nt, Artificial Sequence
  Description of Artificial Sequence: Synthetic oligonucleotide
  Antisense strand to SEQ ID NO: 1388000
ucaagccaagucaucugau

SEQ ID NO: 1388002 - RNA, 19 nt, Artificial Sequence
  Description of Artificial Sequence: Synthetic oligonucleotide
  Sense strand starting at position 2092 of SEQ ID NO: 1243003
ucagaugacuuggcuugau

SEQ ID NO: 1388003 - RNA, 19 nt, Artificial Sequence
  Description of Artificial Sequence: Synthetic oligonucleotide
  Antisense strand to SEQ ID NO: 1388002
aucaagccaagucaucuga

SEQ ID NO: 1388004 - RNA, 19 nt, Artificial Sequence
  Description of Artificial Sequence: Synthetic oligonucleotide
  Sense strand starting at position 2117 of SEQ ID NO: 1243003
ugcuuagauggaugcaaau

SEQ ID NO: 1388005 - RNA, 19 nt, Artificial Sequence
  Description of Artificial Sequence: Synthetic oligonucleotide
  Antisense strand to SEQ ID NO: 1388004
auuugcauccaucuaagca

SEQ ID NO: 1388006 - RNA, 19 nt, Artificial Sequence
  Description of Artificial Sequence: Synthetic oligonucleotide
  Sense strand starting at position 2272 of SEQ ID NO: 1243003
ccacucugaccuggaaagu

SEQ ID NO: 1388007 - RNA, 19 nt, Artificial Sequence
  Description of Artificial Sequence: Synthetic oligonucleotide
  Antisense strand to SEQ ID NO: 1388006
acuuuccaggucagagugg

SEQ ID NO: 1388008 - RNA, 19 nt, Artificial Sequence
  Description of Artificial Sequence: Synthetic oligonucleotide
  Sense strand starting at position 2326 of SEQ ID NO: 1243003
ggagcacagagcgaguauu

SEQ ID NO: 1388009 - RNA, 19 nt, Artificial Sequence
  Description of Artificial Sequence: Synthetic oligonucleotide
  Antisense strand to SEQ ID NO: 1388008
aauacucgcucugugcucc

SEQ ID NO: 1388010 - RNA, 19 nt, Artificial Sequence
  Description of Artificial Sequence: Synthetic oligonucleotide
  Sense strand starting at position 2470 of SEQ ID NO: 1243003
aguggagaggcagauguau

SEQ ID NO: 1388011 - RNA, 19 nt, Artificial Sequence
  Description of Artificial Sequence: Synthetic oligonucleotide
  Antisense strand to SEQ ID NO: 1388010
auacaucugccucuccacu

SEQ ID NO: 1388012 - RNA, 19 nt, Artificial Sequence
  Description of Artificial Sequence: Synthetic oligonucleotide
  Sense strand starting at position 2472 of SEQ ID NO: 1243003
uggagaggcagauguauaa

SEQ ID NO: 1388013 - RNA, 19 nt, Artificial Sequence
  Description of Artificial Sequence: Synthetic oligonucleotide
  Antisense strand to SEQ ID NO: 1388012
uuauacaucugccucucca

SEQ ID NO: 1388014 - RNA, 19 nt, Artificial Sequence
  Description of Artificial Sequence: Synthetic oligonucleotide
  Sense strand starting at position 2555 of SEQ ID NO: 1243003
agguguggcuuucugagaa

SEQ ID NO: 1388015 - RNA, 19 nt, Artificial Sequence
  Description of Artificial Sequence: Synthetic oligonucleotide
  Antisense strand to SEQ ID NO: 1388014
uucucagaaagccacaccu

SEQ ID NO: 1388016 - RNA, 19 nt, Artificial Sequence
  Description of Artificial Sequence: Synthetic oligonucleotide
  Sense strand starting at position 2591 of SEQ ID NO: 1243003
ggugcuugagcugagcauu

SEQ ID NO: 1388017 - RNA, 19 nt, Artificial Sequence
  Description of Artificial Sequence: Synthetic oligonucleotide
  Antisense strand to SEQ ID NO: 1388016
aaugcucagcucaagcacc

SEQ ID NO: 1388018 - RNA, 19 nt, Artificial Sequence
  Description of Artificial Sequence: Synthetic oligonucleotide
  Sense strand starting at position 2594 of SEQ ID NO: 1243003
gcuugagcugagcauugaa

SEQ ID NO: 1388019 - RNA, 19 nt, Artificial Sequence
  Description of Artificial Sequence: Synthetic oligonucleotide
  Antisense strand to SEQ ID NO: 1388018
uucaaugcucagcucaagc

SEQ ID NO: 1388020 - RNA, 19 nt, Artificial Sequence
  Description of Artificial Sequence: Synthetic oligonucleotide
  Sense strand starting at position 2712 of SEQ ID NO: 1243003
ggugggaaguuguaagaga

SEQ ID NO: 1388021 - RNA, 19 nt, Artificial Sequence
  Description of Artificial Sequence: Synthetic oligonucleotide
  Antisense strand to SEQ ID NO: 1388020
ucucuuacaacuucccacc

SEQ ID NO: 1388022 - RNA, 19 nt, Artificial Sequence
  Description of Artificial Sequence: Synthetic oligonucleotide
  Sense strand starting at position 3204 of SEQ ID NO: 1243003
uuuagaaaguggguuauau

SEQ ID NO: 1388023 - RNA, 19 nt, Artificial Sequence
  Description of Artificial Sequence: Synthetic oligonucleotide
  Antisense strand to SEQ ID NO: 1388022
auauaacccacuuucuaaa

SEQ ID NO: 1388024 - RNA, 19 nt, Artificial Sequence
  Description of Artificial Sequence: Synthetic oligonucleotide
  Sense strand starting at position 3546 of SEQ ID NO: 1243003
gggcaugguuucuuuggga

SEQ ID NO: 1388025 - RNA, 19 nt, Artificial Sequence
  Description of Artificial Sequence: Synthetic oligonucleotide
  Antisense strand to SEQ ID NO: 1388024
ucccaaagaaaccaugccc

SEQ ID NO: 1388026 - RNA, 19 nt, Artificial Sequence
  Description of Artificial Sequence: Synthetic oligonucleotide
  Sense strand starting at position 3576 of SEQ ID NO: 1243003
acugauuugucaggagaga

SEQ ID NO: 1388027 - RNA, 19 nt, Artificial Sequence
  Description of Artificial Sequence: Synthetic oligonucleotide
  Antisense strand to SEQ ID NO: 1388026
ucucuccugacaaaucagu

SEQ ID NO: 1388028 - RNA, 19 nt, Artificial Sequence
  Description of Artificial Sequence: Synthetic oligonucleotide
  Sense strand starting at position 3723 of SEQ ID NO: 1243003
accagagugcaguguuuaa

SEQ ID NO: 1388029 - RNA, 19 nt, Artificial Sequence
  Description of Artificial Sequence: Synthetic oligonucleotide
  Antisense strand to SEQ ID NO: 1388028
uuaaacacugcacucuggu

SEQ ID NO: 1388030 - RNA, 19 nt, Artificial Sequence
  Description of Artificial Sequence: Synthetic oligonucleotide
  Sense strand starting at position 3735 of SEQ ID NO: 1243003
uguuuaagagcuuggacua

SEQ ID NO: 1388031 - RNA, 19 nt, Artificial Sequence
  Description of Artificial Sequence: Synthetic oligonucleotide
  Antisense strand to SEQ ID NO: 1388030
uaguccaagcucuuaaaca

SEQ ID NO: 1388032 - RNA, 19 nt, Artificial Sequence
  Description of Artificial Sequence: Synthetic oligonucleotide
  Sense strand starting at position 3736 of SEQ ID NO: 1243003
guuuaagagcuuggacuau

SEQ ID NO: 1388033 - RNA, 19 nt, Artificial Sequence
  Description of Artificial Sequence: Synthetic oligonucleotide
  Antisense strand to SEQ ID NO: 1388032
auaguccaagcucuuaaac

SEQ ID NO: 1388034 - RNA, 19 nt, Artificial Sequence
  Description of Artificial Sequence: Synthetic oligonucleotide
  Sense strand starting at position 3893 of SEQ ID NO: 1243003
gaucauugcugugcuguga

SEQ ID NO: 1388035 - RNA, 19 nt, Artificial Sequence
  Description of Artificial Sequence: Synthetic oligonucleotide
  Antisense strand to SEQ ID NO: 1388034
ucacagcacagcaaugauc

SEQ ID NO: 1388036 - RNA, 19 nt, Artificial Sequence
  Description of Artificial Sequence: Synthetic oligonucleotide
  Sense strand starting at position 2137 of SEQ ID NO: 1243004
uugcgcucccuugaaguua

SEQ ID NO: 1388037 - RNA, 19 nt, Artificial Sequence
  Description of Artificial Sequence: Synthetic oligonucleotide
  Antisense strand to SEQ ID NO: 1388036
uaacuucaagggagcgcaa

SEQ ID NO: 1388038 - RNA, 19 nt, Artificial Sequence
  Description of Artificial Sequence: Synthetic oligonucleotide
  Sense strand starting at position 2148 of SEQ ID NO: 1243004
ugaaguuauacugggacgu

SEQ ID NO: 1388039 - RNA, 19 nt, Artificial Sequence
  Description of Artificial Sequence: Synthetic oligonucleotide
  Antisense strand to SEQ ID NO: 1388038
acgucccaguauaacuuca

SEQ ID NO: 1388040 - RNA, 19 nt, Artificial Sequence
  Description of Artificial Sequence: Synthetic oligonucleotide
  Sense strand starting at position 2149 of SEQ ID NO: 1243004
gaaguuauacugggacguu

SEQ ID NO: 1388041 - RNA, 19 nt, Artificial Sequence
  Description of Artificial Sequence: Synthetic oligonucleotide
  Antisense strand to SEQ ID NO: 1388040
aacgucccaguauaacuuc

SEQ ID NO: 1388042 - RNA, 19 nt, Artificial Sequence
  Description of Artificial Sequence: Synthetic oligonucleotide
  Sense strand starting at position 2152 of SEQ ID NO: 1243004
guuauacugggacguugaa

SEQ ID NO: 1388043 - RNA, 19 nt, Artificial Sequence
  Description of Artificial Sequence: Synthetic oligonucleotide
  Antisense strand to SEQ ID NO: 1388042
uucaacgucccaguauaac

SEQ ID NO: 1388044 - RNA, 19 nt, Artificial Sequence
  Description of Artificial Sequence: Synthetic oligonucleotide
  Sense strand starting at position 2275 of SEQ ID NO: 1243004
gccgcagucgucuguucaa

SEQ ID NO: 1388045 - RNA, 19 nt, Artificial Sequence
  Description of Artificial Sequence: Synthetic oligonucleotide
  Antisense strand to SEQ ID NO: 1388044
uugaacagacgacugcggc

SEQ ID NO: 1388046 - RNA, 19 nt, Artificial Sequence
  Description of Artificial Sequence: Synthetic oligonucleotide
  Sense strand starting at position 2277 of SEQ ID NO: 1243004
cgcagucgucuguucaaac

SEQ ID NO: 1388047 - RNA, 19 nt, Artificial Sequence
  Description of Artificial Sequence: Synthetic oligonucleotide
  Antisense strand to SEQ ID NO: 1388046
guuugaacagacgacugcg

SEQ ID NO: 1388048 - RNA, 19 nt, Artificial Sequence
  Description of Artificial Sequence: Synthetic oligonucleotide
  Sense strand starting at position 2349 of SEQ ID NO: 1243004
aaucauaguugacaagaug

SEQ ID NO: 1388049 - RNA, 19 nt, Artificial Sequence
  Description of Artificial Sequence: Synthetic oligonucleotide
  Antisense strand to SEQ ID NO: 1388048
caucuugucaacuaugauu

SEQ ID NO: 1388050 - RNA, 19 nt, Artificial Sequence
  Description of Artificial Sequence: Synthetic oligonucleotide
  Sense strand starting at position 2372 of SEQ ID NO: 1243004
agguuucuguccuucguga

SEQ ID NO: 1388051 - RNA, 19 nt, Artificial Sequence
  Description of Artificial Sequence: Synthetic oligonucleotide
  Antisense strand to SEQ ID NO: 1388050
ucacgaaggacagaaaccu

SEQ ID NO: 1388052 - RNA, 19 nt, Artificial Sequence
  Description of Artificial Sequence: Synthetic oligonucleotide
  Sense strand starting at position 2374 of SEQ ID NO: 1243004
guuucuguccuucgugaag

SEQ ID NO: 1388053 - RNA, 19 nt, Artificial Sequence
  Description of Artificial Sequence: Synthetic oligonucleotide
  Antisense strand to SEQ ID NO: 1388052
cuucacgaaggacagaaac

SEQ ID NO: 1388054 - RNA, 19 nt, Artificial Sequence
  Description of Artificial Sequence: Synthetic oligonucleotide
  Sense strand starting at position 2376 of SEQ ID NO: 1243004
uucuguccuucgugaagcu

SEQ ID NO: 1388055 - RNA, 19 nt, Artificial Sequence
  Description of Artificial Sequence: Synthetic oligonucleotide
  Antisense strand to SEQ ID NO: 1388054
agcuucacgaaggacagaa

SEQ ID NO: 1388056 - RNA, 19 nt, Artificial Sequence
  Description of Artificial Sequence: Synthetic oligonucleotide
  Sense strand starting at position 2936 of SEQ ID NO: 1243004
agaagaucgcuugagugag

SEQ ID NO: 1388057 - RNA, 19 nt, Artificial Sequence
  Description of Artificial Sequence: Synthetic oligonucleotide
  Antisense strand to SEQ ID NO: 1388056
cucacucaagcgaucuucu

SEQ ID NO: 1388058 - RNA, 19 nt, Artificial Sequence
  Description of Artificial Sequence: Synthetic oligonucleotide
  Sense strand starting at position 3018 of SEQ ID NO: 1243004
gcaagacucuugucucuga

SEQ ID NO: 1388059 - RNA, 19 nt, Artificial Sequence
  Description of Artificial Sequence: Synthetic oligonucleotide
  Antisense strand to SEQ ID NO: 1388058
ucagagacaagagucuugc

SEQ ID NO: 1388060 - RNA, 19 nt, Artificial Sequence
  Description of Artificial Sequence: Synthetic oligonucleotide
  Sense strand starting at position 3233 of SEQ ID NO: 1243004
uuccucaucugcugggaau

SEQ ID NO: 1388061 - RNA, 19 nt, Artificial Sequence
  Description of Artificial Sequence: Synthetic oligonucleotide
  Antisense strand to SEQ ID NO: 1388060
auucccagcagaugaggaa

SEQ ID NO: 1388062 - RNA, 19 nt, Artificial Sequence
  Description of Artificial Sequence: Synthetic oligonucleotide
  Sense strand starting at position 3234 of SEQ ID NO: 1243004
uccucaucugcugggaauu

SEQ ID NO: 1388063 - RNA, 19 nt, Artificial Sequence
  Description of Artificial Sequence: Synthetic oligonucleotide
  Antisense strand to SEQ ID NO: 1388062
aauucccagcagaugagga

SEQ ID NO: 1388064 - RNA, 19 nt, Artificial Sequence
  Description of Artificial Sequence: Synthetic oligonucleotide
  Sense strand starting at position 3258 of SEQ ID NO: 1243004
gguccuuugucugggucua

SEQ ID NO: 1388065 - RNA, 19 nt, Artificial Sequence
  Description of Artificial Sequence: Synthetic oligonucleotide
  Antisense strand to SEQ ID NO: 1388064
uagacccagacaaaggacc

SEQ ID NO: 1388066 - RNA, 19 nt, Artificial Sequence
  Description of Artificial Sequence: Synthetic oligonucleotide
  Sense strand starting at position 3260 of SEQ ID NO: 1243004
uccuuugucugggucuaca

SEQ ID NO: 1388067 - RNA, 19 nt, Artificial Sequence
  Description of Artificial Sequence: Synthetic oligonucleotide
  Antisense strand to SEQ ID NO: 1388066
uguagacccagacaaagga

SEQ ID NO: 1388068 - RNA, 19 nt, Artificial Sequence
  Description of Artificial Sequence: Synthetic oligonucleotide
  Sense strand starting at position 3320 of SEQ ID NO: 1243004
gggagcacuuccugaaaua

SEQ ID NO: 1388069 - RNA, 19 nt, Artificial Sequence
  Description of Artificial Sequence: Synthetic oligonucleotide
  Antisense strand to SEQ ID NO: 1388068
uauuucaggaagugcuccc

SEQ ID NO: 1388070 - RNA, 19 nt, Artificial Sequence
  Description of Artificial Sequence: Synthetic oligonucleotide
  Sense strand starting at position 3488 of SEQ ID NO: 1243004
cuggguuguucccaguaaa

SEQ ID NO: 1388071 - RNA, 19 nt, Artificial Sequence
  Description of Artificial Sequence: Synthetic oligonucleotide
  Antisense strand to SEQ ID NO: 1388070
uuuacugggaacaacccag

SEQ ID NO: 1388072 - RNA, 19 nt, Artificial Sequence
  Description of Artificial Sequence: Synthetic oligonucleotide
  Sense strand starting at position 3491 of SEQ ID NO: 1243004
gguuguucccaguaaaucc

SEQ ID NO: 1388073 - RNA, 19 nt, Artificial Sequence
  Description of Artificial Sequence: Synthetic oligonucleotide
  Antisense strand to SEQ ID NO: 1388072
ggauuuacugggaacaacc

SEQ ID NO: 1388074 - RNA, 19 nt, Artificial Sequence
  Description of Artificial Sequence: Synthetic oligonucleotide
  Sense strand starting at position 3588 of SEQ ID NO: 1243004
cagucaagauucuuagguu

SEQ ID NO: 1388075 - RNA, 19 nt, Artificial Sequence
  Description of Artificial Sequence: Synthetic oligonucleotide
  Antisense strand to SEQ ID NO: 1388074
aaccuaagaaucuugacug

SEQ ID NO: 1388076 - RNA, 19 nt, Artificial Sequence
  Description of Artificial Sequence: Synthetic oligonucleotide
  Sense strand starting at position 3589 of SEQ ID NO: 1243004
agucaagauucuuagguuu

SEQ ID NO: 1388077 - RNA, 19 nt, Artificial Sequence
  Description of Artificial Sequence: Synthetic oligonucleotide
  Antisense strand to SEQ ID NO: 1388076
aaaccuaagaaucuugacu

SEQ ID NO: 1388078 - RNA, 19 nt, Artificial Sequence
  Description of Artificial Sequence: Synthetic oligonucleotide
  Sense strand starting at position 3592 of SEQ ID NO: 1243004
caagauucuuagguuugca

SEQ ID NO: 1388079 - RNA, 19 nt, Artificial Sequence
  Description of Artificial Sequence: Synthetic oligonucleotide
  Antisense strand to SEQ ID NO: 1388078
ugcaaaccuaagaaucuug

SEQ ID NO: 1388080 - RNA, 19 nt, Artificial Sequence
  Description of Artificial Sequence: Synthetic oligonucleotide
  Sense strand starting at position 3595 of SEQ ID NO: 1243004
gauucuuagguuugcaagu

SEQ ID NO: 1388081 - RNA, 19 nt, Artificial Sequence
  Description of Artificial Sequence: Synthetic oligonucleotide
  Antisense strand to SEQ ID NO: 1388080
acuugcaaaccuaagaauc

SEQ ID NO: 1388082 - RNA, 19 nt, Artificial Sequence
  Description of Artificial Sequence: Synthetic oligonucleotide
  Sense strand starting at position 3597 of SEQ ID NO: 1243004
uucuuagguuugcaaguga

SEQ ID NO: 1388083 - RNA, 19 nt, Artificial Sequence
  Description of Artificial Sequence: Synthetic oligonucleotide
  Antisense strand to SEQ ID NO: 1388082
ucacuugcaaaccuaagaa

SEQ ID NO: 1388084 - RNA, 19 nt, Artificial Sequence
  Description of Artificial Sequence: Synthetic oligonucleotide
  Sense strand starting at position 3601 of SEQ ID NO: 1243004
uagguuugcaagugacaga

SEQ ID NO: 1388085 - RNA, 19 nt, Artificial Sequence
  Description of Artificial Sequence: Synthetic oligonucleotide
  Antisense strand to SEQ ID NO: 1388084
ucugucacuugcaaaccua

SEQ ID NO: 1388086 - RNA, 19 nt, Artificial Sequence
  Description of Artificial Sequence: Synthetic oligonucleotide
  Sense strand starting at position 3602 of SEQ ID NO: 1243004
agguuugcaagugacagaa

SEQ ID NO: 1388087 - RNA, 19 nt, Artificial Sequence
  Description of Artificial Sequence: Synthetic oligonucleotide
  Antisense strand to SEQ ID NO: 1388086
uucugucacuugcaaaccu

SEQ ID NO: 1388088 - RNA, 19 nt, Artificial Sequence
  Description of Artificial Sequence: Synthetic oligonucleotide
  Sense strand starting at position 3679 of SEQ ID NO: 1243004
auuguaucauguuaacuga

SEQ ID NO: 1388089 - RNA, 19 nt, Artificial Sequence
  Description of Artificial Sequence: Synthetic oligonucleotide
  Antisense strand to SEQ ID NO: 1388088
ucaguuaacaugauacaau

SEQ ID NO: 1388090 - RNA, 19 nt, Artificial Sequence
  Description of Artificial Sequence: Synthetic oligonucleotide
  Sense strand starting at position 3682 of SEQ ID NO: 1243004
guaucauguuaacugagau

SEQ ID NO: 1388091 - RNA, 19 nt, Artificial Sequence
  Description of Artificial Sequence: Synthetic oligonucleotide
  Antisense strand to SEQ ID NO: 1388090
aucucaguuaacaugauac

SEQ ID NO: 1388092 - RNA, 19 nt, Artificial Sequence
  Description of Artificial Sequence: Synthetic oligonucleotide
  Sense strand starting at position 3830 of SEQ ID NO: 1243004
gcugcuguagucucacauu

SEQ ID NO: 1388093 - RNA, 19 nt, Artificial Sequence
  Description of Artificial Sequence: Synthetic oligonucleotide
  Antisense strand to SEQ ID NO: 1388092
aaugugagacuacagcagc

SEQ ID NO: 1388094 - RNA, 19 nt, Artificial Sequence
  Description of Artificial Sequence: Synthetic oligonucleotide
  Sense strand starting at position 3867 of SEQ ID NO: 1243004
aagagagccuuuccuguuu

SEQ ID NO: 1388095 - RNA, 19 nt, Artificial Sequence
  Description of Artificial Sequence: Synthetic oligonucleotide
  Antisense strand to SEQ ID NO: 1388094
aaacaggaaaggcucucuu

SEQ ID NO: 1388096 - RNA, 19 nt, Artificial Sequence
  Description of Artificial Sequence: Synthetic oligonucleotide
  Sense strand starting at position 618 of SEQ ID NO: 1243005
gcgucuucucaggugggua

SEQ ID NO: 1388097 - RNA, 19 nt, Artificial Sequence
  Description of Artificial Sequence: Synthetic oligonucleotide
  Antisense strand to SEQ ID NO: 1388096
uacccaccugagaagacgc

SEQ ID NO: 1388098 - RNA, 19 nt, Artificial Sequence
  Description of Artificial Sequence: Synthetic oligonucleotide
  Sense strand starting at position 619 of SEQ ID NO: 1243005
cgucuucucagguggguaa

SEQ ID NO: 1388099 - RNA, 19 nt, Artificial Sequence
  Description of Artificial Sequence: Synthetic oligonucleotide
  Antisense strand to SEQ ID NO: 1388098
uuacccaccugagaagacg

SEQ ID NO: 1388100 - RNA, 19 nt, Artificial Sequence
  Description of Artificial Sequence: Synthetic oligonucleotide
  Sense strand starting at position 620 of SEQ ID NO: 1243005
gucuucucagguggguaaa

SEQ ID NO: 1388101 - RNA, 19 nt, Artificial Sequence
  Description of Artificial Sequence: Synthetic oligonucleotide
  Antisense strand to SEQ ID NO: 1388100
uuuacccaccugagaagac

SEQ ID NO: 1388102 - RNA, 19 nt, Artificial Sequence
  Description of Artificial Sequence: Synthetic oligonucleotide
  Sense strand starting at position 724 of SEQ ID NO: 1243005
ugaccuuacgaccguagau

SEQ ID NO: 1388103 - RNA, 19 nt, Artificial Sequence
  Description of Artificial Sequence: Synthetic oligonucleotide
  Antisense strand to SEQ ID NO: 1388102
aucuacggucguaagguca

SEQ ID NO: 1388104 - RNA, 19 nt, Artificial Sequence
  Description of Artificial Sequence: Synthetic oligonucleotide
  Sense strand starting at position 733 of SEQ ID NO: 1243005
gaccguagaucacuucuga

SEQ ID NO: 1388105 - RNA, 19 nt, Artificial Sequence
  Description of Artificial Sequence: Synthetic oligonucleotide
  Antisense strand to SEQ ID NO: 1388104
ucagaagugaucuacgguc

SEQ ID NO: 1388106 - RNA, 19 nt, Artificial Sequence
  Description of Artificial Sequence: Synthetic oligonucleotide
  Sense strand starting at position 737 of SEQ ID NO: 1243005
guagaucacuucugaguac

SEQ ID NO: 1388107 - RNA, 19 nt, Artificial Sequence
  Description of Artificial Sequence: Synthetic oligonucleotide
  Antisense strand to SEQ ID NO: 1388106
guacucagaagugaucuac

SEQ ID NO: 1388108 - RNA, 19 nt, Artificial Sequence
  Description of Artificial Sequence: Synthetic oligonucleotide
  Sense strand starting at position 937 of SEQ ID NO: 1243005
gggaguagugccgaaagag

SEQ ID NO: 1388109 - RNA, 19 nt, Artificial Sequence
  Description of Artificial Sequence: Synthetic oligonucleotide
  Antisense strand to SEQ ID NO: 1388108
cucuuucggcacuacuccc

SEQ ID NO: 1388110 - RNA, 19 nt, Artificial Sequence
  Description of Artificial Sequence: Synthetic oligonucleotide
  Sense strand starting at position 995 of SEQ ID NO: 1243005
cagggugucugccaacaga

SEQ ID NO: 1388111 - RNA, 19 nt, Artificial Sequence
  Description of Artificial Sequence: Synthetic oligonucleotide
  Antisense strand to SEQ ID NO: 1388110
ucuguuggcagacacccug

SEQ ID NO: 1388112 - RNA, 19 nt, Artificial Sequence
  Description of Artificial Sequence: Synthetic oligonucleotide
  Sense strand starting at position 1242 of SEQ ID NO: 1243005
guaccuuugugguaggagu

SEQ ID NO: 1388113 - RNA, 19 nt, Artificial Sequence
  Description of Artificial Sequence: Synthetic oligonucleotide
  Antisense strand to SEQ ID NO: 1388112
acuccuaccacaaagguac

SEQ ID NO: 1388114 - RNA, 19 nt, Artificial Sequence
  Description of Artificial Sequence: Synthetic oligonucleotide
  Sense strand starting at position 1419 of SEQ ID NO: 1243005
caccgaguuguccgugagu

SEQ ID NO: 1388115 - RNA, 19 nt, Artificial Sequence
  Description of Artificial Sequence: Synthetic oligonucleotide
  Antisense strand to SEQ ID NO: 1388114
acucacggacaacucggug

SEQ ID NO: 1388116 - RNA, 19 nt, Artificial Sequence
  Description of Artificial Sequence: Synthetic oligonucleotide
  Sense strand starting at position 1420 of SEQ ID NO: 1243005
accgaguuguccgugaguc

SEQ ID NO: 1388117 - RNA, 19 nt, Artificial Sequence
  Description of Artificial Sequence: Synthetic oligonucleotide
  Antisense strand to SEQ ID NO: 1388116
gacucacggacaacucggu

SEQ ID NO: 1388118 - RNA, 19 nt, Artificial Sequence
  Description of Artificial Sequence: Synthetic oligonucleotide
  Sense strand starting at position 1421 of SEQ ID NO: 1243005
ccgaguuguccgugagucc

SEQ ID NO: 1388119 - RNA, 19 nt, Artificial Sequence
  Description of Artificial Sequence: Synthetic oligonucleotide
  Antisense strand to SEQ ID NO: 1388118
ggacucacggacaacucgg

SEQ ID NO: 1388120 - RNA, 19 nt, Artificial Sequence
  Description of Artificial Sequence: Synthetic oligonucleotide
  Sense strand starting at position 2193 of SEQ ID NO: 1243005
uuccuuuauugaggucuca

SEQ ID NO: 1388121 - RNA, 19 nt, Artificial Sequence
  Description of Artificial Sequence: Synthetic oligonucleotide
  Antisense strand to SEQ ID NO: 1388120
ugagaccucaauaaaggaa

SEQ ID NO: 1388122 - RNA, 19 nt, Artificial Sequence
  Description of Artificial Sequence: Synthetic oligonucleotide
  Sense strand starting at position 2405 of SEQ ID NO: 1243005
cgaagagacccuugacuac

SEQ ID NO: 1388123 - RNA, 19 nt, Artificial Sequence
  Description of Artificial Sequence: Synthetic oligonucleotide
  Antisense strand to SEQ ID NO: 1388122
guagucaagggucucuucg

SEQ ID NO: 1388124 - RNA, 19 nt, Artificial Sequence
  Description of Artificial Sequence: Synthetic oligonucleotide
  Sense strand starting at position 3183 of SEQ ID NO: 1243005
cucugagucuguccuccau

SEQ ID NO: 1388125 - RNA, 19 nt, Artificial Sequence
  Description of Artificial Sequence: Synthetic oligonucleotide
  Antisense strand to SEQ ID NO: 1388124
auggaggacagacucagag

SEQ ID NO: 1388126 - RNA, 19 nt, Artificial Sequence
  Description of Artificial Sequence: Synthetic oligonucleotide
  Sense strand starting at position 3245 of SEQ ID NO: 1243005
gcguguuccggauccagca

SEQ ID NO: 1388127 - RNA, 19 nt, Artificial Sequence
  Description of Artificial Sequence: Synthetic oligonucleotide
  Antisense strand to SEQ ID NO: 1388126
ugcuggauccggaacacgc

SEQ ID NO: 1388128 - RNA, 19 nt, Artificial Sequence
  Description of Artificial Sequence: Synthetic oligonucleotide
  Sense strand starting at position 3328 of SEQ ID NO: 1243005
cucgguuuccucguuaucu

SEQ ID NO: 1388129 - RNA, 19 nt, Artificial Sequence
  Description of Artificial Sequence: Synthetic oligonucleotide
  Antisense strand to SEQ ID NO: 1388128
agauaacgaggaaaccgag

SEQ ID NO: 1388130 - RNA, 19 nt, Artificial Sequence
  Description of Artificial Sequence: Synthetic oligonucleotide
  Sense strand starting at position 3329 of SEQ ID NO: 1243005
ucgguuuccucguuaucug

SEQ ID NO: 1388131 - RNA, 19 nt, Artificial Sequence
  Description of Artificial Sequence: Synthetic oligonucleotide
  Antisense strand to SEQ ID NO: 1388130
cagauaacgaggaaaccga

SEQ ID NO: 1388132 - RNA, 19 nt, Artificial Sequence
  Description of Artificial Sequence: Synthetic oligonucleotide
  Sense strand starting at position 3337 of SEQ ID NO: 1243005
cucguuaucugcccgacaa

SEQ ID NO: 1388133 - RNA, 19 nt, Artificial Sequence
  Description of Artificial Sequence: Synthetic oligonucleotide
  Antisense strand to SEQ ID NO: 1388132
uugucgggcagauaacgag

SEQ ID NO: 1388134 - RNA, 19 nt, Artificial Sequence
  Description of Artificial Sequence: Synthetic oligonucleotide
  Sense strand starting at position 3338 of SEQ ID NO: 1243005
ucguuaucugcccgacaau

SEQ ID NO: 1388135 - RNA, 19 nt, Artificial Sequence
  Description of Artificial Sequence: Synthetic oligonucleotide
  Antisense strand to SEQ ID NO: 1388134
auugucgggcagauaacga

SEQ ID NO: 1388136 - RNA, 19 nt, Artificial Sequence
  Description of Artificial Sequence: Synthetic oligonucleotide
  Sense strand starting at position 3339 of SEQ ID NO: 1243005
cguuaucugcccgacaaug

SEQ ID NO: 1388137 - RNA, 19 nt, Artificial Sequence
  Description of Artificial Sequence: Synthetic oligonucleotide
  Antisense strand to SEQ ID NO: 1388136
cauugucgggcagauaacg

SEQ ID NO: 1388138 - RNA, 19 nt, Artificial Sequence
  Description of Artificial Sequence: Synthetic oligonucleotide
  Sense strand starting at position 3430 of SEQ ID NO: 1243005
ccucauuggugaugagugu

SEQ ID NO: 1388139 - RNA, 19 nt, Artificial Sequence
  Description of Artificial Sequence: Synthetic oligonucleotide
  Antisense strand to SEQ ID NO: 1388138
acacucaucaccaaugagg

SEQ ID NO: 1388140 - RNA, 19 nt, Artificial Sequence
  Description of Artificial Sequence: Synthetic oligonucleotide
  Sense strand starting at position 3452 of SEQ ID NO: 1243005
cgaggagucgagcagaacu

SEQ ID NO: 1388141 - RNA, 19 nt, Artificial Sequence
  Description of Artificial Sequence: Synthetic oligonucleotide
  Antisense strand to SEQ ID NO: 1388140
aguucugcucgacuccucg

SEQ ID NO: 1388142 - RNA, 19 nt, Artificial Sequence
  Description of Artificial Sequence: Synthetic oligonucleotide
  Sense strand starting at position 3711 of SEQ ID NO: 1243005
aguagaugauccgcagcau

SEQ ID NO: 1388143 - RNA, 19 nt, Artificial Sequence
  Description of Artificial Sequence: Synthetic oligonucleotide
  Antisense strand to SEQ ID NO: 1388142
augcugcggaucaucuacu

SEQ ID NO: 1388144 - RNA, 19 nt, Artificial Sequence
  Description of Artificial Sequence: Synthetic oligonucleotide
  Sense strand starting at position 3823 of SEQ ID NO: 1243005
gucacaagcccucagcauu

SEQ ID NO: 1388145 - RNA, 19 nt, Artificial Sequence
  Description of Artificial Sequence: Synthetic oligonucleotide
  Antisense strand to SEQ ID NO: 1388144
aaugcugagggcuugugac

SEQ ID NO: 1388146 - RNA, 19 nt, Artificial Sequence
  Description of Artificial Sequence: Synthetic oligonucleotide
  Sense strand starting at position 58 of SEQ ID NO: 1243006
gcaggagcauuauauaauu

SEQ ID NO: 1388147 - RNA, 19 nt, Artificial Sequence
  Description of Artificial Sequence: Synthetic oligonucleotide
  Antisense strand to SEQ ID NO: 1388146
aauuauauaaugcuccugc

SEQ ID NO: 1388148 - RNA, 19 nt, Artificial Sequence
  Description of Artificial Sequence: Synthetic oligonucleotide
  Sense strand starting at position 93 of SEQ ID NO: 1243006
uccuccucuucggguaaua

SEQ ID NO: 1388149 - RNA, 19 nt, Artificial Sequence
  Description of Artificial Sequence: Synthetic oligonucleotide
  Antisense strand to SEQ ID NO: 1388148
uauuacccgaagaggagga

SEQ ID NO: 1388150 - RNA, 19 nt, Artificial Sequence
  Description of Artificial Sequence: Synthetic oligonucleotide
  Sense strand starting at position 95 of SEQ ID NO: 1243006
cuccucuucggguaauaac

SEQ ID NO: 1388151 - RNA, 19 nt, Artificial Sequence
  Description of Artificial Sequence: Synthetic oligonucleotide
  Antisense strand to SEQ ID NO: 1388150
guuauuacccgaagaggag

SEQ ID NO: 1388152 - RNA, 19 nt, Artificial Sequence
  Description of Artificial Sequence: Synthetic oligonucleotide
  Sense strand starting at position 2921 of SEQ ID NO: 1243006
gcagcuuggguccaagagu

SEQ ID NO: 1388153 - RNA, 19 nt, Artificial Sequence
  Description of Artificial Sequence: Synthetic oligonucleotide
  Antisense strand to SEQ ID NO: 1388152
acucuuggacccaagcugc

SEQ ID NO: 1388154 - RNA, 19 nt, Artificial Sequence
  Description of Artificial Sequence: Synthetic oligonucleotide
  Sense strand starting at position 3207 of SEQ ID NO: 1243006
gucugauucuuggauccga

SEQ ID NO: 1388155 - RNA, 19 nt, Artificial Sequence
  Description of Artificial Sequence: Synthetic oligonucleotide
  Antisense strand to SEQ ID NO: 1388154
ucggauccaagaaucagac

SEQ ID NO: 1388156 - RNA, 19 nt, Artificial Sequence
  Description of Artificial Sequence: Synthetic oligonucleotide
  Sense strand starting at position 3298 of SEQ ID NO: 1243006
uccugaaaugcgugcggga

SEQ ID NO: 1388157 - RNA, 19 nt, Artificial Sequence
  Description of Artificial Sequence: Synthetic oligonucleotide
  Antisense strand to SEQ ID NO: 1388156
ucccgcacgcauuucagga

SEQ ID NO: 1388158 - RNA, 19 nt, Artificial Sequence
  Description of Artificial Sequence: Synthetic oligonucleotide
  Sense strand starting at position 3300 of SEQ ID NO: 1243006
cugaaaugcgugcgggaaa

SEQ ID NO: 1388159 - RNA, 19 nt, Artificial Sequence
  Description of Artificial Sequence: Synthetic oligonucleotide
  Antisense strand to SEQ ID NO: 1388158
uuucccgcacgcauuucag

SEQ ID NO: 1388160 - RNA, 19 nt, Artificial Sequence
  Description of Artificial Sequence: Synthetic oligonucleotide
  Sense strand starting at position 3301 of SEQ ID NO: 1243006
ugaaaugcgugcgggaaau

SEQ ID NO: 1388161 - RNA, 19 nt, Artificial Sequence
  Description of Artificial Sequence: Synthetic oligonucleotide
  Antisense strand to SEQ ID NO: 1388160
auuucccgcacgcauuuca

SEQ ID NO: 1388162 - RNA, 19 nt, Artificial Sequence
  Description of Artificial Sequence: Synthetic oligonucleotide
  Sense strand starting at position 3430 of SEQ ID NO: 1243006
aggccuggagccugagauu

SEQ ID NO: 1388163 - RNA, 19 nt, Artificial Sequence
  Description of Artificial Sequence: Synthetic oligonucleotide
  Antisense strand to SEQ ID NO: 1388162
aaucucaggcuccaggccu

SEQ ID NO: 1388164 - RNA, 19 nt, Artificial Sequence
  Description of Artificial Sequence: Synthetic oligonucleotide
  Sense strand starting at position 3676 of SEQ ID NO: 1243006
acccacugucaaugaggaa

SEQ ID NO: 1388165 - RNA, 19 nt, Artificial Sequence
  Description of Artificial Sequence: Synthetic oligonucleotide
  Antisense strand to SEQ ID NO: 1388164
uuccucauugacagugggu

SEQ ID NO: 1388166 - RNA, 19 nt, Artificial Sequence
  Description of Artificial Sequence: Synthetic oligonucleotide
  Sense strand starting at position 3779 of SEQ ID NO: 1243006
acagaaguucucuaaaugu

SEQ ID NO: 1388167 - RNA, 19 nt, Artificial Sequence
  Description of Artificial Sequence: Synthetic oligonucleotide
  Antisense strand to SEQ ID NO: 1388166
acauuuagagaacuucugu

SEQ ID NO: 1388168 - RNA, 19 nt, Artificial Sequence
  Description of Artificial Sequence: Synthetic oligonucleotide
  Sense strand starting at position 3901 of SEQ ID NO: 1243006
cuggguuugugguucucua

SEQ ID NO: 1388169 - RNA, 19 nt, Artificial Sequence
  Description of Artificial Sequence: Synthetic oligonucleotide
  Antisense strand to SEQ ID NO: 1388168
uagagaaccacaaacccag

SEQ ID NO: 1388170 - RNA, 19 nt, Artificial Sequence
  Description of Artificial Sequence: Synthetic oligonucleotide
  Sense strand starting at position 3981 of SEQ ID NO: 1243006
ucaucuaaauggguaugaa

SEQ ID NO: 1388171 - RNA, 19 nt, Artificial Sequence
  Description of Artificial Sequence: Synthetic oligonucleotide
  Antisense strand to SEQ ID NO: 1388170
uucauacccauuuagauga

SEQ ID NO: 1388172 - RNA, 19 nt, Artificial Sequence
  Description of Artificial Sequence: Synthetic oligonucleotide
  Sense strand starting at position 290 of SEQ ID NO: 1243007
uugauuaucauaggugguu

SEQ ID NO: 1388173 - RNA, 19 nt, Artificial Sequence
  Description of Artificial Sequence: Synthetic oligonucleotide
  Antisense strand to SEQ ID NO: 1388172
aaccaccuaugauaaucaa

SEQ ID NO: 1388174 - RNA, 19 nt, Artificial Sequence
  Description of Artificial Sequence: Synthetic oligonucleotide
  Sense strand starting at position 291 of SEQ ID NO: 1243007
ugauuaucauaggugguuu

SEQ ID NO: 1388175 - RNA, 19 nt, Artificial Sequence
  Description of Artificial Sequence: Synthetic oligonucleotide
  Antisense strand to SEQ ID NO: 1388174
aaaccaccuaugauaauca

SEQ ID NO: 1388176 - RNA, 19 nt, Artificial Sequence
  Description of Artificial Sequence: Synthetic oligonucleotide
  Sense strand starting at position 295 of SEQ ID NO: 1243007
uaucauaggugguuugaaa

SEQ ID NO: 1388177 - RNA, 19 nt, Artificial Sequence
  Description of Artificial Sequence: Synthetic oligonucleotide
  Antisense strand to SEQ ID NO: 1388176
uuucaaaccaccuaugaua

SEQ ID NO: 1388178 - RNA, 19 nt, Artificial Sequence
  Description of Artificial Sequence: Synthetic oligonucleotide
  Sense strand starting at position 323 of SEQ ID NO: 1243007
aaacuuuaggaucguauau

SEQ ID NO: 1388179 - RNA, 19 nt, Artificial Sequence
  Description of Artificial Sequence: Synthetic oligonucleotide
  Antisense strand to SEQ ID NO: 1388178
auauacgauccuaaaguuu

SEQ ID NO: 1388180 - RNA, 19 nt, Artificial Sequence
  Description of Artificial Sequence: Synthetic oligonucleotide
  Sense strand starting at position 441 of SEQ ID NO: 1243007
uccaucggauugcucuaau

SEQ ID NO: 1388181 - RNA, 19 nt, Artificial Sequence
  Description of Artificial Sequence: Synthetic oligonucleotide
  Antisense strand to SEQ ID NO: 1388180
auuagagcaauccgaugga

SEQ ID NO: 1388182 - RNA, 19 nt, Artificial Sequence
  Description of Artificial Sequence: Synthetic oligonucleotide
  Sense strand starting at position 444 of SEQ ID NO: 1243007
aucggauugcucuaauaaa

SEQ ID NO: 1388183 - RNA, 19 nt, Artificial Sequence
  Description of Artificial Sequence: Synthetic oligonucleotide
  Antisense strand to SEQ ID NO: 1388182
uuuauuagagcaauccgau

SEQ ID NO: 1388184 - RNA, 19 nt, Artificial Sequence
  Description of Artificial Sequence: Synthetic oligonucleotide
  Sense strand starting at position 1183 of SEQ ID NO: 1243007
ucaauuaccuguguucugu

SEQ ID NO: 1388185 - RNA, 19 nt, Artificial Sequence
  Description of Artificial Sequence: Synthetic oligonucleotide
  Antisense strand to SEQ ID NO: 1388184
acagaacacagguaauuga

SEQ ID NO: 1388186 - RNA, 19 nt, Artificial Sequence
  Description of Artificial Sequence: Synthetic oligonucleotide
  Sense strand starting at position 1192 of SEQ ID NO: 1243007
uguguucugugguucaaau

SEQ ID NO: 1388187 - RNA, 19 nt, Artificial Sequence
  Description of Artificial Sequence: Synthetic oligonucleotide
  Antisense strand to SEQ ID NO: 1388186
auuugaaccacagaacaca

SEQ ID NO: 1388188 - RNA, 19 nt, Artificial Sequence
  Description of Artificial Sequence: Synthetic oligonucleotide
  Sense strand starting at position 1214 of SEQ ID NO: 1243007
gaacgcuaaugagaauaua

SEQ ID NO: 1388189 - RNA, 19 nt, Artificial Sequence
  Description of Artificial Sequence: Synthetic oligonucleotide
  Antisense strand to SEQ ID NO: 1388188
uauauucucauuagcguuc

SEQ ID NO: 1388190 - RNA, 19 nt, Artificial Sequence
  Description of Artificial Sequence: Synthetic oligonucleotide
  Sense strand starting at position 1239 of SEQ ID NO: 1243007
ccaguuaaaggguggcuaa

SEQ ID NO: 1388191 - RNA, 19 nt, Artificial Sequence
  Description of Artificial Sequence: Synthetic oligonucleotide
  Antisense strand to SEQ ID NO: 1388190
uuagccacccuuuaacugg

SEQ ID NO: 1388192 - RNA, 19 nt, Artificial Sequence
  Description of Artificial Sequence: Synthetic oligonucleotide
  Sense strand starting at position 1240 of SEQ ID NO: 1243007
caguuaaaggguggcuaau

SEQ ID NO: 1388193 - RNA, 19 nt, Artificial Sequence
  Description of Artificial Sequence: Synthetic oligonucleotide
  Antisense strand to SEQ ID NO: 1388192
auuagccacccuuuaacug

SEQ ID NO: 1388194 - RNA, 19 nt, Artificial Sequence
  Description of Artificial Sequence: Synthetic oligonucleotide
  Sense strand starting at position 1250 of SEQ ID NO: 1243007
guggcuaauccugacuuau

SEQ ID NO: 1388195 - RNA, 19 nt, Artificial Sequence
  Description of Artificial Sequence: Synthetic oligonucleotide
  Antisense strand to SEQ ID NO: 1388194
auaagucaggauuagccac

SEQ ID NO: 1388196 - RNA, 19 nt, Artificial Sequence
  Description of Artificial Sequence: Synthetic oligonucleotide
  Sense strand starting at position 1252 of SEQ ID NO: 1243007
ggcuaauccugacuuaucu

SEQ ID NO: 1388197 - RNA, 19 nt, Artificial Sequence
  Description of Artificial Sequence: Synthetic oligonucleotide
  Antisense strand to SEQ ID NO: 1388196
agauaagucaggauuagcc

SEQ ID NO: 1388198 - RNA, 19 nt, Artificial Sequence
  Description of Artificial Sequence: Synthetic oligonucleotide
  Sense strand starting at position 1298 of SEQ ID NO: 1243007
gggagugguuaacaaagau

SEQ ID NO: 1388199 - RNA, 19 nt, Artificial Sequence
  Description of Artificial Sequence: Synthetic oligonucleotide
  Antisense strand to SEQ ID NO: 1388198
aucuuuguuaaccacuccc

SEQ ID NO: 1388200 - RNA, 19 nt, Artificial Sequence
  Description of Artificial Sequence: Synthetic oligonucleotide
  Sense strand starting at position 1325 of SEQ ID NO: 1243007
gaauuaagauggucucuac

SEQ ID NO: 1388201 - RNA, 19 nt, Artificial Sequence
  Description of Artificial Sequence: Synthetic oligonucleotide
  Antisense strand to SEQ ID NO: 1388200
guagagaccaucuuaauuc

SEQ ID NO: 1388202 - RNA, 19 nt, Artificial Sequence
  Description of Artificial Sequence: Synthetic oligonucleotide
  Sense strand starting at position 1329 of SEQ ID NO: 1243007
uaagauggucucuacuguu

SEQ ID NO: 1388203 - RNA, 19 nt, Artificial Sequence
  Description of Artificial Sequence: Synthetic oligonucleotide
  Antisense strand to SEQ ID NO: 1388202
aacaguagagaccaucuua

SEQ ID NO: 1388204 - RNA, 19 nt, Artificial Sequence
  Description of Artificial Sequence: Synthetic oligonucleotide
  Sense strand starting at position 1339 of SEQ ID NO: 1243007
ucuacuguuagacguugau

SEQ ID NO: 1388205 - RNA, 19 nt, Artificial Sequence
  Description of Artificial Sequence: Synthetic oligonucleotide
  Antisense strand to SEQ ID NO: 1388204
aucaacgucuaacaguaga

SEQ ID NO: 1388206 - RNA, 19 nt, Artificial Sequence
  Description of Artificial Sequence: Synthetic oligonucleotide
  Sense strand starting at position 1343 of SEQ ID NO: 1243007
cuguuagacguugaucacu

SEQ ID NO: 1388207 - RNA, 19 nt, Artificial Sequence
  Description of Artificial Sequence: Synthetic oligonucleotide
  Antisense strand to SEQ ID NO: 1388206
agugaucaacgucuaacag

SEQ ID NO: 1388208 - RNA, 19 nt, Artificial Sequence
  Description of Artificial Sequence: Synthetic oligonucleotide
  Sense strand starting at position 1345 of SEQ ID NO: 1243007
guuagacguugaucacuua

SEQ ID NO: 1388209 - RNA, 19 nt, Artificial Sequence
  Description of Artificial Sequence: Synthetic oligonucleotide
  Antisense strand to SEQ ID NO: 1388208
uaagugaucaacgucuaac

SEQ ID NO: 1388210 - RNA, 19 nt, Artificial Sequence
  Description of Artificial Sequence: Synthetic oligonucleotide
  Sense strand starting at position 1346 of SEQ ID NO: 1243007
uuagacguugaucacuuaa

SEQ ID NO: 1388211 - RNA, 19 nt, Artificial Sequence
  Description of Artificial Sequence: Synthetic oligonucleotide
  Antisense strand to SEQ ID NO: 1388210
uuaagugaucaacgucuaa

SEQ ID NO: 1388212 - RNA, 19 nt, Artificial Sequence
  Description of Artificial Sequence: Synthetic oligonucleotide
  Sense strand starting at position 1348 of SEQ ID NO: 1243007
agacguugaucacuuaaua

SEQ ID NO: 1388213 - RNA, 19 nt, Artificial Sequence
  Description of Artificial Sequence: Synthetic oligonucleotide
  Antisense strand to SEQ ID NO: 1388212
uauuaagugaucaacgucu

SEQ ID NO: 1388214 - RNA, 19 nt, Artificial Sequence
  Description of Artificial Sequence: Synthetic oligonucleotide
  Sense strand starting at position 1395 of SEQ ID NO: 1243007
cggguagaugcaugacagu

SEQ ID NO: 1388215 - RNA, 19 nt, Artificial Sequence
  Description of Artificial Sequence: Synthetic oligonucleotide
  Antisense strand to SEQ ID NO: 1388214
acugucaugcaucuacccg

SEQ ID NO: 1388216 - RNA, 19 nt, Artificial Sequence
  Description of Artificial Sequence: Synthetic oligonucleotide
  Sense strand starting at position 1526 of SEQ ID NO: 1243007
cguuuacugaguggcucaa

SEQ ID NO: 1388217 - RNA, 19 nt, Artificial Sequence
  Description of Artificial Sequence: Synthetic oligonucleotide
  Antisense strand to SEQ ID NO: 1388216
uugagccacucaguaaacg

SEQ ID NO: 1388218 - RNA, 19 nt, Artificial Sequence
  Description of Artificial Sequence: Synthetic oligonucleotide
  Sense strand starting at position 1530 of SEQ ID NO: 1243007
uacugaguggcucaacaaa

SEQ ID NO: 1388219 - RNA, 19 nt, Artificial Sequence
  Description of Artificial Sequence: Synthetic oligonucleotide
  Antisense strand to SEQ ID NO: 1388218
uuuguugagccacucagua

SEQ ID NO: 1388220 - RNA, 19 nt, Artificial Sequence
  Description of Artificial Sequence: Synthetic oligonucleotide
  Sense strand starting at position 1552 of SEQ ID NO: 1243007
augcauuucucagaaagga

SEQ ID NO: 1388221 - RNA, 19 nt, Artificial Sequence
  Description of Artificial Sequence: Synthetic oligonucleotide
  Antisense strand to SEQ ID NO: 1388220
uccuuucugagaaaugcau

SEQ ID NO: 1388222 - RNA, 19 nt, Artificial Sequence
  Description of Artificial Sequence: Synthetic oligonucleotide
  Sense strand starting at position 1615 of SEQ ID NO: 1243007
cuuaguucucguccuaguu

SEQ ID NO: 1388223 - RNA, 19 nt, Artificial Sequence
  Description of Artificial Sequence: Synthetic oligonucleotide
  Antisense strand to SEQ ID NO: 1388222
aacuaggacgagaacuaag

SEQ ID NO: 1388224 - RNA, 19 nt, Artificial Sequence
  Description of Artificial Sequence: Synthetic oligonucleotide
  Sense strand starting at position 1645 of SEQ ID NO: 1243007
gucucuuaacucuaggagu

SEQ ID NO: 1388225 - RNA, 19 nt, Artificial Sequence
  Description of Artificial Sequence: Synthetic oligonucleotide
  Antisense strand to SEQ ID NO: 1388224
acuccuagaguuaagagac

SEQ ID NO: 1388226 - RNA, 19 nt, Artificial Sequence
  Description of Artificial Sequence: Synthetic oligonucleotide
  Sense strand starting at position 1647 of SEQ ID NO: 1243007
cucuuaacucuaggaguau

SEQ ID NO: 1388227 - RNA, 19 nt, Artificial Sequence
  Description of Artificial Sequence: Synthetic oligonucleotide
  Antisense strand to SEQ ID NO: 1388226
auacuccuagaguuaagag

SEQ ID NO: 1388228 - RNA, 19 nt, Artificial Sequence
  Description of Artificial Sequence: Synthetic oligonucleotide
  Sense strand starting at position 1981 of SEQ ID NO: 1243007
ggaggauaguacguuaauu

SEQ ID NO: 1388229 - RNA, 19 nt, Artificial Sequence
  Description of Artificial Sequence: Synthetic oligonucleotide
  Antisense strand to SEQ ID NO: 1388228
aauuaacguacuauccucc

SEQ ID NO: 1388230 - RNA, 19 nt, Artificial Sequence
  Description of Artificial Sequence: Synthetic oligonucleotide
  Sense strand starting at position 1990 of SEQ ID NO: 1243007
uacguuaauuuccagguca

SEQ ID NO: 1388231 - RNA, 19 nt, Artificial Sequence
  Description of Artificial Sequence: Synthetic oligonucleotide
  Antisense strand to SEQ ID NO: 1388230
ugaccuggaaauuaacgua

SEQ ID NO: 1388232 - RNA, 19 nt, Artificial Sequence
  Description of Artificial Sequence: Synthetic oligonucleotide
  Sense strand starting at position 2981 of SEQ ID NO: 1243007
ccuguugacauccggguaa

SEQ ID NO: 1388233 - RNA, 19 nt, Artificial Sequence
  Description of Artificial Sequence: Synthetic oligonucleotide
  Antisense strand to SEQ ID NO: 1388232
uuacccggaugucaacagg

SEQ ID NO: 1388234 - RNA, 19 nt, Artificial Sequence
  Description of Artificial Sequence: Synthetic oligonucleotide
  Sense strand starting at position 2983 of SEQ ID NO: 1243007
uguugacauccggguaaau

SEQ ID NO: 1388235 - RNA, 19 nt, Artificial Sequence
  Description of Artificial Sequence: Synthetic oligonucleotide
  Antisense strand to SEQ ID NO: 1388234
auuuacccggaugucaaca

SEQ ID NO: 1388236 - RNA, 19 nt, Artificial Sequence
  Description of Artificial Sequence: Synthetic oligonucleotide
  Sense strand starting at position 2993 of SEQ ID NO: 1243007
cggguaaauuugcaccauu

SEQ ID NO: 1388237 - RNA, 19 nt, Artificial Sequence
  Description of Artificial Sequence: Synthetic oligonucleotide
  Antisense strand to SEQ ID NO: 1388236
aauggugcaaauuuacccg

SEQ ID NO: 1388238 - RNA, 19 nt, Artificial Sequence
  Description of Artificial Sequence: Synthetic oligonucleotide
  Sense strand starting at position 3026 of SEQ ID NO: 1243007
cucccuuguuguuuauuau

SEQ ID NO: 1388239 - RNA, 19 nt, Artificial Sequence
  Description of Artificial Sequence: Synthetic oligonucleotide
  Antisense strand to SEQ ID NO: 1388238
auaauaaacaacaagggag

SEQ ID NO: 1388240 - RNA, 19 nt, Artificial Sequence
  Description of Artificial Sequence: Synthetic oligonucleotide
  Sense strand starting at position 3027 of SEQ ID NO: 1243007
ucccuuguuguuuauuauu

SEQ ID NO: 1388241 - RNA, 19 nt, Artificial Sequence
  Description of Artificial Sequence: Synthetic oligonucleotide
  Antisense strand to SEQ ID NO: 1388240
aauaauaaacaacaaggga

SEQ ID NO: 1388242 - RNA, 19 nt, Artificial Sequence
  Description of Artificial Sequence: Synthetic oligonucleotide
  Sense strand starting at position 3378 of SEQ ID NO: 1243007
uuguguugcccugacaggu

SEQ ID NO: 1388243 - RNA, 19 nt, Artificial Sequence
  Description of Artificial Sequence: Synthetic oligonucleotide
  Antisense strand to SEQ ID NO: 1388242
accugucagggcaacacaa

SEQ ID NO: 1388244 - RNA, 19 nt, Artificial Sequence
  Description of Artificial Sequence: Synthetic oligonucleotide
  Sense strand starting at position 3510 of SEQ ID NO: 1243007
ugacuagaauauugacaug

SEQ ID NO: 1388245 - RNA, 19 nt, Artificial Sequence
  Description of Artificial Sequence: Synthetic oligonucleotide
  Antisense strand to SEQ ID NO: 1388244
caugucaauauucuaguca

SEQ ID NO: 1388246 - RNA, 19 nt, Artificial Sequence
  Description of Artificial Sequence: Synthetic oligonucleotide
  Sense strand starting at position 3516 of SEQ ID NO: 1243007
gaauauugacaugguucua

SEQ ID NO: 1388247 - RNA, 19 nt, Artificial Sequence
  Description of Artificial Sequence: Synthetic oligonucleotide
  Antisense strand to SEQ ID NO: 1388246
uagaaccaugucaauauuc

SEQ ID NO: 1388248 - RNA, 19 nt, Artificial Sequence
  Description of Artificial Sequence: Synthetic oligonucleotide
  Sense strand starting at position 3585 of SEQ ID NO: 1243007
ggcggcucaagcuuguaau

SEQ ID NO: 1388249 - RNA, 19 nt, Artificial Sequence
  Description of Artificial Sequence: Synthetic oligonucleotide
  Antisense strand to SEQ ID NO: 1388248
auuacaagcuugagccgcc

SEQ ID NO: 1388250 - RNA, 19 nt, Artificial Sequence
  Description of Artificial Sequence: Synthetic oligonucleotide
  Sense strand starting at position 3720 of SEQ ID NO: 1243007
ggcggagaguuccuguagu

SEQ ID NO: 1388251 - RNA, 19 nt, Artificial Sequence
  Description of Artificial Sequence: Synthetic oligonucleotide
  Antisense strand to SEQ ID NO: 1388250
acuacaggaacucuccgcc

SEQ ID NO: 1388252 - RNA, 19 nt, Artificial Sequence
  Description of Artificial Sequence: Synthetic oligonucleotide
  Sense strand starting at position 49 of SEQ ID NO: 1243008
uaccuagggucacagauuu

SEQ ID NO: 1388253 - RNA, 19 nt, Artificial Sequence
  Description of Artificial Sequence: Synthetic oligonucleotide
  Antisense strand to SEQ ID NO: 1388252
aaaucugugacccuaggua

SEQ ID NO: 1388254 - RNA, 19 nt, Artificial Sequence
  Description of Artificial Sequence: Synthetic oligonucleotide
  Sense strand starting at position 72 of SEQ ID NO: 1243008
agugguaagagcuaauacu

SEQ ID NO: 1388255 - RNA, 19 nt, Artificial Sequence
  Description of Artificial Sequence: Synthetic oligonucleotide
  Antisense strand to SEQ ID NO: 1388254
aguauuagcucuuaccacu

SEQ ID NO: 1388256 - RNA, 19 nt, Artificial Sequence
  Description of Artificial Sequence: Synthetic oligonucleotide
  Sense strand starting at position 170 of SEQ ID NO: 1243008
gagugcuggcucuggauua

SEQ ID NO: 1388257 - RNA, 19 nt, Artificial Sequence
  Description of Artificial Sequence: Synthetic oligonucleotide
  Antisense strand to SEQ ID NO: 1388256
uaauccagagccagcacuc

SEQ ID NO: 1388258 - RNA, 19 nt, Artificial Sequence
  Description of Artificial Sequence: Synthetic oligonucleotide
  Sense strand starting at position 171 of SEQ ID NO: 1243008
agugcuggcucuggauuaa

SEQ ID NO: 1388259 - RNA, 19 nt, Artificial Sequence
  Description of Artificial Sequence: Synthetic oligonucleotide
  Antisense strand to SEQ ID NO: 1388258
uuaauccagagccagcacu

SEQ ID NO: 1388260 - RNA, 19 nt, Artificial Sequence
  Description of Artificial Sequence: Synthetic oligonucleotide
  Sense strand starting at position 484 of SEQ ID NO: 1243008
gcgauuccaucucaaacaa

SEQ ID NO: 1388261 - RNA, 19 nt, Artificial Sequence
  Description of Artificial Sequence: Synthetic oligonucleotide
  Antisense strand to SEQ ID NO: 1388260
uuguuugagauggaaucgc

SEQ ID NO: 1388262 - RNA, 19 nt, Artificial Sequence
  Description of Artificial Sequence: Synthetic oligonucleotide
  Sense strand starting at position 539 of SEQ ID NO: 1243008
acuuccuagcuauguguaa

SEQ ID NO: 1388263 - RNA, 19 nt, Artificial Sequence
  Description of Artificial Sequence: Synthetic oligonucleotide
  Antisense strand to SEQ ID NO: 1388262
uuacacauagcuaggaagu

SEQ ID NO: 1388264 - RNA, 19 nt, Artificial Sequence
  Description of Artificial Sequence: Synthetic oligonucleotide
  Sense strand starting at position 543 of SEQ ID NO: 1243008
ccuagcuauguguaacuga

SEQ ID NO: 1388265 - RNA, 19 nt, Artificial Sequence
  Description of Artificial Sequence: Synthetic oligonucleotide
  Antisense strand to SEQ ID NO: 1388264
ucaguuacacauagcuagg

SEQ ID NO: 1388266 - RNA, 19 nt, Artificial Sequence
  Description of Artificial Sequence: Synthetic oligonucleotide
  Sense strand starting at position 550 of SEQ ID NO: 1243008
auguguaacugagcaaguu

SEQ ID NO: 1388267 - RNA, 19 nt, Artificial Sequence
  Description of Artificial Sequence: Synthetic oligonucleotide
  Antisense strand to SEQ ID NO: 1388266
aacuugcucaguuacacau

SEQ ID NO: 1388268 - RNA, 19 nt, Artificial Sequence
  Description of Artificial Sequence: Synthetic oligonucleotide
  Sense strand starting at position 551 of SEQ ID NO: 1243008
uguguaacugagcaaguua

SEQ ID NO: 1388269 - RNA, 19 nt, Artificial Sequence
  Description of Artificial Sequence: Synthetic oligonucleotide
  Antisense strand to SEQ ID NO: 1388268
uaacuugcucaguuacaca

SEQ ID NO: 1388270 - RNA, 19 nt, Artificial Sequence
  Description of Artificial Sequence: Synthetic oligonucleotide
  Sense strand starting at position 559 of SEQ ID NO: 1243008
ugagcaaguuauuccaucu

SEQ ID NO: 1388271 - RNA, 19 nt, Artificial Sequence
  Description of Artificial Sequence: Synthetic oligonucleotide
  Antisense strand to SEQ ID NO: 1388270
agauggaauaacuugcuca

SEQ ID NO: 1388272 - RNA, 19 nt, Artificial Sequence
  Description of Artificial Sequence: Synthetic oligonucleotide
  Sense strand starting at position 793 of SEQ ID NO: 1243008
ggauaauaguaccaaccuu

SEQ ID NO: 1388273 - RNA, 19 nt, Artificial Sequence
  Description of Artificial Sequence: Synthetic oligonucleotide
  Antisense strand to SEQ ID NO: 1388272
aagguugguacuauuaucc

SEQ ID NO: 1388274 - RNA, 19 nt, Artificial Sequence
  Description of Artificial Sequence: Synthetic oligonucleotide
  Sense strand starting at position 817 of SEQ ID NO: 1243008
gugaauuaaugccuccaaa

SEQ ID NO: 1388275 - RNA, 19 nt, Artificial Sequence
  Description of Artificial Sequence: Synthetic oligonucleotide
  Antisense strand to SEQ ID NO: 1388274
uuuggaggcauuaauucac

SEQ ID NO: 1388276 - RNA, 19 nt, Artificial Sequence
  Description of Artificial Sequence: Synthetic oligonucleotide
  Sense strand starting at position 853 of SEQ ID NO: 1243008
ugacaauuagcagagcauu

SEQ ID NO: 1388277 - RNA, 19 nt, Artificial Sequence
  Description of Artificial Sequence: Synthetic oligonucleotide
  Antisense strand to SEQ ID NO: 1388276
aaugcucugcuaauuguca

SEQ ID NO: 1388278 - RNA, 19 nt, Artificial Sequence
  Description of Artificial Sequence: Synthetic oligonucleotide
  Sense strand starting at position 914 of SEQ ID NO: 1243008
uguguuguugccggguaca

SEQ ID NO: 1388279 - RNA, 19 nt, Artificial Sequence
  Description of Artificial Sequence: Synthetic oligonucleotide
  Antisense strand to SEQ ID NO: 1388278
uguacccggcaacaacaca

SEQ ID NO: 1388280 - RNA, 19 nt, Artificial Sequence
  Description of Artificial Sequence: Synthetic oligonucleotide
  Sense strand starting at position 941 of SEQ ID NO: 1243008
agugaugaaucacaagaag

SEQ ID NO: 1388281 - RNA, 19 nt, Artificial Sequence
  Description of Artificial Sequence: Synthetic oligonucleotide
  Antisense strand to SEQ ID NO: 1388280
cuucuugugauucaucacu

SEQ ID NO: 1388282 - RNA, 19 nt, Artificial Sequence
  Description of Artificial Sequence: Synthetic oligonucleotide
  Sense strand starting at position 968 of SEQ ID NO: 1243008
uccagaaguucccaguaug

SEQ ID NO: 1388283 - RNA, 19 nt, Artificial Sequence
  Description of Artificial Sequence: Synthetic oligonucleotide
  Antisense strand to SEQ ID NO: 1388282
cauacugggaacuucugga

SEQ ID NO: 1388284 - RNA, 19 nt, Artificial Sequence
  Description of Artificial Sequence: Synthetic oligonucleotide
  Sense strand starting at position 1242 of SEQ ID NO: 1243008
guguguucuggccuggcaa

SEQ ID NO: 1388285 - RNA, 19 nt, Artificial Sequence
  Description of Artificial Sequence: Synthetic oligonucleotide
  Antisense strand to SEQ ID NO: 1388284
uugccaggccagaacacac

SEQ ID NO: 1388286 - RNA, 19 nt, Artificial Sequence
  Description of Artificial Sequence: Synthetic oligonucleotide
  Sense strand starting at position 1243 of SEQ ID NO: 1243008
uguguucuggccuggcaau

SEQ ID NO: 1388287 - RNA, 19 nt, Artificial Sequence
  Description of Artificial Sequence: Synthetic oligonucleotide
  Antisense strand to SEQ ID NO: 1388286
auugccaggccagaacaca

SEQ ID NO: 1388288 - RNA, 19 nt, Artificial Sequence
  Description of Artificial Sequence: Synthetic oligonucleotide
  Sense strand starting at position 1266 of SEQ ID NO: 1243008
uuuccuaguguuggcuaga

SEQ ID NO: 1388289 - RNA, 19 nt, Artificial Sequence
  Description of Artificial Sequence: Synthetic oligonucleotide
  Antisense strand to SEQ ID NO: 1388288
ucuagccaacacuaggaaa

SEQ ID NO: 1388290 - RNA, 19 nt, Artificial Sequence
  Description of Artificial Sequence: Synthetic oligonucleotide
  Sense strand starting at position 1267 of SEQ ID NO: 1243008
uuccuaguguuggcuagaa

SEQ ID NO: 1388291 - RNA, 19 nt, Artificial Sequence
  Description of Artificial Sequence: Synthetic oligonucleotide
  Antisense strand to SEQ ID NO: 1388290
uucuagccaacacuaggaa

SEQ ID NO: 1388292 - RNA, 19 nt, Artificial Sequence
  Description of Artificial Sequence: Synthetic oligonucleotide
  Sense strand starting at position 1269 of SEQ ID NO: 1243008
ccuaguguuggcuagaaac

SEQ ID NO: 1388293 - RNA, 19 nt, Artificial Sequence
  Description of Artificial Sequence: Synthetic oligonucleotide
  Antisense strand to SEQ ID NO: 1388292
guuucuagccaacacuagg

SEQ ID NO: 1388294 - RNA, 19 nt, Artificial Sequence
  Description of Artificial Sequence: Synthetic oligonucleotide
  Sense strand starting at position 1271 of SEQ ID NO: 1243008
uaguguuggcuagaaacug

SEQ ID NO: 1388295 - RNA, 19 nt, Artificial Sequence
  Description of Artificial Sequence: Synthetic oligonucleotide
  Antisense strand to SEQ ID NO: 1388294
caguuucuagccaacacua

SEQ ID NO: 1388296 - RNA, 19 nt, Artificial Sequence
  Description of Artificial Sequence: Synthetic oligonucleotide
  Sense strand starting at position 1378 of SEQ ID NO: 1243008
ccuguuguuucuggaaggu

SEQ ID NO: 1388297 - RNA, 19 nt, Artificial Sequence
  Description of Artificial Sequence: Synthetic oligonucleotide
  Antisense strand to SEQ ID NO: 1388296
accuuccagaaacaacagg

SEQ ID NO: 1388298 - RNA, 19 nt, Artificial Sequence
  Description of Artificial Sequence: Synthetic oligonucleotide
  Sense strand starting at position 1393 of SEQ ID NO: 1243008
aggucuucucucugcggau

SEQ ID NO: 1388299 - RNA, 19 nt, Artificial Sequence
  Description of Artificial Sequence: Synthetic oligonucleotide
  Antisense strand to SEQ ID NO: 1388298
auccgcagagagaagaccu

SEQ ID NO: 1388300 - RNA, 19 nt, Artificial Sequence
  Description of Artificial Sequence: Synthetic oligonucleotide
  Sense strand starting at position 1519 of SEQ ID NO: 1243008
ugggaacaauccuggugaa

SEQ ID NO: 1388301 - RNA, 19 nt, Artificial Sequence
  Description of Artificial Sequence: Synthetic oligonucleotide
  Antisense strand to SEQ ID NO: 1388300
uucaccaggauuguuccca

SEQ ID NO: 1388302 - RNA, 19 nt, Artificial Sequence
  Description of Artificial Sequence: Synthetic oligonucleotide
  Sense strand starting at position 1558 of SEQ ID NO: 1243008
aggcgucgcucggcauaau

SEQ ID NO: 1388303 - RNA, 19 nt, Artificial Sequence
  Description of Artificial Sequence: Synthetic oligonucleotide
  Antisense strand to SEQ ID NO: 1388302
auuaugccgagcgacgccu

SEQ ID NO: 1388304 - RNA, 19 nt, Artificial Sequence
  Description of Artificial Sequence: Synthetic oligonucleotide
  Sense strand starting at position 1559 of SEQ ID NO: 1243008
ggcgucgcucggcauaauu

SEQ ID NO: 1388305 - RNA, 19 nt, Artificial Sequence
  Description of Artificial Sequence: Synthetic oligonucleotide
  Antisense strand to SEQ ID NO: 1388304
aauuaugccgagcgacgcc

SEQ ID NO: 1388306 - RNA, 19 nt, Artificial Sequence
  Description of Artificial Sequence: Synthetic oligonucleotide
  Sense strand starting at position 1561 of SEQ ID NO: 1243008
cgucgcucggcauaauuca

SEQ ID NO: 1388307 - RNA, 19 nt, Artificial Sequence
  Description of Artificial Sequence: Synthetic oligonucleotide
  Antisense strand to SEQ ID NO: 1388306
ugaauuaugccgagcgacg

SEQ ID NO: 1388308 - RNA, 19 nt, Artificial Sequence
  Description of Artificial Sequence: Synthetic oligonucleotide
  Sense strand starting at position 2224 of SEQ ID NO: 1243008
agacuuaccucaugcgaug

SEQ ID NO: 1388309 - RNA, 19 nt, Artificial Sequence
  Description of Artificial Sequence: Synthetic oligonucleotide
  Antisense strand to SEQ ID NO: 1388308
caucgcaugagguaagucu

SEQ ID NO: 1388310 - RNA, 19 nt, Artificial Sequence
  Description of Artificial Sequence: Synthetic oligonucleotide
  Sense strand starting at position 3102 of SEQ ID NO: 1243008
acggguguguccagggaca

SEQ ID NO: 1388311 - RNA, 19 nt, Artificial Sequence
  Description of Artificial Sequence: Synthetic oligonucleotide
  Antisense strand to SEQ ID NO: 1388310
ugucccuggacacacccgu

SEQ ID NO: 1388312 - RNA, 19 nt, Artificial Sequence
  Description of Artificial Sequence: Synthetic oligonucleotide
  Sense strand starting at position 3700 of SEQ ID NO: 1243008
cacugaggguucugugaga

SEQ ID NO: 1388313 - RNA, 19 nt, Artificial Sequence
  Description of Artificial Sequence: Synthetic oligonucleotide
  Antisense strand to SEQ ID NO: 1388312
ucucacagaacccucagug

SEQ ID NO: 1388314 - RNA, 19 nt, Artificial Sequence
  Description of Artificial Sequence: Synthetic oligonucleotide
  Sense strand starting at position 3716 of SEQ ID NO: 1243008
agagucaguaaagguuaaa

SEQ ID NO: 1388315 - RNA, 19 nt, Artificial Sequence
  Description of Artificial Sequence: Synthetic oligonucleotide
  Antisense strand to SEQ ID NO: 1388314
uuuaaccuuuacugacucu

SEQ ID NO: 1388316 - RNA, 19 nt, Artificial Sequence
  Description of Artificial Sequence: Synthetic oligonucleotide
  Sense strand starting at position 3736 of SEQ ID NO: 1243008
ccauuuauauguguauggu

SEQ ID NO: 1388317 - RNA, 19 nt, Artificial Sequence
  Description of Artificial Sequence: Synthetic oligonucleotide
  Antisense strand to SEQ ID NO: 1388316
accauacacauauaaaugg

SEQ ID NO: 1388318 - RNA, 19 nt, Artificial Sequence
  Description of Artificial Sequence: Synthetic oligonucleotide
  Sense strand starting at position 3740 of SEQ ID NO: 1243008
uuauauguguaugguccaa

SEQ ID NO: 1388319 - RNA, 19 nt, Artificial Sequence
  Description of Artificial Sequence: Synthetic oligonucleotide
  Antisense strand to SEQ ID NO: 1388318
uuggaccauacacauauaa

SEQ ID NO: 1388320 - RNA, 19 nt, Artificial Sequence
  Description of Artificial Sequence: Synthetic oligonucleotide
  Sense strand starting at position 3744 of SEQ ID NO: 1243008
auguguaugguccaaccau

SEQ ID NO: 1388321 - RNA, 19 nt, Artificial Sequence
  Description of Artificial Sequence: Synthetic oligonucleotide
  Antisense strand to SEQ ID NO: 1388320
augguuggaccauacacau

SEQ ID NO: 1388322 - RNA, 19 nt, Artificial Sequence
  Description of Artificial Sequence: Synthetic oligonucleotide
  Sense strand starting at position 80 of SEQ ID NO: 1243009
ggaaguuugacuugugaga

SEQ ID NO: 1388323 - RNA, 19 nt, Artificial Sequence
  Description of Artificial Sequence: Synthetic oligonucleotide
  Antisense strand to SEQ ID NO: 1388322
ucucacaagucaaacuucc

SEQ ID NO: 1388324 - RNA, 19 nt, Artificial Sequence
  Description of Artificial Sequence: Synthetic oligonucleotide
  Sense strand starting at position 87 of SEQ ID NO: 1243009
ugacuugugagaugucuga

SEQ ID NO: 1388325 - RNA, 19 nt, Artificial Sequence
  Description of Artificial Sequence: Synthetic oligonucleotide
  Antisense strand to SEQ ID NO: 1388324
ucagacaucucacaaguca

SEQ ID NO: 1388326 - RNA, 19 nt, Artificial Sequence
  Description of Artificial Sequence: Synthetic oligonucleotide
  Sense strand starting at position 91 of SEQ ID NO: 1243009
uugugagaugucugagaau

SEQ ID NO: 1388327 - RNA, 19 nt, Artificial Sequence
  Description of Artificial Sequence: Synthetic oligonucleotide
  Antisense strand to SEQ ID NO: 1388326
auucucagacaucucacaa

SEQ ID NO: 1388328 - RNA, 19 nt, Artificial Sequence
  Description of Artificial Sequence: Synthetic oligonucleotide
  Sense strand starting at position 102 of SEQ ID NO: 1243009
cugagaaugcugugaacau

SEQ ID NO: 1388329 - RNA, 19 nt, Artificial Sequence
  Description of Artificial Sequence: Synthetic oligonucleotide
  Antisense strand to SEQ ID NO: 1388328
auguucacagcauucucag

SEQ ID NO: 1388330 - RNA, 19 nt, Artificial Sequence
  Description of Artificial Sequence: Synthetic oligonucleotide
  Sense strand starting at position 106 of SEQ ID NO: 1243009
gaaugcugugaacaucuuu

SEQ ID NO: 1388331 - RNA, 19 nt, Artificial Sequence
  Description of Artificial Sequence: Synthetic oligonucleotide
  Antisense strand to SEQ ID NO: 1388330
aaagauguucacagcauuc

SEQ ID NO: 1388332 - RNA, 19 nt, Artificial Sequence
  Description of Artificial Sequence: Synthetic oligonucleotide
  Sense strand starting at position 154 of SEQ ID NO: 1243009
cuggaaaugcugugcuaag

SEQ ID NO: 1388333 - RNA, 19 nt, Artificial Sequence
  Description of Artificial Sequence: Synthetic oligonucleotide
  Antisense strand to SEQ ID NO: 1388332
cuuagcacagcauuuccag

SEQ ID NO: 1388334 - RNA, 19 nt, Artificial Sequence
  Description of Artificial Sequence: Synthetic oligonucleotide
  Sense strand starting at position 155 of SEQ ID NO: 1243009
uggaaaugcugugcuaagu

SEQ ID NO: 1388335 - RNA, 19 nt, Artificial Sequence
  Description of Artificial Sequence: Synthetic oligonucleotide
  Antisense strand to SEQ ID NO: 1388334
acuuagcacagcauuucca

SEQ ID NO: 1388336 - RNA, 19 nt, Artificial Sequence
  Description of Artificial Sequence: Synthetic oligonucleotide
  Sense strand starting at position 166 of SEQ ID NO: 1243009
ugcuaagugcuuuaggaug

SEQ ID NO: 1388337 - RNA, 19 nt, Artificial Sequence
  Description of Artificial Sequence: Synthetic oligonucleotide
  Antisense strand to SEQ ID NO: 1388336
cauccuaaagcacuuagca

SEQ ID NO: 1388338 - RNA, 19 nt, Artificial Sequence
  Description of Artificial Sequence: Synthetic oligonucleotide
  Sense strand starting at position 301 of SEQ ID NO: 1243009
uaagaagugccacagucau

SEQ ID NO: 1388339 - RNA, 19 nt, Artificial Sequence
  Description of Artificial Sequence: Synthetic oligonucleotide
  Antisense strand to SEQ ID NO: 1388338
augacuguggcacuucuua

SEQ ID NO: 1388340 - RNA, 19 nt, Artificial Sequence
  Description of Artificial Sequence: Synthetic oligonucleotide
  Sense strand starting at position 314 of SEQ ID NO: 1243009
agucaugauuuacauaaug

SEQ ID NO: 1388341 - RNA, 19 nt, Artificial Sequence
  Description of Artificial Sequence: Synthetic oligonucleotide
  Antisense strand to SEQ ID NO: 1388340
cauuauguaaaucaugacu

SEQ ID NO: 1388342 - RNA, 19 nt, Artificial Sequence
  Description of Artificial Sequence: Synthetic oligonucleotide
  Sense strand starting at position 319 of SEQ ID NO: 1243009
ugauuuacauaauggucua

SEQ ID NO: 1388343 - RNA, 19 nt, Artificial Sequence
  Description of Artificial Sequence: Synthetic oligonucleotide
  Antisense strand to SEQ ID NO: 1388342
uagaccauuauguaaauca

SEQ ID NO: 1388344 - RNA, 19 nt, Artificial Sequence
  Description of Artificial Sequence: Synthetic oligonucleotide
  Sense strand starting at position 332 of SEQ ID NO: 1243009
ggucuaucuuacucccaag

SEQ ID NO: 1388345 - RNA, 19 nt, Artificial Sequence
  Description of Artificial Sequence: Synthetic oligonucleotide
  Antisense strand to SEQ ID NO: 1388344
cuugggaguaagauagacc

SEQ ID NO: 1388346 - RNA, 19 nt, Artificial Sequence
  Description of Artificial Sequence: Synthetic oligonucleotide
  Sense strand starting at position 899 of SEQ ID NO: 1243009
gcaaauuagguuugggaau

SEQ ID NO: 1388347 - RNA, 19 nt, Artificial Sequence
  Description of Artificial Sequence: Synthetic oligonucleotide
  Antisense strand to SEQ ID NO: 1388346
auucccaaaccuaauuugc

SEQ ID NO: 1388348 - RNA, 19 nt, Artificial Sequence
  Description of Artificial Sequence: Synthetic oligonucleotide
  Sense strand starting at position 939 of SEQ ID NO: 1243009
uagggugauuuggaacgua

SEQ ID NO: 1388349 - RNA, 19 nt, Artificial Sequence
  Description of Artificial Sequence: Synthetic oligonucleotide
  Antisense strand to SEQ ID NO: 1388348
uacguuccaaaucacccua

SEQ ID NO: 1388350 - RNA, 19 nt, Artificial Sequence
  Description of Artificial Sequence: Synthetic oligonucleotide
  Sense strand starting at position 1056 of SEQ ID NO: 1243009
agaccacgugucugcaauu

SEQ ID NO: 1388351 - RNA, 19 nt, Artificial Sequence
  Description of Artificial Sequence: Synthetic oligonucleotide
  Antisense strand to SEQ ID NO: 1388350
aauugcagacacguggucu

SEQ ID NO: 1388352 - RNA, 19 nt, Artificial Sequence
  Description of Artificial Sequence: Synthetic oligonucleotide
  Sense strand starting at position 1131 of SEQ ID NO: 1243009
ggagucagaagcuaagcuu

SEQ ID NO: 1388353 - RNA, 19 nt, Artificial Sequence
  Description of Artificial Sequence: Synthetic oligonucleotide
  Antisense strand to SEQ ID NO: 1388352
aagcuuagcuucugacucc

SEQ ID NO: 1388354 - RNA, 19 nt, Artificial Sequence
  Description of Artificial Sequence: Synthetic oligonucleotide
  Sense strand starting at position 1184 of SEQ ID NO: 1243009
ugaaguccuccuuggaaag

SEQ ID NO: 1388355 - RNA, 19 nt, Artificial Sequence
  Description of Artificial Sequence: Synthetic oligonucleotide
  Antisense strand to SEQ ID NO: 1388354
cuuuccaaggaggacuuca

SEQ ID NO: 1388356 - RNA, 19 nt, Artificial Sequence
  Description of Artificial Sequence: Synthetic oligonucleotide
  Sense strand starting at position 1185 of SEQ ID NO: 1243009
gaaguccuccuuggaaaga

SEQ ID NO: 1388357 - RNA, 19 nt, Artificial Sequence
  Description of Artificial Sequence: Synthetic oligonucleotide
  Antisense strand to SEQ ID NO: 1388356
ucuuuccaaggaggacuuc

SEQ ID NO: 1388358 - RNA, 19 nt, Artificial Sequence
  Description of Artificial Sequence: Synthetic oligonucleotide
  Sense strand starting at position 1268 of SEQ ID NO: 1243009
ugcgauucccaaggacaga

SEQ ID NO: 1388359 - RNA, 19 nt, Artificial Sequence
  Description of Artificial Sequence: Synthetic oligonucleotide
  Antisense strand to SEQ ID NO: 1388358
ucuguccuugggaaucgca

SEQ ID NO: 1388360 - RNA, 19 nt, Artificial Sequence
  Description of Artificial Sequence: Synthetic oligonucleotide
  Sense strand starting at position 1311 of SEQ ID NO: 1243009
ggcguaaguggcuaugacu

SEQ ID NO: 1388361 - RNA, 19 nt, Artificial Sequence
  Description of Artificial Sequence: Synthetic oligonucleotide
  Antisense strand to SEQ ID NO: 1388360
agucauagccacuuacgcc

SEQ ID NO: 1388362 - RNA, 19 nt, Artificial Sequence
  Description of Artificial Sequence: Synthetic oligonucleotide
  Sense strand starting at position 2199 of SEQ ID NO: 1243009
gcaagcugccguuuccuua

SEQ ID NO: 1388363 - RNA, 19 nt, Artificial Sequence
  Description of Artificial Sequence: Synthetic oligonucleotide
  Antisense strand to SEQ ID NO: 1388362
uaaggaaacggcagcuugc

SEQ ID NO: 1388364 - RNA, 19 nt, Artificial Sequence
  Description of Artificial Sequence: Synthetic oligonucleotide
  Sense strand starting at position 2266 of SEQ ID NO: 1243009
gaaccuaauuugugucuga

SEQ ID NO: 1388365 - RNA, 19 nt, Artificial Sequence
  Description of Artificial Sequence: Synthetic oligonucleotide
  Antisense strand to SEQ ID NO: 1388364
ucagacacaaauuagguuc

SEQ ID NO: 1388366 - RNA, 19 nt, Artificial Sequence
  Description of Artificial Sequence: Synthetic oligonucleotide
  Sense strand starting at position 2534 of SEQ ID NO: 1243009
ggaggacuuugucccuguu

SEQ ID NO: 1388367 - RNA, 19 nt, Artificial Sequence
  Description of Artificial Sequence: Synthetic oligonucleotide
  Antisense strand to SEQ ID NO: 1388366
aacagggacaaaguccucc

SEQ ID NO: 1388368 - RNA, 19 nt, Artificial Sequence
  Description of Artificial Sequence: Synthetic oligonucleotide
  Sense strand starting at position 2537 of SEQ ID NO: 1243009
ggacuuugucccuguucuu

SEQ ID NO: 1388369 - RNA, 19 nt, Artificial Sequence
  Description of Artificial Sequence: Synthetic oligonucleotide
  Antisense strand to SEQ ID NO: 1388368
aagaacagggacaaagucc

SEQ ID NO: 1388370 - RNA, 19 nt, Artificial Sequence
  Description of Artificial Sequence: Synthetic oligonucleotide
  Sense strand starting at position 2730 of SEQ ID NO: 1243009
aggccagcuuuauuuguga

SEQ ID NO: 1388371 - RNA, 19 nt, Artificial Sequence
  Description of Artificial Sequence: Synthetic oligonucleotide
  Antisense strand to SEQ ID NO: 1388370
ucacaaauaaagcuggccu

SEQ ID NO: 1388372 - RNA, 19 nt, Artificial Sequence
  Description of Artificial Sequence: Synthetic oligonucleotide
  Sense strand starting at position 2932 of SEQ ID NO: 1243009
gcuccuugggcucacauaa

SEQ ID NO: 1388373 - RNA, 19 nt, Artificial Sequence
  Description of Artificial Sequence: Synthetic oligonucleotide
  Antisense strand to SEQ ID NO: 1388372
uuaugugagcccaaggagc

SEQ ID NO: 1388374 - RNA, 19 nt, Artificial Sequence
  Description of Artificial Sequence: Synthetic oligonucleotide
  Sense strand starting at position 2974 of SEQ ID NO: 1243009
aggaauuccuguucccauu

SEQ ID NO: 1388375 - RNA, 19 nt, Artificial Sequence
  Description of Artificial Sequence: Synthetic oligonucleotide
  Antisense strand to SEQ ID NO: 1388374
aaugggaacaggaauuccu

SEQ ID NO: 1388376 - RNA, 19 nt, Artificial Sequence
  Description of Artificial Sequence: Synthetic oligonucleotide
  Sense strand starting at position 3016 of SEQ ID NO: 1243009
ggguuaagaugcuugcaga

SEQ ID NO: 1388377 - RNA, 19 nt, Artificial Sequence
  Description of Artificial Sequence: Synthetic oligonucleotide
  Antisense strand to SEQ ID NO: 1388376
ucugcaagcaucuuaaccc

SEQ ID NO: 1388378 - RNA, 19 nt, Artificial Sequence
  Description of Artificial Sequence: Synthetic oligonucleotide
  Sense strand starting at position 3068 of SEQ ID NO: 1243009
uucgaacccuuguucugaa

SEQ ID NO: 1388379 - RNA, 19 nt, Artificial Sequence
  Description of Artificial Sequence: Synthetic oligonucleotide
  Antisense strand to SEQ ID NO: 1388378
uucagaacaaggguucgaa

SEQ ID NO: 1388380 - RNA, 19 nt, Artificial Sequence
  Description of Artificial Sequence: Synthetic oligonucleotide
  Sense strand starting at position 3069 of SEQ ID NO: 1243009
ucgaacccuuguucugaaa

SEQ ID NO: 1388381 - RNA, 19 nt, Artificial Sequence
  Description of Artificial Sequence: Synthetic oligonucleotide
  Antisense strand to SEQ ID NO: 1388380
uuucagaacaaggguucga

SEQ ID NO: 1388382 - RNA, 19 nt, Artificial Sequence
  Description of Artificial Sequence: Synthetic oligonucleotide
  Sense strand starting at position 3322 of SEQ ID NO: 1243009
gcgugagucaccgcaagac

SEQ ID NO: 1388383 - RNA, 19 nt, Artificial Sequence
  Description of Artificial Sequence: Synthetic oligonucleotide
  Antisense strand to SEQ ID NO: 1388382
gucuugcggugacucacgc

SEQ ID NO: 1388384 - RNA, 19 nt, Artificial Sequence
  Description of Artificial Sequence: Synthetic oligonucleotide
  Sense strand starting at position 3356 of SEQ ID NO: 1243009
gcagaauaacaucggauca

SEQ ID NO: 1388385 - RNA, 19 nt, Artificial Sequence
  Description of Artificial Sequence: Synthetic oligonucleotide
  Antisense strand to SEQ ID NO: 1388384
ugauccgauguuauucugc

SEQ ID NO: 1388386 - RNA, 19 nt, Artificial Sequence
  Description of Artificial Sequence: Synthetic oligonucleotide
  Sense strand starting at position 3358 of SEQ ID NO: 1243009
agaauaacaucggaucaaa

SEQ ID NO: 1388387 - RNA, 19 nt, Artificial Sequence
  Description of Artificial Sequence: Synthetic oligonucleotide
  Antisense strand to SEQ ID NO: 1388386
uuugauccgauguuauucu

SEQ ID NO: 1388388 - RNA, 19 nt, Artificial Sequence
  Description of Artificial Sequence: Synthetic oligonucleotide
  Sense strand starting at position 3464 of SEQ ID NO: 1243009
cguagauuccaguacuugu

SEQ ID NO: 1388389 - RNA, 19 nt, Artificial Sequence
  Description of Artificial Sequence: Synthetic oligonucleotide
  Antisense strand to SEQ ID NO: 1388388
acaaguacuggaaucuacg

SEQ ID NO: 1388390 - RNA, 19 nt, Artificial Sequence
  Description of Artificial Sequence: Synthetic oligonucleotide
  Sense strand starting at position 3467 of SEQ ID NO: 1243009
agauuccaguacuuguuaa

SEQ ID NO: 1388391 - RNA, 19 nt, Artificial Sequence
  Description of Artificial Sequence: Synthetic oligonucleotide
  Antisense strand to SEQ ID NO: 1388390
uuaacaaguacuggaaucu

SEQ ID NO: 1388392 - RNA, 19 nt, Artificial Sequence
  Description of Artificial Sequence: Synthetic oligonucleotide
  Sense strand starting at position 3479 of SEQ ID NO: 1243009
uuguuaacaguuugccaua

SEQ ID NO: 1388393 - RNA, 19 nt, Artificial Sequence
  Description of Artificial Sequence: Synthetic oligonucleotide
  Antisense strand to SEQ ID NO: 1388392
uauggcaaacuguuaacaa

SEQ ID NO: 1388394 - RNA, 19 nt, Artificial Sequence
  Description of Artificial Sequence: Synthetic oligonucleotide
  Sense strand starting at position 3480 of SEQ ID NO: 1243009
uguuaacaguuugccauau

SEQ ID NO: 1388395 - RNA, 19 nt, Artificial Sequence
  Description of Artificial Sequence: Synthetic oligonucleotide
  Antisense strand to SEQ ID NO: 1388394
auauggcaaacuguuaaca

SEQ ID NO: 1388396 - RNA, 19 nt, Artificial Sequence
  Description of Artificial Sequence: Synthetic oligonucleotide
  Sense strand starting at position 3493 of SEQ ID NO: 1243009
ccauauuugcuucgucugu

SEQ ID NO: 1388397 - RNA, 19 nt, Artificial Sequence
  Description of Artificial Sequence: Synthetic oligonucleotide
  Antisense strand to SEQ ID NO: 1388396
acagacgaagcaaauaugg

SEQ ID NO: 1388398 - RNA, 19 nt, Artificial Sequence
  Description of Artificial Sequence: Synthetic oligonucleotide
  Sense strand starting at position 3563 of SEQ ID NO: 1243009
accaaauacugagcaugua

SEQ ID NO: 1388399 - RNA, 19 nt, Artificial Sequence
  Description of Artificial Sequence: Synthetic oligonucleotide
  Antisense strand to SEQ ID NO: 1388398
uacaugcucaguauuuggu

SEQ ID NO: 1388400 - RNA, 19 nt, Artificial Sequence
  Description of Artificial Sequence: Synthetic oligonucleotide
  Sense strand starting at position 3571 of SEQ ID NO: 1243009
cugagcauguaucucuuaa

SEQ ID NO: 1388401 - RNA, 19 nt, Artificial Sequence
  Description of Artificial Sequence: Synthetic oligonucleotide
  Antisense strand to SEQ ID NO: 1388400
uuaagagauacaugcucag

SEQ ID NO: 1388402 - RNA, 19 nt, Artificial Sequence
  Description of Artificial Sequence: Synthetic oligonucleotide
  Sense strand starting at position 42 of SEQ ID NO: 1243010
gggcuugaguaauucaguc

SEQ ID NO: 1388403 - RNA, 19 nt, Artificial Sequence
  Description of Artificial Sequence: Synthetic oligonucleotide
  Antisense strand to SEQ ID NO: 1388402
gacugaauuacucaagccc

SEQ ID NO: 1388404 - RNA, 19 nt, Artificial Sequence
  Description of Artificial Sequence: Synthetic oligonucleotide
  Sense strand starting at position 117 of SEQ ID NO: 1243010
ggcuuaaccucucugaucu

SEQ ID NO: 1388405 - RNA, 19 nt, Artificial Sequence
  Description of Artificial Sequence: Synthetic oligonucleotide
  Antisense strand to SEQ ID NO: 1388404
agaucagagagguuaagcc

SEQ ID NO: 1388406 - RNA, 19 nt, Artificial Sequence
  Description of Artificial Sequence: Synthetic oligonucleotide
  Sense strand starting at position 203 of SEQ ID NO: 1243010
uuaagaauguaggcucuca

SEQ ID NO: 1388407 - RNA, 19 nt, Artificial Sequence
  Description of Artificial Sequence: Synthetic oligonucleotide
  Antisense strand to SEQ ID NO: 1388406
ugagagccuacauucuuaa

SEQ ID NO: 1388408 - RNA, 19 nt, Artificial Sequence
  Description of Artificial Sequence: Synthetic oligonucleotide
  Sense strand starting at position 292 of SEQ ID NO: 1243010
uugcuuuaucuguaugacu

SEQ ID NO: 1388409 - RNA, 19 nt, Artificial Sequence
  Description of Artificial Sequence: Synthetic oligonucleotide
  Antisense strand to SEQ ID NO: 1388408
agucauacagauaaagcaa

SEQ ID NO: 1388410 - RNA, 19 nt, Artificial Sequence
  Description of Artificial Sequence: Synthetic oligonucleotide
  Sense strand starting at position 337 of SEQ ID NO: 1243010
gggcauggcaaggguuaua

SEQ ID NO: 1388411 - RNA, 19 nt, Artificial Sequence
  Description of Artificial Sequence: Synthetic oligonucleotide
  Antisense strand to SEQ ID NO: 1388410
uauaacccuugccaugccc

SEQ ID NO: 1388412 - RNA, 19 nt, Artificial Sequence
  Description of Artificial Sequence: Synthetic oligonucleotide
  Sense strand starting at position 367 of SEQ ID NO: 1243010
acaagaaaguguguauuaa

SEQ ID NO: 1388413 - RNA, 19 nt, Artificial Sequence
  Description of Artificial Sequence: Synthetic oligonucleotide
  Antisense strand to SEQ ID NO: 1388412
uuaauacacacuuucuugu

SEQ ID NO: 1388414 - RNA, 19 nt, Artificial Sequence
  Description of Artificial Sequence: Synthetic oligonucleotide
  Sense strand starting at position 368 of SEQ ID NO: 1243010
caagaaaguguguauuaau

SEQ ID NO: 1388415 - RNA, 19 nt, Artificial Sequence
  Description of Artificial Sequence: Synthetic oligonucleotide
  Antisense strand to SEQ ID NO: 1388414
auuaauacacacuuucuug

SEQ ID NO: 1388416 - RNA, 19 nt, Artificial Sequence
  Description of Artificial Sequence: Synthetic oligonucleotide
  Sense strand starting at position 458 of SEQ ID NO: 1243010
agagcuccacuuuauagau

SEQ ID NO: 1388417 - RNA, 19 nt, Artificial Sequence
  Description of Artificial Sequence: Synthetic oligonucleotide
  Antisense strand to SEQ ID NO: 1388416
aucuauaaaguggagcucu

SEQ ID NO: 1388418 - RNA, 19 nt, Artificial Sequence
  Description of Artificial Sequence: Synthetic oligonucleotide
  Sense strand starting at position 504 of SEQ ID NO: 1243010
gugucuugccuacuguuua

SEQ ID NO: 1388419 - RNA, 19 nt, Artificial Sequence
  Description of Artificial Sequence: Synthetic oligonucleotide
  Antisense strand to SEQ ID NO: 1388418
uaaacaguaggcaagacac

SEQ ID NO: 1388420 - RNA, 19 nt, Artificial Sequence
  Description of Artificial Sequence: Synthetic oligonucleotide
  Sense strand starting at position 557 of SEQ ID NO: 1243010
ucuguuauuaaagguucga

SEQ ID NO: 1388421 - RNA, 19 nt, Artificial Sequence
  Description of Artificial Sequence: Synthetic oligonucleotide
  Antisense strand to SEQ ID NO: 1388420
ucgaaccuuuaauaacaga

SEQ ID NO: 1388422 - RNA, 19 nt, Artificial Sequence
  Description of Artificial Sequence: Synthetic oligonucleotide
  Sense strand starting at position 561 of SEQ ID NO: 1243010
uuauuaaagguucgaguag

SEQ ID NO: 1388423 - RNA, 19 nt, Artificial Sequence
  Description of Artificial Sequence: Synthetic oligonucleotide
  Antisense strand to SEQ ID NO: 1388422
cuacucgaaccuuuaauaa

SEQ ID NO: 1388424 - RNA, 19 nt, Artificial Sequence
  Description of Artificial Sequence: Synthetic oligonucleotide
  Sense strand starting at position 570 of SEQ ID NO: 1243010
guucgaguagcccaggaau

SEQ ID NO: 1388425 - RNA, 19 nt, Artificial Sequence
  Description of Artificial Sequence: Synthetic oligonucleotide
  Antisense strand to SEQ ID NO: 1388424
auuccugggcuacucgaac

SEQ ID NO: 1388426 - RNA, 19 nt, Artificial Sequence
  Description of Artificial Sequence: Synthetic oligonucleotide
  Sense strand starting at position 578 of SEQ ID NO: 1243010
agcccaggaaugugacuau

SEQ ID NO: 1388427 - RNA, 19 nt, Artificial Sequence
  Description of Artificial Sequence: Synthetic oligonucleotide
  Antisense strand to SEQ ID NO: 1388426
auagucacauuccugggcu

SEQ ID NO: 1388428 - RNA, 19 nt, Artificial Sequence
  Description of Artificial Sequence: Synthetic oligonucleotide
  Sense strand starting at position 581 of SEQ ID NO: 1243010
ccaggaaugugacuaugcu

SEQ ID NO: 1388429 - RNA, 19 nt, Artificial Sequence
  Description of Artificial Sequence: Synthetic oligonucleotide
  Antisense strand to SEQ ID NO: 1388428
agcauagucacauuccugg

SEQ ID NO: 1388430 - RNA, 19 nt, Artificial Sequence
  Description of Artificial Sequence: Synthetic oligonucleotide
  Sense strand starting at position 582 of SEQ ID NO: 1243010
caggaaugugacuaugcuu

SEQ ID NO: 1388431 - RNA, 19 nt, Artificial Sequence
  Description of Artificial Sequence: Synthetic oligonucleotide
  Antisense strand to SEQ ID NO: 1388430
aagcauagucacauuccug

SEQ ID NO: 1388432 - RNA, 19 nt, Artificial Sequence
  Description of Artificial Sequence: Synthetic oligonucleotide
  Sense strand starting at position 705 of SEQ ID NO: 1243010
gagcauugcguacuugcaa

SEQ ID NO: 1388433 - RNA, 19 nt, Artificial Sequence
  Description of Artificial Sequence: Synthetic oligonucleotide
  Antisense strand to SEQ ID NO: 1388432
uugcaaguacgcaaugcuc

SEQ ID NO: 1388434 - RNA, 19 nt, Artificial Sequence
  Description of Artificial Sequence: Synthetic oligonucleotide
  Sense strand starting at position 712 of SEQ ID NO: 1243010
gcguacuugcaaucacagu

SEQ ID NO: 1388435 - RNA, 19 nt, Artificial Sequence
  Description of Artificial Sequence: Synthetic oligonucleotide
  Antisense strand to SEQ ID NO: 1388434
acugugauugcaaguacgc

SEQ ID NO: 1388436 - RNA, 19 nt, Artificial Sequence
  Description of Artificial Sequence: Synthetic oligonucleotide
  Sense strand starting at position 1173 of SEQ ID NO: 1243010
accuauaugaggugcuuga

SEQ ID NO: 1388437 - RNA, 19 nt, Artificial Sequence
  Description of Artificial Sequence: Synthetic oligonucleotide
  Antisense strand to SEQ ID NO: 1388436
ucaagcaccucauauaggu

SEQ ID NO: 1388438 - RNA, 19 nt, Artificial Sequence
  Description of Artificial Sequence: Synthetic oligonucleotide
  Sense strand starting at position 1177 of SEQ ID NO: 1243010
auaugaggugcuugacuua

SEQ ID NO: 1388439 - RNA, 19 nt, Artificial Sequence
  Description of Artificial Sequence: Synthetic oligonucleotide
  Antisense strand to SEQ ID NO: 1388438
uaagucaagcaccucauau

SEQ ID NO: 1388440 - RNA, 19 nt, Artificial Sequence
  Description of Artificial Sequence: Synthetic oligonucleotide
  Sense strand starting at position 1415 of SEQ ID NO: 1243010
guuggauuccgguggauag

SEQ ID NO: 1388441 - RNA, 19 nt, Artificial Sequence
  Description of Artificial Sequence: Synthetic oligonucleotide
  Antisense strand to SEQ ID NO: 1388440
cuauccaccggaauccaac

SEQ ID NO: 1388442 - RNA, 19 nt, Artificial Sequence
  Description of Artificial Sequence: Synthetic oligonucleotide
  Sense strand starting at position 1416 of SEQ ID NO: 1243010
uuggauuccgguggauagu

SEQ ID NO: 1388443 - RNA, 19 nt, Artificial Sequence
  Description of Artificial Sequence: Synthetic oligonucleotide
  Antisense strand to SEQ ID NO: 1388442
acuauccaccggaauccaa

SEQ ID NO: 1388444 - RNA, 19 nt, Artificial Sequence
  Description of Artificial Sequence: Synthetic oligonucleotide
  Sense strand starting at position 2000 of SEQ ID NO: 1243010
cagguuucugguggagaug

SEQ ID NO: 1388445 - RNA, 19 nt, Artificial Sequence
  Description of Artificial Sequence: Synthetic oligonucleotide
  Antisense strand to SEQ ID NO: 1388444
caucuccaccagaaaccug

SEQ ID NO: 1388446 - RNA, 19 nt, Artificial Sequence
  Description of Artificial Sequence: Synthetic oligonucleotide
  Sense strand starting at position 2002 of SEQ ID NO: 1243010
gguuucugguggagaugaa

SEQ ID NO: 1388447 - RNA, 19 nt, Artificial Sequence
  Description of Artificial Sequence: Synthetic oligonucleotide
  Antisense strand to SEQ ID NO: 1388446
uucaucuccaccagaaacc

SEQ ID NO: 1388448 - RNA, 19 nt, Artificial Sequence
  Description of Artificial Sequence: Synthetic oligonucleotide
  Sense strand starting at position 2197 of SEQ ID NO: 1243010
agucccuuuccuuaugaga

SEQ ID NO: 1388449 - RNA, 19 nt, Artificial Sequence
  Description of Artificial Sequence: Synthetic oligonucleotide
  Antisense strand to SEQ ID NO: 1388448
ucucauaaggaaagggacu

SEQ ID NO: 1388450 - RNA, 19 nt, Artificial Sequence
  Description of Artificial Sequence: Synthetic oligonucleotide
  Sense strand starting at position 2608 of SEQ ID NO: 1243010
gggacagguucagacagaa

SEQ ID NO: 1388451 - RNA, 19 nt, Artificial Sequence
  Description of Artificial Sequence: Synthetic oligonucleotide
  Antisense strand to SEQ ID NO: 1388450
uucugucugaaccuguccc

SEQ ID NO: 1388452 - RNA, 19 nt, Artificial Sequence
  Description of Artificial Sequence: Synthetic oligonucleotide
  Sense strand starting at position 2783 of SEQ ID NO: 1243010
ucaauugucuugucucuaa

SEQ ID NO: 1388453 - RNA, 19 nt, Artificial Sequence
  Description of Artificial Sequence: Synthetic oligonucleotide
  Antisense strand to SEQ ID NO: 1388452
uuagagacaagacaauuga

SEQ ID NO: 1388454 - RNA, 19 nt, Artificial Sequence
  Description of Artificial Sequence: Synthetic oligonucleotide
  Sense strand starting at position 2867 of SEQ ID NO: 1243010
gaugguugggugggugaaa

SEQ ID NO: 1388455 - RNA, 19 nt, Artificial Sequence
  Description of Artificial Sequence: Synthetic oligonucleotide
  Antisense strand to SEQ ID NO: 1388454
uuucacccacccaaccauc

SEQ ID NO: 1388456 - RNA, 19 nt, Artificial Sequence
  Description of Artificial Sequence: Synthetic oligonucleotide
  Sense strand starting at position 2979 of SEQ ID NO: 1243010
uuggguuucucagucaaau

SEQ ID NO: 1388457 - RNA, 19 nt, Artificial Sequence
  Description of Artificial Sequence: Synthetic oligonucleotide
  Antisense strand to SEQ ID NO: 1388456
auuugacugagaaacccaa

SEQ ID NO: 1388458 - RNA, 19 nt, Artificial Sequence
  Description of Artificial Sequence: Synthetic oligonucleotide
  Sense strand starting at position 2981 of SEQ ID NO: 1243010
ggguuucucagucaaauga

SEQ ID NO: 1388459 - RNA, 19 nt, Artificial Sequence
  Description of Artificial Sequence: Synthetic oligonucleotide
  Antisense strand to SEQ ID NO: 1388458
ucauuugacugagaaaccc

SEQ ID NO: 1388460 - RNA, 19 nt, Artificial Sequence
  Description of Artificial Sequence: Synthetic oligonucleotide
  Sense strand starting at position 3042 of SEQ ID NO: 1243010
cuuguaguugcucacuaca

SEQ ID NO: 1388461 - RNA, 19 nt, Artificial Sequence
  Description of Artificial Sequence: Synthetic oligonucleotide
  Antisense strand to SEQ ID NO: 1388460
uguagugagcaacuacaag

SEQ ID NO: 1388462 - RNA, 19 nt, Artificial Sequence
  Description of Artificial Sequence: Synthetic oligonucleotide
  Sense strand starting at position 3154 of SEQ ID NO: 1243010
ugagaagaggcuugcucaa

SEQ ID NO: 1388463 - RNA, 19 nt, Artificial Sequence
  Description of Artificial Sequence: Synthetic oligonucleotide
  Antisense strand to SEQ ID NO: 1388462
uugagcaagccucuucuca

SEQ ID NO: 1388464 - RNA, 19 nt, Artificial Sequence
  Description of Artificial Sequence: Synthetic oligonucleotide
  Sense strand starting at position 3171 of SEQ ID NO: 1243010
aaggucaucuugcugguua

SEQ ID NO: 1388465 - RNA, 19 nt, Artificial Sequence
  Description of Artificial Sequence: Synthetic oligonucleotide
  Antisense strand to SEQ ID NO: 1388464
uaaccagcaagaugaccuu

SEQ ID NO: 1388466 - RNA, 19 nt, Artificial Sequence
  Description of Artificial Sequence: Synthetic oligonucleotide
  Sense strand starting at position 3175 of SEQ ID NO: 1243010
ucaucuugcugguuagaac

SEQ ID NO: 1388467 - RNA, 19 nt, Artificial Sequence
  Description of Artificial Sequence: Synthetic oligonucleotide
  Antisense strand to SEQ ID NO: 1388466
guucuaaccagcaagauga

SEQ ID NO: 1388468 - RNA, 19 nt, Artificial Sequence
  Description of Artificial Sequence: Synthetic oligonucleotide
  Sense strand starting at position 3513 of SEQ ID NO: 1243010
uuaacagacgcuugaguuu

SEQ ID NO: 1388469 - RNA, 19 nt, Artificial Sequence
  Description of Artificial Sequence: Synthetic oligonucleotide
  Antisense strand to SEQ ID NO: 1388468
aaacucaagcgucuguuaa

SEQ ID NO: 1388470 - RNA, 19 nt, Artificial Sequence
  Description of Artificial Sequence: Synthetic oligonucleotide
  Sense strand starting at position 3728 of SEQ ID NO: 1243010
uagggcucugcagaaauga

SEQ ID NO: 1388471 - RNA, 19 nt, Artificial Sequence
  Description of Artificial Sequence: Synthetic oligonucleotide
  Antisense strand to SEQ ID NO: 1388470
ucauuucugcagagcccua

SEQ ID NO: 1388472 - RNA, 19 nt, Artificial Sequence
  Description of Artificial Sequence: Synthetic oligonucleotide
  Sense strand starting at position 3825 of SEQ ID NO: 1243010
ucugaucugucuccauaag

SEQ ID NO: 1388473 - RNA, 19 nt, Artificial Sequence
  Description of Artificial Sequence: Synthetic oligonucleotide
  Antisense strand to SEQ ID NO: 1388472
cuuauggagacagaucaga

SEQ ID NO: 1388474 - RNA, 19 nt, Artificial Sequence
  Description of Artificial Sequence: Synthetic oligonucleotide
  Sense strand starting at position 3826 of SEQ ID NO: 1243010
cugaucugucuccauaaga

SEQ ID NO: 1388475 - RNA, 19 nt, Artificial Sequence
  Description of Artificial Sequence: Synthetic oligonucleotide
  Antisense strand to SEQ ID NO: 1388474
ucuuauggagacagaucag

SEQ ID NO: 1388476 - RNA, 19 nt, Artificial Sequence
  Description of Artificial Sequence: Synthetic oligonucleotide
  Sense strand starting at position 3834 of SEQ ID NO: 1243010
ucuccauaagacuguaagu

SEQ ID NO: 1388477 - RNA, 19 nt, Artificial Sequence
  Description of Artificial Sequence: Synthetic oligonucleotide
  Antisense strand to SEQ ID NO: 1388476
acuuacagucuuauggaga

SEQ ID NO: 1388478 - RNA, 19 nt, Artificial Sequence
  Description of Artificial Sequence: Synthetic oligonucleotide
  Sense strand starting at position 3836 of SEQ ID NO: 1243010
uccauaagacuguaagugu

SEQ ID NO: 1388479 - RNA, 19 nt, Artificial Sequence
  Description of Artificial Sequence: Synthetic oligonucleotide
  Antisense strand to SEQ ID NO: 1388478
acacuuacagucuuaugga

SEQ ID NO: 1388480 - RNA, 19 nt, Artificial Sequence
  Description of Artificial Sequence: Synthetic oligonucleotide
  Sense strand starting at position 3929 of SEQ ID NO: 1243010
gccaguaauggagaaguuu

SEQ ID NO: 1388481 - RNA, 19 nt, Artificial Sequence
  Description of Artificial Sequence: Synthetic oligonucleotide
  Antisense strand to SEQ ID NO: 1388480
aaacuucuccauuacuggc

SEQ ID NO: 1388482 - RNA, 19 nt, Artificial Sequence
  Description of Artificial Sequence: Synthetic oligonucleotide
  Sense strand starting at position 15 of SEQ ID NO: 1243011
gucucaaaccugugccaca

SEQ ID NO: 1388483 - RNA, 19 nt, Artificial Sequence
  Description of Artificial Sequence: Synthetic oligonucleotide
  Antisense strand to SEQ ID NO: 1388482
uguggcacagguuugagac

SEQ ID NO: 1388484 - RNA, 19 nt, Artificial Sequence
  Description of Artificial Sequence: Synthetic oligonucleotide
  Sense strand starting at position 63 of SEQ ID NO: 1243011
cgaguucucccuuaaguuu

SEQ ID NO: 1388485 - RNA, 19 nt, Artificial Sequence
  Description of Artificial Sequence: Synthetic oligonucleotide
  Antisense strand to SEQ ID NO: 1388484
aaacuuaagggagaacucg

SEQ ID NO: 1388486 - RNA, 19 nt, Artificial Sequence
  Description of Artificial Sequence: Synthetic oligonucleotide
  Sense strand starting at position 135 of SEQ ID NO: 1243011
aggcucucaccaugagaaa

SEQ ID NO: 1388487 - RNA, 19 nt, Artificial Sequence
  Description of Artificial Sequence: Synthetic oligonucleotide
  Antisense strand to SEQ ID NO: 1388486
uuucucauggugagagccu

SEQ ID NO: 1388488 - RNA, 19 nt, Artificial Sequence
  Description of Artificial Sequence: Synthetic oligonucleotide
  Sense strand starting at position 146 of SEQ ID NO: 1243011
augagaaaguucuugcaga

SEQ ID NO: 1388489 - RNA, 19 nt, Artificial Sequence
  Description of Artificial Sequence: Synthetic oligonucleotide
  Antisense strand to SEQ ID NO: 1388488
ucugcaagaacuuucucau

SEQ ID NO: 1388490 - RNA, 19 nt, Artificial Sequence
  Description of Artificial Sequence: Synthetic oligonucleotide
  Sense strand starting at position 193 of SEQ ID NO: 1243011
cgaaguuaauucucaccau

SEQ ID NO: 1388491 - RNA, 19 nt, Artificial Sequence
  Description of Artificial Sequence: Synthetic oligonucleotide
  Antisense strand to SEQ ID NO: 1388490
auggugagaauuaacuucg

SEQ ID NO: 1388492 - RNA, 19 nt, Artificial Sequence
  Description of Artificial Sequence: Synthetic oligonucleotide
  Sense strand starting at position 327 of SEQ ID NO: 1243011
gcaauugcauaugcauaua

SEQ ID NO: 1388493 - RNA, 19 nt, Artificial Sequence
  Description of Artificial Sequence: Synthetic oligonucleotide
  Antisense strand to SEQ ID NO: 1388492
uauaugcauaugcaauugc

SEQ ID NO: 1388494 - RNA, 19 nt, Artificial Sequence
  Description of Artificial Sequence: Synthetic oligonucleotide
  Sense strand starting at position 360 of SEQ ID NO: 1243011
gcuuauuggucuucugauc

SEQ ID NO: 1388495 - RNA, 19 nt, Artificial Sequence
  Description of Artificial Sequence: Synthetic oligonucleotide
  Antisense strand to SEQ ID NO: 1388494
gaucagaagaccaauaagc

SEQ ID NO: 1388496 - RNA, 19 nt, Artificial Sequence
  Description of Artificial Sequence: Synthetic oligonucleotide
  Sense strand starting at position 798 of SEQ ID NO: 1243011
uugauacuugaaggcagau

SEQ ID NO: 1388497 - RNA, 19 nt, Artificial Sequence
  Description of Artificial Sequence: Synthetic oligonucleotide
  Antisense strand to SEQ ID NO: 1388496
aucugccuucaaguaucaa

SEQ ID NO: 1388498 - RNA, 19 nt, Artificial Sequence
  Description of Artificial Sequence: Synthetic oligonucleotide
  Sense strand starting at position 845 of SEQ ID NO: 1243011
cucucacaguccucguuaa

SEQ ID NO: 1388499 - RNA, 19 nt, Artificial Sequence
  Description of Artificial Sequence: Synthetic oligonucleotide
  Antisense strand to SEQ ID NO: 1388498
uuaacgaggacugugagag

SEQ ID NO: 1388500 - RNA, 19 nt, Artificial Sequence
  Description of Artificial Sequence: Synthetic oligonucleotide
  Sense strand starting at position 920 of SEQ ID NO: 1243011
gcacgaaggguccauacuu

SEQ ID NO: 1388501 - RNA, 19 nt, Artificial Sequence
  Description of Artificial Sequence: Synthetic oligonucleotide
  Antisense strand to SEQ ID NO: 1388500
aaguauggacccuucgugc

SEQ ID NO: 1388502 - RNA, 19 nt, Artificial Sequence
  Description of Artificial Sequence: Synthetic oligonucleotide
  Sense strand starting at position 1048 of SEQ ID NO: 1243011
acagguggauuccuagagu

SEQ ID NO: 1388503 - RNA, 19 nt, Artificial Sequence
  Description of Artificial Sequence: Synthetic oligonucleotide
  Antisense strand to SEQ ID NO: 1388502
acucuaggaauccaccugu

SEQ ID NO: 1388504 - RNA, 19 nt, Artificial Sequence
  Description of Artificial Sequence: Synthetic oligonucleotide
  Sense strand starting at position 1051 of SEQ ID NO: 1243011
gguggauuccuagagugua

SEQ ID NO: 1388505 - RNA, 19 nt, Artificial Sequence
  Description of Artificial Sequence: Synthetic oligonucleotide
  Antisense strand to SEQ ID NO: 1388504
uacacucuaggaauccacc

SEQ ID NO: 1388506 - RNA, 19 nt, Artificial Sequence
  Description of Artificial Sequence: Synthetic oligonucleotide
  Sense strand starting at position 1591 of SEQ ID NO: 1243011
ugaacauggcuuugagcau

SEQ ID NO: 1388507 - RNA, 19 nt, Artificial Sequence
  Description of Artificial Sequence: Synthetic oligonucleotide
  Antisense strand to SEQ ID NO: 1388506
augcucaaagccauguuca

SEQ ID NO: 1388508 - RNA, 19 nt, Artificial Sequence
  Description of Artificial Sequence: Synthetic oligonucleotide
  Sense strand starting at position 2195 of SEQ ID NO: 1243011
aagucuccaccucgugauu

SEQ ID NO: 1388509 - RNA, 19 nt, Artificial Sequence
  Description of Artificial Sequence: Synthetic oligonucleotide
  Antisense strand to SEQ ID NO: 1388508
aaucacgagguggagacuu

SEQ ID NO: 1388510 - RNA, 19 nt, Artificial Sequence
  Description of Artificial Sequence: Synthetic oligonucleotide
  Sense strand starting at position 2257 of SEQ ID NO: 1243011
gacagagaggucugggcau

SEQ ID NO: 1388511 - RNA, 19 nt, Artificial Sequence
  Description of Artificial Sequence: Synthetic oligonucleotide
  Antisense strand to SEQ ID NO: 1388510
augcccagaccucucuguc

SEQ ID NO: 1388512 - RNA, 19 nt, Artificial Sequence
  Description of Artificial Sequence: Synthetic oligonucleotide
  Sense strand starting at position 2344 of SEQ ID NO: 1243011
gagggaagcucuuaaagga

SEQ ID NO: 1388513 - RNA, 19 nt, Artificial Sequence
  Description of Artificial Sequence: Synthetic oligonucleotide
  Antisense strand to SEQ ID NO: 1388512
uccuuuaagagcuucccuc

SEQ ID NO: 1388514 - RNA, 19 nt, Artificial Sequence
  Description of Artificial Sequence: Synthetic oligonucleotide
  Sense strand starting at position 2471 of SEQ ID NO: 1243011
gcaguaauccgugaucgga

SEQ ID NO: 1388515 - RNA, 19 nt, Artificial Sequence
  Description of Artificial Sequence: Synthetic oligonucleotide
  Antisense strand to SEQ ID NO: 1388514
uccgaucacggauuacugc

SEQ ID NO: 1388516 - RNA, 19 nt, Artificial Sequence
  Description of Artificial Sequence: Synthetic oligonucleotide
  Sense strand starting at position 2692 of SEQ ID NO: 1243011
acugaacuguucuccguau

SEQ ID NO: 1388517 - RNA, 19 nt, Artificial Sequence
  Description of Artificial Sequence: Synthetic oligonucleotide
  Antisense strand to SEQ ID NO: 1388516
auacggagaacaguucagu

SEQ ID NO: 1388518 - RNA, 19 nt, Artificial Sequence
  Description of Artificial Sequence: Synthetic oligonucleotide
  Sense strand starting at position 2694 of SEQ ID NO: 1243011
ugaacuguucuccguauuu

SEQ ID NO: 1388519 - RNA, 19 nt, Artificial Sequence
  Description of Artificial Sequence: Synthetic oligonucleotide
  Antisense strand to SEQ ID NO: 1388518
aaauacggagaacaguuca

SEQ ID NO: 1388520 - RNA, 19 nt, Artificial Sequence
  Description of Artificial Sequence: Synthetic oligonucleotide
  Sense strand starting at position 2773 of SEQ ID NO: 1243011
gcuaaugucgugggaccua

SEQ ID NO: 1388521 - RNA, 19 nt, Artificial Sequence
  Description of Artificial Sequence: Synthetic oligonucleotide
  Antisense strand to SEQ ID NO: 1388520
uaggucccacgacauuagc

SEQ ID NO: 1388522 - RNA, 19 nt, Artificial Sequence
  Description of Artificial Sequence: Synthetic oligonucleotide
  Sense strand starting at position 2886 of SEQ ID NO: 1243011
aguuuagaagccgauacau

SEQ ID NO: 1388523 - RNA, 19 nt, Artificial Sequence
  Description of Artificial Sequence: Synthetic oligonucleotide
  Antisense strand to SEQ ID NO: 1388522
auguaucggcuucuaaacu

SEQ ID NO: 1388524 - RNA, 19 nt, Artificial Sequence
  Description of Artificial Sequence: Synthetic oligonucleotide
  Sense strand starting at position 2888 of SEQ ID NO: 1243011
uuuagaagccgauacauca

SEQ ID NO: 1388525 - RNA, 19 nt, Artificial Sequence
  Description of Artificial Sequence: Synthetic oligonucleotide
  Antisense strand to SEQ ID NO: 1388524
ugauguaucggcuucuaaa

SEQ ID NO: 1388526 - RNA, 19 nt, Artificial Sequence
  Description of Artificial Sequence: Synthetic oligonucleotide
  Sense strand starting at position 2920 of SEQ ID NO: 1243011
cugucuuaaugucuagcaa

SEQ ID NO: 1388527 - RNA, 19 nt, Artificial Sequence
  Description of Artificial Sequence: Synthetic oligonucleotide
  Antisense strand to SEQ ID NO: 1388526
uugcuagacauuaagacag

SEQ ID NO: 1388528 - RNA, 19 nt, Artificial Sequence
  Description of Artificial Sequence: Synthetic oligonucleotide
  Sense strand starting at position 2921 of SEQ ID NO: 1243011
ugucuuaaugucuagcaag

SEQ ID NO: 1388529 - RNA, 19 nt, Artificial Sequence
  Description of Artificial Sequence: Synthetic oligonucleotide
  Antisense strand to SEQ ID NO: 1388528
cuugcuagacauuaagaca

SEQ ID NO: 1388530 - RNA, 19 nt, Artificial Sequence
  Description of Artificial Sequence: Synthetic oligonucleotide
  Sense strand starting at position 3008 of SEQ ID NO: 1243011
augcuagacgagugacuuu

SEQ ID NO: 1388531 - RNA, 19 nt, Artificial Sequence
  Description of Artificial Sequence: Synthetic oligonucleotide
  Antisense strand to SEQ ID NO: 1388530
aaagucacucgucuagcau

SEQ ID NO: 1388532 - RNA, 19 nt, Artificial Sequence
  Description of Artificial Sequence: Synthetic oligonucleotide
  Sense strand starting at position 3034 of SEQ ID NO: 1243011
gcgugguugguguaaggga

SEQ ID NO: 1388533 - RNA, 19 nt, Artificial Sequence
  Description of Artificial Sequence: Synthetic oligonucleotide
  Antisense strand to SEQ ID NO: 1388532
ucccuuacaccaaccacgc

SEQ ID NO: 1388534 - RNA, 19 nt, Artificial Sequence
  Description of Artificial Sequence: Synthetic oligonucleotide
  Sense strand starting at position 3066 of SEQ ID NO: 1243011
ggaaggucggaguguaaau

SEQ ID NO: 1388535 - RNA, 19 nt, Artificial Sequence
  Description of Artificial Sequence: Synthetic oligonucleotide
  Antisense strand to SEQ ID NO: 1388534
auuuacacuccgaccuucc

SEQ ID NO: 1388536 - RNA, 19 nt, Artificial Sequence
  Description of Artificial Sequence: Synthetic oligonucleotide
  Sense strand starting at position 3094 of SEQ ID NO: 1243011
gggccuguuacuggguaua

SEQ ID NO: 1388537 - RNA, 19 nt, Artificial Sequence
  Description of Artificial Sequence: Synthetic oligonucleotide
  Antisense strand to SEQ ID NO: 1388536
uauacccaguaacaggccc

SEQ ID NO: 1388538 - RNA, 19 nt, Artificial Sequence
  Description of Artificial Sequence: Synthetic oligonucleotide
  Sense strand starting at position 3096 of SEQ ID NO: 1243011
gccuguuacuggguauaaa

SEQ ID NO: 1388539 - RNA, 19 nt, Artificial Sequence
  Description of Artificial Sequence: Synthetic oligonucleotide
  Antisense strand to SEQ ID NO: 1388538
uuuauacccaguaacaggc

SEQ ID NO: 1388540 - RNA, 19 nt, Artificial Sequence
  Description of Artificial Sequence: Synthetic oligonucleotide
  Sense strand starting at position 3097 of SEQ ID NO: 1243011
ccuguuacuggguauaaau

SEQ ID NO: 1388541 - RNA, 19 nt, Artificial Sequence
  Description of Artificial Sequence: Synthetic oligonucleotide
  Antisense strand to SEQ ID NO: 1388540
auuuauacccaguaacagg

SEQ ID NO: 1388542 - RNA, 19 nt, Artificial Sequence
  Description of Artificial Sequence: Synthetic oligonucleotide
  Sense strand starting at position 3106 of SEQ ID NO: 1243011
ggguauaaaugggccugua

SEQ ID NO: 1388543 - RNA, 19 nt, Artificial Sequence
  Description of Artificial Sequence: Synthetic oligonucleotide
  Antisense strand to SEQ ID NO: 1388542
uacaggcccauuuauaccc

SEQ ID NO: 1388544 - RNA, 19 nt, Artificial Sequence
  Description of Artificial Sequence: Synthetic oligonucleotide
  Sense strand starting at position 3131 of SEQ ID NO: 1243011
gggagcucauguucuacca

SEQ ID NO: 1388545 - RNA, 19 nt, Artificial Sequence
  Description of Artificial Sequence: Synthetic oligonucleotide
  Antisense strand to SEQ ID NO: 1388544
ugguagaacaugagcuccc

SEQ ID NO: 1388546 - RNA, 19 nt, Artificial Sequence
  Description of Artificial Sequence: Synthetic oligonucleotide
  Sense strand starting at position 3173 of SEQ ID NO: 1243011
ucgaguguggcgguguaaa

SEQ ID NO: 1388547 - RNA, 19 nt, Artificial Sequence
  Description of Artificial Sequence: Synthetic oligonucleotide
  Antisense strand to SEQ ID NO: 1388546
uuuacaccgccacacucga

SEQ ID NO: 1388548 - RNA, 19 nt, Artificial Sequence
  Description of Artificial Sequence: Synthetic oligonucleotide
  Sense strand starting at position 3293 of SEQ ID NO: 1243011
ugguguccuguugagcaaa

SEQ ID NO: 1388549 - RNA, 19 nt, Artificial Sequence
  Description of Artificial Sequence: Synthetic oligonucleotide
  Antisense strand to SEQ ID NO: 1388548
uuugcucaacaggacacca

SEQ ID NO: 1388550 - RNA, 19 nt, Artificial Sequence
  Description of Artificial Sequence: Synthetic oligonucleotide
  Sense strand starting at position 3343 of SEQ ID NO: 1243011
cucucugacugaucuagaa

SEQ ID NO: 1388551 - RNA, 19 nt, Artificial Sequence
  Description of Artificial Sequence: Synthetic oligonucleotide
  Antisense strand to SEQ ID NO: 1388550
uucuagaucagucagagag

SEQ ID NO: 1388552 - RNA, 19 nt, Artificial Sequence
  Description of Artificial Sequence: Synthetic oligonucleotide
  Sense strand starting at position 3449 of SEQ ID NO: 1243011
gcguaaguuacugcugcuu

SEQ ID NO: 1388553 - RNA, 19 nt, Artificial Sequence
  Description of Artificial Sequence: Synthetic oligonucleotide
  Antisense strand to SEQ ID NO: 1388552
aagcagcaguaacuuacgc

SEQ ID NO: 1388554 - RNA, 19 nt, Artificial Sequence
  Description of Artificial Sequence: Synthetic oligonucleotide
  Sense strand starting at position 3549 of SEQ ID NO: 1243011
augcaaucuuggcuuacca

SEQ ID NO: 1388555 - RNA, 19 nt, Artificial Sequence
  Description of Artificial Sequence: Synthetic oligonucleotide
  Antisense strand to SEQ ID NO: 1388554
ugguaagccaagauugcau

SEQ ID NO: 1388556 - RNA, 19 nt, Artificial Sequence
  Description of Artificial Sequence: Synthetic oligonucleotide
  Sense strand starting at position 3648 of SEQ ID NO: 1243011
ccagaucauuucuguauuu

SEQ ID NO: 1388557 - RNA, 19 nt, Artificial Sequence
  Description of Artificial Sequence: Synthetic oligonucleotide
  Antisense strand to SEQ ID NO: 1388556
aaauacagaaaugaucugg

SEQ ID NO: 1388558 - RNA, 19 nt, Artificial Sequence
  Description of Artificial Sequence: Synthetic oligonucleotide
  Sense strand starting at position 3687 of SEQ ID NO: 1243011
ccaaguugcccaggugagu

SEQ ID NO: 1388559 - RNA, 19 nt, Artificial Sequence
  Description of Artificial Sequence: Synthetic oligonucleotide
  Antisense strand to SEQ ID NO: 1388558
acucaccugggcaacuugg

SEQ ID NO: 1388560 - RNA, 19 nt, Artificial Sequence
  Description of Artificial Sequence: Synthetic oligonucleotide
  Sense strand starting at position 3955 of SEQ ID NO: 1243011
guuccaauccuguaauaag

SEQ ID NO: 1388561 - RNA, 19 nt, Artificial Sequence
  Description of Artificial Sequence: Synthetic oligonucleotide
  Antisense strand to SEQ ID NO: 1388560
cuuauuacaggauuggaac

SEQ ID NO: 1388562 - RNA, 19 nt, Artificial Sequence
  Description of Artificial Sequence: Synthetic oligonucleotide
  Sense strand starting at position 82 of SEQ ID NO: 1243012
augacaaauugugaaauga

SEQ ID NO: 1388563 - RNA, 19 nt, Artificial Sequence
  Description of Artificial Sequence: Synthetic oligonucleotide
  Antisense strand to SEQ ID NO: 1388562
ucauuucacaauuugucau

SEQ ID NO: 1388564 - RNA, 19 nt, Artificial Sequence
  Description of Artificial Sequence: Synthetic oligonucleotide
  Sense strand starting at position 90 of SEQ ID NO: 1243012
uugugaaaugauugcauaa

SEQ ID NO: 1388565 - RNA, 19 nt, Artificial Sequence
  Description of Artificial Sequence: Synthetic oligonucleotide
  Antisense strand to SEQ ID NO: 1388564
uuaugcaaucauuucacaa

SEQ ID NO: 1388566 - RNA, 19 nt, Artificial Sequence
  Description of Artificial Sequence: Synthetic oligonucleotide
  Sense strand starting at position 92 of SEQ ID NO: 1243012
gugaaaugauugcauaacu

SEQ ID NO: 1388567 - RNA, 19 nt, Artificial Sequence
  Description of Artificial Sequence: Synthetic oligonucleotide
  Antisense strand to SEQ ID NO: 1388566
aguuaugcaaucauuucac

SEQ ID NO: 1388568 - RNA, 19 nt, Artificial Sequence
  Description of Artificial Sequence: Synthetic oligonucleotide
  Sense strand starting at position 142 of SEQ ID NO: 1243012
ugagcuaaccuagaauucu

SEQ ID NO: 1388569 - RNA, 19 nt, Artificial Sequence
  Description of Artificial Sequence: Synthetic oligonucleotide
  Antisense strand to SEQ ID NO: 1388568
agaauucuagguuagcuca

SEQ ID NO: 1388570 - RNA, 19 nt, Artificial Sequence
  Description of Artificial Sequence: Synthetic oligonucleotide
  Sense strand starting at position 281 of SEQ ID NO: 1243012
ccuugauucugcuuucugu

SEQ ID NO: 1388571 - RNA, 19 nt, Artificial Sequence
  Description of Artificial Sequence: Synthetic oligonucleotide
  Antisense strand to SEQ ID NO: 1388570
acagaaagcagaaucaagg

SEQ ID NO: 1388572 - RNA, 19 nt, Artificial Sequence
  Description of Artificial Sequence: Synthetic oligonucleotide
  Sense strand starting at position 294 of SEQ ID NO: 1243012
uucuguucuccuuaaaggu

SEQ ID NO: 1388573 - RNA, 19 nt, Artificial Sequence
  Description of Artificial Sequence: Synthetic oligonucleotide
  Antisense strand to SEQ ID NO: 1388572
accuuuaaggagaacagaa

SEQ ID NO: 1388574 - RNA, 19 nt, Artificial Sequence
  Description of Artificial Sequence: Synthetic oligonucleotide
  Sense strand starting at position 345 of SEQ ID NO: 1243012
gcagauguuggaugccaaa

SEQ ID NO: 1388575 - RNA, 19 nt, Artificial Sequence
  Description of Artificial Sequence: Synthetic oligonucleotide
  Antisense strand to SEQ ID NO: 1388574
uuuggcauccaacaucugc

SEQ ID NO: 1388576 - RNA, 19 nt, Artificial Sequence
  Description of Artificial Sequence: Synthetic oligonucleotide
  Sense strand starting at position 348 of SEQ ID NO: 1243012
gauguuggaugccaaagaa

SEQ ID NO: 1388577 - RNA, 19 nt, Artificial Sequence
  Description of Artificial Sequence: Synthetic oligonucleotide
  Antisense strand to SEQ ID NO: 1388576
uucuuuggcauccaacauc

SEQ ID NO: 1388578 - RNA, 19 nt, Artificial Sequence
  Description of Artificial Sequence: Synthetic oligonucleotide
  Sense strand starting at position 905 of SEQ ID NO: 1243012
gcggcuguucuuucccaaa

SEQ ID NO: 1388579 - RNA, 19 nt, Artificial Sequence
  Description of Artificial Sequence: Synthetic oligonucleotide
  Antisense strand to SEQ ID NO: 1388578
uuugggaaagaacagccgc

SEQ ID NO: 1388580 - RNA, 19 nt, Artificial Sequence
  Description of Artificial Sequence: Synthetic oligonucleotide
  Sense strand starting at position 907 of SEQ ID NO: 1243012
ggcuguucuuucccaaaga

SEQ ID NO: 1388581 - RNA, 19 nt, Artificial Sequence
  Description of Artificial Sequence: Synthetic oligonucleotide
  Antisense strand to SEQ ID NO: 1388580
ucuuugggaaagaacagcc

SEQ ID NO: 1388582 - RNA, 19 nt, Artificial Sequence
  Description of Artificial Sequence: Synthetic oligonucleotide
  Sense strand starting at position 937 of SEQ ID NO: 1243012
cugguuagugcagagcuau

SEQ ID NO: 1388583 - RNA, 19 nt, Artificial Sequence
  Description of Artificial Sequence: Synthetic oligonucleotide
  Antisense strand to SEQ ID NO: 1388582
auagcucugcacuaaccag

SEQ ID NO: 1388584 - RNA, 19 nt, Artificial Sequence
  Description of Artificial Sequence: Synthetic oligonucleotide
  Sense strand starting at position 999 of SEQ ID NO: 1243012
accuguggugcuugaaaga

SEQ ID NO: 1388585 - RNA, 19 nt, Artificial Sequence
  Description of Artificial Sequence: Synthetic oligonucleotide
  Antisense strand to SEQ ID NO: 1388584
ucuuucaagcaccacaggu

SEQ ID NO: 1388586 - RNA, 19 nt, Artificial Sequence
  Description of Artificial Sequence: Synthetic oligonucleotide
  Sense strand starting at position 1022 of SEQ ID NO: 1243012
aggcuucuugccggacuga

SEQ ID NO: 1388587 - RNA, 19 nt, Artificial Sequence
  Description of Artificial Sequence: Synthetic oligonucleotide
  Antisense strand to SEQ ID NO: 1388586
ucaguccggcaagaagccu

SEQ ID NO: 1388588 - RNA, 19 nt, Artificial Sequence
  Description of Artificial Sequence: Synthetic oligonucleotide
  Sense strand starting at position 1129 of SEQ ID NO: 1243012
agaagcuccguccaaguaa

SEQ ID NO: 1388589 - RNA, 19 nt, Artificial Sequence
  Description of Artificial Sequence: Synthetic oligonucleotide
  Antisense strand to SEQ ID NO: 1388588
uuacuuggacggagcuucu

SEQ ID NO: 1388590 - RNA, 19 nt, Artificial Sequence
  Description of Artificial Sequence: Synthetic oligonucleotide
  Sense strand starting at position 1488 of SEQ ID NO: 1243012
gcuagaacuuccucaugcu

SEQ ID NO: 1388591 - RNA, 19 nt, Artificial Sequence
  Description of Artificial Sequence: Synthetic oligonucleotide
  Antisense strand to SEQ ID NO: 1388590
agcaugaggaaguucuagc

SEQ ID NO: 1388592 - RNA, 19 nt, Artificial Sequence
  Description of Artificial Sequence: Synthetic oligonucleotide
  Sense strand starting at position 1567 of SEQ ID NO: 1243012
cccaucaugccuuagaguu

SEQ ID NO: 1388593 - RNA, 19 nt, Artificial Sequence
  Description of Artificial Sequence: Synthetic oligonucleotide
  Antisense strand to SEQ ID NO: 1388592
aacucuaaggcaugauggg

SEQ ID NO: 1388594 - RNA, 19 nt, Artificial Sequence
  Description of Artificial Sequence: Synthetic oligonucleotide
  Sense strand starting at position 1764 of SEQ ID NO: 1243012
aagacagagcguuauucua

SEQ ID NO: 1388595 - RNA, 19 nt, Artificial Sequence
  Description of Artificial Sequence: Synthetic oligonucleotide
  Antisense strand to SEQ ID NO: 1388594
uagaauaacgcucugucuu

SEQ ID NO: 1388596 - RNA, 19 nt, Artificial Sequence
  Description of Artificial Sequence: Synthetic oligonucleotide
  Sense strand starting at position 1766 of SEQ ID NO: 1243012
gacagagcguuauucuaac

SEQ ID NO: 1388597 - RNA, 19 nt, Artificial Sequence
  Description of Artificial Sequence: Synthetic oligonucleotide
  Antisense strand to SEQ ID NO: 1388596
guuagaauaacgcucuguc

SEQ ID NO: 1388598 - RNA, 19 nt, Artificial Sequence
  Description of Artificial Sequence: Synthetic oligonucleotide
  Sense strand starting at position 1772 of SEQ ID NO: 1243012
gcguuauucuaacuccuca

SEQ ID NO: 1388599 - RNA, 19 nt, Artificial Sequence
  Description of Artificial Sequence: Synthetic oligonucleotide
  Antisense strand to SEQ ID NO: 1388598
ugaggaguuagaauaacgc

SEQ ID NO: 1388600 - RNA, 19 nt, Artificial Sequence
  Description of Artificial Sequence: Synthetic oligonucleotide
  Sense strand starting at position 2312 of SEQ ID NO: 1243012
gggauaacuugaggcagaa

SEQ ID NO: 1388601 - RNA, 19 nt, Artificial Sequence
  Description of Artificial Sequence: Synthetic oligonucleotide
  Antisense strand to SEQ ID NO: 1388600
uucugccucaaguuauccc

SEQ ID NO: 1388602 - RNA, 19 nt, Artificial Sequence
  Description of Artificial Sequence: Synthetic oligonucleotide
  Sense strand starting at position 2484 of SEQ ID NO: 1243012
guggcugaccgcuguaauc

SEQ ID NO: 1388603 - RNA, 19 nt, Artificial Sequence
  Description of Artificial Sequence: Synthetic oligonucleotide
  Antisense strand to SEQ ID NO: 1388602
gauuacagcggucagccac

SEQ ID NO: 1388604 - RNA, 19 nt, Artificial Sequence
  Description of Artificial Sequence: Synthetic oligonucleotide
  Sense strand starting at position 2803 of SEQ ID NO: 1243012
cuaguaggcaguuggauau

SEQ ID NO: 1388605 - RNA, 19 nt, Artificial Sequence
  Description of Artificial Sequence: Synthetic oligonucleotide
  Antisense strand to SEQ ID NO: 1388604
auauccaacugccuacuag

SEQ ID NO: 1388606 - RNA, 19 nt, Artificial Sequence
  Description of Artificial Sequence: Synthetic oligonucleotide
  Sense strand starting at position 2817 of SEQ ID NO: 1243012
gauauaugggucuggaccu

SEQ ID NO: 1388607 - RNA, 19 nt, Artificial Sequence
  Description of Artificial Sequence: Synthetic oligonucleotide
  Antisense strand to SEQ ID NO: 1388606
agguccagacccauauauc

SEQ ID NO: 1388608 - RNA, 19 nt, Artificial Sequence
  Description of Artificial Sequence: Synthetic oligonucleotide
  Sense strand starting at position 2879 of SEQ ID NO: 1243012
agcaauaggugguauuuaa

SEQ ID NO: 1388609 - RNA, 19 nt, Artificial Sequence
  Description of Artificial Sequence: Synthetic oligonucleotide
  Antisense strand to SEQ ID NO: 1388608
uuaaauaccaccuauugcu

SEQ ID NO: 1388610 - RNA, 19 nt, Artificial Sequence
  Description of Artificial Sequence: Synthetic oligonucleotide
  Sense strand starting at position 2985 of SEQ ID NO: 1243012
guguuuagagguuguauag

SEQ ID NO: 1388611 - RNA, 19 nt, Artificial Sequence
  Description of Artificial Sequence: Synthetic oligonucleotide
  Antisense strand to SEQ ID NO: 1388610
cuauacaaccucuaaacac

SEQ ID NO: 1388612 - RNA, 19 nt, Artificial Sequence
  Description of Artificial Sequence: Synthetic oligonucleotide
  Sense strand starting at position 3003 of SEQ ID NO: 1243012
gaggaagaaugugguaucu

SEQ ID NO: 1388613 - RNA, 19 nt, Artificial Sequence
  Description of Artificial Sequence: Synthetic oligonucleotide
  Antisense strand to SEQ ID NO: 1388612
agauaccacauucuuccuc

SEQ ID NO: 1388614 - RNA, 19 nt, Artificial Sequence
  Description of Artificial Sequence: Synthetic oligonucleotide
  Sense strand starting at position 3012 of SEQ ID NO: 1243012
ugugguaucuuggaauuug

SEQ ID NO: 1388615 - RNA, 19 nt, Artificial Sequence
  Description of Artificial Sequence: Synthetic oligonucleotide
  Antisense strand to SEQ ID NO: 1388614
caaauuccaagauaccaca

SEQ ID NO: 1388616 - RNA, 19 nt, Artificial Sequence
  Description of Artificial Sequence: Synthetic oligonucleotide
  Sense strand starting at position 3039 of SEQ ID NO: 1243012
uaguguaucgagcaagcaa

SEQ ID NO: 1388617 - RNA, 19 nt, Artificial Sequence
  Description of Artificial Sequence: Synthetic oligonucleotide
  Antisense strand to SEQ ID NO: 1388616
uugcuugcucgauacacua

SEQ ID NO: 1388618 - RNA, 19 nt, Artificial Sequence
  Description of Artificial Sequence: Synthetic oligonucleotide
  Sense strand starting at position 3102 of SEQ ID NO: 1243012
ugcagagugucuguuagau

SEQ ID NO: 1388619 - RNA, 19 nt, Artificial Sequence
  Description of Artificial Sequence: Synthetic oligonucleotide
  Antisense strand to SEQ ID NO: 1388618
aucuaacagacacucugca

SEQ ID NO: 1388620 - RNA, 19 nt, Artificial Sequence
  Description of Artificial Sequence: Synthetic oligonucleotide
  Sense strand starting at position 3104 of SEQ ID NO: 1243012
cagagugucuguuagauuu

SEQ ID NO: 1388621 - RNA, 19 nt, Artificial Sequence
  Description of Artificial Sequence: Synthetic oligonucleotide
  Antisense strand to SEQ ID NO: 1388620
aaaucuaacagacacucug

SEQ ID NO: 1388622 - RNA, 19 nt, Artificial Sequence
  Description of Artificial Sequence: Synthetic oligonucleotide
  Sense strand starting at position 3106 of SEQ ID NO: 1243012
gagugucuguuagauuuag

SEQ ID NO: 1388623 - RNA, 19 nt, Artificial Sequence
  Description of Artificial Sequence: Synthetic oligonucleotide
  Antisense strand to SEQ ID NO: 1388622
cuaaaucuaacagacacuc

SEQ ID NO: 1388624 - RNA, 19 nt, Artificial Sequence
  Description of Artificial Sequence: Synthetic oligonucleotide
  Sense strand starting at position 3236 of SEQ ID NO: 1243012
cagugaaaguaagaacuuu

SEQ ID NO: 1388625 - RNA, 19 nt, Artificial Sequence
  Description of Artificial Sequence: Synthetic oligonucleotide
  Antisense strand to SEQ ID NO: 1388624
aaaguucuuacuuucacug

SEQ ID NO: 1388626 - RNA, 19 nt, Artificial Sequence
  Description of Artificial Sequence: Synthetic oligonucleotide
  Sense strand starting at position 3306 of SEQ ID NO: 1243012
gcguaugaugugcagucaa

SEQ ID NO: 1388627 - RNA, 19 nt, Artificial Sequence
  Description of Artificial Sequence: Synthetic oligonucleotide
  Antisense strand to SEQ ID NO: 1388626
uugacugcacaucauacgc

SEQ ID NO: 1388628 - RNA, 19 nt, Artificial Sequence
  Description of Artificial Sequence: Synthetic oligonucleotide
  Sense strand starting at position 3348 of SEQ ID NO: 1243012
agagcaugucgguagucua

SEQ ID NO: 1388629 - RNA, 19 nt, Artificial Sequence
  Description of Artificial Sequence: Synthetic oligonucleotide
  Antisense strand to SEQ ID NO: 1388628
uagacuaccgacaugcucu

SEQ ID NO: 1388630 - RNA, 19 nt, Artificial Sequence
  Description of Artificial Sequence: Synthetic oligonucleotide
  Sense strand starting at position 3351 of SEQ ID NO: 1243012
gcaugucgguagucuaaug

SEQ ID NO: 1388631 - RNA, 19 nt, Artificial Sequence
  Description of Artificial Sequence: Synthetic oligonucleotide
  Antisense strand to SEQ ID NO: 1388630
cauuagacuaccgacaugc

SEQ ID NO: 1388632 - RNA, 19 nt, Artificial Sequence
  Description of Artificial Sequence: Synthetic oligonucleotide
  Sense strand starting at position 3435 of SEQ ID NO: 1243012
aauuuauucuguggguaau

SEQ ID NO: 1388633 - RNA, 19 nt, Artificial Sequence
  Description of Artificial Sequence: Synthetic oligonucleotide
  Antisense strand to SEQ ID NO: 1388632
auuacccacagaauaaauu

SEQ ID NO: 1388634 - RNA, 19 nt, Artificial Sequence
  Description of Artificial Sequence: Synthetic oligonucleotide
  Sense strand starting at position 3437 of SEQ ID NO: 1243012
uuuauucuguggguaauau

SEQ ID NO: 1388635 - RNA, 19 nt, Artificial Sequence
  Description of Artificial Sequence: Synthetic oligonucleotide
  Antisense strand to SEQ ID NO: 1388634
auauuacccacagaauaaa

SEQ ID NO: 1388636 - RNA, 19 nt, Artificial Sequence
  Description of Artificial Sequence: Synthetic oligonucleotide
  Sense strand starting at position 3438 of SEQ ID NO: 1243012
uuauucuguggguaauaua

SEQ ID NO: 1388637 - RNA, 19 nt, Artificial Sequence
  Description of Artificial Sequence: Synthetic oligonucleotide
  Antisense strand to SEQ ID NO: 1388636
uauauuacccacagaauaa

SEQ ID NO: 1388638 - RNA, 19 nt, Artificial Sequence
  Description of Artificial Sequence: Synthetic oligonucleotide
  Sense strand starting at position 3441 of SEQ ID NO: 1243012
uucuguggguaauauaaua

SEQ ID NO: 1388639 - RNA, 19 nt, Artificial Sequence
  Description of Artificial Sequence: Synthetic oligonucleotide
  Antisense strand to SEQ ID NO: 1388638
uauuauauuacccacagaa

SEQ ID NO: 1388640 - RNA, 19 nt, Artificial Sequence
  Description of Artificial Sequence: Synthetic oligonucleotide
  Sense strand starting at position 3780 of SEQ ID NO: 1243012
auuguacagugagaagaaa

SEQ ID NO: 1388641 - RNA, 19 nt, Artificial Sequence
  Description of Artificial Sequence: Synthetic oligonucleotide
  Antisense strand to SEQ ID NO: 1388640
uuucuucucacuguacaau

SEQ ID NO: 1388642 - RNA, 19 nt, Artificial Sequence
  Description of Artificial Sequence: Synthetic oligonucleotide
  Sense strand starting at position 182 of SEQ ID NO: 1243013
ccuuaacugugcuaaaguu

SEQ ID NO: 1388643 - RNA, 19 nt, Artificial Sequence
  Description of Artificial Sequence: Synthetic oligonucleotide
  Antisense strand to SEQ ID NO: 1388642
aacuuuagcacaguuaagg

SEQ ID NO: 1388644 - RNA, 19 nt, Artificial Sequence
  Description of Artificial Sequence: Synthetic oligonucleotide
  Sense strand starting at position 1120 of SEQ ID NO: 1243013
acggacgcaucuucuaaga

SEQ ID NO: 1388645 - RNA, 19 nt, Artificial Sequence
  Description of Artificial Sequence: Synthetic oligonucleotide
  Antisense strand to SEQ ID NO: 1388644
ucuuagaagaugcguccgu

SEQ ID NO: 1388646 - RNA, 19 nt, Artificial Sequence
  Description of Artificial Sequence: Synthetic oligonucleotide
  Sense strand starting at position 1259 of SEQ ID NO: 1243013
cguccagaaugugaaacaa

SEQ ID NO: 1388647 - RNA, 19 nt, Artificial Sequence
  Description of Artificial Sequence: Synthetic oligonucleotide
  Antisense strand to SEQ ID NO: 1388646
uuguuucacauucuggacg

SEQ ID NO: 1388648 - RNA, 19 nt, Artificial Sequence
  Description of Artificial Sequence: Synthetic oligonucleotide
  Sense strand starting at position 1455 of SEQ ID NO: 1243013
ggugaaucgacucaggauc

SEQ ID NO: 1388649 - RNA, 19 nt, Artificial Sequence
  Description of Artificial Sequence: Synthetic oligonucleotide
  Antisense strand to SEQ ID NO: 1388648
gauccugagucgauucacc

SEQ ID NO: 1388650 - RNA, 19 nt, Artificial Sequence
  Description of Artificial Sequence: Synthetic oligonucleotide
  Sense strand starting at position 1607 of SEQ ID NO: 1243013
gaagucuccuccgcacgaa

SEQ ID NO: 1388651 - RNA, 19 nt, Artificial Sequence
  Description of Artificial Sequence: Synthetic oligonucleotide
  Antisense strand to SEQ ID NO: 1388650
uucgugcggaggagacuuc

SEQ ID NO: 1388652 - RNA, 19 nt, Artificial Sequence
  Description of Artificial Sequence: Synthetic oligonucleotide
  Sense strand starting at position 1997 of SEQ ID NO: 1243013
uuaauagcguccucugagu

SEQ ID NO: 1388653 - RNA, 19 nt, Artificial Sequence
  Description of Artificial Sequence: Synthetic oligonucleotide
  Antisense strand to SEQ ID NO: 1388652
acucagaggacgcuauuaa

SEQ ID NO: 1388654 - RNA, 19 nt, Artificial Sequence
  Description of Artificial Sequence: Synthetic oligonucleotide
  Sense strand starting at position 2134 of SEQ ID NO: 1243013
gggugaucugggcacuaac

SEQ ID NO: 1388655 - RNA, 19 nt, Artificial Sequence
  Description of Artificial Sequence: Synthetic oligonucleotide
  Antisense strand to SEQ ID NO: 1388654
guuagugcccagaucaccc

SEQ ID NO: 1388656 - RNA, 19 nt, Artificial Sequence
  Description of Artificial Sequence: Synthetic oligonucleotide
  Sense strand starting at position 3030 of SEQ ID NO: 1243013
gguugugggcgcucguaau

SEQ ID NO: 1388657 - RNA, 19 nt, Artificial Sequence
  Description of Artificial Sequence: Synthetic oligonucleotide
  Antisense strand to SEQ ID NO: 1388656
auuacgagcgcccacaacc

SEQ ID NO: 1388658 - RNA, 19 nt, Artificial Sequence
  Description of Artificial Sequence: Synthetic oligonucleotide
  Sense strand starting at position 3475 of SEQ ID NO: 1243013
acuuaacagucguaauaga

SEQ ID NO: 1388659 - RNA, 19 nt, Artificial Sequence
  Description of Artificial Sequence: Synthetic oligonucleotide
  Antisense strand to SEQ ID NO: 1388658
ucuauuacgacuguuaagu

SEQ ID NO: 1388660 - RNA, 19 nt, Artificial Sequence
  Description of Artificial Sequence: Synthetic oligonucleotide
  Sense strand starting at position 3526 of SEQ ID NO: 1243013
gucauucugccagacgguu

SEQ ID NO: 1388661 - RNA, 19 nt, Artificial Sequence
  Description of Artificial Sequence: Synthetic oligonucleotide
  Antisense strand to SEQ ID NO: 1388660
aaccgucuggcagaaugac

SEQ ID NO: 1388662 - RNA, 19 nt, Artificial Sequence
  Description of Artificial Sequence: Synthetic oligonucleotide
  Sense strand starting at position 4 of SEQ ID NO: 1243014
ccaaaugugggccauauca

SEQ ID NO: 1388663 - RNA, 19 nt, Artificial Sequence
  Description of Artificial Sequence: Synthetic oligonucleotide
  Antisense strand to SEQ ID NO: 1388662
ugauauggcccacauuugg

SEQ ID NO: 1388664 - RNA, 19 nt, Artificial Sequence
  Description of Artificial Sequence: Synthetic oligonucleotide
  Sense strand starting at position 27 of SEQ ID NO: 1243014
gccugaguggccucguauc

SEQ ID NO: 1388665 - RNA, 19 nt, Artificial Sequence
  Description of Artificial Sequence: Synthetic oligonucleotide
  Antisense strand to SEQ ID NO: 1388664
gauacgaggccacucaggc

SEQ ID NO: 1388666 - RNA, 19 nt, Artificial Sequence
  Description of Artificial Sequence: Synthetic oligonucleotide
  Sense strand starting at position 66 of SEQ ID NO: 1243014
cccagagcucaacagguau

SEQ ID NO: 1388667 - RNA, 19 nt, Artificial Sequence
  Description of Artificial Sequence: Synthetic oligonucleotide
  Antisense strand to SEQ ID NO: 1388666
auaccuguugagcucuggg

SEQ ID NO: 1388668 - RNA, 19 nt, Artificial Sequence
  Description of Artificial Sequence: Synthetic oligonucleotide
  Sense strand starting at position 95 of SEQ ID NO: 1243014
agaccucuuguugaucaca

SEQ ID NO: 1388669 - RNA, 19 nt, Artificial Sequence
  Description of Artificial Sequence: Synthetic oligonucleotide
  Antisense strand to SEQ ID NO: 1388668
ugugaucaacaagaggucu

SEQ ID NO: 1388670 - RNA, 19 nt, Artificial Sequence
  Description of Artificial Sequence: Synthetic oligonucleotide
  Sense strand starting at position 97 of SEQ ID NO: 1243014
accucuuguugaucacaga

SEQ ID NO: 1388671 - RNA, 19 nt, Artificial Sequence
  Description of Artificial Sequence: Synthetic oligonucleotide
  Antisense strand to SEQ ID NO: 1388670
ucugugaucaacaagaggu

SEQ ID NO: 1388672 - RNA, 19 nt, Artificial Sequence
  Description of Artificial Sequence: Synthetic oligonucleotide
  Sense strand starting at position 98 of SEQ ID NO: 1243014
ccucuuguugaucacagaa

SEQ ID NO: 1388673 - RNA, 19 nt, Artificial Sequence
  Description of Artificial Sequence: Synthetic oligonucleotide
  Antisense strand to SEQ ID NO: 1388672
uucugugaucaacaagagg

SEQ ID NO: 1388674 - RNA, 19 nt, Artificial Sequence
  Description of Artificial Sequence: Synthetic oligonucleotide
  Sense strand starting at position 619 of SEQ ID NO: 1243014
ugguguaugaaaugaucuu

SEQ ID NO: 1388675 - RNA, 19 nt, Artificial Sequence
  Description of Artificial Sequence: Synthetic oligonucleotide
  Antisense strand to SEQ ID NO: 1388674
aagaucauuucauacacca

SEQ ID NO: 1388676 - RNA, 19 nt, Artificial Sequence
  Description of Artificial Sequence: Synthetic oligonucleotide
  Sense strand starting at position 647 of SEQ ID NO: 1243014
gucagaauauaggcuguua

SEQ ID NO: 1388677 - RNA, 19 nt, Artificial Sequence
  Description of Artificial Sequence: Synthetic oligonucleotide
  Antisense strand to SEQ ID NO: 1388676
uaacagccuauauucugac

SEQ ID NO: 1388678 - RNA, 19 nt, Artificial Sequence
  Description of Artificial Sequence: Synthetic oligonucleotide
  Sense strand starting at position 649 of SEQ ID NO: 1243014
cagaauauaggcuguuaug

SEQ ID NO: 1388679 - RNA, 19 nt, Artificial Sequence
  Description of Artificial Sequence: Synthetic oligonucleotide
  Antisense strand to SEQ ID NO: 1388678
cauaacagccuauauucug

SEQ ID NO: 1388680 - RNA, 19 nt, Artificial Sequence
  Description of Artificial Sequence: Synthetic oligonucleotide
  Sense strand starting at position 906 of SEQ ID NO: 1243014
ccugucauccuaggauucu

SEQ ID NO: 1388681 - RNA, 19 nt, Artificial Sequence
  Description of Artificial Sequence: Synthetic oligonucleotide
  Antisense strand to SEQ ID NO: 1388680
agaauccuaggaugacagg

SEQ ID NO: 1388682 - RNA, 19 nt, Artificial Sequence
  Description of Artificial Sequence: Synthetic oligonucleotide
  Sense strand starting at position 1059 of SEQ ID NO: 1243014
agcagcugugauuacagau

SEQ ID NO: 1388683 - RNA, 19 nt, Artificial Sequence
  Description of Artificial Sequence: Synthetic oligonucleotide
  Antisense strand to SEQ ID NO: 1388682
aucuguaaucacagcugcu

SEQ ID NO: 1388684 - RNA, 19 nt, Artificial Sequence
  Description of Artificial Sequence: Synthetic oligonucleotide
  Sense strand starting at position 1150 of SEQ ID NO: 1243014
uugugaacuccugaccuga

SEQ ID NO: 1388685 - RNA, 19 nt, Artificial Sequence
  Description of Artificial Sequence: Synthetic oligonucleotide
  Antisense strand to SEQ ID NO: 1388684
ucaggucaggaguucacaa

SEQ ID NO: 1388686 - RNA, 19 nt, Artificial Sequence
  Description of Artificial Sequence: Synthetic oligonucleotide
  Sense strand starting at position 1272 of SEQ ID NO: 1243014
cccugaguauucuuuaagg

SEQ ID NO: 1388687 - RNA, 19 nt, Artificial Sequence
  Description of Artificial Sequence: Synthetic oligonucleotide
  Antisense strand to SEQ ID NO: 1388686
ccuuaaagaauacucaggg

SEQ ID NO: 1388688 - RNA, 19 nt, Artificial Sequence
  Description of Artificial Sequence: Synthetic oligonucleotide
  Sense strand starting at position 1274 of SEQ ID NO: 1243014
cugaguauucuuuaaggug

SEQ ID NO: 1388689 - RNA, 19 nt, Artificial Sequence
  Description of Artificial Sequence: Synthetic oligonucleotide
  Antisense strand to SEQ ID NO: 1388688
caccuuaaagaauacucag

SEQ ID NO: 1388690 - RNA, 19 nt, Artificial Sequence
  Description of Artificial Sequence: Synthetic oligonucleotide
  Sense strand starting at position 1420 of SEQ ID NO: 1243014
acaccuagcuuucugggaa

SEQ ID NO: 1388691 - RNA, 19 nt, Artificial Sequence
  Description of Artificial Sequence: Synthetic oligonucleotide
  Antisense strand to SEQ ID NO: 1388690
uucccagaaagcuaggugu

SEQ ID NO: 1388692 - RNA, 19 nt, Artificial Sequence
  Description of Artificial Sequence: Synthetic oligonucleotide
  Sense strand starting at position 1444 of SEQ ID NO: 1243014
gguccaguucucuaaucuc

SEQ ID NO: 1388693 - RNA, 19 nt, Artificial Sequence
  Description of Artificial Sequence: Synthetic oligonucleotide
  Antisense strand to SEQ ID NO: 1388692
gagauuagagaacuggacc

SEQ ID NO: 1388694 - RNA, 19 nt, Artificial Sequence
  Description of Artificial Sequence: Synthetic oligonucleotide
  Sense strand starting at position 1470 of SEQ ID NO: 1243014
uuauuauggcaguauucca

SEQ ID NO: 1388695 - RNA, 19 nt, Artificial Sequence
  Description of Artificial Sequence: Synthetic oligonucleotide
  Antisense strand to SEQ ID NO: 1388694
uggaauacugccauaauaa

SEQ ID NO: 1388696 - RNA, 19 nt, Artificial Sequence
  Description of Artificial Sequence: Synthetic oligonucleotide
  Sense strand starting at position 2319 of SEQ ID NO: 1243014
ucucgaguugcucagacua

SEQ ID NO: 1388697 - RNA, 19 nt, Artificial Sequence
  Description of Artificial Sequence: Synthetic oligonucleotide
  Antisense strand to SEQ ID NO: 1388696
uagucugagcaacucgaga

SEQ ID NO: 1388698 - RNA, 19 nt, Artificial Sequence
  Description of Artificial Sequence: Synthetic oligonucleotide
  Sense strand starting at position 2491 of SEQ ID NO: 1243014
ggaggagcgccgagugauc

SEQ ID NO: 1388699 - RNA, 19 nt, Artificial Sequence
  Description of Artificial Sequence: Synthetic oligonucleotide
  Antisense strand to SEQ ID NO: 1388698
gaucacucggcgcuccucc

SEQ ID NO: 1388700 - RNA, 19 nt, Artificial Sequence
  Description of Artificial Sequence: Synthetic oligonucleotide
  Sense strand starting at position 2562 of SEQ ID NO: 1243014
cagaaaggcuuggcuguau

SEQ ID NO: 1388701 - RNA, 19 nt, Artificial Sequence
  Description of Artificial Sequence: Synthetic oligonucleotide
  Antisense strand to SEQ ID NO: 1388700
auacagccaagccuuucug

SEQ ID NO: 1388702 - RNA, 19 nt, Artificial Sequence
  Description of Artificial Sequence: Synthetic oligonucleotide
  Sense strand starting at position 2626 of SEQ ID NO: 1243014
agauaacaacuucguacaa

SEQ ID NO: 1388703 - RNA, 19 nt, Artificial Sequence
  Description of Artificial Sequence: Synthetic oligonucleotide
  Antisense strand to SEQ ID NO: 1388702
uuguacgaaguuguuaucu

SEQ ID NO: 1388704 - RNA, 19 nt, Artificial Sequence
  Description of Artificial Sequence: Synthetic oligonucleotide
  Sense strand starting at position 2638 of SEQ ID NO: 1243014
cguacaaggcuguuugcau

SEQ ID NO: 1388705 - RNA, 19 nt, Artificial Sequence
  Description of Artificial Sequence: Synthetic oligonucleotide
  Antisense strand to SEQ ID NO: 1388704
augcaaacagccuuguacg

SEQ ID NO: 1388706 - RNA, 19 nt, Artificial Sequence
  Description of Artificial Sequence: Synthetic oligonucleotide
  Sense strand starting at position 2714 of SEQ ID NO: 1243014
aacugaggcucagugauua

SEQ ID NO: 1388707 - RNA, 19 nt, Artificial Sequence
  Description of Artificial Sequence: Synthetic oligonucleotide
  Antisense strand to SEQ ID NO: 1388706
uaaucacugagccucaguu

SEQ ID NO: 1388708 - RNA, 19 nt, Artificial Sequence
  Description of Artificial Sequence: Synthetic oligonucleotide
  Sense strand starting at position 2718 of SEQ ID NO: 1243014
gaggcucagugauuaaagu

SEQ ID NO: 1388709 - RNA, 19 nt, Artificial Sequence
  Description of Artificial Sequence: Synthetic oligonucleotide
  Antisense strand to SEQ ID NO: 1388708
acuuuaaucacugagccuc

SEQ ID NO: 1388710 - RNA, 19 nt, Artificial Sequence
  Description of Artificial Sequence: Synthetic oligonucleotide
  Sense strand starting at position 2727 of SEQ ID NO: 1243014
ugauuaaaguggccacaua

SEQ ID NO: 1388711 - RNA, 19 nt, Artificial Sequence
  Description of Artificial Sequence: Synthetic oligonucleotide
  Antisense strand to SEQ ID NO: 1388710
uauguggccacuuuaauca

SEQ ID NO: 1388712 - RNA, 19 nt, Artificial Sequence
  Description of Artificial Sequence: Synthetic oligonucleotide
  Sense strand starting at position 2910 of SEQ ID NO: 1243014
uccuguggacuccaaguau

SEQ ID NO: 1388713 - RNA, 19 nt, Artificial Sequence
  Description of Artificial Sequence: Synthetic oligonucleotide
  Antisense strand to SEQ ID NO: 1388712
auacuuggaguccacagga

SEQ ID NO: 1388714 - RNA, 19 nt, Artificial Sequence
  Description of Artificial Sequence: Synthetic oligonucleotide
  Sense strand starting at position 2958 of SEQ ID NO: 1243014
auggaaaguuauguucgua

SEQ ID NO: 1388715 - RNA, 19 nt, Artificial Sequence
  Description of Artificial Sequence: Synthetic oligonucleotide
  Antisense strand to SEQ ID NO: 1388714
uacgaacauaacuuuccau

SEQ ID NO: 1388716 - RNA, 19 nt, Artificial Sequence
  Description of Artificial Sequence: Synthetic oligonucleotide
  Sense strand starting at position 3003 of SEQ ID NO: 1243014
aggcuugcucaggaucagu

SEQ ID NO: 1388717 - RNA, 19 nt, Artificial Sequence
  Description of Artificial Sequence: Synthetic oligonucleotide
  Antisense strand to SEQ ID NO: 1388716
acugauccugagcaagccu

SEQ ID NO: 1388718 - RNA, 19 nt, Artificial Sequence
  Description of Artificial Sequence: Synthetic oligonucleotide
  Sense strand starting at position 3071 of SEQ ID NO: 1243014
gaggaucguagcuauugua

SEQ ID NO: 1388719 - RNA, 19 nt, Artificial Sequence
  Description of Artificial Sequence: Synthetic oligonucleotide
  Antisense strand to SEQ ID NO: 1388718
uacaauagcuacgauccuc

SEQ ID NO: 1388720 - RNA, 19 nt, Artificial Sequence
  Description of Artificial Sequence: Synthetic oligonucleotide
  Sense strand starting at position 3116 of SEQ ID NO: 1243014
gaguguauuaguccgcuuu

SEQ ID NO: 1388721 - RNA, 19 nt, Artificial Sequence
  Description of Artificial Sequence: Synthetic oligonucleotide
  Antisense strand to SEQ ID NO: 1388720
aaagcggacuaauacacuc

SEQ ID NO: 1388722 - RNA, 19 nt, Artificial Sequence
  Description of Artificial Sequence: Synthetic oligonucleotide
  Sense strand starting at position 3270 of SEQ ID NO: 1243014
acgagauaaugagaaccaa

SEQ ID NO: 1388723 - RNA, 19 nt, Artificial Sequence
  Description of Artificial Sequence: Synthetic oligonucleotide
  Antisense strand to SEQ ID NO: 1388722
uugguucucauuaucucgu

SEQ ID NO: 1388724 - RNA, 19 nt, Artificial Sequence
  Description of Artificial Sequence: Synthetic oligonucleotide
  Sense strand starting at position 3555 of SEQ ID NO: 1243014
gguuuagaauccucauggu

SEQ ID NO: 1388725 - RNA, 19 nt, Artificial Sequence
  Description of Artificial Sequence: Synthetic oligonucleotide
  Antisense strand to SEQ ID NO: 1388724
accaugaggauucuaaacc

SEQ ID NO: 1388726 - RNA, 19 nt, Artificial Sequence
  Description of Artificial Sequence: Synthetic oligonucleotide
  Sense strand starting at position 3559 of SEQ ID NO: 1243014
uagaauccucaugguuaug

SEQ ID NO: 1388727 - RNA, 19 nt, Artificial Sequence
  Description of Artificial Sequence: Synthetic oligonucleotide
  Antisense strand to SEQ ID NO: 1388726
cauaaccaugaggauucua

SEQ ID NO: 1388728 - RNA, 19 nt, Artificial Sequence
  Description of Artificial Sequence: Synthetic oligonucleotide
  Sense strand starting at position 3571 of SEQ ID NO: 1243014
gguuaugugcuacacuaag

SEQ ID NO: 1388729 - RNA, 19 nt, Artificial Sequence
  Description of Artificial Sequence: Synthetic oligonucleotide
  Antisense strand to SEQ ID NO: 1388728
cuuaguguagcacauaacc

SEQ ID NO: 1388730 - RNA, 19 nt, Artificial Sequence
  Description of Artificial Sequence: Synthetic oligonucleotide
  Sense strand starting at position 3823 of SEQ ID NO: 1243014
auaagugauuaccugaacu

SEQ ID NO: 1388731 - RNA, 19 nt, Artificial Sequence
  Description of Artificial Sequence: Synthetic oligonucleotide
  Antisense strand to SEQ ID NO: 1388730
aguucagguaaucacuuau

SEQ ID NO: 1388732 - RNA, 19 nt, Artificial Sequence
  Description of Artificial Sequence: Synthetic oligonucleotide
  Sense strand starting at position 3875 of SEQ ID NO: 1243014
ggucaaccacuuugguuaa

SEQ ID NO: 1388733 - RNA, 19 nt, Artificial Sequence
  Description of Artificial Sequence: Synthetic oligonucleotide
  Antisense strand to SEQ ID NO: 1388732
uuaaccaaagugguugacc

SEQ ID NO: 1388734 - RNA, 19 nt, Artificial Sequence
  Description of Artificial Sequence: Synthetic oligonucleotide
  Sense strand starting at position 3877 of SEQ ID NO: 1243014
ucaaccacuuugguuaaga

SEQ ID NO: 1388735 - RNA, 19 nt, Artificial Sequence
  Description of Artificial Sequence: Synthetic oligonucleotide
  Antisense strand to SEQ ID NO: 1388734
ucuuaaccaaagugguuga

SEQ ID NO: 1388736 - RNA, 19 nt, Artificial Sequence
  Description of Artificial Sequence: Synthetic oligonucleotide
  Sense strand starting at position 3973 of SEQ ID NO: 1243014
cuggccucagguugauaua

SEQ ID NO: 1388737 - RNA, 19 nt, Artificial Sequence
  Description of Artificial Sequence: Synthetic oligonucleotide
  Antisense strand to SEQ ID NO: 1388736
uauaucaaccugaggccag

SEQ ID NO: 1388738 - RNA, 19 nt, Artificial Sequence
  Description of Artificial Sequence: Synthetic oligonucleotide
  Sense strand starting at position 3974 of SEQ ID NO: 1243014
uggccucagguugauauau

SEQ ID NO: 1388739 - RNA, 19 nt, Artificial Sequence
  Description of Artificial Sequence: Synthetic oligonucleotide
  Antisense strand to SEQ ID NO: 1388738
auauaucaaccugaggcca

SEQ ID NO: 1388740 - RNA, 19 nt, Artificial Sequence
  Description of Artificial Sequence: Synthetic oligonucleotide
  Sense strand starting at position 3983 of SEQ ID NO: 1243014
guugauauauucucugauc

SEQ ID NO: 1388741 - RNA, 19 nt, Artificial Sequence
  Description of Artificial Sequence: Synthetic oligonucleotide
  Antisense strand to SEQ ID NO: 1388740
gaucagagaauauaucaac

SEQ ID NO: 1388742 - RNA, 19 nt, Artificial Sequence
  Description of Artificial Sequence: Synthetic oligonucleotide
  Sense strand starting at position 130 of SEQ ID NO: 1243015
ugguguaugaaaugaucuu

SEQ ID NO: 1388743 - RNA, 19 nt, Artificial Sequence
  Description of Artificial Sequence: Synthetic oligonucleotide
  Antisense strand to SEQ ID NO: 1388742
aagaucauuucauacacca

SEQ ID NO: 1388744 - RNA, 19 nt, Artificial Sequence
  Description of Artificial Sequence: Synthetic oligonucleotide
  Sense strand starting at position 158 of SEQ ID NO: 1243015
gucagaauauaggcuguua

SEQ ID NO: 1388745 - RNA, 19 nt, Artificial Sequence
  Description of Artificial Sequence: Synthetic oligonucleotide
  Antisense strand to SEQ ID NO: 1388744
uaacagccuauauucugac

SEQ ID NO: 1388746 - RNA, 19 nt, Artificial Sequence
  Description of Artificial Sequence: Synthetic oligonucleotide
  Sense strand starting at position 160 of SEQ ID NO: 1243015
cagaauauaggcuguuaug

SEQ ID NO: 1388747 - RNA, 19 nt, Artificial Sequence
  Description of Artificial Sequence: Synthetic oligonucleotide
  Antisense strand to SEQ ID NO: 1388746
cauaacagccuauauucug

SEQ ID NO: 1388748 - RNA, 19 nt, Artificial Sequence
  Description of Artificial Sequence: Synthetic oligonucleotide
  Sense strand starting at position 417 of SEQ ID NO: 1243015
ccugucauccuaggauucu

SEQ ID NO: 1388749 - RNA, 19 nt, Artificial Sequence
  Description of Artificial Sequence: Synthetic oligonucleotide
  Antisense strand to SEQ ID NO: 1388748
agaauccuaggaugacagg

SEQ ID NO: 1388750 - RNA, 19 nt, Artificial Sequence
  Description of Artificial Sequence: Synthetic oligonucleotide
  Sense strand starting at position 570 of SEQ ID NO: 1243015
agcagcugugauuacagau

SEQ ID NO: 1388751 - RNA, 19 nt, Artificial Sequence
  Description of Artificial Sequence: Synthetic oligonucleotide
  Antisense strand to SEQ ID NO: 1388750
aucuguaaucacagcugcu

SEQ ID NO: 1388752 - RNA, 19 nt, Artificial Sequence
  Description of Artificial Sequence: Synthetic oligonucleotide
  Sense strand starting at position 661 of SEQ ID NO: 1243015
uugugaacuccugaccuga

SEQ ID NO: 1388753 - RNA, 19 nt, Artificial Sequence
  Description of Artificial Sequence: Synthetic oligonucleotide
  Antisense strand to SEQ ID NO: 1388752
ucaggucaggaguucacaa

SEQ ID NO: 1388754 - RNA, 19 nt, Artificial Sequence
  Description of Artificial Sequence: Synthetic oligonucleotide
  Sense strand starting at position 783 of SEQ ID NO: 1243015
cccugaguauucuuuaagg

SEQ ID NO: 1388755 - RNA, 19 nt, Artificial Sequence
  Description of Artificial Sequence: Synthetic oligonucleotide
  Antisense strand to SEQ ID NO: 1388754
ccuuaaagaauacucaggg

SEQ ID NO: 1388756 - RNA, 19 nt, Artificial Sequence
  Description of Artificial Sequence: Synthetic oligonucleotide
  Sense strand starting at position 785 of SEQ ID NO: 1243015
cugaguauucuuuaaggug

SEQ ID NO: 1388757 - RNA, 19 nt, Artificial Sequence
  Description of Artificial Sequence: Synthetic oligonucleotide
  Antisense strand to SEQ ID NO: 1388756
caccuuaaagaauacucag

SEQ ID NO: 1388758 - RNA, 19 nt, Artificial Sequence
  Description of Artificial Sequence: Synthetic oligonucleotide
  Sense strand starting at position 823 of SEQ ID NO: 1243015
ccgagagccucacugugau

SEQ ID NO: 1388759 - RNA, 19 nt, Artificial Sequence
  Description of Artificial Sequence: Synthetic oligonucleotide
  Antisense strand to SEQ ID NO: 1388758
aucacagugaggcucucgg

SEQ ID NO: 1388760 - RNA, 19 nt, Artificial Sequence
  Description of Artificial Sequence: Synthetic oligonucleotide
  Sense strand starting at position 931 of SEQ ID NO: 1243015
acaccuagcuuucugggaa

SEQ ID NO: 1388761 - RNA, 19 nt, Artificial Sequence
  Description of Artificial Sequence: Synthetic oligonucleotide
  Antisense strand to SEQ ID NO: 1388760
uucccagaaagcuaggugu

SEQ ID NO: 1388762 - RNA, 19 nt, Artificial Sequence
  Description of Artificial Sequence: Synthetic oligonucleotide
  Sense strand starting at position 955 of SEQ ID NO: 1243015
gguccaguucucuaaucuc

SEQ ID NO: 1388763 - RNA, 19 nt, Artificial Sequence
  Description of Artificial Sequence: Synthetic oligonucleotide
  Antisense strand to SEQ ID NO: 1388762
gagauuagagaacuggacc

SEQ ID NO: 1388764 - RNA, 19 nt, Artificial Sequence
  Description of Artificial Sequence: Synthetic oligonucleotide
  Sense strand starting at position 981 of SEQ ID NO: 1243015
uuauuauggcaguauucca

SEQ ID NO: 1388765 - RNA, 19 nt, Artificial Sequence
  Description of Artificial Sequence: Synthetic oligonucleotide
  Antisense strand to SEQ ID NO: 1388764
uggaauacugccauaauaa

SEQ ID NO: 1388766 - RNA, 19 nt, Artificial Sequence
  Description of Artificial Sequence: Synthetic oligonucleotide
  Sense strand starting at position 1624 of SEQ ID NO: 1243015
gcggaaccuuucccuuuau

SEQ ID NO: 1388767 - RNA, 19 nt, Artificial Sequence
  Description of Artificial Sequence: Synthetic oligonucleotide
  Antisense strand to SEQ ID NO: 1388766
auaaagggaaagguuccgc

SEQ ID NO: 1388768 - RNA, 19 nt, Artificial Sequence
  Description of Artificial Sequence: Synthetic oligonucleotide
  Sense strand starting at position 1830 of SEQ ID NO: 1243015
ucucgaguugcucagacua

SEQ ID NO: 1388769 - RNA, 19 nt, Artificial Sequence
  Description of Artificial Sequence: Synthetic oligonucleotide
  Antisense strand to SEQ ID NO: 1388768
uagucugagcaacucgaga

SEQ ID NO: 1388770 - RNA, 19 nt, Artificial Sequence
  Description of Artificial Sequence: Synthetic oligonucleotide
  Sense strand starting at position 2002 of SEQ ID NO: 1243015
ggaggagcgccgagugauc

SEQ ID NO: 1388771 - RNA, 19 nt, Artificial Sequence
  Description of Artificial Sequence: Synthetic oligonucleotide
  Antisense strand to SEQ ID NO: 1388770
gaucacucggcgcuccucc

SEQ ID NO: 1388772 - RNA, 19 nt, Artificial Sequence
  Description of Artificial Sequence: Synthetic oligonucleotide
  Sense strand starting at position 2073 of SEQ ID NO: 1243015
cagaaaggcuuggcuguau

SEQ ID NO: 1388773 - RNA, 19 nt, Artificial Sequence
  Description of Artificial Sequence: Synthetic oligonucleotide
  Antisense strand to SEQ ID NO: 1388772
auacagccaagccuuucug

SEQ ID NO: 1388774 - RNA, 19 nt, Artificial Sequence
  Description of Artificial Sequence: Synthetic oligonucleotide
  Sense strand starting at position 2137 of SEQ ID NO: 1243015
agauaacaacuucguacaa

SEQ ID NO: 1388775 - RNA, 19 nt, Artificial Sequence
  Description of Artificial Sequence: Synthetic oligonucleotide
  Antisense strand to SEQ ID NO: 1388774
uuguacgaaguuguuaucu

SEQ ID NO: 1388776 - RNA, 19 nt, Artificial Sequence
  Description of Artificial Sequence: Synthetic oligonucleotide
  Sense strand starting at position 2149 of SEQ ID NO: 1243015
cguacaaggcuguuugcau

SEQ ID NO: 1388777 - RNA, 19 nt, Artificial Sequence
  Description of Artificial Sequence: Synthetic oligonucleotide
  Antisense strand to SEQ ID NO: 1388776
augcaaacagccuuguacg

SEQ ID NO: 1388778 - RNA, 19 nt, Artificial Sequence
  Description of Artificial Sequence: Synthetic oligonucleotide
  Sense strand starting at position 2225 of SEQ ID NO: 1243015
aacugaggcucagugauua

SEQ ID NO: 1388779 - RNA, 19 nt, Artificial Sequence
  Description of Artificial Sequence: Synthetic oligonucleotide
  Antisense strand to SEQ ID NO: 1388778
uaaucacugagccucaguu

SEQ ID NO: 1388780 - RNA, 19 nt, Artificial Sequence
  Description of Artificial Sequence: Synthetic oligonucleotide
  Sense strand starting at position 2229 of SEQ ID NO: 1243015
gaggcucagugauuaaagu

SEQ ID NO: 1388781 - RNA, 19 nt, Artificial Sequence
  Description of Artificial Sequence: Synthetic oligonucleotide
  Antisense strand to SEQ ID NO: 1388780
acuuuaaucacugagccuc

SEQ ID NO: 1388782 - RNA, 19 nt, Artificial Sequence
  Description of Artificial Sequence: Synthetic oligonucleotide
  Sense strand starting at position 2238 of SEQ ID NO: 1243015
ugauuaaaguggccacaua

SEQ ID NO: 1388783 - RNA, 19 nt, Artificial Sequence
  Description of Artificial Sequence: Synthetic oligonucleotide
  Antisense strand to SEQ ID NO: 1388782
uauguggccacuuuaauca

SEQ ID NO: 1388784 - RNA, 19 nt, Artificial Sequence
  Description of Artificial Sequence: Synthetic oligonucleotide
  Sense strand starting at position 2421 of SEQ ID NO: 1243015
uccuguggacuccaaguau

SEQ ID NO: 1388785 - RNA, 19 nt, Artificial Sequence
  Description of Artificial Sequence: Synthetic oligonucleotide
  Antisense strand to SEQ ID NO: 1388784
auacuuggaguccacagga

SEQ ID NO: 1388786 - RNA, 19 nt, Artificial Sequence
  Description of Artificial Sequence: Synthetic oligonucleotide
  Sense strand starting at position 2469 of SEQ ID NO: 1243015
auggaaaguuauguucgua

SEQ ID NO: 1388787 - RNA, 19 nt, Artificial Sequence
  Description of Artificial Sequence: Synthetic oligonucleotide
  Antisense strand to SEQ ID NO: 1388786
uacgaacauaacuuuccau

SEQ ID NO: 1388788 - RNA, 19 nt, Artificial Sequence
  Description of Artificial Sequence: Synthetic oligonucleotide
  Sense strand starting at position 2472 of SEQ ID NO: 1243015
gaaaguuauguucguacug

SEQ ID NO: 1388789 - RNA, 19 nt, Artificial Sequence
  Description of Artificial Sequence: Synthetic oligonucleotide
  Antisense strand to SEQ ID NO: 1388788
caguacgaacauaacuuuc

SEQ ID NO: 1388790 - RNA, 19 nt, Artificial Sequence
  Description of Artificial Sequence: Synthetic oligonucleotide
  Sense strand starting at position 2473 of SEQ ID NO: 1243015
aaaguuauguucguacuga

SEQ ID NO: 1388791 - RNA, 19 nt, Artificial Sequence
  Description of Artificial Sequence: Synthetic oligonucleotide
  Antisense strand to SEQ ID NO: 1388790
ucaguacgaacauaacuuu

SEQ ID NO: 1388792 - RNA, 19 nt, Artificial Sequence
  Description of Artificial Sequence: Synthetic oligonucleotide
  Sense strand starting at position 2514 of SEQ ID NO: 1243015
aggcuugcucaggaucagu

SEQ ID NO: 1388793 - RNA, 19 nt, Artificial Sequence
  Description of Artificial Sequence: Synthetic oligonucleotide
  Antisense strand to SEQ ID NO: 1388792
acugauccugagcaagccu

SEQ ID NO: 1388794 - RNA, 19 nt, Artificial Sequence
  Description of Artificial Sequence: Synthetic oligonucleotide
  Sense strand starting at position 2582 of SEQ ID NO: 1243015
gaggaucguagcuauugua

SEQ ID NO: 1388795 - RNA, 19 nt, Artificial Sequence
  Description of Artificial Sequence: Synthetic oligonucleotide
  Antisense strand to SEQ ID NO: 1388794
uacaauagcuacgauccuc

SEQ ID NO: 1388796 - RNA, 19 nt, Artificial Sequence
  Description of Artificial Sequence: Synthetic oligonucleotide
  Sense strand starting at position 2627 of SEQ ID NO: 1243015
gaguguauuaguccgcuuu

SEQ ID NO: 1388797 - RNA, 19 nt, Artificial Sequence
  Description of Artificial Sequence: Synthetic oligonucleotide
  Antisense strand to SEQ ID NO: 1388796
aaagcggacuaauacacuc

SEQ ID NO: 1388798 - RNA, 19 nt, Artificial Sequence
  Description of Artificial Sequence: Synthetic oligonucleotide
  Sense strand starting at position 2781 of SEQ ID NO: 1243015
acgagauaaugagaaccaa

SEQ ID NO: 1388799 - RNA, 19 nt, Artificial Sequence
  Description of Artificial Sequence: Synthetic oligonucleotide
  Antisense strand to SEQ ID NO: 1388798
uugguucucauuaucucgu

SEQ ID NO: 1388800 - RNA, 19 nt, Artificial Sequence
  Description of Artificial Sequence: Synthetic oligonucleotide
  Sense strand starting at position 3036 of SEQ ID NO: 1243015
ggaugcugguguuugaacu

SEQ ID NO: 1388801 - RNA, 19 nt, Artificial Sequence
  Description of Artificial Sequence: Synthetic oligonucleotide
  Antisense strand to SEQ ID NO: 1388800
aguucaaacaccagcaucc

SEQ ID NO: 1388802 - RNA, 19 nt, Artificial Sequence
  Description of Artificial Sequence: Synthetic oligonucleotide
  Sense strand starting at position 3066 of SEQ ID NO: 1243015
gguuuagaauccucauggu

SEQ ID NO: 1388803 - RNA, 19 nt, Artificial Sequence
  Description of Artificial Sequence: Synthetic oligonucleotide
  Antisense strand to SEQ ID NO: 1388802
accaugaggauucuaaacc

SEQ ID NO: 1388804 - RNA, 19 nt, Artificial Sequence
  Description of Artificial Sequence: Synthetic oligonucleotide
  Sense strand starting at position 3070 of SEQ ID NO: 1243015
uagaauccucaugguuaug

SEQ ID NO: 1388805 - RNA, 19 nt, Artificial Sequence
  Description of Artificial Sequence: Synthetic oligonucleotide
  Antisense strand to SEQ ID NO: 1388804
cauaaccaugaggauucua

SEQ ID NO: 1388806 - RNA, 19 nt, Artificial Sequence
  Description of Artificial Sequence: Synthetic oligonucleotide
  Sense strand starting at position 3082 of SEQ ID NO: 1243015
gguuaugugcuacacuaag

SEQ ID NO: 1388807 - RNA, 19 nt, Artificial Sequence
  Description of Artificial Sequence: Synthetic oligonucleotide
  Antisense strand to SEQ ID NO: 1388806
cuuaguguagcacauaacc

SEQ ID NO: 1388808 - RNA, 19 nt, Artificial Sequence
  Description of Artificial Sequence: Synthetic oligonucleotide
  Sense strand starting at position 3272 of SEQ ID NO: 1243015
auuguuuaccugugagagc

SEQ ID NO: 1388809 - RNA, 19 nt, Artificial Sequence
  Description of Artificial Sequence: Synthetic oligonucleotide
  Antisense strand to SEQ ID NO: 1388808
gcucucacagguaaacaau

SEQ ID NO: 1388810 - RNA, 19 nt, Artificial Sequence
  Description of Artificial Sequence: Synthetic oligonucleotide
  Sense strand starting at position 3334 of SEQ ID NO: 1243015
auaagugauuaccugaacu

SEQ ID NO: 1388811 - RNA, 19 nt, Artificial Sequence
  Description of Artificial Sequence: Synthetic oligonucleotide
  Antisense strand to SEQ ID NO: 1388810
aguucagguaaucacuuau

SEQ ID NO: 1388812 - RNA, 19 nt, Artificial Sequence
  Description of Artificial Sequence: Synthetic oligonucleotide
  Sense strand starting at position 3386 of SEQ ID NO: 1243015
ggucaaccacuuugguuaa

SEQ ID NO: 1388813 - RNA, 19 nt, Artificial Sequence
  Description of Artificial Sequence: Synthetic oligonucleotide
  Antisense strand to SEQ ID NO: 1388812
uuaaccaaagugguugacc

SEQ ID NO: 1388814 - RNA, 19 nt, Artificial Sequence
  Description of Artificial Sequence: Synthetic oligonucleotide
  Sense strand starting at position 3388 of SEQ ID NO: 1243015
ucaaccacuuugguuaaga

SEQ ID NO: 1388815 - RNA, 19 nt, Artificial Sequence
  Description of Artificial Sequence: Synthetic oligonucleotide
  Antisense strand to SEQ ID NO: 1388814
ucuuaaccaaagugguuga

SEQ ID NO: 1388816 - RNA, 19 nt, Artificial Sequence
  Description of Artificial Sequence: Synthetic oligonucleotide
  Sense strand starting at position 3484 of SEQ ID NO: 1243015
cuggccucagguugauaua

SEQ ID NO: 1388817 - RNA, 19 nt, Artificial Sequence
  Description of Artificial Sequence: Synthetic oligonucleotide
  Antisense strand to SEQ ID NO: 1388816
uauaucaaccugaggccag

SEQ ID NO: 1388818 - RNA, 19 nt, Artificial Sequence
  Description of Artificial Sequence: Synthetic oligonucleotide
  Sense strand starting at position 3485 of SEQ ID NO: 1243015
uggccucagguugauauau

SEQ ID NO: 1388819 - RNA, 19 nt, Artificial Sequence
  Description of Artificial Sequence: Synthetic oligonucleotide
  Antisense strand to SEQ ID NO: 1388818
auauaucaaccugaggcca

SEQ ID NO: 1388820 - RNA, 19 nt, Artificial Sequence
  Description of Artificial Sequence: Synthetic oligonucleotide
  Sense strand starting at position 3494 of SEQ ID NO: 1243015
guugauauauucucugauc

SEQ ID NO: 1388821 - RNA, 19 nt, Artificial Sequence
  Description of Artificial Sequence: Synthetic oligonucleotide
  Antisense strand to SEQ ID NO: 1388820
gaucagagaauauaucaac

SEQ ID NO: 1388822 - RNA, 19 nt, Artificial Sequence
  Description of Artificial Sequence: Synthetic oligonucleotide
  Sense strand starting at position 120 of SEQ ID NO: 1243016
cacuauugggagugguuaa

SEQ ID NO: 1388823 - RNA, 19 nt, Artificial Sequence
  Description of Artificial Sequence: Synthetic oligonucleotide
  Antisense strand to SEQ ID NO: 1388822
uuaaccacucccaauagug

SEQ ID NO: 1388824 - RNA, 19 nt, Artificial Sequence
  Description of Artificial Sequence: Synthetic oligonucleotide
  Sense strand starting at position 121 of SEQ ID NO: 1243016
acuauugggagugguuaau

SEQ ID NO: 1388825 - RNA, 19 nt, Artificial Sequence
  Description of Artificial Sequence: Synthetic oligonucleotide
  Antisense strand to SEQ ID NO: 1388824
auuaaccacucccaauagu

SEQ ID NO: 1388826 - RNA, 19 nt, Artificial Sequence
  Description of Artificial Sequence: Synthetic oligonucleotide
  Sense strand starting at position 148 of SEQ ID NO: 1243016
ggauuuaacugcuaccacu

SEQ ID NO: 1388827 - RNA, 19 nt, Artificial Sequence
  Description of Artificial Sequence: Synthetic oligonucleotide
  Antisense strand to SEQ ID NO: 1388826
agugguagcaguuaaaucc

SEQ ID NO: 1388828 - RNA, 19 nt, Artificial Sequence
  Description of Artificial Sequence: Synthetic oligonucleotide
  Sense strand starting at position 179 of SEQ ID NO: 1243016
cgauucuugucuuuccuau

SEQ ID NO: 1388829 - RNA, 19 nt, Artificial Sequence
  Description of Artificial Sequence: Synthetic oligonucleotide
  Antisense strand to SEQ ID NO: 1388828
auaggaaagacaagaaucg

SEQ ID NO: 1388830 - RNA, 19 nt, Artificial Sequence
  Description of Artificial Sequence: Synthetic oligonucleotide
  Sense strand starting at position 238 of SEQ ID NO: 1243016
aucguaagaaucugugaua

SEQ ID NO: 1388831 - RNA, 19 nt, Artificial Sequence
  Description of Artificial Sequence: Synthetic oligonucleotide
  Antisense strand to SEQ ID NO: 1388830
uaucacagauucuuacgau

SEQ ID NO: 1388832 - RNA, 19 nt, Artificial Sequence
  Description of Artificial Sequence: Synthetic oligonucleotide
  Sense strand starting at position 239 of SEQ ID NO: 1243016
ucguaagaaucugugauau

SEQ ID NO: 1388833 - RNA, 19 nt, Artificial Sequence
  Description of Artificial Sequence: Synthetic oligonucleotide
  Antisense strand to SEQ ID NO: 1388832
auaucacagauucuuacga

SEQ ID NO: 1388834 - RNA, 19 nt, Artificial Sequence
  Description of Artificial Sequence: Synthetic oligonucleotide
  Sense strand starting at position 307 of SEQ ID NO: 1243016
uccugaaagugagcuaaca

SEQ ID NO: 1388835 - RNA, 19 nt, Artificial Sequence
  Description of Artificial Sequence: Synthetic oligonucleotide
  Antisense strand to SEQ ID NO: 1388834
uguuagcucacuuucagga

SEQ ID NO: 1388836 - RNA, 19 nt, Artificial Sequence
  Description of Artificial Sequence: Synthetic oligonucleotide
  Sense strand starting at position 489 of SEQ ID NO: 1243016
gcaauaauccugugaaaua

SEQ ID NO: 1388837 - RNA, 19 nt, Artificial Sequence
  Description of Artificial Sequence: Synthetic oligonucleotide
  Antisense strand to SEQ ID NO: 1388836
uauuucacaggauuauugc

SEQ ID NO: 1388838 - RNA, 19 nt, Artificial Sequence
  Description of Artificial Sequence: Synthetic oligonucleotide
  Sense strand starting at position 513 of SEQ ID NO: 1243016
gggagaaauuagcuacauu

SEQ ID NO: 1388839 - RNA, 19 nt, Artificial Sequence
  Description of Artificial Sequence: Synthetic oligonucleotide
  Antisense strand to SEQ ID NO: 1388838
aauguagcuaauuucuccc

SEQ ID NO: 1388840 - RNA, 19 nt, Artificial Sequence
  Description of Artificial Sequence: Synthetic oligonucleotide
  Sense strand starting at position 571 of SEQ ID NO: 1243016
gcgagccugacacaagauu

SEQ ID NO: 1388841 - RNA, 19 nt, Artificial Sequence
  Description of Artificial Sequence: Synthetic oligonucleotide
  Antisense strand to SEQ ID NO: 1388840
aaucuugugucaggcucgc

SEQ ID NO: 1388842 - RNA, 19 nt, Artificial Sequence
  Description of Artificial Sequence: Synthetic oligonucleotide
  Sense strand starting at position 734 of SEQ ID NO: 1243016
uucuguuugacuugagcga

SEQ ID NO: 1388843 - RNA, 19 nt, Artificial Sequence
  Description of Artificial Sequence: Synthetic oligonucleotide
  Antisense strand to SEQ ID NO: 1388842
ucgcucaagucaaacagaa

SEQ ID NO: 1388844 - RNA, 19 nt, Artificial Sequence
  Description of Artificial Sequence: Synthetic oligonucleotide
  Sense strand starting at position 943 of SEQ ID NO: 1243016
cguuguuuggauuacauga

SEQ ID NO: 1388845 - RNA, 19 nt, Artificial Sequence
  Description of Artificial Sequence: Synthetic oligonucleotide
  Antisense strand to SEQ ID NO: 1388844
ucauguaauccaaacaacg

SEQ ID NO: 1388846 - RNA, 19 nt, Artificial Sequence
  Description of Artificial Sequence: Synthetic oligonucleotide
  Sense strand starting at position 973 of SEQ ID NO: 1243016
gggaacauuuagcaaaugu

SEQ ID NO: 1388847 - RNA, 19 nt, Artificial Sequence
  Description of Artificial Sequence: Synthetic oligonucleotide
  Antisense strand to SEQ ID NO: 1388846
acauuugcuaaauguuccc

SEQ ID NO: 1388848 - RNA, 19 nt, Artificial Sequence
  Description of Artificial Sequence: Synthetic oligonucleotide
  Sense strand starting at position 983 of SEQ ID NO: 1243016
agcaaauguuguuuccuua

SEQ ID NO: 1388849 - RNA, 19 nt, Artificial Sequence
  Description of Artificial Sequence: Synthetic oligonucleotide
  Antisense strand to SEQ ID NO: 1388848
uaaggaaacaacauuugcu

SEQ ID NO: 1388850 - RNA, 19 nt, Artificial Sequence
  Description of Artificial Sequence: Synthetic oligonucleotide
  Sense strand starting at position 1208 of SEQ ID NO: 1243016
auaacuguugaacgaauaa

SEQ ID NO: 1388851 - RNA, 19 nt, Artificial Sequence
  Description of Artificial Sequence: Synthetic oligonucleotide
  Antisense strand to SEQ ID NO: 1388850
uuauucguucaacaguuau

SEQ ID NO: 1388852 - RNA, 19 nt, Artificial Sequence
  Description of Artificial Sequence: Synthetic oligonucleotide
  Sense strand starting at position 1257 of SEQ ID NO: 1243016
ucaauacaccgauaugcaa

SEQ ID NO: 1388853 - RNA, 19 nt, Artificial Sequence
  Description of Artificial Sequence: Synthetic oligonucleotide
  Antisense strand to SEQ ID NO: 1388852
uugcauaucgguguauuga

SEQ ID NO: 1388854 - RNA, 19 nt, Artificial Sequence
  Description of Artificial Sequence: Synthetic oligonucleotide
  Sense strand starting at position 1326 of SEQ ID NO: 1243016
uggacagcucuugguaaua

SEQ ID NO: 1388855 - RNA, 19 nt, Artificial Sequence
  Description of Artificial Sequence: Synthetic oligonucleotide
  Antisense strand to SEQ ID NO: 1388854
uauuaccaagagcugucca

SEQ ID NO: 1388856 - RNA, 19 nt, Artificial Sequence
  Description of Artificial Sequence: Synthetic oligonucleotide
  Sense strand starting at position 1336 of SEQ ID NO: 1243016
uugguaauaccggaaaggu

SEQ ID NO: 1388857 - RNA, 19 nt, Artificial Sequence
  Description of Artificial Sequence: Synthetic oligonucleotide
  Antisense strand to SEQ ID NO: 1388856
accuuuccgguauuaccaa

SEQ ID NO: 1388858 - RNA, 19 nt, Artificial Sequence
  Description of Artificial Sequence: Synthetic oligonucleotide
  Sense strand starting at position 1345 of SEQ ID NO: 1243016
ccggaaaggugcuugagaa

SEQ ID NO: 1388859 - RNA, 19 nt, Artificial Sequence
  Description of Artificial Sequence: Synthetic oligonucleotide
  Antisense strand to SEQ ID NO: 1388858
uucucaagcaccuuuccgg

SEQ ID NO: 1388860 - RNA, 19 nt, Artificial Sequence
  Description of Artificial Sequence: Synthetic oligonucleotide
  Sense strand starting at position 1346 of SEQ ID NO: 1243016
cggaaaggugcuugagaaa

SEQ ID NO: 1388861 - RNA, 19 nt, Artificial Sequence
  Description of Artificial Sequence: Synthetic oligonucleotide
  Antisense strand to SEQ ID NO: 1388860
uuucucaagcaccuuuccg

SEQ ID NO: 1388862 - RNA, 19 nt, Artificial Sequence
  Description of Artificial Sequence: Synthetic oligonucleotide
  Sense strand starting at position 1379 of SEQ ID NO: 1243016
ucacgaggucgcguuacaa

SEQ ID NO: 1388863 - RNA, 19 nt, Artificial Sequence
  Description of Artificial Sequence: Synthetic oligonucleotide
  Antisense strand to SEQ ID NO: 1388862
uuguaacgcgaccucguga

SEQ ID NO: 1388864 - RNA, 19 nt, Artificial Sequence
  Description of Artificial Sequence: Synthetic oligonucleotide
  Sense strand starting at position 1830 of SEQ ID NO: 1243016
gcaggacugucugcaaacu

SEQ ID NO: 1388865 - RNA, 19 nt, Artificial Sequence
  Description of Artificial Sequence: Synthetic oligonucleotide
  Antisense strand to SEQ ID NO: 1388864
aguuugcagacaguccugc

SEQ ID NO: 1388866 - RNA, 19 nt, Artificial Sequence
  Description of Artificial Sequence: Synthetic oligonucleotide
  Sense strand starting at position 2845 of SEQ ID NO: 1243016
ucacguuucccuggaauaa

SEQ ID NO: 1388867 - RNA, 19 nt, Artificial Sequence
  Description of Artificial Sequence: Synthetic oligonucleotide
  Antisense strand to SEQ ID NO: 1388866
uuauuccagggaaacguga

SEQ ID NO: 1388868 - RNA, 19 nt, Artificial Sequence
  Description of Artificial Sequence: Synthetic oligonucleotide
  Sense strand starting at position 2846 of SEQ ID NO: 1243016
cacguuucccuggaauaaa

SEQ ID NO: 1388869 - RNA, 19 nt, Artificial Sequence
  Description of Artificial Sequence: Synthetic oligonucleotide
  Antisense strand to SEQ ID NO: 1388868
uuuauuccagggaaacgug

SEQ ID NO: 1388870 - RNA, 19 nt, Artificial Sequence
  Description of Artificial Sequence: Synthetic oligonucleotide
  Sense strand starting at position 2949 of SEQ ID NO: 1243016
agcacauauuguguaaguu

SEQ ID NO: 1388871 - RNA, 19 nt, Artificial Sequence
  Description of Artificial Sequence: Synthetic oligonucleotide
  Antisense strand to SEQ ID NO: 1388870
aacuuacacaauaugugcu

SEQ ID NO: 1388872 - RNA, 19 nt, Artificial Sequence
  Description of Artificial Sequence: Synthetic oligonucleotide
  Sense strand starting at position 2950 of SEQ ID NO: 1243016
gcacauauuguguaaguua

SEQ ID NO: 1388873 - RNA, 19 nt, Artificial Sequence
  Description of Artificial Sequence: Synthetic oligonucleotide
  Antisense strand to SEQ ID NO: 1388872
uaacuuacacaauaugugc

SEQ ID NO: 1388874 - RNA, 19 nt, Artificial Sequence
  Description of Artificial Sequence: Synthetic oligonucleotide
  Sense strand starting at position 3003 of SEQ ID NO: 1243016
gcuaaaugcuaccuuagga

SEQ ID NO: 1388875 - RNA, 19 nt, Artificial Sequence
  Description of Artificial Sequence: Synthetic oligonucleotide
  Antisense strand to SEQ ID NO: 1388874
uccuaagguagcauuuagc

SEQ ID NO: 1388876 - RNA, 19 nt, Artificial Sequence
  Description of Artificial Sequence: Synthetic oligonucleotide
  Sense strand starting at position 3029 of SEQ ID NO: 1243016
uuuaaaguuugcccagaaa

SEQ ID NO: 1388877 - RNA, 19 nt, Artificial Sequence
  Description of Artificial Sequence: Synthetic oligonucleotide
  Antisense strand to SEQ ID NO: 1388876
uuucugggcaaacuuuaaa

SEQ ID NO: 1388878 - RNA, 19 nt, Artificial Sequence
  Description of Artificial Sequence: Synthetic oligonucleotide
  Sense strand starting at position 3064 of SEQ ID NO: 1243016
aagaaucaguaagucgaaa

SEQ ID NO: 1388879 - RNA, 19 nt, Artificial Sequence
  Description of Artificial Sequence: Synthetic oligonucleotide
  Antisense strand to SEQ ID NO: 1388878
uuucgacuuacugauucuu

SEQ ID NO: 1388880 - RNA, 19 nt, Artificial Sequence
  Description of Artificial Sequence: Synthetic oligonucleotide
  Sense strand starting at position 3072 of SEQ ID NO: 1243016
guaagucgaaauugccaaa

SEQ ID NO: 1388881 - RNA, 19 nt, Artificial Sequence
  Description of Artificial Sequence: Synthetic oligonucleotide
  Antisense strand to SEQ ID NO: 1388880
uuuggcaauuucgacuuac

SEQ ID NO: 1388882 - RNA, 19 nt, Artificial Sequence
  Description of Artificial Sequence: Synthetic oligonucleotide
  Sense strand starting at position 3082 of SEQ ID NO: 1243016
auugccaaacgagaauauu

SEQ ID NO: 1388883 - RNA, 19 nt, Artificial Sequence
  Description of Artificial Sequence: Synthetic oligonucleotide
  Antisense strand to SEQ ID NO: 1388882
aauauucucguuuggcaau

SEQ ID NO: 1388884 - RNA, 19 nt, Artificial Sequence
  Description of Artificial Sequence: Synthetic oligonucleotide
  Sense strand starting at position 3114 of SEQ ID NO: 1243016
uccuuacugggagguuauu

SEQ ID NO: 1388885 - RNA, 19 nt, Artificial Sequence
  Description of Artificial Sequence: Synthetic oligonucleotide
  Antisense strand to SEQ ID NO: 1388884
aauaaccucccaguaagga

SEQ ID NO: 1388886 - RNA, 19 nt, Artificial Sequence
  Description of Artificial Sequence: Synthetic oligonucleotide
  Sense strand starting at position 3172 of SEQ ID NO: 1243016
cuguaaacaucccuguaga

SEQ ID NO: 1388887 - RNA, 19 nt, Artificial Sequence
  Description of Artificial Sequence: Synthetic oligonucleotide
  Antisense strand to SEQ ID NO: 1388886
ucuacagggauguuuacag

SEQ ID NO: 1388888 - RNA, 19 nt, Artificial Sequence
  Description of Artificial Sequence: Synthetic oligonucleotide
  Sense strand starting at position 3173 of SEQ ID NO: 1243016
uguaaacaucccuguagac

SEQ ID NO: 1388889 - RNA, 19 nt, Artificial Sequence
  Description of Artificial Sequence: Synthetic oligonucleotide
  Antisense strand to SEQ ID NO: 1388888
gucuacagggauguuuaca

SEQ ID NO: 1388890 - RNA, 19 nt, Artificial Sequence
  Description of Artificial Sequence: Synthetic oligonucleotide
  Sense strand starting at position 3225 of SEQ ID NO: 1243016
ugaagaauccuuugugccu

SEQ ID NO: 1388891 - RNA, 19 nt, Artificial Sequence
  Description of Artificial Sequence: Synthetic oligonucleotide
  Antisense strand to SEQ ID NO: 1388890
aggcacaaaggauucuuca

SEQ ID NO: 1388892 - RNA, 19 nt, Artificial Sequence
  Description of Artificial Sequence: Synthetic oligonucleotide
  Sense strand starting at position 3231 of SEQ ID NO: 1243016
auccuuugugccuguauuu

SEQ ID NO: 1388893 - RNA, 19 nt, Artificial Sequence
  Description of Artificial Sequence: Synthetic oligonucleotide
  Antisense strand to SEQ ID NO: 1388892
aaauacaggcacaaaggau

SEQ ID NO: 1388894 - RNA, 19 nt, Artificial Sequence
  Description of Artificial Sequence: Synthetic oligonucleotide
  Sense strand starting at position 3398 of SEQ ID NO: 1243016
gccuacaaauuugagacua

SEQ ID NO: 1388895 - RNA, 19 nt, Artificial Sequence
  Description of Artificial Sequence: Synthetic oligonucleotide
  Antisense strand to SEQ ID NO: 1388894
uagucucaaauuuguaggc

SEQ ID NO: 1388896 - RNA, 19 nt, Artificial Sequence
  Description of Artificial Sequence: Synthetic oligonucleotide
  Sense strand starting at position 3400 of SEQ ID NO: 1243016
cuacaaauuugagacuaga

SEQ ID NO: 1388897 - RNA, 19 nt, Artificial Sequence
  Description of Artificial Sequence: Synthetic oligonucleotide
  Antisense strand to SEQ ID NO: 1388896
ucuagucucaaauuuguag

SEQ ID NO: 1388898 - RNA, 19 nt, Artificial Sequence
  Description of Artificial Sequence: Synthetic oligonucleotide
  Sense strand starting at position 3476 of SEQ ID NO: 1243016
ucauuaugucuguguauag

SEQ ID NO: 1388899 - RNA, 19 nt, Artificial Sequence
  Description of Artificial Sequence: Synthetic oligonucleotide
  Antisense strand to SEQ ID NO: 1388898
cuauacacagacauaauga

SEQ ID NO: 1388900 - RNA, 19 nt, Artificial Sequence
  Description of Artificial Sequence: Synthetic oligonucleotide
  Sense strand starting at position 3666 of SEQ ID NO: 1243016
agguaauuguagguuucua

SEQ ID NO: 1388901 - RNA, 19 nt, Artificial Sequence
  Description of Artificial Sequence: Synthetic oligonucleotide
  Antisense strand to SEQ ID NO: 1388900
uagaaaccuacaauuaccu

SEQ ID NO: 1388902 - RNA, 19 nt, Artificial Sequence
  Description of Artificial Sequence: Synthetic oligonucleotide
  Sense strand starting at position 44 of SEQ ID NO: 1243017
caguaacaugcccggcauu

SEQ ID NO: 1388903 - RNA, 19 nt, Artificial Sequence
  Description of Artificial Sequence: Synthetic oligonucleotide
  Antisense strand to SEQ ID NO: 1388902
aaugccgggcauguuacug

SEQ ID NO: 1388904 - RNA, 19 nt, Artificial Sequence
  Description of Artificial Sequence: Synthetic oligonucleotide
  Sense strand starting at position 45 of SEQ ID NO: 1243017
aguaacaugcccggcauua

SEQ ID NO: 1388905 - RNA, 19 nt, Artificial Sequence
  Description of Artificial Sequence: Synthetic oligonucleotide
  Antisense strand to SEQ ID NO: 1388904
uaaugccgggcauguuacu

SEQ ID NO: 1388906 - RNA, 19 nt, Artificial Sequence
  Description of Artificial Sequence: Synthetic oligonucleotide
  Sense strand starting at position 99 of SEQ ID NO: 1243017
guaaauauaguaggaacau

SEQ ID NO: 1388907 - RNA, 19 nt, Artificial Sequence
  Description of Artificial Sequence: Synthetic oligonucleotide
  Antisense strand to SEQ ID NO: 1388906
auguuccuacuauauuuac

SEQ ID NO: 1388908 - RNA, 19 nt, Artificial Sequence
  Description of Artificial Sequence: Synthetic oligonucleotide
  Sense strand starting at position 118 of SEQ ID NO: 1243017
uaagcuagugcugucugua

SEQ ID NO: 1388909 - RNA, 19 nt, Artificial Sequence
  Description of Artificial Sequence: Synthetic oligonucleotide
  Antisense strand to SEQ ID NO: 1388908
uacagacagcacuagcuua

SEQ ID NO: 1388910 - RNA, 19 nt, Artificial Sequence
  Description of Artificial Sequence: Synthetic oligonucleotide
  Sense strand starting at position 123 of SEQ ID NO: 1243017
uagugcugucuguacuaca

SEQ ID NO: 1388911 - RNA, 19 nt, Artificial Sequence
  Description of Artificial Sequence: Synthetic oligonucleotide
  Antisense strand to SEQ ID NO: 1388910
uguaguacagacagcacua

SEQ ID NO: 1388912 - RNA, 19 nt, Artificial Sequence
  Description of Artificial Sequence: Synthetic oligonucleotide
  Sense strand starting at position 531 of SEQ ID NO: 1243017
uuauuaaaggcguagacaa

SEQ ID NO: 1388913 - RNA, 19 nt, Artificial Sequence
  Description of Artificial Sequence: Synthetic oligonucleotide
  Antisense strand to SEQ ID NO: 1388912
uugucuacgccuuuaauaa

SEQ ID NO: 1388914 - RNA, 19 nt, Artificial Sequence
  Description of Artificial Sequence: Synthetic oligonucleotide
  Sense strand starting at position 533 of SEQ ID NO: 1243017
auuaaaggcguagacaauu

SEQ ID NO: 1388915 - RNA, 19 nt, Artificial Sequence
  Description of Artificial Sequence: Synthetic oligonucleotide
  Antisense strand to SEQ ID NO: 1388914
aauugucuacgccuuuaau

SEQ ID NO: 1388916 - RNA, 19 nt, Artificial Sequence
  Description of Artificial Sequence: Synthetic oligonucleotide
  Sense strand starting at position 776 of SEQ ID NO: 1243017
uggaauuuauccuaagaaa

SEQ ID NO: 1388917 - RNA, 19 nt, Artificial Sequence
  Description of Artificial Sequence: Synthetic oligonucleotide
  Antisense strand to SEQ ID NO: 1388916
uuucuuaggauaaauucca

SEQ ID NO: 1388918 - RNA, 19 nt, Artificial Sequence
  Description of Artificial Sequence: Synthetic oligonucleotide
  Sense strand starting at position 1059 of SEQ ID NO: 1243017
gcacgccuguaauccuaaa

SEQ ID NO: 1388919 - RNA, 19 nt, Artificial Sequence
  Description of Artificial Sequence: Synthetic oligonucleotide
  Antisense strand to SEQ ID NO: 1388918
uuuaggauuacaggcgugc

SEQ ID NO: 1388920 - RNA, 19 nt, Artificial Sequence
  Description of Artificial Sequence: Synthetic oligonucleotide
  Sense strand starting at position 1253 of SEQ ID NO: 1243017
ugcaguagugaucagugua

SEQ ID NO: 1388921 - RNA, 19 nt, Artificial Sequence
  Description of Artificial Sequence: Synthetic oligonucleotide
  Antisense strand to SEQ ID NO: 1388920
uacacugaucacuacugca

SEQ ID NO: 1388922 - RNA, 19 nt, Artificial Sequence
  Description of Artificial Sequence: Synthetic oligonucleotide
  Sense strand starting at position 1256 of SEQ ID NO: 1243017
aguagugaucaguguauga

SEQ ID NO: 1388923 - RNA, 19 nt, Artificial Sequence
  Description of Artificial Sequence: Synthetic oligonucleotide
  Antisense strand to SEQ ID NO: 1388922
ucauacacugaucacuacu

SEQ ID NO: 1388924 - RNA, 19 nt, Artificial Sequence
  Description of Artificial Sequence: Synthetic oligonucleotide
  Sense strand starting at position 1258 of SEQ ID NO: 1243017
uagugaucaguguaugaua

SEQ ID NO: 1388925 - RNA, 19 nt, Artificial Sequence
  Description of Artificial Sequence: Synthetic oligonucleotide
  Antisense strand to SEQ ID NO: 1388924
uaucauacacugaucacua

SEQ ID NO: 1388926 - RNA, 19 nt, Artificial Sequence
  Description of Artificial Sequence: Synthetic oligonucleotide
  Sense strand starting at position 1260 of SEQ ID NO: 1243017
gugaucaguguaugauaca

SEQ ID NO: 1388927 - RNA, 19 nt, Artificial Sequence
  Description of Artificial Sequence: Synthetic oligonucleotide
  Antisense strand to SEQ ID NO: 1388926
uguaucauacacugaucac

SEQ ID NO: 1388928 - RNA, 19 nt, Artificial Sequence
  Description of Artificial Sequence: Synthetic oligonucleotide
  Sense strand starting at position 1261 of SEQ ID NO: 1243017
ugaucaguguaugauacaa

SEQ ID NO: 1388929 - RNA, 19 nt, Artificial Sequence
  Description of Artificial Sequence: Synthetic oligonucleotide
  Antisense strand to SEQ ID NO: 1388928
uuguaucauacacugauca

SEQ ID NO: 1388930 - RNA, 19 nt, Artificial Sequence
  Description of Artificial Sequence: Synthetic oligonucleotide
  Sense strand starting at position 1311 of SEQ ID NO: 1243017
acagaauauucuucgguca

SEQ ID NO: 1388931 - RNA, 19 nt, Artificial Sequence
  Description of Artificial Sequence: Synthetic oligonucleotide
  Antisense strand to SEQ ID NO: 1388930
ugaccgaagaauauucugu

SEQ ID NO: 1388932 - RNA, 19 nt, Artificial Sequence
  Description of Artificial Sequence: Synthetic oligonucleotide
  Sense strand starting at position 1316 of SEQ ID NO: 1243017
auauucuucggucagccaa

SEQ ID NO: 1388933 - RNA, 19 nt, Artificial Sequence
  Description of Artificial Sequence: Synthetic oligonucleotide
  Antisense strand to SEQ ID NO: 1388932
uuggcugaccgaagaauau

SEQ ID NO: 1388934 - RNA, 19 nt, Artificial Sequence
  Description of Artificial Sequence: Synthetic oligonucleotide
  Sense strand starting at position 1366 of SEQ ID NO: 1243017
uguucagaggccugcgaau

SEQ ID NO: 1388935 - RNA, 19 nt, Artificial Sequence
  Description of Artificial Sequence: Synthetic oligonucleotide
  Antisense strand to SEQ ID NO: 1388934
auucgcaggccucugaaca

SEQ ID NO: 1388936 - RNA, 19 nt, Artificial Sequence
  Description of Artificial Sequence: Synthetic oligonucleotide
  Sense strand starting at position 2224 of SEQ ID NO: 1243017
cgcucacagaucuaagaug

SEQ ID NO: 1388937 - RNA, 19 nt, Artificial Sequence
  Description of Artificial Sequence: Synthetic oligonucleotide
  Antisense strand to SEQ ID NO: 1388936
caucuuagaucugugagcg

SEQ ID NO: 1388938 - RNA, 19 nt, Artificial Sequence
  Description of Artificial Sequence: Synthetic oligonucleotide
  Sense strand starting at position 2250 of SEQ ID NO: 1243017
agugacuguguguagucau

SEQ ID NO: 1388939 - RNA, 19 nt, Artificial Sequence
  Description of Artificial Sequence: Synthetic oligonucleotide
  Antisense strand to SEQ ID NO: 1388938
augacuacacacagucacu

SEQ ID NO: 1388940 - RNA, 19 nt, Artificial Sequence
  Description of Artificial Sequence: Synthetic oligonucleotide
  Sense strand starting at position 2290 of SEQ ID NO: 1243017
cucuuccucuaagaaggaa

SEQ ID NO: 1388941 - RNA, 19 nt, Artificial Sequence
  Description of Artificial Sequence: Synthetic oligonucleotide
  Antisense strand to SEQ ID NO: 1388940
uuccuucuuagaggaagag

SEQ ID NO: 1388942 - RNA, 19 nt, Artificial Sequence
  Description of Artificial Sequence: Synthetic oligonucleotide
  Sense strand starting at position 2446 of SEQ ID NO: 1243017
gcuaccauuugggaaugua

SEQ ID NO: 1388943 - RNA, 19 nt, Artificial Sequence
  Description of Artificial Sequence: Synthetic oligonucleotide
  Antisense strand to SEQ ID NO: 1388942
uacauucccaaaugguagc

SEQ ID NO: 1388944 - RNA, 19 nt, Artificial Sequence
  Description of Artificial Sequence: Synthetic oligonucleotide
  Sense strand starting at position 2459 of SEQ ID NO: 1243017
aauguagacccaggaguau

SEQ ID NO: 1388945 - RNA, 19 nt, Artificial Sequence
  Description of Artificial Sequence: Synthetic oligonucleotide
  Antisense strand to SEQ ID NO: 1388944
auacuccugggucuacauu

SEQ ID NO: 1388946 - RNA, 19 nt, Artificial Sequence
  Description of Artificial Sequence: Synthetic oligonucleotide
  Sense strand starting at position 2485 of SEQ ID NO: 1243017
ucuacagguuucuaaggaa

SEQ ID NO: 1388947 - RNA, 19 nt, Artificial Sequence
  Description of Artificial Sequence: Synthetic oligonucleotide
  Antisense strand to SEQ ID NO: 1388946
uuccuuagaaaccuguaga

SEQ ID NO: 1388948 - RNA, 19 nt, Artificial Sequence
  Description of Artificial Sequence: Synthetic oligonucleotide
  Sense strand starting at position 2492 of SEQ ID NO: 1243017
guuucuaaggaaugcugaa

SEQ ID NO: 1388949 - RNA, 19 nt, Artificial Sequence
  Description of Artificial Sequence: Synthetic oligonucleotide
  Antisense strand to SEQ ID NO: 1388948
uucagcauuccuuagaaac

SEQ ID NO: 1388950 - RNA, 19 nt, Artificial Sequence
  Description of Artificial Sequence: Synthetic oligonucleotide
  Sense strand starting at position 2506 of SEQ ID NO: 1243017
cugaaaucccguuacauga

SEQ ID NO: 1388951 - RNA, 19 nt, Artificial Sequence
  Description of Artificial Sequence: Synthetic oligonucleotide
  Antisense strand to SEQ ID NO: 1388950
ucauguaacgggauuucag

SEQ ID NO: 1388952 - RNA, 19 nt, Artificial Sequence
  Description of Artificial Sequence: Synthetic oligonucleotide
  Sense strand starting at position 2508 of SEQ ID NO: 1243017
gaaaucccguuacaugaaa

SEQ ID NO: 1388953 - RNA, 19 nt, Artificial Sequence
  Description of Artificial Sequence: Synthetic oligonucleotide
  Antisense strand to SEQ ID NO: 1388952
uuucauguaacgggauuuc

SEQ ID NO: 1388954 - RNA, 19 nt, Artificial Sequence
  Description of Artificial Sequence: Synthetic oligonucleotide
  Sense strand starting at position 2617 of SEQ ID NO: 1243017
ccaucugcuucguucuaca

SEQ ID NO: 1388955 - RNA, 19 nt, Artificial Sequence
  Description of Artificial Sequence: Synthetic oligonucleotide
  Antisense strand to SEQ ID NO: 1388954
uguagaacgaagcagaugg

SEQ ID NO: 1388956 - RNA, 19 nt, Artificial Sequence
  Description of Artificial Sequence: Synthetic oligonucleotide
  Sense strand starting at position 2703 of SEQ ID NO: 1243017
gaaucugugucaccgcaga

SEQ ID NO: 1388957 - RNA, 19 nt, Artificial Sequence
  Description of Artificial Sequence: Synthetic oligonucleotide
  Antisense strand to SEQ ID NO: 1388956
ucugcggugacacagauuc

SEQ ID NO: 1388958 - RNA, 19 nt, Artificial Sequence
  Description of Artificial Sequence: Synthetic oligonucleotide
  Sense strand starting at position 2766 of SEQ ID NO: 1243017
gcgguuacacuuugcaauu

SEQ ID NO: 1388959 - RNA, 19 nt, Artificial Sequence
  Description of Artificial Sequence: Synthetic oligonucleotide
  Antisense strand to SEQ ID NO: 1388958
aauugcaaaguguaaccgc

SEQ ID NO: 1388960 - RNA, 19 nt, Artificial Sequence
  Description of Artificial Sequence: Synthetic oligonucleotide
  Sense strand starting at position 2866 of SEQ ID NO: 1243017
uuaugagauucugcaaaca

SEQ ID NO: 1388961 - RNA, 19 nt, Artificial Sequence
  Description of Artificial Sequence: Synthetic oligonucleotide
  Antisense strand to SEQ ID NO: 1388960
uguuugcagaaucucauaa

SEQ ID NO: 1388962 - RNA, 19 nt, Artificial Sequence
  Description of Artificial Sequence: Synthetic oligonucleotide
  Sense strand starting at position 2934 of SEQ ID NO: 1243017
ugugcaaggagcuagaaau

SEQ ID NO: 1388963 - RNA, 19 nt, Artificial Sequence
  Description of Artificial Sequence: Synthetic oligonucleotide
  Antisense strand to SEQ ID NO: 1388962
auuucuagcuccuugcaca

SEQ ID NO: 1388964 - RNA, 19 nt, Artificial Sequence
  Description of Artificial Sequence: Synthetic oligonucleotide
  Sense strand starting at position 3418 of SEQ ID NO: 1243017
gcagccuccagcuguagaa

SEQ ID NO: 1388965 - RNA, 19 nt, Artificial Sequence
  Description of Artificial Sequence: Synthetic oligonucleotide
  Antisense strand to SEQ ID NO: 1388964
uucuacagcuggaggcugc

SEQ ID NO: 1388966 - RNA, 19 nt, Artificial Sequence
  Description of Artificial Sequence: Synthetic oligonucleotide
  Sense strand starting at position 3582 of SEQ ID NO: 1243017
cagggagaaucuggaacuu

SEQ ID NO: 1388967 - RNA, 19 nt, Artificial Sequence
  Description of Artificial Sequence: Synthetic oligonucleotide
  Antisense strand to SEQ ID NO: 1388966
aaguuccagauucucccug

SEQ ID NO: 1388968 - RNA, 19 nt, Artificial Sequence
  Description of Artificial Sequence: Synthetic oligonucleotide
  Sense strand starting at position 3860 of SEQ ID NO: 1243017
acgucauccucaccucuua

SEQ ID NO: 1388969 - RNA, 19 nt, Artificial Sequence
  Description of Artificial Sequence: Synthetic oligonucleotide
  Antisense strand to SEQ ID NO: 1388968
uaagaggugaggaugacgu

SEQ ID NO: 1388970 - RNA, 19 nt, Artificial Sequence
  Description of Artificial Sequence: Synthetic oligonucleotide
  Sense strand starting at position 3882 of SEQ ID NO: 1243017
cgacaucucagaugcuuga

SEQ ID NO: 1388971 - RNA, 19 nt, Artificial Sequence
  Description of Artificial Sequence: Synthetic oligonucleotide
  Antisense strand to SEQ ID NO: 1388970
ucaagcaucugagaugucg

SEQ ID NO: 1388972 - RNA, 19 nt, Artificial Sequence
  Description of Artificial Sequence: Synthetic oligonucleotide
  Sense strand starting at position 3916 of SEQ ID NO: 1243017
uguggaauugcuggccaaa

SEQ ID NO: 1388973 - RNA, 19 nt, Artificial Sequence
  Description of Artificial Sequence: Synthetic oligonucleotide
  Antisense strand to SEQ ID NO: 1388972
uuuggccagcaauuccaca

SEQ ID NO: 1388974 - RNA, 19 nt, Artificial Sequence
  Description of Artificial Sequence: Synthetic oligonucleotide
  Sense strand starting at position 3935 of SEQ ID NO: 1243017
gggugugcgcauuauuaag

SEQ ID NO: 1388975 - RNA, 19 nt, Artificial Sequence
  Description of Artificial Sequence: Synthetic oligonucleotide
  Antisense strand to SEQ ID NO: 1388974
cuuaauaaugcgcacaccc

SEQ ID NO: 1388976 - RNA, 19 nt, Artificial Sequence
  Description of Artificial Sequence: Synthetic oligonucleotide
  Sense strand starting at position 3945 of SEQ ID NO: 1243017
auuauuaaggcuugugaua

SEQ ID NO: 1388977 - RNA, 19 nt, Artificial Sequence
  Description of Artificial Sequence: Synthetic oligonucleotide
  Antisense strand to SEQ ID NO: 1388976
uaucacaagccuuaauaau

SEQ ID NO: 1388978 - RNA, 19 nt, Artificial Sequence
  Description of Artificial Sequence: Synthetic oligonucleotide
  Sense strand starting at position 3950 of SEQ ID NO: 1243017
uaaggcuugugauaggaau

SEQ ID NO: 1388979 - RNA, 19 nt, Artificial Sequence
  Description of Artificial Sequence: Synthetic oligonucleotide
  Antisense strand to SEQ ID NO: 1388978
auuccuaucacaagccuua

SEQ ID NO: 1388980 - RNA, 19 nt, Artificial Sequence
  Description of Artificial Sequence: Synthetic oligonucleotide
  Sense strand starting at position 3952 of SEQ ID NO: 1243017
aggcuugugauaggaauca

SEQ ID NO: 1388981 - RNA, 19 nt, Artificial Sequence
  Description of Artificial Sequence: Synthetic oligonucleotide
  Antisense strand to SEQ ID NO: 1388980
ugauuccuaucacaagccu

SEQ ID NO: 1388982 - RNA, 19 nt, Artificial Sequence
  Description of Artificial Sequence: Synthetic oligonucleotide
  Sense strand starting at position 307 of SEQ ID NO: 1243018
auuuaaggcuugugauuua

SEQ ID NO: 1388983 - RNA, 19 nt, Artificial Sequence
  Description of Artificial Sequence: Synthetic oligonucleotide
  Antisense strand to SEQ ID NO: 1388982
uaaaucacaagccuuaaau

SEQ ID NO: 1388984 - RNA, 19 nt, Artificial Sequence
  Description of Artificial Sequence: Synthetic oligonucleotide
  Sense strand starting at position 464 of SEQ ID NO: 1243018
ugaugaucugaucgcaaac

SEQ ID NO: 1388985 - RNA, 19 nt, Artificial Sequence
  Description of Artificial Sequence: Synthetic oligonucleotide
  Antisense strand to SEQ ID NO: 1388984
guuugcgaucagaucauca

SEQ ID NO: 1388986 - RNA, 19 nt, Artificial Sequence
  Description of Artificial Sequence: Synthetic oligonucleotide
  Sense strand starting at position 677 of SEQ ID NO: 1243018
auacgcuucccaggagaaa

SEQ ID NO: 1388987 - RNA, 19 nt, Artificial Sequence
  Description of Artificial Sequence: Synthetic oligonucleotide
  Antisense strand to SEQ ID NO: 1388986
uuucuccugggaagcguau

SEQ ID NO: 1388988 - RNA, 19 nt, Artificial Sequence
  Description of Artificial Sequence: Synthetic oligonucleotide
  Sense strand starting at position 678 of SEQ ID NO: 1243018
uacgcuucccaggagaaau

SEQ ID NO: 1388989 - RNA, 19 nt, Artificial Sequence
  Description of Artificial Sequence: Synthetic oligonucleotide
  Antisense strand to SEQ ID NO: 1388988
auuucuccugggaagcgua

SEQ ID NO: 1388990 - RNA, 19 nt, Artificial Sequence
  Description of Artificial Sequence: Synthetic oligonucleotide
  Sense strand starting at position 817 of SEQ ID NO: 1243018
ggaaaugaauccgaaacau

SEQ ID NO: 1388991 - RNA, 19 nt, Artificial Sequence
  Description of Artificial Sequence: Synthetic oligonucleotide
  Antisense strand to SEQ ID NO: 1388990
auguuucggauucauuucc

SEQ ID NO: 1388992 - RNA, 19 nt, Artificial Sequence
  Description of Artificial Sequence: Synthetic oligonucleotide
  Sense strand starting at position 1238 of SEQ ID NO: 1243018
ccgcauuuccauugcuauc

SEQ ID NO: 1388993 - RNA, 19 nt, Artificial Sequence
  Description of Artificial Sequence: Synthetic oligonucleotide
  Antisense strand to SEQ ID NO: 1388992
gauagcaauggaaaugcgg

SEQ ID NO: 1388994 - RNA, 19 nt, Artificial Sequence
  Description of Artificial Sequence: Synthetic oligonucleotide
  Sense strand starting at position 2311 of SEQ ID NO: 1243018
aggaaauaccgucggauuc

SEQ ID NO: 1388995 - RNA, 19 nt, Artificial Sequence
  Description of Artificial Sequence: Synthetic oligonucleotide
  Antisense strand to SEQ ID NO: 1388994
gaauccgacgguauuuccu

SEQ ID NO: 1388996 - RNA, 19 nt, Artificial Sequence
  Description of Artificial Sequence: Synthetic oligonucleotide
  Sense strand starting at position 2312 of SEQ ID NO: 1243018
ggaaauaccgucggauucu

SEQ ID NO: 1388997 - RNA, 19 nt, Artificial Sequence
  Description of Artificial Sequence: Synthetic oligonucleotide
  Antisense strand to SEQ ID NO: 1388996
agaauccgacgguauuucc

SEQ ID NO: 1388998 - RNA, 19 nt, Artificial Sequence
  Description of Artificial Sequence: Synthetic oligonucleotide
  Sense strand starting at position 2348 of SEQ ID NO: 1243018
cgguuucccuaccuuuaaa

SEQ ID NO: 1388999 - RNA, 19 nt, Artificial Sequence
  Description of Artificial Sequence: Synthetic oligonucleotide
  Antisense strand to SEQ ID NO: 1388998
uuuaaagguagggaaaccg

SEQ ID NO: 1389000 - RNA, 19 nt, Artificial Sequence
  Description of Artificial Sequence: Synthetic oligonucleotide
  Sense strand starting at position 2407 of SEQ ID NO: 1243018
gaaggcauguuauuaacca

SEQ ID NO: 1389001 - RNA, 19 nt, Artificial Sequence
  Description of Artificial Sequence: Synthetic oligonucleotide
  Antisense strand to SEQ ID NO: 1389000
ugguuaauaacaugccuuc

SEQ ID NO: 1389002 - RNA, 19 nt, Artificial Sequence
  Description of Artificial Sequence: Synthetic oligonucleotide
  Sense strand starting at position 2538 of SEQ ID NO: 1243018
cuuggauacuugguaugga

SEQ ID NO: 1389003 - RNA, 19 nt, Artificial Sequence
  Description of Artificial Sequence: Synthetic oligonucleotide
  Antisense strand to SEQ ID NO: 1389002
uccauaccaaguauccaag

SEQ ID NO: 1389004 - RNA, 19 nt, Artificial Sequence
  Description of Artificial Sequence: Synthetic oligonucleotide
  Sense strand starting at position 2594 of SEQ ID NO: 1243018
caucuuugagacugguaga

SEQ ID NO: 1389005 - RNA, 19 nt, Artificial Sequence
  Description of Artificial Sequence: Synthetic oligonucleotide
  Antisense strand to SEQ ID NO: 1389004
ucuaccagucucaaagaug

SEQ ID NO: 1389006 - RNA, 19 nt, Artificial Sequence
  Description of Artificial Sequence: Synthetic oligonucleotide
  Sense strand starting at position 2595 of SEQ ID NO: 1243018
aucuuugagacugguagau

SEQ ID NO: 1389007 - RNA, 19 nt, Artificial Sequence
  Description of Artificial Sequence: Synthetic oligonucleotide
  Antisense strand to SEQ ID NO: 1389006
aucuaccagucucaaagau

SEQ ID NO: 1389008 - RNA, 19 nt, Artificial Sequence
  Description of Artificial Sequence: Synthetic oligonucleotide
  Sense strand starting at position 2765 of SEQ ID NO: 1243018
uuuaguuguagaggaagua

SEQ ID NO: 1389009 - RNA, 19 nt, Artificial Sequence
  Description of Artificial Sequence: Synthetic oligonucleotide
  Antisense strand to SEQ ID NO: 1389008
uacuuccucuacaacuaaa

SEQ ID NO: 1389010 - RNA, 19 nt, Artificial Sequence
  Description of Artificial Sequence: Synthetic oligonucleotide
  Sense strand starting at position 2766 of SEQ ID NO: 1243018
uuaguuguagaggaaguau

SEQ ID NO: 1389011 - RNA, 19 nt, Artificial Sequence
  Description of Artificial Sequence: Synthetic oligonucleotide
  Antisense strand to SEQ ID NO: 1389010
auacuuccucuacaacuaa

SEQ ID NO: 1389012 - RNA, 19 nt, Artificial Sequence
  Description of Artificial Sequence: Synthetic oligonucleotide
  Sense strand starting at position 2858 of SEQ ID NO: 1243018
uggagaaucugguucugga

SEQ ID NO: 1389013 - RNA, 19 nt, Artificial Sequence
  Description of Artificial Sequence: Synthetic oligonucleotide
  Antisense strand to SEQ ID NO: 1389012
uccagaaccagauucucca

SEQ ID NO: 1389014 - RNA, 19 nt, Artificial Sequence
  Description of Artificial Sequence: Synthetic oligonucleotide
  Sense strand starting at position 2902 of SEQ ID NO: 1243018
ugaagauauuuguacaacu

SEQ ID NO: 1389015 - RNA, 19 nt, Artificial Sequence
  Description of Artificial Sequence: Synthetic oligonucleotide
  Antisense strand to SEQ ID NO: 1389014
aguuguacaaauaucuuca

SEQ ID NO: 1389016 - RNA, 19 nt, Artificial Sequence
  Description of Artificial Sequence: Synthetic oligonucleotide
  Sense strand starting at position 2918 of SEQ ID NO: 1243018
acuacauuccagugcuaua

SEQ ID NO: 1389017 - RNA, 19 nt, Artificial Sequence
  Description of Artificial Sequence: Synthetic oligonucleotide
  Antisense strand to SEQ ID NO: 1389016
uauagcacuggaauguagu

SEQ ID NO: 1389018 - RNA, 19 nt, Artificial Sequence
  Description of Artificial Sequence: Synthetic oligonucleotide
  Sense strand starting at position 2945 of SEQ ID NO: 1243018
ucugguagcuccuuaaaug

SEQ ID NO: 1389019 - RNA, 19 nt, Artificial Sequence
  Description of Artificial Sequence: Synthetic oligonucleotide
  Antisense strand to SEQ ID NO: 1389018
cauuuaaggagcuaccaga

SEQ ID NO: 1389020 - RNA, 19 nt, Artificial Sequence
  Description of Artificial Sequence: Synthetic oligonucleotide
  Sense strand starting at position 2946 of SEQ ID NO: 1243018
cugguagcuccuuaaauga

SEQ ID NO: 1389021 - RNA, 19 nt, Artificial Sequence
  Description of Artificial Sequence: Synthetic oligonucleotide
  Antisense strand to SEQ ID NO: 1389020
ucauuuaaggagcuaccag

SEQ ID NO: 1389022 - RNA, 19 nt, Artificial Sequence
  Description of Artificial Sequence: Synthetic oligonucleotide
  Sense strand starting at position 2980 of SEQ ID NO: 1243018
aaagaaaugcagugauauc

SEQ ID NO: 1389023 - RNA, 19 nt, Artificial Sequence
  Description of Artificial Sequence: Synthetic oligonucleotide
  Antisense strand to SEQ ID NO: 1389022
gauaucacugcauuucuuu

SEQ ID NO: 1389024 - RNA, 19 nt, Artificial Sequence
  Description of Artificial Sequence: Synthetic oligonucleotide
  Sense strand starting at position 2998 of SEQ ID NO: 1243018
cugaaauagggcugaaugu

SEQ ID NO: 1389025 - RNA, 19 nt, Artificial Sequence
  Description of Artificial Sequence: Synthetic oligonucleotide
  Antisense strand to SEQ ID NO: 1389024
acauucagcccuauuucag

SEQ ID NO: 1389026 - RNA, 19 nt, Artificial Sequence
  Description of Artificial Sequence: Synthetic oligonucleotide
  Sense strand starting at position 3040 of SEQ ID NO: 1243018
ucugaaauuacgggaguua

SEQ ID NO: 1389027 - RNA, 19 nt, Artificial Sequence
  Description of Artificial Sequence: Synthetic oligonucleotide
  Antisense strand to SEQ ID NO: 1389026
uaacucccguaauuucaga

SEQ ID NO: 1389028 - RNA, 19 nt, Artificial Sequence
  Description of Artificial Sequence: Synthetic oligonucleotide
  Sense strand starting at position 3049 of SEQ ID NO: 1243018
acgggaguuaugcaggaga

SEQ ID NO: 1389029 - RNA, 19 nt, Artificial Sequence
  Description of Artificial Sequence: Synthetic oligonucleotide
  Antisense strand to SEQ ID NO: 1389028
ucuccugcauaacucccgu

SEQ ID NO: 1389030 - RNA, 19 nt, Artificial Sequence
  Description of Artificial Sequence: Synthetic oligonucleotide
  Sense strand starting at position 3051 of SEQ ID NO: 1243018
gggaguuaugcaggagaaa

SEQ ID NO: 1389031 - RNA, 19 nt, Artificial Sequence
  Description of Artificial Sequence: Synthetic oligonucleotide
  Antisense strand to SEQ ID NO: 1389030
uuucuccugcauaacuccc

SEQ ID NO: 1389032 - RNA, 19 nt, Artificial Sequence
  Description of Artificial Sequence: Synthetic oligonucleotide
  Sense strand starting at position 3096 of SEQ ID NO: 1243018
ugacauauggaucgaugau

SEQ ID NO: 1389033 - RNA, 19 nt, Artificial Sequence
  Description of Artificial Sequence: Synthetic oligonucleotide
  Antisense strand to SEQ ID NO: 1389032
aucaucgauccauauguca

SEQ ID NO: 1389034 - RNA, 19 nt, Artificial Sequence
  Description of Artificial Sequence: Synthetic oligonucleotide
  Sense strand starting at position 3102 of SEQ ID NO: 1243018
auggaucgaugaucaagua

SEQ ID NO: 1389035 - RNA, 19 nt, Artificial Sequence
  Description of Artificial Sequence: Synthetic oligonucleotide
  Antisense strand to SEQ ID NO: 1389034
uacuugaucaucgauccau

SEQ ID NO: 1389036 - RNA, 19 nt, Artificial Sequence
  Description of Artificial Sequence: Synthetic oligonucleotide
  Sense strand starting at position 3174 of SEQ ID NO: 1243018
acuguagacuccuugggaa

SEQ ID NO: 1389037 - RNA, 19 nt, Artificial Sequence
  Description of Artificial Sequence: Synthetic oligonucleotide
  Antisense strand to SEQ ID NO: 1389036
uucccaaggagucuacagu

SEQ ID NO: 1389038 - RNA, 19 nt, Artificial Sequence
  Description of Artificial Sequence: Synthetic oligonucleotide
  Sense strand starting at position 3176 of SEQ ID NO: 1243018
uguagacuccuugggaaag

SEQ ID NO: 1389039 - RNA, 19 nt, Artificial Sequence
  Description of Artificial Sequence: Synthetic oligonucleotide
  Antisense strand to SEQ ID NO: 1389038
cuuucccaaggagucuaca

SEQ ID NO: 1389040 - RNA, 19 nt, Artificial Sequence
  Description of Artificial Sequence: Synthetic oligonucleotide
  Sense strand starting at position 3284 of SEQ ID NO: 1243018
ccagauuuguuugaccaac

SEQ ID NO: 1389041 - RNA, 19 nt, Artificial Sequence
  Description of Artificial Sequence: Synthetic oligonucleotide
  Antisense strand to SEQ ID NO: 1389040
guuggucaaacaaaucugg

SEQ ID NO: 1389042 - RNA, 19 nt, Artificial Sequence
  Description of Artificial Sequence: Synthetic oligonucleotide
  Sense strand starting at position 3503 of SEQ ID NO: 1243018
ggaugcuguggcugaauaa

SEQ ID NO: 1389043 - RNA, 19 nt, Artificial Sequence
  Description of Artificial Sequence: Synthetic oligonucleotide
  Antisense strand to SEQ ID NO: 1389042
uuauucagccacagcaucc

SEQ ID NO: 1389044 - RNA, 19 nt, Artificial Sequence
  Description of Artificial Sequence: Synthetic oligonucleotide
  Sense strand starting at position 3504 of SEQ ID NO: 1243018
gaugcuguggcugaauaaa

SEQ ID NO: 1389045 - RNA, 19 nt, Artificial Sequence
  Description of Artificial Sequence: Synthetic oligonucleotide
  Antisense strand to SEQ ID NO: 1389044
uuuauucagccacagcauc

SEQ ID NO: 1389046 - RNA, 19 nt, Artificial Sequence
  Description of Artificial Sequence: Synthetic oligonucleotide
  Sense strand starting at position 3598 of SEQ ID NO: 1243018
agcuguuugggagaauugu

SEQ ID NO: 1389047 - RNA, 19 nt, Artificial Sequence
  Description of Artificial Sequence: Synthetic oligonucleotide
  Antisense strand to SEQ ID NO: 1389046
acaauucucccaaacagcu

SEQ ID NO: 1389048 - RNA, 19 nt, Artificial Sequence
  Description of Artificial Sequence: Synthetic oligonucleotide
  Sense strand starting at position 3672 of SEQ ID NO: 1243018
cucuccugacuucguagaa

SEQ ID NO: 1389049 - RNA, 19 nt, Artificial Sequence
  Description of Artificial Sequence: Synthetic oligonucleotide
  Antisense strand to SEQ ID NO: 1389048
uucuacgaagucaggagag

SEQ ID NO: 1389050 - RNA, 19 nt, Artificial Sequence
  Description of Artificial Sequence: Synthetic oligonucleotide
  Sense strand starting at position 3676 of SEQ ID NO: 1243018
ccugacuucguagaagguu

SEQ ID NO: 1389051 - RNA, 19 nt, Artificial Sequence
  Description of Artificial Sequence: Synthetic oligonucleotide
  Antisense strand to SEQ ID NO: 1389050
aaccuucuacgaagucagg

SEQ ID NO: 1389052 - RNA, 19 nt, Artificial Sequence
  Description of Artificial Sequence: Synthetic oligonucleotide
  Sense strand starting at position 3758 of SEQ ID NO: 1243018
aagugaguucugcaaacca

SEQ ID NO: 1389053 - RNA, 19 nt, Artificial Sequence
  Description of Artificial Sequence: Synthetic oligonucleotide
  Antisense strand to SEQ ID NO: 1389052
ugguuugcagaacucacuu

SEQ ID NO: 1389054 - RNA, 19 nt, Artificial Sequence
  Description of Artificial Sequence: Synthetic oligonucleotide
  Sense strand starting at position 3842 of SEQ ID NO: 1243018
uugugaccucuccaaagau

SEQ ID NO: 1389055 - RNA, 19 nt, Artificial Sequence
  Description of Artificial Sequence: Synthetic oligonucleotide
  Antisense strand to SEQ ID NO: 1389054
aucuuuggagaggucacaa

SEQ ID NO: 1389056 - RNA, 19 nt, Artificial Sequence
  Description of Artificial Sequence: Synthetic oligonucleotide
  Sense strand starting at position 3903 of SEQ ID NO: 1243018
auuucuugaugugaaaugu

SEQ ID NO: 1389057 - RNA, 19 nt, Artificial Sequence
  Description of Artificial Sequence: Synthetic oligonucleotide
  Antisense strand to SEQ ID NO: 1389056
acauuucacaucaagaaau

SEQ ID NO: 1389058 - RNA, 19 nt, Artificial Sequence
  Description of Artificial Sequence: Synthetic oligonucleotide
  Sense strand starting at position 3927 of SEQ ID NO: 1243018
uguguaaaucaaggaaaua

SEQ ID NO: 1389059 - RNA, 19 nt, Artificial Sequence
  Description of Artificial Sequence: Synthetic oligonucleotide
  Antisense strand to SEQ ID NO: 1389058
uauuuccuugauuuacaca

SEQ ID NO: 1389060 - RNA, 19 nt, Artificial Sequence
  Description of Artificial Sequence: Synthetic oligonucleotide
  Sense strand starting at position 3973 of SEQ ID NO: 1243018
agguauauuucccaguauu

SEQ ID NO: 1389061 - RNA, 19 nt, Artificial Sequence
  Description of Artificial Sequence: Synthetic oligonucleotide
  Antisense strand to SEQ ID NO: 1389060
aauacugggaaauauaccu

SEQ ID NO: 1389062 - RNA, 19 nt, Artificial Sequence
  Description of Artificial Sequence: Synthetic oligonucleotide
  Sense strand starting at position 29 of SEQ ID NO: 1243019
uuuggaggcaaauguaauu

SEQ ID NO: 1389063 - RNA, 19 nt, Artificial Sequence
  Description of Artificial Sequence: Synthetic oligonucleotide
  Antisense strand to SEQ ID NO: 1389062
aauuacauuugccuccaaa

SEQ ID NO: 1389064 - RNA, 19 nt, Artificial Sequence
  Description of Artificial Sequence: Synthetic oligonucleotide
  Sense strand starting at position 75 of SEQ ID NO: 1243019
ucagaaguaauggguuuau

SEQ ID NO: 1389065 - RNA, 19 nt, Artificial Sequence
  Description of Artificial Sequence: Synthetic oligonucleotide
  Antisense strand to SEQ ID NO: 1389064
auaaacccauuacuucuga

SEQ ID NO: 1389066 - RNA, 19 nt, Artificial Sequence
  Description of Artificial Sequence: Synthetic oligonucleotide
  Sense strand starting at position 79 of SEQ ID NO: 1243019
aaguaauggguuuauuguu

SEQ ID NO: 1389067 - RNA, 19 nt, Artificial Sequence
  Description of Artificial Sequence: Synthetic oligonucleotide
  Antisense strand to SEQ ID NO: 1389066
aacaauaaacccauuacuu

SEQ ID NO: 1389068 - RNA, 19 nt, Artificial Sequence
  Description of Artificial Sequence: Synthetic oligonucleotide
  Sense strand starting at position 224 of SEQ ID NO: 1243019
ggccaauuauuauuaugau

SEQ ID NO: 1389069 - RNA, 19 nt, Artificial Sequence
  Description of Artificial Sequence: Synthetic oligonucleotide
  Antisense strand to SEQ ID NO: 1389068
aucauaauaauaauuggcc

SEQ ID NO: 1389070 - RNA, 19 nt, Artificial Sequence
  Description of Artificial Sequence: Synthetic oligonucleotide
  Sense strand starting at position 597 of SEQ ID NO: 1243019
aguuuaaaucuucgauaug

SEQ ID NO: 1389071 - RNA, 19 nt, Artificial Sequence
  Description of Artificial Sequence: Synthetic oligonucleotide
  Antisense strand to SEQ ID NO: 1389070
cauaucgaagauuuaaacu

SEQ ID NO: 1389072 - RNA, 19 nt, Artificial Sequence
  Description of Artificial Sequence: Synthetic oligonucleotide
  Sense strand starting at position 638 of SEQ ID NO: 1243019
aacaaagcucuuugaggua

SEQ ID NO: 1389073 - RNA, 19 nt, Artificial Sequence
  Description of Artificial Sequence: Synthetic oligonucleotide
  Antisense strand to SEQ ID NO: 1389072
uaccucaaagagcuuuguu

SEQ ID NO: 1389074 - RNA, 19 nt, Artificial Sequence
  Description of Artificial Sequence: Synthetic oligonucleotide
  Sense strand starting at position 685 of SEQ ID NO: 1243019
agguuugaggacugauguu

SEQ ID NO: 1389075 - RNA, 19 nt, Artificial Sequence
  Description of Artificial Sequence: Synthetic oligonucleotide
  Antisense strand to SEQ ID NO: 1389074
aacaucaguccucaaaccu

SEQ ID NO: 1389076 - RNA, 19 nt, Artificial Sequence
  Description of Artificial Sequence: Synthetic oligonucleotide
  Sense strand starting at position 691 of SEQ ID NO: 1243019
gaggacugauguucuauag

SEQ ID NO: 1389077 - RNA, 19 nt, Artificial Sequence
  Description of Artificial Sequence: Synthetic oligonucleotide
  Antisense strand to SEQ ID NO: 1389076
cuauagaacaucaguccuc

SEQ ID NO: 1389078 - RNA, 19 nt, Artificial Sequence
  Description of Artificial Sequence: Synthetic oligonucleotide
  Sense strand starting at position 695 of SEQ ID NO: 1243019
acugauguucuauagcaac

SEQ ID NO: 1389079 - RNA, 19 nt, Artificial Sequence
  Description of Artificial Sequence: Synthetic oligonucleotide
  Antisense strand to SEQ ID NO: 1389078
guugcuauagaacaucagu

SEQ ID NO: 1389080 - RNA, 19 nt, Artificial Sequence
  Description of Artificial Sequence: Synthetic oligonucleotide
  Sense strand starting at position 720 of SEQ ID NO: 1243019
uugaccuuuccagaaggca

SEQ ID NO: 1389081 - RNA, 19 nt, Artificial Sequence
  Description of Artificial Sequence: Synthetic oligonucleotide
  Antisense strand to SEQ ID NO: 1389080
ugccuucuggaaaggucaa

SEQ ID NO: 1389082 - RNA, 19 nt, Artificial Sequence
  Description of Artificial Sequence: Synthetic oligonucleotide
  Sense strand starting at position 898 of SEQ ID NO: 1243019
gggacagugcuguaauuag

SEQ ID NO: 1389083 - RNA, 19 nt, Artificial Sequence
  Description of Artificial Sequence: Synthetic oligonucleotide
  Antisense strand to SEQ ID NO: 1389082
cuaauuacagcacuguccc

SEQ ID NO: 1389084 - RNA, 19 nt, Artificial Sequence
  Description of Artificial Sequence: Synthetic oligonucleotide
  Sense strand starting at position 945 of SEQ ID NO: 1243019
cuaccagucucucuagacu

SEQ ID NO: 1389085 - RNA, 19 nt, Artificial Sequence
  Description of Artificial Sequence: Synthetic oligonucleotide
  Antisense strand to SEQ ID NO: 1389084
agucuagagagacugguag

SEQ ID NO: 1389086 - RNA, 19 nt, Artificial Sequence
  Description of Artificial Sequence: Synthetic oligonucleotide
  Sense strand starting at position 948 of SEQ ID NO: 1243019
ccagucucucuagacuuua

SEQ ID NO: 1389087 - RNA, 19 nt, Artificial Sequence
  Description of Artificial Sequence: Synthetic oligonucleotide
  Antisense strand to SEQ ID NO: 1389086
uaaagucuagagagacugg

SEQ ID NO: 1389088 - RNA, 19 nt, Artificial Sequence
  Description of Artificial Sequence: Synthetic oligonucleotide
  Sense strand starting at position 959 of SEQ ID NO: 1243019
agacuuuagucuucccauc

SEQ ID NO: 1389089 - RNA, 19 nt, Artificial Sequence
  Description of Artificial Sequence: Synthetic oligonucleotide
  Antisense strand to SEQ ID NO: 1389088
gaugggaagacuaaagucu

SEQ ID NO: 1389090 - RNA, 19 nt, Artificial Sequence
  Description of Artificial Sequence: Synthetic oligonucleotide
  Sense strand starting at position 1438 of SEQ ID NO: 1243019
ugaagcuuagcgagguguu

SEQ ID NO: 1389091 - RNA, 19 nt, Artificial Sequence
  Description of Artificial Sequence: Synthetic oligonucleotide
  Antisense strand to SEQ ID NO: 1389090
aacaccucgcuaagcuuca

SEQ ID NO: 1389092 - RNA, 19 nt, Artificial Sequence
  Description of Artificial Sequence: Synthetic oligonucleotide
  Sense strand starting at position 1451 of SEQ ID NO: 1243019
gguguugcccaagaguacu

SEQ ID NO: 1389093 - RNA, 19 nt, Artificial Sequence
  Description of Artificial Sequence: Synthetic oligonucleotide
  Antisense strand to SEQ ID NO: 1389092
aguacucuugggcaacacc

SEQ ID NO: 1389094 - RNA, 19 nt, Artificial Sequence
  Description of Artificial Sequence: Synthetic oligonucleotide
  Sense strand starting at position 1457 of SEQ ID NO: 1243019
gcccaagaguacuuacaga

SEQ ID NO: 1389095 - RNA, 19 nt, Artificial Sequence
  Description of Artificial Sequence: Synthetic oligonucleotide
  Antisense strand to SEQ ID NO: 1389094
ucuguaaguacucuugggc

SEQ ID NO: 1389096 - RNA, 19 nt, Artificial Sequence
  Description of Artificial Sequence: Synthetic oligonucleotide
  Sense strand starting at position 1470 of SEQ ID NO: 1243019
uacagaguucuugguacug

SEQ ID NO: 1389097 - RNA, 19 nt, Artificial Sequence
  Description of Artificial Sequence: Synthetic oligonucleotide
  Antisense strand to SEQ ID NO: 1389096
caguaccaagaacucugua

SEQ ID NO: 1389098 - RNA, 19 nt, Artificial Sequence
  Description of Artificial Sequence: Synthetic oligonucleotide
  Sense strand starting at position 1487 of SEQ ID NO: 1243019
uggaaagcacuuuguuaaa

SEQ ID NO: 1389099 - RNA, 19 nt, Artificial Sequence
  Description of Artificial Sequence: Synthetic oligonucleotide
  Antisense strand to SEQ ID NO: 1389098
uuuaacaaagugcuuucca

SEQ ID NO: 1389100 - RNA, 19 nt, Artificial Sequence
  Description of Artificial Sequence: Synthetic oligonucleotide
  Sense strand starting at position 1496 of SEQ ID NO: 1243019
cuuuguuaaagggagcuau

SEQ ID NO: 1389101 - RNA, 19 nt, Artificial Sequence
  Description of Artificial Sequence: Synthetic oligonucleotide
  Antisense strand to SEQ ID NO: 1389100
auagcucccuuuaacaaag

SEQ ID NO: 1389102 - RNA, 19 nt, Artificial Sequence
  Description of Artificial Sequence: Synthetic oligonucleotide
  Sense strand starting at position 1500 of SEQ ID NO: 1243019
guuaaagggagcuauuauu

SEQ ID NO: 1389103 - RNA, 19 nt, Artificial Sequence
  Description of Artificial Sequence: Synthetic oligonucleotide
  Antisense strand to SEQ ID NO: 1389102
aauaauagcucccuuuaac

SEQ ID NO: 1389104 - RNA, 19 nt, Artificial Sequence
  Description of Artificial Sequence: Synthetic oligonucleotide
  Sense strand starting at position 1540 of SEQ ID NO: 1243019
gggaguauuuccuaaacuc

SEQ ID NO: 1389105 - RNA, 19 nt, Artificial Sequence
  Description of Artificial Sequence: Synthetic oligonucleotide
  Antisense strand to SEQ ID NO: 1389104
gaguuuaggaaauacuccc

SEQ ID NO: 1389106 - RNA, 19 nt, Artificial Sequence
  Description of Artificial Sequence: Synthetic oligonucleotide
  Sense strand starting at position 1880 of SEQ ID NO: 1243019
ggguucauggccuaggauu

SEQ ID NO: 1389107 - RNA, 19 nt, Artificial Sequence
  Description of Artificial Sequence: Synthetic oligonucleotide
  Antisense strand to SEQ ID NO: 1389106
aauccuaggccaugaaccc

SEQ ID NO: 1389108 - RNA, 19 nt, Artificial Sequence
  Description of Artificial Sequence: Synthetic oligonucleotide
  Sense strand starting at position 2271 of SEQ ID NO: 1243019
agucguuguuggacgaagu

SEQ ID NO: 1389109 - RNA, 19 nt, Artificial Sequence
  Description of Artificial Sequence: Synthetic oligonucleotide
  Antisense strand to SEQ ID NO: 1389108
acuucguccaacaacgacu

SEQ ID NO: 1389110 - RNA, 19 nt, Artificial Sequence
  Description of Artificial Sequence: Synthetic oligonucleotide
  Sense strand starting at position 2652 of SEQ ID NO: 1243019
ccuggaguccgauggaguu

SEQ ID NO: 1389111 - RNA, 19 nt, Artificial Sequence
  Description of Artificial Sequence: Synthetic oligonucleotide
  Antisense strand to SEQ ID NO: 1389110
aacuccaucggacuccagg

SEQ ID NO: 1389112 - RNA, 19 nt, Artificial Sequence
  Description of Artificial Sequence: Synthetic oligonucleotide
  Sense strand starting at position 2728 of SEQ ID NO: 1243019
gguaauggcgaacaggauu

SEQ ID NO: 1389113 - RNA, 19 nt, Artificial Sequence
  Description of Artificial Sequence: Synthetic oligonucleotide
  Antisense strand to SEQ ID NO: 1389112
aauccuguucgccauuacc

SEQ ID NO: 1389114 - RNA, 19 nt, Artificial Sequence
  Description of Artificial Sequence: Synthetic oligonucleotide
  Sense strand starting at position 2775 of SEQ ID NO: 1243019
uuuccuuuacauuggagga

SEQ ID NO: 1389115 - RNA, 19 nt, Artificial Sequence
  Description of Artificial Sequence: Synthetic oligonucleotide
  Antisense strand to SEQ ID NO: 1389114
uccuccaauguaaaggaaa

SEQ ID NO: 1389116 - RNA, 19 nt, Artificial Sequence
  Description of Artificial Sequence: Synthetic oligonucleotide
  Sense strand starting at position 2895 of SEQ ID NO: 1243019
ucgagaucugcguaucagg

SEQ ID NO: 1389117 - RNA, 19 nt, Artificial Sequence
  Description of Artificial Sequence: Synthetic oligonucleotide
  Antisense strand to SEQ ID NO: 1389116
ccugauacgcagaucucga

SEQ ID NO: 1389118 - RNA, 19 nt, Artificial Sequence
  Description of Artificial Sequence: Synthetic oligonucleotide
  Sense strand starting at position 2913 of SEQ ID NO: 1243019
gacaauuagcgauaaugcu

SEQ ID NO: 1389119 - RNA, 19 nt, Artificial Sequence
  Description of Artificial Sequence: Synthetic oligonucleotide
  Antisense strand to SEQ ID NO: 1389118
agcauuaucgcuaauuguc

SEQ ID NO: 1389120 - RNA, 19 nt, Artificial Sequence
  Description of Artificial Sequence: Synthetic oligonucleotide
  Sense strand starting at position 2938 of SEQ ID NO: 1243019
ugacauuuaucagggacuu

SEQ ID NO: 1389121 - RNA, 19 nt, Artificial Sequence
  Description of Artificial Sequence: Synthetic oligonucleotide
  Antisense strand to SEQ ID NO: 1389120
aagucccugauaaauguca

SEQ ID NO: 1389122 - RNA, 19 nt, Artificial Sequence
  Description of Artificial Sequence: Synthetic oligonucleotide
  Sense strand starting at position 3275 of SEQ ID NO: 1243019
ccacauugcuguucuaaga

SEQ ID NO: 1389123 - RNA, 19 nt, Artificial Sequence
  Description of Artificial Sequence: Synthetic oligonucleotide
  Antisense strand to SEQ ID NO: 1389122
ucuuagaacagcaaugugg

SEQ ID NO: 1389124 - RNA, 19 nt, Artificial Sequence
  Description of Artificial Sequence: Synthetic oligonucleotide
  Sense strand starting at position 3339 of SEQ ID NO: 1243019
uugauuaaacuccguuaaa

SEQ ID NO: 1389125 - RNA, 19 nt, Artificial Sequence
  Description of Artificial Sequence: Synthetic oligonucleotide
  Antisense strand to SEQ ID NO: 1389124
uuuaacggaguuuaaucaa

SEQ ID NO: 1389126 - RNA, 19 nt, Artificial Sequence
  Description of Artificial Sequence: Synthetic oligonucleotide
  Sense strand starting at position 3340 of SEQ ID NO: 1243019
ugauuaaacuccguuaaac

SEQ ID NO: 1389127 - RNA, 19 nt, Artificial Sequence
  Description of Artificial Sequence: Synthetic oligonucleotide
  Antisense strand to SEQ ID NO: 1389126
guuuaacggaguuuaauca

SEQ ID NO: 1389128 - RNA, 19 nt, Artificial Sequence
  Description of Artificial Sequence: Synthetic oligonucleotide
  Sense strand starting at position 3348 of SEQ ID NO: 1243019
cuccguuaaacaggagauu

SEQ ID NO: 1389129 - RNA, 19 nt, Artificial Sequence
  Description of Artificial Sequence: Synthetic oligonucleotide
  Antisense strand to SEQ ID NO: 1389128
aaucuccuguuuaacggag

SEQ ID NO: 1389130 - RNA, 19 nt, Artificial Sequence
  Description of Artificial Sequence: Synthetic oligonucleotide
  Sense strand starting at position 3377 of SEQ ID NO: 1243019
gauccucaccuaugaggua

SEQ ID NO: 1389131 - RNA, 19 nt, Artificial Sequence
  Description of Artificial Sequence: Synthetic oligonucleotide
  Antisense strand to SEQ ID NO: 1389130
uaccucauaggugaggauc

SEQ ID NO: 1389132 - RNA, 19 nt, Artificial Sequence
  Description of Artificial Sequence: Synthetic oligonucleotide
  Sense strand starting at position 3398 of SEQ ID NO: 1243019
ugcuguuaucguccucauu

SEQ ID NO: 1389133 - RNA, 19 nt, Artificial Sequence
  Description of Artificial Sequence: Synthetic oligonucleotide
  Antisense strand to SEQ ID NO: 1389132
aaugaggacgauaacagca

SEQ ID NO: 1389134 - RNA, 19 nt, Artificial Sequence
  Description of Artificial Sequence: Synthetic oligonucleotide
  Sense strand starting at position 3472 of SEQ ID NO: 1243019
ggcaauaagugacuaagaa

SEQ ID NO: 1389135 - RNA, 19 nt, Artificial Sequence
  Description of Artificial Sequence: Synthetic oligonucleotide
  Antisense strand to SEQ ID NO: 1389134
uucuuagucacuuauugcc

SEQ ID NO: 1389136 - RNA, 19 nt, Artificial Sequence
  Description of Artificial Sequence: Synthetic oligonucleotide
  Sense strand starting at position 3524 of SEQ ID NO: 1243019
gcucuuaagccauauugug

SEQ ID NO: 1389137 - RNA, 19 nt, Artificial Sequence
  Description of Artificial Sequence: Synthetic oligonucleotide
  Antisense strand to SEQ ID NO: 1389136
cacaauauggcuuaagagc

SEQ ID NO: 1389138 - RNA, 19 nt, Artificial Sequence
  Description of Artificial Sequence: Synthetic oligonucleotide
  Sense strand starting at position 3564 of SEQ ID NO: 1243019
agguaauaauguccaagac

SEQ ID NO: 1389139 - RNA, 19 nt, Artificial Sequence
  Description of Artificial Sequence: Synthetic oligonucleotide
  Antisense strand to SEQ ID NO: 1389138
gucuuggacauuauuaccu

SEQ ID NO: 1389140 - RNA, 19 nt, Artificial Sequence
  Description of Artificial Sequence: Synthetic oligonucleotide
  Sense strand starting at position 3969 of SEQ ID NO: 1243019
gcugaaguguggaauugga

SEQ ID NO: 1389141 - RNA, 19 nt, Artificial Sequence
  Description of Artificial Sequence: Synthetic oligonucleotide
  Antisense strand to SEQ ID NO: 1389140
uccaauuccacacuucagc

SEQ ID NO: 1389142 - RNA, 19 nt, Artificial Sequence
  Description of Artificial Sequence: Synthetic oligonucleotide
  Sense strand starting at position 397 of SEQ ID NO: 1243020
acuguaaugcuccaggacu

SEQ ID NO: 1389143 - RNA, 19 nt, Artificial Sequence
  Description of Artificial Sequence: Synthetic oligonucleotide
  Antisense strand to SEQ ID NO: 1389142
aguccuggagcauuacagu

SEQ ID NO: 1389144 - RNA, 19 nt, Artificial Sequence
  Description of Artificial Sequence: Synthetic oligonucleotide
  Sense strand starting at position 449 of SEQ ID NO: 1243020
ccuagauguucucauccac

SEQ ID NO: 1389145 - RNA, 19 nt, Artificial Sequence
  Description of Artificial Sequence: Synthetic oligonucleotide
  Antisense strand to SEQ ID NO: 1389144
guggaugagaacaucuagg

SEQ ID NO: 1389146 - RNA, 19 nt, Artificial Sequence
  Description of Artificial Sequence: Synthetic oligonucleotide
  Sense strand starting at position 514 of SEQ ID NO: 1243020
agaccaguguugccaauuu

SEQ ID NO: 1389147 - RNA, 19 nt, Artificial Sequence
  Description of Artificial Sequence: Synthetic oligonucleotide
  Antisense strand to SEQ ID NO: 1389146
aaauuggcaacacuggucu

SEQ ID NO: 1389148 - RNA, 19 nt, Artificial Sequence
  Description of Artificial Sequence: Synthetic oligonucleotide
  Sense strand starting at position 662 of SEQ ID NO: 1243020
agugucaucacuugaaugu

SEQ ID NO: 1389149 - RNA, 19 nt, Artificial Sequence
  Description of Artificial Sequence: Synthetic oligonucleotide
  Antisense strand to SEQ ID NO: 1389148
acauucaagugaugacacu

SEQ ID NO: 1389150 - RNA, 19 nt, Artificial Sequence
  Description of Artificial Sequence: Synthetic oligonucleotide
  Sense strand starting at position 663 of SEQ ID NO: 1243020
gugucaucacuugaauguu

SEQ ID NO: 1389151 - RNA, 19 nt, Artificial Sequence
  Description of Artificial Sequence: Synthetic oligonucleotide
  Antisense strand to SEQ ID NO: 1389150
aacauucaagugaugacac

SEQ ID NO: 1389152 - RNA, 19 nt, Artificial Sequence
  Description of Artificial Sequence: Synthetic oligonucleotide
  Sense strand starting at position 669 of SEQ ID NO: 1243020
ucacuugaauguuuaauag

SEQ ID NO: 1389153 - RNA, 19 nt, Artificial Sequence
  Description of Artificial Sequence: Synthetic oligonucleotide
  Antisense strand to SEQ ID NO: 1389152
cuauuaaacauucaaguga

SEQ ID NO: 1389154 - RNA, 19 nt, Artificial Sequence
  Description of Artificial Sequence: Synthetic oligonucleotide
  Sense strand starting at position 673 of SEQ ID NO: 1243020
uugaauguuuaauaggcau

SEQ ID NO: 1389155 - RNA, 19 nt, Artificial Sequence
  Description of Artificial Sequence: Synthetic oligonucleotide
  Antisense strand to SEQ ID NO: 1389154
augccuauuaaacauucaa

SEQ ID NO: 1389156 - RNA, 19 nt, Artificial Sequence
  Description of Artificial Sequence: Synthetic oligonucleotide
  Sense strand starting at position 679 of SEQ ID NO: 1243020
guuuaauaggcauaucaaa

SEQ ID NO: 1389157 - RNA, 19 nt, Artificial Sequence
  Description of Artificial Sequence: Synthetic oligonucleotide
  Antisense strand to SEQ ID NO: 1389156
uuugauaugccuauuaaac

SEQ ID NO: 1389158 - RNA, 19 nt, Artificial Sequence
  Description of Artificial Sequence: Synthetic oligonucleotide
  Sense strand starting at position 706 of SEQ ID NO: 1243020
guccucugucugggauguu

SEQ ID NO: 1389159 - RNA, 19 nt, Artificial Sequence
  Description of Artificial Sequence: Synthetic oligonucleotide
  Antisense strand to SEQ ID NO: 1389158
aacaucccagacagaggac

SEQ ID NO: 1389160 - RNA, 19 nt, Artificial Sequence
  Description of Artificial Sequence: Synthetic oligonucleotide
  Sense strand starting at position 733 of SEQ ID NO: 1243020
uguauaauggcauggguca

SEQ ID NO: 1389161 - RNA, 19 nt, Artificial Sequence
  Description of Artificial Sequence: Synthetic oligonucleotide
  Antisense strand to SEQ ID NO: 1389160
ugacccaugccauuauaca

SEQ ID NO: 1389162 - RNA, 19 nt, Artificial Sequence
  Description of Artificial Sequence: Synthetic oligonucleotide
  Sense strand starting at position 866 of SEQ ID NO: 1243020
auuauuguucuuuguagca

SEQ ID NO: 1389163 - RNA, 19 nt, Artificial Sequence
  Description of Artificial Sequence: Synthetic oligonucleotide
  Antisense strand to SEQ ID NO: 1389162
ugcuacaaagaacaauaau

SEQ ID NO: 1389164 - RNA, 19 nt, Artificial Sequence
  Description of Artificial Sequence: Synthetic oligonucleotide
  Sense strand starting at position 1012 of SEQ ID NO: 1243020
cgcagcaauugcucaauaa

SEQ ID NO: 1389165 - RNA, 19 nt, Artificial Sequence
  Description of Artificial Sequence: Synthetic oligonucleotide
  Antisense strand to SEQ ID NO: 1389164
uuauugagcaauugcugcg

SEQ ID NO: 1389166 - RNA, 19 nt, Artificial Sequence
  Description of Artificial Sequence: Synthetic oligonucleotide
  Sense strand starting at position 1013 of SEQ ID NO: 1243020
gcagcaauugcucaauaaa

SEQ ID NO: 1389167 - RNA, 19 nt, Artificial Sequence
  Description of Artificial Sequence: Synthetic oligonucleotide
  Antisense strand to SEQ ID NO: 1389166
uuuauugagcaauugcugc

SEQ ID NO: 1389168 - RNA, 19 nt, Artificial Sequence
  Description of Artificial Sequence: Synthetic oligonucleotide
  Sense strand starting at position 1274 of SEQ ID NO: 1243020
cgacauaccuccucgaaau

SEQ ID NO: 1389169 - RNA, 19 nt, Artificial Sequence
  Description of Artificial Sequence: Synthetic oligonucleotide
  Antisense strand to SEQ ID NO: 1389168
auuucgaggagguaugucg

SEQ ID NO: 1389170 - RNA, 19 nt, Artificial Sequence
  Description of Artificial Sequence: Synthetic oligonucleotide
  Sense strand starting at position 1284 of SEQ ID NO: 1243020
ccucgaaauuaccagaaua

SEQ ID NO: 1389171 - RNA, 19 nt, Artificial Sequence
  Description of Artificial Sequence: Synthetic oligonucleotide
  Antisense strand to SEQ ID NO: 1389170
uauucugguaauuucgagg

SEQ ID NO: 1389172 - RNA, 19 nt, Artificial Sequence
  Description of Artificial Sequence: Synthetic oligonucleotide
  Sense strand starting at position 1324 of SEQ ID NO: 1243020
ggguccuuccgccaagaau

SEQ ID NO: 1389173 - RNA, 19 nt, Artificial Sequence
  Description of Artificial Sequence: Synthetic oligonucleotide
  Antisense strand to SEQ ID NO: 1389172
auucuuggcggaaggaccc

SEQ ID NO: 1389174 - RNA, 19 nt, Artificial Sequence
  Description of Artificial Sequence: Synthetic oligonucleotide
  Sense strand starting at position 1362 of SEQ ID NO: 1243020
ggagcaaacucuuaaccau

SEQ ID NO: 1389175 - RNA, 19 nt, Artificial Sequence
  Description of Artificial Sequence: Synthetic oligonucleotide
  Antisense strand to SEQ ID NO: 1389174
augguuaagaguuugcucc

SEQ ID NO: 1389176 - RNA, 19 nt, Artificial Sequence
  Description of Artificial Sequence: Synthetic oligonucleotide
  Sense strand starting at position 1451 of SEQ ID NO: 1243020
gcgacuucuuuacucagag

SEQ ID NO: 1389177 - RNA, 19 nt, Artificial Sequence
  Description of Artificial Sequence: Synthetic oligonucleotide
  Antisense strand to SEQ ID NO: 1389176
cucugaguaaagaagucgc

SEQ ID NO: 1389178 - RNA, 19 nt, Artificial Sequence
  Description of Artificial Sequence: Synthetic oligonucleotide
  Sense strand starting at position 1465 of SEQ ID NO: 1243020
cagagcugucacuguugga

SEQ ID NO: 1389179 - RNA, 19 nt, Artificial Sequence
  Description of Artificial Sequence: Synthetic oligonucleotide
  Antisense strand to SEQ ID NO: 1389178
uccaacagugacagcucug

SEQ ID NO: 1389180 - RNA, 19 nt, Artificial Sequence
  Description of Artificial Sequence: Synthetic oligonucleotide
  Sense strand starting at position 1576 of SEQ ID NO: 1243020
gugcauaaugaaugaagga

SEQ ID NO: 1389181 - RNA, 19 nt, Artificial Sequence
  Description of Artificial Sequence: Synthetic oligonucleotide
  Antisense strand to SEQ ID NO: 1389180
uccuucauucauuaugcac

SEQ ID NO: 1389182 - RNA, 19 nt, Artificial Sequence
  Description of Artificial Sequence: Synthetic oligonucleotide
  Sense strand starting at position 1806 of SEQ ID NO: 1243020
gaggcuucuccgggagauc

SEQ ID NO: 1389183 - RNA, 19 nt, Artificial Sequence
  Description of Artificial Sequence: Synthetic oligonucleotide
  Antisense strand to SEQ ID NO: 1389182
gaucucccggagaagccuc

SEQ ID NO: 1389184 - RNA, 19 nt, Artificial Sequence
  Description of Artificial Sequence: Synthetic oligonucleotide
  Sense strand starting at position 1807 of SEQ ID NO: 1243020
aggcuucuccgggagauca

SEQ ID NO: 1389185 - RNA, 19 nt, Artificial Sequence
  Description of Artificial Sequence: Synthetic oligonucleotide
  Antisense strand to SEQ ID NO: 1389184
ugaucucccggagaagccu

SEQ ID NO: 1389186 - RNA, 19 nt, Artificial Sequence
  Description of Artificial Sequence: Synthetic oligonucleotide
  Sense strand starting at position 2304 of SEQ ID NO: 1243020
ggauacuuuaagcguguca

SEQ ID NO: 1389187 - RNA, 19 nt, Artificial Sequence
  Description of Artificial Sequence: Synthetic oligonucleotide
  Antisense strand to SEQ ID NO: 1389186
ugacacgcuuaaaguaucc

SEQ ID NO: 1389188 - RNA, 19 nt, Artificial Sequence
  Description of Artificial Sequence: Synthetic oligonucleotide
  Sense strand starting at position 2306 of SEQ ID NO: 1243020
auacuuuaagcgugucacu

SEQ ID NO: 1389189 - RNA, 19 nt, Artificial Sequence
  Description of Artificial Sequence: Synthetic oligonucleotide
  Antisense strand to SEQ ID NO: 1389188
agugacacgcuuaaaguau

SEQ ID NO: 1389190 - RNA, 19 nt, Artificial Sequence
  Description of Artificial Sequence: Synthetic oligonucleotide
  Sense strand starting at position 2315 of SEQ ID NO: 1243020
gcgugucacucugcaagaa

SEQ ID NO: 1389191 - RNA, 19 nt, Artificial Sequence
  Description of Artificial Sequence: Synthetic oligonucleotide
  Antisense strand to SEQ ID NO: 1389190
uucuugcagagugacacgc

SEQ ID NO: 1389192 - RNA, 19 nt, Artificial Sequence
  Description of Artificial Sequence: Synthetic oligonucleotide
  Sense strand starting at position 2316 of SEQ ID NO: 1243020
cgugucacucugcaagaau

SEQ ID NO: 1389193 - RNA, 19 nt, Artificial Sequence
  Description of Artificial Sequence: Synthetic oligonucleotide
  Antisense strand to SEQ ID NO: 1389192
auucuugcagagugacacg

SEQ ID NO: 1389194 - RNA, 19 nt, Artificial Sequence
  Description of Artificial Sequence: Synthetic oligonucleotide
  Sense strand starting at position 2409 of SEQ ID NO: 1243020
gugguuuauucugcgagca

SEQ ID NO: 1389195 - RNA, 19 nt, Artificial Sequence
  Description of Artificial Sequence: Synthetic oligonucleotide
  Antisense strand to SEQ ID NO: 1389194
ugcucgcagaauaaaccac

SEQ ID NO: 1389196 - RNA, 19 nt, Artificial Sequence
  Description of Artificial Sequence: Synthetic oligonucleotide
  Sense strand starting at position 2410 of SEQ ID NO: 1243020
ugguuuauucugcgagcag

SEQ ID NO: 1389197 - RNA, 19 nt, Artificial Sequence
  Description of Artificial Sequence: Synthetic oligonucleotide
  Antisense strand to SEQ ID NO: 1389196
cugcucgcagaauaaacca

SEQ ID NO: 1389198 - RNA, 19 nt, Artificial Sequence
  Description of Artificial Sequence: Synthetic oligonucleotide
  Sense strand starting at position 2702 of SEQ ID NO: 1243020
gcaccucacgucgggaaau

SEQ ID NO: 1389199 - RNA, 19 nt, Artificial Sequence
  Description of Artificial Sequence: Synthetic oligonucleotide
  Antisense strand to SEQ ID NO: 1389198
auuucccgacgugaggugc

SEQ ID NO: 1389200 - RNA, 19 nt, Artificial Sequence
  Description of Artificial Sequence: Synthetic oligonucleotide
  Sense strand starting at position 3179 of SEQ ID NO: 1243020
gccagaagucccggcagaa

SEQ ID NO: 1389201 - RNA, 19 nt, Artificial Sequence
  Description of Artificial Sequence: Synthetic oligonucleotide
  Antisense strand to SEQ ID NO: 1389200
uucugccgggacuucuggc

SEQ ID NO: 1389202 - RNA, 19 nt, Artificial Sequence
  Description of Artificial Sequence: Synthetic oligonucleotide
  Sense strand starting at position 3416 of SEQ ID NO: 1243020
gguagauccuccucugcaa

SEQ ID NO: 1389203 - RNA, 19 nt, Artificial Sequence
  Description of Artificial Sequence: Synthetic oligonucleotide
  Antisense strand to SEQ ID NO: 1389202
uugcagaggaggaucuacc

SEQ ID NO: 1389204 - RNA, 19 nt, Artificial Sequence
  Description of Artificial Sequence: Synthetic oligonucleotide
  Sense strand starting at position 3601 of SEQ ID NO: 1243020
aaguguuugacgggaggga

SEQ ID NO: 1389205 - RNA, 19 nt, Artificial Sequence
  Description of Artificial Sequence: Synthetic oligonucleotide
  Antisense strand to SEQ ID NO: 1389204
ucccucccgucaaacacuu

SEQ ID NO: 1389206 - RNA, 19 nt, Artificial Sequence
  Description of Artificial Sequence: Synthetic oligonucleotide
  Sense strand starting at position 3730 of SEQ ID NO: 1243020
gcggugcguccuugaggaa

SEQ ID NO: 1389207 - RNA, 19 nt, Artificial Sequence
  Description of Artificial Sequence: Synthetic oligonucleotide
  Antisense strand to SEQ ID NO: 1389206
uuccucaaggacgcaccgc

SEQ ID NO: 1389208 - RNA, 19 nt, Artificial Sequence
  Description of Artificial Sequence: Synthetic oligonucleotide
  Sense strand starting at position 3731 of SEQ ID NO: 1243020
cggugcguccuugaggaaa

SEQ ID NO: 1389209 - RNA, 19 nt, Artificial Sequence
  Description of Artificial Sequence: Synthetic oligonucleotide
  Antisense strand to SEQ ID NO: 1389208
uuuccucaaggacgcaccg

SEQ ID NO: 1389210 - RNA, 19 nt, Artificial Sequence
  Description of Artificial Sequence: Synthetic oligonucleotide
  Sense strand starting at position 3759 of SEQ ID NO: 1243020
cgguuucuguuuccucauu

SEQ ID NO: 1389211 - RNA, 19 nt, Artificial Sequence
  Description of Artificial Sequence: Synthetic oligonucleotide
  Antisense strand to SEQ ID NO: 1389210
aaugaggaaacagaaaccg

SEQ ID NO: 1389212 - RNA, 19 nt, Artificial Sequence
  Description of Artificial Sequence: Synthetic oligonucleotide
  Sense strand starting at position 3787 of SEQ ID NO: 1243020
agggaaguaucccagugag

SEQ ID NO: 1389213 - RNA, 19 nt, Artificial Sequence
  Description of Artificial Sequence: Synthetic oligonucleotide
  Antisense strand to SEQ ID NO: 1389212
cucacugggauacuucccu

SEQ ID NO: 1389214 - RNA, 19 nt, Artificial Sequence
  Description of Artificial Sequence: Synthetic oligonucleotide
  Sense strand starting at position 3790 of SEQ ID NO: 1243020
gaaguaucccagugaggag

SEQ ID NO: 1389215 - RNA, 19 nt, Artificial Sequence
  Description of Artificial Sequence: Synthetic oligonucleotide
  Antisense strand to SEQ ID NO: 1389214
cuccucacugggauacuuc

SEQ ID NO: 1389216 - RNA, 19 nt, Artificial Sequence
  Description of Artificial Sequence: Synthetic oligonucleotide
  Sense strand starting at position 3919 of SEQ ID NO: 1243020
acauuacuggcacagagua

SEQ ID NO: 1389217 - RNA, 19 nt, Artificial Sequence
  Description of Artificial Sequence: Synthetic oligonucleotide
  Antisense strand to SEQ ID NO: 1389216
uacucugugccaguaaugu

SEQ ID NO: 1389218 - RNA, 19 nt, Artificial Sequence
  Description of Artificial Sequence: Synthetic oligonucleotide
  Sense strand starting at position 3932 of SEQ ID NO: 1243020
agaguagggccuugaaaua

SEQ ID NO: 1389219 - RNA, 19 nt, Artificial Sequence
  Description of Artificial Sequence: Synthetic oligonucleotide
  Antisense strand to SEQ ID NO: 1389218
uauuucaaggcccuacucu

SEQ ID NO: 1389220 - RNA, 19 nt, Artificial Sequence
  Description of Artificial Sequence: Synthetic oligonucleotide
  Sense strand starting at position 3944 of SEQ ID NO: 1243020
ugaaauauuugcuggacga

SEQ ID NO: 1389221 - RNA, 19 nt, Artificial Sequence
  Description of Artificial Sequence: Synthetic oligonucleotide
  Antisense strand to SEQ ID NO: 1389220
ucguccagcaaauauuuca

SEQ ID NO: 1389222 - RNA, 19 nt, Artificial Sequence
  Description of Artificial Sequence: Synthetic oligonucleotide
  Sense strand starting at position 132 of SEQ ID NO: 1243021
cacuauugcguguuuguca

SEQ ID NO: 1389223 - RNA, 19 nt, Artificial Sequence
  Description of Artificial Sequence: Synthetic oligonucleotide
  Antisense strand to SEQ ID NO: 1389222
ugacaaacacgcaauagug

SEQ ID NO: 1389224 - RNA, 19 nt, Artificial Sequence
  Description of Artificial Sequence: Synthetic oligonucleotide
  Sense strand starting at position 161 of SEQ ID NO: 1243021
cugacugccaacugugaga

SEQ ID NO: 1389225 - RNA, 19 nt, Artificial Sequence
  Description of Artificial Sequence: Synthetic oligonucleotide
  Antisense strand to SEQ ID NO: 1389224
ucucacaguuggcagucag

SEQ ID NO: 1389226 - RNA, 19 nt, Artificial Sequence
  Description of Artificial Sequence: Synthetic oligonucleotide
  Sense strand starting at position 529 of SEQ ID NO: 1243021
gagcuaagagagcaucuua

SEQ ID NO: 1389227 - RNA, 19 nt, Artificial Sequence
  Description of Artificial Sequence: Synthetic oligonucleotide
  Antisense strand to SEQ ID NO: 1389226
uaagaugcucucuuagcuc

SEQ ID NO: 1389228 - RNA, 19 nt, Artificial Sequence
  Description of Artificial Sequence: Synthetic oligonucleotide
  Sense strand starting at position 573 of SEQ ID NO: 1243021
guucuugucuucuuaguca

SEQ ID NO: 1389229 - RNA, 19 nt, Artificial Sequence
  Description of Artificial Sequence: Synthetic oligonucleotide
  Antisense strand to SEQ ID NO: 1389228
ugacuaagaagacaagaac

SEQ ID NO: 1389230 - RNA, 19 nt, Artificial Sequence
  Description of Artificial Sequence: Synthetic oligonucleotide
  Sense strand starting at position 709 of SEQ ID NO: 1243021
acacaucucucauuguguu

SEQ ID NO: 1389231 - RNA, 19 nt, Artificial Sequence
  Description of Artificial Sequence: Synthetic oligonucleotide
  Antisense strand to SEQ ID NO: 1389230
aacacaaugagagaugugu

SEQ ID NO: 1389232 - RNA, 19 nt, Artificial Sequence
  Description of Artificial Sequence: Synthetic oligonucleotide
  Sense strand starting at position 714 of SEQ ID NO: 1243021
ucucucauuguguuucgua

SEQ ID NO: 1389233 - RNA, 19 nt, Artificial Sequence
  Description of Artificial Sequence: Synthetic oligonucleotide
  Antisense strand to SEQ ID NO: 1389232
uacgaaacacaaugagaga

SEQ ID NO: 1389234 - RNA, 19 nt, Artificial Sequence
  Description of Artificial Sequence: Synthetic oligonucleotide
  Sense strand starting at position 716 of SEQ ID NO: 1243021
ucucauuguguuucguauu

SEQ ID NO: 1389235 - RNA, 19 nt, Artificial Sequence
  Description of Artificial Sequence: Synthetic oligonucleotide
  Antisense strand to SEQ ID NO: 1389234
aauacgaaacacaaugaga

SEQ ID NO: 1389236 - RNA, 19 nt, Artificial Sequence
  Description of Artificial Sequence: Synthetic oligonucleotide
  Sense strand starting at position 728 of SEQ ID NO: 1243021
ucguauuacaucuacguau

SEQ ID NO: 1389237 - RNA, 19 nt, Artificial Sequence
  Description of Artificial Sequence: Synthetic oligonucleotide
  Antisense strand to SEQ ID NO: 1389236
auacguagauguaauacga

SEQ ID NO: 1389238 - RNA, 19 nt, Artificial Sequence
  Description of Artificial Sequence: Synthetic oligonucleotide
  Sense strand starting at position 730 of SEQ ID NO: 1243021
guauuacaucuacguaugu

SEQ ID NO: 1389239 - RNA, 19 nt, Artificial Sequence
  Description of Artificial Sequence: Synthetic oligonucleotide
  Antisense strand to SEQ ID NO: 1389238
acauacguagauguaauac

SEQ ID NO: 1389240 - RNA, 19 nt, Artificial Sequence
  Description of Artificial Sequence: Synthetic oligonucleotide
  Sense strand starting at position 734 of SEQ ID NO: 1243021
uacaucuacguaugugaca

SEQ ID NO: 1389241 - RNA, 19 nt, Artificial Sequence
  Description of Artificial Sequence: Synthetic oligonucleotide
  Antisense strand to SEQ ID NO: 1389240
ugucacauacguagaugua

SEQ ID NO: 1389242 - RNA, 19 nt, Artificial Sequence
  Description of Artificial Sequence: Synthetic oligonucleotide
  Sense strand starting at position 767 of SEQ ID NO: 1243021
acuguaaauuccucgagga

SEQ ID NO: 1389243 - RNA, 19 nt, Artificial Sequence
  Description of Artificial Sequence: Synthetic oligonucleotide
  Antisense strand to SEQ ID NO: 1389242
uccucgaggaauuuacagu

SEQ ID NO: 1389244 - RNA, 19 nt, Artificial Sequence
  Description of Artificial Sequence: Synthetic oligonucleotide
  Sense strand starting at position 768 of SEQ ID NO: 1243021
cuguaaauuccucgaggaa

SEQ ID NO: 1389245 - RNA, 19 nt, Artificial Sequence
  Description of Artificial Sequence: Synthetic oligonucleotide
  Antisense strand to SEQ ID NO: 1389244
uuccucgaggaauuuacag

SEQ ID NO: 1389246 - RNA, 19 nt, Artificial Sequence
  Description of Artificial Sequence: Synthetic oligonucleotide
  Sense strand starting at position 882 of SEQ ID NO: 1243021
uaacauguacuugggcaua

SEQ ID NO: 1389247 - RNA, 19 nt, Artificial Sequence
  Description of Artificial Sequence: Synthetic oligonucleotide
  Antisense strand to SEQ ID NO: 1389246
uaugcccaaguacauguua

SEQ ID NO: 1389248 - RNA, 19 nt, Artificial Sequence
  Description of Artificial Sequence: Synthetic oligonucleotide
  Sense strand starting at position 884 of SEQ ID NO: 1243021
acauguacuugggcauaau

SEQ ID NO: 1389249 - RNA, 19 nt, Artificial Sequence
  Description of Artificial Sequence: Synthetic oligonucleotide
  Antisense strand to SEQ ID NO: 1389248
auuaugcccaaguacaugu

SEQ ID NO: 1389250 - RNA, 19 nt, Artificial Sequence
  Description of Artificial Sequence: Synthetic oligonucleotide
  Sense strand starting at position 960 of SEQ ID NO: 1243021
uuuacuaguuguguuaacu

SEQ ID NO: 1389251 - RNA, 19 nt, Artificial Sequence
  Description of Artificial Sequence: Synthetic oligonucleotide
  Antisense strand to SEQ ID NO: 1389250
aguuaacacaacuaguaaa

SEQ ID NO: 1389252 - RNA, 19 nt, Artificial Sequence
  Description of Artificial Sequence: Synthetic oligonucleotide
  Sense strand starting at position 968 of SEQ ID NO: 1243021
uuguguuaacucugaacaa

SEQ ID NO: 1389253 - RNA, 19 nt, Artificial Sequence
  Description of Artificial Sequence: Synthetic oligonucleotide
  Antisense strand to SEQ ID NO: 1389252
uuguucagaguuaacacaa

SEQ ID NO: 1389254 - RNA, 19 nt, Artificial Sequence
  Description of Artificial Sequence: Synthetic oligonucleotide
  Sense strand starting at position 1036 of SEQ ID NO: 1243021
gauagcauuguguggacaa

SEQ ID NO: 1389255 - RNA, 19 nt, Artificial Sequence
  Description of Artificial Sequence: Synthetic oligonucleotide
  Antisense strand to SEQ ID NO: 1389254
uuguccacacaaugcuauc

SEQ ID NO: 1389256 - RNA, 19 nt, Artificial Sequence
  Description of Artificial Sequence: Synthetic oligonucleotide
  Sense strand starting at position 1038 of SEQ ID NO: 1243021
uagcauuguguggacaaua

SEQ ID NO: 1389257 - RNA, 19 nt, Artificial Sequence
  Description of Artificial Sequence: Synthetic oligonucleotide
  Antisense strand to SEQ ID NO: 1389256
uauuguccacacaaugcua

SEQ ID NO: 1389258 - RNA, 19 nt, Artificial Sequence
  Description of Artificial Sequence: Synthetic oligonucleotide
  Sense strand starting at position 1100 of SEQ ID NO: 1243021
uagcaagagcucuacaugu

SEQ ID NO: 1389259 - RNA, 19 nt, Artificial Sequence
  Description of Artificial Sequence: Synthetic oligonucleotide
  Antisense strand to SEQ ID NO: 1389258
acauguagagcucuugcua

SEQ ID NO: 1389260 - RNA, 19 nt, Artificial Sequence
  Description of Artificial Sequence: Synthetic oligonucleotide
  Sense strand starting at position 1102 of SEQ ID NO: 1243021
gcaagagcucuacaugugu

SEQ ID NO: 1389261 - RNA, 19 nt, Artificial Sequence
  Description of Artificial Sequence: Synthetic oligonucleotide
  Antisense strand to SEQ ID NO: 1389260
acacauguagagcucuugc

SEQ ID NO: 1389262 - RNA, 19 nt, Artificial Sequence
  Description of Artificial Sequence: Synthetic oligonucleotide
  Sense strand starting at position 1157 of SEQ ID NO: 1243021
uaacgagggcuccagugaa

SEQ ID NO: 1389263 - RNA, 19 nt, Artificial Sequence
  Description of Artificial Sequence: Synthetic oligonucleotide
  Antisense strand to SEQ ID NO: 1389262
uucacuggagcccucguua

SEQ ID NO: 1389264 - RNA, 19 nt, Artificial Sequence
  Description of Artificial Sequence: Synthetic oligonucleotide
  Sense strand starting at position 1206 of SEQ ID NO: 1243021
aggauuaagucuccggguu

SEQ ID NO: 1389265 - RNA, 19 nt, Artificial Sequence
  Description of Artificial Sequence: Synthetic oligonucleotide
  Antisense strand to SEQ ID NO: 1389264
aacccggagacuuaauccu

SEQ ID NO: 1389266 - RNA, 19 nt, Artificial Sequence
  Description of Artificial Sequence: Synthetic oligonucleotide
  Sense strand starting at position 1207 of SEQ ID NO: 1243021
ggauuaagucuccggguua

SEQ ID NO: 1389267 - RNA, 19 nt, Artificial Sequence
  Description of Artificial Sequence: Synthetic oligonucleotide
  Antisense strand to SEQ ID NO: 1389266
uaacccggagacuuaaucc

SEQ ID NO: 1389268 - RNA, 19 nt, Artificial Sequence
  Description of Artificial Sequence: Synthetic oligonucleotide
  Sense strand starting at position 1222 of SEQ ID NO: 1243021
guuagagaggcacauguaa

SEQ ID NO: 1389269 - RNA, 19 nt, Artificial Sequence
  Description of Artificial Sequence: Synthetic oligonucleotide
  Antisense strand to SEQ ID NO: 1389268
uuacaugugccucucuaac

SEQ ID NO: 1389270 - RNA, 19 nt, Artificial Sequence
  Description of Artificial Sequence: Synthetic oligonucleotide
  Sense strand starting at position 1304 of SEQ ID NO: 1243021
acuuccaugcuagagugaa

SEQ ID NO: 1389271 - RNA, 19 nt, Artificial Sequence
  Description of Artificial Sequence: Synthetic oligonucleotide
  Antisense strand to SEQ ID NO: 1389270
uucacucuagcauggaagu

SEQ ID NO: 1389272 - RNA, 19 nt, Artificial Sequence
  Description of Artificial Sequence: Synthetic oligonucleotide
  Sense strand starting at position 1312 of SEQ ID NO: 1243021
gcuagagugaaaggaaauu

SEQ ID NO: 1389273 - RNA, 19 nt, Artificial Sequence
  Description of Artificial Sequence: Synthetic oligonucleotide
  Antisense strand to SEQ ID NO: 1389272
aauuuccuuucacucuagc

SEQ ID NO: 1389274 - RNA, 19 nt, Artificial Sequence
  Description of Artificial Sequence: Synthetic oligonucleotide
  Sense strand starting at position 1351 of SEQ ID NO: 1243021
ccuguaaucgcagagcauc

SEQ ID NO: 1389275 - RNA, 19 nt, Artificial Sequence
  Description of Artificial Sequence: Synthetic oligonucleotide
  Antisense strand to SEQ ID NO: 1389274
gaugcucugcgauuacagg

SEQ ID NO: 1389276 - RNA, 19 nt, Artificial Sequence
  Description of Artificial Sequence: Synthetic oligonucleotide
  Sense strand starting at position 1427 of SEQ ID NO: 1243021
gcaucucucagggaugucu

SEQ ID NO: 1389277 - RNA, 19 nt, Artificial Sequence
  Description of Artificial Sequence: Synthetic oligonucleotide
  Antisense strand to SEQ ID NO: 1389276
agacaucccugagagaugc

SEQ ID NO: 1389278 - RNA, 19 nt, Artificial Sequence
  Description of Artificial Sequence: Synthetic oligonucleotide
  Sense strand starting at position 1873 of SEQ ID NO: 1243021
gggcucaaguaccugagau

SEQ ID NO: 1389279 - RNA, 19 nt, Artificial Sequence
  Description of Artificial Sequence: Synthetic oligonucleotide
  Antisense strand to SEQ ID NO: 1389278
aucucagguacuugagccc

SEQ ID NO: 1389280 - RNA, 19 nt, Artificial Sequence
  Description of Artificial Sequence: Synthetic oligonucleotide
  Sense strand starting at position 1874 of SEQ ID NO: 1243021
ggcucaaguaccugagauc

SEQ ID NO: 1389281 - RNA, 19 nt, Artificial Sequence
  Description of Artificial Sequence: Synthetic oligonucleotide
  Antisense strand to SEQ ID NO: 1389280
gaucucagguacuugagcc

SEQ ID NO: 1389282 - RNA, 19 nt, Artificial Sequence
  Description of Artificial Sequence: Synthetic oligonucleotide
  Sense strand starting at position 2499 of SEQ ID NO: 1243021
ggauguuccugucuuuaua

SEQ ID NO: 1389283 - RNA, 19 nt, Artificial Sequence
  Description of Artificial Sequence: Synthetic oligonucleotide
  Antisense strand to SEQ ID NO: 1389282
uauaaagacaggaacaucc

SEQ ID NO: 1389284 - RNA, 19 nt, Artificial Sequence
  Description of Artificial Sequence: Synthetic oligonucleotide
  Sense strand starting at position 2502 of SEQ ID NO: 1243021
uguuccugucuuuauaacu

SEQ ID NO: 1389285 - RNA, 19 nt, Artificial Sequence
  Description of Artificial Sequence: Synthetic oligonucleotide
  Antisense strand to SEQ ID NO: 1389284
aguuauaaagacaggaaca

SEQ ID NO: 1389286 - RNA, 19 nt, Artificial Sequence
  Description of Artificial Sequence: Synthetic oligonucleotide
  Sense strand starting at position 2550 of SEQ ID NO: 1243021
aaacgcuuagucugugauu

SEQ ID NO: 1389287 - RNA, 19 nt, Artificial Sequence
  Description of Artificial Sequence: Synthetic oligonucleotide
  Antisense strand to SEQ ID NO: 1389286
aaucacagacuaagcguuu

SEQ ID NO: 1389288 - RNA, 19 nt, Artificial Sequence
  Description of Artificial Sequence: Synthetic oligonucleotide
  Sense strand starting at position 2593 of SEQ ID NO: 1243021
guucccaguccuuaagagu

SEQ ID NO: 1389289 - RNA, 19 nt, Artificial Sequence
  Description of Artificial Sequence: Synthetic oligonucleotide
  Antisense strand to SEQ ID NO: 1389288
acucuuaaggacugggaac

SEQ ID NO: 1389290 - RNA, 19 nt, Artificial Sequence
  Description of Artificial Sequence: Synthetic oligonucleotide
  Sense strand starting at position 3048 of SEQ ID NO: 1243021
uuagaucaguguuucugaa

SEQ ID NO: 1389291 - RNA, 19 nt, Artificial Sequence
  Description of Artificial Sequence: Synthetic oligonucleotide
  Antisense strand to SEQ ID NO: 1389290
uucagaaacacugaucuaa

SEQ ID NO: 1389292 - RNA, 19 nt, Artificial Sequence
  Description of Artificial Sequence: Synthetic oligonucleotide
  Sense strand starting at position 3050 of SEQ ID NO: 1243021
agaucaguguuucugaaac

SEQ ID NO: 1389293 - RNA, 19 nt, Artificial Sequence
  Description of Artificial Sequence: Synthetic oligonucleotide
  Antisense strand to SEQ ID NO: 1389292
guuucagaaacacugaucu

SEQ ID NO: 1389294 - RNA, 19 nt, Artificial Sequence
  Description of Artificial Sequence: Synthetic oligonucleotide
  Sense strand starting at position 3077 of SEQ ID NO: 1243021
uugggaucccacuacaguu

SEQ ID NO: 1389295 - RNA, 19 nt, Artificial Sequence
  Description of Artificial Sequence: Synthetic oligonucleotide
  Antisense strand to SEQ ID NO: 1389294
aacuguagugggaucccaa

SEQ ID NO: 1389296 - RNA, 19 nt, Artificial Sequence
  Description of Artificial Sequence: Synthetic oligonucleotide
  Sense strand starting at position 3574 of SEQ ID NO: 1243021
gcacuacagcaauagauau

SEQ ID NO: 1389297 - RNA, 19 nt, Artificial Sequence
  Description of Artificial Sequence: Synthetic oligonucleotide
  Antisense strand to SEQ ID NO: 1389296
auaucuauugcuguagugc

SEQ ID NO: 1389298 - RNA, 19 nt, Artificial Sequence
  Description of Artificial Sequence: Synthetic oligonucleotide
  Sense strand starting at position 3644 of SEQ ID NO: 1243021
agugaugauggcugcguaa

SEQ ID NO: 1389299 - RNA, 19 nt, Artificial Sequence
  Description of Artificial Sequence: Synthetic oligonucleotide
  Antisense strand to SEQ ID NO: 1389298
uuacgcagccaucaucacu

SEQ ID NO: 1389300 - RNA, 19 nt, Artificial Sequence
  Description of Artificial Sequence: Synthetic oligonucleotide
  Sense strand starting at position 3653 of SEQ ID NO: 1243021
ggcugcguaacguaauaaa

SEQ ID NO: 1389301 - RNA, 19 nt, Artificial Sequence
  Description of Artificial Sequence: Synthetic oligonucleotide
  Antisense strand to SEQ ID NO: 1389300
uuuauuacguuacgcagcc

SEQ ID NO: 1389302 - RNA, 19 nt, Artificial Sequence
  Description of Artificial Sequence: Synthetic oligonucleotide
  Sense strand starting at position 117 of SEQ ID NO: 1243022
uuccuugcaguguaaguua

SEQ ID NO: 1389303 - RNA, 19 nt, Artificial Sequence
  Description of Artificial Sequence: Synthetic oligonucleotide
  Antisense strand to SEQ ID NO: 1389302
uaacuuacacugcaaggaa

SEQ ID NO: 1389304 - RNA, 19 nt, Artificial Sequence
  Description of Artificial Sequence: Synthetic oligonucleotide
  Sense strand starting at position 124 of SEQ ID NO: 1243022
caguguaaguuaccaguca

SEQ ID NO: 1389305 - RNA, 19 nt, Artificial Sequence
  Description of Artificial Sequence: Synthetic oligonucleotide
  Antisense strand to SEQ ID NO: 1389304
ugacugguaacuuacacug

SEQ ID NO: 1389306 - RNA, 19 nt, Artificial Sequence
  Description of Artificial Sequence: Synthetic oligonucleotide
  Sense strand starting at position 132 of SEQ ID NO: 1243022
guuaccagucaugaugaau

SEQ ID NO: 1389307 - RNA, 19 nt, Artificial Sequence
  Description of Artificial Sequence: Synthetic oligonucleotide
  Antisense strand to SEQ ID NO: 1389306
auucaucaugacugguaac

SEQ ID NO: 1389308 - RNA, 19 nt, Artificial Sequence
  Description of Artificial Sequence: Synthetic oligonucleotide
  Sense strand starting at position 221 of SEQ ID NO: 1243022
cuagaauaucugcauugcu

SEQ ID NO: 1389309 - RNA, 19 nt, Artificial Sequence
  Description of Artificial Sequence: Synthetic oligonucleotide
  Antisense strand to SEQ ID NO: 1389308
agcaaugcagauauucuag

SEQ ID NO: 1389310 - RNA, 19 nt, Artificial Sequence
  Description of Artificial Sequence: Synthetic oligonucleotide
  Sense strand starting at position 387 of SEQ ID NO: 1243022
cacuauugcguguuuguca

SEQ ID NO: 1389311 - RNA, 19 nt, Artificial Sequence
  Description of Artificial Sequence: Synthetic oligonucleotide
  Antisense strand to SEQ ID NO: 1389310
ugacaaacacgcaauagug

SEQ ID NO: 1389312 - RNA, 19 nt, Artificial Sequence
  Description of Artificial Sequence: Synthetic oligonucleotide
  Sense strand starting at position 416 of SEQ ID NO: 1243022
cugacugccaacugugaga

SEQ ID NO: 1389313 - RNA, 19 nt, Artificial Sequence
  Description of Artificial Sequence: Synthetic oligonucleotide
  Antisense strand to SEQ ID NO: 1389312
ucucacaguuggcagucag

SEQ ID NO: 1389314 - RNA, 19 nt, Artificial Sequence
  Description of Artificial Sequence: Synthetic oligonucleotide
  Sense strand starting at position 784 of SEQ ID NO: 1243022
gagcuaagagagcaucuua

SEQ ID NO: 1389315 - RNA, 19 nt, Artificial Sequence
  Description of Artificial Sequence: Synthetic oligonucleotide
  Antisense strand to SEQ ID NO: 1389314
uaagaugcucucuuagcuc

SEQ ID NO: 1389316 - RNA, 19 nt, Artificial Sequence
  Description of Artificial Sequence: Synthetic oligonucleotide
  Sense strand starting at position 964 of SEQ ID NO: 1243022
acacaucucucauuguguu

SEQ ID NO: 1389317 - RNA, 19 nt, Artificial Sequence
  Description of Artificial Sequence: Synthetic oligonucleotide
  Antisense strand to SEQ ID NO: 1389316
aacacaaugagagaugugu

SEQ ID NO: 1389318 - RNA, 19 nt, Artificial Sequence
  Description of Artificial Sequence: Synthetic oligonucleotide
  Sense strand starting at position 969 of SEQ ID NO: 1243022
ucucucauuguguuucgua

SEQ ID NO: 1389319 - RNA, 19 nt, Artificial Sequence
  Description of Artificial Sequence: Synthetic oligonucleotide
  Antisense strand to SEQ ID NO: 1389318
uacgaaacacaaugagaga

SEQ ID NO: 1389320 - RNA, 19 nt, Artificial Sequence
  Description of Artificial Sequence: Synthetic oligonucleotide
  Sense strand starting at position 971 of SEQ ID NO: 1243022
ucucauuguguuucguauu

SEQ ID NO: 1389321 - RNA, 19 nt, Artificial Sequence
  Description of Artificial Sequence: Synthetic oligonucleotide
  Antisense strand to SEQ ID NO: 1389320
aauacgaaacacaaugaga

SEQ ID NO: 1389322 - RNA, 19 nt, Artificial Sequence
  Description of Artificial Sequence: Synthetic oligonucleotide
  Sense strand starting at position 983 of SEQ ID NO: 1243022
ucguauuacaucuacguau

SEQ ID NO: 1389323 - RNA, 19 nt, Artificial Sequence
  Description of Artificial Sequence: Synthetic oligonucleotide
  Antisense strand to SEQ ID NO: 1389322
auacguagauguaauacga

SEQ ID NO: 1389324 - RNA, 19 nt, Artificial Sequence
  Description of Artificial Sequence: Synthetic oligonucleotide
  Sense strand starting at position 989 of SEQ ID NO: 1243022
uacaucuacguaugugaca

SEQ ID NO: 1389325 - RNA, 19 nt, Artificial Sequence
  Description of Artificial Sequence: Synthetic oligonucleotide
  Antisense strand to SEQ ID NO: 1389324
ugucacauacguagaugua

SEQ ID NO: 1389326 - RNA, 19 nt, Artificial Sequence
  Description of Artificial Sequence: Synthetic oligonucleotide
  Sense strand starting at position 1022 of SEQ ID NO: 1243022
acuguaaauuccucgagga

SEQ ID NO: 1389327 - RNA, 19 nt, Artificial Sequence
  Description of Artificial Sequence: Synthetic oligonucleotide
  Antisense strand to SEQ ID NO: 1389326
uccucgaggaauuuacagu

SEQ ID NO: 1389328 - RNA, 19 nt, Artificial Sequence
  Description of Artificial Sequence: Synthetic oligonucleotide
  Sense strand starting at position 1023 of SEQ ID NO: 1243022
cuguaaauuccucgaggaa

SEQ ID NO: 1389329 - RNA, 19 nt, Artificial Sequence
  Description of Artificial Sequence: Synthetic oligonucleotide
  Antisense strand to SEQ ID NO: 1389328
uuccucgaggaauuuacag

SEQ ID NO: 1389330 - RNA, 19 nt, Artificial Sequence
  Description of Artificial Sequence: Synthetic oligonucleotide
  Sense strand starting at position 1137 of SEQ ID NO: 1243022
uaacauguacuugggcaua

SEQ ID NO: 1389331 - RNA, 19 nt, Artificial Sequence
  Description of Artificial Sequence: Synthetic oligonucleotide
  Antisense strand to SEQ ID NO: 1389330
uaugcccaaguacauguua

SEQ ID NO: 1389332 - RNA, 19 nt, Artificial Sequence
  Description of Artificial Sequence: Synthetic oligonucleotide
  Sense strand starting at position 1139 of SEQ ID NO: 1243022
acauguacuugggcauaau

SEQ ID NO: 1389333 - RNA, 19 nt, Artificial Sequence
  Description of Artificial Sequence: Synthetic oligonucleotide
  Antisense strand to SEQ ID NO: 1389332
auuaugcccaaguacaugu

SEQ ID NO: 1389334 - RNA, 19 nt, Artificial Sequence
  Description of Artificial Sequence: Synthetic oligonucleotide
  Sense strand starting at position 1215 of SEQ ID NO: 1243022
uuuacuaguuguguuaacu

SEQ ID NO: 1389335 - RNA, 19 nt, Artificial Sequence
  Description of Artificial Sequence: Synthetic oligonucleotide
  Antisense strand to SEQ ID NO: 1389334
aguuaacacaacuaguaaa

SEQ ID NO: 1389336 - RNA, 19 nt, Artificial Sequence
  Description of Artificial Sequence: Synthetic oligonucleotide
  Sense strand starting at position 1223 of SEQ ID NO: 1243022
uuguguuaacucugaacaa

SEQ ID NO: 1389337 - RNA, 19 nt, Artificial Sequence
  Description of Artificial Sequence: Synthetic oligonucleotide
  Antisense strand to SEQ ID NO: 1389336
uuguucagaguuaacacaa

SEQ ID NO: 1389338 - RNA, 19 nt, Artificial Sequence
  Description of Artificial Sequence: Synthetic oligonucleotide
  Sense strand starting at position 1291 of SEQ ID NO: 1243022
gauagcauuguguggacaa

SEQ ID NO: 1389339 - RNA, 19 nt, Artificial Sequence
  Description of Artificial Sequence: Synthetic oligonucleotide
  Antisense strand to SEQ ID NO: 1389338
uuguccacacaaugcuauc

SEQ ID NO: 1389340 - RNA, 19 nt, Artificial Sequence
  Description of Artificial Sequence: Synthetic oligonucleotide
  Sense strand starting at position 1293 of SEQ ID NO: 1243022
uagcauuguguggacaaua

SEQ ID NO: 1389341 - RNA, 19 nt, Artificial Sequence
  Description of Artificial Sequence: Synthetic oligonucleotide
  Antisense strand to SEQ ID NO: 1389340
uauuguccacacaaugcua

SEQ ID NO: 1389342 - RNA, 19 nt, Artificial Sequence
  Description of Artificial Sequence: Synthetic oligonucleotide
  Sense strand starting at position 1355 of SEQ ID NO: 1243022
uagcaagagcucuacaugu

SEQ ID NO: 1389343 - RNA, 19 nt, Artificial Sequence
  Description of Artificial Sequence: Synthetic oligonucleotide
  Antisense strand to SEQ ID NO: 1389342
acauguagagcucuugcua

SEQ ID NO: 1389344 - RNA, 19 nt, Artificial Sequence
  Description of Artificial Sequence: Synthetic oligonucleotide
  Sense strand starting at position 1357 of SEQ ID NO: 1243022
gcaagagcucuacaugugu

SEQ ID NO: 1389345 - RNA, 19 nt, Artificial Sequence
  Description of Artificial Sequence: Synthetic oligonucleotide
  Antisense strand to SEQ ID NO: 1389344
acacauguagagcucuugc

SEQ ID NO: 1389346 - RNA, 19 nt, Artificial Sequence
  Description of Artificial Sequence: Synthetic oligonucleotide
  Sense strand starting at position 1412 of SEQ ID NO: 1243022
uaacgagggcuccagugaa

SEQ ID NO: 1389347 - RNA, 19 nt, Artificial Sequence
  Description of Artificial Sequence: Synthetic oligonucleotide
  Antisense strand to SEQ ID NO: 1389346
uucacuggagcccucguua

SEQ ID NO: 1389348 - RNA, 19 nt, Artificial Sequence
  Description of Artificial Sequence: Synthetic oligonucleotide
  Sense strand starting at position 1461 of SEQ ID NO: 1243022
aggauuaagucuccggguu

SEQ ID NO: 1389349 - RNA, 19 nt, Artificial Sequence
  Description of Artificial Sequence: Synthetic oligonucleotide
  Antisense strand to SEQ ID NO: 1389348
aacccggagacuuaauccu

SEQ ID NO: 1389350 - RNA, 19 nt, Artificial Sequence
  Description of Artificial Sequence: Synthetic oligonucleotide
  Sense strand starting at position 1462 of SEQ ID NO: 1243022
ggauuaagucuccggguua

SEQ ID NO: 1389351 - RNA, 19 nt, Artificial Sequence
  Description of Artificial Sequence: Synthetic oligonucleotide
  Antisense strand to SEQ ID NO: 1389350
uaacccggagacuuaaucc

SEQ ID NO: 1389352 - RNA, 19 nt, Artificial Sequence
  Description of Artificial Sequence: Synthetic oligonucleotide
  Sense strand starting at position 1477 of SEQ ID NO: 1243022
guuagagaggcacauguaa

SEQ ID NO: 1389353 - RNA, 19 nt, Artificial Sequence
  Description of Artificial Sequence: Synthetic oligonucleotide
  Antisense strand to SEQ ID NO: 1389352
uuacaugugccucucuaac

SEQ ID NO: 1389354 - RNA, 19 nt, Artificial Sequence
  Description of Artificial Sequence: Synthetic oligonucleotide
  Sense strand starting at position 1559 of SEQ ID NO: 1243022
acuuccaugcuagagugaa

SEQ ID NO: 1389355 - RNA, 19 nt, Artificial Sequence
  Description of Artificial Sequence: Synthetic oligonucleotide
  Antisense strand to SEQ ID NO: 1389354
uucacucuagcauggaagu

SEQ ID NO: 1389356 - RNA, 19 nt, Artificial Sequence
  Description of Artificial Sequence: Synthetic oligonucleotide
  Sense strand starting at position 1567 of SEQ ID NO: 1243022
gcuagagugaaaggaaauu

SEQ ID NO: 1389357 - RNA, 19 nt, Artificial Sequence
  Description of Artificial Sequence: Synthetic oligonucleotide
  Antisense strand to SEQ ID NO: 1389356
aauuuccuuucacucuagc

SEQ ID NO: 1389358 - RNA, 19 nt, Artificial Sequence
  Description of Artificial Sequence: Synthetic oligonucleotide
  Sense strand starting at position 1606 of SEQ ID NO: 1243022
ccuguaaucgcagagcauc

SEQ ID NO: 1389359 - RNA, 19 nt, Artificial Sequence
  Description of Artificial Sequence: Synthetic oligonucleotide
  Antisense strand to SEQ ID NO: 1389358
gaugcucugcgauuacagg

SEQ ID NO: 1389360 - RNA, 19 nt, Artificial Sequence
  Description of Artificial Sequence: Synthetic oligonucleotide
  Sense strand starting at position 1682 of SEQ ID NO: 1243022
gcaucucucagggaugucu

SEQ ID NO: 1389361 - RNA, 19 nt, Artificial Sequence
  Description of Artificial Sequence: Synthetic oligonucleotide
  Antisense strand to SEQ ID NO: 1389360
agacaucccugagagaugc

SEQ ID NO: 1389362 - RNA, 19 nt, Artificial Sequence
  Description of Artificial Sequence: Synthetic oligonucleotide
  Sense strand starting at position 2128 of SEQ ID NO: 1243022
gggcucaaguaccugagau

SEQ ID NO: 1389363 - RNA, 19 nt, Artificial Sequence
  Description of Artificial Sequence: Synthetic oligonucleotide
  Antisense strand to SEQ ID NO: 1389362
aucucagguacuugagccc

SEQ ID NO: 1389364 - RNA, 19 nt, Artificial Sequence
  Description of Artificial Sequence: Synthetic oligonucleotide
  Sense strand starting at position 2129 of SEQ ID NO: 1243022
ggcucaaguaccugagauc

SEQ ID NO: 1389365 - RNA, 19 nt, Artificial Sequence
  Description of Artificial Sequence: Synthetic oligonucleotide
  Antisense strand to SEQ ID NO: 1389364
gaucucagguacuugagcc

SEQ ID NO: 1389366 - RNA, 19 nt, Artificial Sequence
  Description of Artificial Sequence: Synthetic oligonucleotide
  Sense strand starting at position 2754 of SEQ ID NO: 1243022
ggauguuccugucuuuaua

SEQ ID NO: 1389367 - RNA, 19 nt, Artificial Sequence
  Description of Artificial Sequence: Synthetic oligonucleotide
  Antisense strand to SEQ ID NO: 1389366
uauaaagacaggaacaucc

SEQ ID NO: 1389368 - RNA, 19 nt, Artificial Sequence
  Description of Artificial Sequence: Synthetic oligonucleotide
  Sense strand starting at position 2757 of SEQ ID NO: 1243022
uguuccugucuuuauaacu

SEQ ID NO: 1389369 - RNA, 19 nt, Artificial Sequence
  Description of Artificial Sequence: Synthetic oligonucleotide
  Antisense strand to SEQ ID NO: 1389368
aguuauaaagacaggaaca

SEQ ID NO: 1389370 - RNA, 19 nt, Artificial Sequence
  Description of Artificial Sequence: Synthetic oligonucleotide
  Sense strand starting at position 2848 of SEQ ID NO: 1243022
guucccaguccuuaagagu

SEQ ID NO: 1389371 - RNA, 19 nt, Artificial Sequence
  Description of Artificial Sequence: Synthetic oligonucleotide
  Antisense strand to SEQ ID NO: 1389370
acucuuaaggacugggaac

SEQ ID NO: 1389372 - RNA, 19 nt, Artificial Sequence
  Description of Artificial Sequence: Synthetic oligonucleotide
  Sense strand starting at position 3303 of SEQ ID NO: 1243022
uuagaucaguguuucugaa

SEQ ID NO: 1389373 - RNA, 19 nt, Artificial Sequence
  Description of Artificial Sequence: Synthetic oligonucleotide
  Antisense strand to SEQ ID NO: 1389372
uucagaaacacugaucuaa

SEQ ID NO: 1389374 - RNA, 19 nt, Artificial Sequence
  Description of Artificial Sequence: Synthetic oligonucleotide
  Sense strand starting at position 3305 of SEQ ID NO: 1243022
agaucaguguuucugaaac

SEQ ID NO: 1389375 - RNA, 19 nt, Artificial Sequence
  Description of Artificial Sequence: Synthetic oligonucleotide
  Antisense strand to SEQ ID NO: 1389374
guuucagaaacacugaucu

SEQ ID NO: 1389376 - RNA, 19 nt, Artificial Sequence
  Description of Artificial Sequence: Synthetic oligonucleotide
  Sense strand starting at position 3332 of SEQ ID NO: 1243022
uugggaucccacuacaguu

SEQ ID NO: 1389377 - RNA, 19 nt, Artificial Sequence
  Description of Artificial Sequence: Synthetic oligonucleotide
  Antisense strand to SEQ ID NO: 1389376
aacuguagugggaucccaa

SEQ ID NO: 1389378 - RNA, 19 nt, Artificial Sequence
  Description of Artificial Sequence: Synthetic oligonucleotide
  Sense strand starting at position 3829 of SEQ ID NO: 1243022
gcacuacagcaauagauau

SEQ ID NO: 1389379 - RNA, 19 nt, Artificial Sequence
  Description of Artificial Sequence: Synthetic oligonucleotide
  Antisense strand to SEQ ID NO: 1389378
auaucuauugcuguagugc

SEQ ID NO: 1389380 - RNA, 19 nt, Artificial Sequence
  Description of Artificial Sequence: Synthetic oligonucleotide
  Sense strand starting at position 3908 of SEQ ID NO: 1243022
ggcugcguaacguaauaaa

SEQ ID NO: 1389381 - RNA, 19 nt, Artificial Sequence
  Description of Artificial Sequence: Synthetic oligonucleotide
  Antisense strand to SEQ ID NO: 1389380
uuuauuacguuacgcagcc

SEQ ID NO: 1389382 - RNA, 19 nt, Artificial Sequence
  Description of Artificial Sequence: Synthetic oligonucleotide
  Sense strand starting at position 193 of SEQ ID NO: 1243023
uccucaguuugcuugucaa

SEQ ID NO: 1389383 - RNA, 19 nt, Artificial Sequence
  Description of Artificial Sequence: Synthetic oligonucleotide
  Antisense strand to SEQ ID NO: 1389382
uugacaagcaaacugagga

SEQ ID NO: 1389384 - RNA, 19 nt, Artificial Sequence
  Description of Artificial Sequence: Synthetic oligonucleotide
  Sense strand starting at position 196 of SEQ ID NO: 1243023
ucaguuugcuugucaauaa

SEQ ID NO: 1389385 - RNA, 19 nt, Artificial Sequence
  Description of Artificial Sequence: Synthetic oligonucleotide
  Antisense strand to SEQ ID NO: 1389384
uuauugacaagcaaacuga

SEQ ID NO: 1389386 - RNA, 19 nt, Artificial Sequence
  Description of Artificial Sequence: Synthetic oligonucleotide
  Sense strand starting at position 244 of SEQ ID NO: 1243023
aggaucaaaugggaugaaa

SEQ ID NO: 1389387 - RNA, 19 nt, Artificial Sequence
  Description of Artificial Sequence: Synthetic oligonucleotide
  Antisense strand to SEQ ID NO: 1389386
uuucaucccauuugauccu

SEQ ID NO: 1389388 - RNA, 19 nt, Artificial Sequence
  Description of Artificial Sequence: Synthetic oligonucleotide
  Sense strand starting at position 482 of SEQ ID NO: 1243023
gccaauucucaggguggca

SEQ ID NO: 1389389 - RNA, 19 nt, Artificial Sequence
  Description of Artificial Sequence: Synthetic oligonucleotide
  Antisense strand to SEQ ID NO: 1389388
ugccacccugagaauuggc

SEQ ID NO: 1389390 - RNA, 19 nt, Artificial Sequence
  Description of Artificial Sequence: Synthetic oligonucleotide
  Sense strand starting at position 484 of SEQ ID NO: 1243023
caauucucaggguggcaau

SEQ ID NO: 1389391 - RNA, 19 nt, Artificial Sequence
  Description of Artificial Sequence: Synthetic oligonucleotide
  Antisense strand to SEQ ID NO: 1389390
auugccacccugagaauug

SEQ ID NO: 1389392 - RNA, 19 nt, Artificial Sequence
  Description of Artificial Sequence: Synthetic oligonucleotide
  Sense strand starting at position 598 of SEQ ID NO: 1243023
ucaucugaccuuugucuua

SEQ ID NO: 1389393 - RNA, 19 nt, Artificial Sequence
  Description of Artificial Sequence: Synthetic oligonucleotide
  Antisense strand to SEQ ID NO: 1389392
uaagacaaaggucagauga

SEQ ID NO: 1389394 - RNA, 19 nt, Artificial Sequence
  Description of Artificial Sequence: Synthetic oligonucleotide
  Sense strand starting at position 635 of SEQ ID NO: 1243023
aagucuguauggucauaua

SEQ ID NO: 1389395 - RNA, 19 nt, Artificial Sequence
  Description of Artificial Sequence: Synthetic oligonucleotide
  Antisense strand to SEQ ID NO: 1389394
uauaugaccauacagacuu

SEQ ID NO: 1389396 - RNA, 19 nt, Artificial Sequence
  Description of Artificial Sequence: Synthetic oligonucleotide
  Sense strand starting at position 638 of SEQ ID NO: 1243023
ucuguauggucauauaauc

SEQ ID NO: 1389397 - RNA, 19 nt, Artificial Sequence
  Description of Artificial Sequence: Synthetic oligonucleotide
  Antisense strand to SEQ ID NO: 1389396
gauuauaugaccauacaga

SEQ ID NO: 1389398 - RNA, 19 nt, Artificial Sequence
  Description of Artificial Sequence: Synthetic oligonucleotide
  Sense strand starting at position 682 of SEQ ID NO: 1243023
agguuagaaagcugagaua

SEQ ID NO: 1389399 - RNA, 19 nt, Artificial Sequence
  Description of Artificial Sequence: Synthetic oligonucleotide
  Antisense strand to SEQ ID NO: 1389398
uaucucagcuuucuaaccu

SEQ ID NO: 1389400 - RNA, 19 nt, Artificial Sequence
  Description of Artificial Sequence: Synthetic oligonucleotide
  Sense strand starting at position 685 of SEQ ID NO: 1243023
uuagaaagcugagauaaca

SEQ ID NO: 1389401 - RNA, 19 nt, Artificial Sequence
  Description of Artificial Sequence: Synthetic oligonucleotide
  Antisense strand to SEQ ID NO: 1389400
uguuaucucagcuuucuaa

SEQ ID NO: 1389402 - RNA, 19 nt, Artificial Sequence
  Description of Artificial Sequence: Synthetic oligonucleotide
  Sense strand starting at position 893 of SEQ ID NO: 1243023
uuguaauacuuaggacaac

SEQ ID NO: 1389403 - RNA, 19 nt, Artificial Sequence
  Description of Artificial Sequence: Synthetic oligonucleotide
  Antisense strand to SEQ ID NO: 1389402
guuguccuaaguauuacaa

SEQ ID NO: 1389404 - RNA, 19 nt, Artificial Sequence
  Description of Artificial Sequence: Synthetic oligonucleotide
  Sense strand starting at position 1096 of SEQ ID NO: 1243023
gcacaaauguggugggaga

SEQ ID NO: 1389405 - RNA, 19 nt, Artificial Sequence
  Description of Artificial Sequence: Synthetic oligonucleotide
  Antisense strand to SEQ ID NO: 1389404
ucucccaccacauuugugc

SEQ ID NO: 1389406 - RNA, 19 nt, Artificial Sequence
  Description of Artificial Sequence: Synthetic oligonucleotide
  Sense strand starting at position 1806 of SEQ ID NO: 1243023
gugcccgacccguguuaaa

SEQ ID NO: 1389407 - RNA, 19 nt, Artificial Sequence
  Description of Artificial Sequence: Synthetic oligonucleotide
  Antisense strand to SEQ ID NO: 1389406
uuuaacacgggucgggcac

SEQ ID NO: 1389408 - RNA, 19 nt, Artificial Sequence
  Description of Artificial Sequence: Synthetic oligonucleotide
  Sense strand starting at position 1808 of SEQ ID NO: 1243023
gcccgacccguguuaaagu

SEQ ID NO: 1389409 - RNA, 19 nt, Artificial Sequence
  Description of Artificial Sequence: Synthetic oligonucleotide
  Antisense strand to SEQ ID NO: 1389408
acuuuaacacgggucgggc

SEQ ID NO: 1389410 - RNA, 19 nt, Artificial Sequence
  Description of Artificial Sequence: Synthetic oligonucleotide
  Sense strand starting at position 1929 of SEQ ID NO: 1243023
ucgguuacccuguaauuac

SEQ ID NO: 1389411 - RNA, 19 nt, Artificial Sequence
  Description of Artificial Sequence: Synthetic oligonucleotide
  Antisense strand to SEQ ID NO: 1389410
guaauuacaggguaaccga

SEQ ID NO: 1389412 - RNA, 19 nt, Artificial Sequence
  Description of Artificial Sequence: Synthetic oligonucleotide
  Sense strand starting at position 1938 of SEQ ID NO: 1243023
cuguaauuaccugacagcu

SEQ ID NO: 1389413 - RNA, 19 nt, Artificial Sequence
  Description of Artificial Sequence: Synthetic oligonucleotide
  Antisense strand to SEQ ID NO: 1389412
agcugucagguaauuacag

SEQ ID NO: 1389414 - RNA, 19 nt, Artificial Sequence
  Description of Artificial Sequence: Synthetic oligonucleotide
  Sense strand starting at position 1940 of SEQ ID NO: 1243023
guaauuaccugacagcucu

SEQ ID NO: 1389415 - RNA, 19 nt, Artificial Sequence
  Description of Artificial Sequence: Synthetic oligonucleotide
  Antisense strand to SEQ ID NO: 1389414
agagcugucagguaauuac

SEQ ID NO: 1389416 - RNA, 19 nt, Artificial Sequence
  Description of Artificial Sequence: Synthetic oligonucleotide
  Sense strand starting at position 1978 of SEQ ID NO: 1243023
ugagaaaccucagucucau

SEQ ID NO: 1389417 - RNA, 19 nt, Artificial Sequence
  Description of Artificial Sequence: Synthetic oligonucleotide
  Antisense strand to SEQ ID NO: 1389416
augagacugagguuucuca

SEQ ID NO: 1389418 - RNA, 19 nt, Artificial Sequence
  Description of Artificial Sequence: Synthetic oligonucleotide
  Sense strand starting at position 1987 of SEQ ID NO: 1243023
ucagucucaucucugguau

SEQ ID NO: 1389419 - RNA, 19 nt, Artificial Sequence
  Description of Artificial Sequence: Synthetic oligonucleotide
  Antisense strand to SEQ ID NO: 1389418
auaccagagaugagacuga

SEQ ID NO: 1389420 - RNA, 19 nt, Artificial Sequence
  Description of Artificial Sequence: Synthetic oligonucleotide
  Sense strand starting at position 1989 of SEQ ID NO: 1243023
agucucaucucugguaucu

SEQ ID NO: 1389421 - RNA, 19 nt, Artificial Sequence
  Description of Artificial Sequence: Synthetic oligonucleotide
  Antisense strand to SEQ ID NO: 1389420
agauaccagagaugagacu

SEQ ID NO: 1389422 - RNA, 19 nt, Artificial Sequence
  Description of Artificial Sequence: Synthetic oligonucleotide
  Sense strand starting at position 2416 of SEQ ID NO: 1243023
uagggcucgcaggaugaaa

SEQ ID NO: 1389423 - RNA, 19 nt, Artificial Sequence
  Description of Artificial Sequence: Synthetic oligonucleotide
  Antisense strand to SEQ ID NO: 1389422
uuucauccugcgagcccua

SEQ ID NO: 1389424 - RNA, 19 nt, Artificial Sequence
  Description of Artificial Sequence: Synthetic oligonucleotide
  Sense strand starting at position 2456 of SEQ ID NO: 1243023
gguauuuguuuccgaauac

SEQ ID NO: 1389425 - RNA, 19 nt, Artificial Sequence
  Description of Artificial Sequence: Synthetic oligonucleotide
  Antisense strand to SEQ ID NO: 1389424
guauucggaaacaaauacc

SEQ ID NO: 1389426 - RNA, 19 nt, Artificial Sequence
  Description of Artificial Sequence: Synthetic oligonucleotide
  Sense strand starting at position 2457 of SEQ ID NO: 1243023
guauuuguuuccgaauacg

SEQ ID NO: 1389427 - RNA, 19 nt, Artificial Sequence
  Description of Artificial Sequence: Synthetic oligonucleotide
  Antisense strand to SEQ ID NO: 1389426
cguauucggaaacaaauac

SEQ ID NO: 1389428 - RNA, 19 nt, Artificial Sequence
  Description of Artificial Sequence: Synthetic oligonucleotide
  Sense strand starting at position 2487 of SEQ ID NO: 1243023
gugcgaaaguugcauauca

SEQ ID NO: 1389429 - RNA, 19 nt, Artificial Sequence
  Description of Artificial Sequence: Synthetic oligonucleotide
  Antisense strand to SEQ ID NO: 1389428
ugauaugcaacuuucgcac

SEQ ID NO: 1389430 - RNA, 19 nt, Artificial Sequence
  Description of Artificial Sequence: Synthetic oligonucleotide
  Sense strand starting at position 2605 of SEQ ID NO: 1243023
gcagcaucuccguaagucu

SEQ ID NO: 1389431 - RNA, 19 nt, Artificial Sequence
  Description of Artificial Sequence: Synthetic oligonucleotide
  Antisense strand to SEQ ID NO: 1389430
agacuuacggagaugcugc

SEQ ID NO: 1389432 - RNA, 19 nt, Artificial Sequence
  Description of Artificial Sequence: Synthetic oligonucleotide
  Sense strand starting at position 2608 of SEQ ID NO: 1243023
gcaucuccguaagucuaau

SEQ ID NO: 1389433 - RNA, 19 nt, Artificial Sequence
  Description of Artificial Sequence: Synthetic oligonucleotide
  Antisense strand to SEQ ID NO: 1389432
auuagacuuacggagaugc

SEQ ID NO: 1389434 - RNA, 19 nt, Artificial Sequence
  Description of Artificial Sequence: Synthetic oligonucleotide
  Sense strand starting at position 2720 of SEQ ID NO: 1243023
agcagugaaugcucugaau

SEQ ID NO: 1389435 - RNA, 19 nt, Artificial Sequence
  Description of Artificial Sequence: Synthetic oligonucleotide
  Antisense strand to SEQ ID NO: 1389434
auucagagcauucacugcu

SEQ ID NO: 1389436 - RNA, 19 nt, Artificial Sequence
  Description of Artificial Sequence: Synthetic oligonucleotide
  Sense strand starting at position 2722 of SEQ ID NO: 1243023
cagugaaugcucugaauau

SEQ ID NO: 1389437 - RNA, 19 nt, Artificial Sequence
  Description of Artificial Sequence: Synthetic oligonucleotide
  Antisense strand to SEQ ID NO: 1389436
auauucagagcauucacug

SEQ ID NO: 1389438 - RNA, 19 nt, Artificial Sequence
  Description of Artificial Sequence: Synthetic oligonucleotide
  Sense strand starting at position 2723 of SEQ ID NO: 1243023
agugaaugcucugaauauu

SEQ ID NO: 1389439 - RNA, 19 nt, Artificial Sequence
  Description of Artificial Sequence: Synthetic oligonucleotide
  Antisense strand to SEQ ID NO: 1389438
aauauucagagcauucacu

SEQ ID NO: 1389440 - RNA, 19 nt, Artificial Sequence
  Description of Artificial Sequence: Synthetic oligonucleotide
  Sense strand starting at position 2869 of SEQ ID NO: 1243023
ccguauggguguugagaua

SEQ ID NO: 1389441 - RNA, 19 nt, Artificial Sequence
  Description of Artificial Sequence: Synthetic oligonucleotide
  Antisense strand to SEQ ID NO: 1389440
uaucucaacacccauacgg

SEQ ID NO: 1389442 - RNA, 19 nt, Artificial Sequence
  Description of Artificial Sequence: Synthetic oligonucleotide
  Sense strand starting at position 3097 of SEQ ID NO: 1243023
gagcauuggucagggauag

SEQ ID NO: 1389443 - RNA, 19 nt, Artificial Sequence
  Description of Artificial Sequence: Synthetic oligonucleotide
  Antisense strand to SEQ ID NO: 1389442
cuaucccugaccaaugcuc

SEQ ID NO: 1389444 - RNA, 19 nt, Artificial Sequence
  Description of Artificial Sequence: Synthetic oligonucleotide
  Sense strand starting at position 3098 of SEQ ID NO: 1243023
agcauuggucagggauaga

SEQ ID NO: 1389445 - RNA, 19 nt, Artificial Sequence
  Description of Artificial Sequence: Synthetic oligonucleotide
  Antisense strand to SEQ ID NO: 1389444
ucuaucccugaccaaugcu

SEQ ID NO: 1389446 - RNA, 19 nt, Artificial Sequence
  Description of Artificial Sequence: Synthetic oligonucleotide
  Sense strand starting at position 3128 of SEQ ID NO: 1243023
agggauaggucccucauga

SEQ ID NO: 1389447 - RNA, 19 nt, Artificial Sequence
  Description of Artificial Sequence: Synthetic oligonucleotide
  Antisense strand to SEQ ID NO: 1389446
ucaugagggaccuaucccu

SEQ ID NO: 1389448 - RNA, 19 nt, Artificial Sequence
  Description of Artificial Sequence: Synthetic oligonucleotide
  Sense strand starting at position 3169 of SEQ ID NO: 1243023
agguauucccugcagaagu

SEQ ID NO: 1389449 - RNA, 19 nt, Artificial Sequence
  Description of Artificial Sequence: Synthetic oligonucleotide
  Antisense strand to SEQ ID NO: 1389448
acuucugcagggaauaccu

SEQ ID NO: 1389450 - RNA, 19 nt, Artificial Sequence
  Description of Artificial Sequence: Synthetic oligonucleotide
  Sense strand starting at position 3179 of SEQ ID NO: 1243023
ugcagaagucuuuauugag

SEQ ID NO: 1389451 - RNA, 19 nt, Artificial Sequence
  Description of Artificial Sequence: Synthetic oligonucleotide
  Antisense strand to SEQ ID NO: 1389450
cucaauaaagacuucugca

SEQ ID NO: 1389452 - RNA, 19 nt, Artificial Sequence
  Description of Artificial Sequence: Synthetic oligonucleotide
  Sense strand starting at position 3258 of SEQ ID NO: 1243023
cucagacaguaaugucauu

SEQ ID NO: 1389453 - RNA, 19 nt, Artificial Sequence
  Description of Artificial Sequence: Synthetic oligonucleotide
  Antisense strand to SEQ ID NO: 1389452
aaugacauuacugucugag

SEQ ID NO: 1389454 - RNA, 19 nt, Artificial Sequence
  Description of Artificial Sequence: Synthetic oligonucleotide
  Sense strand starting at position 3551 of SEQ ID NO: 1243023
gggugaacguucugaaaug

SEQ ID NO: 1389455 - RNA, 19 nt, Artificial Sequence
  Description of Artificial Sequence: Synthetic oligonucleotide
  Antisense strand to SEQ ID NO: 1389454
cauuucagaacguucaccc

SEQ ID NO: 1389456 - RNA, 19 nt, Artificial Sequence
  Description of Artificial Sequence: Synthetic oligonucleotide
  Sense strand starting at position 3552 of SEQ ID NO: 1243023
ggugaacguucugaaauga

SEQ ID NO: 1389457 - RNA, 19 nt, Artificial Sequence
  Description of Artificial Sequence: Synthetic oligonucleotide
  Antisense strand to SEQ ID NO: 1389456
ucauuucagaacguucacc

SEQ ID NO: 1389458 - RNA, 19 nt, Artificial Sequence
  Description of Artificial Sequence: Synthetic oligonucleotide
  Sense strand starting at position 3669 of SEQ ID NO: 1243023
aucaucaaagcuugagcaa

SEQ ID NO: 1389459 - RNA, 19 nt, Artificial Sequence
  Description of Artificial Sequence: Synthetic oligonucleotide
  Antisense strand to SEQ ID NO: 1389458
uugcucaagcuuugaugau

SEQ ID NO: 1389460 - RNA, 19 nt, Artificial Sequence
  Description of Artificial Sequence: Synthetic oligonucleotide
  Sense strand starting at position 3789 of SEQ ID NO: 1243023
aagugacugaaguguaagu

SEQ ID NO: 1389461 - RNA, 19 nt, Artificial Sequence
  Description of Artificial Sequence: Synthetic oligonucleotide
  Antisense strand to SEQ ID NO: 1389460
acuuacacuucagucacuu

SEQ ID NO: 1389462 - RNA, 19 nt, Artificial Sequence
  Description of Artificial Sequence: Synthetic oligonucleotide
  Sense strand starting at position 110 of SEQ ID NO: 1243024
agcguuucugcgguuauca

SEQ ID NO: 1389463 - RNA, 19 nt, Artificial Sequence
  Description of Artificial Sequence: Synthetic oligonucleotide
  Antisense strand to SEQ ID NO: 1389462
ugauaaccgcagaaacgcu

SEQ ID NO: 1389464 - RNA, 19 nt, Artificial Sequence
  Description of Artificial Sequence: Synthetic oligonucleotide
  Sense strand starting at position 118 of SEQ ID NO: 1243024
ugcgguuaucaggaaggga

SEQ ID NO: 1389465 - RNA, 19 nt, Artificial Sequence
  Description of Artificial Sequence: Synthetic oligonucleotide
  Antisense strand to SEQ ID NO: 1389464
ucccuuccugauaaccgca

SEQ ID NO: 1389466 - RNA, 19 nt, Artificial Sequence
  Description of Artificial Sequence: Synthetic oligonucleotide
  Sense strand starting at position 181 of SEQ ID NO: 1243024
gcgugugcuagaucccgaa

SEQ ID NO: 1389467 - RNA, 19 nt, Artificial Sequence
  Description of Artificial Sequence: Synthetic oligonucleotide
  Antisense strand to SEQ ID NO: 1389466
uucgggaucuagcacacgc

SEQ ID NO: 1389468 - RNA, 19 nt, Artificial Sequence
  Description of Artificial Sequence: Synthetic oligonucleotide
  Sense strand starting at position 402 of SEQ ID NO: 1243024
cccuguuuacuagaugucu

SEQ ID NO: 1389469 - RNA, 19 nt, Artificial Sequence
  Description of Artificial Sequence: Synthetic oligonucleotide
  Antisense strand to SEQ ID NO: 1389468
agacaucuaguaaacaggg

SEQ ID NO: 1389470 - RNA, 19 nt, Artificial Sequence
  Description of Artificial Sequence: Synthetic oligonucleotide
  Sense strand starting at position 408 of SEQ ID NO: 1243024
uuacuagaugucugaccuu

SEQ ID NO: 1389471 - RNA, 19 nt, Artificial Sequence
  Description of Artificial Sequence: Synthetic oligonucleotide
  Antisense strand to SEQ ID NO: 1389470
aaggucagacaucuaguaa

SEQ ID NO: 1389472 - RNA, 19 nt, Artificial Sequence
  Description of Artificial Sequence: Synthetic oligonucleotide
  Sense strand starting at position 414 of SEQ ID NO: 1243024
gaugucugaccuugggaga

SEQ ID NO: 1389473 - RNA, 19 nt, Artificial Sequence
  Description of Artificial Sequence: Synthetic oligonucleotide
  Antisense strand to SEQ ID NO: 1389472
ucucccaaggucagacauc

SEQ ID NO: 1389474 - RNA, 19 nt, Artificial Sequence
  Description of Artificial Sequence: Synthetic oligonucleotide
  Sense strand starting at position 415 of SEQ ID NO: 1243024
augucugaccuugggagaa

SEQ ID NO: 1389475 - RNA, 19 nt, Artificial Sequence
  Description of Artificial Sequence: Synthetic oligonucleotide
  Antisense strand to SEQ ID NO: 1389474
uucucccaaggucagacau

SEQ ID NO: 1389476 - RNA, 19 nt, Artificial Sequence
  Description of Artificial Sequence: Synthetic oligonucleotide
  Sense strand starting at position 428 of SEQ ID NO: 1243024
ggagaauuacuuugccucu

SEQ ID NO: 1389477 - RNA, 19 nt, Artificial Sequence
  Description of Artificial Sequence: Synthetic oligonucleotide
  Antisense strand to SEQ ID NO: 1389476
agaggcaaaguaauucucc

SEQ ID NO: 1389478 - RNA, 19 nt, Artificial Sequence
  Description of Artificial Sequence: Synthetic oligonucleotide
  Sense strand starting at position 490 of SEQ ID NO: 1243024
cuuauaggguugcucuaaa

SEQ ID NO: 1389479 - RNA, 19 nt, Artificial Sequence
  Description of Artificial Sequence: Synthetic oligonucleotide
  Antisense strand to SEQ ID NO: 1389478
uuuagagcaacccuauaag

SEQ ID NO: 1389480 - RNA, 19 nt, Artificial Sequence
  Description of Artificial Sequence: Synthetic oligonucleotide
  Sense strand starting at position 682 of SEQ ID NO: 1243024
gcccuagaucagggacauu

SEQ ID NO: 1389481 - RNA, 19 nt, Artificial Sequence
  Description of Artificial Sequence: Synthetic oligonucleotide
  Antisense strand to SEQ ID NO: 1389480
aaugucccugaucuagggc

SEQ ID NO: 1389482 - RNA, 19 nt, Artificial Sequence
  Description of Artificial Sequence: Synthetic oligonucleotide
  Sense strand starting at position 789 of SEQ ID NO: 1243024
ggaaguuguacagggaaug

SEQ ID NO: 1389483 - RNA, 19 nt, Artificial Sequence
  Description of Artificial Sequence: Synthetic oligonucleotide
  Antisense strand to SEQ ID NO: 1389482
cauucccuguacaacuucc

SEQ ID NO: 1389484 - RNA, 19 nt, Artificial Sequence
  Description of Artificial Sequence: Synthetic oligonucleotide
  Sense strand starting at position 1022 of SEQ ID NO: 1243024
aauacacgucugggaaaga

SEQ ID NO: 1389485 - RNA, 19 nt, Artificial Sequence
  Description of Artificial Sequence: Synthetic oligonucleotide
  Antisense strand to SEQ ID NO: 1389484
ucuuucccagacguguauu

SEQ ID NO: 1389486 - RNA, 19 nt, Artificial Sequence
  Description of Artificial Sequence: Synthetic oligonucleotide
  Sense strand starting at position 1110 of SEQ ID NO: 1243024
gcaaucuugagacaguguu

SEQ ID NO: 1389487 - RNA, 19 nt, Artificial Sequence
  Description of Artificial Sequence: Synthetic oligonucleotide
  Antisense strand to SEQ ID NO: 1389486
aacacugucucaagauugc

SEQ ID NO: 1389488 - RNA, 19 nt, Artificial Sequence
  Description of Artificial Sequence: Synthetic oligonucleotide
  Sense strand starting at position 1297 of SEQ ID NO: 1243024
ugcugagacccucacaacu

SEQ ID NO: 1389489 - RNA, 19 nt, Artificial Sequence
  Description of Artificial Sequence: Synthetic oligonucleotide
  Antisense strand to SEQ ID NO: 1389488
aguugugagggucucagca

SEQ ID NO: 1389490 - RNA, 19 nt, Artificial Sequence
  Description of Artificial Sequence: Synthetic oligonucleotide
  Sense strand starting at position 2209 of SEQ ID NO: 1243024
ugcucaugcguucccugaa

SEQ ID NO: 1389491 - RNA, 19 nt, Artificial Sequence
  Description of Artificial Sequence: Synthetic oligonucleotide
  Antisense strand to SEQ ID NO: 1389490
uucagggaacgcaugagca

SEQ ID NO: 1389492 - RNA, 19 nt, Artificial Sequence
  Description of Artificial Sequence: Synthetic oligonucleotide
  Sense strand starting at position 2422 of SEQ ID NO: 1243024
gcucuuacucacgagacaa

SEQ ID NO: 1389493 - RNA, 19 nt, Artificial Sequence
  Description of Artificial Sequence: Synthetic oligonucleotide
  Antisense strand to SEQ ID NO: 1389492
uugucucgugaguaagagc

SEQ ID NO: 1389494 - RNA, 19 nt, Artificial Sequence
  Description of Artificial Sequence: Synthetic oligonucleotide
  Sense strand starting at position 2630 of SEQ ID NO: 1243024
ccuggagucccuuaaggua

SEQ ID NO: 1389495 - RNA, 19 nt, Artificial Sequence
  Description of Artificial Sequence: Synthetic oligonucleotide
  Antisense strand to SEQ ID NO: 1389494
uaccuuaagggacuccagg

SEQ ID NO: 1389496 - RNA, 19 nt, Artificial Sequence
  Description of Artificial Sequence: Synthetic oligonucleotide
  Sense strand starting at position 2916 of SEQ ID NO: 1243024
gacgguucugcagauaauc

SEQ ID NO: 1389497 - RNA, 19 nt, Artificial Sequence
  Description of Artificial Sequence: Synthetic oligonucleotide
  Antisense strand to SEQ ID NO: 1389496
gauuaucugcagaaccguc

SEQ ID NO: 1389498 - RNA, 19 nt, Artificial Sequence
  Description of Artificial Sequence: Synthetic oligonucleotide
  Sense strand starting at position 3058 of SEQ ID NO: 1243024
ugggcugccagucaagaau

SEQ ID NO: 1389499 - RNA, 19 nt, Artificial Sequence
  Description of Artificial Sequence: Synthetic oligonucleotide
  Antisense strand to SEQ ID NO: 1389498
auucuugacuggcagccca

SEQ ID NO: 1389500 - RNA, 19 nt, Artificial Sequence
  Description of Artificial Sequence: Synthetic oligonucleotide
  Sense strand starting at position 3168 of SEQ ID NO: 1243024
gugcaugcuuuauuugaca

SEQ ID NO: 1389501 - RNA, 19 nt, Artificial Sequence
  Description of Artificial Sequence: Synthetic oligonucleotide
  Antisense strand to SEQ ID NO: 1389500
ugucaaauaaagcaugcac

SEQ ID NO: 1389502 - RNA, 19 nt, Artificial Sequence
  Description of Artificial Sequence: Synthetic oligonucleotide
  Sense strand starting at position 3173 of SEQ ID NO: 1243024
ugcuuuauuugacaacuga

SEQ ID NO: 1389503 - RNA, 19 nt, Artificial Sequence
  Description of Artificial Sequence: Synthetic oligonucleotide
  Antisense strand to SEQ ID NO: 1389502
ucaguugucaaauaaagca

SEQ ID NO: 1389504 - RNA, 19 nt, Artificial Sequence
  Description of Artificial Sequence: Synthetic oligonucleotide
  Sense strand starting at position 3186 of SEQ ID NO: 1243024
aacugagauuccucaguga

SEQ ID NO: 1389505 - RNA, 19 nt, Artificial Sequence
  Description of Artificial Sequence: Synthetic oligonucleotide
  Antisense strand to SEQ ID NO: 1389504
ucacugaggaaucucaguu

SEQ ID NO: 1389506 - RNA, 19 nt, Artificial Sequence
  Description of Artificial Sequence: Synthetic oligonucleotide
  Sense strand starting at position 3189 of SEQ ID NO: 1243024
ugagauuccucagugaagg

SEQ ID NO: 1389507 - RNA, 19 nt, Artificial Sequence
  Description of Artificial Sequence: Synthetic oligonucleotide
  Antisense strand to SEQ ID NO: 1389506
ccuucacugaggaaucuca

SEQ ID NO: 1389508 - RNA, 19 nt, Artificial Sequence
  Description of Artificial Sequence: Synthetic oligonucleotide
  Sense strand starting at position 3190 of SEQ ID NO: 1243024
gagauuccucagugaaggc

SEQ ID NO: 1389509 - RNA, 19 nt, Artificial Sequence
  Description of Artificial Sequence: Synthetic oligonucleotide
  Antisense strand to SEQ ID NO: 1389508
gccuucacugaggaaucuc

SEQ ID NO: 1389510 - RNA, 19 nt, Artificial Sequence
  Description of Artificial Sequence: Synthetic oligonucleotide
  Sense strand starting at position 3319 of SEQ ID NO: 1243024
gaguuaugaucucugaauu

SEQ ID NO: 1389511 - RNA, 19 nt, Artificial Sequence
  Description of Artificial Sequence: Synthetic oligonucleotide
  Antisense strand to SEQ ID NO: 1389510
aauucagagaucauaacuc

SEQ ID NO: 1389512 - RNA, 19 nt, Artificial Sequence
  Description of Artificial Sequence: Synthetic oligonucleotide
  Sense strand starting at position 3320 of SEQ ID NO: 1243024
aguuaugaucucugaauuc

SEQ ID NO: 1389513 - RNA, 19 nt, Artificial Sequence
  Description of Artificial Sequence: Synthetic oligonucleotide
  Antisense strand to SEQ ID NO: 1389512
gaauucagagaucauaacu

SEQ ID NO: 1389514 - RNA, 19 nt, Artificial Sequence
  Description of Artificial Sequence: Synthetic oligonucleotide
  Sense strand starting at position 3420 of SEQ ID NO: 1243024
guaucuaucucccuugauu

SEQ ID NO: 1389515 - RNA, 19 nt, Artificial Sequence
  Description of Artificial Sequence: Synthetic oligonucleotide
  Antisense strand to SEQ ID NO: 1389514
aaucaagggagauagauac

SEQ ID NO: 1389516 - RNA, 19 nt, Artificial Sequence
  Description of Artificial Sequence: Synthetic oligonucleotide
  Sense strand starting at position 3431 of SEQ ID NO: 1243024
ccuugauuauagucccuau

SEQ ID NO: 1389517 - RNA, 19 nt, Artificial Sequence
  Description of Artificial Sequence: Synthetic oligonucleotide
  Antisense strand to SEQ ID NO: 1389516
auagggacuauaaucaagg

SEQ ID NO: 1389518 - RNA, 19 nt, Artificial Sequence
  Description of Artificial Sequence: Synthetic oligonucleotide
  Sense strand starting at position 3434 of SEQ ID NO: 1243024
ugauuauagucccuaugag

SEQ ID NO: 1389519 - RNA, 19 nt, Artificial Sequence
  Description of Artificial Sequence: Synthetic oligonucleotide
  Antisense strand to SEQ ID NO: 1389518
cucauagggacuauaauca

SEQ ID NO: 1389520 - RNA, 19 nt, Artificial Sequence
  Description of Artificial Sequence: Synthetic oligonucleotide
  Sense strand starting at position 3435 of SEQ ID NO: 1243024
gauuauagucccuaugagu

SEQ ID NO: 1389521 - RNA, 19 nt, Artificial Sequence
  Description of Artificial Sequence: Synthetic oligonucleotide
  Antisense strand to SEQ ID NO: 1389520
acucauagggacuauaauc

SEQ ID NO: 1389522 - RNA, 19 nt, Artificial Sequence
  Description of Artificial Sequence: Synthetic oligonucleotide
  Sense strand starting at position 3476 of SEQ ID NO: 1243024
gacagaaugucuuuaaagu

SEQ ID NO: 1389523 - RNA, 19 nt, Artificial Sequence
  Description of Artificial Sequence: Synthetic oligonucleotide
  Antisense strand to SEQ ID NO: 1389522
acuuuaaagacauucuguc

SEQ ID NO: 1389524 - RNA, 19 nt, Artificial Sequence
  Description of Artificial Sequence: Synthetic oligonucleotide
  Sense strand starting at position 3477 of SEQ ID NO: 1243024
acagaaugucuuuaaaguc

SEQ ID NO: 1389525 - RNA, 19 nt, Artificial Sequence
  Description of Artificial Sequence: Synthetic oligonucleotide
  Antisense strand to SEQ ID NO: 1389524
gacuuuaaagacauucugu

SEQ ID NO: 1389526 - RNA, 19 nt, Artificial Sequence
  Description of Artificial Sequence: Synthetic oligonucleotide
  Sense strand starting at position 3517 of SEQ ID NO: 1243024
uuucuuacucagggauuga

SEQ ID NO: 1389527 - RNA, 19 nt, Artificial Sequence
  Description of Artificial Sequence: Synthetic oligonucleotide
  Antisense strand to SEQ ID NO: 1389526
ucaaucccugaguaagaaa

SEQ ID NO: 1389528 - RNA, 19 nt, Artificial Sequence
  Description of Artificial Sequence: Synthetic oligonucleotide
  Sense strand starting at position 3530 of SEQ ID NO: 1243024
gauugaguacauugacauu

SEQ ID NO: 1389529 - RNA, 19 nt, Artificial Sequence
  Description of Artificial Sequence: Synthetic oligonucleotide
  Antisense strand to SEQ ID NO: 1389528
aaugucaauguacucaauc

SEQ ID NO: 1389530 - RNA, 19 nt, Artificial Sequence
  Description of Artificial Sequence: Synthetic oligonucleotide
  Sense strand starting at position 3536 of SEQ ID NO: 1243024
guacauugacauuaacugu

SEQ ID NO: 1389531 - RNA, 19 nt, Artificial Sequence
  Description of Artificial Sequence: Synthetic oligonucleotide
  Antisense strand to SEQ ID NO: 1389530
acaguuaaugucaauguac

SEQ ID NO: 1389532 - RNA, 19 nt, Artificial Sequence
  Description of Artificial Sequence: Synthetic oligonucleotide
  Sense strand starting at position 3680 of SEQ ID NO: 1243024
cugccaacacuuuagaagu

SEQ ID NO: 1389533 - RNA, 19 nt, Artificial Sequence
  Description of Artificial Sequence: Synthetic oligonucleotide
  Antisense strand to SEQ ID NO: 1389532
acuucuaaaguguuggcag

SEQ ID NO: 1389534 - RNA, 19 nt, Artificial Sequence
  Description of Artificial Sequence: Synthetic oligonucleotide
  Sense strand starting at position 3878 of SEQ ID NO: 1243024
aaaugcagugugugauaga

SEQ ID NO: 1389535 - RNA, 19 nt, Artificial Sequence
  Description of Artificial Sequence: Synthetic oligonucleotide
  Antisense strand to SEQ ID NO: 1389534
ucuaucacacacugcauuu

SEQ ID NO: 1389536 - RNA, 19 nt, Artificial Sequence
  Description of Artificial Sequence: Synthetic oligonucleotide
  Sense strand starting at position 3883 of SEQ ID NO: 1243024
cagugugugauagagcuau

SEQ ID NO: 1389537 - RNA, 19 nt, Artificial Sequence
  Description of Artificial Sequence: Synthetic oligonucleotide
  Antisense strand to SEQ ID NO: 1389536
auagcucuaucacacacug

SEQ ID NO: 1389538 - RNA, 19 nt, Artificial Sequence
  Description of Artificial Sequence: Synthetic oligonucleotide
  Sense strand starting at position 3887 of SEQ ID NO: 1243024
gugugauagagcuaugacu

SEQ ID NO: 1389539 - RNA, 19 nt, Artificial Sequence
  Description of Artificial Sequence: Synthetic oligonucleotide
  Antisense strand to SEQ ID NO: 1389538
agucauagcucuaucacac

SEQ ID NO: 1389540 - RNA, 19 nt, Artificial Sequence
  Description of Artificial Sequence: Synthetic oligonucleotide
  Sense strand starting at position 3929 of SEQ ID NO: 1243024
aucagaugcauauggguau

SEQ ID NO: 1389541 - RNA, 19 nt, Artificial Sequence
  Description of Artificial Sequence: Synthetic oligonucleotide
  Antisense strand to SEQ ID NO: 1389540
auacccauaugcaucugau

SEQ ID NO: 1389542 - RNA, 19 nt, Artificial Sequence
  Description of Artificial Sequence: Synthetic oligonucleotide
  Sense strand starting at position 102 of SEQ ID NO: 1243025
caauaauugccaggacugu

SEQ ID NO: 1389543 - RNA, 19 nt, Artificial Sequence
  Description of Artificial Sequence: Synthetic oligonucleotide
  Antisense strand to SEQ ID NO: 1389542
acaguccuggcaauuauug

SEQ ID NO: 1389544 - RNA, 19 nt, Artificial Sequence
  Description of Artificial Sequence: Synthetic oligonucleotide
  Sense strand starting at position 108 of SEQ ID NO: 1243025
uugccaggacugugaaaga

SEQ ID NO: 1389545 - RNA, 19 nt, Artificial Sequence
  Description of Artificial Sequence: Synthetic oligonucleotide
  Antisense strand to SEQ ID NO: 1389544
ucuuucacaguccuggcaa

SEQ ID NO: 1389546 - RNA, 19 nt, Artificial Sequence
  Description of Artificial Sequence: Synthetic oligonucleotide
  Sense strand starting at position 135 of SEQ ID NO: 1243025
ccacucuugugauuagguu

SEQ ID NO: 1389547 - RNA, 19 nt, Artificial Sequence
  Description of Artificial Sequence: Synthetic oligonucleotide
  Antisense strand to SEQ ID NO: 1389546
aaccuaaucacaagagugg

SEQ ID NO: 1389548 - RNA, 19 nt, Artificial Sequence
  Description of Artificial Sequence: Synthetic oligonucleotide
  Sense strand starting at position 139 of SEQ ID NO: 1243025
ucuugugauuagguuguau

SEQ ID NO: 1389549 - RNA, 19 nt, Artificial Sequence
  Description of Artificial Sequence: Synthetic oligonucleotide
  Antisense strand to SEQ ID NO: 1389548
auacaaccuaaucacaaga

SEQ ID NO: 1389550 - RNA, 19 nt, Artificial Sequence
  Description of Artificial Sequence: Synthetic oligonucleotide
  Sense strand starting at position 141 of SEQ ID NO: 1243025
uugugauuagguuguauua

SEQ ID NO: 1389551 - RNA, 19 nt, Artificial Sequence
  Description of Artificial Sequence: Synthetic oligonucleotide
  Antisense strand to SEQ ID NO: 1389550
uaauacaaccuaaucacaa

SEQ ID NO: 1389552 - RNA, 19 nt, Artificial Sequence
  Description of Artificial Sequence: Synthetic oligonucleotide
  Sense strand starting at position 167 of SEQ ID NO: 1243025
agcugaauuuaagaaagag

SEQ ID NO: 1389553 - RNA, 19 nt, Artificial Sequence
  Description of Artificial Sequence: Synthetic oligonucleotide
  Antisense strand to SEQ ID NO: 1389552
cucuuucuuaaauucagcu

SEQ ID NO: 1389554 - RNA, 19 nt, Artificial Sequence
  Description of Artificial Sequence: Synthetic oligonucleotide
  Sense strand starting at position 307 of SEQ ID NO: 1243025
cuguuacaaucaccuuagu

SEQ ID NO: 1389555 - RNA, 19 nt, Artificial Sequence
  Description of Artificial Sequence: Synthetic oligonucleotide
  Antisense strand to SEQ ID NO: 1389554
acuaaggugauuguaacag

SEQ ID NO: 1389556 - RNA, 19 nt, Artificial Sequence
  Description of Artificial Sequence: Synthetic oligonucleotide
  Sense strand starting at position 320 of SEQ ID NO: 1243025
cuuaguauuggguacugga

SEQ ID NO: 1389557 - RNA, 19 nt, Artificial Sequence
  Description of Artificial Sequence: Synthetic oligonucleotide
  Antisense strand to SEQ ID NO: 1389556
uccaguacccaauacuaag

SEQ ID NO: 1389558 - RNA, 19 nt, Artificial Sequence
  Description of Artificial Sequence: Synthetic oligonucleotide
  Sense strand starting at position 386 of SEQ ID NO: 1243025
guggcuuacggcuuguaau

SEQ ID NO: 1389559 - RNA, 19 nt, Artificial Sequence
  Description of Artificial Sequence: Synthetic oligonucleotide
  Antisense strand to SEQ ID NO: 1389558
auuacaagccguaagccac

SEQ ID NO: 1389560 - RNA, 19 nt, Artificial Sequence
  Description of Artificial Sequence: Synthetic oligonucleotide
  Sense strand starting at position 701 of SEQ ID NO: 1243025
gcugguuacugagugcuua

SEQ ID NO: 1389561 - RNA, 19 nt, Artificial Sequence
  Description of Artificial Sequence: Synthetic oligonucleotide
  Antisense strand to SEQ ID NO: 1389560
uaagcacucaguaaccagc

SEQ ID NO: 1389562 - RNA, 19 nt, Artificial Sequence
  Description of Artificial Sequence: Synthetic oligonucleotide
  Sense strand starting at position 705 of SEQ ID NO: 1243025
guuacugagugcuuacuuu

SEQ ID NO: 1389563 - RNA, 19 nt, Artificial Sequence
  Description of Artificial Sequence: Synthetic oligonucleotide
  Antisense strand to SEQ ID NO: 1389562
aaaguaagcacucaguaac

SEQ ID NO: 1389564 - RNA, 19 nt, Artificial Sequence
  Description of Artificial Sequence: Synthetic oligonucleotide
  Sense strand starting at position 712 of SEQ ID NO: 1243025
agugcuuacuuucugccaa

SEQ ID NO: 1389565 - RNA, 19 nt, Artificial Sequence
  Description of Artificial Sequence: Synthetic oligonucleotide
  Antisense strand to SEQ ID NO: 1389564
uuggcagaaaguaagcacu

SEQ ID NO: 1389566 - RNA, 19 nt, Artificial Sequence
  Description of Artificial Sequence: Synthetic oligonucleotide
  Sense strand starting at position 760 of SEQ ID NO: 1243025
acugacuuccugugccaca

SEQ ID NO: 1389567 - RNA, 19 nt, Artificial Sequence
  Description of Artificial Sequence: Synthetic oligonucleotide
  Antisense strand to SEQ ID NO: 1389566
uguggcacaggaagucagu

SEQ ID NO: 1389568 - RNA, 19 nt, Artificial Sequence
  Description of Artificial Sequence: Synthetic oligonucleotide
  Sense strand starting at position 761 of SEQ ID NO: 1243025
cugacuuccugugccacaa

SEQ ID NO: 1389569 - RNA, 19 nt, Artificial Sequence
  Description of Artificial Sequence: Synthetic oligonucleotide
  Antisense strand to SEQ ID NO: 1389568
uuguggcacaggaagucag

SEQ ID NO: 1389570 - RNA, 19 nt, Artificial Sequence
  Description of Artificial Sequence: Synthetic oligonucleotide
  Sense strand starting at position 896 of SEQ ID NO: 1243025
uccauuauuuaagagauga

SEQ ID NO: 1389571 - RNA, 19 nt, Artificial Sequence
  Description of Artificial Sequence: Synthetic oligonucleotide
  Antisense strand to SEQ ID NO: 1389570
ucaucucuuaaauaaugga

SEQ ID NO: 1389572 - RNA, 19 nt, Artificial Sequence
  Description of Artificial Sequence: Synthetic oligonucleotide
  Sense strand starting at position 927 of SEQ ID NO: 1243025
aucaaugacuuaggaagaa

SEQ ID NO: 1389573 - RNA, 19 nt, Artificial Sequence
  Description of Artificial Sequence: Synthetic oligonucleotide
  Antisense strand to SEQ ID NO: 1389572
uucuuccuaagucauugau

SEQ ID NO: 1389574 - RNA, 19 nt, Artificial Sequence
  Description of Artificial Sequence: Synthetic oligonucleotide
  Sense strand starting at position 950 of SEQ ID NO: 1243025
gacaaaggacuguggucaa

SEQ ID NO: 1389575 - RNA, 19 nt, Artificial Sequence
  Description of Artificial Sequence: Synthetic oligonucleotide
  Antisense strand to SEQ ID NO: 1389574
uugaccacaguccuuuguc

SEQ ID NO: 1389576 - RNA, 19 nt, Artificial Sequence
  Description of Artificial Sequence: Synthetic oligonucleotide
  Sense strand starting at position 1073 of SEQ ID NO: 1243025
ccugcucgugaggaguaaa

SEQ ID NO: 1389577 - RNA, 19 nt, Artificial Sequence
  Description of Artificial Sequence: Synthetic oligonucleotide
  Antisense strand to SEQ ID NO: 1389576
uuuacuccucacgagcagg

SEQ ID NO: 1389578 - RNA, 19 nt, Artificial Sequence
  Description of Artificial Sequence: Synthetic oligonucleotide
  Sense strand starting at position 1324 of SEQ ID NO: 1243025
ggcugcugugaugauuauu

SEQ ID NO: 1389579 - RNA, 19 nt, Artificial Sequence
  Description of Artificial Sequence: Synthetic oligonucleotide
  Antisense strand to SEQ ID NO: 1389578
aauaaucaucacagcagcc

SEQ ID NO: 1389580 - RNA, 19 nt, Artificial Sequence
  Description of Artificial Sequence: Synthetic oligonucleotide
  Sense strand starting at position 1435 of SEQ ID NO: 1243025
caggucuuccugugccaaa

SEQ ID NO: 1389581 - RNA, 19 nt, Artificial Sequence
  Description of Artificial Sequence: Synthetic oligonucleotide
  Antisense strand to SEQ ID NO: 1389580
uuuggcacaggaagaccug

SEQ ID NO: 1389582 - RNA, 19 nt, Artificial Sequence
  Description of Artificial Sequence: Synthetic oligonucleotide
  Sense strand starting at position 1946 of SEQ ID NO: 1243025
cgcgcucuccgcucggaaa

SEQ ID NO: 1389583 - RNA, 19 nt, Artificial Sequence
  Description of Artificial Sequence: Synthetic oligonucleotide
  Antisense strand to SEQ ID NO: 1389582
uuuccgagcggagagcgcg

SEQ ID NO: 1389584 - RNA, 19 nt, Artificial Sequence
  Description of Artificial Sequence: Synthetic oligonucleotide
  Sense strand starting at position 2170 of SEQ ID NO: 1243025
gccuguaacccuggagcuu

SEQ ID NO: 1389585 - RNA, 19 nt, Artificial Sequence
  Description of Artificial Sequence: Synthetic oligonucleotide
  Antisense strand to SEQ ID NO: 1389584
aagcuccaggguuacaggc

SEQ ID NO: 1389586 - RNA, 19 nt, Artificial Sequence
  Description of Artificial Sequence: Synthetic oligonucleotide
  Sense strand starting at position 2171 of SEQ ID NO: 1243025
ccuguaacccuggagcuuu

SEQ ID NO: 1389587 - RNA, 19 nt, Artificial Sequence
  Description of Artificial Sequence: Synthetic oligonucleotide
  Antisense strand to SEQ ID NO: 1389586
aaagcuccaggguuacagg

SEQ ID NO: 1389588 - RNA, 19 nt, Artificial Sequence
  Description of Artificial Sequence: Synthetic oligonucleotide
  Sense strand starting at position 2358 of SEQ ID NO: 1243025
ggaagaucgcuugagucaa

SEQ ID NO: 1389589 - RNA, 19 nt, Artificial Sequence
  Description of Artificial Sequence: Synthetic oligonucleotide
  Antisense strand to SEQ ID NO: 1389588
uugacucaagcgaucuucc

SEQ ID NO: 1389590 - RNA, 19 nt, Artificial Sequence
  Description of Artificial Sequence: Synthetic oligonucleotide
  Sense strand starting at position 2376 of SEQ ID NO: 1243025
aggaguuccaggcagcaau

SEQ ID NO: 1389591 - RNA, 19 nt, Artificial Sequence
  Description of Artificial Sequence: Synthetic oligonucleotide
  Antisense strand to SEQ ID NO: 1389590
auugcugccuggaacuccu

SEQ ID NO: 1389592 - RNA, 19 nt, Artificial Sequence
  Description of Artificial Sequence: Synthetic oligonucleotide
  Sense strand starting at position 2540 of SEQ ID NO: 1243025
agacgugcccucugaguuu

SEQ ID NO: 1389593 - RNA, 19 nt, Artificial Sequence
  Description of Artificial Sequence: Synthetic oligonucleotide
  Antisense strand to SEQ ID NO: 1389592
aaacucagagggcacgucu

SEQ ID NO: 1389594 - RNA, 19 nt, Artificial Sequence
  Description of Artificial Sequence: Synthetic oligonucleotide
  Sense strand starting at position 2860 of SEQ ID NO: 1243025
uuugcagauccugaguaag

SEQ ID NO: 1389595 - RNA, 19 nt, Artificial Sequence
  Description of Artificial Sequence: Synthetic oligonucleotide
  Antisense strand to SEQ ID NO: 1389594
cuuacucaggaucugcaaa

SEQ ID NO: 1389596 - RNA, 19 nt, Artificial Sequence
  Description of Artificial Sequence: Synthetic oligonucleotide
  Sense strand starting at position 2862 of SEQ ID NO: 1243025
ugcagauccugaguaagac

SEQ ID NO: 1389597 - RNA, 19 nt, Artificial Sequence
  Description of Artificial Sequence: Synthetic oligonucleotide
  Antisense strand to SEQ ID NO: 1389596
gucuuacucaggaucugca

SEQ ID NO: 1389598 - RNA, 19 nt, Artificial Sequence
  Description of Artificial Sequence: Synthetic oligonucleotide
  Sense strand starting at position 3237 of SEQ ID NO: 1243025
aagggcauguccucaaaug

SEQ ID NO: 1389599 - RNA, 19 nt, Artificial Sequence
  Description of Artificial Sequence: Synthetic oligonucleotide
  Antisense strand to SEQ ID NO: 1389598
cauuugaggacaugcccuu

SEQ ID NO: 1389600 - RNA, 19 nt, Artificial Sequence
  Description of Artificial Sequence: Synthetic oligonucleotide
  Sense strand starting at position 3288 of SEQ ID NO: 1243025
guaggcuagagcuaaugau

SEQ ID NO: 1389601 - RNA, 19 nt, Artificial Sequence
  Description of Artificial Sequence: Synthetic oligonucleotide
  Antisense strand to SEQ ID NO: 1389600
aucauuagcucuagccuac

SEQ ID NO: 1389602 - RNA, 19 nt, Artificial Sequence
  Description of Artificial Sequence: Synthetic oligonucleotide
  Sense strand starting at position 3292 of SEQ ID NO: 1243025
gcuagagcuaaugauagca

SEQ ID NO: 1389603 - RNA, 19 nt, Artificial Sequence
  Description of Artificial Sequence: Synthetic oligonucleotide
  Antisense strand to SEQ ID NO: 1389602
ugcuaucauuagcucuagc

SEQ ID NO: 1389604 - RNA, 19 nt, Artificial Sequence
  Description of Artificial Sequence: Synthetic oligonucleotide
  Sense strand starting at position 3398 of SEQ ID NO: 1243025
gccucaaauuacguaagaa

SEQ ID NO: 1389605 - RNA, 19 nt, Artificial Sequence
  Description of Artificial Sequence: Synthetic oligonucleotide
  Antisense strand to SEQ ID NO: 1389604
uucuuacguaauuugaggc

SEQ ID NO: 1389606 - RNA, 19 nt, Artificial Sequence
  Description of Artificial Sequence: Synthetic oligonucleotide
  Sense strand starting at position 3406 of SEQ ID NO: 1243025
uuacguaagaaauggcaaa

SEQ ID NO: 1389607 - RNA, 19 nt, Artificial Sequence
  Description of Artificial Sequence: Synthetic oligonucleotide
  Antisense strand to SEQ ID NO: 1389606
uuugccauuucuuacguaa

SEQ ID NO: 1389608 - RNA, 19 nt, Artificial Sequence
  Description of Artificial Sequence: Synthetic oligonucleotide
  Sense strand starting at position 3438 of SEQ ID NO: 1243025
cauggaauguuaugauuug

SEQ ID NO: 1389609 - RNA, 19 nt, Artificial Sequence
  Description of Artificial Sequence: Synthetic oligonucleotide
  Antisense strand to SEQ ID NO: 1389608
caaaucauaacauuccaug

SEQ ID NO: 1389610 - RNA, 19 nt, Artificial Sequence
  Description of Artificial Sequence: Synthetic oligonucleotide
  Sense strand starting at position 3444 of SEQ ID NO: 1243025
auguuaugauuugaaagag

SEQ ID NO: 1389611 - RNA, 19 nt, Artificial Sequence
  Description of Artificial Sequence: Synthetic oligonucleotide
  Antisense strand to SEQ ID NO: 1389610
cucuuucaaaucauaacau

SEQ ID NO: 1389612 - RNA, 19 nt, Artificial Sequence
  Description of Artificial Sequence: Synthetic oligonucleotide
  Sense strand starting at position 3475 of SEQ ID NO: 1243025
gcuuaucacuacuuagaag

SEQ ID NO: 1389613 - RNA, 19 nt, Artificial Sequence
  Description of Artificial Sequence: Synthetic oligonucleotide
  Antisense strand to SEQ ID NO: 1389612
cuucuaaguagugauaagc

SEQ ID NO: 1389614 - RNA, 19 nt, Artificial Sequence
  Description of Artificial Sequence: Synthetic oligonucleotide
  Sense strand starting at position 3496 of SEQ ID NO: 1243025
gucaucuuuggauggguaa

SEQ ID NO: 1389615 - RNA, 19 nt, Artificial Sequence
  Description of Artificial Sequence: Synthetic oligonucleotide
  Antisense strand to SEQ ID NO: 1389614
uuacccauccaaagaugac

SEQ ID NO: 1389616 - RNA, 19 nt, Artificial Sequence
  Description of Artificial Sequence: Synthetic oligonucleotide
  Sense strand starting at position 3497 of SEQ ID NO: 1243025
ucaucuuuggauggguaau

SEQ ID NO: 1389617 - RNA, 19 nt, Artificial Sequence
  Description of Artificial Sequence: Synthetic oligonucleotide
  Antisense strand to SEQ ID NO: 1389616
auuacccauccaaagauga

SEQ ID NO: 1389618 - RNA, 19 nt, Artificial Sequence
  Description of Artificial Sequence: Synthetic oligonucleotide
  Sense strand starting at position 3499 of SEQ ID NO: 1243025
aucuuuggauggguaauca

SEQ ID NO: 1389619 - RNA, 19 nt, Artificial Sequence
  Description of Artificial Sequence: Synthetic oligonucleotide
  Antisense strand to SEQ ID NO: 1389618
ugauuacccauccaaagau

SEQ ID NO: 1389620 - RNA, 19 nt, Artificial Sequence
  Description of Artificial Sequence: Synthetic oligonucleotide
  Sense strand starting at position 3591 of SEQ ID NO: 1243025
aguuuauuacuuugugugu

SEQ ID NO: 1389621 - RNA, 19 nt, Artificial Sequence
  Description of Artificial Sequence: Synthetic oligonucleotide
  Antisense strand to SEQ ID NO: 1389620
acacacaaaguaauaaacu

SEQ ID NO: 1389622 - RNA, 19 nt, Artificial Sequence
  Description of Artificial Sequence: Synthetic oligonucleotide
  Sense strand starting at position 8 of SEQ ID NO: 1243026
caagcuaagugacuuaagu

SEQ ID NO: 1389623 - RNA, 19 nt, Artificial Sequence
  Description of Artificial Sequence: Synthetic oligonucleotide
  Antisense strand to SEQ ID NO: 1389622
acuuaagucacuuagcuug

SEQ ID NO: 1389624 - RNA, 19 nt, Artificial Sequence
  Description of Artificial Sequence: Synthetic oligonucleotide
  Sense strand starting at position 10 of SEQ ID NO: 1243026
agcuaagugacuuaagugu

SEQ ID NO: 1389625 - RNA, 19 nt, Artificial Sequence
  Description of Artificial Sequence: Synthetic oligonucleotide
  Antisense strand to SEQ ID NO: 1389624
acacuuaagucacuuagcu

SEQ ID NO: 1389626 - RNA, 19 nt, Artificial Sequence
  Description of Artificial Sequence: Synthetic oligonucleotide
  Sense strand starting at position 105 of SEQ ID NO: 1243026
uugaucucauggucacaaa

SEQ ID NO: 1389627 - RNA, 19 nt, Artificial Sequence
  Description of Artificial Sequence: Synthetic oligonucleotide
  Antisense strand to SEQ ID NO: 1389626
uuugugaccaugagaucaa

SEQ ID NO: 1389628 - RNA, 19 nt, Artificial Sequence
  Description of Artificial Sequence: Synthetic oligonucleotide
  Sense strand starting at position 125 of SEQ ID NO: 1243026
cuaguaaacggccgagaau

SEQ ID NO: 1389629 - RNA, 19 nt, Artificial Sequence
  Description of Artificial Sequence: Synthetic oligonucleotide
  Antisense strand to SEQ ID NO: 1389628
auucucggccguuuacuag

SEQ ID NO: 1389630 - RNA, 19 nt, Artificial Sequence
  Description of Artificial Sequence: Synthetic oligonucleotide
  Sense strand starting at position 209 of SEQ ID NO: 1243026
cggguucgagaguaucaca

SEQ ID NO: 1389631 - RNA, 19 nt, Artificial Sequence
  Description of Artificial Sequence: Synthetic oligonucleotide
  Antisense strand to SEQ ID NO: 1389630
ugugauacucucgaacccg

SEQ ID NO: 1389632 - RNA, 19 nt, Artificial Sequence
  Description of Artificial Sequence: Synthetic oligonucleotide
  Sense strand starting at position 239 of SEQ ID NO: 1243026
ucaugaugcagaugaggau

SEQ ID NO: 1389633 - RNA, 19 nt, Artificial Sequence
  Description of Artificial Sequence: Synthetic oligonucleotide
  Antisense strand to SEQ ID NO: 1389632
auccucaucugcaucauga

SEQ ID NO: 1389634 - RNA, 19 nt, Artificial Sequence
  Description of Artificial Sequence: Synthetic oligonucleotide
  Sense strand starting at position 252 of SEQ ID NO: 1243026
gaggaugugguacagugau

SEQ ID NO: 1389635 - RNA, 19 nt, Artificial Sequence
  Description of Artificial Sequence: Synthetic oligonucleotide
  Antisense strand to SEQ ID NO: 1389634
aucacuguaccacauccuc

SEQ ID NO: 1389636 - RNA, 19 nt, Artificial Sequence
  Description of Artificial Sequence: Synthetic oligonucleotide
  Sense strand starting at position 386 of SEQ ID NO: 1243026
agagcagugaggugaaaua

SEQ ID NO: 1389637 - RNA, 19 nt, Artificial Sequence
  Description of Artificial Sequence: Synthetic oligonucleotide
  Antisense strand to SEQ ID NO: 1389636
uauuucaccucacugcucu

SEQ ID NO: 1389638 - RNA, 19 nt, Artificial Sequence
  Description of Artificial Sequence: Synthetic oligonucleotide
  Sense strand starting at position 692 of SEQ ID NO: 1243026
ugagaagaguuuguuaccu

SEQ ID NO: 1389639 - RNA, 19 nt, Artificial Sequence
  Description of Artificial Sequence: Synthetic oligonucleotide
  Antisense strand to SEQ ID NO: 1389638
agguaacaaacucuucuca

SEQ ID NO: 1389640 - RNA, 19 nt, Artificial Sequence
  Description of Artificial Sequence: Synthetic oligonucleotide
  Sense strand starting at position 696 of SEQ ID NO: 1243026
aagaguuuguuaccuauug

SEQ ID NO: 1389641 - RNA, 19 nt, Artificial Sequence
  Description of Artificial Sequence: Synthetic oligonucleotide
  Antisense strand to SEQ ID NO: 1389640
caauagguaacaaacucuu

SEQ ID NO: 1389642 - RNA, 19 nt, Artificial Sequence
  Description of Artificial Sequence: Synthetic oligonucleotide
  Sense strand starting at position 697 of SEQ ID NO: 1243026
agaguuuguuaccuauuga

SEQ ID NO: 1389643 - RNA, 19 nt, Artificial Sequence
  Description of Artificial Sequence: Synthetic oligonucleotide
  Antisense strand to SEQ ID NO: 1389642
ucaauagguaacaaacucu

SEQ ID NO: 1389644 - RNA, 19 nt, Artificial Sequence
  Description of Artificial Sequence: Synthetic oligonucleotide
  Sense strand starting at position 737 of SEQ ID NO: 1243026
agaacaaugugacaagaag

SEQ ID NO: 1389645 - RNA, 19 nt, Artificial Sequence
  Description of Artificial Sequence: Synthetic oligonucleotide
  Antisense strand to SEQ ID NO: 1389644
cuucuugucacauuguucu

SEQ ID NO: 1389646 - RNA, 19 nt, Artificial Sequence
  Description of Artificial Sequence: Synthetic oligonucleotide
  Sense strand starting at position 748 of SEQ ID NO: 1243026
acaagaagucagcacuguu

SEQ ID NO: 1389647 - RNA, 19 nt, Artificial Sequence
  Description of Artificial Sequence: Synthetic oligonucleotide
  Antisense strand to SEQ ID NO: 1389646
aacagugcugacuucuugu

SEQ ID NO: 1389648 - RNA, 19 nt, Artificial Sequence
  Description of Artificial Sequence: Synthetic oligonucleotide
  Sense strand starting at position 751 of SEQ ID NO: 1243026
agaagucagcacuguucuu

SEQ ID NO: 1389649 - RNA, 19 nt, Artificial Sequence
  Description of Artificial Sequence: Synthetic oligonucleotide
  Antisense strand to SEQ ID NO: 1389648
aagaacagugcugacuucu

SEQ ID NO: 1389650 - RNA, 19 nt, Artificial Sequence
  Description of Artificial Sequence: Synthetic oligonucleotide
  Sense strand starting at position 756 of SEQ ID NO: 1243026
ucagcacuguucuuagaua

SEQ ID NO: 1389651 - RNA, 19 nt, Artificial Sequence
  Description of Artificial Sequence: Synthetic oligonucleotide
  Antisense strand to SEQ ID NO: 1389650
uaucuaagaacagugcuga

SEQ ID NO: 1389652 - RNA, 19 nt, Artificial Sequence
  Description of Artificial Sequence: Synthetic oligonucleotide
  Sense strand starting at position 799 of SEQ ID NO: 1243026
caguguucccauggaagga

SEQ ID NO: 1389653 - RNA, 19 nt, Artificial Sequence
  Description of Artificial Sequence: Synthetic oligonucleotide
  Antisense strand to SEQ ID NO: 1389652
uccuuccaugggaacacug

SEQ ID NO: 1389654 - RNA, 19 nt, Artificial Sequence
  Description of Artificial Sequence: Synthetic oligonucleotide
  Sense strand starting at position 873 of SEQ ID NO: 1243026
uggauuccucucgacaaac

SEQ ID NO: 1389655 - RNA, 19 nt, Artificial Sequence
  Description of Artificial Sequence: Synthetic oligonucleotide
  Antisense strand to SEQ ID NO: 1389654
guuugucgagaggaaucca

SEQ ID NO: 1389656 - RNA, 19 nt, Artificial Sequence
  Description of Artificial Sequence: Synthetic oligonucleotide
  Sense strand starting at position 1042 of SEQ ID NO: 1243026
cgucguucccacagugaga

SEQ ID NO: 1389657 - RNA, 19 nt, Artificial Sequence
  Description of Artificial Sequence: Synthetic oligonucleotide
  Antisense strand to SEQ ID NO: 1389656
ucucacugugggaacgacg

SEQ ID NO: 1389658 - RNA, 19 nt, Artificial Sequence
  Description of Artificial Sequence: Synthetic oligonucleotide
  Sense strand starting at position 1353 of SEQ ID NO: 1243026
gugacaaucccaggucacu

SEQ ID NO: 1389659 - RNA, 19 nt, Artificial Sequence
  Description of Artificial Sequence: Synthetic oligonucleotide
  Antisense strand to SEQ ID NO: 1389658
agugaccugggauugucac

SEQ ID NO: 1389660 - RNA, 19 nt, Artificial Sequence
  Description of Artificial Sequence: Synthetic oligonucleotide
  Sense strand starting at position 1456 of SEQ ID NO: 1243026
cgaccucagcguuggagaa

SEQ ID NO: 1389661 - RNA, 19 nt, Artificial Sequence
  Description of Artificial Sequence: Synthetic oligonucleotide
  Antisense strand to SEQ ID NO: 1389660
uucuccaacgcugaggucg

SEQ ID NO: 1389662 - RNA, 19 nt, Artificial Sequence
  Description of Artificial Sequence: Synthetic oligonucleotide
  Sense strand starting at position 1457 of SEQ ID NO: 1243026
gaccucagcguuggagaaa

SEQ ID NO: 1389663 - RNA, 19 nt, Artificial Sequence
  Description of Artificial Sequence: Synthetic oligonucleotide
  Antisense strand to SEQ ID NO: 1389662
uuucuccaacgcugagguc

SEQ ID NO: 1389664 - RNA, 19 nt, Artificial Sequence
  Description of Artificial Sequence: Synthetic oligonucleotide
  Sense strand starting at position 2506 of SEQ ID NO: 1243026
cuuaucagcgucuaauauu

SEQ ID NO: 1389665 - RNA, 19 nt, Artificial Sequence
  Description of Artificial Sequence: Synthetic oligonucleotide
  Antisense strand to SEQ ID NO: 1389664
aauauuagacgcugauaag

SEQ ID NO: 1389666 - RNA, 19 nt, Artificial Sequence
  Description of Artificial Sequence: Synthetic oligonucleotide
  Sense strand starting at position 2512 of SEQ ID NO: 1243026
agcgucuaauauuccaaau

SEQ ID NO: 1389667 - RNA, 19 nt, Artificial Sequence
  Description of Artificial Sequence: Synthetic oligonucleotide
  Antisense strand to SEQ ID NO: 1389666
auuuggaauauuagacgcu

SEQ ID NO: 1389668 - RNA, 19 nt, Artificial Sequence
  Description of Artificial Sequence: Synthetic oligonucleotide
  Sense strand starting at position 2650 of SEQ ID NO: 1243026
ucaguaaauguguauggaa

SEQ ID NO: 1389669 - RNA, 19 nt, Artificial Sequence
  Description of Artificial Sequence: Synthetic oligonucleotide
  Antisense strand to SEQ ID NO: 1389668
uuccauacacauuuacuga

SEQ ID NO: 1389670 - RNA, 19 nt, Artificial Sequence
  Description of Artificial Sequence: Synthetic oligonucleotide
  Sense strand starting at position 2652 of SEQ ID NO: 1243026
aguaaauguguauggaaug

SEQ ID NO: 1389671 - RNA, 19 nt, Artificial Sequence
  Description of Artificial Sequence: Synthetic oligonucleotide
  Antisense strand to SEQ ID NO: 1389670
cauuccauacacauuuacu

SEQ ID NO: 1389672 - RNA, 19 nt, Artificial Sequence
  Description of Artificial Sequence: Synthetic oligonucleotide
  Sense strand starting at position 2729 of SEQ ID NO: 1243026
cgggaugaaccuuggagau

SEQ ID NO: 1389673 - RNA, 19 nt, Artificial Sequence
  Description of Artificial Sequence: Synthetic oligonucleotide
  Antisense strand to SEQ ID NO: 1389672
aucuccaagguucaucccg

SEQ ID NO: 1389674 - RNA, 19 nt, Artificial Sequence
  Description of Artificial Sequence: Synthetic oligonucleotide
  Sense strand starting at position 2746 of SEQ ID NO: 1243026
auguaauacuuagugaaag

SEQ ID NO: 1389675 - RNA, 19 nt, Artificial Sequence
  Description of Artificial Sequence: Synthetic oligonucleotide
  Antisense strand to SEQ ID NO: 1389674
cuuucacuaaguauuacau

SEQ ID NO: 1389676 - RNA, 19 nt, Artificial Sequence
  Description of Artificial Sequence: Synthetic oligonucleotide
  Sense strand starting at position 2792 of SEQ ID NO: 1243026
uaugauuccguguauguga

SEQ ID NO: 1389677 - RNA, 19 nt, Artificial Sequence
  Description of Artificial Sequence: Synthetic oligonucleotide
  Antisense strand to SEQ ID NO: 1389676
ucacauacacggaaucaua

SEQ ID NO: 1389678 - RNA, 19 nt, Artificial Sequence
  Description of Artificial Sequence: Synthetic oligonucleotide
  Sense strand starting at position 2794 of SEQ ID NO: 1243026
ugauuccguguaugugaaa

SEQ ID NO: 1389679 - RNA, 19 nt, Artificial Sequence
  Description of Artificial Sequence: Synthetic oligonucleotide
  Antisense strand to SEQ ID NO: 1389678
uuucacauacacggaauca

SEQ ID NO: 1389680 - RNA, 19 nt, Artificial Sequence
  Description of Artificial Sequence: Synthetic oligonucleotide
  Sense strand starting at position 2795 of SEQ ID NO: 1243026
gauuccguguaugugaaau

SEQ ID NO: 1389681 - RNA, 19 nt, Artificial Sequence
  Description of Artificial Sequence: Synthetic oligonucleotide
  Antisense strand to SEQ ID NO: 1389680
auuucacauacacggaauc

SEQ ID NO: 1389682 - RNA, 19 nt, Artificial Sequence
  Description of Artificial Sequence: Synthetic oligonucleotide
  Sense strand starting at position 2805 of SEQ ID NO: 1243026
augugaaauguccggaaca

SEQ ID NO: 1389683 - RNA, 19 nt, Artificial Sequence
  Description of Artificial Sequence: Synthetic oligonucleotide
  Antisense strand to SEQ ID NO: 1389682
uguuccggacauuucacau

SEQ ID NO: 1389684 - RNA, 19 nt, Artificial Sequence
  Description of Artificial Sequence: Synthetic oligonucleotide
  Sense strand starting at position 2807 of SEQ ID NO: 1243026
gugaaauguccggaacaag

SEQ ID NO: 1389685 - RNA, 19 nt, Artificial Sequence
  Description of Artificial Sequence: Synthetic oligonucleotide
  Antisense strand to SEQ ID NO: 1389684
cuuguuccggacauuucac

SEQ ID NO: 1389686 - RNA, 19 nt, Artificial Sequence
  Description of Artificial Sequence: Synthetic oligonucleotide
  Sense strand starting at position 2883 of SEQ ID NO: 1243026
gugggaaauggcugcugaa

SEQ ID NO: 1389687 - RNA, 19 nt, Artificial Sequence
  Description of Artificial Sequence: Synthetic oligonucleotide
  Antisense strand to SEQ ID NO: 1389686
uucagcagccauuucccac

SEQ ID NO: 1389688 - RNA, 19 nt, Artificial Sequence
  Description of Artificial Sequence: Synthetic oligonucleotide
  Sense strand starting at position 2918 of SEQ ID NO: 1243026
uuguguagugcucacuaca

SEQ ID NO: 1389689 - RNA, 19 nt, Artificial Sequence
  Description of Artificial Sequence: Synthetic oligonucleotide
  Antisense strand to SEQ ID NO: 1389688
uguagugagcacuacacaa

SEQ ID NO: 1389690 - RNA, 19 nt, Artificial Sequence
  Description of Artificial Sequence: Synthetic oligonucleotide
  Sense strand starting at position 3709 of SEQ ID NO: 1243026
acaggugugagccaaggau

SEQ ID NO: 1389691 - RNA, 19 nt, Artificial Sequence
  Description of Artificial Sequence: Synthetic oligonucleotide
  Antisense strand to SEQ ID NO: 1389690
auccuuggcucacaccugu

SEQ ID NO: 1389692 - RNA, 19 nt, Artificial Sequence
  Description of Artificial Sequence: Synthetic oligonucleotide
  Sense strand starting at position 3713 of SEQ ID NO: 1243026
gugugagccaaggaucuuu

SEQ ID NO: 1389693 - RNA, 19 nt, Artificial Sequence
  Description of Artificial Sequence: Synthetic oligonucleotide
  Antisense strand to SEQ ID NO: 1389692
aaagauccuuggcucacac

SEQ ID NO: 1389694 - RNA, 19 nt, Artificial Sequence
  Description of Artificial Sequence: Synthetic oligonucleotide
  Sense strand starting at position 3718 of SEQ ID NO: 1243026
agccaaggaucuuuaaaug

SEQ ID NO: 1389695 - RNA, 19 nt, Artificial Sequence
  Description of Artificial Sequence: Synthetic oligonucleotide
  Antisense strand to SEQ ID NO: 1389694
cauuuaaagauccuuggcu

SEQ ID NO: 1389696 - RNA, 19 nt, Artificial Sequence
  Description of Artificial Sequence: Synthetic oligonucleotide
  Sense strand starting at position 3887 of SEQ ID NO: 1243026
cuguuauucugucuccaua

SEQ ID NO: 1389697 - RNA, 19 nt, Artificial Sequence
  Description of Artificial Sequence: Synthetic oligonucleotide
  Antisense strand to SEQ ID NO: 1389696
uauggagacagaauaacag

SEQ ID NO: 1389698 - RNA, 19 nt, Artificial Sequence
  Description of Artificial Sequence: Synthetic oligonucleotide
  Sense strand starting at position 3900 of SEQ ID NO: 1243026
uccauaccgacauguggau

SEQ ID NO: 1389699 - RNA, 19 nt, Artificial Sequence
  Description of Artificial Sequence: Synthetic oligonucleotide
  Antisense strand to SEQ ID NO: 1389698
auccacaugucgguaugga

SEQ ID NO: 1389700 - RNA, 19 nt, Artificial Sequence
  Description of Artificial Sequence: Synthetic oligonucleotide
  Sense strand starting at position 3917 of SEQ ID NO: 1243026
auggaucucuguucugaca

SEQ ID NO: 1389701 - RNA, 19 nt, Artificial Sequence
  Description of Artificial Sequence: Synthetic oligonucleotide
  Antisense strand to SEQ ID NO: 1389700
ugucagaacagagauccau

SEQ ID NO: 1389702 - RNA, 19 nt, Artificial Sequence
  Description of Artificial Sequence: Synthetic oligonucleotide
  Sense strand starting at position 4 of SEQ ID NO: 1243027
ccuguuuccugguuuauuu

SEQ ID NO: 1389703 - RNA, 19 nt, Artificial Sequence
  Description of Artificial Sequence: Synthetic oligonucleotide
  Antisense strand to SEQ ID NO: 1389702
aaauaaaccaggaaacagg

SEQ ID NO: 1389704 - RNA, 19 nt, Artificial Sequence
  Description of Artificial Sequence: Synthetic oligonucleotide
  Sense strand starting at position 15 of SEQ ID NO: 1243027
guuuauuuccaguguccug

SEQ ID NO: 1389705 - RNA, 19 nt, Artificial Sequence
  Description of Artificial Sequence: Synthetic oligonucleotide
  Antisense strand to SEQ ID NO: 1389704
caggacacuggaaauaaac

SEQ ID NO: 1389706 - RNA, 19 nt, Artificial Sequence
  Description of Artificial Sequence: Synthetic oligonucleotide
  Sense strand starting at position 142 of SEQ ID NO: 1243027
guaggugugggagggaaua

SEQ ID NO: 1389707 - RNA, 19 nt, Artificial Sequence
  Description of Artificial Sequence: Synthetic oligonucleotide
  Antisense strand to SEQ ID NO: 1389706
uauucccucccacaccuac

SEQ ID NO: 1389708 - RNA, 19 nt, Artificial Sequence
  Description of Artificial Sequence: Synthetic oligonucleotide
  Sense strand starting at position 162 of SEQ ID NO: 1243027
gguguaauacaaugauaca

SEQ ID NO: 1389709 - RNA, 19 nt, Artificial Sequence
  Description of Artificial Sequence: Synthetic oligonucleotide
  Antisense strand to SEQ ID NO: 1389708
uguaucauuguauuacacc

SEQ ID NO: 1389710 - RNA, 19 nt, Artificial Sequence
  Description of Artificial Sequence: Synthetic oligonucleotide
  Sense strand starting at position 222 of SEQ ID NO: 1243027
gguuguggaaccuguccua

SEQ ID NO: 1389711 - RNA, 19 nt, Artificial Sequence
  Description of Artificial Sequence: Synthetic oligonucleotide
  Antisense strand to SEQ ID NO: 1389710
uaggacagguuccacaacc

SEQ ID NO: 1389712 - RNA, 19 nt, Artificial Sequence
  Description of Artificial Sequence: Synthetic oligonucleotide
  Sense strand starting at position 282 of SEQ ID NO: 1243027
ugguauuaaucccugagac

SEQ ID NO: 1389713 - RNA, 19 nt, Artificial Sequence
  Description of Artificial Sequence: Synthetic oligonucleotide
  Antisense strand to SEQ ID NO: 1389712
gucucagggauuaauacca

SEQ ID NO: 1389714 - RNA, 19 nt, Artificial Sequence
  Description of Artificial Sequence: Synthetic oligonucleotide
  Sense strand starting at position 283 of SEQ ID NO: 1243027
gguauuaaucccugagaca

SEQ ID NO: 1389715 - RNA, 19 nt, Artificial Sequence
  Description of Artificial Sequence: Synthetic oligonucleotide
  Antisense strand to SEQ ID NO: 1389714
ugucucagggauuaauacc

SEQ ID NO: 1389716 - RNA, 19 nt, Artificial Sequence
  Description of Artificial Sequence: Synthetic oligonucleotide
  Sense strand starting at position 418 of SEQ ID NO: 1243027
gcgacauaaaguuaggaau

SEQ ID NO: 1389717 - RNA, 19 nt, Artificial Sequence
  Description of Artificial Sequence: Synthetic oligonucleotide
  Antisense strand to SEQ ID NO: 1389716
auuccuaacuuuaugucgc

SEQ ID NO: 1389718 - RNA, 19 nt, Artificial Sequence
  Description of Artificial Sequence: Synthetic oligonucleotide
  Sense strand starting at position 432 of SEQ ID NO: 1243027
ggaauguauggguggugau

SEQ ID NO: 1389719 - RNA, 19 nt, Artificial Sequence
  Description of Artificial Sequence: Synthetic oligonucleotide
  Antisense strand to SEQ ID NO: 1389718
aucaccacccauacauucc

SEQ ID NO: 1389720 - RNA, 19 nt, Artificial Sequence
  Description of Artificial Sequence: Synthetic oligonucleotide
  Sense strand starting at position 433 of SEQ ID NO: 1243027
gaauguauggguggugaua

SEQ ID NO: 1389721 - RNA, 19 nt, Artificial Sequence
  Description of Artificial Sequence: Synthetic oligonucleotide
  Antisense strand to SEQ ID NO: 1389720
uaucaccacccauacauuc

SEQ ID NO: 1389722 - RNA, 19 nt, Artificial Sequence
  Description of Artificial Sequence: Synthetic oligonucleotide
  Sense strand starting at position 445 of SEQ ID NO: 1243027
ggugauaagccuugaacag

SEQ ID NO: 1389723 - RNA, 19 nt, Artificial Sequence
  Description of Artificial Sequence: Synthetic oligonucleotide
  Antisense strand to SEQ ID NO: 1389722
cuguucaaggcuuaucacc

SEQ ID NO: 1389724 - RNA, 19 nt, Artificial Sequence
  Description of Artificial Sequence: Synthetic oligonucleotide
  Sense strand starting at position 647 of SEQ ID NO: 1243027
cuagcuagauuguugguaa

SEQ ID NO: 1389725 - RNA, 19 nt, Artificial Sequence
  Description of Artificial Sequence: Synthetic oligonucleotide
  Antisense strand to SEQ ID NO: 1389724
uuaccaacaaucuagcuag

SEQ ID NO: 1389726 - RNA, 19 nt, Artificial Sequence
  Description of Artificial Sequence: Synthetic oligonucleotide
  Sense strand starting at position 970 of SEQ ID NO: 1243027
gcccuacugugccuaauuu

SEQ ID NO: 1389727 - RNA, 19 nt, Artificial Sequence
  Description of Artificial Sequence: Synthetic oligonucleotide
  Antisense strand to SEQ ID NO: 1389726
aaauuaggcacaguagggc

SEQ ID NO: 1389728 - RNA, 19 nt, Artificial Sequence
  Description of Artificial Sequence: Synthetic oligonucleotide
  Sense strand starting at position 1131 of SEQ ID NO: 1243027
uuaaauaagugggcagaga

SEQ ID NO: 1389729 - RNA, 19 nt, Artificial Sequence
  Description of Artificial Sequence: Synthetic oligonucleotide
  Antisense strand to SEQ ID NO: 1389728
ucucugcccacuuauuuaa

SEQ ID NO: 1389730 - RNA, 19 nt, Artificial Sequence
  Description of Artificial Sequence: Synthetic oligonucleotide
  Sense strand starting at position 1171 of SEQ ID NO: 1243027
aggugcaaaccuugaaaua

SEQ ID NO: 1389731 - RNA, 19 nt, Artificial Sequence
  Description of Artificial Sequence: Synthetic oligonucleotide
  Antisense strand to SEQ ID NO: 1389730
uauuucaagguuugcaccu

SEQ ID NO: 1389732 - RNA, 19 nt, Artificial Sequence
  Description of Artificial Sequence: Synthetic oligonucleotide
  Sense strand starting at position 1184 of SEQ ID NO: 1243027
gaaauaguguagucaggag
